United States Patent Application Publication US 2017/0009304 A1 - sequence listing, part 16

SEQ ID NO: 323547 - DNA, 100 bp, Homo sapiens
tttctgaagaatgcagcaggaaggttgaaagcggagcgtgctttggacaccatgaattttgatgttataaagggcaagccagtacgcatcatgtggtctc

SEQ ID NO: 323548 - DNA, 100 bp, Homo sapiens
attttaggaatcctgatgacatccttctttttagagatcgttttgatggatatatcttccttgacagcaaaggtgattcatggcaggggacgtggaagga

SEQ ID NO: 323549 - DNA, 75 bp, Homo sapiens
gatataacagtggttacactttctgacggtacgcaataactgtttggtattttgatgcagatgagagagcacgag

SEQ ID NO: 323550 - DNA, 100 bp, Homo sapiens
cttcaacaggtagaagatctagaaaggagagttgcatcagcaagtttgcaagtgaagaagaaaaagtcagcactttttgaagtgtctgaggttataccag

SEQ ID NO: 323551 - DNA, 100 bp, Homo sapiens
gccagcagtgagcagaatggggcactcaccaatggggacaagttgaagagagttttaagacactgttctgggctatatttggactttctgaagtgaaatc

SEQ ID NO: 323552 - DNA, 100 bp, Homo sapiens
ctggggccggcgggagcgcgaacgagcgacggcggaacccgtgggcctgtggactgcagcctcggcggtcagcagagttgtggaaagtaaaaatgtagcc

SEQ ID NO: 323553 - DNA, 98 bp, Homo sapiens
cggaggtgaaagaggagccttcctccaaaagggagcatcagatgtctcagagcatgtcttcagtatcttcaaggcattctgaaaagatagctattaga

SEQ ID NO: 323554 - DNA, 100 bp, Homo sapiens
taaatatttgaaagaaattcttcaagatttggttaagaaccttacaagcaatatgtggcgagttcgagaatccaggtggacgtctgatttatgaagctcc

SEQ ID NO: 323555 - DNA, 100 bp, Homo sapiens
gaaaaagcttggagataaagttgctttttactggcgggatgtagctcattttgggatacgagtctccatcgtggagcctggcttcttccgaacccctgtg

SEQ ID NO: 323556 - DNA, 100 bp, Homo sapiens
tcttcctctctcagctggtgttcgtgattgggatcaaccagacggaaaacccggtgctgggcgtcctcttctttgccatagcctgcttcttatacaagcc

SEQ ID NO: 323557 - DNA, 50 bp, Homo sapiens
ttgaaattatctctggtgctgcagctctatcttcagtttagatcttggag

SEQ ID NO: 323558 - DNA, 90 bp, Homo sapiens
cgctcccggcaacccggagcgcgcaccgcaggccggcggccgagctcgcgggtaagcttgatgattaccaggaacgaatgaacaaagggg

SEQ ID NO: 323559 - DNA, 75 bp, Homo sapiens
gccgtctacaatctttgtctggagctggaagatggagcctcacagtctactcagagaaaaataaaagaaggcaaa

SEQ ID NO: 323560 - DNA, 96 bp, Homo sapiens
gctgaccgtcttggggacctggccttgttactagagaccctgaatggcagccaggtgtcacgtcttgaaattttaaatgtcctcagtgactctcta

SEQ ID NO: 323561 - DNA, 107 bp, Homo sapiens
cggggagccgagctggagctgccgcggcgcagccaggcctccggtgtggctgtctctgatggtgtcatcaaggtgttcaacgacatgaaggtgcgtaagtcttcaac

SEQ ID NO: 323562 - DNA, 108 bp, Homo sapiens
ctattattcatgaggcaaatgaggaacagggcaatagtatgatgtttctagatgtcgtgcagctggttcatcggaagtcctggaaagtgggtgatatcttccatgcag

SEQ ID NO: 323563 - DNA, 100 bp, Homo sapiens
agctgaactgaatgagtttcttactcgggagctggctgaagatggctactctggagttgagggtctctggccctgttcttgccccagcatgacttttatc

SEQ ID NO: 323564 - DNA, 50 bp, Homo sapiens
cacagccagaagctagaccacctccgacaagggcacacaactggttccgt

SEQ ID NO: 323565 - DNA, 90 bp, Homo sapiens
ttgctatcgggactcggcgaggacgtcctcctgcatatgcccaagaggattgggagtggaatggacaccagcagaagcaccacagttatt

SEQ ID NO: 323566 - DNA, 100 bp, Homo sapiens
ctggaggaggcatggagcccgaggaggagccaagtgtggcagcagttcgtgaagtctgtgaggaggttcaagaagacgtggaagctgcgggctctgaagg

SEQ ID NO: 323567 - DNA, 100 bp, Homo sapiens
agaggtgaagctcaaggcacaggtggcccgatcccagcaggacattgaaagacttaattcagtgcacaaatgagatgaatgtgaacatcccacagttggc

SEQ ID NO: 323568 - DNA, 50 bp, Homo sapiens
cttcagaacacctcacaactttgtgtttgcttgcctaaactggacttgaa

SEQ ID NO: 323569 - DNA, 75 bp, Homo sapiens
cttgagttggtcacttgaaccttgggaatattgagatcagtggaccatcccctgcccggatcctctctctccaca

SEQ ID NO: 323570 - DNA, 75 bp, Homo sapiens
actgtataccgtattgccagacaggcttccagaatgaatcttcctcggtcacccaggatggagtgtagtggcgcg

SEQ ID NO: 323571 - DNA, 75 bp, Homo sapiens
taaagtctctcttcaccctgccgtcatgtctaagtcagaggtgcaccagctatatgaaactatacagcgctggag

SEQ ID NO: 323572 - DNA, 90 bp, Homo sapiens
agagaaagtcctcgctcgtcaccagcaagcttgcgggacatggagggggaagagcagtggattgaagacaaccttgccttgaggaagaag

SEQ ID NO: 323573 - DNA, 75 bp, Homo sapiens
gaagatgtggctggggggacttatgaatgatgatgtggggaatgaagattggagctggagtgagccttccaggaa

SEQ ID NO: 323574 - DNA, 74 bp, Homo sapiens
cagaaggtctctggagacatcttcagcagatgccatggacaatattaccaggcagaaccaattctacgataccc

SEQ ID NO: 323575 - DNA, 100 bp, Homo sapiens
ggagaggcgcccccgccggccgccgcgccgcccggcagcctcggcaggtactccaaagattcaggtttactcacgtcatccagcagagaatggaaagtca

SEQ ID NO: 323576 - DNA, 75 bp, Homo sapiens
ccatctgtcttagcaaggctgtcatcacagttaaagcggcaactggggaagaagtatctgctgaggatcttggag

SEQ ID NO: 323577 - DNA, 100 bp, Homo sapiens
ctctccatgaagcagttcctggacttcgatgtaggtgcaaaaaactacagacatctctgtgctgtttattacaacaagaatcctgggtttgagatcattc

SEQ ID NO: 323578 - DNA, 90 bp, Homo sapiens
gtcaaaacagctgctacactaacgggcatctttgtcttgttctcagtcttaaaaagactgtatgcaggagctattcttgaagtttgtgga

SEQ ID NO: 323579 - DNA, 80 bp, Homo sapiens
tcatggaggctgagcatttattcagcccaagaagatgaaaggattgttcttgttgacaacaaatgtaagtgtgcccggat

SEQ ID NO: 323580 - DNA, 98 bp, Homo sapiens
gcaacgtaaaatccttggaaaagggtcattcctgtcccaatcagctgctctactactgatgacattaaagatgccttcattacccaggcacaggagca

SEQ ID NO: 323581 - DNA, 49 bp, Homo sapiens
cattcctgtgtatgtgggccgcaaggctctgccgacttccagttctgga

SEQ ID NO: 323582 - DNA, 87 bp, Homo sapiens
ggagaacagcacgtccccgctgagtgagatttgtgcccttggctctggacgatatgaagatgaataagaaagaaatggccctcaccc

SEQ ID NO: 323583 - DNA, 88 bp, Homo sapiens
catagagtggtgctggccgcctgtagtccttattttcatgccatgtttacagaattataaggctgtctgcagagatttgaaaaatggc

SEQ ID NO: 323584 - DNA, 98 bp, Homo sapiens
gaaggcatatgttcgactggctcctgattacgatgctttggatgttgccaacaaagtgacgagagcagacgtggatgtccagccctatgcgttcacaa

SEQ ID NO: 323585 - DNA, 98 bp, Homo sapiens
accagagatctcccacctcagtgtgggttccatcttacttgtcactttaattggttggggtcagataagaagaggagtgacaatcaagccaacagtag

SEQ ID NO: 323586 - DNA, 83 bp, Homo sapiens
tgaaaattgtttcgtagcagagaacagctctttgcatccggagagtggacaagaaaactaaggacttgacagacacactgatg

SEQ ID NO: 323587 - DNA, 100 bp, Homo sapiens
gcaaaagaagagaagcagaattatacctagaagtctactaatggacagttagtcacccacctacatgttgaggcatgaaagaattactgatgtccttgat

SEQ ID NO: 323588 - DNA, 75 bp, Homo sapiens
aagcattcaaattgctcacagctgatcctaaggcctgggcggatgatgtggagcggtttcagaaaatgttcagac

SEQ ID NO: 323589 - DNA, 100 bp, Homo sapiens
gtgatgtggaggaaaacaacttcgagggcagacttttgcgagaattgaagcaccctaatgtgattgcattgcagaaggtgttcctttctcacagtgacag

SEQ ID NO: 323590 - DNA, 74 bp, Homo sapiens
gccctcaccacccctatccagacggctgcccttcaagtaccaagacgagttgtactgctgtcacaggaaatgga

SEQ ID NO: 323591 - DNA, 100 bp, Homo sapiens
ggaaagaaaagaatacattcctgattacctgccacccattgtgtcttctcaagaaggtgccagcgagatttcagattcctgtaaacctctaaagaaaagg

SEQ ID NO: 323592 - DNA, 100 bp, Homo sapiens
agacccgcacctacgacggcgacggctacaagaagcgggccgcatgcctgtgtttccgcagcgagagcgaggaggaggtttttgtggaaactctggataa

SEQ ID NO: 323593 - DNA, 75 bp, Homo sapiens
caatgtcacttacaacattaatcagatactgcatttaagtcggagtctagccagtcagaggcgtctgtccggagg

SEQ ID NO: 323594 - DNA, 74 bp, Homo sapiens
caaaatggcgcgggtgctgaaggctgcagccgcgaatgccgtaggaaaacccttctgccacgctggaggacctg

SEQ ID NO: 323595 - DNA, 83 bp, Homo sapiens
ttatcttccgactgatccagctggtggtcctggtctacgtcatcgggttctgcggggagtgtctccagccctgcctgcaggtg

SEQ ID NO: 323596 - DNA, 100 bp, Homo sapiens
acttcaaagacgttctcaaggagaaggcagacctgggccatagtgtatgaaggccaagacaagaacccagaaatgtgccgagtcttgctcacacatgaga

SEQ ID NO: 323597 - DNA, 89 bp, Homo sapiens
cagtcagccatcgtgctgggggacctgaagcttaggaagttcgtcttctccacggaggagaggtgcttctcagcttcacgggaaagggc

SEQ ID NO: 323598 - DNA, 100 bp, Homo sapiens
agctacttgggaggctgaggcagagaagaagaaggaggttcctgctgtgccagaaacccttaagaaaaagcgaaggaatttcgcagagctgaagatcaag

SEQ ID NO: 323599 - DNA, 101 bp, Homo sapiens
gaggaacatggcgttgctggtgcgagtccttacgaaatctcacaaaactgtcccttatcttcagtcacatgctggcagaaatcaaagcaatctttcccaat

SEQ ID NO: 323600 - DNA, 100 bp, Homo sapiens
tagaaaaacaaaactcgctgattttaaaagatctggaacatcgaaaggaccaagtaacacagctttcacaagagggttctgagcaaggttcaaccagtca

SEQ ID NO: 323601 - DNA, 100 bp, Homo sapiens
tcaaatacttcatatttggcttcaatgtcatattttggagatgggcagtagcgaaccccttcccatcgcagatggtgacaggaggaggaagaagaagcgg

SEQ ID NO: 323602 - DNA, 90 bp, Homo sapiens
gaacctagggctgaccaacacacttttggatcaaagggagcctttgggtttcagcatcctgtaagaaatgcactcggtgatggaaagaga

SEQ ID NO: 323603 - DNA, 100 bp, Homo sapiens
aggaagggctacggccactgtgtggtgggaagaggccggcccgatacttctccccacaagctcgccgtcgattccacgctgcccttgcttcttgttccac

SEQ ID NO: 323604 - DNA, 87 bp, Homo sapiens
gtcttaggaccataccatgacaaggatgttcacttctccacaatgaatgagtgtcactatgacaagcacatggactttttttataat

SEQ ID NO: 323605 - DNA, 97 bp, Homo sapiens
cgagaatacagagagaaaattgagacggagctaagagatatctgcaatgatgtactggcatttgcaagtaaaatcactggcatgttgttggaattat

SEQ ID NO: 323606 - DNA, 75 bp, Homo sapiens
catagtagatgaaagagtagatgaaacttccgagtctgatgtgaatgctacacagggagaaaatcagccagatct

SEQ ID NO: 323607 - DNA, 90 bp, Homo sapiens
cgacagcgatcagctgttttacaccaagatcttcttggacccggagaagaggcagaaaaatatggctcaggagactaaccagaccccggg

SEQ ID NO: 323608 - DNA, 89 bp, Homo sapiens
ggaggaaggaacgaggcaaggagctaaagcagcgtgcgttcagccctgggtgttgttaataacagtactggtagtggaagggattgccg

SEQ ID NO: 323609 - DNA, 100 bp, Homo sapiens
gatatttaatggcgaccgatactgtggagtcgctacccacaggagaacaagggaacctacatcccagtgcctatagtctcagagttacaaagtggaaagt

SEQ ID NO: 323610 - DNA, 100 bp, Homo sapiens
atcacctgtctggagcaaggaaaagatccctggaatatgaagagacacagtatggtagccacacccccagttgacatgaagacaatggagactgcagaga

SEQ ID NO: 323611 - DNA, 101 bp, Homo sapiens
cattattttgtgtgtgatggctggtattattggaacgatcctcttaatttcttacagtattcgccgactgataaaggtgcaggcctggggtagtctcctgt

SEQ ID NO: 323612 - DNA, 87 bp, Homo sapiens
tttgaggcttcagtcgtttctggaatattccctgggcttttgaggcaataaagcaagcaagtgaatgggtaagaagaactgaaggac

SEQ ID NO: 323613 - DNA, 100 bp, Homo sapiens
gctgtcccggccaggaaccagtatcgaaggatgatcgcagtgatgtggagagcagctcagaggaagaagatgtgaccacctgcacaaaaagtccctgtga

SEQ ID NO: 323614 - DNA, 100 bp, Homo sapiens
tttccacagaaggttagaccctgaaagagatggctcagcaccacctatggatcttgctcctttgcctgcaaacctgcatttccggagagttcttttgaag

SEQ ID NO: 323615 - DNA, 107 bp, Homo sapiens
gctctagaagtagatcctccagtagtgattcaatcagcagcagcagtagtaccagcagtgacagaaagctgaccttgcagttgctccactggctattacctatgttc

SEQ ID NO: 323616 - DNA, 88 bp, Homo sapiens
cagtggtcgcttcttctccttggtacgctacgggccatgacatcacagagcactctgtgctgatccacgagtactacagccgagaggc

SEQ ID NO: 323617 - DNA, 98 bp, Homo sapiens
gatggtgatggagattttgatgtggatgatgccaaagttttattaggtgcagtagacattgttgcaatcatgatcggcaatctgaaaggcacaaaaat

SEQ ID NO: 323618 - DNA, 74 bp, Homo sapiens
cgccctgggacaaccacgtctccggccacgtcctcaaccactgaagaagaagcttgatgcttggctgtcagaag

SEQ ID NO: 323619 - DNA, 99 bp, Homo sapiens
attgtaagaacccagtttataccactggaaggaaacctacggtaatagcagtgagtgcccgcctccaggaaatgctgaagatgacactgtttgcttgga

SEQ ID NO: 323620 - DNA, 100 bp, Homo sapiens
aggagttacagagggccgagaaggacaggatcaggtggagccgccaccaaaatgcagattttcgtgaaaacccttacggggaagaccatcaccctcgagg

SEQ ID NO: 323621 - DNA, 100 bp, Homo sapiens
agatcagcgaggagcagcagcagctccagcaggcgctggctcctgctcaggccctgagacgggagttaaaggagaaagaatattctgtcctgaatgctgt

SEQ ID NO: 323622 - DNA, 90 bp, Homo sapiens
tgcagcttcaagcttaggaccacccaccatgcctatccaggtgtgtgcagtggcctcagggatccggaaagtctaggactgaacttctcc

SEQ ID NO: 323623 - DNA, 98 bp, Homo sapiens
gcggcggccgggccctcgagacggggacggttcgatacaagaggctgttttcctagcgtggcttgctgcctttggtaagaacatgtcgtccatcttgc

SEQ ID NO: 323624 - DNA, 82 bp, Homo sapiens
ttaaaagacagtcctcgtcagcactgactttcagctatggaatcgacatttatgcagtgtgtgattctttctaaaacaactc

SEQ ID NO: 323625 - DNA, 134 bp, Homo sapiens
agtggatgtgacagttcagcattagaagggctacccctaataaagcgactcattgagcagaattcctcattcctggacagtccggaggcagacctgccactttgttttgagcaaactgttctggtgtggattcc

SEQ ID NO: 323626 - DNA, 83 bp, Homo sapiens
cctttctatttattttacctcagtataacattagcgtgcctacagcagcaaaagactgttgaagtagagagcattttgcccag

SEQ ID NO: 323627 - DNA, 75 bp, Homo sapiens
aagccacaagacactgctgataaggatggaaacgtgctcagggggagaagcccttggctggtgctaaaatagtgg

SEQ ID NO: 323628 - DNA, 100 bp, Homo sapiens
gcgaaaaagaagaagaaaataaaaaatggcagtaaccctgagacaaccacttctggtggttgccactcacctgaggatttacgttatgatgatgaagtga

SEQ ID NO: 323629 - DNA, 110 bp, Homo sapiens
aggagccattatttatgtcatcaagaagaatgacgatggtacaggtgaacaaaggcagagtaaactgtcaccccagatgcaggtacatcaagacaaaaccctgccaccag

SEQ ID NO: 323630 - DNA, 82 bp, Homo sapiens
gttacaacgaggagaagcactctcaggatgaccagtgtcccagtgaaggaacgagtgaaggtgtctcagaactggagactgg

SEQ ID NO: 323631 - DNA, 83 bp, Homo sapiens
tggctcaaagaaagatgattataatccacattcatctcaatggaaggatcctgccttaagtcaacttatttgtttttgccggg

SEQ ID NO: 323632 - DNA, 82 bp, Homo sapiens
ggtggcggcttccacgtgaatctggggaaggagtcgagagcgcagaccctgcagaatggtgtccccaggtgtcattgccaac

SEQ ID NO: 323633 - DNA, 77 bp, Homo sapiens
caaaccaatgagggagaagtatcggaagaaagcagttccaagtacaaggtgaatatcttaaccagacttgccgcaga

SEQ ID NO: 323634 - DNA, 74 bp, Homo sapiens
ctgcagcacagtcgggggtgtaggttatggggactgggctggcttagatgaagatgaagatgcacatgtctggg

SEQ ID NO: 323635 - DNA, 73 bp, Homo sapiens
ttctgagactccctgtcccggaccgcagatgccacttcaaatgaacaacaagagcttttctgtcagaagttgc

SEQ ID NO: 323636 - DNA, 82 bp, Homo sapiens
ctctcatctcgctcggctgcgggaaatcgggctgaagcgactgagtccgcgatggaggtctgtgcagacttttgcagacaaa

SEQ ID NO: 323637 - DNA, 90 bp, Homo sapiens
cccggactcatacagagattgaaatgttccttagaaaggagcagcaggtgaaatgacaatggatgctctgttggctcgattgaaacttct

SEQ ID NO: 323638 - DNA, 82 bp, Homo sapiens
ctgagttcctcttgctcacagagctctgtaaagggagtgcatccgccccaacccttttccccctcgtctcctgtgagaattc

SEQ ID NO: 323639 - DNA, 75 bp, Homo sapiens
tctgcccctattgtaagtgcagatggaacacaacaggtgaaaacagctactattgccactgaaaggaatgggaaa

SEQ ID NO: 323640 - DNA, 88 bp, Homo sapiens
gccattccagcactggactcatggaggctgagcatttattcagagcgggaacagcttccacgtgttcgaccagggccagtttgccaag

SEQ ID NO: 323641 - DNA, 100 bp, Homo sapiens
aaccaagcactgacatgccactcatggctcctcaagagttactgatctatgaaatggcagagaatggaaaaaattgtgaccagagacgtgtagcaatgaa

SEQ ID NO: 323642 - DNA, 100 bp, Homo sapiens
ctggtagaaattgcagccagggatattgagaaacttctgagcaacagatctaaagccctggtgtcttcccaagggattgttgaagaaacttctgaagagg

SEQ ID NO: 323643 - DNA, 97 bp, Homo sapiens
agttcagaccgtggcgaagtggagagtgacatgcagttggatggcggtgactgcgtggaacctgtgaaatttgtagatttgcttggtgaccatggga

SEQ ID NO: 323644 - DNA, 83 bp, Homo sapiens
tctgacatcgcgacgctgctcaaaacctcgctccggaaaggggacacctgtggcttacagaagagacgaaatgtggtctgagg

SEQ ID NO: 323645 - DNA, 100 bp, Homo sapiens
ggaaatgctggggcaagtggtcaccctcatactcctcctgctcctcaaggtgtatcagggcaaagctgtcaataccagcaaatatgcagaaagctatcgg

SEQ ID NO: 323646 - DNA, 100 bp, Homo sapiens
gacactgtggaagtgctgaaagcaattcagaaagccaaggaggtcaagtccaaactgagcaacccagagaagaagggtgtgtgtacattcgaaactccac

SEQ ID NO: 323647 - DNA, 100 bp, Homo sapiens
gaatccagaagctggcaaacagcatcagccatgcagacctattgggacaccttctggagtatgggatactgaagtactctttcccagtgggactaagaac

SEQ ID NO: 323648 - DNA, 100 bp, Homo sapiens
gaccctccgccaggcaaaaggaaggcactacacgctggatgcttccctgcctttgcgtctgcgaccagagtcaatggagaagctgcgctgtctccgggct

SEQ ID NO: 323649 - DNA, 100 bp, Homo sapiens
ggggatctggcactgtggttcctgcatgaagacagtggctggcggtgcctggacgtacaagactatggactacgtggcttcttccaaggtggcatccccc

SEQ ID NO: 323650 - DNA, 100 bp, Homo sapiens
agagtctatctctaccatgggccaaaccgggattcacgtgccagagttgaaggtggtgtttttaaggctcatcttactttcccaaaagattatcccctcc

SEQ ID NO: 323651 - DNA, 78 bp, Homo sapiens
tttaagcctgatctaacccctagaaacagatgccatggacaatattaccaggcagaaccaattctacgatacccaagt

SEQ ID NO: 323652 - DNA, 101 bp, Homo sapiens
cgggccggttgctaagacttggcgaagcgctgcgctcgcgcccggatccctcagaacatccagtcatggataaaaatgagctggttcagaaggccaaactg

SEQ ID NO: 323653 - DNA, 78 bp, Homo sapiens
ggcccaaagaggtgtccacagcttgtgccaccgccgtgctgggcaatcagtcacccacaaaagctgtatataatgcca

SEQ ID NO: 323654 - DNA, 82 bp, Homo sapiens
cgaggacacgaccttcctgcccttcacgctccaggagctagttccagggtctccctccactgctgtagtaacccgggtccgg

SEQ ID NO: 323655 - DNA, 75 bp, Homo sapiens
agcggaggagcccgaccgacccggcataagatgcacatttttctgctctggagccgggaatgaaatattcttgag

SEQ ID NO: 323656 - DNA, 82 bp, Homo sapiens
attacacactgctgaaccaggccccagacatgctgcataggacctaccagatagtattcaagtaggtggcaggatatcacct

SEQ ID NO: 323657 - DNA, 50 bp, Homo sapiens
ccgccactgccgcaggaggcgtgagacaacatctggggaagatgtacgag

SEQ ID NO: 323658 - DNA, 85 bp, Homo sapiens
ggtcttggggggatggttccatcatggcgtcaatgcagtgcacttgttgagctcgtgaaacacaagcccaaggcaacaaaagagc

SEQ ID NO: 323659 - DNA, 75 bp, Homo sapiens
ccgccgcatccacagctaccgagatccaatgcttaaagttgatgacagcaacactcggatcctgattggctgctt

SEQ ID NO: 323660 - DNA, 82 bp, Homo sapiens
atccagaagtacaagcagtctggtctcggcgcggaagatggccggcggcgtggacggccccatcgggatcccgttccccgac

SEQ ID NO: 323661 - DNA, 100 bp, Homo sapiens
aatgaagctgagaccacatccatggtttctatgcccctctatgcagtcatgtatcctgtgtttaatgagggtgtatgccatgtacaattccgtaaaggga

SEQ ID NO: 323662 - DNA, 90 bp, Homo sapiens
tcatgtaactataagcagcttcggaaaggagccaatgagggttgttaccccttctacaaaactgacccgttcatcttcccagagtgcccg

SEQ ID NO: 323663 - DNA, 75 bp, Homo sapiens
atgtgccaggaacacaacctcaccttgatcagcattggttggatggtacaaaaagcatcaaaaagcaagtaaaaa

SEQ ID NO: 323664 - DNA, 100 bp, Homo sapiens
gcgagagcgagtgcctgagcaacatccgcgagttcctgcgcggctgcggggcttccctgcggctggaggtaagaatgattgatgttggctgatattggag

SEQ ID NO: 323665 - DNA, 75 bp, Homo sapiens
cttcctgatttctgcagctctgtgtgaaggtaccttaacatggggaatcttcttaaagttttgacatgcacagac

SEQ ID NO: 323666 - DNA, 98 bp, Homo sapiens
cagccttcccagtagctggaactacaggtttattacagaggtcagctgggaagagctaccactttaagtgtaactcctgaaatggaaagagtgaagaa

SEQ ID NO: 323667 - DNA, 82 bp, Homo sapiens
gtggtacgggaagaagaaatgggggtaccgaggagaaggcattgtatatgggacactagaggaggtgtgggactgtgtgaag

SEQ ID NO: 323668 - DNA, 71 bp, Homo sapiens
ctcggagccggagacgccgagctggggccgggagtgacagttcatttagattctttgtattcttcttcgtc

SEQ ID NO: 323669 - DNA, 100 bp, Homo sapiens
aagctccgactcaccattattgaatgtgggtgtgacattaacatgatgattgatctggctgaagtagcagatctgtgtcagagatggctttggattcccc

SEQ ID NO: 323670 - DNA, 100 bp, Homo sapiens
cgaggcctggatggctatcaagggcctgatggaccccggggacccaagttaagtgggcagaccaacatccacctcagcaaaaacttcttcctgacgaatc

SEQ ID NO: 323671 - DNA, 98 bp, Homo sapiens
gggcgagcggcgcgggcggcaccatgaggcggcagtggggcgcgctgctgcttggcgccctgctctgcgcacacgagatggggtttcgccatgttgcc

SEQ ID NO: 323672 - DNA, 80 bp, Homo sapiens
tcgaagtaaagataccgatgcacttatagatgcaattgacacaggagcgggctacattgagagacctcagctgattcgag

SEQ ID NO: 323673 - DNA, 100 bp, Homo sapiens
agaaaatgtcttctgaggctgatctggtgtctcacatctgtaatcccagcacttggggaggctgagatatgtcttgtcgttcaagacttgcaacactaaa

SEQ ID NO: 323674 - DNA, 75 bp, Homo sapiens
gacttttcttatgctgggatgtgccttagaggattatggggagaccaaattttgaggaaggtggaccaacatcag

SEQ ID NO: 323675 - DNA, 100 bp, Homo sapiens
cggctccagcctgtgaagaagttaactgtactttgccagacgtttatcaaaatggggctgctgtcttctttcacttgtagtgacgagtttagctcattga

SEQ ID NO: 323676 - DNA, 75 bp, Homo sapiens
aaactctaaaccatctgaattggctcaatgatgaggtgtgtgtggtttcagcgcagcatggctgtggtcatccgt

SEQ ID NO: 323677 - DNA, 97 bp, Homo sapiens
cgcccctgcgccgccgagccagctgccagtatagcgtaagcactgtccacctgcgaagggcgcccctcaaggatccagacgcactcctgggcatgtg

SEQ ID NO: 323678 - DNA, 90 bp, Homo sapiens
agggccccctcgatgcagagacagaggtcggtgctgaccgctgcacgtcgactgcctaccaggagcagacaatgcctgtggaagacaagt

SEQ ID NO: 323679 - DNA, 75 bp, Homo sapiens
attttagtgcctcttctgtcaggggagtgagggccacaacacacagtgatcttgttctaagagcaacaaagctgg

SEQ ID NO: 323680 - DNA, 82 bp, Homo sapiens
cttcacctgtcggcttggagagatccagggcgaccattgacgaggtggagacggacgtggtggagattgaggccaaactgga

SEQ ID NO: 323681 - DNA, 100 bp, Homo sapiens
atgaaagcctggaatggttggcaagtcgaacaaagtcagctttctccaatctttctacatcccagagaagaagttgaagctttgatatgagtaaacaagt

SEQ ID NO: 323682 - DNA, 75 bp, Homo sapiens
gcttgtcggtctggactgatgaaaatccatatgaccattcccggagtaataaatccagttggagcagcagtgatg

SEQ ID NO: 323683 - DNA, 117 bp, Homo sapiens
atcacagaaacgtgaggatcaagaagccggactacaaggtcgcctacgtgcagctgctggctggaggcgtgatcctgggtgtggccctgtggctccgccatgacccgcagaccacca

SEQ ID NO: 323684 - DNA, 100 bp, Homo sapiens
gtcctagtctccgccgggtttgatgctgttgaaggacatctgtctcctctgggtggctactctgtcaccgccagatgtggagtctcgctctgtcacccag

SEQ ID NO: 323685 - DNA, 83 bp, Homo sapiens
gaccattcagatgggatctttccggatcaatccagatggcagccagtcagtggtggaggggctctgtaactcccagctggtgt

SEQ ID NO: 323686 - DNA, 75 bp, Homo sapiens
ccccagcaaaagaaaaatattgctgtacctaaattcaatgcatagtatgggactgggactccaatggcaagcatg

SEQ ID NO: 323687 - DNA, 98 bp, Homo sapiens
tgacatccctaccccagtgctcagcctttccatgctctccatcacctatcacagcagcatccgctctctggaggaactcctggatatgatgattgctg

SEQ ID NO: 323688 - DNA, 100 bp, Homo sapiens
ccaagtttcacatccttgtctgtgaagctaaactcaatgctgctgtgtgggaagaagatttgtaaagaaaactcttaggaaaggttatttgtcaatgaag

SEQ ID NO: 323689 - DNA, 75 bp, Homo sapiens
tggccttctgcatttcagaagccaaaaggaccaggtttggatgcatctgctcagactacttctcatgaactcacc

SEQ ID NO: 323690 - DNA, 90 bp, Homo sapiens
cccaggtggggaaggatggtgtcctccgggacggagatggagccgtggtccttcccaatgagaaaacccgcctagtgccaagcaaccctc

SEQ ID NO: 323691 - DNA, 100 bp, Homo sapiens
tggtttgccacgacagattggattgctatttaccagaggaaggttatcctgaatacatgtctaacaattttccttgcaacgttagctgttgtttttcact

SEQ ID NO: 323692 - DNA, 50 bp, Homo sapiens
ccgaggagagcaccgggaaagcctcttagagacggggtttcgccgtgtta

SEQ ID NO: 323693 - DNA, 108 bp, Homo sapiens
ggaggagacactgaagcgactgcagagccagaagggagtgcagggaatcatcgtcgtgaacacagaaggtgatcatcgagcgctacaagggtgagaagcagctgcccg

SEQ ID NO: 323694 - DNA, 74 bp, Homo sapiens
cagtattcagtgcccttgtgacagggcatgccagagctggggatcatggaatctattccagaggaaactaacca

SEQ ID NO: 323695 - DNA, 75 bp, Homo sapiens
tttggaacccagactttgcggtggaaaaggaggtgccgtgagcgatgtggagatgcaggaacactatgatgagtt

SEQ ID NO: 323696 - DNA, 83 bp, Homo sapiens
cgagaagcaagcggaacttcctgaggtttggtgcacctcgatttggaggaagtagggcagggcccttatctggaaagaagttt

SEQ ID NO: 323697 - DNA, 100 bp, Homo sapiens
attcaagaagttgaaaaacgcttttcacgtcacctggagagatgcacagagaaatgttctttactaccatggaaagccaccttctgcgctgcaaagtgtt

SEQ ID NO: 323698 - DNA, 75 bp, Homo sapiens
tttgaacggaatgctggagtcagtggaagacggagctggtcggcccgaagttacagaatgtctgaaggggacagt

SEQ ID NO: 323699 - DNA, 74 bp, Homo sapiens
caaatttacattaactatgagaattaagcaggttaatgaactttctgaggaagaagaggaagatgaaaagctgg

SEQ ID NO: 323700 - DNA, 75 bp, Homo sapiens
cggcgcctcaggcacctcggcccggcggtttccaacctagatgaggaaagccgatggacagtccactacactgcc

SEQ ID NO: 323701 - DNA, 95 bp, Homo sapiens
gtgatggataggagcaaccctgtaaaaccagccttagactatttttcaaacaaggaagaagcccctccagatggtgctgttgccgaatacagaag

SEQ ID NO: 323702 - DNA, 100 bp, Homo sapiens
tgtttagcaagcactgctatgaagactgagaattgtgtggccaaagaagttcagtacctgcttcaagtagcagcactgtacctgtctctctgccttctgg

SEQ ID NO: 323703 - DNA, 101 bp, Homo sapiens
cggaagaccgcgcgcagggcctgcagcgggagctggacggcgagcgcgagcggcgcgagaaacaaccatgtccaagggacctgcagttggtattgatcttg

SEQ ID NO: 323704 - DNA, 122 bp, Homo sapiens
ccaagaaaggagactaccagaaggcttatgaggatggctgcaagactgtcgacctaaagcctgactggggcaagtcactctgagaggagtgataccaatgaaaaaaggtcagttgattccag

SEQ ID NO: 323705 - DNA, 98 bp, Homo sapiens
tcccccaagggctcccccgccaaggggtcccccaaaggctcccccagcaggcacagccggagcccatgatgctgcccaaacctgggacctattacctc

SEQ ID NO: 323706 - DNA, 75 bp, Homo sapiens
ggacgcagatctccgggccacctgccttgaaggtcctggaccggatcaaaggctcactgctgccccggcctggcc

SEQ ID NO: 323707 - DNA, 100 bp, Homo sapiens
accagcacccccagacctgacccttggggaaggagtggatagaagccaaagaactgctgcaggagtcacaggaggaggaggaagaggaagaggaagaaat

SEQ ID NO: 323708 - DNA, 98 bp, Homo sapiens
cgtggtgtatctgtacagcagtttcctcatccctgcagctgtgtttgaacagtgatcatgaagttccagaaccagaatcagaaatgaagatgagacta

SEQ ID NO: 323709 - DNA, 82 bp, Homo sapiens
cagaggcacttatgcttgtcaggtatactgcaacatccagatggcacagttttgaaacagttacaaccacctccaaggggcc

SEQ ID NO: 323710 - DNA, 96 bp, Homo sapiens
accatgattgaatggggcaattactggtcgggctcccgctcccggagcaagagccggagccggagccagagtcggagccggagcaagaaagagaaa

SEQ ID NO: 323711 - DNA, 76 bp, Homo sapiens
gcccttgccggccggcaactgcacggacgagggctgaatgaggaacgcgccactggacacatgaggaagaggctgc

SEQ ID NO: 323712 - DNA, 74 bp, Homo sapiens
agaattgaaaccctccaaaccacgtcatctgattgtgaccaagaatatggcccaggtgaccaaagccctggaca

SEQ ID NO: 323713 - DNA, 83 bp, Homo sapiens
ggaggtcctgccgtccatgcggaagatcgtcgccacctggatgctggagtgcctccggagccagcgtggtggccatagacaac

SEQ ID NO: 323714 - DNA, 100 bp, Homo sapiens
gtggcggggactactggtgcctgcgctgaaaaaggtggtttgttctggatgcagaaaccagagatctagtttctatccacacagacgggaatgaacagct

SEQ ID NO: 323715 - DNA, 100 bp, Homo sapiens
cagctcgcagcgcatccccgcgcacaggccgccatggcatcagatgaaggcaaactttttgttggagggctgagttttgacaccaatgagcagtcgctgg

SEQ ID NO: 323716 - DNA, 80 bp, Homo sapiens
caggaccaaaattgtggaaaagtcactctgtgggtaattccagaattgattggccataccattgtcactgtattactgct

SEQ ID NO: 323717 - DNA, 74 bp, Homo sapiens
ctgcggtgtgagaatggagtgggcaggaaagcagcgggactttcagttcattcggctcctaaagaagtagcagt

SEQ ID NO: 323718 - DNA, 75 bp, Homo sapiens
gtggcattcaaatcctagcactctgggagaggaatcccgttctgcttccagaagtggaagtgctcacggatcggg

SEQ ID NO: 323719 - DNA, 75 bp, Homo sapiens
catagagtcgcagggagcccaccgggcgggcctggccaaggtcaaaatgcagatcttcgtgaaaacccttaccgg

SEQ ID NO: 323720 - DNA, 90 bp, Homo sapiens
gacgttagcgtgagtgatcactctcaatcccgggcattgaatccagctctccagaggtgaaaggctattggggtaatgattaaaaaaaaa

SEQ ID NO: 323721 - DNA, 96 bp, Homo sapiens
actttctcgtgggacagacaaacaataacatgtagaaacatatcagctgttggtttttcgttggaatatacgttgcacatttatggcgattctgag

SEQ ID NO: 323722 - DNA, 100 bp, Homo sapiens
ggattgtgcagttgctgccagtgccgattgcaggaaaaatgccagctgtgggacaaggagtgcaggccgcacaacctcggcaggcaccggggggatgtgg

SEQ ID NO: 323723 - DNA, 100 bp, Homo sapiens
cacaaagtgaccaagaacgtgagcaagcccaggcacagccgacgccgcgggcaaacggggattcagcgtccgatcctttggaacagggactcacgtgaag

SEQ ID NO: 323724 - DNA, 100 bp, Homo sapiens
ccggcggtctccgggtcctcgtccagaccggccaccggagcttgacctcctgcatcgaccgtgcagagtgtcgatatcgcagctttcaacaagatctgaa

SEQ ID NO: 323725 - DNA, 83 bp, Homo sapiens
gaagtggagtatttgctgggccgggtaccatggacgtgggcgaacttctgagctaccagaggctccaccggttagagagatga

SEQ ID NO: 323726 - DNA, 100 bp, Homo sapiens
aaagaggccacagaggcagccaagtgtaacctgctggcagaaaaggtagttagaaacaaacctgtggcaaggcaggctcctggcaaacggaagtgcaatt

SEQ ID NO: 323727 - DNA, 99 bp, Homo sapiens
gggacctcctggaagccaaaaatggatatgctgcaggctgctagtcattatcgccaaaatagaaactctttgtatagaagagaagaatcactagaaaaa

SEQ ID NO: 323728 - DNA, 50 bp, Homo sapiens
ggctcactgcaacctctacctcccaggttcaagtgattcttctgcctcag

SEQ ID NO: 323729 - DNA, 99 bp, Homo sapiens
ttcggacgtgggtcgaggctgtagcaggactccagcctatgaaagagacaaccagcaccaagatgaagcagaaggagatccaggtaatagacatgagcc

SEQ ID NO: 323730 - DNA, 83 bp, Homo sapiens
ggaaaagtggcactgaggctctggaacttctgcccagctctccttgtattatcagaaaatccacccagcttcaccattactgt

SEQ ID NO: 323731 - DNA, 100 bp, Homo sapiens
aagaatttgaccaactccagaaatattcagaataacaccaatcagggtcttcaggcctggaagattgaagacattccagccaacaaaatgtccattgcgt

SEQ ID NO: 323732 - DNA, 82 bp, Homo sapiens
gagatgattgccaaacccccaggcccagaggcagagctacacaaccatggaatccaaattaattcctgttctgtgcgactgg

SEQ ID NO: 323733 - DNA, 100 bp, Homo sapiens
cggagcggagacggcaaatggcggacttcgacacctacgacgatcgggcctacagcagcttcggcggcggcagaggggaaaaagacctcgatgaagttct

SEQ ID NO: 323734 - DNA, 51 bp, Homo sapiens
cgatgacttcgtcacctatgaggaaagggagcgggagcgagagagagagaa

SEQ ID NO: 323735 - DNA, 78 bp, Homo sapiens
ggtggtgcagctgggcctgaccaacccgaaaacattgctaggcacgaaggcagttccagtctcagctggctgacctgc

SEQ ID NO: 323736 - DNA, 80 bp, Homo sapiens
ctttttgcccttcctcctctgtgcggtgctgctcagtgcagttcaggttcctgacggagacttcgcccttcatgtggtcc

SEQ ID NO: 323737 - DNA, 83 bp, Homo sapiens
acaagaggaaagacacacctaccaagaagccagtcaagcggccagtaattcgccaaaatgacgaacacaaagggaaagaggag

SEQ ID NO: 323738 - DNA, 100 bp, Homo sapiens
tcgtctcttacgtctgcggaagtgcagctgcctcagttcttagcgcagtaaggtacctgccgtgggcagatctgagctttcttcttggacaccccatacc

SEQ ID NO: 323739 - DNA, 100 bp, Homo sapiens
gcaagttccaggcttcggtcactgtggagatctttgtcctggacgtcaatgataacagcccacagtgttcacaggagttggtgaccttcagagatgtggc

SEQ ID NO: 323740 - DNA, 88 bp, Homo sapiens
aagaaagtgcgcagcctgcaagattgtggtgcacacgccctgcatcgagcagctggagaagggaggcatgcatctccccatgtgctat

SEQ ID NO: 323741 - DNA, 83 bp, Homo sapiens
ctcggcagcgcccgcggagacgtgaagagctcagccagacgtccaggatcccaccccttgcaaaagaccaggccgtggaagcc

SEQ ID NO: 323742 - DNA, 100 bp, Homo sapiens
cactcacaaatttgtgtgggaaaatcaggggctatctgatgggttagagtgcctttgagaagaaatcagtggatactggatttgctcctgtcaatgaagt

SEQ ID NO: 323743 - DNA, 90 bp, Homo sapiens
gaactaaggaccttctttgccaggtggggacttaaagctaaagaactctcctattcatggaggcgaacactgaggatgctttccacatga

SEQ ID NO: 323744 - DNA, 73 bp, Homo sapiens
gccatttcctggggtccaagaagagagatgaggtggaacgtgtgatcaccattatgcagaatccacgccagta

SEQ ID NO: 323745 - DNA, 100 bp, Homo sapiens
ctggcccccttgagcctgtcccaagccctggtgccaggtgtccatccccgtgctgaggaatcccgttctgcttccagaagtggaagtgctcacggatcgg

SEQ ID NO: 323746 - DNA, 75 bp, Homo sapiens
gtgtaacccgaataagctgtcagactttgatagagcttgcactagcactcatttatctcagagttcaaatctctc

SEQ ID NO: 323747 - DNA, 87 bp, Homo sapiens
cttgtccgagcaaacagaggcgctcatccacagagccacatctgttaggtggtatcacggaaaacttgacagaacgatagcagaaga

SEQ ID NO: 323748 - DNA, 51 bp, Homo sapiens
gccgggagcgagcccaggcggcaggagtctgcactatggaaacaacctgtc

SEQ ID NO: 323749 - DNA, 96 bp, Homo sapiens
ttatcagtcaggggattcctgtgtacctcttttctgatataacgccaaccccctttgtggctaaagaattacctccaaagccattgtcaagaccac

SEQ ID NO: 323750 - DNA, 98 bp, Homo sapiens
gaagcagagtggctatggtgggcaaactaagccgattttccggaaaaagacatatctgaagagatggattaagaatgctttggattaaggattgtgga

SEQ ID NO: 323751 - DNA, 98 bp, Homo sapiens
ttcctccggactcctgcacgacctgctcctacagccggcgatccactcccggctgttcccccggaggcattgaatgccccagaggagcccgaaacctc

SEQ ID NO: 323752 - DNA, 83 bp, Homo sapiens
gaacttcagggtttccaccgttcgttcaagggactttgaacatgtcggggatcgccctcagcagactcgcccaggagaggaaa

SEQ ID NO: 323753 - DNA, 83 bp, Homo sapiens
cttcctcctcgatgcctacaaacaggatgagtctcatgatcactcatttggaccaatgcctatatcagcaaatggaagcaatc

SEQ ID NO: 323754 - DNA, 74 bp, Homo sapiens
ttcgtatggagtcctttcctatcatactctgatgccagtatggactggagatgatgggagccagttggatagcc

SEQ ID NO: 323755 - DNA, 82 bp, Homo sapiens
cccacgcaaccccagatccatttacactttacaggatggaagcttcctggcgccaggtggccggtggccgaggccgatcccg

SEQ ID NO: 323756 - DNA, 83 bp, Homo sapiens
gttgctacagctgtggagcagtatgttccctctgagcatttatataactctgcagccttcaaagctcgaaccaaagctagaag

SEQ ID NO: 323757 - DNA, 83 bp, Homo sapiens
gggcgtaggcgcgcggggcccgccatggctgcgtcggagctctacacaaagacctgcctagagctggaacgttacctccagag

SEQ ID NO: 323758 - DNA, 82 bp, Homo sapiens
ttgtagtgtatgcctcgtttgttgggaacctactgatgaaccttgcgaatgctgatgtcttaaaggcgatggtagcagataa

SEQ ID NO: 323759 - DNA, 82 bp, Homo sapiens
ctacctctttgtccaactctgcaagagcaccaagctatggatcatcatggagtacctgggcggcggctcagcactggacttg

SEQ ID NO: 323760 - DNA, 100 bp, Homo sapiens
ctcgatcctgctggctgctgtctctattctctcggcctgtcagcaaagacgcgcgggcggccatgcgccccttcgacccctccactctgctgcccacctg

SEQ ID NO: 323761 - DNA, 75 bp, Homo sapiens
gcacctggatgagacatttgctacagcatcccacattaagtcaacggatgtgatcttcgtggtggaaagctaaat

SEQ ID NO: 323762 - DNA, 101 bp, Homo sapiens
ggaggtctgcgttgctcttgcttttcctcgctggggtgtacgacaattcctcctcgcttcaagaagatgaagaagtagagatggaggccatcagctggcag

SEQ ID NO: 323763 - DNA, 100 bp, Homo sapiens
cattggagctcatcagactgaccgtgtcttacatcagttcagagaggaattgcattttgtgaaaaaagaacaagaattttctgcaaggatcatatctaag

SEQ ID NO: 323764 - DNA, 90 bp, Homo sapiens
gcatgatggaaacaccatggctgcggcggcccagctctctctgacacaggcagtggccattcaccaccgagtagcagtctcacttctcca

SEQ ID NO: 323765 - DNA, 82 bp, Homo sapiens
gaaatgatccgggacctgtgccaggcagacaagcagggaaggtggtgctgtggagccgtgaggagtccctggcagaagtggt

SEQ ID NO: 323766 - DNA, 75 bp, Homo sapiens
gcgagttgaactttaggagagctgtgttctctgcagattctaaatgcttgctttaaatcgagtaacagcatcgca

SEQ ID NO: 323767 - DNA, 74 bp, Homo sapiens
cacggagtttgggcatcctgcagccattaatgatcccaagatagatcacagatggagagacattttgccacacg

SEQ ID NO: 323768 - DNA, 98 bp, Homo sapiens
cccaaacctggcaaggatggtgcagattttggcagattatggctttgtccccacccagcactgatgatattataaagacgccaggaaagcatgtgcag

SEQ ID NO: 323769 - DNA, 100 bp, Homo sapiens
gaagacgaagttgatggcctggagaagaaagatgttttgcctactgttgatccggaacttataatcaaaactgtattaagctcggcaagagatgagccct

SEQ ID NO: 323770 - DNA, 73 bp, Homo sapiens
tcagcctcctaagtagctgggactacagatgggatgtcaggtcgggaaccatccttggaaatcctgccgcgga

SEQ ID NO: 323771 - DNA, 89 bp, Homo sapiens
tagtcgactacttcccagaatatgatgccttatgtttgatcatcggccaaggtcctggcgagaactgcctctgcggctagctgattttg

SEQ ID NO: 323772 - DNA, 50 bp, Homo sapiens
caacatttggacacatctcttagacattccattattgttccattgacctt

SEQ ID NO: 323773 - DNA, 103 bp, Homo sapiens
cggagctgttcctattcggccatctttgctcctccctgcaactaactccattcttaattggtccggctgatgcaggaatctgtccgaaggataattgaggcag

SEQ ID NO: 323774 - DNA, 75 bp, Homo sapiens
gggactcattggaaattgtacagtgacatcttctgggatttagtctggtagcacaggcggagtgcagcggaggcc

SEQ ID NO: 323775 - DNA, 80 bp, Homo sapiens
cgctgacaagatcgagggcttctatcgggtgctaccaaggttttgcttttgcatggaaatgtctactgcacagttgcacc

SEQ ID NO: 323776 - DNA, 75 bp, Homo sapiens
aaactattacaattgaatcagaaggacgtgggtcaacatttgccaagaggatcagcactgccagtggagatgggc

SEQ ID NO: 323777 - DNA, 50 bp, Homo sapiens
cacagacaactccaccaattgtacagttggtgtggatgactacagctcag

SEQ ID NO: 323778 - DNA, 105 bp, Homo sapiens
atatccaagaagcagtagagggtgccatgcacattcagtctgcatgaagaaatcagtgatttttatgaatacatgtctccaagacctgaggaggagaagatgcgg

SEQ ID NO: 323779 - DNA, 82 bp, Homo sapiens
ctttgagtggtttcagagcatccgagagatcacctggaagattgacaccaagtgcccatgacgcttccggagacaaccctgg

SEQ ID NO: 323780 - DNA, 49 bp, Homo sapiens
ctgaaaacgtgctgcatttcaaagaagggacaatggagaacattgcagc

SEQ ID NO: 323781 - DNA, 100 bp, Homo sapiens
taaccgggtccagacccacgcggcgccagttctccggcgggaaggaaaaccgcgcagagaggtttgacagatgaaaaagtgaaggcatatctttctcttc

SEQ ID NO: 323782 - DNA, 87 bp, Homo sapiens
ggctctttctgctgggcctgcccttcaccctctacatggtaagaatgattgatgttggctgatattggagtgctcattcacatgaag

SEQ ID NO: 323783 - DNA, 126 bp, Homo sapiens
tggtgagcttctctgaagcctgctttgtaaagattgtggcttccgcctgaactgcttctttcctgcctcaaagggtgatacaattctggagactggagaagtaattccaccaatgaaagaatttcc

SEQ ID NO: 323784 - DNA, 100 bp, Homo sapiens
gaatcttcccaacctcatgaatctcatcgccaccatctttgtctttgcagtggtcatctatttccaggccagctttgctccaatggaggacaaactcaac

SEQ ID NO: 323785 - DNA, 82 bp, Homo sapiens
atctggcccaacgatggcgagggcgccttccatggagacgcaggtttggtgcacctcgatttggaggaagtagggcagggcc

SEQ ID NO: 323786 - DNA, 80 bp, Homo sapiens
cgactctgcgccgccgctgcctccatcctgggcaaacctgcggacgtctctaattaacagaagatggcaaagcccagcca

SEQ ID NO: 323787 - DNA, 100 bp, Homo sapiens
cgggaggcccggcggaggatcgacctcaacctggatatcagcccccagcggcccaggcccatgtgtcccggcatggatatccggaacaacctcactaggt

SEQ ID NO: 323788 - DNA, 100 bp, Homo sapiens
cccggttgtcctcaggcgctgtcagagcaatggtggaacaaagcggcaaaagatatcccatcaaaattatatagcctatcaaaagcaagttattcgccga

SEQ ID NO: 323789 - DNA, 100 bp, Homo sapiens
tggaccttttttcatttccatttctaccttgtatgcctcaatttgctggatttaagcactgctgcactttatgagcccatggcgaattgtggatgattgc

SEQ ID NO: 323790 - DNA, 100 bp, Homo sapiens
gagaagatgctggaggacctgcggcgggaacagcaggccacagagctgcttgcggccaagtacaaggttagcagaggagccggacacagaggaagctcag

SEQ ID NO: 323791 - DNA, 83 bp, Homo sapiens
cgtccagaagaccaagtacctgcagatcctgacctctctgatgagatggatcggagggtgaggacaaaatcttcttaatcaac

SEQ ID NO: 323792 - DNA, 75 bp, Homo sapiens
accgtctactggaaatctgaatgctgttatcacatggcccactgcgtgaccttggttcagctgtccatttcctgt

SEQ ID NO: 323793 - DNA, 76 bp, Homo sapiens
ctcttactgggctttcttaaatattatgctacagaatttgagcaaaagaatggaccccagcaggaaaagcaaagca

SEQ ID NO: 323794 - DNA, 98 bp, Homo sapiens
cccagtgagctcctggattctgctggtgcgcacacggtcagtgggcgagtgtgtcgagtactactacctgtggaagaagtcggagcgctacgactact

SEQ ID NO: 323795 - DNA, 120 bp, Homo sapiens
aaaggttgccataaaggacaaacaagtgaaatacttcatacattacagtggttggaataaaaagtgcacagattctcagcaccacagcggccgctgctgggagatgggagaggaatggcc

SEQ ID NO: 323796 - DNA, 78 bp, Homo sapiens
gctgttgctgggctcggcgtgctgcgagtacccaaaggcaagtggaacagctctaatggggttgaagaaaaggagact

SEQ ID NO: 323797 - DNA, 100 bp, Homo sapiens
cccactcagtcaagatcacaggaatgactgctgatggagcgccagaattgaagatagagagtctgaattcaaaggccaagctgcatgctgcactttacga

SEQ ID NO: 323798 - DNA, 82 bp, Homo sapiens
aacgaggcgccgcgttggcgcttggacggcgggaaccggctccggagcgagaacgcgcgagaactacgatgacccgcacaaa

SEQ ID NO: 323799 - DNA, 76 bp, Homo sapiens
cagcgatgtccccatccgccgccgagaggaggcctatgagaatcaggtgatatatcccctgaaggaggtctacccc

SEQ ID NO: 323800 - DNA, 83 bp, Homo sapiens
ggagctgctcgacgaccaagaggcgaagagaagcatcaagtgtacctgatttgtgaacctatcttgcttcagttggtttcctc

SEQ ID NO: 323801 - DNA, 98 bp, Homo sapiens
gaaaactcgtgtccatcaaaatccagatgctggatgacacccaggaggcatttgaagttccattttcaatggttccagcaggtcaacacgggagaagg

SEQ ID NO: 323802 - DNA, 157 bp, Homo sapiens
acttttgacccgtctcctcaccttctgatacacaccaaccaaccagtcaaccagccattgctgtttactggatacctgcttccaggtggttcacttatttttaacactctgcagcagcagcaacagcagctctcccagtttacaccacaacaacctc

SEQ ID NO: 323803 - DNA, 75 bp, Homo sapiens
caccggtccccaacgcatcatgccagggagccaagcgtcctgcccggccggtttccaggcctgaggtgcccgccc

SEQ ID NO: 323804 - DNA, 100 bp, Homo sapiens
cagagtgccaagacgcagattaaactgtgtgaggcctgcccgatgcactctttgcataagctctgtgaaaggattgaagtgagtgatggattggaactga

SEQ ID NO: 323805 - DNA, 90 bp, Homo sapiens
gtgtgaacgggcatctcctcccagcagctcatgcaacatctcctctggggaaatgcagaagcatctacacgggcgacagcttcgtcaccc

SEQ ID NO: 323806 - DNA, 82 bp, Homo sapiens
gacgctcagatgaaaacctttgacactaccttctcccatttcaagaatttccggcaaactgtgaagtcatccaaaggtggtc

SEQ ID NO: 323807 - DNA, 75 bp, Homo sapiens
gcaccagttcaagtggccctcagggcatccccgttttcgtggacgtgatgctgaatccaggcagtgccacttcga

SEQ ID NO: 323808 - DNA, 74 bp, Homo sapiens
ggagaaccgggcccagcagcactgggatgaggcctgcctgtgttaatacacctagtgaggagtggagctgaatt

SEQ ID NO: 323809 - DNA, 102 bp, Homo sapiens
gcggtgaaaaaagattcagagttggataagcacttggaatcacgggttgaagggaataaccagcaagtacctgtcaagaatgaagtagatcattgtgaaaat

SEQ ID NO: 323810 - DNA, 100 bp, Homo sapiens
cgcctggaggttatccagcccctggaggctatcctggtgccccacagccagggggagctccatcctatcccggagaccaatgccaggattcagagactgg

SEQ ID NO: 323811 - DNA, 90 bp, Homo sapiens
cgcctctgcaatcatgggtcaccaagagaggctgagagaccaggcacggagtgtgaatgtgaagacacaagctctttctggatacagaga

SEQ ID NO: 323812 - DNA, 100 bp, Homo sapiens
ctaacatcacctgcttcatccttgtttaatgactttggtgccctcaacatctctcagagacgaaagctgaactgtcccaagcaataaacagtggtacatt

SEQ ID NO: 323813 - DNA, 100 bp, Homo sapiens
tggcatccaaatatccagattttaagcagcatgttcagataaatctgaatggaagagtgagcatggctattatctatggagtgttctctgcttcaaattt

SEQ ID NO: 323814 - DNA, 50 bp, Homo sapiens
ttccgcagcagcactccgacagactgggaagctcgaattgacagccacgg

SEQ ID NO: 323815 - DNA, 80 bp, Homo sapiens
aaaagcattattggcatgggaacaggagcaggcgcctacatcctaactcgatttgcttacctggagtagaacagaaaaat

SEQ ID NO: 323816 - DNA, 50 bp, Homo sapiens
cctgcctcgcgctagcaggaaggcacacaagactgtatctctgcttacac

SEQ ID NO: 323817 - DNA, 80 bp, Homo sapiens
gcagggctctagagaccacgtgaagtctcctcgatctgaaattcagagtgtagctctgagacttgcttccaaagtcattt

SEQ ID NO: 323818 - DNA, 82 bp, Homo sapiens
cggcttcggagcgggagtgttcgttgtgccagcgactaaaaagaggcacttcagacaccacctccaacaacacagcaaccgt

SEQ ID NO: 323819 - DNA, 74 bp, Homo sapiens
ctgtggctggacaacacggagaacgacctcaaccaggggttaccacattctcatctggagccaggaggaagcca

SEQ ID NO: 323820 - DNA, 101 bp, Homo sapiens
attgcctcggattccgacagcaggaaacttggatttaactggccagaagcaggtattcaaagcagagaacaatccctgggtgacccccattgcagaccagt

SEQ ID NO: 323821 - DNA, 100 bp, Homo sapiens
gggaaataatcaagcgaactgtccctgaaaaacagctgaatgatattgaagattgtgacctcaatgtggtgagactgtgttttcaagtttttctccctga

SEQ ID NO: 323822 - DNA, 75 bp, Homo sapiens
gctgcatccaaatcttctccctggacctcgtgcatacggagccaggtgagaatttcaaggattatcgacttcata

SEQ ID NO: 323823 - DNA, 83 bp, Homo sapiens
cgggggtcttcctcctccgccgttgacagggggatatgagactttctactcggaatatcctgagtgttgcgtggatgtaaaac

SEQ ID NO: 323824 - DNA, 75 bp, Homo sapiens
cttcatcgctcctaccttgaagcctgcaggactgctggacacttcgtgcagtgtttcctgaggttataggcgggt

SEQ ID NO: 323825 - DNA, 100 bp, Homo sapiens
gtagaatccattgatcctgtcactgtcagtataaactcatggattgaactggttatcccatcatcaggtagcaagttgaaacgaccaacaccaacttttc

SEQ ID NO: 323826 - DNA, 100 bp, Homo sapiens
gtgcagcttcttcagttccaggaagatgcctttgggaagcatgtcaccaacccggccttcaccaaactccctgctctattccgttcgctggttcgccacc

SEQ ID NO: 323827 - DNA, 96 bp, Homo sapiens
tctgggcgggggcgtggtcaagcaccacattgccaatgccaacctcatgtgtgccactgaagatcctggtgtcgccatgggccgccgccccgcccg

SEQ ID NO: 323828 - DNA, 51 bp, Homo sapiens
gaaattctggaacacctatatgatggacgacctcagtgggaggtagaaggg

SEQ ID NO: 323829 - DNA, 75 bp, Homo sapiens
cgctgagcgaggcggagaaggtgtacatcgtgcatggcgtccagcatccaccagctgaggaacaaagtatcagag

SEQ ID NO: 323830 - DNA, 83 bp, Homo sapiens
gtgtaccaggcgaagctggccgagcaggctgagcgatacgacggaactctgcgaccttcaagtcgtttgaggaccgagttggg

SEQ ID NO: 323831 - DNA, 75 bp, Homo sapiens
gggaaatcagggctccttcttaactaaaggtgtggatgaggtcaccattgtcaacattttgaccaaccgcagcaa

SEQ ID NO: 323832 - DNA, 100 bp, Homo sapiens
tgctttgctggctggatctgagtacctcaagcttggaattatatccagatcgagagacagaagattctgaaagggttcaatgaaatgagagtcatcttgg

SEQ ID NO: 323833 - DNA, 80 bp, Homo sapiens
cagacccccgatgtcgtgttcgcaagcatcctagcagccttctccaaagccacatctgtgcctttggctgcaacaagtat

SEQ ID NO: 323834 - DNA, 101 bp, Homo sapiens
gaggcctcgcgaccgccgagcctgcagcctgccccgcggccaacatgagcttcttgttggaaatcctcattgacgattcaatttgttgaaggccaatttgt

SEQ ID NO: 323835 - DNA, 82 bp, Homo sapiens
ctgaagacaaaaatccagaagtacaagcagtctggacatggatttgattgacatactttggaggcaagatatagatcttgga

SEQ ID NO: 323836 - DNA, 80 bp, Homo sapiens
acatggatgcttgttggatgaattaatgaaccttgacccacaccaaggtggacgacccaccggagcccgtgtacgcgaac

SEQ ID NO: 323837 - DNA, 83 bp, Homo sapiens
cgcgcacttcgtcatgttcttcgcgccctgaactggtcatgctgctggagtggtggtcctgcacggagtgtacactgttcacg

SEQ ID NO: 323838 - DNA, 156 bp, Homo sapiens
acaagatcgtcaacaaaaacaatgtgagatgtctccagcatttttacggacccaatcatgagcactgctttaataggatgggcttaggtcacgagcaaggatttggagccccttgtttaaaatgcaaagaaaaatgtgaaggattcgaactgcact

SEQ ID NO: 323839 - DNA, 50 bp, Homo sapiens
ctgcaccgcaccgagggcgagctccaggctggcgcccatgcggctctaca

SEQ ID NO: 323840 - DNA, 75 bp, Homo sapiens
cacttgctcgtgcactttacacacatgagggagaagatgtcaaccggacactagaaggtggaaggaaacctcttc

SEQ ID NO: 323841 - DNA, 75 bp, Homo sapiens
ggaacaggccagcaaaacactcagctgcaagtccaaagccacaagagcacagggctccctcttcaacgtggcgac

SEQ ID NO: 323842 - DNA, 75 bp, Homo sapiens
gaacctgtgaaaacgtacgctctccaactggccaatacaaatcccttgtatccattctgatagttggtggtggtg

SEQ ID NO: 323843 - DNA, 90 bp, Homo sapiens
gcttccttatgaactgactgaaggggacatcatctgtgtgttctcacaatgagtgaccgaggaggtggcgttcctttgaggaaaattgac

SEQ ID NO: 323844 - DNA, 100 bp, Homo sapiens
gttgatctggataatgtggtcaaaaagtggaggtgaagacagaaagcaagagaagtgtcactccccattccggatcatcccctatctgattcatgtacat

SEQ ID NO: 323845 - DNA, 75 bp, Homo sapiens
actcaactggctatttgacagagccaggtctaaactgcagtaatccatttactcagctggagaggagacatcaag

SEQ ID NO: 323846 - DNA, 115 bp, Homo sapiens
tgctctgagggagggtccgagccagccgctgttttgccggaggagcccctcaggccgaaacttggatttaactggccagaagcaggtattcaaagcagagaacaatccctgggtg

SEQ ID NO: 323847 - DNA, 98 bp, Homo sapiens
agactatgaatctctgttccaaatgctttgctggaatcctatccatcttcttcaccgatatggtttgtggattctgaagacccaaatctgacatcagt

SEQ ID NO: 323848 - DNA, 74 bp, Homo sapiens
ctgtttttagctatcaagtggcatccacgcttaaacaggtgaaacatggtgacagttcgtgatgctataaatca

SEQ ID NO: 323849 - DNA, 82 bp, Homo sapiens
acctcctgcgaggcctcccgggctccgggaaaactacactggccagggcgaagctgtgctcaggcccgggctggacgcagag

SEQ ID NO: 323850 - DNA, 100 bp, Homo sapiens
ccatgataatttccccagagcgtcttgatccttttgcagatgatcccctgtaagcagcttacagattcgctatgatcaaccaggcaacagcagtttggaa

SEQ ID NO: 323851 - DNA, 82 bp, Homo sapiens
gtctgcgagccaggattcccggccaagtcctgtatctgccatgtctgtggcgtccacctcaacaggctgcattcctgcctct

SEQ ID NO: 323852 - DNA, 80 bp, Homo sapiens
cccctggatgggggaccacaagatcctcatcgacagattacacacactccgcctgcaggaatacttatcagggctttaat

SEQ ID NO: 323853 - DNA, 75 bp, Homo sapiens
tttggttataaattatgatctacctaccaatcgtgaaaactatattcacagctaaagatcttattcgcacagcag

SEQ ID NO: 323854 - DNA, 100 bp, Homo sapiens
tttgccttcgccactgctcagcgtctgcacatccctacaatggctaaaacagcaatggggattatcagcatagaaagaaagccttgtaaccatcaggtag

SEQ ID NO: 323855 - DNA, 87 bp, Homo sapiens
tcattctcatatttcaccaataaaggacaaagtggccttggagagtatgcctctgctaggcttcaccattgctccagaaaaggaaga

SEQ ID NO: 323856 - DNA, 100 bp, Homo sapiens
ttttatgacgagacagaagcccggaaatacgttcgcaaaggcggggtttcaccatgttgcccagactggtcttgaactcctgagcttaagcaatccacct

SEQ ID NO: 323857 - DNA, 100 bp, Homo sapiens
ttggagagaggagaacgaacatcttctggacctttgtccagatttggcagctgatcggaagctctttcgtcttgtctccaatgactccttcatctctatt

SEQ ID NO: 323858 - DNA, 75 bp, Homo sapiens
cacggagatacactttgtcaccaaatgtgcctttcaggacagtcattttgtttactcattcagccctgttgcagg

SEQ ID NO: 323859 - DNA, 90 bp, Homo sapiens
tgccgagaaggagttgtttcccattgcagcccaggtggataaggaacatctcttcccagcggctcagcctggctcccaccatgagtgctg

SEQ ID NO: 323860 - DNA, 75 bp, Homo sapiens
aacatccagagctgcatcattccttggggcaaaatgtggacaagggcttgttagcagtggcacaagatcttacag

SEQ ID NO: 323861 - DNA, 74 bp, Homo sapiens
tgaaccactccactgcctttaaccctcagcctcagagtcagatgcaggtatgtccgtggttcagaccctgtatt

SEQ ID NO: 323862 - DNA, 75 bp, Homo sapiens
gcgttcgatcttttaacatcacatcacatgctgacagcacaagaagcaaaccagtccagctacgggggcccagcc

SEQ ID NO: 323863 - DNA, 96 bp, Homo sapiens
tgattttgatgcttgcgaagagttgattgaaaaggctgtaaatgctttcggaaaatgtgattgatcgaatgaaggaatcctctccatctggttcga

SEQ ID NO: 323864 - DNA, 83 bp, Homo sapiens
gccttgggcaggacccacctcgccttcctcccggcgtggcagatgctccaggtcgcaatggaagaagagatcgccgcgctggt

SEQ ID NO: 323865 - DNA, 100 bp, Homo sapiens
aacacggtgttgctggtgtcattacaaaatccagtaaagaaatgaagctgacagatggctcttactttggagaagctgcacacatacatgtaagagaagc

SEQ ID NO: 323866 - DNA, 100 bp, Homo sapiens
caggaagcttcatggctgggcaccaggccctgactaccaggatatgatgatgcctatagatttgggggaaaagacaatatatttagtttcattctttgaa

SEQ ID NO: 323867 - DNA, 90 bp, Homo sapiens
gctgccgctgctgctggtgttagcgctcagtcaagctgggaactgctggctccgtcaagcgaagaacggccgctgccaggtcctgtacaa

SEQ ID NO: 323868 - DNA, 75 bp, Homo sapiens
gactgtcccagaagtgaatcgcaggctttgaacttggcctactccagcatttacggcagctaccggaacttcgtg

SEQ ID NO: 323869 - DNA, 87 bp, Homo sapiens
caggttttggactcgctgaagcggtcagtttaggggctggtgcaaaggatgagttgcacattgttgaagcagaggcaatgaattacg

SEQ ID NO: 323870 - DNA, 98 bp, Homo sapiens
tggggctgtggagagcgacccgtggccttgtgtttcaggaattagcttaccgaaaggagatggtgagagctgacctaattaacaaaaaagttggaatc

SEQ ID NO: 323871 - DNA, 100 bp, Homo sapiens
ccttgcctagtgggccttccttcccagcttatgttcctgaggaagaattgaaggcagcagaaatagatgaagagcacgtggaggatgacgggctgtcttt

SEQ ID NO: 323872 - DNA, 82 bp, Homo sapiens
gaggcggaacaggccgggcaccaaggcgcagttggttgaagccatggataacagaacccacagatgcagagggctgactgta

SEQ ID NO: 323873 - DNA, 83 bp, Homo sapiens
ctctccggctcccgccgccacccccgccctcgccttcgcctccgcctccggtctacaaggaagtcttcacgaggagcagtgag

SEQ ID NO: 323874 - DNA, 97 bp, Homo sapiens
gaatggacagagccatccctgacacccggcatgaccaaatgaagaatccccacctgagggccaaactagcagaggtgttggaagcagtgatgcccca

SEQ ID NO: 323875 - DNA, 51 bp, Homo sapiens
tgatggttgtggtgaccagactttagcccgagtgattgatgtatctaatgg

SEQ ID NO: 323876 - DNA, 73 bp, Homo sapiens
atggagcgatttcagcttcactatcagattggagctggagggagcatcactgggctgaagtttaaccctctca

SEQ ID NO: 323877 - DNA, 82 bp, Homo sapiens
gtcatcaacgggcagtttgtcgaacgatgttggactcatagtcactgccagaaaggttttaaaatcaaagatgggaaaatcg

SEQ ID NO: 323878 - DNA, 100 bp, Homo sapiens
ttcagcccagaggagaaactcgctcgccttcagaagacaggacccccgcagcaaacacaagtttaagatccacacgtactccagccccacgttttgtgac

SEQ ID NO: 323879 - DNA, 101 bp, Homo sapiens
aactggtacttggagtctggacatctgaaacttgctccaactaccgtgaatgtaacacatcgtccagtaactcaggtgaccacaagactccctgtaccaag

SEQ ID NO: 323880 - DNA, 96 bp, Homo sapiens
gccaccggccgcttctgtcctcggtgaacttcacggtagaccagatccgcgccatcatggacaagaaggccaacatccgcaacatgtctgtcatcg

SEQ ID NO: 323881 - DNA, 102 bp, Homo sapiens
ggaccgagcctgacggagccggaggctgggagccgcggcggcctgggccagagactgctgctactttgaaacgtacgatagaggccctgatggacagaggag

SEQ ID NO: 323882 - DNA, 100 bp, Homo sapiens
atctggaccatcatccttcgctttgctattcaggatatttcggttgaagcattagtgccagcagtagttcccaagggctgtctcagccatccacccagac

SEQ ID NO: 323883 - DNA, 100 bp, Homo sapiens
cctcgaatgtgggaccccagcccctctccagctcgaaatcgaagttctccagcagctgattgtaatgaatttgcccaatgttttgatgattggcagagac

SEQ ID NO: 323884 - DNA, 100 bp, Homo sapiens
gaaccctacttgcctaaatgaggaatgtctttcctaccatctaaaatacgaaggtttctggctggatgacgaagatgatcctgcagaagctgaaaaggag

SEQ ID NO: 323885 - DNA, 97 bp, Homo sapiens
gaaactcagcctccagaaacggtccagaactggattgaattacttagtggtcgtttatacgcaatgcagactggaatgaagatcgatagtaaaactc

SEQ ID NO: 323886 - DNA, 82 bp, Homo sapiens
cccgaactccaggacagcatccaggcctcattggacagcattcgaggtgtccctggccagtgtccttccacctgtccacaag

SEQ ID NO: 323887 - DNA, 98 bp, Homo sapiens
gccatccgcaccgaattccaagcccgggcacagaggcctagcagccccgccttgtgcatggatcagaccagcaaaagctttgcatcgtccctatggtt

SEQ ID NO: 323888 - DNA, 75 bp, Homo sapiens
gtcgtttgtttctccaaggtttgaaaagcagctggcctgcaagacctggagtggaagatcatttatgttggctcg

SEQ ID NO: 323889 - DNA, 100 bp, Homo sapiens
ctgtgaactacatctcaacagtactagcagattgggctgacaatgttgtctattctggataagcaggttttgtgaagacatttattctttcttggacctc

SEQ ID NO: 323890 - DNA, 75 bp, Homo sapiens
aaaaagctgccctgagacggtgtcccgccgaaaggtagttacttttggtgacgctgtccagttcccacaatgtat

SEQ ID NO: 323891 - DNA, 82 bp, Homo sapiens
ttcttcagaattagaaaggagctgcttcccaataaggaaacagaatgtatcctgtcaggtataatgtcagtgaatggcaaga

SEQ ID NO: 323892 - DNA, 75 bp, Homo sapiens
tccccggggtgtaataatgttaactgagggaggtggggaagacagggctccagctaccacaggacgggctctggg

SEQ ID NO: 323893 - DNA, 74 bp, Homo sapiens
tccagcaccctcatcgccctggccgacaagcacgcaaggagcatcgagtacagctgtccggcctccaacgagtg

SEQ ID NO: 323894 - DNA, 51 bp, Homo sapiens
cccacttccgaaaccacaagtttgccgattatgaccagtataagactccaa

SEQ ID NO: 323895 - DNA, 87 bp, Homo sapiens
gacgctcctgaagccgcgagatgatgccgtgcgcgaaattcggaagtatgatgatgtgacggaaaaggtgaacctccagaacaatcc

SEQ ID NO: 323896 - DNA, 87 bp, Homo sapiens
agcagtaaactcactgcaggaggaactagctaatgtccaagaccatttgaacctagcaaaacagaaaactatgtgcaagctgtggag

SEQ ID NO: 323897 - DNA, 100 bp, Homo sapiens
tctgctccacctcctccccgcggggcgtgcagctccgaagctctttggacctagcaggttcggcggccgggataatcagacagctaaatggagtctgagc

SEQ ID NO: 323898 - DNA, 50 bp, Homo sapiens
agcctcctgagtagctggaattacaggtgcatgccaccacacccagctaa

SEQ ID NO: 323899 - DNA, 83 bp, Homo sapiens
ggagaaacaggcgccgcgggctccgcgcccggccggacccgggcccgagtccagaatgacagggtccagaaactggcgagcca

SEQ ID NO: 323900 - DNA, 100 bp, Homo sapiens
gggacggagagaacacgagcccatcaggtgaaaggtgtagcagtcactcggcctacacccacagcatcgaccttgtgaacccagcgacctgactgccttg

SEQ ID NO: 323901 - DNA, 75 bp, Homo sapiens
ttgtctcggcagcgcccgcggagacgtgaagaggtgagaagccctaccactgcaactgggacggctgcggctgga

SEQ ID NO: 323902 - DNA, 100 bp, Homo sapiens
acaaggagtatgctgaagatgacaacatctatcaacagaagatcaagatgtcgaactctctcaggttcacccagaccaaagaattttaagaagattcatt

SEQ ID NO: 323903 - DNA, 91 bp, Homo sapiens
tttcttctgtggcaacgtggctcatcagcagcttatccagatgcttgctctgtcaaggcacagcctattgtctcctttgctcagtgtgaca

SEQ ID NO: 323904 - DNA, 100 bp, Homo sapiens
aagagaaaaagcccaggcataaaatcatctccatattctcaggcacagagaaaggaacaggaaatatagtggtcattatgattagctatccaaaaggaag

SEQ ID NO: 323905 - DNA, 74 bp, Homo sapiens
caccaatggaccaaaatgaacacagtcactggggtatctcagatgaagacatcatcaacattactcttcctact

SEQ ID NO: 323906 - DNA, 153 bp, Homo sapiens
gacggggtcggcgccccgcgcctgccgctgccctacggcttctccgccatgcaaggctggcgcgtctccatggagaatggcctttgtgctgcaccaggctgggcccccccacagccacgggtctaggggagcagagtatgcaccgctggagga

SEQ ID NO: 323907 - DNA, 51 bp, Homo sapiens
caagaccctacccgcttcactggcaccatgagcctgtctccccaggaccgt

SEQ ID NO: 323908 - DNA, 98 bp, Homo sapiens
gggactgtcaccatcctctgcattgacttgggcactgacatgatgtcatcgcaacagataaagaagacgttgccttcaaagacctggatgtggccatt

SEQ ID NO: 323909 - DNA, 101 bp, Homo sapiens
caaacgcagcagccgttgccatggctgcaacacttacacagcagcaacagcctgctacagtgaagtgcgccacaagcaaaccagctttctttgcagagaag

SEQ ID NO: 323910 - DNA, 75 bp, Homo sapiens
cgtcgcctcccactgcaaaaaggcctgggattctgaaaccttccttgtatccctcctgagacatctttgctgcaa

SEQ ID NO: 323911 - DNA, 100 bp, Homo sapiens
agataccagtttgcgtcaggagacacagaagaaattgcttcagagaattcagattgcatctttccttcagctcctgatgttaaggcctgagcgtcaatca

SEQ ID NO: 323912 - DNA, 76 bp, Homo sapiens
ttatatcatttaaaccacatggctatctaaagagggtctccgtctctccaccgggggcttcatccttccagggagg

SEQ ID NO: 323913 - DNA, 100 bp, Homo sapiens
cttggttttcaacttttgagcatgatggtcagaaggagagctggaggtgtttcagaaagatggggaacgaaaaattcagagtcgacagcaacttccagtg

SEQ ID NO: 323914 - DNA, 100 bp, Homo sapiens
attttggaagagggagtcaccactggacctccaaggaagccacgtgcagacatctacaaccttcgatctcctgacgaacatcttcatttgattgtacacc

SEQ ID NO: 323915 - DNA, 83 bp, Homo sapiens
ctttccaacatccagagctgcatcattccttggggcaaaatgtggacaaggaaagaagcttccggttctgaggtcctggaggt

SEQ ID NO: 323916 - DNA, 101 bp, Homo sapiens
cgggcggcttcctggcctgggcgctccggtggcggcggaggagggtgtgaagacagagaatgaccacatcaacctgaaggtggccgggcaggacggctccg

SEQ ID NO: 323917 - DNA, 50 bp, Homo sapiens
cagaggacgacatgttgcttttcgtggagaagtttcaggcacctgcaaga

SEQ ID NO: 323918 - DNA, 75 bp, Homo sapiens
cgcgcggtgcttggctgcggtgctcacactcatgaggagccggaagatgatcatgggaacagcaatagtagtcat

SEQ ID NO: 323919 - DNA, 100 bp, Homo sapiens
gacactgtcagcgagaccatgacgcccatgcactaccacctgcgggagatcatcatctgcacctaccgccaggtgtgcattgtgcagaagcgggacacgg

SEQ ID NO: 323920 - DNA, 77 bp, Homo sapiens
tggaaatcctaatgacagtctccaaattcgcctccatctgtaccatgggaactctaatgatccaggacaaagaagtt

SEQ ID NO: 323921 - DNA, 75 bp, Homo sapiens
ctccatcacccaccaacaacaccacaataatccacagccaaggtgaaagaaaagatgttgtcccggttaagagta

SEQ ID NO: 323922 - DNA, 83 bp, Homo sapiens
ggagagcacaaccatcgcagttggaagcccatggggcaggcgggtgccacgtctatgtgggcttcgtgctgtgggctgctgaa

SEQ ID NO: 323923 - DNA, 75 bp, Homo sapiens
cggacagagcccgtggtcgcgcagaacattctagtatgccagtagaaaaaaatatcactttagaaaggccttcta

SEQ ID NO: 323924 - DNA, 100 bp, Homo sapiens
tcccgggagaacctgcggcggccggagcgctgtgctccattgaagtgacttgtgaatcagccagtgtgatggctgcgacactggctaatggtggtttctg

SEQ ID NO: 323925 - DNA, 75 bp, Homo sapiens
ggcttggagcacttcctattccactggattgggaaagaccatggcagatagaagagtgatggatgtcatttctcg

SEQ ID NO: 323926 - DNA, 131 bp, Homo sapiens
cctgctgcacccacgaatctgcccacccctcctgtaacccagcctgtttcacttcttgggtgttgaaagcagcaggggcctagaagacattaaaccgataccacagaaatacaaaggatcattagagacta

SEQ ID NO: 323927 - DNA, 100 bp, Homo sapiens
ggtcaggtcacagagaagctgcagctgacttacatggaggagacgtgtcgtcactatgtggcccatgtgaaggtccttatgtcgtcagaagatcgagaag

SEQ ID NO: 323928 - DNA, 75 bp, Homo sapiens
caagcaagcatgcagcttactgcttgaaaggcccccgatttctacgttgagatgaagtgggagttcaccagctgg

SEQ ID NO: 323929 - DNA, 90 bp, Homo sapiens
cagagagcgaccccaacagggtagacgggcgccctgcgtccggcagaggaggcgagcatcccgctcaggtgatgaggaacccctcgcgca

SEQ ID NO: 323930 - DNA, 50 bp, Homo sapiens
tacctccgagccaggccgccgcaaagcagcacgtgtggagtgagagcgag

SEQ ID NO: 323931 - DNA, 98 bp, Homo sapiens
acagagcctcgcctttgccgatccgccgcccgtccacacccgccgccagcccggaagttatgagatccgacactatggaccagccaagtgggtcagca

SEQ ID NO: 323932 - DNA, 97 bp, Homo sapiens
ggagcctctccgcccggcagccaccccatctgggaacctttctgaagggcctgagtgacaagcagcgggaggaacattacttctgcaaggactttgt

SEQ ID NO: 323933 - DNA, 75 bp, Homo sapiens
tgctaatccagtatttgcggatagctccaaactgggatatctccagtgatccacaagctcagaaatacatcgcgg

SEQ ID NO: 323934 - DNA, 82 bp, Homo sapiens
gggtgagatggcagtgtgtgcaaaaaagcgccccccagagtgatgatgcgggtgtgctggttggtgagacaggacagccggc

SEQ ID NO: 323935 - DNA, 82 bp, Homo sapiens
cctgccttctgccgccggccggcgcgtcgtccccacaggtcttccccagggaggtcctgaactacacagctgagaacatctg

SEQ ID NO: 323936 - DNA, 101 bp, Homo sapiens
gccagaaagaggacatggctgctgggcagcgggaagcgaggccccagtgcctggccctgcggggagcggagcggcagaagctgatgcgagcagacctgcac

SEQ ID NO: 323937 - DNA, 87 bp, Homo sapiens
cacaaagctgcgatcacctccttggacctcagccccaacggcaagcaacttggatggttcctacctggctgagttcctgctggagaa

SEQ ID NO: 323938 - DNA, 100 bp, Homo sapiens
gaagactctgcctcctacaaatatgtatggagagtgcaatcacgctgtggcagttcctgttgcagttgctgctggatcagaaacatgagcatttgatctg

SEQ ID NO: 323939 - DNA, 83 bp, Homo sapiens
gggaggctttcagccggagaagcgagtttcagctggcggctatgagaggttttcctccgagtacccagaattctgttctaaaa

SEQ ID NO: 323940 - DNA, 100 bp, Homo sapiens
atcatcagctgatttcctatcagggcagaattccatatcctcgccctggaactagagtgaagggcgttccccaaaccacattgtagtgctgtgtcgaggc

SEQ ID NO: 323941 - DNA, 98 bp, Homo sapiens
ttcttctctttaaatatttgatgaaattcaccagtgaagccgtgacatcctgggatattctttgttgagaggttggtcaaagaaaaagtgatgtatga

SEQ ID NO: 323942 - DNA, 75 bp, Homo sapiens
cgagtatatatctgggatccacataatggagacattctgatggaatttggctaccaagtggcccatccaacagga

SEQ ID NO: 323943 - DNA, 100 bp, Homo sapiens
tcaagcatggatcggcgctggacgtgctcctctccatggggttccccagagcccgcgcgctgcctgataggggctgtaaatctcaaatccagcaatcgaa

SEQ ID NO: 323944 - DNA, 88 bp, Homo sapiens
cctgacacaaataaggatgatcccaaagccaaggagaagttctcccagctggcagaagcctatgagaatgtcaaaactggaccaatgg

SEQ ID NO: 323945 - DNA, 100 bp, Homo sapiens
aaaaatgttagagctcagttggttgatatgaaacgactggaggtgaacatacatgtcccggcacctgagctgcagtctgacatcatcgccatcacgggcc

SEQ ID NO: 323946 - DNA, 87 bp, Homo sapiens
ctatgtttccacatcggtcagaaaaagatatcgataaagaattggctagtggtgaatactttttgaaggcaaatcagaagaagcggc

SEQ ID NO: 323947 - DNA, 100 bp, Homo sapiens
ggaacgaggtgcccagctcccgtggagaaagcttaaggacaccacgccagtgctttcctgccttccttccgagtaccgtgaacaggaagctattcgcctt

SEQ ID NO: 323948 - DNA, 124 bp, Homo sapiens
ccaacggtgtgttcacccccgacttccaggagtttgtcaataaatgtaagactttgaccccgacgcaggcttcagtgattgccgcggatcagaagcctgagcactttggctcgagacaattaag

SEQ ID NO: 323949 - DNA, 101 bp, Homo sapiens
aggttctggcaaaaccagtctgttgtccaaactctgcagtgaaagccccgataacgtcgtgtcgaccacaggtgcagctaaatcaagtccagcagctaaac

SEQ ID NO: 323950 - DNA, 90 bp, Homo sapiens
gaactcgatcctgctggctgctgtctctattctctcggcctgtcagcaaaccgcttacaaacacgcagatggcaagaagattgatggcag

SEQ ID NO: 323951 - DNA, 100 bp, Homo sapiens
ctcagagcgttgcttcggtttccctccagacagttttctggatatgccgcagaaggatccgtgccagaagcaagcctgtgagatacagaaatgtttacaa

SEQ ID NO: 323952 - DNA, 100 bp, Homo sapiens
cgaaccccgcgcccgcaggacgccccagccaggtaaagtaccttttattcatgtgggaaatcaagtagtatcagaacttggtccaatagtccaatttgtt

SEQ ID NO: 323953 - DNA, 83 bp, Homo sapiens
ctgctcactgacctgctgctgtcccagaacctgctgcggaggctgcccgacggcatcggtgtttcccattaaacactaccagg

SEQ ID NO: 323954 - DNA, 75 bp, Homo sapiens
tttttgtaacgttccacggtattcggaattggctacagaacataataagtcacagcaaactgtacaatggcagtt

SEQ ID NO: 323955 - DNA, 75 bp, Homo sapiens
aaacaaacgctattcctctcacgaaatgaatggggtgctgaaaggaatgctctcagaatggttttcctccgggtt

SEQ ID NO: 323956 - DNA, 80 bp, Homo sapiens
ggcttttcggaaggcggctaagtcccggcagcgggaacacagagagcgaagccaggcgttcccacagctgtgcagaactt

SEQ ID NO: 323957 - DNA, 82 bp, Homo sapiens
ttgatatgtcaggagtgcgcctggcgcggcttccccggagcagccgacaggggtctagtggggatgagcgggcaatggctaa

SEQ ID NO: 323958 - DNA, 71 bp, Homo sapiens
ctgctccacactgccaaccggccagaggacgagtgtgccaccttctgggtgaaccctcagttcaagatccg

SEQ ID NO: 323959 - DNA, 100 bp, Homo sapiens
cctacctcccaacaccattatggaatacaaaactcacaccgacagcatcaaccattatgcagatgtagatcctgaaaaccagaactttttacttgaatcg

SEQ ID NO: 323960 - DNA, 100 bp, Homo sapiens
accgggagtgggagagattggactgggagactcagcaggccctcagatcctgatgattgcagtcttcaccctcactggagctgtggtgctgctcctgctc

SEQ ID NO: 323961 - DNA, 74 bp, Homo sapiens
tggtcgtcttcagttaatggcaagacttgcagagggggaggagtggggccagttaaaagctccccatgccaacc

SEQ ID NO: 323962 - DNA, 96 bp, Homo sapiens
ccggaggaggaggggagaggcctggaggacaccaacatgggcgccctgcgtccggcagaggaggcgagcatcccgctcaggtgatgaggaacccct

SEQ ID NO: 323963 - DNA, 98 bp, Homo sapiens
cactgcaggcactgactatcctttaccgggagatgcaccgacagtaaaatagtgagagtactaaacttatggcagaagaataatgtatttaagagtga

SEQ ID NO: 323964 - DNA, 83 bp, Homo sapiens
gtgattgtcagtttcctgaggcctccccagccacgctttctgtacagcctgcagaactgcagttgtgaaaaacttcaggacaa

SEQ ID NO: 323965 - DNA, 83 bp, Homo sapiens
gacgctgctgctgcccggcctcgggcattttgaaagcgaagcagaagccgtagaatcagcggcgagcctgttgaaagaaccca

SEQ ID NO: 323966 - DNA, 96 bp, Homo sapiens
aatcatcaccaggctgcttactggaaactggatgcagcaaggaaataggatttaaccgctctctgcctcccaggttcagattcagaacaagaaagt

SEQ ID NO: 323967 - DNA, 100 bp, Homo sapiens
ggaatttctcctggggctcagagtcaaaccagtccagctacgggggcccagccagccagcagctgagtgggggttacggaggcggctacggtggccagag

SEQ ID NO: 323968 - DNA, 98 bp, Homo sapiens
agatccggccaaggacctcagcaggcaatgagaagcacgaccttcatgttacctcccagcagggcagcagtgaaccagttgtccaagacctggcccag

SEQ ID NO: 323969 - DNA, 98 bp, Homo sapiens
cgagcggggctttggacgccggtggagacgcaggcgagttgtaatttagattcgagaagtggtttatcctttgactggaaaagaaaagtagctgcagt

SEQ ID NO: 323970 - DNA, 99 bp, Homo sapiens
acatctacaaccttcgatctcctgacgaaataactgaagtgaagtgatggactccgatttggagagtagtaagacgtgaaaggaatacacttgtgttta

SEQ ID NO: 323971 - DNA, 74 bp, Homo sapiens
cagctctctgactctggctctgctgatgaggttgatgaatttgaaatccaagatcctatagcaatggaactcag

SEQ ID NO: 323972 - DNA, 100 bp, Homo sapiens
cggggggaaaacttggaacatctccgcaacaagacagaggatctggaagccacaaaatgtgtgctatactggccggaaaagagagggatatatggaaaag

SEQ ID NO: 323973 - DNA, 101 bp, Homo sapiens
attcacttattccaaggaaagatacagctgttaaacgtttaatgaaagaagcggcagaattgaaagatccaacagatcattaccatgcgcagcctttagag

SEQ ID NO: 323974 - DNA, 100 bp, Homo sapiens
cgcgggagcagcacttccacagccaagtgcgggagtccacgaaaatgcttggacagaagagatgagtactatttccactaaggcctagaattgcctactg

SEQ ID NO: 323975 - DNA, 82 bp, Homo sapiens
cctaaagcgattcttgtataaaaagttaccaaggtgtgttgtgctctccgaccccttgaaggactcttctcgaactcaggaa

SEQ ID NO: 323976 - DNA, 75 bp, Homo sapiens
gcctttgaaaatgatatgctggctgttaacctgtaccgatgggagatgtaccaatggatggtatctctgttgctg

SEQ ID NO: 323977 - DNA, 100 bp, Homo sapiens
tgagcagctggcgcacctggtgcgggccctctggaccctggagtacaccccgcagcacagccgcgacttcaaggacccccgcagcaaacacaagtttaag

SEQ ID NO: 323978 - DNA, 95 bp, Homo sapiens
aattccagcttcacactaatgttgtgacaaacagtggcaaaacaacactggctaagaatttgcagaaacacctcccaaattgcagtgtcatatct

SEQ ID NO: 323979 - DNA, 82 bp, Homo sapiens
cgtcaacttcctcaagtcgcccaaaggcttgggcactgtttaaaggaaagttccgagaaggcatcgacaagccggaccctcc

SEQ ID NO: 323980 - DNA, 83 bp, Homo sapiens
gcagttattgccgtgtgcagtataataacctggaacagatgtaggtgcaaaaaactacagacatctctgtgctgtttattaca

SEQ ID NO: 323981 - DNA, 100 bp, Homo sapiens
ggaagttgattactcagtctctaaaaagctaagaaccccagctcaaagggattgtgacaaggttattcagccagcagggatacttcctgcagatgcaccc

SEQ ID NO: 323982 - DNA, 100 bp, Homo sapiens
tacagactcctgacagttaacaagtcaagcctgtctgaaaagcatccgcacttccactaatagccaagtagacaagctgaccctgtcagggagtgacagc

SEQ ID NO: 323983 - DNA, 100 bp, Homo sapiens
gggcaagacgggttcagttcgtcatggggctgtttggaaagacccaggagaagccgcccaaagaactgttgatgcggatgaaattaaaaggctaggaaag

SEQ ID NO: 323984 - DNA, 100 bp, Homo sapiens
cgtcactgtcggcggccatgacaccgctcgtctcccgcctgagtcgtctgtgggctttcatctgagtggcacagtaactgagctggccactgcctctgaa

SEQ ID NO: 323985 - DNA, 100 bp, Homo sapiens
acagagtgctataaaaagtatggaaaaatgtgggggtactaggttttgacaagcttgcatcatgcgtgagtataagctagtcgttcttggctcaggaggc

SEQ ID NO: 323986 - DNA, 87 bp, Homo sapiens
tggcctggaggatatttggaatagcctctcttcagtgttcacagagatgcaaccaacaggggcaagtgtccgagtggtgaatcagct

SEQ ID NO: 323987 - DNA, 98 bp, Homo sapiens
aaaagatgaaaaggaatatgcattgaagcaaattgaaggcacaggaatatccatgtcggcttgtagagagattgcaatgccttcaattaagttgcaga

SEQ ID NO: 323988 - DNA, 87 bp, Homo sapiens
caaatggcacttcattggccacctacagaaacaaaatgtcaacaaattgatgggtagatatagttgtaggtactccgggaagactag

SEQ ID NO: 323989 - DNA, 74 bp, Homo sapiens
gcgtgagtgtggtctacgagctgtttctcatctttatactcttccagtggagacctttggcgacttggcctttg

SEQ ID NO: 323990 - DNA, 73 bp, Homo sapiens
ttctgaattgtgctgccttggccaaaagaggtctgggaggggctgaacgtggtgaagacaggccgagtgatgc

SEQ ID NO: 323991 - DNA, 87 bp, Homo sapiens
ccgctcagctcgagcttccctcgtggccgacggaacaatgaaggaaacctcgacctgtctcccagttggttgcacagcaggttactc

SEQ ID NO: 323992 - DNA, 98 bp, Homo sapiens
tttgacgccctggtgaagatgggggagctggccagcgagagccagggctccaaagaactcgaggcatttcatccttcatgaagccattcaggattttg

SEQ ID NO: 323993 - DNA, 85 bp, Homo sapiens
gcttcctgggctgctgctgagtctactcaggcacagtcaggagagcaacagcctccagcaggaggagatgaccagtgccttggcc

SEQ ID NO: 323994 - DNA, 100 bp, Homo sapiens
gcagatctcttggagtgaaggctgttagtcgccgcctgcaagctttcttcctggtggcagatgacatcatggattcatcccttacccgccggggacagat

SEQ ID NO: 323995 - DNA, 100 bp, Homo sapiens
gagatgagcacgccctttacctgcgtttcctggatgctcttaaaggaatggaagttggatacactttgtgacttgtacgagacactgaccattacacagg

SEQ ID NO: 323996 - DNA, 75 bp, Homo sapiens
ctaaactggcgggctccgtggaagcgtggccggcagcgtcccggacgaggaggacgccaggaaagcatgtgcaga

SEQ ID NO: 323997 - DNA, 96 bp, Homo sapiens
cttcccccaagttatcaaatccaagggcggtgttgtgggcatcaagcctatcaagactcttccacctgctacttctaccgagccatctgtaatctt

SEQ ID NO: 323998 - DNA, 82 bp, Homo sapiens
cgtctctctgctgcggcgcggggaccgctgtgctctcgaaataaggatctggcatgtcaacacaaacataggaagttgaggc

SEQ ID NO: 323999 - DNA, 80 bp, Homo sapiens
acggaaacagagcacccaagatgaagatgctgttagcctttgcagtctcgacataagtttttctgagtttaaccagtaat

SEQ ID NO: 324000 - DNA, 98 bp, Homo sapiens
ggaaaattccaagtaaagaactgagggtcagattgtctacgaagatctacactccaggccggaaagagcaaggggagcccatgacccctcgccgcacg

SEQ ID NO: 324001 - DNA, 83 bp, Homo sapiens
gctgacccagaccgcagcccgggagcttggacggtgagaagccctaccactgcaactgggacggctgcggctggaagtttgcg

SEQ ID NO: 324002 - DNA, 102 bp, Homo sapiens
ggaccgcaggaacatccgccccaacatcatcctggtgctgacggacgaccaggatgtggagctgggaatagccaggccagaagaaggaaggcctgtggtgag

SEQ ID NO: 324003 - DNA, 100 bp, Homo sapiens
aggcggctaaggaaaggtgccacagcagagacgcgaaggagaggccctagaaccgtagttctcactggaattggtgcagatgagcaacttgcaggttatt

SEQ ID NO: 324004 - DNA, 75 bp, Homo sapiens
aacctagctgatgataggggggttccatctcccaacttgtccatatcatcaatgctgtggtactgttgattttat

SEQ ID NO: 324005 - DNA, 75 bp, Homo sapiens
aacgccgcgctgcgcatctccaacagcgacctgagcgatcaggatcctcatgaccagccaaagagaagaagaatt

SEQ ID NO: 324006 - DNA, 74 bp, Homo sapiens
gcaatttctacagaaacaagtaataaacagccattggactcttcaaacaaaaacgctgtctccatcaagtactg

SEQ ID NO: 324007 - DNA, 75 bp, Homo sapiens
tgagcgagccttcacctacagcatcgtgggcgccggctcccagtttgggaggaggcctcggtggtaccagaagag

SEQ ID NO: 324008 - DNA, 75 bp, Homo sapiens
tggtgtggaaggaggggcggcagcttctccgacaattcatgatgttgctatcaaaagttgagaaattgtcagaag

SEQ ID NO: 324009 - DNA, 100 bp, Homo sapiens
tggcggagaacagcggtcgcgccggcaagagcagcgggagcggcgcggggaagggggcggtgtccgcagagcaggaggacgaatccatgaaccaaccagg

SEQ ID NO: 324010 - DNA, 82 bp, Homo sapiens
cgcggacatcgtctcctgtgtggcgatggtcttcctgctggggctcatgtttgaggagcattggtttgaaaaggccctacga

SEQ ID NO: 324011 - DNA, 100 bp, Homo sapiens
gctgaatgaatgtatttcaccagtagcaaatgagatgaaccatcttcctgcacacagccacgatttgcaaagaagtcaatgaaaggattctattttgcaa

SEQ ID NO: 324012 - DNA, 51 bp, Homo sapiens
tatcttcccatcataaaaaagacactgcccatctctaagataagaacctgg

SEQ ID NO: 324013 - DNA, 75 bp, Homo sapiens
gctgtgccgcaccgaggcgagcaggagcagggaacaggagagcttgtttcatatccatatcccactgtattcctg

SEQ ID NO: 324014 - DNA, 75 bp, Homo sapiens
ccctccagtcagtactgattgaattactcaaggctgcctctctgcaaagttgagctttctgagaccaagatcttc

SEQ ID NO: 324015 - DNA, 88 bp, Homo sapiens
aaggaactggcacctggagtccagacatctgaaacttgccggaagaattaacctcgagtctgcacgcttttaagaacaaggcctttaa

SEQ ID NO: 324016 - DNA, 75 bp, Homo sapiens
gtttttgcagcctgggaaccctggtggcaggtatgatctcgtgaaatcttgagagaaactgaatgacgaatgaaa

SEQ ID NO: 324017 - DNA, 100 bp, Homo sapiens
ttcgagtgaccattccaacagatttgattgcctccagtggagatatcatcaaggaagacctccgtgtggatggccgtggctgtgaggactaccgatgtgt

SEQ ID NO: 324018 - DNA, 75 bp, Homo sapiens
tgattgtaggtggtgtccagctccagactgtgggatgaagatgagctggattcccacaccatggtgaagactagt

SEQ ID NO: 324019 - DNA, 89 bp, Homo sapiens
aaacacaagaagaaacgcctggtgcagagccccaattcctacttcatggatgtgaaatgcccagtttctgatgaagaattgaaaagaag

SEQ ID NO: 324020 - DNA, 50 bp, Homo sapiens
ggcctgacgtgggcatcattttaacagatggagtttcacttctgttgccc

SEQ ID NO: 324021 - DNA, 51 bp, Homo sapiens
gaggaaggagagaaaatggcgtccacggaaggagctggcaaacagccctga

SEQ ID NO: 324022 - DNA, 100 bp, Homo sapiens
aaccgtgtgtacttatcctggatgatgccaccagtgccctggatgcaaacagccagttacaggtgtaaggtatgcccactgacctttttcaccaagtcag

SEQ ID NO: 324023 - DNA, 88 bp, Homo sapiens
gcctatgtattccctggggatggcgcatcacacaccaaagttggctggggaacagaccagggaattggtggatttggagaagagccgg

SEQ ID NO: 324024 - DNA, 51 bp, Homo sapiens
gaaggacagcctcttctcaatgatgaagttggagcccttgtttttgacatt

SEQ ID NO: 324025 - DNA, 83 bp, Homo sapiens
cgtgggctcgctcttcgacgacagccaaatctcctcagccacctgttgaagaagaagatgaacacttcgatgacacagtggtt

SEQ ID NO: 324026 - DNA, 75 bp, Homo sapiens
gacatagttcctggtgatattgtagaaattgctgcggaaagaacacccggaaatgaaaggccaccaagaagaaag

SEQ ID NO: 324027 - DNA, 75 bp, Homo sapiens
ttcctcggtgggggcttagcgcactggaggagcggcgggcttcagacagcatgttttagaggttcgtcctctaaa

SEQ ID NO: 324028 - DNA, 75 bp, Homo sapiens
ggattatcttacgtagataagacactgcaacagttcatcatgcctagtggcgtataagaagaccccgccaccggt

SEQ ID NO: 324029 - DNA, 100 bp, Homo sapiens
ggaggagtacctcggccaagaaaattatgcatgcgttagggaagctctgagagaatggctgtggaaggctttgaaccattctgtggaagatattgagcca

SEQ ID NO: 324030 - DNA, 106 bp, Homo sapiens
gttagtcgcagacatggacaccaaacatttcctgccgctcggtactccaaagattcaggtttactcacgtcatccagcagagaatggaaagtcaaatttcctgaat

SEQ ID NO: 324031 - DNA, 95 bp, Homo sapiens
agcgggagccgtccggaggacctgggacaccgcggaagtcgggaaatgtggaagagaaagccaatacccacctcctcttgggcatgtgcttagac

SEQ ID NO: 324032 - DNA, 90 bp, Homo sapiens
agaggtgcggcgaaggaggcagaggcacttatgcttgtcaggtctagcacataccgctccaagggctttgacgtcacagtgaagtacaca

SEQ ID NO: 324033 - DNA, 98 bp, Homo sapiens
agtggtgatgcaagaagtttctaggaaaggccggacaccagctgctgaaatgggttgcggattgaacaagttagagaaacgtgatgaaaaacggcctg

SEQ ID NO: 324034 - DNA, 75 bp, Homo sapiens
cagtgttcaccatcctggccccggaaggttttctgtctcaactggtctctgacaagcctctgactgaatgtatcc

SEQ ID NO: 324035 - DNA, 76 bp, Homo sapiens
cctttgggcttctatccgcagagaggtgctggacgtcattgctcctccttatacctctgacttcgtgcaacttttc

SEQ ID NO: 324036 - DNA, 90 bp, Homo sapiens
aagcaattatgaaagaagtcattccttttttgaaggaattctcacactcaagaaagcaaatgaacttcttctgagcacaggcatgcccgg

SEQ ID NO: 324037 - DNA, 83 bp, Homo sapiens
actgccaaaggttctaccaaaactgcccaagttcaaaagaatgctgaaccgggagctgacacacctctcagagatgagccgat

SEQ ID NO: 324038 - DNA, 75 bp, Homo sapiens
ccagtccaagctgcctggagtcaaggaagcttttcctccgcaaccatgtctgacaaacccgatatggctgagatc

SEQ ID NO: 324039 - DNA, 80 bp, Homo sapiens
gctactcctgcccagcgtggtggggcagcagaagctccagagcccagacttgcaggttcttagactctgtgagtaaagac

SEQ ID NO: 324040 - DNA, 100 bp, Homo sapiens
ttttgaacggcttacgaaaatttgtgcaacacatcaagataatctatgccagcaattatgacaatgttagcagaccatgcagctcgtcagctgcttgatt

SEQ ID NO: 324041 - DNA, 100 bp, Homo sapiens
atatattctcctacatgggaaccaaagataaaagggctataacagttcaagaaattgctgttctcaaaaatttacagcaacaatgtcaacaccagataag

SEQ ID NO: 324042 - DNA, 51 bp, Homo sapiens
ggcttccccagccatgtggaaatacagctgattttacttctagagttatat

SEQ ID NO: 324043 - DNA, 88 bp, Homo sapiens
cagtaccaagacccgacacaaggcagcttcccacagcaggttggacagttcacagcttattgcaggagtgaccaggacactacctcct

SEQ ID NO: 324044 - DNA, 126 bp, Homo sapiens
tttgaacgagctacatcatttgaggaatcagaacgcaagcaaaatgcgttaggaaaatgtgatgcatgtctcagtggtaaagaattctccggaaatcctatcaaggtctcatttgctactcgccgg

SEQ ID NO: 324045 - DNA, 100 bp, Homo sapiens
aaaatcagaggagctggtggatcacttcctgcccatgacggaggaagagctcgcatcttctctttctgaagaattgaaacattttgcagacggactggaa

SEQ ID NO: 324046 - DNA, 100 bp, Homo sapiens
ggcctcgcccctggctacacctaccagttccccggaagtgagctcacaatgactcaagctgccacatagtgttgattgtgaaatgccagttgaagcatat

SEQ ID NO: 324047 - DNA, 74 bp, Homo sapiens
taagatgatgtttgagaaaggtgaaccaactcaaactaagggcttccgagtggacctgccaatcaagtcggccc

SEQ ID NO: 324048 - DNA, 89 bp, Homo sapiens
cccggaagctggtggaacagctacgcatagaagccgggattgagcgcatcaaggcctgacgcgtctcctccatccgcacctggagtcag

SEQ ID NO: 324049 - DNA, 100 bp, Homo sapiens
caagtttcatgttcacgagagcaaacctcatgccaatgcagtttctgggtccacttccaaagggtgtaggccctgcttccgtgatggttgggaatctggt

SEQ ID NO: 324050 - DNA, 82 bp, Homo sapiens
caacgacgttccatctgtggaaggacctaccaaccagttttctttttaaaagcggaaggagagttttacatggaagtggctt

SEQ ID NO: 324051 - DNA, 75 bp, Homo sapiens
tgtcattatgacaggggtcatgacagatgaggcagagcccagcaagcttctaccctcctcatctttggaagttgt

SEQ ID NO: 324052 - DNA, 100 bp, Homo sapiens
ggctgcgggaagacgtcgctgctgatggtcttcgccgatggggccttccccgaggccaaaattgtgcgcaatgccaaggacacagcacacacacgggctg

SEQ ID NO: 324053 - DNA, 82 bp, Homo sapiens
gacaccagctccgaaatcaccaccaaggactgcctccgggcctgccaggagcagatcgaagccctgctggagtcaagcctgc

SEQ ID NO: 324054 - DNA, 75 bp, Homo sapiens
cctttgaaaatcaacgacaacttgagcacaggaggattccctgggagcacccaccagctgagatctgcacatcag

SEQ ID NO: 324055 - DNA, 112 bp, Homo sapiens
cgaccgcaacacgtgcgctggataaacgcttgttaactgggttcgagaacttgtcttggacaattgcaaatcaaatgatggaaaaattgagggcttaacagctgaatttgtg

SEQ ID NO: 324056 - DNA, 100 bp, Homo sapiens
ctgcaagcacgcttcccgatgccacgttacatcaacacggagcatggaggcagtcaggagcacgtgcgaaaggtcttccagaagcaggcaagcatggagg

SEQ ID NO: 324057 - DNA, 96 bp, Homo sapiens
gtggctggtgcccatcgggcgctgcatgtgcaaagcaggcttcgaggccgttgagaatggcaccgtctgccgaggcgcggatcaagaagatcatgc

SEQ ID NO: 324058 - DNA, 73 bp, Homo sapiens
ctacaacccgaccaccggagaattcctggggcgcaccgccaagagctgggcggctatgtgactacgtttgtga

SEQ ID NO: 324059 - DNA, 83 bp, Homo sapiens
gcacgcagaaggtttgaggagcattgcttctcatacagtaagttgaccaagctgcaccagttggcaatgcaacagtctcattt

SEQ ID NO: 324060 - DNA, 82 bp, Homo sapiens
ccaccgtcttcgaccactacgcagatgagcgtgaagccgtgcagaagaagaccttcaccaagtgggtcaattcccaccttgc

SEQ ID NO: 324061 - DNA, 100 bp, Homo sapiens
ggtgtttcaaagggtggtgaagaactaagcaggaacgaatgcaggaatttgggaactgagctgtgcaagtgctgaagaaggagatttgtttggaggaaac

SEQ ID NO: 324062 - DNA, 100 bp, Homo sapiens
ttttggatttctttttaataatgtgtgacccttcacctttgatcccctgacctgcattaccttgaatgctatgctggactttgtgttcacagtagatgac

SEQ ID NO: 324063 - DNA, 75 bp, Homo sapiens
agctgaacagggatctccacggatgggaaagggctccttcaagtatgcctgggtcttggataaactgaaagctga

SEQ ID NO: 324064 - DNA, 75 bp, Homo sapiens
ctccaacatgctggatgtcaacggcctctacctacaacggccagagcgagaacaacgaagactatgagatccccc

SEQ ID NO: 324065 - DNA, 74 bp, Homo sapiens
gtatttggtatctcttgctatcgacaaattgaagccaagatgtcaccacagtggatcccaaatacaattattca

SEQ ID NO: 324066 - DNA, 73 bp, Homo sapiens
aaggaaaaaggaaactgatttgccgcagggccgtaggcagccatggcgcccagccggaatggcatggtcttga

SEQ ID NO: 324067 - DNA, 90 bp, Homo sapiens
aaagaatgtgaaattgactaaatacatggaagatgagaagtttttgtctgaagtttttgcacaattaacagatgaggctacagatgatga

SEQ ID NO: 324068 - DNA, 100 bp, Homo sapiens
cgtgctctcgccccaacccgcgcgccagaagccgtcagacgttgaaagtcagagagcatagtgtgttgggaccttatgtcgacggactttctaaactggc

SEQ ID NO: 324069 - DNA, 100 bp, Homo sapiens
gacagtccctggatcaccgacagcacagacagaatccctgctaccagttgacctgacagttcaagaaaaggagaaatatcttaatgtgtctcgctggttt

SEQ ID NO: 324070 - DNA, 83 bp, Homo sapiens
accctcgctccctctgctcttcctcccttcgctcgcaccatgaatcatgggtgagagctggcatggcccctagaggtcatttg

SEQ ID NO: 324071 - DNA, 50 bp, Homo sapiens
aaagggaacgttggatagaacacttgcagaagcaagagggtgcagtgaat

SEQ ID NO: 324072 - DNA, 83 bp, Homo sapiens
gtcgcctggtgcctcccgcctccgtgtgccctggttgtgagaagacgtctgtgtcgtgcgtgtttcctgaggttataggcggg

SEQ ID NO: 324073 - DNA, 100 bp, Homo sapiens
tgcaagatttgctgggtatgaataatgactttcctccaagagcacattgcctggtaagatggtgcaaattgagcatgacccagaattagaaaaagaaagg

SEQ ID NO: 324074 - DNA, 51 bp, Homo sapiens
tgactcagctttactgtgatggggtggcaaactaggcgtggcaactgctgg

SEQ ID NO: 324075 - DNA, 73 bp, Homo sapiens
atatggaaaacatatattggagctacatggatgttgggggccgtcccgctcctaaggcaggaagatggtggcc

SEQ ID NO: 324076 - DNA, 117 bp, Homo sapiens
gcctgaaaggatttcaggggagcagtatggaattcattctgatgtctggagcttaggaatctcttttatggaggatgctgacagacagcaccaagaagtaattgcaatttatcggac

SEQ ID NO: 324077 - DNA, 83 bp, Homo sapiens
aaaggaaaatatcccaaggactaatctgatcgggtcttccttcatgtcagcccaaggccaaccccactgtcactctgttcccg

SEQ ID NO: 324078 - DNA, 75 bp, Homo sapiens
gctttagtgaaatgggctaataatgctggcaaagtggaaaaatgtgcgtctgggttctgcccgcacacattcctc

SEQ ID NO: 324079 - DNA, 96 bp, Homo sapiens
tataggaacctggtctccctgggtcttgtggatgagcagcagaaagttcggaccatcagtgctttggccattgctgccttggctgaagcagcaact

SEQ ID NO: 324080 - DNA, 106 bp, Homo sapiens
gcggagtagagcggagcctggcgggcgtgggaacccaggccccgccgaggcggccaggttttaaaatcaaagatgggaaaatcggagaaaattgcccttccccatg

SEQ ID NO: 324081 - DNA, 75 bp, Homo sapiens
ggaggaggaagaggcggcggcggcggcgattgggtaccgagccggcacagtcttcactaccgtagaagaccttgg

SEQ ID NO: 324082 - DNA, 128 bp, Homo sapiens
ctcggaggaatctcagtagggacaacaggcaggagaattatgggagcgcatttccccagggtgtatcagttcctatccctgtgattggactgagggacgaagaaaaggtgttcgtgaacaacacgacg

SEQ ID NO: 324083 - DNA, 83 bp, Homo sapiens
cgcctcccggccgagctgacgttggctggggaacagaccagggaattggtggatttggagaagagccgggaattaaatcacag

SEQ ID NO: 324084 - DNA, 75 bp, Homo sapiens
cgaaggactctatccaacctattatatcctactttggggataaaggattatttggtcttctggatttggaggcaa

SEQ ID NO: 324085 - DNA, 50 bp, Homo sapiens
ctttgacaatacaggaaatgttttctgaacagcagaagaagcaacaggag

SEQ ID NO: 324086 - DNA, 90 bp, Homo sapiens
aagataatgatgtccaggccctgaacaagttgctcaagtatgaggattgcaaggtgcaccagagagtttcttccttcaaagaagcagtat

SEQ ID NO: 324087 - DNA, 90 bp, Homo sapiens
caagaattacagcagccaacctatgttgccctgagttacataaataggtgtctgaatctccctggctccatgccccatctctgaagacca

SEQ ID NO: 324088 - DNA, 51 bp, Homo sapiens
aacacgttctgattaaccaaggggtgtactctgtgtgaccgcgcctatccc

SEQ ID NO: 324089 - DNA, 87 bp, Homo sapiens
ctgccgtgaataggcagcctaaaggtcgcacggggcaggcggttgcagttcgagccaaggcctttggattcagcgtcatattttatg

SEQ ID NO: 324090 - DNA, 75 bp, Homo sapiens
gtctgagactcctgctcagtgtagcattaagggctattgagtggccagacttccccaacaaatgccaaattggag

SEQ ID NO: 324091 - DNA, 75 bp, Homo sapiens
cgcagtggtcgcttcttctccttggaccgtatccttgatgagcttgacaaagacgatagtacccatgagtctctg

SEQ ID NO: 324092 - DNA, 100 bp, Homo sapiens
cgaaaaaggtgttgaaatagagggaccattgtctacagagaccaactgggatattgcccacatgatcagatgatgaaacatgcttgggataactatagga

SEQ ID NO: 324093 - DNA, 87 bp, Homo sapiens
ggtcacggcccccagcgcagcctgcatgttccagttgtgggttggagagaggatgcctttggcaacttccacggatcatggccacaa

SEQ ID NO: 324094 - DNA, 50 bp, Homo sapiens
gcaggtcgaattgttcgtgaaggaaacattggcaaatttggagcgacaga

SEQ ID NO: 324095 - DNA, 100 bp, Homo sapiens
gagggactgcgccgcccggacggcctgcagagcgctgccatcatgagcactgatagccattgggcgatacagcatgacaatagagactgtggatgtcgga

SEQ ID NO: 324096 - DNA, 96 bp, Homo sapiens
acctcacctatccatctccctcaaggcagcttttggtgaaaggtgtagcagtcactcggcctacacccacagcatcgaccttgtgaacccagcgac

SEQ ID NO: 324097 - DNA, 75 bp, Homo sapiens
aacatctcttcccagcggctcaggagatcctgctgggccgtggcttcaccttttggcagtggtttgatggtgtcc

SEQ ID NO: 324098 - DNA, 100 bp, Homo sapiens
aggaagctaaggccgcgttggggtgagaccctcacttcatccggcaaacatcctgggtctcgccgccggccagcgctgtggcgcctcctgaccgtcgtct

SEQ ID NO: 324099 - DNA, 96 bp, Homo sapiens
ggaggatgggctgcagacacagcaggctgagcagctgcaaacccccgaaaaaggtgaagaacgaggtggagaagctcccccgacagcagcggaagg

SEQ ID NO: 324100 - DNA, 75 bp, Homo sapiens
agctcagggctcccacggattctacattatggtaatagcctgcagctggtgttttgagaagccctactgctgaaa

SEQ ID NO: 324101 - DNA, 100 bp, Homo sapiens
gagtccaacttgcctggaccagcttaatggttctgcatcatggcagaacaggatgtggaaaacgatcttttggattacgatgaagaggaagagccccagg

SEQ ID NO: 324102 - DNA, 50 bp, Homo sapiens
attagaccacctcaacttgaacaaccaggatttgtacacacagatatgac

SEQ ID NO: 324103 - DNA, 80 bp, Homo sapiens
tgacttttcttatgctgggatgtgccttagaggattatgggaattgaatgatctggcacgggaccctccagcacagtgtt

SEQ ID NO: 324104 - DNA, 100 bp, Homo sapiens
aacgagtggcctccattgtagacgaacacacgaggagatgccacagagcatcgtggaggccacctctaggcttaagaccttcaacttgatcccggctgtt

SEQ ID NO: 324105 - DNA, 88 bp, Homo sapiens
cacaaagaagtcacagaacaactgcagtttcttgcagaacataaattattaggaaacattaaaaatgtggccaagacagctaacaagg

SEQ ID NO: 324106 - DNA, 101 bp, Homo sapiens
gttcgttggaagcaaaaaaagcccagtggaggaaagagctaggaggtgtgattgcctatatcagttcttccagctcagcctcaagccctgcctcttgtcac

SEQ ID NO: 324107 - DNA, 75 bp, Homo sapiens
ttctgcagctgaggctgcggcggggccggggctggggtcggggccagaggcggggtttcaccatgttgcccagac

SEQ ID NO: 324108 - DNA, 99 bp, Homo sapiens
ggcagctgctccacctgaaggaccagtgtctgatcagctgctgcgtgctcagccccagagcagtgcaggtcgtaatctgaaggagtggctgagggagca

SEQ ID NO: 324109 - DNA, 100 bp, Homo sapiens
aacaatcttgaatcatgaagctactaaccagagccggctctttctcgagtacccaaaggcaagtggaacagctctaatggggttgaagaaaaggagactt

SEQ ID NO: 324110 - DNA, 90 bp, Homo sapiens
tttttccagtacacagccccaaaacagcctaagaaaggccagggaacggcagcaacaggggaaaggccatacaaatgtcagacctgcgag

SEQ ID NO: 324111 - DNA, 76 bp, Homo sapiens
cgccgctgctacctgcagcgccgtgtggcacgacacaaaaatcagcttttatgacaagaagacagcaattcacaaa

SEQ ID NO: 324112 - DNA, 100 bp, Homo sapiens
ggctctgactctggaggaggagctgcaggaagcgatccggagggcgcaggacctgaaggagaagaaggagaaggtggaggagaaggcaagccggaaagag

SEQ ID NO: 324113 - DNA, 83 bp, Homo sapiens
ggcatacacaagtgtgcattaatgggaaaacatccagtacagacctttctgatatccctgctctccctgcaaatcctattcct

SEQ ID NO: 324114 - DNA, 99 bp, Homo sapiens
tcccgacacctgtcctcatctggaacaaggtgtttaatcaggaaggagaattcatgttgaagtttggctcaaatggagaaggaaatgggcagtttaatg

SEQ ID NO: 324115 - DNA, 100 bp, Homo sapiens
aatcctcactctgagtacggtctcacagacaacgttgaggtataatgggtctctcccaaatggcgatagaggaaggaggaaaagtaggtttgctttgttt

SEQ ID NO: 324116 - DNA, 98 bp, Homo sapiens
cgtgcctggttacagctgtttccacgtgcggtgctcgtcgggagtgatcacctaccctacagcttcctgcctgacacagctcacttcaagaagtgcac

SEQ ID NO: 324117 - DNA, 101 bp, Homo sapiens
attttgagaggttggtaaaaggagattggaaaccagaaggtgatgaatggctgaagatgtcatagttgcaaaagcttctcatttcagagagatgccaggat

SEQ ID NO: 324118 - DNA, 100 bp, Homo sapiens
gtccaagaggaggaggaggcggaggtccaagcggaaagcctgcgtatcagaatctgagacagcgtgttgacaactttgttgcaaatcacttggcaactca

SEQ ID NO: 324119 - DNA, 75 bp, Homo sapiens
aacaacatcatgcagtggaatgcagttatatttgggtcagtttaggggctggtgcaaaggatgagttgcacattg

SEQ ID NO: 324120 - DNA, 100 bp, Homo sapiens
gcaggcaccaagagagtggacgcacatacagaagacagccatgcactgagctggggacatgcaacaataacaggttgaatcgctcctagctgacccctca

SEQ ID NO: 324121 - DNA, 73 bp, Homo sapiens
ttcttccttgaagaaatacagcttggtgaagagttactagctcaaggcccagaccttctctttccctttccag

SEQ ID NO: 324122 - DNA, 100 bp, Homo sapiens
gaccggccacctccatcactggcgtcaccatgggggctgtgctgggtgtcttctccctcgccagctggtgattcgcctttgccagtctcatctcgtgtct

SEQ ID NO: 324123 - DNA, 101 bp, Homo sapiens
gagcttacccagcttaaagagctccacattcaggggaaccgcctcaccgttctgcccccagaactagatcctgggcatggccttctccatgaccctcttcc

SEQ ID NO: 324124 - DNA, 51 bp, Homo sapiens
gggcacggccctgctgctctggaacaaggccaaccccagtgctgatctcta

SEQ ID NO: 324125 - DNA, 100 bp, Homo sapiens
atgatttgaagatattagcctaacaagatggaagcaggtttaaaattttacataagaagttacctttttcagtataaatcaaagccattctgtgaaaaac

SEQ ID NO: 324126 - DNA, 90 bp, Homo sapiens
gcgcggcgcggcggccgggccctcgagacggggacgggagtaccctgacttctaccggaagctctacggcctcttggacccctctgtctt

SEQ ID NO: 324127 - DNA, 75 bp, Homo sapiens
gtgggtgcaagatgccgctgccggttcaggtgtttaacttgcagatccctgtgttccagcgtggagggacaatcg

SEQ ID NO: 324128 - DNA, 84 bp, Homo sapiens
cttcccacggagcagcactcttcaccctgcacagccttgttaggttttgatgaacacctggctttattcttgcaatgaagaaag

SEQ ID NO: 324129 - DNA, 100 bp, Homo sapiens
agaacgtcaacaccaagtgcatcaccatccccagctcacaggaagtaaaagagcacagctttttcaaaggtgttgactggcagcatgtctacttacaaaa

SEQ ID NO: 324130 - DNA, 90 bp, Homo sapiens
aatctgatattgcaccttcacagcaacaagggcagagcggcttgggtaaatccaccttaatcaacaccctcttcaaatccaaaatcagcc

SEQ ID NO: 324131 - DNA, 90 bp, Homo sapiens
gttccactgtgtgtcagctacaaggtcgaagtggttctggaaactttggtggtggtcgtggaggtggtttcggtgggaatgacaacttcg

SEQ ID NO: 324132 - DNA, 83 bp, Homo sapiens
ctgtgctcgcgctactctctctttctggcctggaggctatccagctagccacgatggaggtgatgaacctgatggagcagcct

SEQ ID NO: 324133 - DNA, 100 bp, Homo sapiens
cccaacagctccagctccgggtgcagggaaaggagaaacaccagacactggaagtctcactgtctcgagcacagttggcgggcagctcccaggtctccat

SEQ ID NO: 324134 - DNA, 89 bp, Homo sapiens
ctagaggtggagagagtggtactgggggagtggtgaagcaggttacagtgtacagcatgtatgtttctataatggctttcaatgcaaag

SEQ ID NO: 324135 - DNA, 50 bp, Homo sapiens
gtgaatccactaggaatgtcattgaatgccggaaggtccttctgaatccc

SEQ ID NO: 324136 - DNA, 96 bp, Homo sapiens
agccggggcctttttgacagcttccgccgggactgcctggccgacgtggacaccaaggatctcaaagatttcatgagacaagctggggaagtaacg

SEQ ID NO: 324137 - DNA, 50 bp, Homo sapiens
tctggaggcagtatcacctaacgctcgatcaagtcatccgccaaagaagc

SEQ ID NO: 324138 - DNA, 96 bp, Homo sapiens
gtggacagcaacatttcccacaggacacgaagtttgtcggcccttgccttggcagagctgaggccgccatggcatcagatgaaggcaaactttttg

SEQ ID NO: 324139 - DNA, 80 bp, Homo sapiens
ggaagcagccgatccagcctgcggagcctgtggggcagggtttggtgcaattctccattaatgaagataacatttgaatt

SEQ ID NO: 324140 - DNA, 75 bp, Homo sapiens
gaaatccccactcctccaagaaccaacccccaaattggctgggacagaaaagcacttggttctgcttcgagatgg

SEQ ID NO: 324141 - DNA, 50 bp, Homo sapiens
ttctaagtctcctaaaggatgtggtcctaggcctacttacaagcctccag

SEQ ID NO: 324142 - DNA, 100 bp, Homo sapiens
acatgccctttatgaagatattcttgaggttgcagcatgagaaagccgaactagaacagcatcttgaacaagagcaggaatttcaggtcaacaaactgat

SEQ ID NO: 324143 - DNA, 87 bp, Homo sapiens
acaggacagcttgggagcgtgcttcaaggatgcagagtatattccttcagtgatccttaaagagtggtctgcctataaagggaagtc

SEQ ID NO: 324144 - DNA, 73 bp, Homo sapiens
gtggcagccctgcatggagcaagtctgtcagcaccatctttctaacattttcggctttgtgagaaaccttacc

SEQ ID NO: 324145 - DNA, 98 bp, Homo sapiens
cactttgtggagaaagtcgtcttccacttgcacgaaagctttcctaggccaaaaagaggaaactactaaagttcctggggaagcaaagtagaatttca

SEQ ID NO: 324146 - DNA, 100 bp, Homo sapiens
cattgaggactttccttacctgtttttccagctcacccactgccagcagaggttcgagaacttgtcttggacaattgcaaatcaaatgatggaaaaattg

SEQ ID NO: 324147 - DNA, 102 bp, Homo sapiens
actgtgtccaggaccgacagcccctccaagatcatcaaactagacaccgtgcgggtgattgcagaaaaaatccacatctcaaagaagtggggcttcaccaag

SEQ ID NO: 324148 - DNA, 100 bp, Homo sapiens
caccgtcatcaacgggcagtttgtcgaacgatgttggactcatagtcactgccagaaagcagagcatcctggccagaacaagccaaggagccaagacgag

SEQ ID NO: 324149 - DNA, 100 bp, Homo sapiens
gttcccccagctctgggtacccggctctgcatcgcgtcgccatgatgggccatcgtccagtgctcgtgctcaggacaagaatccttcaagaaacaggaaa

SEQ ID NO: 324150 - DNA, 100 bp, Homo sapiens
gtggccgaggcccacctgctgacatctacctgccaggacgagattgaggagctgcgggccgagatgctggagatgcgggacgtctatatggaggaggacg

SEQ ID NO: 324151 - DNA, 51 bp, Homo sapiens
attggagccaagaaatgagtataggtcaaaaggctgagtttcaaattctgg

SEQ ID NO: 324152 - DNA, 80 bp, Homo sapiens
ctggagcctcagttggaagcagccgatccagcctgcggagcctgtggggcaggatcgccccaggacattcgacatgcact

SEQ ID NO: 324153 - DNA, 75 bp, Homo sapiens
aggatatgtgccccaggaggaggtcccagtgtgttggagagcacaatggctgaacaagtccttcctcaggctttg

SEQ ID NO: 324154 - DNA, 76 bp, Homo sapiens
ccacctcatctttgacatggacggacttcttctgggtcccaggtgtgacaccttcagcaggtctcagggaagatgg

SEQ ID NO: 324155 - DNA, 75 bp, Homo sapiens
aggccctggacacagcaatatctctgggctttcacagaaaatgatgcatcctgttgccagcagtaatccagcttt

SEQ ID NO: 324156 - DNA, 100 bp, Homo sapiens
ggaaggacagcattggatttagcagatccatctgccaaagcagtgcttactgtgggttgtcttctggcctcagagtatcccttatcagaaccttgggccc

SEQ ID NO: 324157 - DNA, 100 bp, Homo sapiens
tctgcttgcctcagcttgtaaggtaatctcagccaggaaaggagagtttgaaactggatttgaaaaaggaggacagacaagagaacatgcaatgttggca

SEQ ID NO: 324158 - DNA, 97 bp, Homo sapiens
gtgaaactggcctcccaagccctgataagaatttttgagagatatcttcaatctcctgtttttgttgccaagtctaaaggaccgacaacagccaaag

SEQ ID NO: 324159 - DNA, 83 bp, Homo sapiens
cctgccggcctccaggtgctcaacgattacctggcggacaagagctacatcgagggatgttcccacaagcctgcatttccaga

SEQ ID NO: 324160 - DNA, 75 bp, Homo sapiens
gggccgggcagaattgggctccagcccggtcctttggagtagaatggattgcaagttggctagtggtcacggtgc

SEQ ID NO: 324161 - DNA, 80 bp, Homo sapiens
aatatttaagaaagaagatgttaactttcaggtggtggaggtggatacagcagtcggagaacatctggcagagacaaata

SEQ ID NO: 324162 - DNA, 83 bp, Homo sapiens
gccggcctgggcaggtgtcttcctcgagaggcaggcaggggatcccggaccacctgtgattacagaggaaaccacccttcaac

SEQ ID NO: 324163 - DNA, 75 bp, Homo sapiens
acttcagcattgtcaagattgaaagttccgatgaagttaaattccgtcaagatttaatgaatattgcgggcacaa

SEQ ID NO: 324164 - DNA, 113 bp, Homo sapiens
cgaggatatcagggcagccctggaggcttactgcaagaagtatgagcagctcaagctggtaggtgagtgctgtcctcggctcactttcctcaagctctccggctgccacggtg

SEQ ID NO: 324165 - DNA, 100 bp, Homo sapiens
ctctgaggcgctatggggcggtggaggagacggcttggaaaacggagagactggggagaactgagatctgtatctgtggacctgaatgttgatccctcgc

SEQ ID NO: 324166 - DNA, 73 bp, Homo sapiens
gaagaacagctcgagagagcattacaagccagcctctgggaccgaggattctgagaaacgaacccctcttcat

SEQ ID NO: 324167 - DNA, 82 bp, Homo sapiens
gcgctgagaacaggaccccccgcccccgagaaacaattgcagcacttacagacataaccaacttgaaccatctggaatctga

SEQ ID NO: 324168 - DNA, 80 bp, Homo sapiens
aagttgaagaaagtgaacaaaaagctgcagagttttcaaagaagatccataatgagatggcatcaacatcagataaaggt

SEQ ID NO: 324169 - DNA, 100 bp, Homo sapiens
ggtctccatggtgagtttggtctccctggtcctgctggtccaagaattactgaagatttcattgctacatatcaggccaattatggcttctctaacgatg

SEQ ID NO: 324170 - DNA, 49 bp, Homo sapiens
ccggggtcagacgcccactccaggagctgacatggacccaaatcctcgg

SEQ ID NO: 324171 - DNA, 83 bp, Homo sapiens
caccagctcccgggacccgctcagcgatacacgatgaggcgagtggtacgacagagcaagtttcggcatgtatttgggcaagc

SEQ ID NO: 324172 - DNA, 97 bp, Homo sapiens
gtcagctcagtgctgtgcgggccaggcctgtctacaagtcattttgcttgggcatttcactcagtagcagaagaagaactgctgaacatgttgccag

SEQ ID NO: 324173 - DNA, 50 bp, Homo sapiens
aggtctctggagacatcttcagcaggatttaagaggggtgcagatcccgg

SEQ ID NO: 324174 - DNA, 100 bp, Homo sapiens
gctgtcgctggggacgtgcctgggcctggcctgatgagccctcgctgtgctaatctggccctcaagcactacctgctcaagccggttcagaggatccccc

SEQ ID NO: 324175 - DNA, 100 bp, Homo sapiens
cttcaggctcctctctttactgctgaagctttacttcgagctcatgaaacattgctgaggctcttgtcagcaaaggtctagccacagtgatcagataccg

SEQ ID NO: 324176 - DNA, 83 bp, Homo sapiens
cgcagaaagcaggcgaacccgcggcgcaataacggtgcgggcggcacccagagactcacccgtgctgttgggaagtcgctggc

SEQ ID NO: 324177 - DNA, 51 bp, Homo sapiens
cccgtggaagaagtcaggactgtgatcagagcagcccgacggccatggagg

SEQ ID NO: 324178 - DNA, 90 bp, Homo sapiens
atgaagctctcgaggctgctaagagactaaatatgtgtcacaaagatgtctacacggaactgccagggaatggactcagtgatcaaaccc

SEQ ID NO: 324179 - DNA, 51 bp, Homo sapiens
tgtaactttaacgaacagcttgaaaatggagatacaactcgtcaacgaatc

SEQ ID NO: 324180 - DNA, 83 bp, Homo sapiens
gtttatctggagtgaggtggccggttcttggtgggatctgagcagaaattccgggtagatatgcctggctcaggcagtgcatt

SEQ ID NO: 324181 - DNA, 74 bp, Homo sapiens
gtcttcatccagaagggacagtttgtgccagctctccagagagaaaaggatcgaatcatcaatttagttgttgg

SEQ ID NO: 324182 - DNA, 90 bp, Homo sapiens
gaatattttggagcctttggagagattttgagatcaggagtgagaacgaggtaaatcccaagcaagagattagtgaagatgtacaatttg

SEQ ID NO: 324183 - DNA, 82 bp, Homo sapiens
agtggatcggggacggagagaacacgagcccatcagtttggaaattttagcattcaggtgccaggaatgcagatgggacagc

SEQ ID NO: 324184 - DNA, 82 bp, Homo sapiens
ggagaagtttccgcaggactacttccccgagttactgtaaaatggggaaaggagaaatttgaaggtgtagaattgaatacag

SEQ ID NO: 324185 - DNA, 141 bp, Homo sapiens
gtggacttggtgtgcattaacctgccgccgcccctcaccagacagatcgctgtcaaaaccctagaatgaaatatgactgaggactctcagagaaactttcgttcagtatattatgagaaagtggggtttcgtggagttgaa

SEQ ID NO: 324186 - DNA, 100 bp, Homo sapiens
ggcagagaaagagtgcaagatagaatatgatgatttcgtagagtgtttgcttcggcagaaaacggtacggttcctggagcagcagaacaagatgctggag

SEQ ID NO: 324187 - DNA, 80 bp, Homo sapiens
gaacagttggagaagatctatgggtcagacagaattgaaattcgaaatgagtcccatgactatcctcatagagtggccaa

SEQ ID NO: 324188 - DNA, 124 bp, Homo sapiens
cccaagggagacaaagctgaggatggcttccatggagtctccccagtgaatgctttccccgcccagaacaactacgggaggctgccggcgtggaccgcgggaaggcggggctggggctcggcgg

SEQ ID NO: 324189 - DNA, 98 bp, Homo sapiens
ccgtgacaactttcgtttccctctgagggaattgggaggtcggcggccccaaaagatacctacctggtttatattctaaatgaattggctggaaactc

SEQ ID NO: 324190 - DNA, 82 bp, Homo sapiens
cgctggggtcccttttgcctcagatactattttgaaggaactgtggctgcaccatctgtcttcatcttcccgccatctgatg

SEQ ID NO: 324191 - DNA, 75 bp, Homo sapiens
ccccctcaacttcgaagtgtgtgccactgtttataccaggcgttcgtggcattcagggatgtggctgtgtacttc

SEQ ID NO: 324192 - DNA, 82 bp, Homo sapiens
ctgtcatggaaatgcagagcagagccacatatggccatgtcactcagcttgcgcgatctctggcctcttcaactgcatcacc

SEQ ID NO: 324193 - DNA, 75 bp, Homo sapiens
aaggctacggcaccatgtacatgaagacacggcttttccaggtctcctctgagcctccggcctccataagaccca

SEQ ID NO: 324194 - DNA, 100 bp, Homo sapiens
tgctgccagagactttgttaactatttggttcgaataaatgaaataaagagtgaagaagttccagcttttggggattttcctaagcccagtgaagagaag

SEQ ID NO: 324195 - DNA, 75 bp, Homo sapiens
gagccccggaggtggcagagcggcagacccggggctgacagtgagtgacgtggacatcttcgagatcaatgaggc

SEQ ID NO: 324196 - DNA, 90 bp, Homo sapiens
ggaactctgaacctcaataacgaggtgagggacttgtgcattgcttatatgctggtgacattaacttatctctatattggagtcctggtt

SEQ ID NO: 324197 - DNA, 100 bp, Homo sapiens
tgcctcactgagcaaccaagaattgaagaaggtattgttgtaatggaagatgattctccagtggaggctgtgagcacacctaatactccccgaaaccttg

SEQ ID NO: 324198 - DNA, 100 bp, Homo sapiens
ttgaccatgctgagatggagctgcgccgaggccagatcctctggttccggggcctgaaccgtatccagactcaggttcagttccggaaggtgtcttagag

SEQ ID NO: 324199 - DNA, 100 bp, Homo sapiens
caccgcggaaagcatgttgtggctgttccaatcgctcctgtttgtcttctgctttggcccagagcagctgcaggagccccaagtcaccatgaagtctgtg

SEQ ID NO: 324200 - DNA, 75 bp, Homo sapiens
gctcgagccggggagccctcggggctgcgggaaagaccacagcaagattctttcattcgtctcctcctagcctgg

SEQ ID NO: 324201 - DNA, 100 bp, Homo sapiens
cttcaaaggggaaagcaaggccaaagacagggagaaggtgactctcctattccatctgtttcttcgggatcatcttcacctctttcagccacttctgccc

SEQ ID NO: 324202 - DNA, 74 bp, Homo sapiens
gaaaaactctttggatgattctgccaaaaaggttcctggtagagttacacagttgtgccgccagtatagcgaca

SEQ ID NO: 324203 - DNA, 82 bp, Homo sapiens
gctggagctgggtcagtccgccgctcaccccgcggccgcaccttcccgccttctcaggctgaccaactgactgaagagcaga

SEQ ID NO: 324204 - DNA, 90 bp, Homo sapiens
gaaagttcccataaaaaaagaactggtttctacagggattatgacattccatttactcaggtatacaaaactaggatatgctggaaatac

SEQ ID NO: 324205 - DNA, 100 bp, Homo sapiens
gcgctgccgcgtgggtcagtgggtgtcctcattaaagaagaatgtgggtcagttcagtggctttccatttgaaaaaggaagtgtccaatataaaaagaag

SEQ ID NO: 324206 - DNA, 144 bp, Homo sapiens
caaaccccaaaatggtgagcagtctccccagcaccgccgacccctctcaccagaccatgccggccaacaagcaggaagaggagttgtacgcatgtcagagaggttgcaggctgttttcaatttgtcagtttgtggatgatggaa

SEQ ID NO: 324207 - DNA, 116 bp, Homo sapiens
agattcttgcagcccttcaagaaagacttgatggtctggtagaaacaccaacaggatacattgaaagatgttctcagtgcagctgagtcttggtgagcagacatgggaatccgaag

SEQ ID NO: 324208 - DNA, 75 bp, Homo sapiens
tttatactaatttacatgaagtgccttatcctgatgcaagaattgagttaaacatgaagtttctggagagacagt

SEQ ID NO: 324209 - DNA, 98 bp, Homo sapiens
acgatctgcacttcgcattttggcattgacatttaattttagggtcctttatatagaagggagagtaggtaactcagcagttgaaggcgcgattctta

SEQ ID NO: 324210 - DNA, 83 bp, Homo sapiens
tggatggttccttgcaaagggcacgtatagcattggtaaagaacgatcgtccagtggagcaatttttccagctagtcaaatta

SEQ ID NO: 324211 - DNA, 83 bp, Homo sapiens
gaggtccattcgactgccagaaaccattgacttagggaactgtggctgcaccatctgtcttcatcttcccgccatctgatgag

SEQ ID NO: 324212 - DNA, 100 bp, Homo sapiens
gaccttctgtacgcccagggtcttggcgacatcactgacagtgctggagaatctggtaaaagcaccattgtgaagcagatgaggatcctgcatgttaatg

SEQ ID NO: 324213 - DNA, 74 bp, Homo sapiens
ggcctcggcctccccttggattcagacgccgattcgcccagaatgccaattcctgtccagttgatcgaactcta

SEQ ID NO: 324214 - DNA, 75 bp, Homo sapiens
gcgcccgcgggcccgggtgcgggcccggcgccgcaccagcagaacgtgccgcagaatggaattcggcattgttcc

SEQ ID NO: 324215 - DNA, 140 bp, Homo sapiens
cggcctcctagggggtcgtcgtggtccagacagtttagcagaacagcctccgcggctccggggagaaggtttccaatacttatctacaggaatcgccatgaccccagctctgagggaggcaacagcaaagggtatcagct

SEQ ID NO: 324216 - DNA, 101 bp, Homo sapiens
atatattcaaaaaatcaacttcaggatgataccatcttccaaaatcctatggtacaagaagctatacgaatggggttcagtttcaaggacattaagaaaat

SEQ ID NO: 324217 - DNA, 83 bp, Homo sapiens
gtggaattttggagatattcaaagacctgcctagagctggaacgttacctccagagcgagccctgctatgtttcagcctcaga

SEQ ID NO: 324218 - DNA, 75 bp, Homo sapiens
gccatgcccctcaggctggaacttgccctgtctcctcgcagatgagaaactggcgatggaatatgagaggagccc

SEQ ID NO: 324219 - DNA, 75 bp, Homo sapiens
ggagagtgtgaacctgctcatgtccccacaaggagcggttggttccccgaggcgtacgtgaaggctctggaggag

SEQ ID NO: 324220 - DNA, 83 bp, Homo sapiens
cacttgtcatctgtgtactgtgtaacttttgatcgaactggcagacggatatttacttttcccagcgaggtggtcattcagag

SEQ ID NO: 324221 - DNA, 88 bp, Homo sapiens
ccgccgtgcaggcggccgtcagcaacctcgtccggactcagcccgcctgcacccaggtgaaatatacagccttgttgctcacacaaag

SEQ ID NO: 324222 - DNA, 82 bp, Homo sapiens
ctggcgctctggctgtgctgcgcgacccccgcgcatgactcaagaatgaacaatccgtcagaaaccagtaaaccatctatgg

SEQ ID NO: 324223 - DNA, 100 bp, Homo sapiens
actgtactggctattggaaggaggagattctgaagataaggaggagtcggatggtcagggctgccctttctgtcgttgtgaaataaaaggaactgagccc

SEQ ID NO: 324224 - DNA, 99 bp, Homo sapiens
ccccacccggagttcagcgcggactcccccagcccagtgatcaacaaatacaagcgcagacgatttcagaaaaccaagaacctgctgacaggagagaca

SEQ ID NO: 324225 - DNA, 98 bp, Homo sapiens
ttctgcagaagtcccttcaggagtgcttggggattatttggagtaacccaagcctcacagcctggaggtctttttgggacagctacaaacaccagcac

SEQ ID NO: 324226 - DNA, 83 bp, Homo sapiens
caggaacatggactgaagtatccagcgctcattgggaatttagttaaggcttttattgagatggagacaagagaagatgcaat

SEQ ID NO: 324227 - DNA, 100 bp, Homo sapiens
ccttcaaaatgaatggttacatatccaatgcaaactactcagtgaagaagtgcatcttcttactcttcatcaaccctttcaagatgttagaaagttcaag

SEQ ID NO: 324228 - DNA, 50 bp, Homo sapiens
catgactcatccccgggagtgttgagctagagtaccgtggcacaatctca

SEQ ID NO: 324229 - DNA, 74 bp, Homo sapiens
attctctgccacaaaaaaatataataaggctgagtgcggagccaagtgtatcctactcagtacatgtatctgaa

SEQ ID NO: 324230 - DNA, 100 bp, Homo sapiens
tccttccgcgcgagtctctggagaagccgcagcgcgagttgccgccgctgctgcccggggccggggaccgtaagaagaagcggtttgtgggacagtcagg

SEQ ID NO: 324231 - DNA, 101 bp, Homo sapiens
tcccagcctcagttttctcatccgttggacataccagatggtcgaagagctccacttcctgctcattaccggagcagtagtactcgcagcattgacactca

SEQ ID NO: 324232 - DNA, 78 bp, Homo sapiens
acaaatttttggatgatgatggatccatttctcctattgaggagtcaacgctttgaattgtattccatggtgccatct

SEQ ID NO: 324233 - DNA, 83 bp, Homo sapiens
cgcggaccagcagcgcgggagagcggactcccctcgccaccgcccgagcccagggagaagatgtcaaccggacactagaaggt

SEQ ID NO: 324234 - DNA, 91 bp, Homo sapiens
ccagcctcgttgcggccatcgccctgccggaccgcgcctcaggctcccccagatggcttaagcaaaatcagactaaactatagcgatgaat

SEQ ID NO: 324235 - DNA, 80 bp, Homo sapiens
cttcaacagaatgtggcaaccagatcctgaaacctgcaagtgcccactctccgacccaagtgagaagccggggaaaatcc

SEQ ID NO: 324236 - DNA, 100 bp, Homo sapiens
gacgagatgatcaaacgcctgaaggactacaaagctgatgaagacccagcattattccagtcagtcaagaccaagagaggccctttgggacccaactgga

SEQ ID NO: 324237 - DNA, 80 bp, Homo sapiens
gaggtccgtgtggccaacgagctcaacgccaggcgccgctcctttacaggttggatttggtctagggagtcccagaaaga

SEQ ID NO: 324238 - DNA, 50 bp, Homo sapiens
cagatggcagccagtcagtggtggaggtcacggtctagatcacattctcg

SEQ ID NO: 324239 - DNA, 89 bp, Homo sapiens
gcggagggacggcagtctcgcgcggcatgttatgttacccagagaactttccaaacaagtacctaaaactcatctgatgtctgaagagg

SEQ ID NO: 324240 - DNA, 89 bp, Homo sapiens
gctcgagcagcggcggcggcaagacctctccccctcggaggcggcgggcggaggcggcgggaaccccatgggccgcacaggactgcgtg

SEQ ID NO: 324241 - DNA, 75 bp, Homo sapiens
ctagaccttaatatgaaggaatacactgggttccaagttgctttgctgaataagcgatctgcctgcctggatgtg

SEQ ID NO: 324242 - DNA, 100 bp, Homo sapiens
ttccggacacataacaagcagcagtgaggacaccaaagcgatgccctcctagctagccgtcacgggatggagggcttcatggactcagggacacagacgg

SEQ ID NO: 324243 - DNA, 98 bp, Homo sapiens
agatttctgcagtgaagattgctgtaaaaaatttcaggattggtactacaaggtgaacttcacggtagaccagatccgcgccatcatggacaagaagg

SEQ ID NO: 324244 - DNA, 98 bp, Homo sapiens
cggcgtcgtcggatgttgtgttgcccgccaccatgagctacacaggtggagattctggacgcaaagacaagggagaagctgtgtttcttggacaaggt

SEQ ID NO: 324245 - DNA, 74 bp, Homo sapiens
agactggcaagcacggccacgccaagacatctccagttacagcccgaacactggaaactctgattcgactggcc

SEQ ID NO: 324246 - DNA, 72 bp, Homo sapiens
ccaaaccaggagattgcgagggagcgatgcggtgcagcgcggaccgtggcaaggaggtgtacagccctgact

SEQ ID NO: 324247 - DNA, 100 bp, Homo sapiens
ccgtgtccgtgtaaagggtggtggtcacgtggcccagatttatgtttgcctatctggggcgcctggctcacgaggttggctggaagtaccaggcagtgac

SEQ ID NO: 324248 - DNA, 83 bp, Homo sapiens
agcacgtccaggctgaccacgagcttttcctccaggcctttgagagtttggtgcacctcgatttggaggaagtagggcagggc

SEQ ID NO: 324249 - DNA, 100 bp, Homo sapiens
atatttcaaggtgtcagagatgaccatctcccaggagccaaaggcaaagactagaactctctttggaaaagggatgaggagaatttctgtgccactgtgc

SEQ ID NO: 324250 - DNA, 100 bp, Homo sapiens
aggaaacaccctgatatcagtggattatgaaatttttgggaaggtgcaaggggtgtttttccgtaagcatactcaggggagctgaatatgtatctgcaag

SEQ ID NO: 324251 - DNA, 99 bp, Homo sapiens
tgtggctggagacatgagcaagaaaagcctctgggagcagaagggaggctccaagacctcatcaacaattaaggcgttcctgttgaatgaagacttggg

SEQ ID NO: 324252 - DNA, 82 bp, Homo sapiens
tttggaggtggaaacactgcctgggaggaagagaatttgtccaaatacaaagacagatgtctttggtggacttgggaaagag

SEQ ID NO: 324253 - DNA, 75 bp, Homo sapiens
cgcacctgaagcaacagcccatctgggttccagaccatcaggatatagcttttggggccttgcagcagggaacta

SEQ ID NO: 324254 - DNA, 100 bp, Homo sapiens
agcgggatctaacccaggagcagacagagaagctgctgcagtttcagtgtttcaggagccgtagagccagatcgtcatcatgtctgcattgtggctgctg

SEQ ID NO: 324255 - DNA, 110 bp, Homo sapiens
acgctgcatcatgagtgcagccggctgcaggagcagctagcgcagttccggaaccccaaggcatccttgcgtgtgcggctctgtgacctcctgagccacctgcagcggag

SEQ ID NO: 324256 - DNA, 90 bp, Homo sapiens
tgcgcgcccgcctcggcccgcacgccaagcacgtggtgggctatggccaccttggatcatccagcagctcgtcaacggcatcatcacgcc

SEQ ID NO: 324257 - DNA, 82 bp, Homo sapiens
tgcccttgggcgcgcagatacccgcggtgcaccgcctgctgggagcgccgctcaaggagacacacggacatcgggaacggac

SEQ ID NO: 324258 - DNA, 80 bp, Homo sapiens
cagaaatggaagtaccagcagaagcttagcagtgtctgcaaaaacgaatcttttcctacaacctgttaactgactggact

SEQ ID NO: 324259 - DNA, 98 bp, Homo sapiens
gaatctacgcttcccaaaccagttcagaagccacccaaaagtaatgttaacaataacccagagaaagcagcagctgccaacatagatgaagtgcagaa

SEQ ID NO: 324260 - DNA, 88 bp, Homo sapiens
tggacagcgtgcggtctgggccttttgggcagcttttccggcctgacaacttcatctttggtctgaatttcctgctgctgttcacaaa

SEQ ID NO: 324261 - DNA, 50 bp, Homo sapiens
caagtgcattgcctttggaaacgaggtatggaacctggctaactgcaagc

SEQ ID NO: 324262 - DNA, 74 bp, Homo sapiens
ccgctctcgcttcgtcctacacttgcgcaaatgtctccgggtcaaagaattgactgtagatccaactgctgctg

SEQ ID NO: 324263 - DNA, 99 bp, Homo sapiens
cgggtgctgaaggctgcagccgcgaatgccgtaggagatggcgttgactttctgtcttggtttctgaatgctctgcactcagctctggggggcacaaag

SEQ ID NO: 324264 - DNA, 90 bp, Homo sapiens
cacacgatccagatccggcaggactggagacacctgggagtcgcagcggtggtttgggatgcggggttgccctgctgtcagacgtctatc

SEQ ID NO: 324265 - DNA, 90 bp, Homo sapiens
cacccccgtggatctctggagtgttggctgcatatttgcagaaatgtttcgtagaaactggagaatgctggaggagaccttaaggatggc

SEQ ID NO: 324266 - DNA, 97 bp, Homo sapiens
tcaatcgttgctgaatcctttcatatcctaataggaattaacctccaaataaaacatgactgatgtccagctcgccgctgtccaagaaacgtcgcgt

SEQ ID NO: 324267 - DNA, 83 bp, Homo sapiens
tccccaacggctccccgtcgtcctggtgctgcagcgaagtccattggaatattaagcccaggagttgctttggggatggctgg

SEQ ID NO: 324268 - DNA, 100 bp, Homo sapiens
tgcattcagtcctttgatgcctccagctgtgatatctcagatgctgctgcttgacaatccacacaaagtaagatcctgaggaggcaggagagggacaggg

SEQ ID NO: 324269 - DNA, 100 bp, Homo sapiens
gattatccggaggagctggaagatgacgacgaggacgccagttactccacggaaagcagcttcagcagcactccaggctccaccaaagcctgtacccaag

SEQ ID NO: 324270 - DNA, 48 bp, Homo sapiens
tgtgtgaaattgcttctgtcaaaggtcatatatcagttatgtgcatgc

SEQ ID NO: 324271 - DNA, 99 bp, Homo sapiens
gaaggagtgcagaggcatcacctgaaaggacaatgtgttgaacatcattaaccagatcatggatgagtgcatcccccaggaccgcgcccccagagattt

SEQ ID NO: 324272 - DNA, 100 bp, Homo sapiens
ttggagttgcggcggcgggaacgattgggctgagcagaggacgacatgttgcttttcgtggaggtttatgaaggcgagcgtgccatgacaaaggataaca

SEQ ID NO: 324273 - DNA, 75 bp, Homo sapiens
tcccccacccccgactcgggcttggcgcggcggccagaggaaccccgaggtccctgtgcgttttattgcgacctg

SEQ ID NO: 324274 - DNA, 75 bp, Homo sapiens
cctcccagggtgactcaactccagatcagtagtaatttcacttcgtcttcttccaaaactatttggtacttttca

SEQ ID NO: 324275 - DNA, 100 bp, Homo sapiens
ggctggaatcattctcaccttgtatgctttaccgtggggtagagcagcggctgccatgctcttctgtggcttcatcatcctggtgatctgtttcatcctc

SEQ ID NO: 324276 - DNA, 100 bp, Homo sapiens
agaagtagctggtactagagtgtatgacgaacgaaaggaagaaagcatctccttaatgaaagaaacagatggagtcttgctctgtcccccaggctggagt

SEQ ID NO: 324277 - DNA, 98 bp, Homo sapiens
ccttctgggctcaagagatcctcccaccatcacgaggtcaggagatcgagaccatcttggctaagaagttcgtgtctgggatgtccggccatttgccc

SEQ ID NO: 324278 - DNA, 95 bp, Homo sapiens
ctcgcctcctcgcagcagcgccatgctgctctgttaaaagcgaaaatgaaacaattgcctgcggcaacagttcgactcctttcaagttctcagat

SEQ ID NO: 324279 - DNA, 101 bp, Homo sapiens
ggctgcggacgctcggtcccgcgctgcgcatccccgcggacgccacagcgctgaactttatattgctgttggaatatctggagccatccaacatttagctg

SEQ ID NO: 324280 - DNA, 106 bp, Homo sapiens
cctgggctcgagcgatcctcccacctcagtctcctgagtagctatgactacggaattctggggagacattgccaaggaattttactggaagactccatgccctggc

SEQ ID NO: 324281 - DNA, 90 bp, Homo sapiens
ctccatcccagctggcctccctcagcctggcccactgctcttcattgaagccagctgaggtgggtgtcctggttggcaaagaccggtcaa

SEQ ID NO: 324282 - DNA, 76 bp, Homo sapiens
gagcccgcgggcggccggtcgggcggggcggcggcgctgacaggtagaggaaggatggtgggaaggtgttctcaac

SEQ ID NO: 324283 - DNA, 97 bp, Homo sapiens
aaatggaaaccaaagtcaagcatgtgataaagcagtctcgtttcctctcagtccatccacccttcatggggccagagccctctctccagaatctgag

SEQ ID NO: 324284 - DNA, 100 bp, Homo sapiens
tgcaagtaaagaagaggcaaccacgttctccaatgcaatgctgtttgccctgaacatcatgaattcccaagaaggaggactgatcctttgaaatactcca

SEQ ID NO: 324285 - DNA, 100 bp, Homo sapiens
cttaggtctggctgcttccggaataccgagacgggcctctgctgttccctgagcttgctgtcagcaaatgtttggagtggagtcaacatatcaatggagc

SEQ ID NO: 324286 - DNA, 100 bp, Homo sapiens
tctgggtgcggactcggagaagccctcgagcatccccacagttgcattaaaatcctcccctactgaaagaaacggaggccaggataactgtagagcagca

SEQ ID NO: 324287 - DNA, 108 bp, Homo sapiens
gactctgaggctgatatgcaatgtcacttacaacattaatcagatactgcatttaagatctgactgcagccatgagcagcaatgagtgcttcaagtgtggacgatctg

SEQ ID NO: 324288 - DNA, 100 bp, Homo sapiens
caatatatgattgatgcagggactgagtttggcccaggaacagcttatgtatgtccgtggttcagaccctgtattaaagcttttggacgacaatgggaac

SEQ ID NO: 324289 - DNA, 100 bp, Homo sapiens
cgtcctcaacgagatcttgggcaccgagagggactacgtgggcaccttgcgcttcttgcagtcgccactgaggcggctcccagctgcgttggcgacatgg

SEQ ID NO: 324290 - DNA, 50 bp, Homo sapiens
ccggcgtctgcctcgagactgaagaccggctggagtgcagtggcgtgatc

SEQ ID NO: 324291 - DNA, 100 bp, Homo sapiens
cgaccgccatttcacatccagcagaggaggcgggggcagccgctgagacggtttttcacaagctttggcagcatgtaagcagctgtttgccaagaaccca

SEQ ID NO: 324292 - DNA, 106 bp, Homo sapiens
gcacctcctggttgtaggaaaacaagctcagggctcccagtgattctacattatggtttttcgttggaatatacgttgcacatttatggcgattctgagtgtgagg

SEQ ID NO: 324293 - DNA, 74 bp, Homo sapiens
gagcatcccaggacctaccagaatctggttttagctaaagaagatactgaggcagctattcaatcaatattata

SEQ ID NO: 324294 - DNA, 100 bp, Homo sapiens
ctttgagaccgtgaagagaaagatgcagttaagtgggcagaccaacatccacctcagcaaaaacttcttcctgacgaatcgcgccagggagcgctcagac

SEQ ID NO: 324295 - DNA, 75 bp, Homo sapiens
gtggtctgccgagaagccagtcacgccgggagctggtacacagcctcagctgcagaaccttggcctgaaaatgct

SEQ ID NO: 324296 - DNA, 60 bp, Homo sapiens
tgtggcgatggtcttcctgctggggctcatgtttgagggcattgctcagattaacctggc

SEQ ID NO: 324297 - DNA, 90 bp, Homo sapiens
gcgctggccagactgacacccataccttttgggcttcagaatgcagtgttttcgctgtggcagaggtaaaacttcgagatgatcaatata

SEQ ID NO: 324298 - DNA, 142 bp, Homo sapiens
agatgtctcgctccgtggccttagctgtgctcgcgctactctctctttctggcctggaggctatccagcatctttaatctcatgaagtacgacagctacagccgcttcttaaagtctgacttgtttttaaaacacaagcgaa

SEQ ID NO: 324299 - DNA, 98 bp, Homo sapiens
aggctgctaccgcccctccgcttccagacattctcagctgtcagacaacaatatgcacaggttttggcccaacagcagaaagcagcactgtcttccca

SEQ ID NO: 324300 - DNA, 83 bp, Homo sapiens
atctcagcttctggtttctaagtccatgtgccaaaggctgccaggaaggaggctattgagggcacctacattgacaagaaatg

SEQ ID NO: 324301 - DNA, 74 bp, Homo sapiens
aagttgcagagctacgtggacgcaggaactccagggttgtagaaggtgatttagctgccatagaagcatacaag

SEQ ID NO: 324302 - DNA, 90 bp, Homo sapiens
caggggaggacgaggtggacgtgggcgtggtgggcgcccaaaccgtggcagcaggaccgacaagaaacctgctcctccaaagccagagcc

SEQ ID NO: 324303 - DNA, 100 bp, Homo sapiens
tggcgcttgagttggtcgggggcagcggcaggatctatcttgggatcccatggctttctttactgggctctggggccccttcacctgtgtaagcagagtg

SEQ ID NO: 324304 - DNA, 74 bp, Homo sapiens
gtggcggcccattcagcccgagcgcccggcgggactgacaggcagagaataggaatatgcagctgaaatgtggg

SEQ ID NO: 324305 - DNA, 100 bp, Homo sapiens
atcaaagaaataggttgcaagaggcttgcaaagacatcctgctgtttaagaatctggatccgaaggagatttaaccatagtagaaagaatggagaactat

SEQ ID NO: 324306 - DNA, 75 bp, Homo sapiens
ggaacatggactgaagtatccagcgctcattgggaatttagttaagaatcctcactatggatgggctcattgagg

SEQ ID NO: 324307 - DNA, 82 bp, Homo sapiens
caaaaaaaggagatgcctggcagccccgctctctgcagtggtggagattgtgaagaagctggagtctcgccagcggggctgg

SEQ ID NO: 324308 - DNA, 80 bp, Homo sapiens
ggatcttcaacactagaagatatttgctgcagcctttagctgtttctgcagaacccagtagatttcctacggtaagaaag

SEQ ID NO: 324309 - DNA, 90 bp, Homo sapiens
cttcccgccagactacggcttccccgaacgcaaggagcgcggagaagatggggagccccgaggatgacctgattgggattccattcccgg

SEQ ID NO: 324310 - DNA, 100 bp, Homo sapiens
gtgggcggtggagtctagacttccccaaggcgtgtacccagtgtggcaaaggagcagagaactttgacaagttcttcacacgaggacagcccgtcttaac

SEQ ID NO: 324311 - DNA, 98 bp, Homo sapiens
ggaggggcgccctgggggttcagattgcaaggtggcaaggagcagaagcagcccttacaagttgcaaaggttctcagaggcactgtgactgacttccc

SEQ ID NO: 324312 - DNA, 95 bp, Homo sapiens
ccaggtgtaagcgcagaaagcaggcgaacccgcggcgcaataacggccggcgaccaccaggggcctgaggatgaagccaagtctgctgtgccggc

SEQ ID NO: 324313 - DNA, 75 bp, Homo sapiens
gttctctgcagagtttgttgactttacctcacagtgtactatactggcaattgctggagaagattttgcaattgt

SEQ ID NO: 324314 - DNA, 98 bp, Homo sapiens
gggcatcgggcaggaactgggcgccggcgcttacagcatgagggaacttaggctgcggaactatgtcccggaggatgaggacctgaagaagaggaggg

SEQ ID NO: 324315 - DNA, 74 bp, Homo sapiens
ggaaactaggaagaggaaattaactatctgtacttataagagggtcttacagacgtcattttataccaccaacc

SEQ ID NO: 324316 - DNA, 98 bp, Homo sapiens
ggaccatcctgctggtcagcactgcggctgataaactcatcctgaaagtcgctgttgttctcctgctgagcaagaatggaggccccactggtgagtct

SEQ ID NO: 324317 - DNA, 100 bp, Homo sapiens
ctttggcttgggaaataggagtgaagctgttatcgcccagttctaccacagccctgcggacaacaagcgggaatgctgtctctgcaatttgagaggaggt

SEQ ID NO: 324318 - DNA, 101 bp, Homo sapiens
acctggccagcatcgccagactccgcatcgcaaaggggggcgtcaatgacaatttccagggaatgggtactgttcaaaaaggaatgccccacaagtgttac

SEQ ID NO: 324319 - DNA, 89 bp, Homo sapiens
ttatttaatcctgttacagacattgaggaaattatccgtttctggaaacattctacagtctccctctgatgccgagccgaagctggact

SEQ ID NO: 324320 - DNA, 82 bp, Homo sapiens
gttgctttactttttgcttcaccgacatagtcattatgccgaagagaaagtgtgctggagaagagaaacgagttggcacacg

SEQ ID NO: 324321 - DNA, 97 bp, Homo sapiens
gcgatgtcagctcagtgctgtgcgggccagagagcccgagcccagcacattgtgccctgtactatatctcagctgctttctgccactttggttgatg

SEQ ID NO: 324322 - DNA, 100 bp, Homo sapiens
tatctactggatttccgtagtattgatggtctcggcgcggaagatggccggcggcgtggacggccccatcgggatcccgttccccgaccacagcagcgac

SEQ ID NO: 324323 - DNA, 83 bp, Homo sapiens
cccgcctgcagctggagctgagcaaagtgcgtgaggagtttaaggagctgaaagcgcggaagccatcttcgacaagagcacag

SEQ ID NO: 324324 - DNA, 75 bp, Homo sapiens
cagcaagatggcgtctgctagtagggtcgttcagcttgggatgtggtaatgccagccacactcctcagagccgtg

SEQ ID NO: 324325 - DNA, 59 bp, Homo sapiens
ggcagcaaatatggaatatatggtgacacgcagagctgaagccatggttcatcaggtgc

SEQ ID NO: 324326 - DNA, 100 bp, Homo sapiens
ttcttcttcaccgccaggacctccttcttcaggagagcgccccagggcaagccccgctccggccaacaagatttgaatttgttgaaatgagcagtcgtaa

SEQ ID NO: 324327 - DNA, 100 bp, Homo sapiens
cctggtgcagtggaagcagaggcacccacgctcctacaatgctaccaagcagtttctcgaagagattaacaagtggacagttcagtacaatgtttccccg

SEQ ID NO: 324328 - DNA, 74 bp, Homo sapiens
tacctgcagcgccgtgtggcacgacacaaaaatcaggttttccagaagagattcaatggctcagtaagtttctt

SEQ ID NO: 324329 - DNA, 89 bp, Homo sapiens
agcgagctgagtggttgtgtggtcgcgtctcggaaaccggtagcgcttgcagcatgcttcctgcctgacacagctcacttcaagaagtg

SEQ ID NO: 324330 - DNA, 119 bp, Homo sapiens
gctgggactaagccaagggattcaggtgtggtgccggtgggaactgaggaagcgcccaaggtgagtggcagtgtgatgagtgtttatagtggagactttggcaatctggaagttaaagg

SEQ ID NO: 324331 - DNA, 88 bp, Homo sapiens
cggcgagagagcggctgacagaggggatgcgaggttgtggcagcactgcctgaaggtatgagaccagattctaatctttatggttttc

SEQ ID NO: 324332 - DNA, 101 bp, Homo sapiens
ctcctgactccataaactattggattcataacctgctccatgcttgaaaacatggggattggaattcggcaatgaatcgctccctggctaatgtgattctt

SEQ ID NO: 324333 - DNA, 75 bp, Homo sapiens
gtaaggacaaaacgggactggctagttaaacaaagaggctggaatgagtccctggaacgccagatgcgtgaaatg

SEQ ID NO: 324334 - DNA, 100 bp, Homo sapiens
ggcttagatcttgtggccaagagttcagaccgtggcgaagtggagagtgacatgcagttggatggcggtgactgcgtgtgtgctggagaagagaaacgag

SEQ ID NO: 324335 - DNA, 100 bp, Homo sapiens
ctcttccctgaccattttctactgtccctgcgcgaggacgctgtgcagagctgcaagtccgtatcactgaggctgtggccacagccactgagcagagaga

SEQ ID NO: 324336 - DNA, 51 bp, Homo sapiens
cctgaacaccagatggaagcttctgcaggctctccagcagaactatctcct

SEQ ID NO: 324337 - DNA, 78 bp, Homo sapiens
gacaccaccgttggcagcaaacaattgacattcacgttaaagaggggcaagtgtccagagaatggctgggatgaaagt

SEQ ID NO: 324338 - DNA, 88 bp, Homo sapiens
catctgcctcagcctctttgtcactgcctggaccattgtccctgctgtttctcaggtgtgatgaatgcagactctgctaccattttgg

SEQ ID NO: 324339 - DNA, 80 bp, Homo sapiens
tagatgttgtggttgaaaataatctagatattgatggctttggctttatcctgtggataaacgcagagtgaacgagtttg

SEQ ID NO: 324340 - DNA, 101 bp, Homo sapiens
cctaaattattctgcaagacaaagggaagaaataaaattttcccatactgaatgtcttatgtctccagaaaattcagatccacaattccacttggagcaca

SEQ ID NO: 324341 - DNA, 75 bp, Homo sapiens
gatggccccaggtgtaagcgcagaaagcaggcgaacccgcggcgcaataacggctactaataaaattgccagaac

SEQ ID NO: 324342 - DNA, 78 bp, Homo sapiens
taagcatgcagttgctgtcatttgggcttactggcttggactgaaggtaccgaaagcacagtaatcactggtgtcgat

SEQ ID NO: 324343 - DNA, 88 bp, Homo sapiens
gagagacgtgaaacatgtgaacactcaagtgaagcaaaagccttccatgattacaacattaaccaggtggtatttgttggaaatttct

SEQ ID NO: 324344 - DNA, 74 bp, Homo sapiens
aacactatcctctgagatcccagatcatgaggaagaaggagagacgaccatcttgcaactagaaaaagatttgc

SEQ ID NO: 324345 - DNA, 74 bp, Homo sapiens
gtgaggagccagacgacaagcacacactatggcgctgaaacggattaataaggacttccaatagtagtcagaca

SEQ ID NO: 324346 - DNA, 95 bp, Homo sapiens
agaagatctgggtgcccgtggaccacaggccctcgttgcccagatgtgcgcgcggagccatggttatcatgtcggagttcagcgcggaccccgcg

SEQ ID NO: 324347 - DNA, 96 bp, Homo sapiens
tccgcctgccccagcagcggcctgatctgggttccgctgattcctttcgtaaccgcaccacacccgaggtgctgtgttattcatggggcagataaa

SEQ ID NO: 324348 - DNA, 90 bp, Homo sapiens
gcagcgtagcccgagtcggtcagcgccggagtgcaccgtccaggtgaggttagagctggggcatcgcgcccaactgcgcaagaagcccac

SEQ ID NO: 324349 - DNA, 96 bp, Homo sapiens
aggctgttttgacagaatacaaattaaaagcaattgaatatgtgcatggatacttttctagtgaacagggaatgggtactgttcaaaaaggaatgc

SEQ ID NO: 324350 - DNA, 82 bp, Homo sapiens
ggatcatgtctgcgagccaggattcccggttctgcggggagtgtctccagccctgcctgcaggtgccatccccgctgtgccc

SEQ ID NO: 324351 - DNA, 82 bp, Homo sapiens
aatgagagatatgcatatgaatggcagagatgcctggggagtgccctgaattgcctccggagccagcgtggtggccatagac

SEQ ID NO: 324352 - DNA, 75 bp, Homo sapiens
ctttgagccaaaggcatatgatctatgaaggtcatcagactagtgctgagtcttggggtactggcagagctgtgg

SEQ ID NO: 324353 - DNA, 88 bp, Homo sapiens
gcgcgcggcggacgcgcccgggacgcgcggcggcaccgggaggccgggccgagcgacaatgcagatcttcgtgaagactctgactggt

SEQ ID NO: 324354 - DNA, 75 bp, Homo sapiens
gcgtcgggtgggctttcgcccgcggctcctgagggatcggtctcagccgcgcggatgtccctggtagatttggga

SEQ ID NO: 324355 - DNA, 100 bp, Homo sapiens
cttccacatggagattggcacaggaccagactcaagacacacaactcataacagttgatgaaaaattggacatccataaaaattcatcagagagcatttt

SEQ ID NO: 324356 - DNA, 82 bp, Homo sapiens
tctcgggatgattataggcgtgatgatagagactgaaactgttgaggagcccatggaggaagaagaagcagccaaagaagag

SEQ ID NO: 324357 - DNA, 82 bp, Homo sapiens
tccagtaatggtggatgaagttgttcattgtttgtcaccacaaaaaggacagaaagagctatctggtcacaaaaatattgtg

SEQ ID NO: 324358 - DNA, 96 bp, Homo sapiens
ctcgatgggcagctcgcacttgctcaacaagggcctgccgcttggtcgcctgcgaggccgctggccaggcctgagcctctgccaccatggccattg

SEQ ID NO: 324359 - DNA, 100 bp, Homo sapiens
cacacgtctgcggtgttacccacgactgcctgggacctggccaagggctccacacaccaagaccaagatcccagatgcagtgactggttactacctgaac

SEQ ID NO: 324360 - DNA, 50 bp, Homo sapiens
acggggctgaccgctctggcccagggtggccttccggagcagtactacag

SEQ ID NO: 324361 - DNA, 100 bp, Homo sapiens
acagagtgctgttttagagctggcagcagcatctcagcccaagagaagaacaatcaaccatgacgaccgaatctggatcagactcggaatccaagccgga

SEQ ID NO: 324362 - DNA, 90 bp, Homo sapiens
cggggccctctcagcaagaacgggaacaaaactctggattctcaaagttggattggtggaaacaatgaaccattgacaggctttacatgg

SEQ ID NO: 324363 - DNA, 157 bp, Homo sapiens
aatgtggatcaagcaggttttaaatcaagatttaacattccaacacataaaaattatttatccaacagctcctcccagatggactagaggcttttaccagatttcttaaaactgaattcagtgaagaaaatattgaattttggatagcctgtgaaga

SEQ ID NO: 324364 - DNA, 100 bp, Homo sapiens
ttcccatggtacacaatggttatggatttttctaccatatcagagatgacagagctcgtctgagtgagtggaaagctggcaaaggaagagtgctaaaaag

SEQ ID NO: 324365 - DNA, 100 bp, Homo sapiens
tggagttctcagtgattcttaatcagcgcactggcaagtgcagcgcctgtaatgtttggcgagtctggaaatgctgtctatgatttcttcattggccgtg

SEQ ID NO: 324366 - DNA, 98 bp, Homo sapiens
tcatagcagagtacgatactcaggtcaaagggccgcgatgggcctcttggaacattggtgtgttcatctgcattcgatgtgctggaatccacaggaat

SEQ ID NO: 324367 - DNA, 75 bp, Homo sapiens
cggcggcggcggcggaggatgagcctgcagagcgcgcagtacctccgggaaaggggctgtttgccacacagctca

SEQ ID NO: 324368 - DNA, 87 bp, Homo sapiens
cagccctgcgtgaggccgcggagcgccagctcaatgaagttcgagaacttgtcttggacaattgcaaatcaaatgatggaaaaattg

SEQ ID NO: 324369 - DNA, 90 bp, Homo sapiens
aaataagaaaactgcctctgatccaagcagagaagggcttcgtgctgtgtcactccatcgctgggggtacgggttctggcctgggctcct

SEQ ID NO: 324370 - DNA, 75 bp, Homo sapiens
cgagaatgtggtcaacttgattgagatttgtcgaaccaaagacaaggacgagtgctccaaggataacggcggctg

SEQ ID NO: 324371 - DNA, 83 bp, Homo sapiens
tcggctgcgggaaatcgggctgaagcgactgagtccgcgatggagattgaggacgagacgcaggtgtcacgggccactcaggg

SEQ ID NO: 324372 - DNA, 98 bp, Homo sapiens
ctggttaacacccttctggccaatgacccaacatctcttcggaaaaacctcaggtccttgaatgggcaagagggcacatgaagtacggcgtcctccac

SEQ ID NO: 324373 - DNA, 100 bp, Homo sapiens
tcgtcagcgctgactccatgcagcttagcagtgtctgcaaaaacgaatcttttcctacaacctgttaactgactggactgttggtaacaaagtaattgtg

SEQ ID NO: 324374 - DNA, 100 bp, Homo sapiens
aatgcttgacagagatgagtttgcagttgaataatgtatttgtggccttggacatgaggcagtcagtcctctgttgctgttaacataaggtcagggactg

SEQ ID NO: 324375 - DNA, 100 bp, Homo sapiens
tctctctcgctgtgagacatgtctgagactcctgctcagtgtagcattaagtgtttctgaaagatctatccagcactccgatggccagcaacaacaccgc

SEQ ID NO: 324376 - DNA, 82 bp, Homo sapiens
ccgaggagcgggaagagttgctgggataccagcttgtggtgacccagagaaaggaggaggagtcacagagcagtagcatcta

SEQ ID NO: 324377 - DNA, 88 bp, Homo sapiens
gccattcgtgtctacctcatgcaaacttcagggagccccttgacagagcggaaagtatcgatacccagttgttgtgtatcctttgcaa

SEQ ID NO: 324378 - DNA, 75 bp, Homo sapiens
aaaactgcgaataaaattcgagccaagttaaagggaaatagctcgtctgctggccctggaggaggctaccctgag

SEQ ID NO: 324379 - DNA, 74 bp, Homo sapiens
aaaccttcgtgatgagattgactgtagccgaggcttatgttcctgaggaagaattgaaggcagcagaaatagat

SEQ ID NO: 324380 - DNA, 75 bp, Homo sapiens
acgacacaacaagccggaagtggaagtcaggaacgtggaacatcttcacatctgccaccacctccaaagttgctt

SEQ ID NO: 324381 - DNA, 100 bp, Homo sapiens
gaccgagtaccctccggccggagccacgcagccgcggcttccggagccctcggggcggcggactggctcgcggtgcagcacctcaatgacctgaagaagg

SEQ ID NO: 324382 - DNA, 75 bp, Homo sapiens
tgaacggaagcgtctttgctcaaggatcccagttttctctggatgacgtgttttgtaccaatggctagaagcaga

SEQ ID NO: 324383 - DNA, 75 bp, Homo sapiens
attagagtcaagttgtgtgattaagacaggatacagacgtccctcaccagtgccagcttggggtctgcagatgag

SEQ ID NO: 324384 - DNA, 100 bp, Homo sapiens
accacctcactgaagaggagcgcaagcacttctgccaggagatacttgactttgccagccagccgtcagacagcccagctccataatgggagaagtaaag

SEQ ID NO: 324385 - DNA, 110 bp, Homo sapiens
gtaacgtgatcttcctagagctcctggcccgggtggagggcagatcctggtacaccccccacagaggacgactttggatagcagccacagctaaaaaaccctcccctcaa

SEQ ID NO: 324386 - DNA, 100 bp, Homo sapiens
cacaacctaactttacctaagcagagcaacttgctgagcttcgtcaggaatttcttcgacaagaagaccagcttcaggactataggaagaacaatactta

SEQ ID NO: 324387 - DNA, 82 bp, Homo sapiens
agcatccccttagcagcagcctctggccgagacgcatccagagctttcgtgaccggggactgttctgaagcaggcctcgtgg

SEQ ID NO: 324388 - DNA, 98 bp, Homo sapiens
gcagtggcgcctaaagtctgagagagggaagtcgcctctgtgctcgtgagtgcatggggtataagtgagacggtttaagcggaagcatcttactgcca

SEQ ID NO: 324389 - DNA, 76 bp, Homo sapiens
gttcttggtcacctgatggaagcaaaatagcagctggctcagccgacaggccaggacgactggaatgggaccaggc

SEQ ID NO: 324390 - DNA, 75 bp, Homo sapiens
cacggagaagaaggcctccgacgtctcggcgcggaagatggccggcggcgtggacggccccatcgggatcccgtt

SEQ ID NO: 324391 - DNA, 83 bp, Homo sapiens
ggccagttttgaaatcgacacacaaagaatagagttgagcctgtgggacacttcggcctcggagaagtcaatgtgcccatcgc

SEQ ID NO: 324392 - DNA, 90 bp, Homo sapiens
cagcagatggagaattacccgaaaaacaaccacactgcttcgatcctggacaggatgcaggcagatgccgtcagtgcccagataccagag

SEQ ID NO: 324393 - DNA, 76 bp, Homo sapiens
gctggggcgtactccaaagttgttcaggaacgtgacttatcagatgccctggtcatcttccagctctatgaaaaga

SEQ ID NO: 324394 - DNA, 100 bp, Homo sapiens
ggaagcccctctacatcctcacttacgtggcctggtttgctttcgaccctggctcggcgcactcggacatcatcctctccaatgacaacctgacagtgac

SEQ ID NO: 324395 - DNA, 100 bp, Homo sapiens
agagaagccacgaaggctgcaagagaggcgctgttgagttctgcagttgatcatggattgtcactgctgttccaagggcacacgcagagggatttggaat

SEQ ID NO: 324396 - DNA, 87 bp, Homo sapiens
tgccaggcagaaggcctctctcctgatacagcaggcgctcaccatgttccctggagcctgtcaggattggagctgctttccgagcac

SEQ ID NO: 324397 - DNA, 101 bp, Homo sapiens
gagtgtcaagttcctcctcagtcgggctggagagtcgagagcgggtcatggctacggaaaaacctgcgagccctggtggttgtccatgctacatggtatgt

SEQ ID NO: 324398 - DNA, 101 bp, Homo sapiens
gaggctgtagtggggctggtggtgcttccaactgcgggacaggaagtggccgtagcggcttgttggataaggcagcgattattagtagagttcagtgtagg

SEQ ID NO: 324399 - DNA, 100 bp, Homo sapiens
attccagttttttaagaagggacaaaagatggggtcgaggatttggtcttttgggttccatttttggaaaggatggtgtattaaaccagccaaacagtgt

SEQ ID NO: 324400 - DNA, 98 bp, Homo sapiens
ccaagaggaaggagaattcaaccttttttgataagaaggatgcttcctttggaaattgcacttacaatctcaccattctcgactgtttgcagggaatc

SEQ ID NO: 324401 - DNA, 98 bp, Homo sapiens
cgtgattcccgtgattgcgttacaagctttgtctccttcgacttggagtctttgtccaggacggtggtgatctttgtgaagtctgtgcagcggtgcat

SEQ ID NO: 324402 - DNA, 50 bp, Homo sapiens
gcctggtggtgtatctccgacactcagagctctcccttcagcgctccagc

SEQ ID NO: 324403 - DNA, 75 bp, Homo sapiens
aataaaggaaagacctcagagtgttctcattcaaagcagtattcagcgatttcaagagaagttttttatttttgc

SEQ ID NO: 324404 - DNA, 75 bp, Homo sapiens
ttattaatctcagggaactggatgtcagcaagaatgaggatggcattccctgtggatatgctggaaaattgcagc

SEQ ID NO: 324405 - DNA, 96 bp, Homo sapiens
ttgttattggagaaacatgcagattatatcgcatcctatggctcaaagaaagatgattatctatatgttctcctttcagccaagacctttcaccag

SEQ ID NO: 324406 - DNA, 101 bp, Homo sapiens
gcggcggatggcaacctgctccagcgatcagagcgttaagacatggaaggtctttaatgtaactttaaatggttcaccaaaggatgctctaatggatgaca

SEQ ID NO: 324407 - DNA, 100 bp, Homo sapiens
gctatacagatgctgatgaggaactttggcaagaagacccttacgaatatatacgcatgaagtttggtggcaattttggaggtagccccggttatggagg

SEQ ID NO: 324408 - DNA, 100 bp, Homo sapiens
atcttacccccatgggccttcctcgacccaaaagcagaaaggacccaggagcgataacagtaaatcaaataagatatttgtcggtggaattcctcacaat

SEQ ID NO: 324409 - DNA, 48 bp, Homo sapiens
tggagctgggggagccgggcgggcagcgggtggcatgagacgtgggaa

SEQ ID NO: 324410 - DNA, 100 bp, Homo sapiens
cttgggactacacaaaccccaatctcagtggacaaggttatcaatactctggctgaccatcatcatcgtgggactgactttggtggaagtccttggttac

SEQ ID NO: 324411 - DNA, 95 bp, Homo sapiens
gaaggaacagttggaaaatgccttgggggccatctccctggagttcgaatctactttggtgaagcagaacctcctgaacgtctcctaccacatcg

SEQ ID NO: 324412 - DNA, 90 bp, Homo sapiens
cgcctccctcccgcgcgtgctgcgggtctgctcgggggtctacttcgaggaacactctgctccagccaaggtggtgagggcagctgttcc

SEQ ID NO: 324413 - DNA, 100 bp, Homo sapiens
tggacatctcggactccaaaatcagtcaccttcaggccattcagaggaggaaagagaggggaatatgaagtcagccaagccccaagtgaaccacagtcag

SEQ ID NO: 324414 - DNA, 97 bp, Homo sapiens
atggcctggatgagaaatgtgctggggtcgcgtgtcaccaacgtgaaggtgcgcgctgtgattggaagcacctacatgctgacccaggacgaagtcc

SEQ ID NO: 324415 - DNA, 100 bp, Homo sapiens
cccaacagaagaaattgaaattcttcttcgttatggacagcatccaaacattatcactctaaaggatatgttttactgtgcctggctaactatagtcgag

SEQ ID NO: 324416 - DNA, 75 bp, Homo sapiens
aatatgtattgtggcattcaaatcctagcactctgggagaggctggattctagtgacatttataacgaattgaaa

SEQ ID NO: 324417 - DNA, 75 bp, Homo sapiens
ctatcgattacacagttctggatgatgtgggccatggtgtcaagagatgtgaactttgtccccataaggatggag

SEQ ID NO: 324418 - DNA, 114 bp, Homo sapiens
cgggatcgtgaccgagaccgtgaccgagagcgtgaccgagagcgcgaatatcgtcatcgttagaagacgctgaccggaaaggagattgagattgacattgaacctacagacaag

SEQ ID NO: 324419 - DNA, 75 bp, Homo sapiens
gcccaatctcctttctgggcaaacgttccaagaaatctccttggaaaagatgcctagtgtgggctttattccaat

SEQ ID NO: 324420 - DNA, 74 bp, Homo sapiens
cagaagcctcccttccagtcagggacggggttgaagaagttcctggagtatgtgcagctcgggacatctgacaa

SEQ ID NO: 324421 - DNA, 100 bp, Homo sapiens
aatcttccgtaacccctgcacagagcagattctgaaacttcttgacaatttgcttgcgcttataaggaaatgcttccagactgcacacttttacttagag

SEQ ID NO: 324422 - DNA, 82 bp, Homo sapiens
gcccgtctgacaatagcagtgctatgttactgcaatggcatgaaaagatatgatttggctatcaaagaccttaaagaagcct

SEQ ID NO: 324423 - DNA, 99 bp, Homo sapiens
tctatgaccaggcctctccggacaagaggactgaagcagatggcaactctgatcccaactctgaatcaccacgacagcagcatgcatgatggacctcag

SEQ ID NO: 324424 - DNA, 88 bp, Homo sapiens
gctcctaaagcaaacgccaccattgaagtgaaaggttttggggccttgtcacagatgccagatgatttgcatcgaccagcaaactggg

SEQ ID NO: 324425 - DNA, 83 bp, Homo sapiens
tattaaaaggaccatacgagtcctagatgtcaataaccagtccttcagagaacaagagagtgttgcggagataggaacatggg

SEQ ID NO: 324426 - DNA, 100 bp, Homo sapiens
caagaagaaagccagaggaagccattgcccactgctgccgcccagtgttgtgccaagctctcctgatgaaatgtgttctgccccactgggctccagggac

SEQ ID NO: 324427 - DNA, 74 bp, Homo sapiens
gaatctccaatcaccatgattggtgcaggttgctccttgagggcaggacagttcttatggctttatccgttgcg

SEQ ID NO: 324428 - DNA, 100 bp, Homo sapiens
tggttcagcatgaaagcagtaatcagatgtttgccatgaaagaaataaggcttcccaaggttggatggcaagcatgtggtgtttggcaaagtgaaagaag

SEQ ID NO: 324429 - DNA, 75 bp, Homo sapiens
ggatgaggggctctaacacctgtgagctaatctttgaagactgcaagattcctgacctcaattactgtttttcag

SEQ ID NO: 324430 - DNA, 99 bp, Homo sapiens
cacatgtcattataccttcacccagcatttcatccctcgtcgaaaggattggattggcatctttagaaatggctgttgatggtgggtgtggggacactg

SEQ ID NO: 324431 - DNA, 100 bp, Homo sapiens
gaccacctgctcacactcttctcctggtaccactgtgtcccgccgcgtgggccccccagtctctcttgaacgccgcagcagcagctccagcagcatcagc

SEQ ID NO: 324432 - DNA, 76 bp, Homo sapiens
aaacgctcctgtttttctcatctgtgcagtggctcgcaaaggatctccttcatccctctccagaagaggagaagag

SEQ ID NO: 324433 - DNA, 74 bp, Homo sapiens
gcgcggggaaccaaggagacgctcctggcactgcagtggccataaaatgcagtaaaaacaaatccagttcccaa

SEQ ID NO: 324434 - DNA, 50 bp, Homo sapiens
cgggcccatgaccctgcagcgccgagttaccggtattgtaagaacaagcc

SEQ ID NO: 324435 - DNA, 85 bp, Homo sapiens
ccaatcttggacctaccacttgaaaccattagtgagctgggttctctccccttgccaccatgagcgagtcatttgactgtgcaaa

SEQ ID NO: 324436 - DNA, 97 bp, Homo sapiens
aagaaagcaaagcgcagaaatgttggatttgaaggactggcacatcttcacattcatcatgtgattcaccgggatatcaagggccagaatgtgttgc

SEQ ID NO: 324437 - DNA, 83 bp, Homo sapiens
ctgcggggcatccagaaggtggcgatgttggtccaagggaactgggtggtgaagaggagtacgagagggcctccaaagtggac

SEQ ID NO: 324438 - DNA, 100 bp, Homo sapiens
attccatcaagtcctgaaaaatcaaaatggatttagagaaaaattatccgactcctcggaccagcaggacagtttggaaattttagcattcaggtgccag

SEQ ID NO: 324439 - DNA, 74 bp, Homo sapiens
tggaaagctttaggagttcacagttaacaaatgtggcaattattttggatctatcacctgtcatcataactggc

SEQ ID NO: 324440 - DNA, 98 bp, Homo sapiens
gacgaggccgccctcagttgctgctccgacgcggaccccagtaccaagctggttgtcttcttgcctgccctgtgtcgtaaaatgggggtcccttactg

SEQ ID NO: 324441 - DNA, 101 bp, Homo sapiens
cgcatgaagcagctggctaaccagaccgtgggcagtacgtagagaaatcgacactcttaatgaacgtttagctgctgaaggacaagcgattgatggagcag

SEQ ID NO: 324442 - DNA, 82 bp, Homo sapiens
cctgcagctgctccccggtgcacccgcaacaggcgttttgcaatgcagatgtagcggagctggagtttgttcagatcatcat

SEQ ID NO: 324443 - DNA, 75 bp, Homo sapiens
agagttgggtccaaactcttctttgacaagagagacaactctgactttgaggaaatactatgtgaagtatgccgg

SEQ ID NO: 324444 - DNA, 82 bp, Homo sapiens
ctgtcggccccggcccgactctatcacaagaagtctgttcggcacttgaagtactccttgtttaagaaatcactactgggca

SEQ ID NO: 324445 - DNA, 100 bp, Homo sapiens
gattgacagtgtggagagccgtgatatgttccagttgcacatttcctgcaaggactccaaagtggtgaggaaacatgccctgaactgtcacagaatgaaa

SEQ ID NO: 324446 - DNA, 83 bp, Homo sapiens
ctcaaggccatgatcaaaacatgaggaaaccagcgtggtgatagttgggaaaatttccttctgtcccaaggatgtcctgggcc

SEQ ID NO: 324447 - DNA, 100 bp, Homo sapiens
gctttttgcttagcactgaaaattctggataatggtgaatgggttcttgcacgcattgcaaatgccacgaggccaactattcatctgtgtgagattgtga

SEQ ID NO: 324448 - DNA, 98 bp, Homo sapiens
tgccccgcgcgggctgacgggccggagcccgcacggagcggccgggcgggacagcaaaatgatgcttcaacacccaggccaggtctctgcctcggaag

SEQ ID NO: 324449 - DNA, 98 bp, Homo sapiens
tttggcactaccctgaagaactgtaggcatctcttggaatgtgctaaggaacttgatgtccaaataattggggttaaccctactgccaataaagggaa

SEQ ID NO: 324450 - DNA, 96 bp, Homo sapiens
attgccatggctgctggaagaagtctcaaaaagctcccgactaggagacagctgttgcaatcccttaagcatgggtgctattaaaaaaatggtgga

SEQ ID NO: 324451 - DNA, 89 bp, Homo sapiens
tgggctgtgcggtgattgacgtggacgtgatggcccggcacggtcaccacctcccacagccctgctgcaccaggggagcaaggcttcgg

SEQ ID NO: 324452 - DNA, 74 bp, Homo sapiens
tcgagaggaccatcctgggtgctggccctgtgctggagctacccttcgaggaactggagtcccagagaggcctg

SEQ ID NO: 324453 - DNA, 101 bp, Homo sapiens
gatggtggtggatgcggccaactccaatgggcctttccagcccgtggtccttctccatattcgaggatgtacagttacccagcacgtgtacctcctcctcc

SEQ ID NO: 324454 - DNA, 139 bp, Homo sapiens
cttgactccatcgggcgcttctttggcggtgacaggggtgcgcccaagcggggctctggcaaggttcatatccagctttcagagtggcaccgtgcaatttttcttccacaggcctggcttgcatacatgaatcgagctt

SEQ ID NO: 324455 - DNA, 98 bp, Homo sapiens
cgaagtttcaagcagacttcacttgctcttgtacatgagggcagagcttgggatatggctttgtgaactacattgaccccaaggatgcagagaaagct

SEQ ID NO: 324456 - DNA, 97 bp, Homo sapiens
tatgaacaatccgtctggatcacggatgtaggaagtgttcactagagaaaaaatccttattgcgagataacgtggacctattgggaagcttggcaga

SEQ ID NO: 324457 - DNA, 82 bp, Homo sapiens
agccgcggcggcagcagcagtgagagacgccgtccctggggaggcagcactccaagcacgtgtgcccgagccctgggtcccg

SEQ ID NO: 324458 - DNA, 88 bp, Homo sapiens
gatgacagcccctgcccatttactgcgaaaacctgcaacccagagccatcagcccacaaagacatgactaccaacgcgggccccttgc

SEQ ID NO: 324459 - DNA, 80 bp, Homo sapiens
agagcactcaggagaccaggaaaatggccacagggctcctgagagccaaaaaagaggttcttgggtgtctctggggagtc

SEQ ID NO: 324460 - DNA, 137 bp, Homo sapiens
acccgtctcctcaccttctgatacacaccaaccaaccagtcaaccagccattgctgtttactggatacctggagtctcccagttgcacgaaaaggtgctgtgtctagtgctctctacatggcatggttagaagctct

SEQ ID NO: 324461 - DNA, 96 bp, Homo sapiens
gaatgataaacatctatcctactgtacagtatccattagaagtgctttgtttgcatttaattgaatcaggcccagtgcttttacaacagaggaatg

SEQ ID NO: 324462 - DNA, 101 bp, Homo sapiens
gtcttccagagcgtgaagatcaagatcgctgcctgtggaggaaccgattgtgtccacagatgaggtcatcttcccactcaccgtttcactggatagactgc

SEQ ID NO: 324463 - DNA, 82 bp, Homo sapiens
tttgaagacgttccttgaggaggtttgaaaaaatttccttgctgaaacagaatctggagatacagctttcccagtctcagac

SEQ ID NO: 324464 - DNA, 82 bp, Homo sapiens
ccgagtgggaggatggcggaagaggatacgaagcgttttcggcttcctgcccggagctgtgcagcaaacagtcgacccccat

SEQ ID NO: 324465 - DNA, 90 bp, Homo sapiens
gtggtcctctgtgaaggggtcaaatggttgtcatttcatagagaccaaatgagagggttgacactgtatcagaaaaaccaagggaagaac

SEQ ID NO: 324466 - DNA, 96 bp, Homo sapiens
ctgatctgtacccagaaagagtcatacctggagcagcaggtgctggaggtggtgagagccaactatgacacgctcacgctgaagctgcaggatggc

SEQ ID NO: 324467 - DNA, 100 bp, Homo sapiens
tgaaagtggagagtcacagaggggaacagatttcagtgtcctccttagctctgcagcttccttcaaaatgtctactgttcacgaaatcctgtgcaagctc

SEQ ID NO: 324468 - DNA, 101 bp, Homo sapiens
ggccaagatccgcaaggccgcccgggaactgctgacgcttgatgagaaggacccacggcgtctgttcgaaggacagaataacgggctcccagattcacaag

SEQ ID NO: 324469 - DNA, 78 bp, Homo sapiens
gtaagaagaggtcccaatcccccactctttccgccctaatggaggtctccagtttcgctcattgctatggacagtgct

SEQ ID NO: 324470 - DNA, 89 bp, Homo sapiens
ggtgtgtcaaaaggcaaagtgtgttttgagatgaaggccttcccttcttcttggtggtgttcttgagtaagataatctggactggcccc

SEQ ID NO: 324471 - DNA, 100 bp, Homo sapiens
agaagcgctggtcggcgtctggcggtggtaaattcactccagcagcaacctcaggctgcatccccttcagtaccagagccccactctttgactccagtgg

SEQ ID NO: 324472 - DNA, 75 bp, Homo sapiens
attcttattgcttgtggaacaagttaccatgctggtgtagcagagtctactcttcatcttgtgttgagacttcgt

SEQ ID NO: 324473 - DNA, 99 bp, Homo sapiens
aatatgttttacatccaagaactacaggctttacttttgtggtagaccgtctaagagaaggacacattcagctaacgtattttagcaggtggagtgagg

SEQ ID NO: 324474 - DNA, 75 bp, Homo sapiens
ggatgcagatgttgatcactgaaaatgatttatgcaagtttaaggtgcatttggtgccagaaaacagtacatgat

SEQ ID NO: 324475 - DNA, 100 bp, Homo sapiens
tgctgtatgacacagcacctcgaggcaaggaaataagaaaactgcctctgatccaagcagagaagagcagcccgacggccatggaggctgaagagacgat

SEQ ID NO: 324476 - DNA, 90 bp, Homo sapiens
ctttggaggcctgtctggctcctttctctacacaggaggatgttgagaaagagaaggaaacccacagttacctcagcaaagaggagatca

SEQ ID NO: 324477 - DNA, 75 bp, Homo sapiens
ccaacccaaattaccttaattgctcatcatatgcccgaagctcagtggttacggctgtgaaatttacaatttctg

SEQ ID NO: 324478 - DNA, 101 bp, Homo sapiens
aagccaatcgatatgtgggactaagcccaagagacccatccttcctacatcagcaacagggagaagcctccagtggagtaggacactcactgaaaaactac

SEQ ID NO: 324479 - DNA, 74 bp, Homo sapiens
agaagatcatcattaaggacggaggcacgaaggacagaataacgggctcccagattcacaagccccaccaagag

SEQ ID NO: 324480 - DNA, 99 bp, Homo sapiens
tccactttcgccagcccgtgccgcgagcgcggcctgcaggaggctgaccccgcactacatctacccaccagccatcgtgcagcccagcgtggtgatccc

SEQ ID NO: 324481 - DNA, 100 bp, Homo sapiens
tttttattcgttactatgtggatgttccacaggaagaagtgccattcagacttaattcagtgcacaaatgagatgaatgtgaacatcccacagttggcag

SEQ ID NO: 324482 - DNA, 76 bp, Homo sapiens
tgaccttctgccatgattgtgaggcctccccagccacgtgaaactgtacagctggataacttgccaggaatgagtc

SEQ ID NO: 324483 - DNA, 75 bp, Homo sapiens
ttttcttatgcttataagagtggaacagtttcagaatggcttcggttattgcctttccttggtgtactcgcactt

SEQ ID NO: 324484 - DNA, 90 bp, Homo sapiens
gggtgctgaagaagcaaagacctttgatcagctgacaccagaagagagcaaggaaaggcttggagtgttgcggagataggaacatgggag

SEQ ID NO: 324485 - DNA, 100 bp, Homo sapiens
ctgagcccccaggggactgtgcgaactgcagggtactgctactataagctccaggttgacttctcctcagaccacctgggctgtttcaccaagtgccgga

SEQ ID NO: 324486 - DNA, 98 bp, Homo sapiens
tcatggggaaaatctccccggtgactttcagatatcagttttagagaatgtggcgtggagaaattctcaaggaaagagtaaaatgctggtgatgtgct

SEQ ID NO: 324487 - DNA, 83 bp, Homo sapiens
tcagaatcaaaacacaaatcgcctaagaaaaagactggaaaggattcttttagcagccactgctgcatcaggggcttttgttc

SEQ ID NO: 324488 - DNA, 50 bp, Homo sapiens
cagcaacagctcggcgggctggaagaacagatctcggcccctttccaaac

SEQ ID NO: 324489 - DNA, 100 bp, Homo sapiens
tttgccctgaacatcatgaattcccaagaaggaggtgctgaccttaaggaaagagccaaaatgagttccagtgaagttggtccttttgtctccaaaataa

SEQ ID NO: 324490 - DNA, 98 bp, Homo sapiens
actgtgtgtggccagtcatttaccaccaatgggaacatgcacagaggcgacaggaagaagggtattacagccgcctggaagccgagaggcgcagacag

SEQ ID NO: 324491 - DNA, 90 bp, Homo sapiens
ctgaaagggtgaagcaagagaatctgaacctcgtctgtattcccacttccttccagcatgttcaaaagaaagctgcagaatggaaaatca

SEQ ID NO: 324492 - DNA, 100 bp, Homo sapiens
aacaaggatttgaagctggcagtctggttccaggtgtttgaagtggtggaacgtgtagaagagttaagaaggaagtggccagtagcgtgggggaagttag

SEQ ID NO: 324493 - DNA, 80 bp, Homo sapiens
ccgacccctggcacctggcgcccagcgcgcccgtggccgctgccgcctccgccccagtagccggatcgagctgggagatg

SEQ ID NO: 324494 - DNA, 100 bp, Homo sapiens
atttttgtcacctccaacaacatccgcgagatcgaggtgggaatgagatctcgaaaccaaggtggtgaaagtgcatctgatgggcatatctcctgtccca

SEQ ID NO: 324495 - DNA, 100 bp, Homo sapiens
gagtcaggatgtaatgcggagtttcaccaacttcagaaatggcaccagtatcattcagggattccagcagaagttcaccttccacagcaaggagattgtg

SEQ ID NO: 324496 - DNA, 100 bp, Homo sapiens
gccgaactgtgggatccggctgcccaggatccggaggtggcgaagtgtccgacagaagcggacccaggttttgaagtacaggaagaaggttatctggcaa

SEQ ID NO: 324497 - DNA, 83 bp, Homo sapiens
tgctcagtctctgtcagaggaagatcccttggccataaaattttgagtagaaaaatccagaaatttgaaaatcagtatcgtgg

SEQ ID NO: 324498 - DNA, 100 bp, Homo sapiens
aaagtcctctcgggagaagcagcgcctgttcccggggcagatccaggttcagatggcagaagattttcaagtcccggctggtggagttgttagtgtccta

SEQ ID NO: 324499 - DNA, 101 bp, Homo sapiens
aggtgtcagtgttaaaggaacctctacaacgaaggtgaagccacggaagataagttccaaagaactactggttcagattttagctcttcccaagttgtgaa

SEQ ID NO: 324500 - DNA, 83 bp, Homo sapiens
gacctgttcgaggccaacgacctgtttgagagtgggaacatgacgcaggtgctggagaatctggtaaaagcaccattgtgaag

SEQ ID NO: 324501 - DNA, 78 bp, Homo sapiens
gaacttgcagttgaaggagtataacacaggagatggaataaactgagactgcaggacaaagagaaacgtctgaagctg

SEQ ID NO: 324502 - DNA, 90 bp, Homo sapiens
caggagctgagagaccctaccctcactttccgtctgcttggctcccccaggtttggaataccttgtagcaggacatgaggatataagaac

SEQ ID NO: 324503 - DNA, 83 bp, Homo sapiens
caggacccgaggcacatggtgctggttcggggactcgtgctgcctgacgctgagcagcgagctgtcccaggcccgagatgaga

SEQ ID NO: 324504 - DNA, 88 bp, Homo sapiens
aagtgaccaacagttgaatcaaagtatggacacagatattgtactccaagatacttggattacgaagatttggagcgcaagtactgga

SEQ ID NO: 324505 - DNA, 83 bp, Homo sapiens
cctcttcctcacttccctgtactctcatcgctctcggcctccgacacgggggcagctggcattttatgctatgtgggagccta

SEQ ID NO: 324506 - DNA, 82 bp, Homo sapiens
tgcgagtcatcacttcccaggcaggaaaggggttaatgcatcacttgccccttggatctcccttcgtggagacgacaccggg

SEQ ID NO: 324507 - DNA, 100 bp, Homo sapiens
cgcggcagcccgtggagtcggctgagggaaaagcgaggcaaggcaggcgggtactaggttttgacaagcttgcatcatgcgtgagtataagctagtcgtt

SEQ ID NO: 324508 - DNA, 50 bp, Homo sapiens
ccggaaccgcgtggccctgaaggactcaaagtcctctggctcacagcctc

SEQ ID NO: 324509 - DNA, 101 bp, Homo sapiens
tagccgggagcttcgacttcagatgcttattattgataactttatacctcgggattatcaggagaagccccgatatccaagcaaaagaagagttatggaag

SEQ ID NO: 324510 - DNA, 101 bp, Homo sapiens
ggaagttgattactcagtctctaaaaagctaagagatcgagatggtgatcatggagcgtagcaagctctcagagctggccgccagcacctccgtgcaggag

SEQ ID NO: 324511 - DNA, 90 bp, Homo sapiens
ccaccaaggggttcagcttattgacttctcaccttgtgaaaggcagtttcccagctacctcgagacggtgacaaaggacatcctggcccc

SEQ ID NO: 324512 - DNA, 100 bp, Homo sapiens
ctggaggcgccggcggccttcacctctggaagtacaacacagtcactcctggcggcaaaccaaacaaaaccagagtcatctggggaaaagtaactcgggc

SEQ ID NO: 324513 - DNA, 83 bp, Homo sapiens
actgagacacagagtcccccccaggaaacctgagcccctggttaaggtagatgacattaatgctgataagaatatctcttctg

SEQ ID NO: 324514 - DNA, 100 bp, Homo sapiens
gtggtaggaaaaatccgcagagaaattcagaacctcaagcttttcaggcatcctcatataattaaacttttaattggttggggtcagataagaagaggag

SEQ ID NO: 324515 - DNA, 101 bp, Homo sapiens
ttaaaaaaaatgaatcaaaagaaaatctctaaatgcagattccagaaaaattacagcacatctcagtgaatttgcaagtgattcaagtccagcatccagcg

SEQ ID NO: 324516 - DNA, 100 bp, Homo sapiens
agacatgaagtagaaaggaccaagtcaagaagaatgacaaataatcaacagaaaacccgtattcttcaggagccaggtgagaatttcaaggattatcgac

SEQ ID NO: 324517 - DNA, 83 bp, Homo sapiens
tatacttctgcaaatgaagacctctctaattttggccttcaaattaatactgacaaagagagcaggatgaatggacagtacca

SEQ ID NO: 324518 - DNA, 134 bp, Homo sapiens
gcctggccgagtgatccgggacaaactaaggatttatgctcactgcacaaaccaccacaagaccagggatgctgtgctgctctcccatgagccagtcaccgagtcggtctgctgcagccctttctgaacctctg

SEQ ID NO: 324519 - DNA, 90 bp, Homo sapiens
ggacagcagacccactggatgagggcccgaaaatggtttcagcacctgtgtcagaatgccagctgatgaagaccgagaggccgcgaccca

SEQ ID NO: 324520 - DNA, 100 bp, Homo sapiens
cggacccgttaacgcgttgattcgttccgtgctgctgcaggtccattacatcgtcgcgtctgctcaggtctggatgataacacgctatgatctgtaccac

SEQ ID NO: 324521 - DNA, 101 bp, Homo sapiens
gagctgaagactccagtatgcaactgactacaaggaggtgctggagaatctggtaaaagcaccattgtgaagcagatgaggatcctgcatgttaatgggtt

SEQ ID NO: 324522 - DNA, 88 bp, Homo sapiens
cgaatatcgtcatcgttagaaggaacaaatgagtgctcttcaagccaaactggatgaagaagagcataaaaacctaaagcttcagcag

SEQ ID NO: 324523 - DNA, 100 bp, Homo sapiens
tggacaccagcacccccagacctgacccttggggaagcttttcttgcctggagaagagggaggggagaggacaagggccctggctactcctggattccta

SEQ ID NO: 324524 - DNA, 75 bp, Homo sapiens
cttctttgacgtggacacctcacaggcctgtagtggtggagacacgcccagtggatgatcctactgctcccagca

SEQ ID NO: 324525 - DNA, 100 bp, Homo sapiens
cggagatgacaagtgagaaagaagtgtccggccgggccatccccttcaggtggctcaatcccttgtttaaaattggccataaacggagattagaggaaga

SEQ ID NO: 324526 - DNA, 98 bp, Homo sapiens
tgaatttccatgtcaacatagtcctggacacattcagctaacgtattttagcaggtggagtgaggttgaagattcctgtgacagcgatgccatagaga

SEQ ID NO: 324527 - DNA, 75 bp, Homo sapiens
aatcagttttccacatatggcgatgccaatgccgctggtgcttattatcaggggccaactcaccctatgcagcac

SEQ ID NO: 324528 - DNA, 88 bp, Homo sapiens
gcaattaatggaaatggacccaccaaggcagcacacttctgcttttgttccttcatcaggacgaatttactcttttgggcttggtggt

SEQ ID NO: 324529 - DNA, 87 bp, Homo sapiens
gcgctggagttggtgctgggaaacccggggctaatgttgacaacaggctcgagcttagaccatgctcagcctccaagcagccttgtc

SEQ ID NO: 324530 - DNA, 100 bp, Homo sapiens
gaagagagctctggggtcgacacggcagaggtggaggagacactgaagcgactgcagagccagaagggagtgcagggaatcatcgtcgtgaacacagaag

SEQ ID NO: 324531 - DNA, 95 bp, Homo sapiens
ggaaaggagaggatcccggagccggtactgggaacaggtgcttgccttgctatggccacggtttgaactgatcctggagatgaatgttcagagcg

SEQ ID NO: 324532 - DNA, 73 bp, Homo sapiens
gaggtggacgccatcgtcaacgccggctccagcccccttttggacatcgttggcggccggaaggcgaggcccc

SEQ ID NO: 324533 - DNA, 100 bp, Homo sapiens
acgtgggcaacgtacgtcagacggcagtggtggaaaagatccatgccaaggtggtcattgggactcccacacttaaacaaagaaaggaaattctgcaagt

SEQ ID NO: 324534 - DNA, 50 bp, Homo sapiens
gttaaggattccaagtaactcttatttgcccatggaggtgtttgtggacg

SEQ ID NO: 324535 - DNA, 100 bp, Homo sapiens
cggccctatgacaagcacatcagccctcggcagaacccactcgtcgctctgggtgccattgggttaaagcacgaattgggagctctcagcgacatcacca

SEQ ID NO: 324536 - DNA, 75 bp, Homo sapiens
cagcctcccaagtagctggaactacaggcgcccactaccacgcccagctttcaagatgttagaaagttcaagcca

SEQ ID NO: 324537 - DNA, 100 bp, Homo sapiens
ctgagctagagactgccggtgccttcatgggcaggactaggccgaaaactccccagtgtatgggtttcgacagaccatgatgaaattgagaatgtggcca

SEQ ID NO: 324538 - DNA, 101 bp, Homo sapiens
agaagctcgatctgaagaggcagaaggagcaggctctgcgggaggtggagcacctgaagagatgccagcaggtatggatcctggcgggagccagtcaaccc

SEQ ID NO: 324539 - DNA, 100 bp, Homo sapiens
atagcctcaaactcccaggctcaagcaatcctaccatgtcagccttcccagtagctggaactacaggttttcttccgccatctgtgacagcttcttgatc

SEQ ID NO: 324540 - DNA, 83 bp, Homo sapiens
actattcagatcatccaagtggaggttcctacagagattcatatgagagttatgatccctactctgttaaaagaaatgtggca

SEQ ID NO: 324541 - DNA, 142 bp, Homo sapiens
gcaccagctgttgcaagggaccttctccggcccctccagctgccccctgtgtggcaaacctttcttgagctcaggctctgggcgtggggaggctgagacacgggagtgcatctactacaacgccaactgggagctggagcgc

SEQ ID NO: 324542 - DNA, 97 bp, Homo sapiens
ttcccctctggcgcctttgctgctcctctctctgcacgttccatacgttttgaagagctgtgcagaatttatagagactcacggcatcgtggatgga

SEQ ID NO: 324543 - DNA, 75 bp, Homo sapiens
caggggccccgaagaactcccacaatgccacaggaggaggcagcagaacagtccactttggaaagtgaagaatgg

SEQ ID NO: 324544 - DNA, 102 bp, Homo sapiens
agcccccaacaccacgacaatccagtttcctgctaatttgcagcttcctccaggtaggagcattgcttttcgtggtgaaagaggcaatgatgaatctgccat

SEQ ID NO: 324545 - DNA, 100 bp, Homo sapiens
agagagagaggtggacagatctgagagatactgaggaaagatatgatccgccaaatgatgattaaaatatttcgctgcattgagccagagctgaacaacc

SEQ ID NO: 324546 - DNA, 100 bp, Homo sapiens
ggagaacgaccggctcctgctcaagatctcagagaaggaggaggtgaccacgcgcgagatcgacgacatcgcggatggcgccgtgaagcccccacccaac

SEQ ID NO: 324547 - DNA, 100 bp, Homo sapiens
cggagaggtgctcggattctcgtagctgtgccgggtgaccaagaatatggcccaggtgaccaaagccctggacaaggccctgagcaccatggacctgcag

SEQ ID NO: 324548 - DNA, 100 bp, Homo sapiens
cgagcttggctgaactgaggaaccagatgggcagccccttctctgtgaaggtgacaggcgagggccgggtgaaagagagcatcacccgcaggcgtcgggc

SEQ ID NO: 324549 - DNA, 82 bp, Homo sapiens
gttaggtgacaataagcagacagaagagccaagcagctatggaggaaaatcagtccaaaagaaactcttccttcaaaacctg

SEQ ID NO: 324550 - DNA, 82 bp, Homo sapiens
ttttcaccgcggccatcctgcaggcacagttgccgattacagtgaagagtgaatctaccaagaacgttggcaatgaaaattg

SEQ ID NO: 324551 - DNA, 82 bp, Homo sapiens
gggagaagaggaatgttccctgacaatttcgttaagatccaggatgagaagactgataaaagaagaagctagctgaacagct

SEQ ID NO: 324552 - DNA, 83 bp, Homo sapiens
gcctcggtgcagggctccaccccgtcgcctcgacagccaggcgggcaccacggcaggggctgagctaccctcatggaagggag

SEQ ID NO: 324553 - DNA, 100 bp, Homo sapiens
tgtttgaaataataacaagctccaggaccttctacgtacagatctcccttgagtttagaaatctggctgagaaataccaaacagtgattgccgacatttg

SEQ ID NO: 324554 - DNA, 100 bp, Homo sapiens
cttaaaggactgatttttagaactccacatttgagagggttgccctgggttgtgcaatggcaacggcagatgtaccttagacctgaatggttggcactgc

SEQ ID NO: 324555 - DNA, 90 bp, Homo sapiens
tctcatgcctcagccaccagagaggctaggattacaggagctcgaggccatgagcagatataccagcccagtgaacccagctgtcttccc

SEQ ID NO: 324556 - DNA, 82 bp, Homo sapiens
aatatatcctctaaatctgatgtttgtaaaagaatggacttggtctgccagagaatgttgaatcagggatttctgaaagtgg

SEQ ID NO: 324557 - DNA, 76 bp, Homo sapiens
tggaaagaagttgcaaaacactggcaaagccttctagacaagctcagtggaatctgaagggcccaccccatggagg

SEQ ID NO: 324558 - DNA, 90 bp, Homo sapiens
ggagacgccgtggcagcctgaacggagtgtgcgacggattgggagaaagagcttaattcccgagatggagcttgggaaagaatatgtggc

SEQ ID NO: 324559 - DNA, 100 bp, Homo sapiens
ggcgcgggggcagagcctcgcctgggttctggaggctgcggggccatcgctccagggaactgctcgcagaaagaagaaggtggttcatagaacagccaca

SEQ ID NO: 324560 - DNA, 82 bp, Homo sapiens
attgtggaatggaacgtacagacatgcaaagtaaagtgggtgctggtgacagctttgtgggagctctggccttctacctggc

SEQ ID NO: 324561 - DNA, 75 bp, Homo sapiens
aactacaaatatgaacaatattctggagacattcgacagctaccccgcaagtctggaaaagtttgaaattccagt

SEQ ID NO: 324562 - DNA, 100 bp, Homo sapiens
gctgaggacccaaagtcatttcccaggctggcggagataaaggcatgacttcctggcaccacagggaaaatcgggtgcaagcccagaaactatttcccca

SEQ ID NO: 324563 - DNA, 82 bp, Homo sapiens
gacagaagtagaaagggtggtggctgactgtctgacaaattgttatcagggaaaaagaccttgatgaagttctgcagaccca

SEQ ID NO: 324564 - DNA, 83 bp, Homo sapiens
atgtcgccgtcccgggcggcgtggacctcctcaccctgccgcagctgtgcttcccagataacgaaggaggcccaacttcattc

SEQ ID NO: 324565 - DNA, 50 bp, Homo sapiens
accgggctgttgcttccagaagtgaaggacaagcatgaggagaaccaccg

SEQ ID NO: 324566 - DNA, 82 bp, Homo sapiens
gtggagccaccagcctctccctgtgacaaaaatgctgagtttcttccgtagaacactagggcgtcggtctatgcgtaaacat

SEQ ID NO: 324567 - DNA, 100 bp, Homo sapiens
acggccgcggggactcggagctgagaggagctgctgctcggaccagcgcggtttttcgttggaatatacgttgcacatttatggcgattctgagtgtgag

SEQ ID NO: 324568 - DNA, 100 bp, Homo sapiens
tgctgctgctgcccgcgtccgaggctcgcgggcggcgggcccgggctacagatgcacatgttgaatggagctcttctggcattgctgtttcctgtggtaa

SEQ ID NO: 324569 - DNA, 82 bp, Homo sapiens
aaatcattttgaaagctgcacaagaactgaaaatgcttcgatgtgaagttcatttccaatccgccctccatggtggcagcgg

SEQ ID NO: 324570 - DNA, 78 bp, Homo sapiens
cactttcagaggatatatcccagcaaaacaaaccgagcccgatgacattggccagtcacccattgtctccatgccgga

SEQ ID NO: 324571 - DNA, 97 bp, Homo sapiens
cctggcagggcagccagctggccaggggggcccgtctgggccagccacctggtgtccggttgattcttcaccacactgaaaccattaggaaaaatcc

SEQ ID NO: 324572 - DNA, 100 bp, Homo sapiens
tctctttctcttcatattttctcacatatacaacacgattcttctaatggatgggaacatgggcaaagaagtttgtcatcctgatattggtggcaagatc

SEQ ID NO: 324573 - DNA, 100 bp, Homo sapiens
gcacccgctcagcgagctcctgggcatcccgctggaccagacttcctttaataagtgttgcgctggttcaaggttgggcattgggtggaggagcagaatt

SEQ ID NO: 324574 - DNA, 71 bp, Homo sapiens
cccaacagcggaatcatcgatgcaggggcctcaattaatgtatctggaaatgactacagagctggaggcat

SEQ ID NO: 324575 - DNA, 100 bp, Homo sapiens
ggacccggccatggcgctggacttcttggctggatgcgcgggggatgcctgaggaaacccagacccaagaccaaccgatggaggaggaggaggttgagac

SEQ ID NO: 324576 - DNA, 51 bp, Homo sapiens
cggagtgattgcctacatcttttacagaatgtctgaaggggacagtgtggg

SEQ ID NO: 324577 - DNA, 98 bp, Homo sapiens
ccacccacagccccccagggaccgtctccgccctccaggaaaccaaggtaaaataccatgaagattttgaaaaaacaaaggggagaggctttactccc

SEQ ID NO: 324578 - DNA, 82 bp, Homo sapiens
ccctgccccagcccatcctctctaaccaaggcacagagcagatgctgtcccatggcaccgctgatgtggtcttagaggcctg

SEQ ID NO: 324579 - DNA, 82 bp, Homo sapiens
tggcgtgtccctgcagcgaaggatcctggttgtttgatgaaggccggaacaactttgaaggggaggtcaccaaggagaacct

SEQ ID NO: 324580 - DNA, 74 bp, Homo sapiens
ctggacctatgaatatccagtttgagccatcggatctaagatccaaaaggtcatggaaaatggaagatttgcaa

SEQ ID NO: 324581 - DNA, 80 bp, Homo sapiens
gcctgcagtcgccgccgccgccgccaggtggaggaactgcaatgtctggtggagaacagaaaccagagaggtactatgtg

SEQ ID NO: 324582 - DNA, 98 bp, Homo sapiens
ttcaggccatttttcttaacagcaattgctttgaacatctcatacgactgctacagaactgcaaggtgaccaagaatatggcccaggtgaccaaagcc

SEQ ID NO: 324583 - DNA, 100 bp, Homo sapiens
ccatcatgagggaaatcgtgcacttgcaggccgggcagtgcggcaaccaaatcggcgccaagataagaccatcatcatgtggaaactgaccagggatgag

SEQ ID NO: 324584 - DNA, 100 bp, Homo sapiens
accgggactgctgctctcacggtccagtctcaggaggacaatctgcgcagcctgttgtgtgacttcattgagacacattacctgaatgagcaggtgaaag

SEQ ID NO: 324585 - DNA, 74 bp, Homo sapiens
cagattctggaaactgtacattgaagcagaggcctagttccccgagagcgttcagacagtgggggctcaagctc

SEQ ID NO: 324586 - DNA, 144 bp, Homo sapiens
ccggagtggggaagacctgcgtcctttttcgtttttcggatgatgccttcaatactacctttatttccaccataggtactaggttttgacaagcttgcatcatgcgtgagtataagctagtcgttcttggctcaggaggcgttg

SEQ ID NO: 324587 - DNA, 78 bp, Homo sapiens
aacgtggagatcaactcctctctgttaatggagtggttgttcctcaaagtcattcaagctgtactcgccgaaggagcc

SEQ ID NO: 324588 - DNA, 93 bp, Homo sapiens
gcggcgggaccggaggggatgaggaggaagagtggctctatggcgacatgaagagtatttctggagaagaatcatcccatggagtgattatga

SEQ ID NO: 324589 - DNA, 83 bp, Homo sapiens
gcaaattaaagcaattatgaaagaagtcattccttttttgaaggcgggtttcttccctaatgtgggaagttcgatatatagag

SEQ ID NO: 324590 - DNA, 90 bp, Homo sapiens
gcaacacattttcctatacctctggaaagaccacagcaagattctttcattcgtctcctcctagcctgggggaccaggctcgaactgacc

SEQ ID NO: 324591 - DNA, 75 bp, Homo sapiens
aaggattccaagtaactcttatttgtggatatgctgctgatgaaatcactcactgcatacggcctcaggacatca

SEQ ID NO: 324592 - DNA, 75 bp, Homo sapiens
gtcttcccaggctgtcatataactcctgagaatagtggttcttaactctgcacccgacaggaggatcctttattc

SEQ ID NO: 324593 - DNA, 78 bp, Homo sapiens
aacactgcatggagcggatccagaaattacagaagacatccccgtgaagactttgaatatgaagactgtgtatgtttc

SEQ ID NO: 324594 - DNA, 83 bp, Homo sapiens
cacaactccaaaaactgaaaagataagcactgccttgatgatccgtatggggaactgttgggtaccagtagagaaaaacaaca

SEQ ID NO: 324595 - DNA, 75 bp, Homo sapiens
atccattccatgggttttattcacaggttgacgagattagagagatggttgacaatgatttaggttttcaacagg

SEQ ID NO: 324596 - DNA, 100 bp, Homo sapiens
gctgaatgctgccatcccttctgctaatccagcaaagaccatgcagggcagtgaggaattacatgaatgacagtcttcgaaccaatgtgtttgttcgatt

SEQ ID NO: 324597 - DNA, 100 bp, Homo sapiens
gcggaacgccgtccacgtgaaggggcccttctcggtggaggccgacccatccaggcgaggccttcttgggcagctttgtggccagcgggatggggccctc

SEQ ID NO: 324598 - DNA, 100 bp, Homo sapiens
ttttgatgcatctctacctggaactttgccgatcagtacaatggaacatgaattttcaataaaggaacgtggatttgaagttcaattgagagagatggaa

SEQ ID NO: 324599 - DNA, 100 bp, Homo sapiens
ataatgcaatagaagctgtggatgaatttgcttttctggaaggtcggccacacacccggagcaccgtcatcacagcggtcaagttccttatctcggacca

SEQ ID NO: 324600 - DNA, 90 bp, Homo sapiens
caacttatgaaattcgtcaggacattgaagatagtgtcagcagaatgaagccatgattgctcgctgtaagcagctcatctgtgaccccag

SEQ ID NO: 324601 - DNA, 100 bp, Homo sapiens
cgctccgtggccttagctgtgctcgcgctactctctctttctggcctggaggctatccagcgatgacagtgatgggattccgtggtcagaagaacgggtg

SEQ ID NO: 324602 - DNA, 100 bp, Homo sapiens
tgaaaaacttataccccagttataaaaactacacatctgtgtatgataaaaacaatcttttgacaaataaggctgagcacagggttgctccaggtgggcc

SEQ ID NO: 324603 - DNA, 75 bp, Homo sapiens
gcaagcttcttcagaaacgaaggacgctgttaagggaagaaagtcggaggctggctttggctgcgaaaagagaaa

SEQ ID NO: 324604 - DNA, 74 bp, Homo sapiens
actcagttgtgcgttgcggccagtcgccactgcttgtttctaagacctcagagaaatttggaatctatagaccc

SEQ ID NO: 324605 - DNA, 83 bp, Homo sapiens
ggcggatggaagggaggagactcctgaccctcagaatggcaacaagcagtggtggtttggtggtggatgtgacctcactccaa

SEQ ID NO: 324606 - DNA, 90 bp, Homo sapiens
taagaatgccctgctcagccagaatccggagaagtttgtgtaccctgtcccatacttcacagagaatgcagttgtcttgacttcaggtct

SEQ ID NO: 324607 - DNA, 50 bp, Homo sapiens
gattcggaactttggaaaaactgtgagacagggtcttgctctgttgccca

SEQ ID NO: 324608 - DNA, 75 bp, Homo sapiens
tgctgatggtgatggagattttgatgtggatgatgccaaagttttattaggtatggcatttcaaatatagataca

SEQ ID NO: 324609 - DNA, 90 bp, Homo sapiens
gcctttttctcttgtaagcatgcttgtcacccagggactagtctaccaagctcctgagactggacagactgcaggacaattccagacacg

SEQ ID NO: 324610 - DNA, 50 bp, Homo sapiens
ggaacgtctgtctgtaccagcatcggacttaattcagtgcacaaatgaga

SEQ ID NO: 324611 - DNA, 83 bp, Homo sapiens
atggaaaatcgcttggttaaaacctgacacttttaacagaacatacatatgatagttgagaaagacacatattctgatcatga

SEQ ID NO: 324612 - DNA, 100 bp, Homo sapiens
tacaaagaccaggcctgctatatctttcaccaccgttgccgccttctcgaggtattctccaagcatgacgatgagtgtgtgatccccccttctccgagac

SEQ ID NO: 324613 - DNA, 82 bp, Homo sapiens
cggcgcgccgcagctgcccaggccggaccgggccgggcgcccgcaggtcgcaatggaagaagagatcgccgcgctggtcatt

SEQ ID NO: 324614 - DNA, 75 bp, Homo sapiens
cacacacaacgcttgttatgttttcatcacttctctccagaaggtatgggctacgtgagttcgtggtgattgccc

SEQ ID NO: 324615 - DNA, 101 bp, Homo sapiens
aagcagatgggcaaacagaagagattttggattctcaaaacttaaattcaagaaggagccctgtcccagacaagttggatggcttgaggactggtactaaa

SEQ ID NO: 324616 - DNA, 75 bp, Homo sapiens
tgaagaactgtctcctggaattacattgaatatacagtggaaattgcaacactaacaagagagaatggaaagaca

SEQ ID NO: 324617 - DNA, 101 bp, Homo sapiens
taaattatgagaaagaagaagaattcctcactaatgagctctccagaaaattgatgcagcctctacggcagacacatgcaggccaacccagaaccaccgaa

SEQ ID NO: 324618 - DNA, 100 bp, Homo sapiens
cgccatcgttgctgccttcttcgtcaagttttcggctttgtgagaaaccttaccatcaaacacgatggccagcaacgttaccaacaagacagatcctcgc

SEQ ID NO: 324619 - DNA, 82 bp, Homo sapiens
caccgccttccggcagaagctggtcagtcaaatgtcagcccaaggccaaccccactgtcactctgttcccgccctcctctga

SEQ ID NO: 324620 - DNA, 75 bp, Homo sapiens
tgcctgagcagtcagaaggcaaagaacagaagatcctccttggcagtgactggctgtgaggactgcctggctgcc

SEQ ID NO: 324621 - DNA, 100 bp, Homo sapiens
aactcagctattgccataccttgctctactaaccattccaatgagaaatcaagatgaggtttatataactttccaagacaaggaagttgtgcaaagcctc

SEQ ID NO: 324622 - DNA, 98 bp, Homo sapiens
tcagaacaatcttgaatcatgaagctactaaccagagccggctctttctcggatgaagatcttctcccaagtaaatattttgaggttgactttccaat

SEQ ID NO: 324623 - DNA, 100 bp, Homo sapiens
ccagcctgtacgctatcatcgtggagatatctttgaaaatgtggactatgttcagattctggcatccacgtgagcccagtgatcccaatgagcgctgcgt

SEQ ID NO: 324624 - DNA, 82 bp, Homo sapiens
cttctaatactcctcctctaacatgtcagcgttattgtaatgcaagtatgtcctggatgatgaatacacaagctcagtaggc

SEQ ID NO: 324625 - DNA, 100 bp, Homo sapiens
gctgctcttctccaggctctgtggagaccagttttgattttaaatgttctcaatccagactaaagacaaccaagtattcttctcagaaagtgataggaac

SEQ ID NO: 324626 - DNA, 100 bp, Homo sapiens
cgggagcggggctgctgctggcctttctccgcgcgctcggctgcgctgggcgggccccaggcaccatggctgaggaaacagctccagcagttcttgagcg

SEQ ID NO: 324627 - DNA, 75 bp, Homo sapiens
ccggggtgctggtgggggctgccgtgtttggcagcttggcagacagggccaattcctgtccccccagcagcatgg

SEQ ID NO: 324628 - DNA, 80 bp, Homo sapiens
caggccacgctgtccgtccgcagtaccgacgcctgcaggttagctttatacgtctacgaatatttactgcacgtaggagc

SEQ ID NO: 324629 - DNA, 75 bp, Homo sapiens
cttttcacagaaggactgaagagtctgacaggacaagtccagaacgagatcctctcattcttctgtctcggaaaa

SEQ ID NO: 324630 - DNA, 75 bp, Homo sapiens
tggagcctgacgagctggcggttggcccgccacaataaactgttgcagcagatgctcaaaccaggatcggatcca

SEQ ID NO: 324631 - DNA, 100 bp, Homo sapiens
ctgctggcagcaccgacgaacccccaatgctgaccaaggaggagcctgttccagaactgctggaagctgaggtactggaagttggaccctgctcaggtct

SEQ ID NO: 324632 - DNA, 78 bp, Homo sapiens
cggtttttctttgtggtgctcaccttcatcgtcactgttgtggcagcactgcctgaaggtatgagaccagattctaat

SEQ ID NO: 324633 - DNA, 74 bp, Homo sapiens
cgggaggggacggccgccggagccgcgaggccaagccaggtcagagcagcccaccatgggatggggagggggtg

SEQ ID NO: 324634 - DNA, 50 bp, Homo sapiens
cgttggccttcgtacccgtcttgattgagcactttcatttggacccgtgg

SEQ ID NO: 324635 - DNA, 82 bp, Homo sapiens
gcttttccttctctgcccttacccagggcaggtgtctgccgctccttcccctgaggtgtgagctgtcagtggagaagtccac

SEQ ID NO: 324636 - DNA, 104 bp, Homo sapiens
acagaaccttccaaatttccttttccaactaagcaaaagagctgtgtctgaacatcagctcctccatgacaaggggaagtccatccaagatttacggcgacgat

SEQ ID NO: 324637 - DNA, 100 bp, Homo sapiens
gagaacgtgcgcggggtgatcaccatgaacgaggagtacgagacgaggttcctgtgcaactcttcacagacagcaaatcaaaaggcctccagtggataat

SEQ ID NO: 324638 - DNA, 89 bp, Homo sapiens
tgccctccaacctgccccatgaagcaacccgagacaccattttcagaggatacctcatccccaaggtcatgaggatctatgatacccag

SEQ ID NO: 324639 - DNA, 75 bp, Homo sapiens
tttcctctcgggaagagatagatcatgcagagtattacctttacaaggacactccggacgcaggcccggccagga

SEQ ID NO: 324640 - DNA, 90 bp, Homo sapiens
aggtcctcgggggcggcggccacgccaaggacggcagacggttgatgatgaagcgccggccgtgtaaatgaagatcgggtgaggagcagg

SEQ ID NO: 324641 - DNA, 75 bp, Homo sapiens
gccaggggcggacgaaaccatcggtagactccacaaggattcaagccaaaactcgagaatttagggaacgacaag

SEQ ID NO: 324642 - DNA, 100 bp, Homo sapiens
agaagaccaccatcaacaatgagtacaactaccgctgctggaccacaaaccgctgccagaaaaagccaaggattgtcaccagtgaagaggtcattattcg

SEQ ID NO: 324643 - DNA, 100 bp, Homo sapiens
gccgccggctccgcggcgatggcgctctataacccctaccgccacggtgcttattgccaacaacgggattgccgccgtgaagtgcatgcgctccatccgc

SEQ ID NO: 324644 - DNA, 75 bp, Homo sapiens
ttcattcatgaaaagcatgcccatacgattaaacctgcgtatttaagtttgacaccatatctgagaaaacatctg

SEQ ID NO: 324645 - DNA, 90 bp, Homo sapiens
gggatgttgaaggaggaggacgatgacacagaacgcttgcccagcaaatgcgaagggctgagccggatcttgaagactcgtggggaaatg

SEQ ID NO: 324646 - DNA, 75 bp, Homo sapiens
gctggaccagttgatgggcacctcccgggacggtctcgtctacagaggactggtctttcaatagcaagttttcac

SEQ ID NO: 324647 - DNA, 99 bp, Homo sapiens
cttcaagccaaacatcaagcagaatgtgatttgcttgaagatatgagacttaattcagtgcacaaatgagatgaatgtgaacatcccacagttggcaga

SEQ ID NO: 324648 - DNA, 99 bp, Homo sapiens
gtgagccaagggatcatgccgcttttcagcattgcaaataacaatctcagctactgggatgcccccctgggaagttcttatatgtgcaacaaagagcag

SEQ ID NO: 324649 - DNA, 100 bp, Homo sapiens
cgaggaaagaggaggaaaacaaaagctgctacttatggaagatacaaaggtgaagctgtggtctaccaatctagacaactcagtggcaagcattgaggca

SEQ ID NO: 324650 - DNA, 100 bp, Homo sapiens
atgtttcctaaagttcgtgaatctcaacttcttggagaacagccatctctggaagaagccatcagaatagcgtctagaatccaacaaggagaaacgccag

SEQ ID NO: 324651 - DNA, 82 bp, Homo sapiens
gacagacagctggcaagaggcagcctgggggccacagctgcttcacacgaaagcaagagattatcaaagtcactgaacaact

SEQ ID NO: 324652 - DNA, 106 bp, Homo sapiens
ccgagcagcgccagcggccgagcgggcggcttcctggcctgggcgctccggtggcggcggagatccagagacaatggccccgatgggatggagcccgaaggcgtca

SEQ ID NO: 324653 - DNA, 82 bp, Homo sapiens
gagatggaggcgtcgggcgtgagcggaaatgaggaggagatggtggaggaggctgaaggaagccatcttcgacaagagcaca

SEQ ID NO: 324654 - DNA, 100 bp, Homo sapiens
cataggccaaggagccagacttcctgtgttaactccttcctctgccactttttaccttggggacctcagcacattttctgtgacaagtttccaaacctag

SEQ ID NO: 324655 - DNA, 80 bp, Homo sapiens
ctgagacctgccgtgctgggtggctacgtgcaggcctgccgcgccctgatgattgctgcctcggtcctgggtctgccggc

SEQ ID NO: 324656 - DNA, 100 bp, Homo sapiens
cagaatggcagatggcttatgaaccacagggcttccgttacaagatgaggtctgtgtatgctcacttccccatcaacgttgttatccaggagaatgggtc

SEQ ID NO: 324657 - DNA, 100 bp, Homo sapiens
atatcacccataatcggaatgtgatcacagagcctatttacccagaagtagtccatatgtccggttccagttgttggcaaaggagaggaagaggaagagg

SEQ ID NO: 324658 - DNA, 83 bp, Homo sapiens
gcgactggacttacgaggagcagtttaagcaggctcccccccaaccaagcggcagcggcggagtcggggccggcccagtggtg

SEQ ID NO: 324659 - DNA, 87 bp, Homo sapiens
tctgttatagcaaaatacccacacaaaataaagagtggagctgaagctaagaaattgggagatgcagttaaagacttgatgcttcgc

SEQ ID NO: 324660 - DNA, 96 bp, Homo sapiens
agtgcgagttcctccgagatgtggaaccctcaaaaatgcctccaccagatctctagtgatccctgaaaagttccagcatattttgcgagtactcaa

SEQ ID NO: 324661 - DNA, 98 bp, Homo sapiens
gtggagtccgtgtggatttctcttattttatctgtggcttgaatgtacatttctgagagagggacaaccctccatatgataagggagccttcagaatc

SEQ ID NO: 324662 - DNA, 100 bp, Homo sapiens
gagatgtctcgctccgtggccttagctgtgctcgcgctactctctctttctggcctggaggctatccagcatgacacctttgaggccctgtgcatcgagc

SEQ ID NO: 324663 - DNA, 98 bp, Homo sapiens
agacagaacagttaatcctcaatttaagcctgatctaacccctagaaacaggggctgattcaggagatcaatgatttgaggttaaaagttagtgaaat

SEQ ID NO: 324664 - DNA, 83 bp, Homo sapiens
cgagcacccaggcgactgcctcatcttcaagggcagctgtgcggagggtagtggcagccatgaaccggatggaccagaagaag

SEQ ID NO: 324665 - DNA, 50 bp, Homo sapiens
ccggaatttgaaaagtgcctgaccgcagctgaatgcacagctagaaggtt

SEQ ID NO: 324666 - DNA, 97 bp, Homo sapiens
aagctgcttcgggccccagcgatcaatgagctgagcaatgttcctgttcctgtcatgctaatgccagatgacttcaaagcctacagcaagatcaagg

SEQ ID NO: 324667 - DNA, 80 bp, Homo sapiens
cggagcatggtcagccccgtcccctccccgacgggcaccatcagggcgtgatggtgggcatgggtcagaaggattcctat

SEQ ID NO: 324668 - DNA, 75 bp, Homo sapiens
ttgtcggcccttgccttggcagagctgagatccagacatttaatgtggatgcaccatgccagaccgtggaagatt

SEQ ID NO: 324669 - DNA, 98 bp, Homo sapiens
ggcttctctgaggcggcgagagatggtcaggtctggagctcgaccgggccaggtcttcctatcactgggctctaatttcactttgcaactggtgactg

SEQ ID NO: 324670 - DNA, 98 bp, Homo sapiens
cagcggagctgacacagccaaatgcgaattggactgcactctggatcagtttttgctggcgtcgttggagttaaaatgccccgttactgtctttttgg

SEQ ID NO: 324671 - DNA, 100 bp, Homo sapiens
cgtgccgcagatgcccaccggaatggagaaggaagaggagtcggctttgaagacaagattcccaaaaggagattctctgagatgcaaaatgaaagacgag

SEQ ID NO: 324672 - DNA, 129 bp, Homo sapiens
aagactttcacatacactcgaacccaagctcagcatctgttcatcatcctcatggagtgcatgaagaagaaggaattggatggtggatgttggtggccaacgatcggaaagacggaagtggattcactg

SEQ ID NO: 324673 - DNA, 80 bp, Homo sapiens
aagtgattccccggaatcgtgtgctgggctggtcccccttggtgaaagaacttgtcctggacaacagtcggtcgaatgaa

SEQ ID NO: 324674 - DNA, 50 bp, Homo sapiens
caagaaacatctcaccaatttcaaatctgcctgccgagtgcctgcgattg

SEQ ID NO: 324675 - DNA, 100 bp, Homo sapiens
atgggtgatcggcctgtccagtttgaaattctcagtgatcagtcagtcaactttggttttagtaaaaaaatctgtgacccaggccttactgcttttgaac

SEQ ID NO: 324676 - DNA, 95 bp, Homo sapiens
gaaaatccttataaagaacctcttaagaaatgtatcttgtgtggaaagcatgtagattataagaatgtacagctggtgacagcctgtgccatgca

SEQ ID NO: 324677 - DNA, 98 bp, Homo sapiens
ctttcagacagagtacagcaggatgacctggtgcgttgctgccacaaatgcagtacaagccagctgccatgttgtgagcacataccacatagctccat

SEQ ID NO: 324678 - DNA, 100 bp, Homo sapiens
ggcaaatacaagttcttacagaagtattatcaccggggtgccttcttcatgggctttagccgccagtcttcactcctgttcaagattctctccagtgttc

SEQ ID NO: 324679 - DNA, 95 bp, Homo sapiens
gcaactgcaaagagaagccgaggacagtcattttgtttactcattcagccctgttgcaggtcccaataaactcttcataaggttgacagaagcac

SEQ ID NO: 324680 - DNA, 101 bp, Homo sapiens
cggccgcagtggcgtcctggagccctcctcaggtgagctggagctgcccggctcggcagcgggaagttacgccccatggtgtccatcctgccagcagactg

SEQ ID NO: 324681 - DNA, 100 bp, Homo sapiens
agaacatccaggtggtggtgagatgcagacggtctggaaaatcccgaagcagaagcccgtattcatctaggcattcaagatctcgtagcaggcacagatt

SEQ ID NO: 324682 - DNA, 100 bp, Homo sapiens
ctggatgctgacagaaacaaggattataagcgccatggctatggctagtgttaaattgcttgccggtgttttaagaaagccagatgcctggattggactc

SEQ ID NO: 324683 - DNA, 87 bp, Homo sapiens
gcgggcggcttcctggcctgggcgctccggtggcggcggagacttcccaagtaagaagcggaagaggagccgctggaaccaagacac

SEQ ID NO: 324684 - DNA, 98 bp, Homo sapiens
catgggatgcttatggaatgtgcgagaacacgggtgtgatgaatgcagactctgctaccattttggctgtttggatcctcctttgaaaaagtctccta

SEQ ID NO: 324685 - DNA, 74 bp, Homo sapiens
gcggccgccgccttcttcctccatgaggcagaggaggtggacacggtggacgtctccggcgtgcccgcagaggt

SEQ ID NO: 324686 - DNA, 96 bp, Homo sapiens
cagcagcctgccccctgtctactggctgccttccatccaccgatacatgtaccctgagatgaagatttcttataggaaagacgtgcaggacaccca

SEQ ID NO: 324687 - DNA, 75 bp, Homo sapiens
gacaatttgtagctaagactcccggataccctgaagtcgggaaatggtccgcgggagagctgtggggcttggtga

SEQ ID NO: 324688 - DNA, 121 bp, Homo sapiens
cctggggctgggcatcaacggcaaagttttgcagatcttcaacaagaggacccaggagaaattcgccctcaaagtgagaagccctaccactgcaactgggacggctgcggctggaagtttg

SEQ ID NO: 324689 - DNA, 51 bp, Homo sapiens
gatatcttgaaaagctgccagaaaggcgcggcagctttgccccaggcgggg

SEQ ID NO: 324690 - DNA, 87 bp, Homo sapiens
ctgcgtgaggtcaacctgcgcccccagatgtcccagacgctgcatccaggtagtacacaaactgctctgctaccagaagaagtgtcg

SEQ ID NO: 324691 - DNA, 87 bp, Homo sapiens
ctctgaccttctcgaacaggcagcccatcaaacctgttcccagtgacctgacagcagaggagcgtcaagaactggagaacatccgac

SEQ ID NO: 324692 - DNA, 73 bp, Homo sapiens
gtttctgagctggcttgagccttaagactaccttaaggaggatgaatttacaggaattgaacccttgagcgag

SEQ ID NO: 324693 - DNA, 90 bp, Homo sapiens
tgtaaattatgtgaaacctccaaatgtggagactctccaacatgtgccttctgaccatacaaatgaaacttccaacagtactgtgaaacc

SEQ ID NO: 324694 - DNA, 95 bp, Homo sapiens
cctgacctctacttccaggactcggggctctcacgctttctgctcaagtcctgtcctcttctgaccaaagagatgaagtgtcctcttgctagcac

SEQ ID NO: 324695 - DNA, 100 bp, Homo sapiens
gttacgtgccaccaaagtgacaaagggggcctttggtgacatgcgaatgctttgtgtggaaagcttcagtgtgagaatgtacaagagatacctgtatttg

SEQ ID NO: 324696 - DNA, 96 bp, Homo sapiens
cctttctatgtactgcgcctggatgtggccagttgcaggagaaataacaaggcattgaagaatggcagatgaacggaaagatgaagcaaaggcacc

SEQ ID NO: 324697 - DNA, 75 bp, Homo sapiens
ggacacccctgaagccgagaaatggtgttggtaaatcatgcttattgctacagtttacagacaagaggtttcagc

SEQ ID NO: 324698 - DNA, 50 bp, Homo sapiens
cctcgtttgacaccttcctggatatcttaatgcaattcagacaatgtgtc

SEQ ID NO: 324699 - DNA, 100 bp, Homo sapiens
ggaggaggctgcccggcgcctggaggtggccatgtaccccttcaagaaggtggtgtgtgatgagaacggctctaagggttatgcctttgtccacttcgag

SEQ ID NO: 324700 - DNA, 75 bp, Homo sapiens
cctgcagagctgtggcttaccagctctggcaggctgccctgagcacgctcaaccccaaccccacggacagctgtc

SEQ ID NO: 324701 - DNA, 137 bp, Homo sapiens
gtcgacagtgactaccatgacgaaaacatgtactacagccagtcttctatgtttccacatcggtcagaaaaagatgaacacctcatcaaaatgcagaagcagaaactgcagatgcccccgcagcccccaccgccaca

SEQ ID NO: 324702 - DNA, 82 bp, Homo sapiens
agacttgaacttaatacagcaagaaagaccatcaagtttaccagttaaccccaaagattggctttccttggagtgaaatcag

SEQ ID NO: 324703 - DNA, 74 bp, Homo sapiens
tcagctggatactcttgttaccagaattccaaaggttctggaatttgctgattcccttggaattccgtttttgg

SEQ ID NO: 324704 - DNA, 95 bp, Homo sapiens
agtgagcttgacccagcagttatggaccagttctacatgaaagatggtgttactgcaaaggatgtcactcgtgctgatttggagcaatataaaaa

SEQ ID NO: 324705 - DNA, 100 bp, Homo sapiens
aaccatgagaagtatgacaacagcctcaagatcatcagcggagaccctgttaactactacgttgacactgctgtgcgccacgtgttgctcagacagggtg

SEQ ID NO: 324706 - DNA, 83 bp, Homo sapiens
tgttcagcgtagagtcgctggagcgggcggagctgtgcgagagcctcctcacttggatgatatcatcaagttgaatcgaaagg

SEQ ID NO: 324707 - DNA, 75 bp, Homo sapiens
aagagcaacaatcctctcagcagtgagctagatttgaagaactacgtgacaggtcacgagacctctgccaaccac

SEQ ID NO: 324708 - DNA, 98 bp, Homo sapiens
cccttgttccaaaaattggaaaatgaccagattgaaagtttaaggcagcgctttggagggggccagcccaacaccagacatcgcatggtacaagaaag

SEQ ID NO: 324709 - DNA, 98 bp, Homo sapiens
tgtaaagcaatatttcgagcagtttggcaaggttgaagccatccttgtcaatatatttggtggtatcgtcaactgtgccatcattgccaatgggatca

SEQ ID NO: 324710 - DNA, 92 bp, Homo sapiens
cttcctcagaatgtgaaggattatttactcgatgatggaactctggtggtttcaggaagaacttgggaatcagtgaaacgtacaaccaggaa

SEQ ID NO: 324711 - DNA, 98 bp, Homo sapiens
ggaggctgagtgctaaactgtgtggggcgcggatgggatccagctgttagtcgggaagggaaaaggccgaggcatcagcgtgtgaagaccgcaaagac

SEQ ID NO: 324712 - DNA, 75 bp, Homo sapiens
caaacagaaatttgtgctcaaaacccccaaggaacatgaatctgaaggtggaagaacacctttgatgaaagctgc

SEQ ID NO: 324713 - DNA, 87 bp, Homo sapiens
gccggcctagcgtcctggaattacttcaatcaagtaaaatgtcggttccaggaccttaccaggcggccactgggccttcctcagcac

SEQ ID NO: 324714 - DNA, 100 bp, Homo sapiens
ccaccagcgcagcgctgccatggagcccagcagcaagatcgtaaagctgaaaattgaaatcatgaaagtagacaggactaaactgaagaagacacctact

SEQ ID NO: 324715 - DNA, 100 bp, Homo sapiens
gtcgaagaggcatttcggcacaaacaaagaaatccaatggatgtgtggcacaactctgcaaataaatgtgcatgagaacggcccttccagtgcaatcagt

SEQ ID NO: 324716 - DNA, 75 bp, Homo sapiens
ttgctactgccccgaacccgcgctgcagggaacagcggggcaaacactcacggatgattgatatccagaccagga

SEQ ID NO: 324717 - DNA, 100 bp, Homo sapiens
gaggacgcgcccggcgcccctgagccggccgagcggcgacggaccgcgaggtaagaatgattgatgttggctgatattggagtgctcattcacatgaagt

SEQ ID NO: 324718 - DNA, 101 bp, Homo sapiens
ggcgctccaaggcccgcccgggagggccggggccgcgctcaggtgctggagaatctggtaaaagcaccattgtgaagcagatgaggatcctgcatgttaat

SEQ ID NO: 324719 - DNA, 100 bp, Homo sapiens
tcggcccaaggccagttctccgcagtgaacagagtatctgtcaggcaagagctgctgtgatggtttatgatgatgccaataagaagtgggtgccagctgg

SEQ ID NO: 324720 - DNA, 100 bp, Homo sapiens
ttcctacagaactgtttgtcacatttaaaggaggatctccttatatagcagccaaaatcaatgaagctaaagatttactagaaggtcaagctaaaaaatg

SEQ ID NO: 324721 - DNA, 90 bp, Homo sapiens
ccccttcgagatctccctctggatccttctggcctgcctcatgaagatagttcgtctaatgattgaaaatccttacgagacccgctctga

SEQ ID NO: 324722 - DNA, 100 bp, Homo sapiens
aatcgaaccaaatatatatgagacttagtttttgaacggagtcattattcctctaaggtgttatgtctggctgtagctgttggtcacgtgaagatgacag

SEQ ID NO: 324723 - DNA, 101 bp, Homo sapiens
ttttgatgatcatgatacagttgataaaattgttgccaaaatgaagtttaatccctttgtgacttccgaccgaagcaagaatcgcaaaaggcatttcaatg

SEQ ID NO: 324724 - DNA, 98 bp, Homo sapiens
tgtggtgttttctatcccagttctttggcttttactaaaaatggacgcctggcaaccaaatgagtaacgaaagaggctttgaaaatgtagaactggga

SEQ ID NO: 324725 - DNA, 83 bp, Homo sapiens
ggaaccctggtcaccgtctcctcagattcttgaagaaactgctctcataagctaaggttccttatgattctgcaaggaagaga

SEQ ID NO: 324726 - DNA, 100 bp, Homo sapiens
gtcaacctgcgcccccagatgtcccaggatattggtgctggaaaaggcaaatactatgctgtcaattttccaatgagagatggtatagatgatgagtcat

SEQ ID NO: 324727 - DNA, 110 bp, Homo sapiens
cagggccaggtgggcaactgctggtttgtggcagcctgctcgtcacttgcctcccgggagtcgctgtggcaaaagctgggatctagcaattgggaggcagcagacttggg

SEQ ID NO: 324728 - DNA, 90 bp, Homo sapiens
ggaaccggatcaccgagggcatttacggcagatctgtaagagcaaagctaaagaatctcagcagtattatcacagcttggctgtccggca

SEQ ID NO: 324729 - DNA, 100 bp, Homo sapiens
aaaataaagaaaacgaacgcccttcggccggatcgaaggtgcataagctggagcctgaggcgtggaaacacgtggaagccgtatatatagacattgcaga

SEQ ID NO: 324730 - DNA, 125 bp, Homo sapiens
tccatccgagagaagctatgtttagcatcttctgtcatgagaagtggcgatcaaaattggtattctctactgccgctgatggtcaaacgcaagtggaaattaaagtgtgtcagggtgaaagagag

SEQ ID NO: 324731 - DNA, 100 bp, Homo sapiens
gccggctgcccgcagcccctgacccggccccggacggagcgccggccgcaccaccgccctctggccgttgcctcaccggacggccaatgggaacgtggag

SEQ ID NO: 324732 - DNA, 121 bp, Homo sapiens
caaattgctgtccaagtgaataatggggatgctggaagggagatgccctgcccgttgccctgtgatgaagaaagttaaagtattgcacaatcagctggtccttttccacaatgccattgcc

SEQ ID NO: 324733 - DNA, 82 bp, Homo sapiens
ggaacatggcgcaagctctgtctgaggaggagtttcagcggatgcagacaatgcagatcttcgtgaagactctgactggtaa

SEQ ID NO: 324734 - DNA, 98 bp, Homo sapiens
acaaagtactcatcttctcccagatggtgcgctgcctcgacatcctagaagattacctcatccagagaaggtggagtctcgctctgtcacccaggctg

SEQ ID NO: 324735 - DNA, 100 bp, Homo sapiens
ccgcgccgcaccatgcccgccgtggacaagctcctgctagaggaggcgttgcaggacagcccccagaaactggcagacctttcacttcgtatccaacaaa

SEQ ID NO: 324736 - DNA, 100 bp, Homo sapiens
gtgaagtataggctgaggctacctgtgaacagtacgcagtgaatgttgacgcacaagaccagccactgctaccgcatcacgtaccgccacatggaacgga

SEQ ID NO: 324737 - DNA, 100 bp, Homo sapiens
gtcaacgccgtatccagcgactacgcggccgcggagacctacctgcggcgtcggcagctgctgctccgaggacaaagtggccttggagagtatgcctctg

SEQ ID NO: 324738 - DNA, 87 bp, Homo sapiens
aggcacgggcagccggaaggacaccaagatgcggatccgggcctttccggatgctcgtcagaagttccgctctgttctggttgaagc

SEQ ID NO: 324739 - DNA, 100 bp, Homo sapiens
ttatcttcactgaggactacaggaccagaaggagaaggcagagcccccccaggctatgaatgccctgatgcggttgaaccagctgaagccagggctgcag

SEQ ID NO: 324740 - DNA, 100 bp, Homo sapiens
tgcaccatccccacctaccccagcggccagatcggcttcatgctgtgcagcaagaacccggctgcttttattcgtgatgaaatgatgccaggagagtggg

SEQ ID NO: 324741 - DNA, 74 bp, Homo sapiens
gccccagcagcccccgaaggccctatcaggacatggagtatgaaagacggtgtgtgtgtgcaggccacagcagc

SEQ ID NO: 324742 - DNA, 90 bp, Homo sapiens
tacgtgaagacgtctccattaaatctcctgcaaagaagctgagccatgcaattagtaaatctttggggtgtgtacccacgagagaacccc

SEQ ID NO: 324743 - DNA, 90 bp, Homo sapiens
gaaaatacgtggttggagagctcatctggaattttgccgatttcatgactaaccagtgtacaatccttggatttaccctccgaccataca

SEQ ID NO: 324744 - DNA, 98 bp, Homo sapiens
tgctgggcgacctgcaggcagcaccggaggcccaggtctccgtgcagcccaacttccagcaggacaagtctcggaagggtgctgacctggaccgggag

SEQ ID NO: 324745 - DNA, 100 bp, Homo sapiens
ctccagccccagctgcgtgcccaggctcacagaacatttcctgcctgttgctcacactctgttgtccacagcatacccgcaccctagatggctgactctt

SEQ ID NO: 324746 - DNA, 100 bp, Homo sapiens
tatggctcattgtagcctcaaactcccaggctcaagcagtcctaccatgtcagccttcccagtagctgggaccacagctaaagctgttgatggatacgtg

SEQ ID NO: 324747 - DNA, 116 bp, Homo sapiens
gtacacactgctgtttaccttggcgaggcctttcaccaagtccatgtcactgtgtgcccagtattctgcagacaaacgagaagatgagaagatgtgtgatcatttgataagagcag

SEQ ID NO: 324748 - DNA, 97 bp, Homo sapiens
cccctgtgctcacgccgggttctttacctccgagccaggccgccgcaaagcagctataaacctgcttgacgtcttgcacatcagactacttgttgga

SEQ ID NO: 324749 - DNA, 100 bp, Homo sapiens
gaggaagccgactgctgcctggtctgcaaagaagtcctttcaagtctctaggactggactcttcctaagcaagtccgtgcaccaattccagctggacatc

SEQ ID NO: 324750 - DNA, 83 bp, Homo sapiens
agaaggagccagaagtgaccatctcaagcatccggcctatttcagaaagacctgcctagagctggaacgttacctccagagcg

SEQ ID NO: 324751 - DNA, 75 bp, Homo sapiens
tttgcaccttcatagtatgaaaaggattgaactggatgacagcagaaaaatatggctcaggagactaaccagacc

SEQ ID NO: 324752 - DNA, 95 bp, Homo sapiens
gaggaccggaggctctggatggaagccatggatggccgggaacctgcaccacctgtaatctactatgtccctgacttcatctccaaagaagagga

SEQ ID NO: 324753 - DNA, 96 bp, Homo sapiens
ccgggtaccggccgtggaagcggccaccgactactgtcagcagctgtgccagaaactggcgatggaatatgagaggagccctctggaaagaaaagg

SEQ ID NO: 324754 - DNA, 97 bp, Homo sapiens
tggctattctttacaactgtacccggacagcgaccgtcaagagctgcatttgatgccagaaggcaaacacaacctgcatttgcgttttgcagatgaa

SEQ ID NO: 324755 - DNA, 74 bp, Homo sapiens
ctgaacaagaagagagccatccccaatcagatttacactctagacatccacagacctgaggattgttggaataa

SEQ ID NO: 324756 - DNA, 75 bp, Homo sapiens
atggaattctgaagatcactcacttaggaaacaaacttctcaataggtttggcatggacaagatctatgaaggcc

SEQ ID NO: 324757 - DNA, 124 bp, Homo sapiens
caaaaacgtgtgatacaggaaggccgaggagagctcccggactttcaagatgggaccaagaatcagcagaatctgccaaaataggaggaataattactgtgtttttgatagcattggtcttgac

SEQ ID NO: 324758 - DNA, 90 bp, Homo sapiens
ccaagagagaccttggagtaattcgtcgacagaagaaaaagtcagcactttttgaagtgtctgaggttataccagtcatgacaaataatt

SEQ ID NO: 324759 - DNA, 100 bp, Homo sapiens
attttggccaaaccaaccgcacccctgaatttctccgcaaatttcctgccggcaagggaccccagtggcccagatgacagaggatgccgtcgacgcggaa

SEQ ID NO: 324760 - DNA, 89 bp, Homo sapiens
gttgctcttctccgccgcggcactgatccccacagaagtaaaatgcccattcccatcaagaccagacaatggatttgtgaactatcctg

SEQ ID NO: 324761 - DNA, 50 bp, Homo sapiens
ctcgaaatcctggatactgcagggacaaaaatatttacaccagcagctcc

SEQ ID NO: 324762 - DNA, 100 bp, Homo sapiens
tcctcctccgtcatcgagcagctcttcttcgtccgtttgctgaaccttattcacagtgaaatcagtaatttagccggctttgaggtggaggccataatca

SEQ ID NO: 324763 - DNA, 51 bp, Homo sapiens
tctcttcagcaactggtagtagaggaattacatgaacgacagccttcgcac

SEQ ID NO: 324764 - DNA, 75 bp, Homo sapiens
ttcaagtctggcctgaagtacaagaaaaggcgacggcggattgacagaagtatgattggagagcccacaaacttt

SEQ ID NO: 324765 - DNA, 98 bp, Homo sapiens
acaggtggaccgacacacagtctacaatatcatcaccaattttatgcgaacccgggaagaagggtgcctgcggcagttgctggactttctccaccact

SEQ ID NO: 324766 - DNA, 85 bp, Homo sapiens
aagaactttctcatttgggatcagcgatatttcctgactggtgaaactgcgtgctgtaagctgggaccagctttgtccataactg

SEQ ID NO: 324767 - DNA, 100 bp, Homo sapiens
tatagaaaagactgggccgttactgattgagctacgaggaccaaggttctggcccatctttgataccttcataagggattctattagtcgcctctccaac

SEQ ID NO: 324768 - DNA, 100 bp, Homo sapiens
caaggactcagtgcttcggaaagccctgcatgacagcctgcatgactgttcacattgaaagtcattgggtggtacagattccggcgcaatacgcagcagc

SEQ ID NO: 324769 - DNA, 95 bp, Homo sapiens
tgtgccagaaagtgaagctattccgggccagcgagccgatcctcagcgtcctgatgtggggggtgaaccacacgacggagtcttgctctgtcgcc

SEQ ID NO: 324770 - DNA, 127 bp, Homo sapiens
cacctgtaaatttgatggggaatgtttaagaattggagacactgtgacttgcgtctgtcagttcaaggaagcccttagtgtatacaaggaagcaattcagaaaatgccaaggcagtttgccccacag

SEQ ID NO: 324771 - DNA, 98 bp, Homo sapiens
agtgaccggggcatctccaacatgctggatgtcaacggcctctgattatcattggcaatggcgttcattccttacgagtggctttactgcagtttatt

SEQ ID NO: 324772 - DNA, 101 bp, Homo sapiens
ctggggtggatgaggaggagccggagacgccgcggaggagaccggaccgaagacggaccgtgccgggaagagttggttgaatctggcgatgtggaacccat

SEQ ID NO: 324773 - DNA, 100 bp, Homo sapiens
gagttcccgctgacgctgaggccttaagtgaaagaagtggaaacacccctaactctcccaggaaatgtgactggaaacagtaactccacgttcatctcca

SEQ ID NO: 324774 - DNA, 80 bp, Homo sapiens
tagtcacccacctacatgttgagaggaaggcggcaaattgtggaacagatggaaaagaaccaggaggagcgatcgctgct

SEQ ID NO: 324775 - DNA, 100 bp, Homo sapiens
cgttgttttatttgtggaagagaagggcacattaaaaaggaatgcccacagtttaaaggctcttcagcgacatctcgaatcagcgatgcacacttggcag

SEQ ID NO: 324776 - DNA, 99 bp, Homo sapiens
tcaggcaggaaaacgtggatgattactacgacaccggcgaggaacttggcagagctgtaggtaaaacttgcctactgatcagttacacaaccaatgcat

SEQ ID NO: 324777 - DNA, 100 bp, Homo sapiens
cactgtcatcctacactcaatctacctgtgctgcgtcagatcgaagaggttcctggtgagctcatgcaggaagacctggcaacggatgacgtcatgcttc

SEQ ID NO: 324778 - DNA, 88 bp, Homo sapiens
ggagaccctcgaagtgcgcaaacttgacactcaccctgaccgtgattctacagtaaccaaattggactttgatcttgagcctgaacct

SEQ ID NO: 324779 - DNA, 82 bp, Homo sapiens
gtcgtcgccctcgagatgattatcgtaggaggagtcctccacctcgtcgcagatggagcaaagacagtgactgtgctgagaa

SEQ ID NO: 324780 - DNA, 59 bp, Homo sapiens
ttcccgagccctggaggtggggagaaaagtagaccaaattttggtacaattgaatcaca

SEQ ID NO: 324781 - DNA, 98 bp, Homo sapiens
ccttgaagtatttggctgaggagttttcaatcccatggaagatagatgataagcctgtaaaaattgacaagtgggatggatcagctgtgaaaaactct

SEQ ID NO: 324782 - DNA, 50 bp, Homo sapiens
gtggaactccaggctatgtcgcgaatgctgatgtcttaaaggcgatggta

SEQ ID NO: 324783 - DNA, 99 bp, Homo sapiens
gcagtcgcgccagagctgagcggagggcgcggcgcgagaacgatctgggattggcacaagactctgctaccagcacaaagagcccaatccttcttggca

SEQ ID NO: 324784 - DNA, 75 bp, Homo sapiens
caagactgtcgacctaaagcctgactggggcaagaccctgtttgggaagatgatggactacctgcagggctctgg

SEQ ID NO: 324785 - DNA, 90 bp, Homo sapiens
gcgaagacggtaacccgtgtgactttgactgggtggtctggataaaaggacatggtcataagagaattgtagtgttaaaaaatgacatga

SEQ ID NO: 324786 - DNA, 114 bp, Homo sapiens
gcaggctaccaaggacagagtcagtgatttccataaattgaagcaaagtgtctgtggaagaattagaacatagtattagcattaaaatagctaaagaagctgtgatggatataa

SEQ ID NO: 324787 - DNA, 51 bp, Homo sapiens
aaattattgatgggctctctgagcaggagctctacaagtttcacgctgttt

SEQ ID NO: 324788 - DNA, 43 bp, Homo sapiens
ctgagtagctgggactacaaatggaatttcactcttgttgccc

SEQ ID NO: 324789 - DNA, 100 bp, Homo sapiens
tgagaccgtctagtataagacagagcacgaaaggcatttttactgctggtttatagcattcttcgtcatgttgctgaggtgttagaatacaccaaggatg

SEQ ID NO: 324790 - DNA, 89 bp, Homo sapiens
acgctggccatctcaatggagtttattaccaagccagaaacgtttgagcatctttttatcaagcatacagcatcagtgacatgtggtcc

SEQ ID NO: 324791 - DNA, 75 bp, Homo sapiens
ccgtgggaaggcagtagacgcgggcagtcagctagcaggtctgtcgcccccattccacgcctacgggaaggcagg

SEQ ID NO: 324792 - DNA, 100 bp, Homo sapiens
caaggtgttcttgctgcaggaggagctggcttactataagagtgctacaaggtgagctgcctggaaatccctgggccctctggccccaagggctaccgtg

SEQ ID NO: 324793 - DNA, 90 bp, Homo sapiens
ggaaagttggaacctctgacaagaccaagtactaccttcaaggaactgtggctgcaccatctgtcttcatcttcccgccatctgatgagc

SEQ ID NO: 324794 - DNA, 100 bp, Homo sapiens
ctggttggaggaggtagatcaccctttctgcgggggacgatttcgtcggtggtagggggatatgagactttctactcggaatatcctgagtgttgcgtgg

SEQ ID NO: 324795 - DNA, 80 bp, Homo sapiens
acagagatctcttctgttctccactgctagagaagatggcgaattagaagatggtgaaatagacgatgcaggatttgaag

SEQ ID NO: 324796 - DNA, 83 bp, Homo sapiens
gtccgtccgccgccaccacccactccggacacagaattcagcggggtgccaagtcgttttctgtgtgggttgagagacaggct

SEQ ID NO: 324797 - DNA, 101 bp, Homo sapiens
agtcagccctggaggcggcccattatttcacagaggacagctcctcagaaggggactcgggcaagggtgccgaagatagacaagaggcacacagagacaga

SEQ ID NO: 324798 - DNA, 100 bp, Homo sapiens
gcacgcaccacgacggcgccatcaccgagcgcttgatgtgcgcggagagcaatcgccgggacagctgcaagatggagatacacgtgaattagagcgaaca

SEQ ID NO: 324799 - DNA, 100 bp, Homo sapiens
atatgcttgcttctattaaaagtggtgatgaacttcaggatgagtggtgatttacaagtcaagttaaaatgtccccagaagtggccttgaaccgaatatc

SEQ ID NO: 324800 - DNA, 51 bp, Homo sapiens
tgatgattagagacatactaatgtacatgactgacaatcacctgaaacatt

SEQ ID NO: 324801 - DNA, 75 bp, Homo sapiens
aaaaatcccaaggtctgcaaaggtaagcagaattttgtacagtttctgtacagcattcaaacgttcttccagaca

SEQ ID NO: 324802 - DNA, 75 bp, Homo sapiens
cgtgtacaacccgacgaggaacgaatgggacaagatcccgtccatgaatcaggaccacctttcactcacctgagg

SEQ ID NO: 324803 - DNA, 108 bp, Homo sapiens
cgcggccgctcgcgcctctcgatgggcagctcgcacttgctcaacaagggcctgccgcttggttgagaacttgttgcttagtaaccaagggaccattaagctgtgtga

SEQ ID NO: 324804 - DNA, 82 bp, Homo sapiens
ttgattgtccagagtttgtaccaggccaagccttttgctcacatacaggcaatataaagtcctggttcactctcaggaacga

SEQ ID NO: 324805 - DNA, 75 bp, Homo sapiens
aatagaaccaaatctgtttgctgatgaagattcacctgtgcatgatgcctggaatgatgtcgtcagtaatgcctg

SEQ ID NO: 324806 - DNA, 87 bp, Homo sapiens
cagatcccccagccggctgagacaggcactcttaaaagacccattttacatgggcttgtaccagaaacgagatcgcacacaacagta

SEQ ID NO: 324807 - DNA, 90 bp, Homo sapiens
cgctgatcagagacatgcttcgacgaattaaggaagatttggtagatattgttgatactcgaattcatcaattagaggatttagaagcca

SEQ ID NO: 324808 - DNA, 100 bp, Homo sapiens
ggcggcccctgcgggcgccagtcagcacgtggtgaggtgtgtatggcttcccgtggactcagcctcttccccgagtcctgtccagatttctgctgtggta

SEQ ID NO: 324809 - DNA, 96 bp, Homo sapiens
catctcttggacagatgatgccagttaattactttgaataggatggttagaacgagagagcaggtatggtctgcaagcaggacacaactggtttat

SEQ ID NO: 324810 - DNA, 100 bp, Homo sapiens
atctacaagaggggacaagtacctttatgaaccagtgtatcccaactgatgttctaatcatgtcagataaagatgatattgagactccactgctaactga

SEQ ID NO: 324811 - DNA, 75 bp, Homo sapiens
cagacctgtgatgctgaaggcaagggcttcatcgccaggaaggatatgcaggtagttgaattcagtgaattggac

SEQ ID NO: 324812 - DNA, 100 bp, Homo sapiens
gatttgttaaggattccaagtaactcttatttggtcctctggtgatgttcttgagacgttcaatttcttagaaaatgccgatgacagtgatgaagatgag

SEQ ID NO: 324813 - DNA, 100 bp, Homo sapiens
ctggatactcttgttaccagaattccaaaggttctgtggtggacttgctttgtgaagagacagttcatgaacaagagtctttcaggacctggacagtgaa

SEQ ID NO: 324814 - DNA, 98 bp, Homo sapiens
gagctccctggggttttactctaaagggtggcctggagcacggagaaccattaatcatctctaagggtgaaattggtgagccgggacaaaaaggcagc

SEQ ID NO: 324815 - DNA, 100 bp, Homo sapiens
ctgacctgtgggttacatgggttggtcgtccagtttgggcttcctgtagacacccttttcctgcgcaacagagctgggcctccctttctctaatttcccc

SEQ ID NO: 324816 - DNA, 75 bp, Homo sapiens
agaagaagggacgccctcacaggacacctcaggacccattctgtaatctatgccagcaattatgacaatgttagc

SEQ ID NO: 324817 - DNA, 75 bp, Homo sapiens
gtctctagtggcggaagccttcgtctcccagattgcaggatattttggaactcttagaaaaaagagtgaagtcaa

SEQ ID NO: 324818 - DNA, 144 bp, Homo sapiens
cttattgaaacattaaatgacagttcacataagaagttcttcgatgtatctaaacttggcaccaagtatggcatggaggagtgacggcaggaactttctgtgctctgacaacccttatgcaccaactagaaaaagaaaattccg

SEQ ID NO: 324819 - DNA, 75 bp, Homo sapiens
ctggagagaccccgcggctgggcgttcatctaccacgctttcgtaaatggcgaaaagtcttttgaagacagcctc

SEQ ID NO: 324820 - DNA, 51 bp, Homo sapiens
gtgactgaagcgcccgtccattccaagtactggagaaaatgaaactgggat

SEQ ID NO: 324821 - DNA, 96 bp, Homo sapiens
gtgcgcttctccatctggctgctgatgggcagatctgtgcatgggactgcagggcttcctcatcttccacagctttgggggcggcactggctctgg

SEQ ID NO: 324822 - DNA, 75 bp, Homo sapiens
gaaagaagttgaatcccagcttcccgaaaaagccaagcagatagaacttcagttcactattggcgaagccattac

SEQ ID NO: 324823 - DNA, 100 bp, Homo sapiens
ctcttggtcatgtgaactgcacgataaaggaactcaggcgcctcttcttagttgatgatttagttgattctctgaaggaacttccactacatcaccatcc

SEQ ID NO: 324824 - DNA, 74 bp, Homo sapiens
agagatgccaggaaggagactgtggagagccacttccggcatgcccaagagaatcgtaaatgcaaaaattgctt

SEQ ID NO: 324825 - DNA, 75 bp, Homo sapiens
ggaagggtagaccatacgcaaatcctgataacttaagtgactctctcttttccggtgatgaagaaaatgctggga

SEQ ID NO: 324826 - DNA, 100 bp, Homo sapiens
aggggaaactgagagttcccaattaataatgaagcaggtgctgcagggtgcacagctgatcgccgtggcctcctcggaccccgcggcggcgggcgtggat

SEQ ID NO: 324827 - DNA, 75 bp, Homo sapiens
gagagaagcccatctattctgtaggagccaaccccctgcagaggaatgaaatgggacacacacccttggattatg

SEQ ID NO: 324828 - DNA, 90 bp, Homo sapiens
tgaaaccaaaaggccagactgaacacgatgaggctgggcctcagtcctcacagggctctagtgggcgttcagccacaccaggagaaggcg

SEQ ID NO: 324829 - DNA, 96 bp, Homo sapiens
atttccaagagaagagcacagaagagggagaagtggctgctctgcgcctcacggccagatcccagatagcagaccccacgttagctgaaatgggaa

SEQ ID NO: 324830 - DNA, 50 bp, Homo sapiens
aacatctcaagcctcattggaatgatgggctctctgactgccacccctgc

SEQ ID NO: 324831 - DNA, 75 bp, Homo sapiens
gacgcacccgtccatcttcgggatcttcgacgggcacgggggagagactttttgtcgatggttagaaaattcctt

SEQ ID NO: 324832 - DNA, 75 bp, Homo sapiens
cacaaaccaggaacggctagctttttgacctggaatttaccagctgaagaaagcctgccggcgagagctacaaac

SEQ ID NO: 324833 - DNA, 82 bp, Homo sapiens
ggacatcttactggtccatgctactgagactgacaggaaaggtcgcaatggaagaagagatcgccgcgctggtcattgacaa

SEQ ID NO: 324834 - DNA, 75 bp, Homo sapiens
gcgatggtgccaggaaagggtggagcgggttacattggcgaatttgaaatcattgatgaccacagagctgggaaa

SEQ ID NO: 324835 - DNA, 75 bp, Homo sapiens
atttcagaattttgaacaaatctttgaggtgaccaaactggatcgagatcctgcatcaggaactgccttacagga

SEQ ID NO: 324836 - DNA, 75 bp, Homo sapiens
aaccgccccagcgatggaagaggatcaggagctggagagatgccagaagaagaagctttctgtgtatttgttaaa

SEQ ID NO: 324837 - DNA, 83 bp, Homo sapiens
aagccagatcaccaccttctgatatttgttcagtcgaatcaaggtgaagaggaaacaacaagaatttcatattttacttttat

SEQ ID NO: 324838 - DNA, 101 bp, Homo sapiens
cgagcgggcggcgggcgcgcgcaccatgggggagaaacccgggaccagacatggtggagctgctgctgctgcagaacgcacaggtgcaccagttggtcctg

SEQ ID NO: 324839 - DNA, 82 bp, Homo sapiens
aagaaatcaagtacttcagtaagagatgggaccatggcaaaagttataaccaccgtactgaagttccctgatgatcagactc

SEQ ID NO: 324840 - DNA, 100 bp, Homo sapiens
agattattgggagcctatttgttcatcatttctcgtgttcaagcttgagtattcaaagacagtagccatctgacttcagttatttattcaagatgcagaa

SEQ ID NO: 324841 - DNA, 74 bp, Homo sapiens
acatgcagaacatcttctggtgccataagaccttcacgacaaatggagttcaccgcctggatgcccaacttccc

SEQ ID NO: 324842 - DNA, 90 bp, Homo sapiens
cagaggcctgtgcggctgcaggtagagtgtcttagtgtggaaccatcagagaatctacaatccctgatggagaagaatcagtccctggta

SEQ ID NO: 324843 - DNA, 90 bp, Homo sapiens
gctcaacttcaagaagggatggatgtcgatcttggacgagcctggagagaaaaggactggacggaggaggaccgggcccgggagaaggtg

SEQ ID NO: 324844 - DNA, 75 bp, Homo sapiens
gtatcatgatgtgatgctggagaacttttcgcttatggcctcagtaggagttcatgatcaagtgttgcccacacc

SEQ ID NO: 324845 - DNA, 100 bp, Homo sapiens
cttgttccaaagatgaattagaacgtgcccttcattatctgaagaatttctgtggaatgtttaatcttctggatccatgactgtctgatacgttggcaat

SEQ ID NO: 324846 - DNA, 100 bp, Homo sapiens
ccgcagccctcacccctcccgccagtctccagccatggagtctcgctctgtcgccaggttggagtgcagtggcatgatctcggctcaccgcaaactctgc

SEQ ID NO: 324847 - DNA, 90 bp, Homo sapiens
aaactgccactgtaaacttcataaccagctatccgggttcatcctacatttttgtgcaagagctggatcagatctgcatttcttttgacg

SEQ ID NO: 324848 - DNA, 101 bp, Homo sapiens
agcaaacctcatgccaatgcagtttctgggtccacttccaaaggttatgggacccattcacataaactttttaagaagctgggaattcctgggccaacccc

SEQ ID NO: 324849 - DNA, 75 bp, Homo sapiens
tccagcgtggccttcagttctgcacacgtgcgtcaaaggagagaagtttgctgaggaatgccttcaagcacaaag

SEQ ID NO: 324850 - DNA, 75 bp, Homo sapiens
gcgcggccggctgccggaaagtcaaggtgaagatgttcttaaagggtcccagattacgtatgttacaggtgtaga

SEQ ID NO: 324851 - DNA, 90 bp, Homo sapiens
cagacgctgtgctcgctggcaccccgaacgggttgcttcccccgctgcgagctctaagcgaaagacatgaggcctcagcctgaaatgagg

SEQ ID NO: 324852 - DNA, 122 bp, Homo sapiens
cagagaattaagtaactggtcgaggttgtatcagtaagaagggagcacggaacagattcaagctcagaggctggaaagagagtatggctgtccttgtatcacaggaaagccaaaagttgcct

SEQ ID NO: 324853 - DNA, 83 bp, Homo sapiens
ggacctcatcaagatgatctttgatgtggaaagtatgaagaaagccatggtggagtatgagcaaaatgatgcttcaacaccca

SEQ ID NO: 324854 - DNA, 73 bp, Homo sapiens
ggcagacagggagctggttcacatgatcaactgggcgaagagggtgccagccttgtcagacccaagcagtaga

SEQ ID NO: 324855 - DNA, 100 bp, Homo sapiens
ggattgctgtgtgaaaaccgagctgctgggagaaggagaacgacacattggatacagaagggaggtgatcatgcaccatggcactggcccccagaacgtc

SEQ ID NO: 324856 - DNA, 98 bp, Homo sapiens
ctttctgctgggctccgtggtccatgaggtcctcaagtatgttccacataatgaagcacaatcattacagctctcgattcggcagcaaacttgggctg

SEQ ID NO: 324857 - DNA, 98 bp, Homo sapiens
aggtgactatgagtgtgtggcccagaaccgctttgggctggtggtcagccggaaggctcgcatccaagctgcaagtgtgcaactgaggaacatggctc

SEQ ID NO: 324858 - DNA, 75 bp, Homo sapiens
tcatctggaattttgccgatttcatgactaaccagtgagtcgttcacgcctactgaggagcatgtgttggtggtg

SEQ ID NO: 324859 - DNA, 74 bp, Homo sapiens
cgcactggcccaggacctgcacaaggacagtcattttgtttactcattcagccctgttgcaggtcccaataaac

SEQ ID NO: 324860 - DNA, 100 bp, Homo sapiens
gtgatgaagagatgagtttgtttacagctgttgtcctggtatctgcaggaagtcaaagtggtgccgccctacatctctcaatgtggttcgaataattaca

SEQ ID NO: 324861 - DNA, 100 bp, Homo sapiens
ggatgtgaggcgatccgctggcgctagtctgaccctccgccaggcaaaaggaaggtgccttggaatttgtgtcgctgagtcagcaagcctttcagatttg

SEQ ID NO: 324862 - DNA, 51 bp, Homo sapiens
agtggaaggtcttgatatacagttggaggatatgggccctcacattttcca

SEQ ID NO: 324863 - DNA, 51 bp, Homo sapiens
ccgagcagcgtcatgtacccctcttcctcttccaggccttcttgttcttgc

SEQ ID NO: 324864 - DNA, 76 bp, Homo sapiens
gctgaataacccttttaacgagtattccaaatttgatggcaaggttgcacagacagcagatggtgtggatgctgac

SEQ ID NO: 324865 - DNA, 90 bp, Homo sapiens
gtgaaaaactctttggatgattctgccaaaaagatatggcgagagcttttttccccacttcatgcactgaattttggaattgggggagat

SEQ ID NO: 324866 - DNA, 100 bp, Homo sapiens
ggatgccctgctggtgggtgttccagctggaagtaaccccttccgggagcctagatcctgtgctttactctgaagactcatggagtcttgctctgtcacc

SEQ ID NO: 324867 - DNA, 100 bp, Homo sapiens
gctcagattcaagtaaaactggctaatccttttcgaataggacaggcacatacagtgaggaccattaaaaatctcaagtgacgactttgggaaactctgg

SEQ ID NO: 324868 - DNA, 74 bp, Homo sapiens
tttgcatttcagaatcttgtgaacctaggatgtggcattggatatggttatttgcatcgaatacctacacgccc

SEQ ID NO: 324869 - DNA, 100 bp, Homo sapiens
ctgtgcccctactgctacaaccacccacccttccgagacatgaagaaagggatccaccacaagtacaacagcgacaagtccagcacctacgtgaagaatg

SEQ ID NO: 324870 - DNA, 82 bp, Homo sapiens
cggggccgctggattctgaggaccagcagatggccagtcacgagaacccaggcttgggcactgtttaaaggaaagttccgag

SEQ ID NO: 324871 - DNA, 75 bp, Homo sapiens
cgacaccggctacttctcagctttaccatccctggaggagacctggcagcagtgagaaagatcagtctaaagaaa

SEQ ID NO: 324872 - DNA, 85 bp, Homo sapiens
cctgttgcaccaggttcttcgaaaactgaagcagatgttgaacaacaagaacacttcagttatggaagatcaaaatgaagatgag

SEQ ID NO: 324873 - DNA, 96 bp, Homo sapiens
ccagtccgttgctttactttttgcttcaccgacatagtcattatgccgaagagaaaggtacccactgatggtaatgctggcctgctggctgaaccc

SEQ ID NO: 324874 - DNA, 73 bp, Homo sapiens
tattgtgaaaacctcaagcatgagctcaaatgatacttttcccacagcaatgcacattgctgctgcaatagaa

SEQ ID NO: 324875 - DNA, 83 bp, Homo sapiens
actgcagggaaacagccatcatgaggtggtataagttgaaatccaaaccaggaaagaaggacaaggagcgaggagaaattgag

SEQ ID NO: 324876 - DNA, 100 bp, Homo sapiens
agcggcgcctgggccgcgccgacctggtcatgagcttcgttaacatggatgatttacccaggaaaaggttacctcagctgtataaaccgcccactcctga

SEQ ID NO: 324877 - DNA, 75 bp, Homo sapiens
ccagaggcagggcacaccagaagccagtggtcatgatgaaaatgaaaaagcatgctttacgctgttattgtcaag

SEQ ID NO: 324878 - DNA, 95 bp, Homo sapiens
atggagaagagaaagcacaaagcatggagaccctccctccagattctgctctctttgctgaactcggttatttcacagacactgatgagctgcaa

SEQ ID NO: 324879 - DNA, 90 bp, Homo sapiens
gtatgcataatatggaatgttcttaacccagaagtagctgaatgtgttactccattgctgaggagtgggcaaacttgaagataaatcttt

SEQ ID NO: 324880 - DNA, 99 bp, Homo sapiens
ccgagatgagaggagaagagcccagcacaacgaagaccttcacggcatggtgcaactcccacctgcggaaggcaggcacacagatcgagaacattgatg

SEQ ID NO: 324881 - DNA, 97 bp, Homo sapiens
gctgccacgtctatgaccgggcggcgcgggtctgcggctccagcgtgcagaagagctccactggttcaacagcctctcctccagtttcgaccccagt

SEQ ID NO: 324882 - DNA, 82 bp, Homo sapiens
ccgccgagtcgcgcggaggcggaggcttgggaaccagacgtcctgggtcctctccagcatggcagccctctactggagggtg

SEQ ID NO: 324883 - DNA, 100 bp, Homo sapiens
cggtgggagaccatgcaagcaagcagatggttaaatttgctgccaactatcagaggactcctgaaacctggagagctacctgctgtataaaggctggcct

SEQ ID NO: 324884 - DNA, 100 bp, Homo sapiens
gtctctaacgttttagaaaatcataacaagcggttctctaccctgtaaaggcctccccatggccacccatggaccagtcggcattcacttcctcccttct

SEQ ID NO: 324885 - DNA, 75 bp, Homo sapiens
accctattttccaccagctggaggccgtgcggctcttctccaagcatgagattcctagaggggagtgcctgcgag

SEQ ID NO: 324886 - DNA, 100 bp, Homo sapiens
gacctgcttgctgatcctgtggtccggatccagagaaaatccctctctgggcgcattgttggaggtgtgtggtggttctttaccctgatcataatctcct

SEQ ID NO: 324887 - DNA, 89 bp, Homo sapiens
gtcaacgggggcctcaacctctccagagccattgctatcatggtgaacttacttcagattgtgcgggaccactgggttcatgttcttgt

SEQ ID NO: 324888 - DNA, 75 bp, Homo sapiens
agatacctgtggaaaacatccttggagaggtcggagatgggtttaagacaccaactctacaacattacctgtcat

SEQ ID NO: 324889 - DNA, 100 bp, Homo sapiens
acattcatggaattgccgaatctcagttacgctacatacaacaggaaagcagatggtggagctgaatatgccacttaccagactaaatcaaccactccag

SEQ ID NO: 324890 - DNA, 100 bp, Homo sapiens
gcccccagcgcccctggtaactgacaaggaggccaggaagaaggttctcaaacaagtgctcaggagctgtcccaggaaatcaaggcttttctgactggcg

SEQ ID NO: 324891 - DNA, 98 bp, Homo sapiens
cggatgccctgcagtacctgcagaaggtctctggagacatcttcagcagaagctaactggggacgtgggcagccctgacgtgatgagctcaaccagca

SEQ ID NO: 324892 - DNA, 82 bp, Homo sapiens
cctcagtatcggggagtaagagcagaattgctggaatccacaaataccaaactatggccattgaagctgaccttggaggtgg

SEQ ID NO: 324893 - DNA, 101 bp, Homo sapiens
gcagggaaaacctacaggtggtgtgtgtgtggccgcagcaagaagcagccctgctgctgaggccgcgccctccccgccctgaggtgggggcccaccaggat

SEQ ID NO: 324894 - DNA, 98 bp, Homo sapiens
agacctctgagctgttcctcccagctacgagctgccccagacttaattcagtgcacaaatgagatgaatgtgaacatcccacagttggcagacagttt

SEQ ID NO: 324895 - DNA, 90 bp, Homo sapiens
cgcaccacgacggcgccatcaccgagcgcttgatgtgcgcggagagcaatcgccgggacagctgcaagagccctatgagtttgtctctct

SEQ ID NO: 324896 - DNA, 82 bp, Homo sapiens
tgaggcggcgcggcagcggagggacggcagtctcgcgcggtgtccctggccagtgtccttccacctgtccacaagcatgggg

SEQ ID NO: 324897 - DNA, 74 bp, Homo sapiens
agagcttcttactggatttcttcatggtgtccattttatttagcaaggaaatactacagagtgtgccaaagttc

SEQ ID NO: 324898 - DNA, 75 bp, Homo sapiens
cccacatatcaggaccgagtggccccgccagaagacctatttggagactgcttcctgtcaccataaaatcctgaa

SEQ ID NO: 324899 - DNA, 75 bp, Homo sapiens
tgggaacaggccagcaaaacactcagctgcaagtccaaagccacaagacagatgcaccatcaggaatggaattac

SEQ ID NO: 324900 - DNA, 50 bp, Homo sapiens
ggagcatctggagttccgcctgccgaaaatatttacaccagcagctccag

SEQ ID NO: 324901 - DNA, 75 bp, Homo sapiens
tctggacaccacacacatcatcagtctgattacatgaagcagatgacatttgaagcccaagcctttttagaagct

SEQ ID NO: 324902 - DNA, 98 bp, Homo sapiens
gtgcttggctgcggtgctcacactcatgaggagccggaagcctcccctggtgaagacacaaactgtcaccatctcagataatgccaatgctgtgaaaa

SEQ ID NO: 324903 - DNA, 129 bp, Homo sapiens
ggaaggcagaggctgcgcagagaatggagagctgtgtctgaggagccttggaacattcacccagagggtgatgagacaggagtgatggataatctgctggaggccttgcagtccggggctgccttccgc

SEQ ID NO: 324904 - DNA, 97 bp, Homo sapiens
ctgtacttgcttttcatgattggagaacttgtaggaaaaaggtcactggtcagaacagcaagaagaaagtagctcttgaagacaaaagttaaaaaca

SEQ ID NO: 324905 - DNA, 75 bp, Homo sapiens
ctgagcttggcctcggcgtcctcggggcatggtgctgatgtgaaatgtgtagactggcatccaaccaaagggtta

SEQ ID NO: 324906 - DNA, 100 bp, Homo sapiens
tggaactaccaagcatgtggctcctggtcagtgtaattctaatctcacggatatcctctgttgggggagaagagataattgacgaccttgccaacctagt

SEQ ID NO: 324907 - DNA, 75 bp, Homo sapiens
ctcaagactaaaaactaaaggcctgggcctgagaactgaatcagaaatgcactcggtgatggaaagagagccact

SEQ ID NO: 324908 - DNA, 100 bp, Homo sapiens
acccgtccctgctggggatcctctacgggaagaagtacgaggcggacatgtgcgtgagatataaagatgaagcgcagctgtataaagaagagcacctgag

SEQ ID NO: 324909 - DNA, 86 bp, Homo sapiens
gatgacatccttctttttagagatcgttttgatggatatatcttccttgacagcaaaggaaatgggtcctgatgaatatgaagaga

SEQ ID NO: 324910 - DNA, 73 bp, Homo sapiens
cctgggggctgaggatgacaaaaaagccttcatagaattactgggagatgtactcaaagatcggccccaggaa

SEQ ID NO: 324911 - DNA, 95 bp, Homo sapiens
aaattttagaaaatggacctgctgacagagcagatggcctggagattcatgacaaaatcatggaggatggctacaatagactagttaatattgtg

SEQ ID NO: 324912 - DNA, 135 bp, Homo sapiens
ttcatttggaaaatgaaggcctgaaaaagaaacaagtaaaactggatgagcagctcatggagatcttatgccttcattcatccggcatggtccaacaattccaagacgaactgatatctgtcttccagattcaag

SEQ ID NO: 324913 - DNA, 75 bp, Homo sapiens
cttctcccatgcctgcaggtcaccctgcggtccccaccaagcctgtggggcccaggagacaccagcgggggctgc

SEQ ID NO: 324914 - DNA, 80 bp, Homo sapiens
aagatgagcagggcccttgcggagttccgcgtccgaggtgtgaaggctcttgtcaggatggtgaagctgttcatcggaaa

SEQ ID NO: 324915 - DNA, 78 bp, Homo sapiens
tattatcttaaggaacctgtaccaatgcagcttaaagaaagtggttattgtacaggtcatgaaccagattccctggag

SEQ ID NO: 324916 - DNA, 75 bp, Homo sapiens
gaggatgctgttgcagcgatgctcaaggatcggtcccacgttcgtgagagcacagtaaggactattgctatggat

SEQ ID NO: 324917 - DNA, 83 bp, Homo sapiens
gagctatcggcgccgcggcaagagccaggtcactatcatatgacaaaggctttgccgcagttcatcttcctccctgtgtactt

SEQ ID NO: 324918 - DNA, 100 bp, Homo sapiens
tcggatggacaagcacatggcaatctcaaggaaatgtaccttctccgaatgcacctttaaagcgggtattagcctatacaggctgttttagtcgaatgca

SEQ ID NO: 324919 - DNA, 143 bp, Homo sapiens
gagtccagctcgcaggaggaggaggtcatcgacggcttcgccatcgccagcttcagcaccctggaggccctggagggagtaccctgacttctaccggaagctctacggcctcttggacccctctgtctttcacgtcaagtacc

SEQ ID NO: 324920 - DNA, 74 bp, Homo sapiens
tttggtgccctcaacatctctcagagacgaaaggaattgcagtgcaacaaagtacgtgaaaatcaggtttcaat

SEQ ID NO: 324921 - DNA, 75 bp, Homo sapiens
ccgagccagccagcaggaaatacagcatacttttatcggacgttttcgccgcatcatggactcctcacagaatgc

SEQ ID NO: 324922 - DNA, 100 bp, Homo sapiens
agggggcggcggaccgcggggcgctcatctggctctgctacgacgcgctggtgcacttcgcgctgggtgataaaagaaaatgtggctgaagttacccgaa

SEQ ID NO: 324923 - DNA, 82 bp, Homo sapiens
gagagaaacccactgaagacgtctgcgtgagaatagagaccaccgagagcactacaaacaccactggtttcccgaaaagccg

SEQ ID NO: 324924 - DNA, 83 bp, Homo sapiens
caacctggatcttcgaacttttgacacggctttggaaacgacgtcatgtgttaggctacagaaattgacagaagaaagaagag

SEQ ID NO: 324925 - DNA, 100 bp, Homo sapiens
ccgagagggaagcgatgccacgggagatggaaccaaggagaaaccatttaaaacaggtctaaaggctccttctcctgaaaaagccgaggaggagagtgag

SEQ ID NO: 324926 - DNA, 99 bp, Homo sapiens
ctccaaatggttgaaaacagatatacagatcggaagttgcacccatcaaatgggtcagattgccatcgtctcgtttcaaaattccactcccaaagtcat

SEQ ID NO: 324927 - DNA, 100 bp, Homo sapiens
ctggaggagattctggggcagtatcaacggagtctccggggtcatcatcagatttgaaatatttaaagtggatacaaaactatttcagcaatgcagacaa

SEQ ID NO: 324928 - DNA, 50 bp, Homo sapiens
agaaatggaaagacgccccttatgtccagttacaacacagggatcacaac

SEQ ID NO: 324929 - DNA, 100 bp, Homo sapiens
ctcgaggctaagtttcaaggagatcatattcaactttcatggactgcccctggcaaggtcctcgataaaggaagagttcacagaagaaaagcttggccag

SEQ ID NO: 324930 - DNA, 100 bp, Homo sapiens
aaccaagaaaaccttatcagcactatttgaaacttttatctcatctggcttggcgcctgaggttctcccattaggtcctcaagtatgttccacataatga

SEQ ID NO: 324931 - DNA, 100 bp, Homo sapiens
atcccagcctcaggcctgcacggacggtgttggttggggattgtcagtggcttcgccccgaggagagctgactgccctgggctgctgcctccggcagagc

SEQ ID NO: 324932 - DNA, 100 bp, Homo sapiens
caaacagagaactggccgctgcatggttaccacagaccacaaaggaaggaccctaaggaccatgagaaggagaacctgaggcggatcagggagattcaga

SEQ ID NO: 324933 - DNA, 50 bp, Homo sapiens
gtctgcttggtgtggagccatgaagaggtgctggagggtgagtgtgtgct

SEQ ID NO: 324934 - DNA, 75 bp, Homo sapiens
agcccgggaccgtttaaaaaactgatggtccccatcatttcccaatgtggagatatgttggtgagaagcctgagg

SEQ ID NO: 324935 - DNA, 78 bp, Homo sapiens
tgcctcagtatctgaacacaaggtgaacttcacggtagaccagatccgcgccatcatggacaagaaggccaacatccg

SEQ ID NO: 324936 - DNA, 88 bp, Homo sapiens
gggccctgtcggtcccggtaagcgggcctgcgcttaccggaaagaggagcgtaagatgaaagagtttggttgaatctggcgatgtgga

SEQ ID NO: 324937 - DNA, 74 bp, Homo sapiens
gccccggcggggaggacgagaatcggtgtgatctgcattctgcccctcctgatgtcaccacgggcctcgtggag

SEQ ID NO: 324938 - DNA, 75 bp, Homo sapiens
agctgagaagtcttcgtgcttcagcttgcattgaaaggctctagttacagtggacttcttgaacgacatcatatt

SEQ ID NO: 324939 - DNA, 100 bp, Homo sapiens
aaagaatattatattccaagacagagcacctaggattaaattggtttcctaacatgttggcagataaattgaacatgactccagaagaagctgaaaggtg

SEQ ID NO: 324940 - DNA, 101 bp, Homo sapiens
cctctgttggaacgtctttcccagttggactcttgtgttcatcctgttctagcatttccagatggaagactatgaccgtctgaggcctttatcttacccaa

SEQ ID NO: 324941 - DNA, 75 bp, Homo sapiens
tccgagttgccgccggagaggagtggcctcgcccgcttggtacctgtacaaactccgcgatcttcacctggactg

SEQ ID NO: 324942 - DNA, 50 bp, Homo sapiens
tgtgtggcaaacctttcttgagctcaggttaatgactccagagagtaaga

SEQ ID NO: 324943 - DNA, 97 bp, Homo sapiens
tccagagctgaggactgcctgtttgcaggcatgggcaagaaggacgaccccaagctgatgcaggagtggttcaagctagtgcaggagaagaacgcca

SEQ ID NO: 324944 - DNA, 83 bp, Homo sapiens
agtaagcgctctaagaatcaagaaaatggaccagtttgttcgttacgagaattggcagagggggtcgatttgggaggaaaggt

SEQ ID NO: 324945 - DNA, 95 bp, Homo sapiens
gacgtgtttggagggaaatgggaatgtacacgataattaaagagtaaagttgtgctcaacgggcaagttaaagtcttcagagccctgtatacgtt

SEQ ID NO: 324946 - DNA, 48 bp, Homo sapiens
ccccaggatggatcccccagaggaattgaatgatctggcacgggaccc

SEQ ID NO: 324947 - DNA, 100 bp, Homo sapiens
ctgttccaccttcagagcgtcacggcgtacgccctcatggggaaaatctccccggtgactttcagtgccaggtggagctcaacaggaaagtcctagcgga

SEQ ID NO: 324948 - DNA, 75 bp, Homo sapiens
caacacacccaaggtcacagagcagctcatgaaactggatgaacaaggggaggaactctctggaatgaaaaataa

SEQ ID NO: 324949 - DNA, 75 bp, Homo sapiens
ccggaatgtcatccagcgagtgattagatacttggcatatcgaaattttatgattgacacgtatcgtctaaaccc

SEQ ID NO: 324950 - DNA, 101 bp, Homo sapiens
ctgggggttcgcgcccgccgacccgcgccctgctccctctcagcacctgggcggacgcaaaagtactttgactcaggagactacaacatggccaaagccaa

SEQ ID NO: 324951 - DNA, 96 bp, Homo sapiens
acaggccatggagggacaggatccggaggcgccagctcaacccaatccccaaggtgagactggagacaatctatatttgcggagtagatgagatga

SEQ ID NO: 324952 - DNA, 74 bp, Homo sapiens
tgagtttgaacatgccatcaaactgtttgaagaaatcagagaggtgctgctggtgagtagcagccggtacccag

SEQ ID NO: 324953 - DNA, 100 bp, Homo sapiens
accgtactgaagttccctgatgatcagactcagaaaattttggaaagagaagatgctcggctgatggtgtggaaacaggaagagaactagaactggaagt

SEQ ID NO: 324954 - DNA, 75 bp, Homo sapiens
aaatttttactgtgttaagtggaaacagtgtgtggctttgcaaaaacgaacaggagattacctggggcaattgat

SEQ ID NO: 324955 - DNA, 101 bp, Homo sapiens
ccgggaccgccaggccaccaccggccgcctcagccatggacgcgtccctggagaaggtgttcattgaggatgtcagcagggagtttgtggaggagttcatc

SEQ ID NO: 324956 - DNA, 88 bp, Homo sapiens
tatcagctggggctggatgagtgttgctccttgagggcaggacagttcttatggctttatccgttgcgtaagcacagagaggtctgcg

SEQ ID NO: 324957 - DNA, 82 bp, Homo sapiens
cctgcggcggagggaaaaaggaagaggagaaggaaattgtcccgaatccctgcagcacatggattaattgatgtatgttgag

SEQ ID NO: 324958 - DNA, 75 bp, Homo sapiens
gcccccgaagtgaaagagatggcctggtggaaagcctgggagccaaaaacctgtatatcatctccgtgaagggga

SEQ ID NO: 324959 - DNA, 50 bp, Homo sapiens
tgatcacaggcctgtgtgtaaagtgttgttacagatcttataacagtcgg

SEQ ID NO: 324960 - DNA, 83 bp, Homo sapiens
gccaaccatgctcaacttcggtgcctctctccagcagactgcgcctcccgcgacgatgcccctcaacgttagcttcaccaaca

SEQ ID NO: 324961 - DNA, 50 bp, Homo sapiens
cgaggaggcagccacggggcccctggagtcgtccttgtctactccactac

SEQ ID NO: 324962 - DNA, 101 bp, Homo sapiens
acctagtatttgaatttgctagtaacgtcatggaggatgaacgacagctattgacctgaaaagtggttctggaaaagtgtaccaaggccctgcaaaaggtg

SEQ ID NO: 324963 - DNA, 91 bp, Homo sapiens
tcctgctcaagatctcagagaaggaggaggtgaccacgcgcgagggtttccaggcctgaggtgcccgccctggccccaggagaatgaacca

SEQ ID NO: 324964 - DNA, 100 bp, Homo sapiens
ctagctattgccttattttttctcatggatgttcttcttcgagtatttgtagaaggggaatgggtactgttcaaaaaggaatgccccacaagtgttacca

SEQ ID NO: 324965 - DNA, 74 bp, Homo sapiens
tttgttaaggattccaagtaactcttatttgatcctacccgccacctgcaacagcggcccagtggctatgtgca

SEQ ID NO: 324966 - DNA, 98 bp, Homo sapiens
gaaggtgctaccatcgtgagagtaaggtcctggctataagtcaccatggcacagcaagctgccgataagtatctctatgtggataaaaacttcatcaa

SEQ ID NO: 324967 - DNA, 75 bp, Homo sapiens
ctcgcttaacattggagttcagtgcttttgacatgtaacacgtacacagacctctcggccggaatctccagggat

SEQ ID NO: 324968 - DNA, 100 bp, Homo sapiens
tgcatcagagctggggcaacaacccatgactgatatggctcgtggacagcagaaaattcagtctcagcagaaaaatgccaaaaagcaagctggacaaaag

SEQ ID NO: 324969 - DNA, 98 bp, Homo sapiens
catcaggtaggctgcgttgaggatctttgctcttccatccgcctttgatcgtcttcctcttcagccatccagtctctagtgatccctgaaaagttcca

SEQ ID NO: 324970 - DNA, 100 bp, Homo sapiens
cggagtcctgttccaccttcagagcgtcacggcgtacgccctcatggggaaaatctccccggtgactttcagactgattcttgctattccaaatcctctt

SEQ ID NO: 324971 - DNA, 74 bp, Homo sapiens
ctcgccaaagcagagaaataattgccaggatgggatttaatgcatcttccatgctacgaaaaagccagctgggt

SEQ ID NO: 324972 - DNA, 74 bp, Homo sapiens
gaaggaggagcgggccgtggaggcttcgccgcctaggactcctcctattttgaggacttctccaacatctccat

SEQ ID NO: 324973 - DNA, 51 bp, Homo sapiens
tgtcggattgggagaaaaggaggtgattgtgaagtgctgaccaattgccac

SEQ ID NO: 324974 - DNA, 98 bp, Homo sapiens
gctggtcagtgtggcaaccagatcggtgccaagcggacaaggcaaaatctcagcaagttcggacctctagtacaataaggcgaacctcctctttggat

SEQ ID NO: 324975 - DNA, 82 bp, Homo sapiens
gaaaacaaaggtagaacatggaggatcgtcaggctctaaacaaaattctggttttttgcatgtctgacacccatgactccac

SEQ ID NO: 324976 - DNA, 100 bp, Homo sapiens
caatgcatttggcttttcggagtgatggatctgttagttacactggatttcatctagaatacaaaggattccagtggaatgacactggtgatgcttgccg

SEQ ID NO: 324977 - DNA, 75 bp, Homo sapiens
cgcgaccacccggagtgattgcccggcagagcgcgttgcatccaagaattgatgcccggagagctgatgaaaacc

SEQ ID NO: 324978 - DNA, 100 bp, Homo sapiens
caaaaatgaacctgtgttaaaacctggagacagggaggctgagaaaatgttagaaattgggggagacaagtttcccttagagagcaggaagttactaagt

SEQ ID NO: 324979 - DNA, 100 bp, Homo sapiens
cagaatcaccatccgcggcgcgggagacgagccggccgtcccgggccgggggacccgcccgccatggccaccaaggattcaagatgaccaacgaagaacc

SEQ ID NO: 324980 - DNA, 83 bp, Homo sapiens
ggagaggctgagctgctccaggacttggggtcaaaatgcagatcttcgtgaaaacccttaccggcaagaccatcacccttgag

SEQ ID NO: 324981 - DNA, 74 bp, Homo sapiens
catcttctgtcctgaatacagtatctccttaagagttacatccatatgggagaatagtctccagatcactacaa

SEQ ID NO: 324982 - DNA, 90 bp, Homo sapiens
cagccgactggagcaggcagcagcccagggccacccagtgctcctgcagaagatcgttcaggaacacccgacagcattgcttcctcctcc

SEQ ID NO: 324983 - DNA, 123 bp, Homo sapiens
gatcttttcaaattccctttctttgaagccatatgttggtttgtagccaaaaacttgctggaaaccctgaaaggacacattcagctaacgtattttagcaggtggagtgaggttgaagattcc

SEQ ID NO: 324984 - DNA, 107 bp, Homo sapiens
tttatatcctgacactatgaatgctacttggatgcctcttaagaaaaagcttgtggtgaaggggggcaaaaaaaagaagcaagttctgaagttcactcttgattgca

SEQ ID NO: 324985 - DNA, 97 bp, Homo sapiens
gcgactgctgctgctgctgcccggacgtggaagcagcaagaggcgcttggtcaagacacactgacgggagtggtacgggtatcactttccggagctg

SEQ ID NO: 324986 - DNA, 98 bp, Homo sapiens
tcacacatcaactggaacgaggacaaagcggcagccatcctggaggcctggcagaggacatatgtggagtttcgccgtgaggaagatgcggaaaaggc

SEQ ID NO: 324987 - DNA, 100 bp, Homo sapiens
caaaggcaccgtgacaggccaagtgcaggggccagaagacaaagtcaattccattttccaaggcaggaaaggtaaagagacaaagaaagtgccttgtaca

SEQ ID NO: 324988 - DNA, 98 bp, Homo sapiens
ccctgaagaagatctggatgccatacagcaatgggcggcccgctctgcacgcttgccagcgcggtgttgatatgagactgaaacccctgggttgtgga

SEQ ID NO: 324989 - DNA, 100 bp, Homo sapiens
ttgttttttatttttattttattttatttatttatttttttagatggagttttgcccttgttgcagtgagctgagattgcgccactgcacccccctaggc

SEQ ID NO: 324990 - DNA, 85 bp, Homo sapiens
gacgccggtctctgttccgcaggatgcccgtggaccgggagcccgtggaccgggagccggtggtgtgccaccccgacctggagga

SEQ ID NO: 324991 - DNA, 100 bp, Homo sapiens
gaagtggaagacagcattggtactaatggccaactcaaggccgttaattaaggaaaagttgagccagggcgtgaccctcgtcgtggacagatacgcattt

SEQ ID NO: 324992 - DNA, 75 bp, Homo sapiens
cccatttgtgtccattgatctcttggagcagctggggatcatggaactgatgaggagtttcaacagagacaggcg

SEQ ID NO: 324993 - DNA, 75 bp, Homo sapiens
cggagccggccgtacgcggtgctgcgagggcagaacctgggtggtgcctcggtgcacaacgccatgcagctgaag

SEQ ID NO: 324994 - DNA, 100 bp, Homo sapiens
gaacagcgggcggtgttcccggctccgtggggccgtcttcccggcgagtccgcgacggtcgccgcccacggcgagggaaatgcaataccttatttccaga

SEQ ID NO: 324995 - DNA, 98 bp, Homo sapiens
agcaggtggaaggagggagggagccgcaggcgcagacccacccgccatgaagccccccgcaggtggccggactgtgccatgctgctccagacccaagg

SEQ ID NO: 324996 - DNA, 75 bp, Homo sapiens
gaagatctgctctctcaatatgaaaatggtagctccacagtaggtagttagaaacaaacctgtggcaaggcaggc

SEQ ID NO: 324997 - DNA, 75 bp, Homo sapiens
ggttaatgaagacatgctgagtgaggctttaattcagctctgggtgaaccaggaggatgaggtggaggaggggcc

SEQ ID NO: 324998 - DNA, 83 bp, Homo sapiens
ctcagttggaagcagccgatccagcctgcggagcctgtggggcaggtcatctgtgggaagtgctccgagttcaaggccgagaa

SEQ ID NO: 324999 - DNA, 75 bp, Homo sapiens
ggtagaacaagtggtactaggattatacattgtaagaggtgacaacgtgtgcaaattgagcatgacccagaatta

SEQ ID NO: 325000 - DNA, 109 bp, Homo sapiens
cgctgggttggacctttacctgtggaggcaacactggccaagaagaggaaagaaggacagaataacgggctcccagattcacaagccccaccaagaggatcaccccagg

SEQ ID NO: 325001 - DNA, 96 bp, Homo sapiens
ccttattccgactatggcaattcttggaaatacttacactgtttcaataaaatcaagccaccattggttcaggcaatcttcagcggtgatccagag

SEQ ID NO: 325002 - DNA, 82 bp, Homo sapiens
cgtccaggctcggagcgcgacacggagactaggtggcagaattcagaaggagctggcggacatcactttagaccctccacct

SEQ ID NO: 325003 - DNA, 83 bp, Homo sapiens
ccgaggactaccccctgcttctagattgcaggaggagatgcttcagagagaggaagccgaaaacaccctgcaatctttcagac

SEQ ID NO: 325004 - DNA, 96 bp, Homo sapiens
aaagtacttcagggagtcaacggtgaggttggtgttcatattgctgatgtgagccattttattaggccaggaaatgccttggatcaagaatcagcc

SEQ ID NO: 325005 - DNA, 80 bp, Homo sapiens
cggctgcgcgctgctcctcgccctcaagttcacctgcaggtcaccatccttgtcagcctggccctagctttccttgcgtg

SEQ ID NO: 325006 - DNA, 100 bp, Homo sapiens
tgctgaagctgaggacacacccaggaaaagactcaggacggacaagcacagtcttcggaagtctcacaccattttgctggtacagcctaccaagaggcca

SEQ ID NO: 325007 - DNA, 74 bp, Homo sapiens
aacaacctgaacgtcaccgaggagaagtaccaggaggcgttggccaagggaagcatgagtgggaaaagcatggg

SEQ ID NO: 325008 - DNA, 100 bp, Homo sapiens
cgcgtccatcacctggcactcaaggaatgtatcctgtcaggtataatgtcagtgaatggcaagaaagttcttcatatggatcgaaacccttactacggag

SEQ ID NO: 325009 - DNA, 51 bp, Homo sapiens
agtgaggaggaaaacacccccatttgaatttcctactgaagcagatctgga

SEQ ID NO: 325010 - DNA, 86 bp, Homo sapiens
tgaaatttgaagatcgatttgacaaatatcttgatccgtccttttttcaacatcggatggagtcctggagtcttgctctgtcaccc

SEQ ID NO: 325011 - DNA, 98 bp, Homo sapiens
taaaaattcatcagagagcattttactactgagctgcaaaggtttccacttgagcggcacagtgacagaacctgcaatacaatcggagccagaaactg

SEQ ID NO: 325012 - DNA, 100 bp, Homo sapiens
gccgactggaccgagctcaccaactgcgtgcccggcgtgctggaccgccgcgactccgccgcgctgcgcacgcccaggttgtggcagcactgcctgaagg

SEQ ID NO: 325013 - DNA, 100 bp, Homo sapiens
cagctctgtcagcatgaacaccttctccgacagcagcacacccagtgcctggaagagctgggatgtctggttgagtcctatggcatgaatgtttgccaac

SEQ ID NO: 325014 - DNA, 83 bp, Homo sapiens
agctcggtgctggagaacttcgtgggccgtgcaccgtccaggtgaggttagagctggggcatcgcgcccaactgcgcaagaag

SEQ ID NO: 325015 - DNA, 75 bp, Homo sapiens
aggttaaaccactagcccatttcacagtttgctgctttgtggtgcacaagcggtgccatgaatttgtcacattct

SEQ ID NO: 325016 - DNA, 139 bp, Homo sapiens
ccctgtggaggctgtgctgcagctccaggactgcagcatcttcatcaagatcattgacagaatcagatcgacccatctgagcaaaagactctggccaatctaccgtggattgtggagccgggccaagaagccaagaggg

SEQ ID NO: 325017 - DNA, 75 bp, Homo sapiens
gaggactttccttacctgtttttccagctcacccactgccagcagagatcagacctattgtgaccgcctggtgca

SEQ ID NO: 325018 - DNA, 100 bp, Homo sapiens
aagaagccacagagagaaccaccagcattgccaccaccaccaccaccaccacagagtctgtggaagaggtggttcgaggaaatgggtcctgatgaatatg

SEQ ID NO: 325019 - DNA, 98 bp, Homo sapiens
caagaggttatcactacatgctcgctaacctgggcgccggccacatggttcccaccgacaagcccctcgctgccttcaccatgttctcccgcttcctg

SEQ ID NO: 325020 - DNA, 83 bp, Homo sapiens
ctggagcagaaccccaggactgcgcccccgggagcgggcgcccagagagctgtaggtaaaacttgcctactgatcagttacac

SEQ ID NO: 325021 - DNA, 100 bp, Homo sapiens
ctcccacaggaagtgtcacacagcagtcaagtatgtcccaaacgtctgatgccctaaatgagaccagggaatcagagacaaagctgaaggagctcccagg

SEQ ID NO: 325022 - DNA, 104 bp, Homo sapiens
gagggcgcaggagcgggactgagagcgcctggaggctcgagcggaggacaatgcagatcttcgtgaagactctgactggtaagaccatcaccctcgaggttgag

SEQ ID NO: 325023 - DNA, 75 bp, Homo sapiens
ctgagcctcagcacctgcttgtttggaagtgcctggctctctggctatgaaaatcctgtggtgtctcgaattaat

SEQ ID NO: 325024 - DNA, 90 bp, Homo sapiens
ctggcagccgcggatctcaccgccgctcagggggctttgaccacgacctttgaagagcttcattttgagatcaagccccacgatgactgc

SEQ ID NO: 325025 - DNA, 78 bp, Homo sapiens
gagactggagtcgaaggccgtgaggtatttttctaagcttccttcaaaatgtctactgttcacgaaatcctgtgcaag

SEQ ID NO: 325026 - DNA, 73 bp, Homo sapiens
tccattatttgagatgagttacatcttggagggcaccgcgtccgtgctgcagcgccggtcccccaatgaggag

SEQ ID NO: 325027 - DNA, 119 bp, Homo sapiens
ttgcaatttacatacccactgtttactacaaatgcttgctctactagtggaaattctaatctttcacagacacagagtaacagttacccctcaatgagcgacccctacctgtccagcta

SEQ ID NO: 325028 - DNA, 100 bp, Homo sapiens
tggcccaggcagaccttgcagtcaaaaaacacaagttcctgagaagaaaaaaggaatcttcaggagagcctatgacctattttgtgggctagagcagcac

SEQ ID NO: 325029 - DNA, 100 bp, Homo sapiens
ttttcatcctgagtctagatcttcagatagttctgttattgttcagcctttttctaaacctgttcttatagaaaattggaacgatatggggaatttctaa

SEQ ID NO: 325030 - DNA, 100 bp, Homo sapiens
aaaatgtatggatacaacttacgtttgatgaaagatttgggcttgaagacccagaagatgacatatgcaagagttgatccctgaattttattatctccct

SEQ ID NO: 325031 - DNA, 82 bp, Homo sapiens
cttagctgtgctcgcgctactctctctttctggcctggaggctatccagcgaggctactcacagtcgaactacaactccccg

SEQ ID NO: 325032 - DNA, 87 bp, Homo sapiens
caaccttcgatctcctgacgaataagaccatcatcatgtggaaactgaccagggatgagaccaactatggaattccacagcgtgctc

SEQ ID NO: 325033 - DNA, 51 bp, Homo sapiens
gcaagatcctgtgcactgactgcgttgatattcactgatggactccaaaga

SEQ ID NO: 325034 - DNA, 90 bp, Homo sapiens
atcctgtgaggcctgcaaagccttcttcaagaggaccatccagggaacagcatatgccatatatgagctggctgtggcttcatttcccaa

SEQ ID NO: 325035 - DNA, 90 bp, Homo sapiens
ggccccggccccctcccagcctgccgctccggagagccgcccgccgaggatgcgacgcaccgcaggtaacaaacctgaatttggcaactg

SEQ ID NO: 325036 - DNA, 50 bp, Homo sapiens
cggcgaggaactccagaatacaaggtcgaaacttcagagaaatgaaaatc

SEQ ID NO: 325037 - DNA, 75 bp, Homo sapiens
ctcttgatcctctccggctgcttggtctacggcacagccccaaacccaccatctatccgagaagaactctgtact

SEQ ID NO: 325038 - DNA, 99 bp, Homo sapiens
gctacttaagaagagaatactctcttagaagcagctgatggaaaagcccattaatattctataactctcagaaattgagcccaatgtattccttcgacc

SEQ ID NO: 325039 - DNA, 75 bp, Homo sapiens
aaggacttcggaatgcactacaacaggaaaatcatattatagatggagtaaaggatcccggctactcaacagaaa

SEQ ID NO: 325040 - DNA, 90 bp, Homo sapiens
ttaaccacttaacctctcagaactgaacaaagacaacattgttcctggaacgccctctttttaaaaaagtgctctggaactgaacccgca

SEQ ID NO: 325041 - DNA, 100 bp, Homo sapiens
acggcggaaacccgttcgccgagcccagcgagcttgacaacccctttcagaaggtgcttcctggaggggcctgccccactgttcctgtgctgagttccag

SEQ ID NO: 325042 - DNA, 96 bp, Homo sapiens
ccatccctcgcagcccctacactgtcactgttggccaagctacgtgcgccaggggctgttgtcggccgtctcctccgtcctgctcagcctgcctgc

SEQ ID NO: 325043 - DNA, 51 bp, Homo sapiens
tgcgctcgggctggaccagcagtcactcagcctctgaagaagcttcgggtt

SEQ ID NO: 325044 - DNA, 100 bp, Homo sapiens
atgtggtctgagggacgatatgaatatgaaagaattccgagagaacgagcacctcctcgaagtcatcccagtgcaccgcctagaatccttcgatctcgct

SEQ ID NO: 325045 - DNA, 90 bp, Homo sapiens
tggcacaggaccagactcaagacacacaactcataacagttgatgaaaaattggtggaagttaaacgagctgagcctcgggacagcaaga

SEQ ID NO: 325046 - DNA, 76 bp, Homo sapiens
cctcggaaaatggttcccactgccgggcgaggtttaactatagatcaacacatcatcttgcatctcatgggttcta

SEQ ID NO: 325047 - DNA, 98 bp, Homo sapiens
tggaggccacgctcagctcgccaggcggcgcagggaaagaatacccacctcatgtccaaaaagttgaaattaatcctgtaaggttaagtcggctccaa

SEQ ID NO: 325048 - DNA, 50 bp, Homo sapiens
gggagtacatacatctgtttgaggactctcacagaaggaggaagaggagg

SEQ ID NO: 325049 - DNA, 75 bp, Homo sapiens
tcgaagatgccttggaaaccatctcaatgttcgatacaagaggctgttttcctagcgtggcttgctgcctttggt

SEQ ID NO: 325050 - DNA, 90 bp, Homo sapiens
gaaaagaatacattcctgattacctgccacccattgtgtcttctcaagaagccccaaggaggcccgcctgacgactgaccagttgccatg

SEQ ID NO: 325051 - DNA, 74 bp, Homo sapiens
gaagatccggcgcggggcacaggatccggagctggagcccccagatgagcagcaccagcagtaagagggctccg

SEQ ID NO: 325052 - DNA, 82 bp, Homo sapiens
gggcagctcgcacttgctcaacaagggcctgccgcttggtatcgagaaccttccctgcgaacttcagaggaacttccagctg

SEQ ID NO: 325053 - DNA, 83 bp, Homo sapiens
ttctcgctccggagccgctgcacatttcggcggctatgagaggttttcctccgagtacccagaattctgttctaaaaccaagg

SEQ ID NO: 325054 - DNA, 82 bp, Homo sapiens
cagctccgaaatcaccaccaaggctgagaagaaagccaaggtcattgcaggaatgaatgctgtggaagaaaaccaggggccc

SEQ ID NO: 325055 - DNA, 74 bp, Homo sapiens
gcctccttcgccgccgcctctgcagtcctcagcgcaggtggaccccaagttcctgaggaacatgcgctttgcca

SEQ ID NO: 325056 - DNA, 100 bp, Homo sapiens
cctggacgagccccgagccatcgcactgcaccccgtgatggggatggacccccttggggacacgctgcggcgactgcgggaggccttccacgcggggcgc

SEQ ID NO: 325057 - DNA, 89 bp, Homo sapiens
tcaagtgatcttctcgcctcagcctcctgagtagctggagctacagtgatccgggccaaggtggtggggaagaagctggtaaaggaggg

SEQ ID NO: 325058 - DNA, 75 bp, Homo sapiens
ggagattatagctctgtatgagaaggacaacacctacttaggtgacttcatggtcatgacgattttcttcaatgt

SEQ ID NO: 325059 - DNA, 78 bp, Homo sapiens
gccgcgtctccgcttctgctgcctgccgggcgggctccggtggccgaaatggaatctatttggaatttgcagaagcaa

SEQ ID NO: 325060 - DNA, 100 bp, Homo sapiens
gaaaaactatgaagatgaagattcattgaagacgcttcgttatgggaagataatgattatgacagatcagccaccctgaagggtcccttcccaagccctt

SEQ ID NO: 325061 - DNA, 75 bp, Homo sapiens
gaatccttttggcttagagatcactaatccatcttcagcttcaattacaaaaaagaaacatttgtttgcatagga

SEQ ID NO: 325062 - DNA, 100 bp, Homo sapiens
atcctgagctccatggagaagccacccagcctcggtgaccaggagactcggcgcaaggcccgaggtgctggagaatctggtaaaagcaccattgtgaagc

SEQ ID NO: 325063 - DNA, 100 bp, Homo sapiens
gcggactcaggctggggtctgcagtgcagcattaatgggccgctgacatgaatatggagtagttttctctagcaaagtgtgtgtgagcacagcaaagaga

SEQ ID NO: 325064 - DNA, 100 bp, Homo sapiens
ttggattccttcctacttagcttaggattcctggtgacagaaaagactgtaaatcatttgcttcaacaggagataaagcttcaccaagaaggttgcccag

SEQ ID NO: 325065 - DNA, 78 bp, Homo sapiens
cactgatggtgctgagctccccactggctttggctggggacacccgacggactttgaacatgtcggggatcgccctca

SEQ ID NO: 325066 - DNA, 95 bp, Homo sapiens
gttattgatacattgcatcgacataaaagtgaattttttgagaaacacggagaggtttacccaaggtccagcctagcccctaggcaccatgtcgg

SEQ ID NO: 325067 - DNA, 75 bp, Homo sapiens
agaagcagttctacaaggcgagccagagcaaggctgaagaggacgtggagtctggggaggatgccggggccagca

SEQ ID NO: 325068 - DNA, 73 bp, Homo sapiens
ggctatggccgcctcctcgaagtagacctcaaaaatgggctgtccgattctgccttcgactctgggcgcctct

SEQ ID NO: 325069 - DNA, 90 bp, Homo sapiens
cagtagcaaataaggacatcatctgctataacctacaagcagttggacaggaaccagtgatgcccatggatcagtcatccatgcattctg

SEQ ID NO: 325070 - DNA, 82 bp, Homo sapiens
gcgggagtcctggcgctctgcaggtttcactgaagaaacttcttagagattcattgcacttctgagatttaatgtttacaac

SEQ ID NO: 325071 - DNA, 50 bp, Homo sapiens
tcaatgaaacagacacacctgcacagtcaaatattggagataatgtcagc

SEQ ID NO: 325072 - DNA, 75 bp, Homo sapiens
tccagatcagcaaggattgagtctctggggagcccctcaaaagcctggcggctgagccagaggccaactgcagag

SEQ ID NO: 325073 - DNA, 73 bp, Homo sapiens
cactggcagtgacgatggcacagttaaggttggatggcaagcatgtggtgtttggcaaagtgaaagaaggcat

SEQ ID NO: 325074 - DNA, 83 bp, Homo sapiens
tagaaaactgatcttaatacagcattcacagctctgatggagggcaaaatcaataagcagctgaaaaaagttctgaagaaaat

SEQ ID NO: 325075 - DNA, 75 bp, Homo sapiens
cacgagtcgaggtcctgcaggtggagctccggcagccgccctgttgacggactggacaaagcttctatagcaaac

SEQ ID NO: 325076 - DNA, 75 bp, Homo sapiens
actggagatgacacgtgcgtggggtgttgggcgggggccggccccagcccagactggaagatgagattgacttcc

SEQ ID NO: 325077 - DNA, 90 bp, Homo sapiens
gtgcagctgaacctggtgttttagaggataccttggtcccagagtcatcatgaagtactatactggcaattgctggagaagattttgcaa

SEQ ID NO: 325078 - DNA, 83 bp, Homo sapiens
gatgaagcttctgaaccatccacacatcataaagctttaccaggacacagcattgttggttttgccatgtactattttaccta

SEQ ID NO: 325079 - DNA, 98 bp, Homo sapiens
gcagcagcggccacagcgcggccttgcaggttccctgctacggtgtcatggagaaactccagctgggcccagagattctgcagcgggaaaatccaagg

SEQ ID NO: 325080 - DNA, 100 bp, Homo sapiens
ctactttggattcacccacagcggggcggcggcggcggcggctgcggcccaatataggtgaaatgacaatggatgctctgttggctcgattgaaacttct

SEQ ID NO: 325081 - DNA, 74 bp, Homo sapiens
tcttgtttgtggatcgctgtgatcgtcacttgcaaaatgatgcttcaacacccaggccaggtctctgcctcgga

SEQ ID NO: 325082 - DNA, 82 bp, Homo sapiens
aaggatacccacagtacggctggcagggtggacctcaggagcctcctaaaaccacagaatacagatatggtccagaaatcag

SEQ ID NO: 325083 - DNA, 50 bp, Homo sapiens
ggccctcattgactgtgaccctagaacccttaggagaaatcttgagagtg

SEQ ID NO: 325084 - DNA, 98 bp, Homo sapiens
gcggatgaaggaccagtgtgacaagtgccgggagatcttgtctgtgggagctgcaaactcagcagcagcagcctgtccatggctgccgtggacatcct

SEQ ID NO: 325085 - DNA, 100 bp, Homo sapiens
ttatacaagccttgtttatggccacagaaccccaccaacaactgaacgctttggtcaggctgctacaatggaaggaattggggcaattggtggaactcct

SEQ ID NO: 325086 - DNA, 73 bp, Homo sapiens
catctacctggacatcgatggacgcattcagaaggcaaaccacagggaagctggaaaagaagcggccctggca

SEQ ID NO: 325087 - DNA, 74 bp, Homo sapiens
gcagtggtcgcttcttctccttgggacagcttaatgaagacaaactgaaggggaaactgagatccttagaaaac

SEQ ID NO: 325088 - DNA, 100 bp, Homo sapiens
acaggaagtgtcacacagcagtcaagtatgtcccaaacgtctgtatacaactctgtcatacagagcccctgaaatgatcaacctttatggagggaaaccc

SEQ ID NO: 325089 - DNA, 76 bp, Homo sapiens
aagccaatcccaggaggaaaaacgacaagttggatggcttgaggactggtactaaaaggaaacgtgactgggaggc

SEQ ID NO: 325090 - DNA, 75 bp, Homo sapiens
atttgttaaggattccaagtaactcttatttggttcccgttggtgaccaggggcaagaactgctctgttgcaaga

SEQ ID NO: 325091 - DNA, 100 bp, Homo sapiens
ctgcactcacacgacgtgcgctatgggtcagagaaagccacagatggctccctgcagagcgaggactgggccctcaacatggagatctgcgacatcatca

SEQ ID NO: 325092 - DNA, 51 bp, Homo sapiens
cccacgacccatccttgaagaagatattgatgatgttaagaagttcaaacc

SEQ ID NO: 325093 - DNA, 99 bp, Homo sapiens
tttaaacaatggtgaagggcagatttttactattgatggccccctgtgcttgaagaatgtacagtctatgtttgggcaagatgtatccaatgactttga

SEQ ID NO: 325094 - DNA, 83 bp, Homo sapiens
tgagtcggcggctgatttagaaggaggttcaggctacggtgagccgaagcactccttgctcaagacccctccccagtacctac

SEQ ID NO: 325095 - DNA, 88 bp, Homo sapiens
gggaaatcgggctgaagcgactgagtccgcgatggagggagcatgattgagcggatattagtgtcgtgcaacaaccagcaggatctgc

SEQ ID NO: 325096 - DNA, 75 bp, Homo sapiens
tgggcagcaagatggcgtctgctagtagggtcgttcaggtcattgctagaatcgtggatggaagcagattcactg

SEQ ID NO: 325097 - DNA, 75 bp, Homo sapiens
cccaaccaggtccacaacgttcggaaacccaaggacttggacttcgcccagcagaagctgaccgataagaacctg

SEQ ID NO: 325098 - DNA, 51 bp, Homo sapiens
caagaggacactgaagatcacagactcatgcaatgatgctacctgttctga

SEQ ID NO: 325099 - DNA, 98 bp, Homo sapiens
tgtggttctctgtcccaggctgttccctaagaaggtctgcccaggactcaggaacttggatacgattggtgttgctgttgatttgattcttctgtttc

SEQ ID NO: 325100 - DNA, 98 bp, Homo sapiens
ctgttccgcttctcagaggacgccttcaacaccaccttcatctccaccatcgacttaattcagtgcacaaatgagatgaatgtgaacatcccacagtt

SEQ ID NO: 325101 - DNA, 98 bp, Homo sapiens
tggagcctctccagcctcccgcgaaggttctctacttaaaagacaatgactactgatgaaggtgccaagaacaatgaagaaagccccacagccactgt

SEQ ID NO: 325102 - DNA, 100 bp, Homo sapiens
cccagccatggcagattcctccgggcagcaggaccttcacggcatggtgcaactcccacctgcggaaggcaggcacacagatcgagaacattgatgagga

SEQ ID NO: 325103 - DNA, 101 bp, Homo sapiens
ggcctggccgcgcgctgctgtgttctggaagggctcattgtacagtcaaggcggcaggtgcggtccattaattgacctttgcaaaggtccacatgtaagac

SEQ ID NO: 325104 - DNA, 73 bp, Homo sapiens
caatatctctgggctttcacaggatattcagtcggagctggtcattttcggagccagcatactaccgaagtag

SEQ ID NO: 325105 - DNA, 75 bp, Homo sapiens
gaatggagatgcagctcagcagggagtctccggtggactgcagcgttagcaaatgcagcaagctggtgggcggag

SEQ ID NO: 325106 - DNA, 100 bp, Homo sapiens
gaagactttcagccaagcatcctaataatccagaatggctactctgatctatgttgataaggaaaatggagaaccaggcacccgtgtggttgctaaggat

SEQ ID NO: 325107 - DNA, 90 bp, Homo sapiens
ctgcctcctgtgttgaagcaagcgattctcatgcctcagcctcctaagtgtcaactctgcccgctcagttcctccttcctacccaccacc

SEQ ID NO: 325108 - DNA, 88 bp, Homo sapiens
ttgagaaatgcctcacagctatcggagaaaatgctgagaagcttctgcagttcaagcgttggttctggtcaatagtagagaagatgag

SEQ ID NO: 325109 - DNA, 80 bp, Homo sapiens
ataaattatgatctacctaccaatcgtgaaaactatattcacaggggtaacagtcaccgtgggccagacccgagctagcc

SEQ ID NO: 325110 - DNA, 100 bp, Homo sapiens
ctgaagactgccctcatccacgatggcctagcacgtggaattcgcgaagctgccaaagccttagacaatttgggcttcctgtagacacccttttcctgcg

SEQ ID NO: 325111 - DNA, 100 bp, Homo sapiens
ggcctccgcgccgcggccgttagtcatgtcgggttggatggcaagcatgtggtgtttggcaaagtgaaagaaggcatgaatattgtggaggccatggagc

SEQ ID NO: 325112 - DNA, 82 bp, Homo sapiens
aatcaagttgcaatgaaccccaccaacacagtttttggagtcgatagcagcagttggtgacgagatggcactcagaaacggc

SEQ ID NO: 325113 - DNA, 83 bp, Homo sapiens
acaataccaggcatacatttggcagaataaatgaaccagtgacctagagtcccgcagggatgtgaagagagaagaaggagagg

SEQ ID NO: 325114 - DNA, 119 bp, Homo sapiens
aaatggcggcgcctgaggagcgggatctaacccaggagcagacagagaagctgctgcagtttcaggctccaaacaggcatgcgaggtgcctttggaaagccccagggcactgtggccag

SEQ ID NO: 325115 - DNA, 50 bp, Homo sapiens
aaagtctttcagaataaaatgcagaatggggaaatggagagagaacctga

SEQ ID NO: 325116 - DNA, 102 bp, Homo sapiens
gtattcagccttgctggacctgtggtgtcaatggcaggacatggagaacagcttttcattgtttatcacagaggtcagtttacgttgcgagacatgtatgag

SEQ ID NO: 325117 - DNA, 100 bp, Homo sapiens
cagccgaggtggagctgcggggccctggcatgaaagcaagagtgagccatggagctacgtgtggggaacaagtaccgcctgggacggaagatcgggagcg

SEQ ID NO: 325118 - DNA, 74 bp, Homo sapiens
aggctattacttttgtcacacagctgctttgctggctctgcaagaaaatggactagacgcaactacagtgaaac

SEQ ID NO: 325119 - DNA, 100 bp, Homo sapiens
ttctctagctattgccttattttttctcatggatgttcttcttcgagtatttgtagaaggggacaagaatccttcaagaaacaggaaaaaactcctaaaa

SEQ ID NO: 325120 - DNA, 100 bp, Homo sapiens
tccgcagcgagtggggcagcctgctggaggagctggtggcggaaggtgtgggacgtgcgtgcggcgagatggacactcccccgctctcggattcggagtc

SEQ ID NO: 325121 - DNA, 82 bp, Homo sapiens
gtgggccgcgtcgaagacatggaccagggctacggagacccctttgctgatgcaagtaagggtgatgacctgcttcctgctg

SEQ ID NO: 325122 - DNA, 83 bp, Homo sapiens
gtgtacctcaatagcactggctaccggacaggaagctgcagtaaaggaagatgaagaagaagtttcagataagggcagtgatt

SEQ ID NO: 325123 - DNA, 80 bp, Homo sapiens
gcacggcccgggccggcgctccaaggcccgcccgggagggccggggccgcgctcaggaaaatcctgccttgcttcgttgg

SEQ ID NO: 325124 - DNA, 98 bp, Homo sapiens
ctcctacgaggacaaaagcaacgacttcgtatgtgtctttggtgcaacactaacaaggcttgtctggactacccagttacaagcgtcttgccaccggc

SEQ ID NO: 325125 - DNA, 98 bp, Homo sapiens
ctcagcccttctgagctctgtgctgaacaagcctgactggctcatggagaaagcctacctaagaatgaagccgggacccggcagaatggctcctgtga

SEQ ID NO: 325126 - DNA, 75 bp, Homo sapiens
cggggacagctgagctggcatcagaagacctacgccttcagggcagtgcgggctctctgtgatcacactgctgca

SEQ ID NO: 325127 - DNA, 80 bp, Homo sapiens
ggccgcgggcgggtggaggcgcgtctccggcacggtgctactgaaattgttcagttactgcgtgaaggtgaaagtcaacc

SEQ ID NO: 325128 - DNA, 100 bp, Homo sapiens
atttatacatacaaatgtggatggccttaacccagatgcacagactgagcttcaggtcttgcttaatatgacgaaaaattgttcagattccattctgtgg

SEQ ID NO: 325129 - DNA, 48 bp, Homo sapiens
gccatgaatgcccaacaagataatgtgcttgtgaatgacttcttcttg

SEQ ID NO: 325130 - DNA, 75 bp, Homo sapiens
gacaagttccatcccacctttgagtcagcttctggagatcagactgctcatatctggagatacgcggtgcagctg

SEQ ID NO: 325131 - DNA, 87 bp, Homo sapiens
aaatgcacttctatgagcttgtggaagacacaaaagatggcatctggctggttcagggaaatcctcattgacgattcaatttgttga

SEQ ID NO: 325132 - DNA, 80 bp, Homo sapiens
aagaccaagccagccacaccgagcatgatgataattccgaagaaggcttccacactattcattcaggaaggcatgaatat

SEQ ID NO: 325133 - DNA, 90 bp, Homo sapiens
gaagttgctctgtgtgctgagcgttctaaaggaaggcgtccgttggccttcgtacccgtcttgattgagataacgaaggaggcccaactt

SEQ ID NO: 325134 - DNA, 100 bp, Homo sapiens
caagaaggcccttgtgttggactgtcattatccagaggatgaggttggcctgtggcatcattgcacgctccgctggccttttccagaaccccaagcagat

SEQ ID NO: 325135 - DNA, 74 bp, Homo sapiens
ctcaaatgcaagtccaagaggaggaggaggcggaggtccaagcggaaagaactgtttgaggcgaagagatgctg

SEQ ID NO: 325136 - DNA, 120 bp, Homo sapiens
ccgtgatctggctgaacccgccggcctcgctgggcaagtggaaaaaggaaccagagttggcagcattcggaaagtaatggaccagtgaaggtgtggggaagcattaaaggactgactgaa

SEQ ID NO: 325137 - DNA, 100 bp, Homo sapiens
cattttaccaagaaagttgggtttcttttactggcaaatagtacttcaagagcacagtcttatgtaaggccaagtcatcaaggcatgggacattggggtg

SEQ ID NO: 325138 - DNA, 100 bp, Homo sapiens
cggccctgggagctggaggaaccgcgcttcctgcctgacacagctcacttcaagaagtgcacaatgtcagaacgtggaattaagtgggcttgtgaatatt

SEQ ID NO: 325139 - DNA, 100 bp, Homo sapiens
ttcgtattgccatcgccctcctgaaggaggccagcaaaggtacttggaaggctccatcgcccctgaagacaaaggaagctgctcattgctgcctgggcct

SEQ ID NO: 325140 - DNA, 75 bp, Homo sapiens
tgtactgggggattcgcagggaggatgtcgggacaccccggaagctgggaaatgcctcaaggaataggttctcct

SEQ ID NO: 325141 - DNA, 83 bp, Homo sapiens
ggcactgctactgcgaagacagctggcagagacaagaggagcagcagcggcaccgcccctcaccctggagggtcctgtacaat

SEQ ID NO: 325142 - DNA, 111 bp, Homo sapiens
gagaagactcttcatgaaacagtaaatttctctggcgttaagagacctttctgtagtgaagacatatctgaagagatggattaagaatgctttggattaaggattgtggag

SEQ ID NO: 325143 - DNA, 148 bp, Homo sapiens
cccacgcgcgcgcgctcgcgcaccacgcgccccgcgcggcccgcccggatcgtggcctctcgagagcaagcttagaccatgctcagcctccaagcagccttgtcatcgacaaagaatctgaagtttacaagatgcttcaggagaaaca

SEQ ID NO: 325144 - DNA, 83 bp, Homo sapiens
ccgaaagtggctctacaaacccaagccttatgccagcctggaccatcttggaggcagtgtaggatcatggaagaactttgaat

SEQ ID NO: 325145 - DNA, 100 bp, Homo sapiens
ggctgcagtcctcgcccggttttaacaacctggatcttcgaacttttgacacggctttggaaacgacgtcatgtgttagagtgttgttcgctgcctgtgg

SEQ ID NO: 325146 - DNA, 73 bp, Homo sapiens
gctggcagccgcggatctcaccgccgctcagggatgattgaggaaagtgggaacaagcggaagaccatggcag

SEQ ID NO: 325147 - DNA, 100 bp, Homo sapiens
tgccaccaccctgatctaagcccttatcatctgcttgaatcactaatctggcagcagaaaagacctacaacaacctagatgtatctgtgactaaagcctt

SEQ ID NO: 325148 - DNA, 98 bp, Homo sapiens
gctagtatatgacatcaccaatggtaaaagttttgaaaacatcagcaaatggcttagaaacatagatgagtctgcaggtgtacccaacagctccaaag

SEQ ID NO: 325149 - DNA, 95 bp, Homo sapiens
ttgatactgacctgtaaatcatcctttaggtcagatgggcagacctggaagagaagaaggatgcagataggaaaagggccataggttttgtggtc

SEQ ID NO: 325150 - DNA, 82 bp, Homo sapiens
gaacttacgcagggttacatatattttcacaaggaaacagagcaaatgcagcgttacaatcaaagacttattgaggaattga

SEQ ID NO: 325151 - DNA, 76 bp, Homo sapiens
acaaatttttggatgatgatggatccatttctcctattgaggagtcaacacatcttcatttgattgtacaccatct

SEQ ID NO: 325152 - DNA, 100 bp, Homo sapiens
gcgagagatggtcaggtctggagctcgaccgggccaggtggggagcagcctattcctctctggaacgaacatgatggaacagcagatggagataaaccta

SEQ ID NO: 325153 - DNA, 75 bp, Homo sapiens
caaccaccagtcagaacagactttgtggcacaagaatggctcaactctccaaatagagagaatttctatcagttg

SEQ ID NO: 325154 - DNA, 100 bp, Homo sapiens
cgttccccccgagttcgacgtgaccgggaacacctttgagatcactggggtgatcctgctggctgttggagtctggggcaaacttactctgggcacctat

SEQ ID NO: 325155 - DNA, 100 bp, Homo sapiens
ctcggaccccatccaggtcaagacgcagcagggaggtctcaagtttgacatgaaatacatgaacttccgtgtgaaggcctgtaacaaggcagttgcagga

SEQ ID NO: 325156 - DNA, 74 bp, Homo sapiens
ggcgcttccttcttctcttccggcggagagtgaccgaagctggctttggtgctgacatcggaatggagaaattc

SEQ ID NO: 325157 - DNA, 82 bp, Homo sapiens
tcgggagcgcaaggtcgccctcaaggccatgatcaaaacgttctcgggaccggaagtcaggtgggagactgggctccccgaa

SEQ ID NO: 325158 - DNA, 51 bp, Homo sapiens
agaagaccatctctgtggtcctacagcatcattctgaaaggctacaagcgt

SEQ ID NO: 325159 - DNA, 96 bp, Homo sapiens
accaaagtgatggaaacaccattccagaaaatgggattgcccaccacgataatgcagttcttattactagattttacaatcaggcgttgaatgtag

SEQ ID NO: 325160 - DNA, 100 bp, Homo sapiens
agaagtcctccagccatgagcggcgcgccttcctgcaggccatcctggagcacgaggagcaggatgaggatgacgatgtcgataccaagaagcagaagac

SEQ ID NO: 325161 - DNA, 90 bp, Homo sapiens
gctaatgacacagcgtgggtagtggaggagggttacttcaacagttccctgtcgctggcagacaaggccgaggcctgcctggagccccag

SEQ ID NO: 325162 - DNA, 75 bp, Homo sapiens
ggcatcgactcagacgcttcctatccctacaaagccatgaaaccccgagactcttcagttgaagttcgtagtgat

SEQ ID NO: 325163 - DNA, 89 bp, Homo sapiens
gcaaacttggaaagagcaagatcggcagccctaaaggtgtgctggaccggttttctcaaattcagccaaagctcatcttctctgtggag

SEQ ID NO: 325164 - DNA, 97 bp, Homo sapiens
ctccgctgtacctggatcctgctcctctgggttgaaacccgggcgccgccaagatgccgggtcaactgctatgatgtgtttggagcccagtcaccct

SEQ ID NO: 325165 - DNA, 98 bp, Homo sapiens
tctactgcgtctaccagagcatggtgctcttcttcttcgagaattacaccggggtccagatgcaggacagctggagcacacattgatgaatcattgtt

SEQ ID NO: 325166 - DNA, 83 bp, Homo sapiens
aggatgagaaggacgacaagcccatccgagagtgaagacatttccacctggacacctgaccatgtgcctgccctgagcagcga

SEQ ID NO: 325167 - DNA, 90 bp, Homo sapiens
cccctacctcctggggcccgacaagaacttcacgcgggagcagtctgcccagtcaagcccgtccaactccagctccagctcagactccag

SEQ ID NO: 325168 - DNA, 75 bp, Homo sapiens
tggactcttattcttcaactcagcatgttccttcacaatatggagcttccgtttctgccaagcctgaactacccc

SEQ ID NO: 325169 - DNA, 75 bp, Homo sapiens
gaacaatccgtctggatcacggatgtaggaagtgcttcttggacacttaatgattgttggcaagaaatgtgctgc

SEQ ID NO: 325170 - DNA, 100 bp, Homo sapiens
atgcacgtcttaataagaaggggcttataaatgcgtggacagctgcagaaaatgacagatggccgtggattcagatatgaagagcattttaagaggtgca

SEQ ID NO: 325171 - DNA, 100 bp, Homo sapiens
gggcaataagactctttaaagaaggcaaggagagaatgtatgaagaacagtcacaggacagcctcaagcccttctcaggatgcgcaggatgccaggcggc

SEQ ID NO: 325172 - DNA, 87 bp, Homo sapiens
aggacataaggaactagtcacagtgttgctgcaacatagagctgacattaactgtcagccttagattgtaagcaaaagaaatcaagg

SEQ ID NO: 325173 - DNA, 82 bp, Homo sapiens
ggagctgcagtcggcactgctactgcgaagacagctggcagtgatgatgacagcctcttcatctatgactgcagtgctgcag

SEQ ID NO: 325174 - DNA, 99 bp, Homo sapiens
attcaaatcaatgccaggatggctcaggcatatgtgttggaagcctccgcatgccccgtccagtggccatgtggccttgtgcagatgctgactccatcc

SEQ ID NO: 325175 - DNA, 101 bp, Homo sapiens
gagccccgggcgctcgaatgcagggagcagtttttgcaagaaaggatcaaagtgaacggaaaagctgggaaccttggtggaggggtggtgaccatcgaaag

SEQ ID NO: 325176 - DNA, 90 bp, Homo sapiens
gaagatcttgctagatcggaacagcacgagcacgtagcaggtctccttgcaagacttcgaaagaaatgcccggcgaagccacagaaaccg

SEQ ID NO: 325177 - DNA, 75 bp, Homo sapiens
gagttctcgggcagaggcgacctccccgcgttccatgcgcacagggacaggggaagacccactaccttatctgag

SEQ ID NO: 325178 - DNA, 102 bp, Homo sapiens
gtggaaacacagatattcaagttgagatagcactggccatgcaaccattaagaagtgagaatgctcagttacgaaggaaaatcctgccttgcttcgttgggc

SEQ ID NO: 325179 - DNA, 75 bp, Homo sapiens
cttgcctacgtcagtaacagccaccaaggtcagataccaggcccaggttccatgatgcccgggcagcacatgcca

SEQ ID NO: 325180 - DNA, 101 bp, Homo sapiens
ggacaaccaagcattttcatgaaacaaccccaaataaaggaagtggaaccacttcagagactttagaagacagctttccatcgacactaggccctttagac

SEQ ID NO: 325181 - DNA, 87 bp, Homo sapiens
aattcaacctcaaatttctaatttcaccaacaactatttattgagggctaggtttaagaattgtttaagctgcatcaatggagcaca

SEQ ID NO: 325182 - DNA, 90 bp, Homo sapiens
ccaggcgcgggggcgacgacaggtggtattaaagataatcaaacattatcaagaagaaggacaaggaactgaagttgttcaaggagtgct

SEQ ID NO: 325183 - DNA, 75 bp, Homo sapiens
tgtgggtttatgtaattagaataaaatgtgaaagcaacactgtaactcaaagcacgcaggtcttcatctgcacca

SEQ ID NO: 325184 - DNA, 100 bp, Homo sapiens
gggcgaagcacgctactacctggtgcagggcctgattgaggactgccagctggcgctgcaggtggtggcggtggcggcccgcgatctgagccgtgcgaag

SEQ ID NO: 325185 - DNA, 101 bp, Homo sapiens
cctgtacatcccattggatataatgatgcagaaatattattacgttcacacaaaagatgttggacaatttctacaattttgcttcatcatttgctgtctct

SEQ ID NO: 325186 - DNA, 82 bp, Homo sapiens
gcggcgggagcgggggctgcaggctgagtatgagacgcaagtcaaaggaagctcttcgtgggcggtcttgactggagcacga

SEQ ID NO: 325187 - DNA, 114 bp, Homo sapiens
cagttggaagcagccgatccagcctgcggagcctgtggggcaggtctacttccccagcaggacagcatcattctcctatatcttctagacatcactcatcttcctcacaatcag

SEQ ID NO: 325188 - DNA, 75 bp, Homo sapiens
cagccaagctcgtagcctgccactccgtgcatcttgagccagatgattgtgcatccatttacatctttaatgtag

SEQ ID NO: 325189 - DNA, 75 bp, Homo sapiens
gacctggccccagtgctgcgtccttatcagccgagccggcactttgaggtgaatgaccggaaggacccccaagag

SEQ ID NO: 325190 - DNA, 75 bp, Homo sapiens
gagccactgcgcccagccttgatcttgagtctattatcctcccagtccacaacgctgaaccgtggctggacgaat

SEQ ID NO: 325191 - DNA, 75 bp, Homo sapiens
tattttccctcctcaaactgactttgcagccacggagaggccagaagcggactcctagaagaggggagcagcaag

SEQ ID NO: 325192 - DNA, 83 bp, Homo sapiens
cctgcacagccgcggcggcagcagcagtgagagagaaacttgcccaggccaaagaagagaacgtgggcttacatcagacactg

SEQ ID NO: 325193 - DNA, 90 bp, Homo sapiens
cgctggtgtacatccacccggtggaagctgcacaggtgtgatccctcacatccacaaatctctgattggaaagaagggacagcagaaaac

SEQ ID NO: 325194 - DNA, 90 bp, Homo sapiens
accaggggcacggaagccacccggcctgcagaaagcgtcagcaccggccgcacccaggcaggtgcagcggcctggctggggagcccgccc

SEQ ID NO: 325195 - DNA, 79 bp, Homo sapiens
tcctcggcccctggctcctgctcctgggcatacttctccgccttcccaccacccggattcatagtgtgaattcctgccc

SEQ ID NO: 325196 - DNA, 83 bp, Homo sapiens
gcttatagtggaggctgctaggagccggtcagagggttaaaaagatcaagtggcatgagcagccttttggggaaaattggtgc

SEQ ID NO: 325197 - DNA, 100 bp, Homo sapiens
cgaaggccgggacccggttccccggcccacagtgggggtgtgcaaacccgagagaactgggtgtcttggctgggcatgacaaccgcgtcagctgcctggg

SEQ ID NO: 325198 - DNA, 90 bp, Homo sapiens
ctttgggttttttttgggtcaaacagcaaccttggtatgaagtgtggcatccaaaatcagaatccaaaatacggagctggcatatacttc

SEQ ID NO: 325199 - DNA, 75 bp, Homo sapiens
ctttgacagtggtctccacccagctgttaaattcattatgctgacatatcttttcatgttggcctggctgggagt

SEQ ID NO: 325200 - DNA, 59 bp, Homo sapiens
tgaaacttgtgggaaagctctatgaccaggttacgaggcaaatgcaagaacatgagcag

SEQ ID NO: 325201 - DNA, 83 bp, Homo sapiens
ctccagctcctcaaggtctgccctactgtccagaacgatctcctctcttaggacgtggcccggctggtcgtggagcgctccac

SEQ ID NO: 325202 - DNA, 96 bp, Homo sapiens
tcagacgagaaggagcagttccgaatttacagggggccgaaggccagagaccaggatttggctacggaggcagagcgtccgactataaatcggctc

SEQ ID NO: 325203 - DNA, 75 bp, Homo sapiens
ttaaaatacccgcaacagccccttcgtcccaaccatgactgacaatactaatgtcaactatgtgcggtacaaggg

SEQ ID NO: 325204 - DNA, 83 bp, Homo sapiens
aggacatctgcaatgatgttctggtactgcacatggtgaggaatgccaaactagttggccagtctattattgcttatctccag

SEQ ID NO: 325205 - DNA, 101 bp, Homo sapiens
tgtgggcaccaaaagtggcaagctgaagaaggtgctccaggaaccaggtggtgacgaactgggtgtgaggcacacagcctaaagtcagcacagcagaggag

SEQ ID NO: 325206 - DNA, 75 bp, Homo sapiens
caagaactacgcaatgggagcgcccaacacgggcgaccctggacatctttgactacatctacatagatgcttttg

SEQ ID NO: 325207 - DNA, 100 bp, Homo sapiens
cgttgcagctaggccagcggctcggcggtgagatcgtcagcgctgactccatgcaggttgtggcagcactgcctgaaggtatgagaccagattctaatct

SEQ ID NO: 325208 - DNA, 90 bp, Homo sapiens
tggcaagggcttattgttccttggatcaatcttcctgtcctacaactgacaaaggatcccctaaagacccctggaaggctggaccatggc

SEQ ID NO: 325209 - DNA, 82 bp, Homo sapiens
acctacgtcctggaggagctcgaaagaggtactggctgtgatcgaacttctcaaccctcagagacttagatcttccacctca

SEQ ID NO: 325210 - DNA, 98 bp, Homo sapiens
tcctattggaaacctttctaagaataaactgttcattaaacttacccgccttccacaatactacattgtagcaacacaagtcggaatagaatggaacc

SEQ ID NO: 325211 - DNA, 100 bp, Homo sapiens
tctgcagctcacccaaggctgctctccgctatgctgctgttcgtaccctcaataagagtttccctacgtataccctggtggttcaagctgctgaccttca

SEQ ID NO: 325212 - DNA, 100 bp, Homo sapiens
gcagctgctgaagacagcactcaaaggttaatgacccagagactgcagtaaaggaattagaagctctcttgggttttacattgagagtaggtgttccaaa

SEQ ID NO: 325213 - DNA, 75 bp, Homo sapiens
tggcgaaggagccggctccaagggagtctgaagatacagtattgctcgtcctcaaagagatctaccaaacccagg

SEQ ID NO: 325214 - DNA, 75 bp, Homo sapiens
cccagaggactttcttccagcttctgctgtccttctttgtggagagcaagttcactttatccaaatgcatagatg

SEQ ID NO: 325215 - DNA, 100 bp, Homo sapiens
tggcagtggaagttttggaactgtctatctggtttcagacaagaaagccaaacgaggagaggaattggaatgacagaggaagaggaagacaaacttctgg

SEQ ID NO: 325216 - DNA, 74 bp, Homo sapiens
gtccgccgattcctcctccttggtcgccgcgtccttggctggcgtacctgcgaccgcatcaagcagtccgccag

SEQ ID NO: 325217 - DNA, 100 bp, Homo sapiens
aggctgagtacgacagcctcaaacaggagctggagcagctcaaagaggtcatactccctgtcacaaactccagctgaactaacttggaggaggatcttcc

SEQ ID NO: 325218 - DNA, 80 bp, Homo sapiens
ctggagcctcagttggaagcagccgatccagcctgcggagcctgtggggcagtgcctgatttgagatggggtcccaggtc

SEQ ID NO: 325219 - DNA, 100 bp, Homo sapiens
tacaccatcgtgcctgctatcgccgagttctacaacacgggagagtccggtagtgaaaggcaatgcgctgttagctctaagcagccttgctgtcgtcgta

SEQ ID NO: 325220 - DNA, 51 bp, Homo sapiens
gccaacgccgtctatttctgcaacagctctgagagagaccgaactctgcag

SEQ ID NO: 325221 - DNA, 75 bp, Homo sapiens
ggcagatggagaacctgatcgaacttcgacaggggcaagtgtccgagtggtgaatcagctacttacagagatgga

SEQ ID NO: 325222 - DNA, 90 bp, Homo sapiens
ccaaccatgatgctgccatctttccaggaggctttggagcggctaaaaacctggttccgagtctgaggaagacataaccttgtgcctgcc

SEQ ID NO: 325223 - DNA, 75 bp, Homo sapiens
taaacttaaaagcaagctggttctctgggatataaataagagtcaagtaaagaacagtttgccagtacaaacatt

SEQ ID NO: 325224 - DNA, 88 bp, Homo sapiens
agagaagcccaaagacagtgaagaactcgagatcgatgggctagaggagaagctgtcccagtgtcggagagacctggaggccgtgaac

SEQ ID NO: 325225 - DNA, 75 bp, Homo sapiens
gaaggagcagaacgtgagggtgtaacttacaaaaagaattaaacaaccaccatgtcgagcaaaaaggcaaagacc

SEQ ID NO: 325226 - DNA, 75 bp, Homo sapiens
ggctgcgagcacatgatggcgatacgggagctcaaagtgtgccttctcggggggcatggtctagtggcccagtca

SEQ ID NO: 325227 - DNA, 135 bp, Homo sapiens
aacgcttccagattccctggaaacatgccacccggcatagccctcaacaagaagaggaaaataccatttttaagattccaggaatatacaattcacccttcagaaaagagcctgatccatgggagctgcaattac

SEQ ID NO: 325228 - DNA, 90 bp, Homo sapiens
gcctggcaggggaaggatcgaggctcatcagattcaagagatgtttccccaggttccataccatctggtactgcaggacctccagctgac

SEQ ID NO: 325229 - DNA, 100 bp, Homo sapiens
gcggggaggtaacaagaaataccgtgccctgaggttggacgtggggaatttctcctggggctcagagtatactgaagtactctttcccagtgggactaag

SEQ ID NO: 325230 - DNA, 100 bp, Homo sapiens
ggaaaagaagcccaaagttttaaagggtgcaactggaaactgacttgaagattgagaaggaatggaggcagactttgcaggaagatcttcaaaaggagaa

SEQ ID NO: 325231 - DNA, 100 bp, Homo sapiens
agatgtatgcagtgtgacgccaagtttgactttctcaccagaaagggaattgcaacccagtgaagaagttacctggaagtaaagactggctagattatcg

SEQ ID NO: 325232 - DNA, 98 bp, Homo sapiens
gaatcaagcacgcacacgagaacgacatcacccacttctacatgctcactatagacaaggggatgtggagacgctggtagcggggccaggaaggctcc

SEQ ID NO: 325233 - DNA, 104 bp, Homo sapiens
aggacatcaggatatgatgcaagaatcagacccaattttaaagatgtcatgtggcctgtgttttggaccgtggttcgtacctatgctccttatgtcacattccc

SEQ ID NO: 325234 - DNA, 100 bp, Homo sapiens
caacatgacggaaccttgccaaagaaagaccacagcaagattctttcattcgtctcctcctagcctgggggaccaggctcgaactgaccctggacatcaa

SEQ ID NO: 325235 - DNA, 101 bp, Homo sapiens
tggaactgacgcagagccgagtgcagaagatctgggtgcccgtggaccacaggccctcgttgcccagatgtgaccattgtgaggtagatattttgttctaa

SEQ ID NO: 325236 - DNA, 82 bp, Homo sapiens
agctgatttctttgaagttttctgtcaacaagttggctccagtcagaaaaccaaacttcagcttcctgcctgacacagctca

SEQ ID NO: 325237 - DNA, 75 bp, Homo sapiens
tactgtccatcaaacatcttccaccacagcttagagatactgaagtactctttcccagtgggactaagaaccagc

SEQ ID NO: 325238 - DNA, 80 bp, Homo sapiens
tgaggctgccccggccgcctgcgcacccggcagcaccatgacagagtcctgtgtatggaaactcacatgagtcagctcag

SEQ ID NO: 325239 - DNA, 100 bp, Homo sapiens
ctggttcctgctggattttaagagaggcctgagcgagctgtgttccggctgaggaaatggatcatctttcgattggtgagcattgtggacagcctgcacc

SEQ ID NO: 325240 - DNA, 75 bp, Homo sapiens
cgcgctcctggagaatatgcacatcgagcagccaggtctaaactgcagtaatccatttactcagctggagaggag

SEQ ID NO: 325241 - DNA, 75 bp, Homo sapiens
aggaacagaagcggaacagccacagcagcctcccaaggagtctgcaagttggccctggagagtgaatttgtttcc

SEQ ID NO: 325242 - DNA, 100 bp, Homo sapiens
ttgttaaggattccaagtaactcttatttgatgaagcccatgaacgtggaatatctcatgatggacgcctccatcctgctgcccccaacaggcacgccac

SEQ ID NO: 325243 - DNA, 74 bp, Homo sapiens
cacgaaaacaagtccgacagtgagaatggatcataaaaggattcctctgtactagcacactcccctaaaaaaaa

SEQ ID NO: 325244 - DNA, 82 bp, Homo sapiens
caagcacagagtatgaccaccactattaatgcctccggagccagcgtggtggccatagacaacaagatcgaacaggccatgg

SEQ ID NO: 325245 - DNA, 100 bp, Homo sapiens
ttcaagaacaagggccgcgatgtggaagcataatcaccagcaacacccgggacaataatacgggggccacctacccccacctgaacttcagcattcccat

SEQ ID NO: 325246 - DNA, 83 bp, Homo sapiens
tgcagtcatcatccattaccacaaaattagaacggggaagataaccgaagggtggtttgagaaacccaccaggccaactggga

SEQ ID NO: 325247 - DNA, 98 bp, Homo sapiens
gggtcgtggagccaggagcgacgtcaccgccatggcaggcatcaaaggaatccaggtaaaaatggcttgtctaatagctgcattttgttagataaatg

SEQ ID NO: 325248 - DNA, 75 bp, Homo sapiens
aagcgggagtcggggatagtgtcatcggttcgacaatgcagatcttcgtgaagactctgactggtaagaccatca

SEQ ID NO: 325249 - DNA, 100 bp, Homo sapiens
gttcgtcatggggctgtttggaaagacccaggagaagccgcccaaagaactgattctgaggttgggaccaagaaggaactatctattttaaaccaaaaat

SEQ ID NO: 325250 - DNA, 100 bp, Homo sapiens
ctggatcctgtgcaggacaaaactcctctctatagtcaactccttcaagcatataagtggtcaaacaaggcataatcaccagcaacacccgggacaataa

SEQ ID NO: 325251 - DNA, 101 bp, Homo sapiens
ttctttttaatgcattaaagcacatgctgcagaagaaagatcagcaactggagcctaaaaaaagtaccagccctaaaaaagctgcggagcccactgtggat

SEQ ID NO: 325252 - DNA, 100 bp, Homo sapiens
tgaaacccagctcaaatgccacctcctctgatttctttaccaactcccgcctcccacagccgcccatgccttcaaacttcccagagccccccagcttcag

SEQ ID NO: 325253 - DNA, 82 bp, Homo sapiens
ctgaagaagtgcaagagcagaggccttctctagaccttgccaagatggcacaggagccttcacgtaaatgggtccagtcatg

SEQ ID NO: 325254 - DNA, 75 bp, Homo sapiens
cgagcagatcgacaagtccgggagctgggcggccatttaccagtattaattttaaagacccacagtttgctgaag

SEQ ID NO: 325255 - DNA, 100 bp, Homo sapiens
taaatgaagccactgattagcaatttaaagatcctctccaaggcatcacgttgggtggtttccatttagaccgaggccggttcagaacttcccaaatgat

SEQ ID NO: 325256 - DNA, 75 bp, Homo sapiens
gctggccccagccgctggagacacaatcatatctttagattttggcagcaacgtactgccaaatctgtcgaaagg

SEQ ID NO: 325257 - DNA, 88 bp, Homo sapiens
ttaacagtatttactgagagctcatcaggaagatgatccctatgatcttgaagatgtttctgcacagaaatgagggaaatacaaagaa

SEQ ID NO: 325258 - DNA, 101 bp, Homo sapiens
gtacggatttgtgaatcacgccctggagttgctggtgatccgcaattacggccccgaggtgtgggaagacatcaaatctcgaatacctgatgcatgcaaaa

SEQ ID NO: 325259 - DNA, 98 bp, Homo sapiens
ccgctgaccccgtggtgatgggcaagaccaaagccgaacagttttactgtggcgacactgaagggaaaaaggtggctttaaccaagagagcagatcca

SEQ ID NO: 325260 - DNA, 90 bp, Homo sapiens
ttcggaccctggcctcttgggatgcaaaggcatgtactggcattgaaaacattgacgaagctattacattgcttgaacaaaataattggg

SEQ ID NO: 325261 - DNA, 100 bp, Homo sapiens
cctgggtccctctgagccccggggcatctatgccagtgagaggcccaagtccctaggcagctgctcccaaccccagaacctttgctgtcttgggacggat

SEQ ID NO: 325262 - DNA, 75 bp, Homo sapiens
actgggttctggactttgggcgtcccattgccatgctcacaagctcaggagcgccgttctggtctgggcccaaac

SEQ ID NO: 325263 - DNA, 50 bp, Homo sapiens
cccagatccatttacactttacagtgagaaaccctatcgttgcaacatct

SEQ ID NO: 325264 - DNA, 75 bp, Homo sapiens
cctcacatccaacacctcccagtatgacacatattgcttcaatgcttcaggaactcaacagaggcaattattatc

SEQ ID NO: 325265 - DNA, 51 bp, Homo sapiens
ctcgtatgcaacctcaggcttcagccagtcctcatgctgataccgccagtg

SEQ ID NO: 325266 - DNA, 75 bp, Homo sapiens
cttttcttcaatgataagagctgtcagttttctgtggatgaaggtattgaagcccctgggtgataatttgatgga

SEQ ID NO: 325267 - DNA, 100 bp, Homo sapiens
caggtgaactggaggagcgatttgccatcgtgctggaaaatcatcagcgtgttagcattttctttgactatgcaagatgtagcaagaacactgcgtggcc

SEQ ID NO: 325268 - DNA, 75 bp, Homo sapiens
ccgctgctgctgaggagaggagcgtcaacagcagcaccatgggattacagtttaaagacaatttctgtgatcaag

SEQ ID NO: 325269 - DNA, 100 bp, Homo sapiens
gccgccttcccgcgccccgcagcgccccgcagagcagtcgagactgtggatattcataaggagaaagtggcacgaagagagattggtattttgacaacaa

SEQ ID NO: 325270 - DNA, 75 bp, Homo sapiens
cttttggcagagctcccactatacaagttgtgcaaagtgaggaagattactgtgggagtgaagggaatccctcac

SEQ ID NO: 325271 - DNA, 100 bp, Homo sapiens
ctcgataaacagggccgtgccgcagatgcccaccggaatggagaaggaagaggagtcgccttgttgtcctcctggtgcgaagagctcggccgcctgctgc

SEQ ID NO: 325272 - DNA, 106 bp, Homo sapiens
cgggatcctgtctggagagaagcagcggatcagcagaggattgcctacagcgctcctttaaggcacaggttttctcctgccctgcttgccggcatgatcttggcca

SEQ ID NO: 325273 - DNA, 150 bp, Homo sapiens
gcctcaccaataaattttcatcctgagtctagatcttcagatagttctgttattgttcagcctttttctaaacctggtccttctcccacacctgaggatgtctccatgaaggaagagaatctctgccaagctttttctgatgccttgctc

SEQ ID NO: 325274 - DNA, 75 bp, Homo sapiens
gtgatgttggagaactacagaaacctggtctccctagcaattttccagattattcaaagtatcaggatgggcatg

SEQ ID NO: 325275 - DNA, 50 bp, Homo sapiens
gatgccacaacccttacgcaaaggtctagatgttgatggaatatatcgag

SEQ ID NO: 325276 - DNA, 90 bp, Homo sapiens
gatccggagcctggaggaagagaaggcagctgtgactgaggcagtgcgggccctgctggtatcttggagatggccgcttccatctggagt

SEQ ID NO: 325277 - DNA, 98 bp, Homo sapiens
agcagctgcccccgccgctctcccctcccagccccagcacccccaaccacagggtgaggtggctttgaccccgggttgcccggccagcacgaccgagg

SEQ ID NO: 325278 - DNA, 75 bp, Homo sapiens
gttttggaagagttgtctgcaaagtgcctctgggttttcctccctcaagcaattcgacatctcaagtgaagacat

SEQ ID NO: 325279 - DNA, 83 bp, Homo sapiens
gcccgggaccgccaggccaccaccggccgcctcagccatggacgcgtccctggagaagggactttgaacatgtcggggatcgc

SEQ ID NO: 325280 - DNA, 82 bp, Homo sapiens
gaaaccacagacatgactgagtcctccatgaagaatgccgacaaaaggatcaaggtggcgaagcccgtggtggagatggatg

SEQ ID NO: 325281 - DNA, 100 bp, Homo sapiens
tcggattaagacatcggagtcggagacctgagagatgttaaccaaattcgagaccaagagcgcgcgggtcaaagcatagattccagcctcaaaatcctct

SEQ ID NO: 325282 - DNA, 100 bp, Homo sapiens
gtcacaatgggagatgaaggaggacttagagttgtggaaagtaaaaatgtagccctaccaaaaggaactattgtactggcttctccaggctggacaacgc

SEQ ID NO: 325283 - DNA, 90 bp, Homo sapiens
cgagcggcggcgctccgagagctccaggagaagcaggctctgatggagcagcagagacggattctgaaaccttccttgtatccctcctga

SEQ ID NO: 325284 - DNA, 100 bp, Homo sapiens
ctgagtggtaatggatgatgcagttcaaataactaagattctggatgaaattgaagaacataacatcaaaatctatcacttacctgatgcagaatcagat

SEQ ID NO: 325285 - DNA, 104 bp, Homo sapiens
ggccctggaggtggaggagtccaactcagaggacgaggcctccttcaagtccgaggccacggcgtatgcctccgaggacggggtcctgaccgaggccatgatgg

SEQ ID NO: 325286 - DNA, 50 bp, Homo sapiens
aaagacacagtctccatcatcccagggtgcaaatagctatgggcaacttg

SEQ ID NO: 325287 - DNA, 82 bp, Homo sapiens
catctttacagaggaatagtctacaaaggaagacttgtaacctggagaagaggccataaagaatgctgatgggagaaccatt

SEQ ID NO: 325288 - DNA, 82 bp, Homo sapiens
aaaaggggcattatcccgctggatgcacactgctgcgtggagtcagcagtcggctttgattataaaggagaagtggagaagc

SEQ ID NO: 325289 - DNA, 51 bp, Homo sapiens
ggagaaaccaggcagtggcaaacagaataactgaagtgaagtgatggactc

SEQ ID NO: 325290 - DNA, 119 bp, Homo sapiens
tcagatcttcacagcacagttcctgggaaggtggagccaccagcctctccttggaaggcgtggaagtgcgagtggccagaatcttcaacacctttgggccacgcatgcacatgaacgat

SEQ ID NO: 325291 - DNA, 76 bp, Homo sapiens
actacttcacttgcataactaaaggtacatcaggaacgtctctatcaagaatacaatttcagcaaggctgagggcc

SEQ ID NO: 325292 - DNA, 100 bp, Homo sapiens
gagctggaatctatgggattttcagctcgatacaatttcacacctggacatccaggcagaaattgatgcccacaatgacatatttaaaagcattgacgga

SEQ ID NO: 325293 - DNA, 100 bp, Homo sapiens
gtcccgagcactctgtgccggaggtgaatggaagagaatccgaagaagaaaatctcaataaatctgaaataagtcaagtgtttgagattgcacttaaacg

SEQ ID NO: 325294 - DNA, 83 bp, Homo sapiens
agtaggccgtctcgctctgggtctccaggcccgcgaccgtccgccagtcgtcccgagaataccctctaccatctgctttggtc

SEQ ID NO: 325295 - DNA, 95 bp, Homo sapiens
cccccagccagtacctgggtgttccccaccttgggcatcatgcaccacaacaaacaggccccctggaaaaaggacaagtgaaaaatgaggcgctt

SEQ ID NO: 325296 - DNA, 105 bp, Homo sapiens
attcaccacaggaatcatgactcctggagaacggatcaagtgcttattacaggcatcatgtgcatggaccacctggaggagatgctgaagctggtgaacggcaac

SEQ ID NO: 325297 - DNA, 100 bp, Homo sapiens
agggcatccttcacccatctgaagggaggaaatagtggcaggtgacagtctgcatgtgcagttttcagagtatgctcaggtaatcaaaatgttgggaaat

SEQ ID NO: 325298 - DNA, 75 bp, Homo sapiens
cggcccggcagcgacatggaaggattttctgccgtctcttggcaaaaatggcaaataatgatgctgttctgaaga

SEQ ID NO: 325299 - DNA, 50 bp, Homo sapiens
tggtccactggtctggccacaacagcagcctattgttcctgatatagatg

SEQ ID NO: 325300 - DNA, 100 bp, Homo sapiens
gtgaccgagagcgtgaccgagagcgcgaatatcgtcatcgttagaagggcaggacacgtcctcacagaaaattgaagacttgatggaaatggtgcaaaag

SEQ ID NO: 325301 - DNA, 100 bp, Homo sapiens
cgaggcacagcgtttcttgcaagaatgggagttgcagaatgaagaagagtctggagaacctgaacaggctgcaggtgatgctcctccaccttacagcagc

SEQ ID NO: 325302 - DNA, 83 bp, Homo sapiens
cgctcatccacagagccacatctgttaggtgtcagctgtgatgcatgtttaaaaggaaattttcgaggtcgcagatataagtg

SEQ ID NO: 325303 - DNA, 100 bp, Homo sapiens
tggcaagagaagactggaaaattataagagcactctctgagacaacagtgcaggaggaaagcacagtagactcccagccagtgccaaacatagatcattt

SEQ ID NO: 325304 - DNA, 83 bp, Homo sapiens
agccagatactccccagtttctaaagcagtacttggagatgatgaaattacaaggagagccttatagatgcaagtgaagacag

SEQ ID NO: 325305 - DNA, 80 bp, Homo sapiens
gcaagctgagcgagctgtcagagcccggggacggcgaggccctcatgtaccacacggtactgaagatttaccccccaaaa

SEQ ID NO: 325306 - DNA, 75 bp, Homo sapiens
gattcaagaaggacaaagagatcatagccgagtatgaaagtcaagtcaaagctgtcacaagatgaaggtagaggc

SEQ ID NO: 325307 - DNA, 74 bp, Homo sapiens
gccgccgccgccgcgagcgctcccggtggattctccacagttttcctcgtgcgtactcacggtggaatccgatg

SEQ ID NO: 325308 - DNA, 100 bp, Homo sapiens
ggcagaaggagctgtacagagacgtgatgcggatgaactacgagctgttggcatccttgggttcgagaacttgtcttggacaattgcaaatcaaatgatg

SEQ ID NO: 325309 - DNA, 83 bp, Homo sapiens
ttagaagaattcatgctcatccgggcatatcacacctgaaaaattttatgtggaagcttgtgatgatggagcagatgacgtac

SEQ ID NO: 325310 - DNA, 74 bp, Homo sapiens
cgaagacggtaacccgtgtgactttgactggcatttgacattgtgcagcaaagaaatggttatggagaagccca

SEQ ID NO: 325311 - DNA, 99 bp, Homo sapiens
agccaacactaaaccacaaatatacaacaaggccattttctcaaacgagagtcagcctttaacgaagacccttttgaggacttctttgggaatcgaagg

SEQ ID NO: 325312 - DNA, 73 bp, Homo sapiens
cggcctttggtcgcctccgtgggcctcaatgagtcgttcaccagacaggtgttatggaagctgctgaaggttg

SEQ ID NO: 325313 - DNA, 130 bp, Homo sapiens
atcagtatgttgtgcaagaggtactgtccatcaaacatcttccaccacagcttagagatcctgagagtgagaagcctgactgaccccgcctagacgccaggcccacttcacgccgtctaagtggagaagt

SEQ ID NO: 325314 - DNA, 74 bp, Homo sapiens
gattcatttagagctgcggaacaggacgccctctgatgtgtgcaactgaggaacatggctcaagaaactaatca

SEQ ID NO: 325315 - DNA, 85 bp, Homo sapiens
ctcatcccagccatgtcatcttatctacgaaatgattcagaggactactgagcccagccaggctgtatgccattgctgccaaaga

SEQ ID NO: 325316 - DNA, 82 bp, Homo sapiens
ccggcttcgacgccctctgcccgctccagaagcagatgccgacaaaaggatcaaggtggcgaagcccgtggtggagatggat

SEQ ID NO: 325317 - DNA, 75 bp, Homo sapiens
agaagtgttctgtcgaaaagaaatcagaaatggaaagtgttttggcccaggccactgagatcgagcgtctcatca

SEQ ID NO: 325318 - DNA, 98 bp, Homo sapiens
gagcagcaccttcaggatgtccggaagagagtgcaggatgaccaactcttggatgatggcaagacactgggcgagtgtggcttcaccagtcaaacagc

SEQ ID NO: 325319 - DNA, 101 bp, Homo sapiens
tggatcccatcacgggagtcggggtggtggcttctcggaaccgagccccgacaggctatgacgtagactcacaccacccggcaagaactgctcactacggc

SEQ ID NO: 325320 - DNA, 50 bp, Homo sapiens
cggcaacttcggggagctccgcctagccacgaccacctgctgtgcctgga

SEQ ID NO: 325321 - DNA, 76 bp, Homo sapiens
gggtcttggcaactcttttatcggaaacgagaggagagacagcgtctggagaccatcctcagtctctgtgctgaat

SEQ ID NO: 325322 - DNA, 98 bp, Homo sapiens
ctcagtttacagccactgcagtatcacagccagcctccaactggtacagatactatggtcaaagctggagttagcactaacataagtaccaagcacca

SEQ ID NO: 325323 - DNA, 90 bp, Homo sapiens
caggtccaaggaggtgatcaatcggccttttaccaatgagagcctgcagcctcatgtgccactccacgggcagtccccactagtgacggg

SEQ ID NO: 325324 - DNA, 82 bp, Homo sapiens
cctgagggcagctgttcccactggctctgctgaccttgtgccttgggctctttgtgatggatgaggacgccaccctccagga

SEQ ID NO: 325325 - DNA, 100 bp, Homo sapiens
cggagaagacggccgccaagatggagaagaaggtgtctaagcgctcgcggaaggaggaggatgatgacctggaagaaggtgaagtgaaggaccccagtga

SEQ ID NO: 325326 - DNA, 97 bp, Homo sapiens
tgtataatctcttcctgaaaattgatgctactcaggtggaagtgaatccctttggtgaaactccagaaggacaagtacttcgggatgacttcagaca

SEQ ID NO: 325327 - DNA, 82 bp, Homo sapiens
gcaagagcagaggccttctctagaccttgccaagatggcacaggcaagccgattttttcagttgatattcaccctgacggga

SEQ ID NO: 325328 - DNA, 100 bp, Homo sapiens
ctgaatgggcccgtgggcatatttagtcattcatttttgatcaggagaaagaagacagccatcatttgaaagatggttctgtgaagggaaagaactgcac

SEQ ID NO: 325329 - DNA, 82 bp, Homo sapiens
cccaccaccaccatctccatcacccaccaacaacaccacaataatccacagccaagtttccaacatggctagatccatcaga

SEQ ID NO: 325330 - DNA, 100 bp, Homo sapiens
gaagaggcaaccacgttctccaatgcaatgctgtttgccctgaacatcatgaattcccaagaaggaggagctcgtgtaaatgccaaggacaacatgtggc

SEQ ID NO: 325331 - DNA, 98 bp, Homo sapiens
gcacgcgggaggccgaggagaagctggaggagcggctgaagcgcgtgcgcatgtggtgtccgcaaagcccaaggtgcataatcgtcaacctcgaatta

SEQ ID NO: 325332 - DNA, 82 bp, Homo sapiens
atggagactggaggaagaattcccaagccagagctttccagagagtgaagaagtttatcaaaggcaggtgctgtcaatttca

SEQ ID NO: 325333 - DNA, 75 bp, Homo sapiens
agattcgcagtggtcgcttcttctccttgtccagcctagggtgaatgtttccccctccaagaaggggcccttgca

SEQ ID NO: 325334 - DNA, 98 bp, Homo sapiens
gaggccggagcccaccaagttctgggaatcattgaaattatgagactatcattcaaatggaagcattatagttcttcggaaccattatgatctcaaaa

SEQ ID NO: 325335 - DNA, 100 bp, Homo sapiens
tgtgacctctgaacaggagtgggacaaggatacaatgtctctttgctatatgaccttgaaaatcttccggcatccaaggattccattgtgcatcaagctg

SEQ ID NO: 325336 - DNA, 82 bp, Homo sapiens
caggaaaactaggtgtctgtgttcactccaggctgaagttacaggccaaagaggtgctgaaaaaatatttggagtccaagga

SEQ ID NO: 325337 - DNA, 74 bp, Homo sapiens
gactacacagttgagttgcctctgattggaaaagcagggaactctaatgatccaggacaaagaagttaccctgg

SEQ ID NO: 325338 - DNA, 98 bp, Homo sapiens
cagaacaagctcagcctcatcaacttcagaccctctttcccagctgcccgctcctcagcacccgaagattcgcctgtacaacgcagagcaggtcctga

SEQ ID NO: 325339 - DNA, 75 bp, Homo sapiens
ctacactgagtcggaggcgaaggaaaaccaattctgtgtcctcggaggaccacagcccagttgggccccaggcga

SEQ ID NO: 325340 - DNA, 100 bp, Homo sapiens
gtccgtaccttctttgtactcagccaggctgaggaaaaggcagatgctctgaataaggagctgctgatgaccaaacagaagttgattgatgcagaagaag

SEQ ID NO: 325341 - DNA, 75 bp, Homo sapiens
ggcgacatactacctctggccccgagatcagaatgccgtactatactggcaattgctggagaagattttgcaatt

SEQ ID NO: 325342 - DNA, 126 bp, Homo sapiens
ctgagcaccccaagcccgatgcagccacccccagacgaggcccgcagggacatggccggggacacccagtggtccaggctgttttggagtcagcggaagatcaccaaggccagggagtggttccac

SEQ ID NO: 325343 - DNA, 101 bp, Homo sapiens
aatggtgaaactacatgttcagaaaaacagtccaggctctgcagacagcatcccacctgtcccagcaggctgacctgaggagcatcgtggaggagattgag

SEQ ID NO: 325344 - DNA, 76 bp, Homo sapiens
gaaatgtccatgagaaaaagcttggagataaagttgctttttactgttgatattcactgatggactccaaagaatc

SEQ ID NO: 325345 - DNA, 120 bp, Homo sapiens
cccagccgaccttgagctccaggagttcgtctcttacgtctgcggaagtgcagctgcctcagttcttagcgcaggtgatttgaagatattaaagctagaaattggaactagaaaatcaaa

SEQ ID NO: 325346 - DNA, 98 bp, Homo sapiens
caacgtgcctgcagtggccgaggagattcaggatgaagttggctgtaccagtgcaggtcctcactttaatcctctatccagaaaacacggtgggccaa

SEQ ID NO: 325347 - DNA, 100 bp, Homo sapiens
gaaagatgtcactttacagaaacagtgtgtaccattccgacgttacaatggtggagttggcaggtgtgcgcagattaatgcaggacaccagtggaaccaa

SEQ ID NO: 325348 - DNA, 75 bp, Homo sapiens
ctctggagctgtggttgctgctgtgatatggaggaagaagagctcagaccaggagaaagtttcagactatgaaat

SEQ ID NO: 325349 - DNA, 50 bp, Homo sapiens
ctgggcagacctcttcagaaatagcaggagtacgaccccagcaaagcgac

SEQ ID NO: 325350 - DNA, 83 bp, Homo sapiens
agatctccagatggaagcggggcatggccaggccagtgttcaagaaggaagtgtatcttcatacatcaccacacctgaaagca

SEQ ID NO: 325351 - DNA, 82 bp, Homo sapiens
tcagtttctggaagaagaagaagagcatgatcggcatgtccaccaagcacatgattaagtaccggtacatcccgttcacaca

SEQ ID NO: 325352 - DNA, 90 bp, Homo sapiens
caaaaacggcccttggatgatggagtaccctcaggtgactacagatgtgttaacacccagcatgttccggtaggagactttctggatggg

SEQ ID NO: 325353 - DNA, 100 bp, Homo sapiens
ccaggttgccttggaaaatgccaacgccgtgtctgaagtttcattgtactgacaacctcagctggcatcatggaccatgaagaagcaagacgaaaacaca

SEQ ID NO: 325354 - DNA, 75 bp, Homo sapiens
cagagcagggcggcggcgactcgatagcctgggctggaagctcttctacgtcacaggctgcctgtttgtggctgt

SEQ ID NO: 325355 - DNA, 100 bp, Homo sapiens
ctgagctgaagaaagccttgtgtactgcccatgagaagttctgtttctggccagacagcccatccccaggctggttgcatgtacattcatggaggagtgg

SEQ ID NO: 325356 - DNA, 100 bp, Homo sapiens
agaatagacacggcagcgcagtgcagatccgcaggcgcaaggcttcaggcgacccgtactgggcctactctgtctttgagagttcaggccctggtccgag

SEQ ID NO: 325357 - DNA, 74 bp, Homo sapiens
atgctaaggaagctgtggcaagcatctaataggattcaggaatcaaagaatcagtgtactcaggtggtacagga

SEQ ID NO: 325358 - DNA, 50 bp, Homo sapiens
ctgctgatgacttccgcaccaagtatgagaatgagctggccctgcgccag

SEQ ID NO: 325359 - DNA, 98 bp, Homo sapiens
gaattccactgtaagctccaagaagccacaaactttccccttcgtccttttgtgattccatttctcaagacctgatggccaaaagaaaggaagaaaat

SEQ ID NO: 325360 - DNA, 106 bp, Homo sapiens
ggcgacaagggtgttcccgaactagagtgggctgaccggttccctgatgtgttacctgcttctgctactgatccaaactgcagaacttctcattcatccccaaggc

SEQ ID NO: 325361 - DNA, 50 bp, Homo sapiens
ccgccggtcacctccgcgcggacaccagcgtgagtgcatctccatccacg

SEQ ID NO: 325362 - DNA, 75 bp, Homo sapiens
cggcgagcagaactacggcgagcggcaataatgacgatgaggacctgacaccagagcagaaggcagagcgtgaga

SEQ ID NO: 325363 - DNA, 82 bp, Homo sapiens
ctatcctggacacggcatgatgttcgtccgcaacgattgcaaggaattacatgaacgacagccttcgcaccgacgtcttcgt

SEQ ID NO: 325364 - DNA, 50 bp, Homo sapiens
caggaggcagtagccaaacacccagacatcaaggagcacgtgaaacagct

SEQ ID NO: 325365 - DNA, 97 bp, Homo sapiens
ggaccctgcagagcgtgctgtggtcagagtcgctgagacaaggtctcaccatgttgcccagaatggacccgaactcctgagctcaagagatcctcct

SEQ ID NO: 325366 - DNA, 100 bp, Homo sapiens
gaaacaatggcatttacagaaagagtcaacagcagtggcaacagtttgggcgtcatagactaaacccagaaaacagaacattgggaagtcttcggaatat

SEQ ID NO: 325367 - DNA, 98 bp, Homo sapiens
gaaatcgcctcccgagaagaagttgaggcgctatacttaattcagtgcacaaatgagatgaatgtgaacatcccacagttggcagacagtttatttga

SEQ ID NO: 325368 - DNA, 75 bp, Homo sapiens
ctgagaaactgcggaaagaattgcatgaaggagcacgtgaattgcctctgcttacgttcaggccctgtcctaaac

SEQ ID NO: 325369 - DNA, 50 bp, Homo sapiens
cgctgcttccacccaacttcctgttagcattggggctttccagctctcac

SEQ ID NO: 325370 - DNA, 75 bp, Homo sapiens
tgtgatgatgcctgagttcagccctcagcagccattcaaactcctccccacgacactctgaagcagcgacggcac

SEQ ID NO: 325371 - DNA, 101 bp, Homo sapiens
tggtggtaccctaaaattagggcatgattaaggaatcagtgacattccaggatgtggctgtggatttcactgcagaggagtggcagctgcttgattgtgct

SEQ ID NO: 325372 - DNA, 90 bp, Homo sapiens
gtcatccaggcctcttgaaagtccacctccttacaggcctgatgaattctctgctgtagctgccactgagaagaaggcggtgactccagc

SEQ ID NO: 325373 - DNA, 75 bp, Homo sapiens
cacatgttgctgcaaatgggtgctaatcacaccagccagggactggtgacattcagggacgtggccatagagttc

SEQ ID NO: 325374 - DNA, 74 bp, Homo sapiens
acggctcaacccaccgctgccgaaatgaagtataagctgtcaccactgactaaagaagagaaaactgcggcaga

SEQ ID NO: 325375 - DNA, 75 bp, Homo sapiens
gagaactacagaaacctcgtctccctggaatgccacccagaggatgtttgaaattgactatagccgggactcctt

SEQ ID NO: 325376 - DNA, 75 bp, Homo sapiens
gatctggattctaaggcaacacttccttgaagaaacaagcttacaggtacatgtcccagagcaagcacacggagg

SEQ ID NO: 325377 - DNA, 75 bp, Homo sapiens
gctcccttcgccaaactcttcattttctctatggagtgaaggtacctgagcgcaggaaccatggtcttcattgct

SEQ ID NO: 325378 - DNA, 82 bp, Homo sapiens
ccctggagcctcagttggaagcagccgatccagcctgcggagcctgtggggcaggtgacaaccaaagccaagcaactgaagg

SEQ ID NO: 325379 - DNA, 100 bp, Homo sapiens
agagcccagcggctgcggagcagtggaggaagtggcagagagacaaggagaagctgaacgtttattgaagatgaccttagaagagagacgcaaagaatac

SEQ ID NO: 325380 - DNA, 88 bp, Homo sapiens
gagatatggctgcttcccgttctgccatgatgtacaagttgtgcaaagtgaggaagattactgtgggagtgaagggaatccctcacct

SEQ ID NO: 325381 - DNA, 101 bp, Homo sapiens
tcacaagttcctcatctgggacactgctggtcaggaacggatgtgacagacaggaagctgactatggaagaagaggaggccaagaggatagcagagatggg

SEQ ID NO: 325382 - DNA, 98 bp, Homo sapiens
gaggacccaagaagcagaaggagaacaagccaggaaaaccccgaaaacgcaagaagcgtgtggaacggcacatgtgtgatggggacattgttatcttc

SEQ ID NO: 325383 - DNA, 50 bp, Homo sapiens
gggaacgcagctgaaagcgtgaactccatgccttgtgttcaggcgcagta

SEQ ID NO: 325384 - DNA, 83 bp, Homo sapiens
cggcggcgccatggcagggcttgcagttgcagagtgggcaggatcttaagacccgataggtgcagaacccatctggacacgga

SEQ ID NO: 325385 - DNA, 76 bp, Homo sapiens
gggtccctgaagagggaagacacgcggaaacaggttggattagcttttcaaaacagaaattcttggaaagaattaa

SEQ ID NO: 325386 - DNA, 50 bp, Homo sapiens
cgattccgaaccgcccggggacagagggccaattcctgtccccccagcag

SEQ ID NO: 325387 - DNA, 100 bp, Homo sapiens
cggcatctgcacagcactgaagaacctgggaatcagaccctgagaccctgagcaagtgaaaggtgtagcagtcactcggcctacacccacagcatcgacc

SEQ ID NO: 325388 - DNA, 100 bp, Homo sapiens
gccggaggagatgtggctctaccggaacccctacgtggaggcggagtatttccccaccaagccgatgtttgagaacaaggggtctgtggaaatcatgaga

SEQ ID NO: 325389 - DNA, 49 bp, Homo sapiens
gtggaactccaggctatgtcggtgtagagttcggtgctcgaatgataac

SEQ ID NO: 325390 - DNA, 74 bp, Homo sapiens
gtttgctctgctcttccaacaccagtggaagatgatcacatcccaggccataaaattttgagtagaaaaatcca

SEQ ID NO: 325391 - DNA, 74 bp, Homo sapiens
ttggctgcttgcattaaaggtttacccaagaatgaaatggaaaggcattttctggagcttcttcagtttaatat

SEQ ID NO: 325392 - DNA, 97 bp, Homo sapiens
tctgggagcttctcagccattttccacagatcagcctcctggaggaaagctatgtcatgaaggatcccttcacctccgacaaggacagattcctggt

SEQ ID NO: 325393 - DNA, 98 bp, Homo sapiens
cagctgagtgtgccacacaggtagccctggacggcattcagtgttttggtgaagttaaaatgaactatttgggcaaaccatatgtagccatggttaca

SEQ ID NO: 325394 - DNA, 82 bp, Homo sapiens
cataattccagtacagcctatcaaactgtacatacctatgtcaacactacaggtgtgcaagaagagcggaaaaaccgcacaa

SEQ ID NO: 325395 - DNA, 100 bp, Homo sapiens
aggggacagaggcaccaaggacctccaagacagctattgacctgaaaagtggttctggaaaagtgtaccaaggccctgcaaaaggtgctgctgatacaac

SEQ ID NO: 325396 - DNA, 100 bp, Homo sapiens
ttcaaaactggatatggccaggatgctatagcattgtcagtgctaaagtaaataatgccagcctgattggactgggttatactcagacccttcgaccagg

SEQ ID NO: 325397 - DNA, 75 bp, Homo sapiens
gtcggagtgaaaagaaggcacggaaggctgagaacgggaagcttgtcatcaatggaaatcccatcaccatcttcc

SEQ ID NO: 325398 - DNA, 74 bp, Homo sapiens
gcgcttccccatggggctggcctgcggcgcctgggcgctctgagggtgtccgcaatgttgccagtgtctgtctg

SEQ ID NO: 325399 - DNA, 98 bp, Homo sapiens
ctagtcctgagcttcccaccgaagatgaacagggttcctggggcatcgacgatctccatatttcattgcaaggccctccctatcctgaagacattagc

SEQ ID NO: 325400 - DNA, 101 bp, Homo sapiens
gattccaagtaactcttatttgggcagagcggcttgggtaaatccaccttaatcaacaccctcttcaaatccaaaatcagccggaagtcggtgcagcccac

SEQ ID NO: 325401 - DNA, 88 bp, Homo sapiens
aacaactggcagaatttgctaggttaaagtattgcacaatcagctggtccttttccacaatgccattgccgcttactttgctgggaat

SEQ ID NO: 325402 - DNA, 80 bp, Homo sapiens
ctcaaaaaatcttcttggttctgctacaagtgtcatcaatcttacagaagaagtgctgtgggtcaaagtgaatataaaca

SEQ ID NO: 325403 - DNA, 100 bp, Homo sapiens
tcgttaagggactcaggcagtacgggaagaacttcttcagaattagaaaggagctgcttcccaataaggaaacagttttgattcccaccatggccatcac

SEQ ID NO: 325404 - DNA, 74 bp, Homo sapiens
tcggcgcctgttctcgggctgtttggcggctattgacctgaaaagtggttctggaaaagtgtaccaaggccctg

SEQ ID NO: 325405 - DNA, 90 bp, Homo sapiens
caagttttcacttatctcgaaagcctatcagcatagttaaggtcatcagatttcgggacgtcctacaccaagctcaccctccagcctggt

SEQ ID NO: 325406 - DNA, 75 bp, Homo sapiens
atcgagcccagcgtcaacttcctcaagtcgcccaaagacttcccaagtaagaagcggaagaggagccgctggaac

SEQ ID NO: 325407 - DNA, 82 bp, Homo sapiens
agctgaaaatttacttctggatgccaatctgaatatcaaaatagcaggtcagagtgcatcaacaagtttgcttcagtcttcg

SEQ ID NO: 325408 - DNA, 121 bp, Homo sapiens
ccggaatgctgcccgatggccctgggtcctcgctgtggggcaatccgggcttgcagacgaggtctttcccgcggtgacttcccttgggctgaatgaacaggagctgttatttctcacccag

SEQ ID NO: 325409 - DNA, 51 bp, Homo sapiens
acactgccaaccggccagaggacgagtgtgagagagactcccgtgagcacg

SEQ ID NO: 325410 - DNA, 83 bp, Homo sapiens
agcatcgtgaaaagcctccttctggttccaaatggccaagaagacgctggagggaggctgttaggagggactctgagcttcac

SEQ ID NO: 325411 - DNA, 100 bp, Homo sapiens
tgggatttgccaatctcccaaatcaagtatacagaaaatcggtgaagagaggttttgaattcacgcttatggtagtggcgaatgacaacagagctgctca

SEQ ID NO: 325412 - DNA, 76 bp, Homo sapiens
ctttttgaaagagttctgcttaaaatgcccagaatacttggccctttctaaggcacaaaatgatgtgatggaaatg

SEQ ID NO: 325413 - DNA, 95 bp, Homo sapiens
ccctggagcctcagttggaagcagccgatccagcctgcggagcctgtggggcaggaatataaatagtttctggaaaggacactgacaacttcaaa

SEQ ID NO: 325414 - DNA, 100 bp, Homo sapiens
gactgcagctccgtggatttcagtgtcttttctgcctgctcagttccagttgtcacagccgaacactgtcagctacagccagtccagcttgatccacctg

SEQ ID NO: 325415 - DNA, 96 bp, Homo sapiens
ggtgactctctggatggaccagaatacgaggaggaagaggtggccataccgttgaccgctcctccaactaaccattttatgtgctgaaagagttgg

SEQ ID NO: 325416 - DNA, 100 bp, Homo sapiens
tgactccataaactattggattcataacctgctccatgcttgaaaacatggggattggaattcgagcaaaggatatgcgattggcaatgccccggagttg

SEQ ID NO: 325417 - DNA, 75 bp, Homo sapiens
ggcctacagctctgccggggaggaggaggaggaggaagaggaggagaagggccaagaccagcttcaagtctccat

SEQ ID NO: 325418 - DNA, 100 bp, Homo sapiens
ccatcaaccgccagatcaacctggagctctacgcctcctacgtttacctgtccatggattgccagccctagagttccccaatgaaaaatagagctgttgg

SEQ ID NO: 325419 - DNA, 98 bp, Homo sapiens
ccgccctgaagaaggagaaacgaaagaaacgtcggcaggaacttgctcgactgagagactcagatgatgatgtgcctgcagatatggttgcagaagaa

SEQ ID NO: 325420 - DNA, 75 bp, Homo sapiens
taaaggatgggttttaactacagacccagtctctgccaagtgaagaagctaagtctcagaaagataactcaccca

SEQ ID NO: 325421 - DNA, 100 bp, Homo sapiens
tgggtcctcgctgtggggcaatccgggcttgcagacgaggcaacatgagtgagaatgaggaagaggaaatttctcagcaagaaggcagtggggactatga

SEQ ID NO: 325422 - DNA, 97 bp, Homo sapiens
ccacttgattacccgttaagtcccccaaagatgagatttacctgtgagatgtttcatcccaacatgagtgatagttgcttcaggaatcttgcagaag

SEQ ID NO: 325423 - DNA, 100 bp, Homo sapiens
tgacatggtgtgcctaaaccacgggaccctgcaggaagctgagggacagaggtcggaggagcagatcacgcttgcgaaggcggtctcgatcacgcggtgg

SEQ ID NO: 325424 - DNA, 75 bp, Homo sapiens
tgaagcaacatgagatggtggatgaacccacagggccatgtttatgagtggactaagtgaaagcaaacaaaccca

SEQ ID NO: 325425 - DNA, 100 bp, Homo sapiens
aacaggggtcacggggcaaggagcacgtggcagcgcaggaaacagctcaccatggatgatgatatcgccgcgctcgtcgtcgacaacggctccggcatgt

SEQ ID NO: 325426 - DNA, 82 bp, Homo sapiens
atgtcctcaactttctgggcgttcatgatcctggccagcctgctcatcgcctactgcagttgagcttcagcgacagcgagag

SEQ ID NO: 325427 - DNA, 50 bp, Homo sapiens
gtgcgtcaatcagagcgtcctgtgcgggcccactgatgatggtgaagaag

SEQ ID NO: 325428 - DNA, 100 bp, Homo sapiens
gcccctggcctgcccggacgagttcgatgacttcgtcacctatgagctcattgctatggacagtgctatcaccctgtggcagttccttcttcagctcctg

SEQ ID NO: 325429 - DNA, 75 bp, Homo sapiens
ctcaatttaagcctgatctaacccctagaaacaggtaatttagcccaagctgaagcagttggaagagaggcactg

SEQ ID NO: 325430 - DNA, 75 bp, Homo sapiens
tacaacatggcagacattgacaatcctaacttaaactggattgtttttcaactctgatctgtcccctggttggca

SEQ ID NO: 325431 - DNA, 100 bp, Homo sapiens
gcctcaggaatttatggtcgcctttttgaatgaggtcttgctcagtgtgcagaactctgctggcagctgagaggggaagccggaaagaggcaagttcctg

SEQ ID NO: 325432 - DNA, 75 bp, Homo sapiens
ttgacctaaagaccattgcacttcgtgcccgaaacgccgaatataatcccaagcaaaggcgccagcagagggagt

SEQ ID NO: 325433 - DNA, 80 bp, Homo sapiens
gcaaaactgcgctttctggctgaggagagctgctgcccaaagggagcaaggaggaacagcgggattacgtcttctacctg

SEQ ID NO: 325434 - DNA, 74 bp, Homo sapiens
acaccaagttggacgctatgctggaagaatttaagaaaggctaactcaggtgagatggagccgctatagtcctg

SEQ ID NO: 325435 - DNA, 98 bp, Homo sapiens
gatgtgaaaacagaagctgtggctgagatgcagaaactaccagaggccgttcagctaattgagaaggccagcatgatgtatctagaaaacggcacccc

SEQ ID NO: 325436 - DNA, 50 bp, Homo sapiens
ggcccgcggcgccccgtgctgcagagttacactgttagaccttatgatag

SEQ ID NO: 325437 - DNA, 87 bp, Homo sapiens
ctgattcttccttcagtgacacagaacttgaccgaagtgcctggatcaaagtggaacagctgaagccatatcatgctcataaagagg

SEQ ID NO: 325438 - DNA, 50 bp, Homo sapiens
aaagcaccattgtgaaacagatgaaggaaatgaggcaagttatcctttgg

SEQ ID NO: 325439 - DNA, 100 bp, Homo sapiens
ggcggcggagccgaacaagaccgaaatccagactctttttaagaggcttcgcgcagttccaaccaacaagtctttaacacctctgtgtgaagatgacaac

SEQ ID NO: 325440 - DNA, 78 bp, Homo sapiens
acatggacatgaagaggaggatccacctggagctgaggaaccggaccccggcagctctcaggcgctcaggactgccag

SEQ ID NO: 325441 - DNA, 75 bp, Homo sapiens
cggattaaaggcagtgaggctgacaggggaagccatatgtttttgaccgtgtattccccccaaacacgactcaag

SEQ ID NO: 325442 - DNA, 80 bp, Homo sapiens
aagcccagacctgcagggttcgtggataataaactcaagcagcgagtcatccagattcaattagcagagcctcacagaca

SEQ ID NO: 325443 - DNA, 98 bp, Homo sapiens
tgcctgaaggagtacatgccctttatgaagatattcttgaggaggggtgtttgatgcttccctcaaaatggctggcttctatggattgtatacctggc

SEQ ID NO: 325444 - DNA, 49 bp, Homo sapiens
tgcggcgcatggaggaggaggaggtatgtgcactgcgcgtgaccagccg

SEQ ID NO: 325445 - DNA, 89 bp, Homo sapiens
aagaaacgttcacgacagaaaactgcagttcatgtgctaaacttttggtgcttaaatccagctgtgccattcgatgaggactatctaaa

SEQ ID NO: 325446 - DNA, 97 bp, Homo sapiens
aactggctcaagaaatttgcctcgaaaaccaaggctctaattcggccacttccaagtcaacaaatgtttgaacatatgcagaagagacaccgtgtat

SEQ ID NO: 325447 - DNA, 75 bp, Homo sapiens
gaactcatccggcagaataagagactggacgctgtgaggcgtccgacctccgatcatgaacgggcccctgcaccc

SEQ ID NO: 325448 - DNA, 83 bp, Homo sapiens
cgctctaaagacggaaccgccacagcactcaatgaaacagattcagatagttcaagttcatcgtcttcctcttcatcttcctc

SEQ ID NO: 325449 - DNA, 82 bp, Homo sapiens
aaccggcgctcctgcccccggggtgacgcgcagctcccagccgaatgttgtaccatctttgggtaggcagacttccctgacg

SEQ ID NO: 325450 - DNA, 98 bp, Homo sapiens
agtgcagttagtgtcgacgtggaaggctacatttatagtcattgtcgaaagctgtggaacaactattttcatctggcagtggcttttatcacccagga

SEQ ID NO: 325451 - DNA, 105 bp, Homo sapiens
ccgaagtcctggaggtgttccacccgacgcatgagtggcaggcccttcagccaggtcagcccaaggccaaccccactgtcactctgttcccgccctcctctgagg

SEQ ID NO: 325452 - DNA, 100 bp, Homo sapiens
aaacctggtgactcacagaaccttggtgtgactgcacagaaaagttacaaaacaaatttgactttttgcgctcacagttgaatgatatttcgtcatttaa

SEQ ID NO: 325453 - DNA, 122 bp, Homo sapiens
gggggcttcccggaggccaaccgtatcgccagcaagtacggattcatcaacataggacagacaatgcagatcttcgtgaagactctgactggtaagaccatcaccctcgaggttgagcccag

SEQ ID NO: 325454 - DNA, 100 bp, Homo sapiens
attcagtttgcatctctccctcctttaaacagcttctccgggtctcagcatggaatggcatcaccagctgccggatgcggactgagagtgagccatcttg

SEQ ID NO: 325455 - DNA, 90 bp, Homo sapiens
cgcgcggcaggcggcgagctcgggggccgcagtgtggcaaaggagcagagaactttgacaagttcttcacacgaggacagcccgtcttaa

SEQ ID NO: 325456 - DNA, 75 bp, Homo sapiens
ttcaaggatttctctttgggaaactaaagtatgaattaggagccgctctgtttattggatgggcaggagcctcac

SEQ ID NO: 325457 - DNA, 98 bp, Homo sapiens
cgtggcctggtctccattatttgagatgagttacatcttggaggcatccttctttaaaagagaaatccacgttagctctccttgaggtctcgagttcc

SEQ ID NO: 325458 - DNA, 90 bp, Homo sapiens
attggaattgaaacagtacaactgcctccaccagaggaaaatagtatgggaattcctattatgcatatagcactttctacattgtgggtt

SEQ ID NO: 325459 - DNA, 100 bp, Homo sapiens
agtagcaattaactggtctggagggtggcatcatgcaaagaagctggttggaaggaaaatcatgcaacattcatgagcgaactaaaaaatcttcaggctt

SEQ ID NO: 325460 - DNA, 83 bp, Homo sapiens
agccaccatgacaatcagtctgcagtggctgagcttgatcgcctctataaggagctgcaggtttgtgcaggggaaactcagtg

SEQ ID NO: 325461 - DNA, 100 bp, Homo sapiens
cagagctcaacagctacccccgcttcagcgactggctgtacactttcaacgtgaggccggaggtggtgcagagcattggggagtcagcaatgtccgttgt

SEQ ID NO: 325462 - DNA, 88 bp, Homo sapiens
agtggtgcgtgatgtggctaagatgctgccgactctgggcggcgaggaaggcgtctcccggctatgttagatactaaagaaggcttcc

SEQ ID NO: 325463 - DNA, 82 bp, Homo sapiens
ccttcatgcccaaatcccggaaactccagcgtgtctccagccgtggtgaccctggcaaagatgagagtgcacatttcgtcct

SEQ ID NO: 325464 - DNA, 82 bp, Homo sapiens
gatccagcctgcggagcctgtggggcaggagcggtggtgccccccccgggcacggggccatgtacaacgggatcgggctgcc

SEQ ID NO: 325465 - DNA, 100 bp, Homo sapiens
ctgctacttcctcgtttgacaccttcctggcagcctcagctcataccagccatccaatgcaaggaaggacaacaccaagcccagaggacagttcctggac

SEQ ID NO: 325466 - DNA, 100 bp, Homo sapiens
caacctctgactccgagaacctcagccccgatgagctggagctgctggccaagctcgaagagcagaaccgaaacagttcgtgactatgagcaccagttcc

SEQ ID NO: 325467 - DNA, 98 bp, Homo sapiens
ggagtccgtgtgccagcaacagagctgggtccgggtgtacgggcgatttgatgaaactgttatcgaagagagaagacaatgtgctgaagacctgctac

SEQ ID NO: 325468 - DNA, 83 bp, Homo sapiens
tgaccttaacacagtagcagctggaaccatgacaggcatgttgtataaatgtacaggtgacaaccaaagccaagcaactgaag

SEQ ID NO: 325469 - DNA, 90 bp, Homo sapiens
ggaattttccttgtcttggatgagacttttgacttggacttttgggttaaggctactgcagcactggggtgtcagttgttggtccgaccc

SEQ ID NO: 325470 - DNA, 100 bp, Homo sapiens
gcctacgatatcattgctgaagacattcaaggaaccgtctttttcgctggtgagatgcccagacctggaggatccccagggtcttctcatggttgcagca

SEQ ID NO: 325471 - DNA, 100 bp, Homo sapiens
catgctggatgtcaacggcctctattctgaagggagtggtaatggaagtgaagatgcttcaaaggacagtggagaaggttcctgtagtgattctgaagaa

SEQ ID NO: 325472 - DNA, 75 bp, Homo sapiens
ggccaagaggcaaaggggaggttacgcagcaaaccatccagaaggtgcccgtggttgacacgagctgtgtcccca

SEQ ID NO: 325473 - DNA, 75 bp, Homo sapiens
ttctcagagagggccctggcactcatgaaggcccgcgcaacctccaagtcccagatcatgtctctgtggggtctg

SEQ ID NO: 325474 - DNA, 96 bp, Homo sapiens
cgcacctgcagcgagtgccaggaactcttctggggagaccccgacgtggagtgccgaggcaggaaactgcatatcttctggtttacatgaagatgg

SEQ ID NO: 325475 - DNA, 98 bp, Homo sapiens
cctagctcagtgccgagcccttagcgtggactgggctggccccggaagcccccacgggctctacctgaccctgcagatgccatgaagtacaccattgt

SEQ ID NO: 325476 - DNA, 75 bp, Homo sapiens
gttcacaaaccaggatgttcctccacgaagttgccagggcctgtccagtttaccagcagccccagcagcagccgg

SEQ ID NO: 325477 - DNA, 71 bp, Homo sapiens
atattacaaccagtgacactgcagtaaaaggcaatcgcaaatgtgagttgaactgccaggcaatgggctac

SEQ ID NO: 325478 - DNA, 75 bp, Homo sapiens
ggagagcaaggagaaggatcgccaggtgctggaggacttcccaacggtcccacgtacctcggagatttatgtcca

SEQ ID NO: 325479 - DNA, 96 bp, Homo sapiens
acatcactcagaagtttgatgtagatgcaggctggctggtgggagtgaaggaatcagactggcttcagtacagagaccttgccacctacaaaggcc

SEQ ID NO: 325480 - DNA, 98 bp, Homo sapiens
agggtggggactgcgatggcttctccaccttcgatgttcccatcttcactgaagagttcttggaccaaaacaaagggtgattctgggggtccacttgt

SEQ ID NO: 325481 - DNA, 101 bp, Homo sapiens
ccgcggtcttcccaggcgtcgcggagagcagaccagagtgaactccgagcaggaacacttcctcattgtcccttttgggcttctttacagtgaagtgactg

SEQ ID NO: 325482 - DNA, 100 bp, Homo sapiens
gtcagagacagcacctcaacctggttcagcagttcagggagctcacatttctcatattgctcaacagaaagccttgagccgggccatgcttctcacatct

SEQ ID NO: 325483 - DNA, 96 bp, Homo sapiens
tcttaacctgggaagtggaaccggatatttaagtacaatggtgggcttaattttaggtgactctcctattccatctgtttcttcgggatcatcttc

SEQ ID NO: 325484 - DNA, 108 bp, Homo sapiens
tgcacaggcaccccagttgtctgtgccaggtggcctccttggtatgccaggggtgacagaggccgtggtcgtggtgggcgctttggttccagaggaggcccaggagga

SEQ ID NO: 325485 - DNA, 100 bp, Homo sapiens
atacaaaactaggatatgctggaaatacagaaccacagtttatcatcccttccttgaggaggacatgtaccgtgctgcagatgaaatagaaaaggagaaa

SEQ ID NO: 325486 - DNA, 75 bp, Homo sapiens
aggctcagaaagatggatttttgcatgagacgcttctggacagacttcacagagaatgcagttgtcttgacttca

SEQ ID NO: 325487 - DNA, 50 bp, Homo sapiens
aagcacctggccccgctacagcaaaccagagctagagccggtgcaggcca

SEQ ID NO: 325488 - DNA, 100 bp, Homo sapiens
gcctaggttccacccttttctgggaacgtgagtatcaaccaaggcagactgccagattcacttacagccccagctaattccaccaaacatggaggagtac

SEQ ID NO: 325489 - DNA, 101 bp, Homo sapiens
ccctggctggagtgccctgcctggagggagccctcctggctgggggcaaggcattgggatcccgtggcagttgcagcactgaagtggagaaggagacccag

SEQ ID NO: 325490 - DNA, 100 bp, Homo sapiens
aagaaagtgagagtcattgatcccaggaaacaagagattgttgcttgatgtggagccaactgcaccgatggaggaacccacagtggtggaggagtcccag

SEQ ID NO: 325491 - DNA, 75 bp, Homo sapiens
taattttgccggaatatttcaagacaccgaaaggagatacaactcgtcaacgaatcaaattcagtgatgacagag

SEQ ID NO: 325492 - DNA, 75 bp, Homo sapiens
agagatgacactataatggctacaggaatgaagccaagagtgatgaaagaagctgtatctactccatcacgaatg

SEQ ID NO: 325493 - DNA, 95 bp, Homo sapiens
aaggatggcaaacttcagattggagataaacttttagcaggaaaacaaagtgcatgatgaagtcttcagactgtgtcataaagcatgctggtgta

SEQ ID NO: 325494 - DNA, 101 bp, Homo sapiens
aaagtgattaagcagagaatggagaagaaggttgattccaggtgaagccaaaaaccttccctcttacccggggccgagcaagatgagggattgctactgca

SEQ ID NO: 325495 - DNA, 99 bp, Homo sapiens
ctcaggtggaaaccaagatagatgtgtcctatgaataccgcttcctggagttcacgactctgagtgctgtgctgaagctgctgaaagatggcagaagaa

SEQ ID NO: 325496 - DNA, 100 bp, Homo sapiens
acataatgaactcagacctattgcaaggaaaggacactcccctaacatatttgggctaagttctaaaaacatcagttcatctccaagcgttgagagtttg

SEQ ID NO: 325497 - DNA, 82 bp, Homo sapiens
gcaacagccccttcgtcccaaaactgtaagagtaaatgggtccagtaattggaatgactccagataagagagctgaaacccc

SEQ ID NO: 325498 - DNA, 75 bp, Homo sapiens
cgcaggcaaacgagaattaaatgccgagaaggccagtacggtgtggcatgcagcattttggaaggaaaattgaag

SEQ ID NO: 325499 - DNA, 100 bp, Homo sapiens
tcatcccggtccagacccagcaccccatacggaagggtctgcatcacaagctctggtagctgaagaacatctcacagtggacgccagggtctattcctac

SEQ ID NO: 325500 - DNA, 100 bp, Homo sapiens
gctggagcctgtccgaacgctttgggctgttagggaaatacccgcagcccaaagggcagaagaagaagaagatcgtcaagtacggcatgggtggcctcat

SEQ ID NO: 325501 - DNA, 100 bp, Homo sapiens
ccgtgacatcctgggatattctttgttgagagttttcagtgtggacagcagatgaaggaattgagagcacagcatgaagaaaatattaaaaagttagcag

SEQ ID NO: 325502 - DNA, 75 bp, Homo sapiens
cgggaggaaggaacgaggcaaggagctaaagcagcgtgcgttcagccctgggatttggtcgtattgggcgcctgg

SEQ ID NO: 325503 - DNA, 80 bp, Homo sapiens
agtttgcagatcgggagcgcaaggtcgccctcaaggccatgatcaaaacgttggttcctgtataccttgggccagagagc

SEQ ID NO: 325504 - DNA, 75 bp, Homo sapiens
gtcattgccctcaacaccattaaggaatggcttgccaagaatcaccatgagtttgaagaaaacaggtctgaaaca

SEQ ID NO: 325505 - DNA, 122 bp, Homo sapiens
gggaagtggagcacgactcatttctgtttgttactttgagtctgaaaatgactggttggatggcaagcatgtggtgtttggcaaagtgaaagaaggcatgaatattgtggaggccatggagc

SEQ ID NO: 325506 - DNA, 98 bp, Homo sapiens
atagtaaccctgccaaatacatcagcttgtaggagacagaggccattgaacacccagttcgaaccaatcagattccacgtcagattcctgaacagtcg

SEQ ID NO: 325507 - DNA, 129 bp, Homo sapiens
tacaccattgatgggctcaagaagatttccagcctggaccaactggtggaaggtgctgtacttctttgcagtatacaaggactagcagttaatattgacccaatcttatatacgtggctcatctatcag

SEQ ID NO: 325508 - DNA, 98 bp, Homo sapiens
tgctatattgcaattggactggaggctataagtggtctacggctctggctctaaggtagcaacacaagtcggaatagaatggaacctgtcccctgttg

SEQ ID NO: 325509 - DNA, 75 bp, Homo sapiens
ggacaagatcatgggcaaaggacagatccaggcatctgggaacaaagtcagtcgccagtcagtgttgtgtggaag

SEQ ID NO: 325510 - DNA, 75 bp, Homo sapiens
tccttacaccagatttgccaccaccttcatcatctagtcatgctgggtgtggtcactcacctgtctaccactccc

SEQ ID NO: 325511 - DNA, 99 bp, Homo sapiens
ctaatggccatgtggtgctgacagattttggtctgagtaaggagtttgtggctgatgaagctccgtccatgccacatcggtagcagcctcaagagtgga

SEQ ID NO: 325512 - DNA, 106 bp, Homo sapiens
tccggcagaaggcctccatccacgaggcctggactgacgctctagaggacaaaatcccagtccttggcacaaactcaggaaatggaagccggagtctgttttttgt

SEQ ID NO: 325513 - DNA, 98 bp, Homo sapiens
tggcaagattcttctgaattgtgctgccttggccaaaagagagcgccgccctgtgctgggctgccgggagctcgtcttcaggaacctctccaagatcc

SEQ ID NO: 325514 - DNA, 120 bp, Homo sapiens
ctctctcatctcgctcggctgcgggaaatcgggctgaagcgactgagtccgcgatggaggattttttatcaagcagaaatgcatcgaacaacgagaatcaagatcactgagctaaatccc

SEQ ID NO: 325515 - DNA, 75 bp, Homo sapiens
cagagcttgacccaggcactagtaggtgagctcgtgaaacaatatgaagaggagaaaatagccttttaaggaaat

SEQ ID NO: 325516 - DNA, 100 bp, Homo sapiens
agaaggtctggaaggcaccaagtacagtaatgtgatgaaactccttcggatggccctcagtggacagcagaaaggacccaggagcgataacagtaaatca

SEQ ID NO: 325517 - DNA, 75 bp, Homo sapiens
tgttcaccatcctggccccggaaggaggagccgaggaaggtctgcttcacctacgacctgttcctgaacctggaa

SEQ ID NO: 325518 - DNA, 100 bp, Homo sapiens
aaggagatcatagcagagtacgatactcaggtcaaagatggagtggatgttgaagatgatccgacttgctcttggccagcttcctcaccttctagcaagg

SEQ ID NO: 325519 - DNA, 100 bp, Homo sapiens
ctgggtactggaaggccgttcaggagctgtggctgcggttgtaccagtccaacctggtgctggtctccgccatcaacgaagttctactacatcaccctgc

SEQ ID NO: 325520 - DNA, 82 bp, Homo sapiens
cagagaagtgcccgaggagagttaacagttgatattcactgatggactccaaagaatcattaactcctggtagagaagaaaa

SEQ ID NO: 325521 - DNA, 74 bp, Homo sapiens
ctcagccacccgctgggaatcgtgcagggattcttcgatcttccatggtggcttattctaattcggcagaaagc

SEQ ID NO: 325522 - DNA, 100 bp, Homo sapiens
accacggccgctgcacccaagcagcagaagtctcggcccaccgcctcgagggatgagcgcttccggtcaggtgtcatggagaaactccagctgggcccag

SEQ ID NO: 325523 - DNA, 100 bp, Homo sapiens
attccaagtaactcttatttgggtgagaggatcacactgctccggcaggtagatgagaactggtacgaagggaggatcccggggacatcccgacaaggca

SEQ ID NO: 325524 - DNA, 99 bp, Homo sapiens
tgaaaaactgggatacatggatctggcctcaagactggtgctggacacagagtatagaaaaaaatgggatgccctggtaatcaagctggaggtgattga

SEQ ID NO: 325525 - DNA, 74 bp, Homo sapiens
ggagaaagagaatctcatacacctgtctctattcaggaagagataggtgatggctcagtgttccgagacttggt

SEQ ID NO: 325526 - DNA, 50 bp, Homo sapiens
cattgccaactcttctaagaaagttcgggactttgccaataccattcctg

SEQ ID NO: 325527 - DNA, 116 bp, Homo sapiens
aatttatccgtgtgcagccccaaactggaaagaagatgctaattaaagtgaaggaacttaagagatttgagaacttcataaaatctcgtcctccttttgatgttgtcattgatggt

SEQ ID NO: 325528 - DNA, 78 bp, Homo sapiens
cgccgaaaccggtcatcgtggacaagcaccgccccgtggaaccggaacgcaggctgtctcctctttgttgaagatggt

SEQ ID NO: 325529 - DNA, 100 bp, Homo sapiens
cggcgaggtcccgcctcgttcctctgggcagcctgggtgttttcacttgttcttggactgggccaaggtgcatgggtaggttctctctccatggggatga

SEQ ID NO: 325530 - DNA, 99 bp, Homo sapiens
gtgcaactcaaagacctggaaaaatggcagaataatctgcttccatcccgccagtttggatacaagtactggttgaacctgaccacttcaaggttgcag

SEQ ID NO: 325531 - DNA, 100 bp, Homo sapiens
ccacctcctttctcagggctgagatgccgtcgaggatgtaccgaatttgtttgtcaattcgttctgaagaggagtacgaccccagcaaagcgacctttgt

SEQ ID NO: 325532 - DNA, 75 bp, Homo sapiens
cgggctggagacatggaccgcggcgagcaaggacagacccacgaagtcaagcatgcggagtgcagccaagccctg

SEQ ID NO: 325533 - DNA, 100 bp, Homo sapiens
gaaaaggctttgagaaattttgagtcctcgagtgaatgggcggatctcatatcttcacttggcaaactcaacaagaaactgcccttggtgcattagcaag

SEQ ID NO: 325534 - DNA, 100 bp, Homo sapiens
ccaaggtgctgagccggcgcggggtcggcgctgggctggaggcggcggagcgcgagagcttcgagcggactcaggtgtgctgggcatcaaggtgaagatc

SEQ ID NO: 325535 - DNA, 98 bp, Homo sapiens
tcagatatggctaagcaagctcagattccattagctgctgtcatcaagccctttgccaccattccttcaaatgaggctatagaaagcgcaattggtgg

SEQ ID NO: 325536 - DNA, 100 bp, Homo sapiens
gcaggccatgattggaccatcccccaatcctctcatcttgtcctacctgaagtatgccattagttcccaggatgtcatccaagtctccaagaagttcctg

SEQ ID NO: 325537 - DNA, 76 bp, Homo sapiens
ccacatagacatttacgcggatgtcggcgaagagttcaaccaggctgctgtccccaaggcccagcctcctcacccc

SEQ ID NO: 325538 - DNA, 100 bp, Homo sapiens
gagaatagaccctctgtccaggcagcattaaaacttaagcagggggaaaagatttgttgcaatgaaagttgtaaaaagtgcccagcattatacggagaca

SEQ ID NO: 325539 - DNA, 130 bp, Homo sapiens
ccgattttggctttgctaaggagaccacccaaaatgccctgcagacaccctgctatactccctattatgtgggtcccctctgagccctctcaccttgtcctgtggaagaagcacaggctcctgtcctcag

SEQ ID NO: 325540 - DNA, 96 bp, Homo sapiens
acgcaaccatggctgaagaacaaccgcaggtcgaattgttcgtgaaggtctcaccatgtcccctgcccggggaaggctccgctgctacatctgtgg

SEQ ID NO: 325541 - DNA, 97 bp, Homo sapiens
ttcaccaacttcatctccatctacaacacagtaatgaaggaactggatcagatgttcagacacccaaatgccatctaaaaagaaggattcaaccagc

SEQ ID NO: 325542 - DNA, 75 bp, Homo sapiens
agctgcccagccaccagcaaccccccaggtcccttcaataatcaggagatggcagaatggtttcaggcgggctat

SEQ ID NO: 325543 - DNA, 90 bp, Homo sapiens
gtgtcctcctggcctcagcaacctgacaattctgtcgtgtcccgagcaagtgcaccggcacctggaccaacacgaagtgagatacctgca

SEQ ID NO: 325544 - DNA, 50 bp, Homo sapiens
catcatagttgaaccgtcctggaatagaaaaatgcactcggtgatggaaa

SEQ ID NO: 325545 - DNA, 89 bp, Homo sapiens
gaactggaaggccacgcctcctcccgcctgccccctcagccctgtggctgggggcagagctcagccctgccaaggtaaccctgctgggg

SEQ ID NO: 325546 - DNA, 100 bp, Homo sapiens
taccagcatatcaaatcaagactggacactggtccagacatcatctggtctccctgaacctgaaatcacaccatggatgattttgagcgtcgcagagaac

SEQ ID NO: 325547 - DNA, 87 bp, Homo sapiens
agccatgcccctcaggctggaacttgccctgtctcctcgcagatgagctcaaactggaggattataaggatcgcctgaaaagtggag

SEQ ID NO: 325548 - DNA, 100 bp, Homo sapiens
ggcagaacgaattcagtgatatcattaagtccagatctggaccagtcctgcctctgttgtagaagacatgtggtgtatataaagtttgtgatcgttggcg

SEQ ID NO: 325549 - DNA, 75 bp, Homo sapiens
ggctccagcgccgtaggactgaggcagactccacgcaacgaaggttttgggaacagtaaaatggttcaatgtaag

SEQ ID NO: 325550 - DNA, 75 bp, Homo sapiens
aatcgctcctgtttgtcttctgctttggcccaggtggatatggttatagaagaagtggccgagataaatatggcc

SEQ ID NO: 325551 - DNA, 82 bp, Homo sapiens
tctactgtaaagtcaccaacgagatcttccgccactacgaacgttccatcctcagagcagcctgaactgttcctaaagaaac

SEQ ID NO: 325552 - DNA, 90 bp, Homo sapiens
agacgagaagcctgaaaagtcgcagcgagctggagccgccggagcagccagactgccttccgggtcactgccatggaggagccgcagtca

SEQ ID NO: 325553 - DNA, 100 bp, Homo sapiens
gagcaggagtcgtccgcttatagtggaggctgctaggagccggtcagaggcaatgactcagatgcatataaagatcaaatatcagtactgccaaatgaac

SEQ ID NO: 325554 - DNA, 100 bp, Homo sapiens
tggtttactccatgcagttgtcaggaggcatttggctttatgtcccgagttgccctacaagcagagaagatgaatcatcacccagaatggttcaatgtat

SEQ ID NO: 325555 - DNA, 100 bp, Homo sapiens
ggagcctcgtttcaaccagaacgttaacctcaggcctccagctcagccctcaggttttgtagtgcatccctgagcatgagcacagaatgaagcggcgttt

SEQ ID NO: 325556 - DNA, 100 bp, Homo sapiens
tccgggcttttgctgatatgcatgcatgtaccgaccttctgaacaaggccaacacctatgcaggttatcgaggacaccaaagagaaaagaaccatcatcc

SEQ ID NO: 325557 - DNA, 100 bp, Homo sapiens
attaccatcaatactatggaatgcattttgaaacttaaggatgggatacagatcatcaatgctgtggtactgttgattttattgagtgccctggctgatc

SEQ ID NO: 325558 - DNA, 75 bp, Homo sapiens
aagcctgcacctgctgcattgctgttttcctggatcttcacactatatagcaaatcactaccacttgatctggcc

SEQ ID NO: 325559 - DNA, 75 bp, Homo sapiens
ggcgcaagatcgtcttcagctgttcatagcgcctgcctcgtcccctcagctttcacacgatgatactcattcacg

SEQ ID NO: 325560 - DNA, 75 bp, Homo sapiens
gtcgaacttggctgggagaatggctgcagatttcctgcagcctgaaaggtacgtgaacacactcctgaaactcat

SEQ ID NO: 325561 - DNA, 101 bp, Homo sapiens
ctcggaacccgtggtcctccgcttcatccccagcatgagaccagatgtaagctctcctccatccagctcctcaacagcaacaacaggaccacctcccaaac

SEQ ID NO: 325562 - DNA, 117 bp, Homo sapiens
ctgatgtttaaaatcattggaccatttagtaagaagaattccagtcttataaaatcatccaattatgatgggttttgaaccccttgtgaaccagaggctacttccacctaccttccc

SEQ ID NO: 325563 - DNA, 49 bp, Homo sapiens
gaataaacatgcaatgaacccaaaaggtttgaaatcctgaagaaatatc

SEQ ID NO: 325564 - DNA, 90 bp, Homo sapiens
ggcttccgaggagctgtacgagcctcttagcaaatatccggctgtgatcaatgatatttcattctggttgccctctgagaattacgcaga

SEQ ID NO: 325565 - DNA, 90 bp, Homo sapiens
tagtgctcaagagcctcattatctaccacccgagatgccccaagatatgtgcattactgaagtgtcaaaccactgacctggaaacgtgtg

SEQ ID NO: 325566 - DNA, 49 bp, Homo sapiens
ggatgtgaaaactctgttactgaagatcaggatcctcatgaccagccaa

SEQ ID NO: 325567 - DNA, 90 bp, Homo sapiens
aggtcttcagcggggcgctccaggaggcactcacagtactgccaaatctgtcgaaagggagataatgaagaactgcttcttctttgtgat

SEQ ID NO: 325568 - DNA, 75 bp, Homo sapiens
ggtgctggcggctgcagccggagttcaaacctaagcagctggaagggatgagctttctgatgttagccaaggcgg

SEQ ID NO: 325569 - DNA, 126 bp, Homo sapiens
gtcggacaagtaagtggatcacacgcgccggctgctgctactactaccactttgggctgatggcaactggttgaaatcacaaagattagacacctttttagataggtgttcttcagcaccactgac

SEQ ID NO: 325570 - DNA, 100 bp, Homo sapiens
aaccatttggctctgagctatgacaagagaggaaacaaaaagttaaacaagcaagcctgccataagtgagaaggaaggatctgagtctctccctgcggag

SEQ ID NO: 325571 - DNA, 100 bp, Homo sapiens
attgaacagactgatggccagcagagggcgaagtttcaagcagacttcacttgctcttgtacatgagagagaactcgatgccaccgcaacggtattggcg

SEQ ID NO: 325572 - DNA, 82 bp, Homo sapiens
tccagaccagcaggaggacaatgttgatgaacagtaccaggaagaggcagaagaggaggtatacatccccagatttcctcta

SEQ ID NO: 325573 - DNA, 73 bp, Homo sapiens
ggaccttgaagacgacttcgaccctgcccagcacgaccagctcatgcaggctgcagagactgcaagtctggaa

SEQ ID NO: 325574 - DNA, 90 bp, Homo sapiens
aagtaccgacccgagttatgcccaccctccaactttgcgacggaaatgtgtcatcgaaagccagaggacccacaggcatgaattatttac

SEQ ID NO: 325575 - DNA, 75 bp, Homo sapiens
ggacgaggaagagtatatcgaggagaggcacatgatcatgcacaagcgcacccacaccggggagaagccttacgc

SEQ ID NO: 325576 - DNA, 50 bp, Homo sapiens
gtggagatatggcgcaactgcggcgcgacctgaaggagaagaaggagaag

SEQ ID NO: 325577 - DNA, 100 bp, Homo sapiens
gagatggcaggctctatgcatctgagaaccatcaggaaatacttaagaatttcgaggatgtcagatgtaaatgtatctgccctccctataaagaaaattc

SEQ ID NO: 325578 - DNA, 100 bp, Homo sapiens
aaagagaagacgctttacccgactctttgggccgttatctcacactatcttgctaatcatggccggttaaatgagtctgaagccaggcgaaaattctggc

SEQ ID NO: 325579 - DNA, 75 bp, Homo sapiens
ccaatgttggtgctggcaaaaagactgctgcatagatgatgacctgatggagaagagacaggaaaatcaagacca

SEQ ID NO: 325580 - DNA, 95 bp, Homo sapiens
cagcgccgagcgcggcccgggcgccatcgagccttggcggcggacgtgcaggacccttgaacatctgtgaagaaatgactattctgcatggaggc

SEQ ID NO: 325581 - DNA, 104 bp, Homo sapiens
gtgggatcgatgtttcaatattggaagcgatttgatctacggcgactccaggaacgtgaagatgagtcttcctctatgtttgacgaatattttcaagaatgcca

SEQ ID NO: 325582 - DNA, 76 bp, Homo sapiens
ctgctgtggaagaccagccccaaagaatttggtgttcacttggcagaactgactgtagatccccagggggcactgg

SEQ ID NO: 325583 - DNA, 99 bp, Homo sapiens
aatctcaactttttgacccgagtgacctccaggatacatccaacagagtaacagtcaaaatcttcagctacttggagcaacagccattgaggataaatt

SEQ ID NO: 325584 - DNA, 50 bp, Homo sapiens
tccagtaatgtcccggcggatatgctgtggaaatacaaagaactctgaat

SEQ ID NO: 325585 - DNA, 73 bp, Homo sapiens
ctgcctacagaaccgtcccaaaatatggcaaagaaacctattctgagggggccgggtgaagacgtggaagcgg

SEQ ID NO: 325586 - DNA, 101 bp, Homo sapiens
gctgagatatgatgattttgaagtcatttcacatcgaagccatgatttaaatatcggcgttaaggtgaattcatcattggccgagttatcaaagccatgaa

SEQ ID NO: 325587 - DNA, 100 bp, Homo sapiens
cagccttggtgctcaggtgccagatgcaaagtggatcaatcttcctgtcctacaactgacaaaggatcccctaaagacccctggaaggctggaccatggc

SEQ ID NO: 325588 - DNA, 75 bp, Homo sapiens
gacaaatccaggtgaacatccaggagcattgacttccaaagactcctggcacatgaggaagaaacccagaagagg

SEQ ID NO: 325589 - DNA, 97 bp, Homo sapiens
acagcacgccagtgagggagatggagaccaatcacccacccagtgtgcggatttaagaggggtgcagatcccggaatgcctgaaccaactgttttga

SEQ ID NO: 325590 - DNA, 100 bp, Homo sapiens
ctgttgatgctgtaattgctgaacttaaaaagcagtctaaacctgtgaccacccctgaagaaattgcacaggcagtccttgatggagatgcagagtcgtc

SEQ ID NO: 325591 - DNA, 51 bp, Homo sapiens
ggaggaggcgccggaccggggggtctgagtaccactatgagtacacggcgt

SEQ ID NO: 325592 - DNA, 100 bp, Homo sapiens
acttccaagaagatgagcagtttctgggagccgttatgccaaggcttgacagcccacctgaggatattgaccataaggactcatatctcattacaagaag

SEQ ID NO: 325593 - DNA, 80 bp, Homo sapiens
cgtacagcagcagaaaatgaccatgttacaggtgctggagaatctggtaaaagcaccattgtgaagcagatgaggatcct

SEQ ID NO: 325594 - DNA, 75 bp, Homo sapiens
tgccgcgccaccgagtccggaccggagactttggggcctaactaggctcgtggaggagttcatgctcttggccaa

SEQ ID NO: 325595 - DNA, 74 bp, Homo sapiens
ccaagtccagctaatgaggaaagggccagtgtcattcaaagatgtggctgtggatttcacccaggaggagtggc

SEQ ID NO: 325596 - DNA, 82 bp, Homo sapiens
gtggaaaatgcgctcgggctggaccagcaggttgaaatcacaaagattagacacctttttagataggtgttcttcagcacca

SEQ ID NO: 325597 - DNA, 90 bp, Homo sapiens
agcctctcgagtagctgggactacagctggcaaactgatacaactcagaaactgctcaatgtcaggaaaaccggaacttgttgatgaact

SEQ ID NO: 325598 - DNA, 83 bp, Homo sapiens
ggagatcccgctggtgaccctgccgctggcgagcgccaccgcatggaaattttactgcaggataaaactccaggataaaactg

SEQ ID NO: 325599 - DNA, 50 bp, Homo sapiens
ccaggcctaccccagtcacggacggaattcctcctgatcagcagagactg

SEQ ID NO: 325600 - DNA, 89 bp, Homo sapiens
ggtggactggctgactgagaagatgcatgccagagacttcacagtttctgctctgcctgttggtctttgcaaaggttctctgactcgaa

SEQ ID NO: 325601 - DNA, 100 bp, Homo sapiens
ggttacagctgatgctaaagtggtttctgctcatggatcgaatttgcaaaactatatactgactctaatgtcaattctgtcggaaaaggtaacagaagat

SEQ ID NO: 325602 - DNA, 99 bp, Homo sapiens
agaaaatagcaaacgatccagacggcagggagtgcatcaaaggtgtgaacacagggtcttactgaagtaacacaaagcttaaaaatggaaaatgaagag

SEQ ID NO: 325603 - DNA, 121 bp, Homo sapiens
tgcttcaccatgtaataataacataaatgcagctacagctgtggctctacagaaactgattcagcagtacagaaagaacttagaaaccagacacctgctccatctgcagctcaaacttctg

SEQ ID NO: 325604 - DNA, 107 bp, Homo sapiens
tcagcaactgggttcagtttgaagatgacacaccctgggccagcacatctccacctcatcaggaaacagctgagacagtttaaggagtcggccttgaggaagcagtc

SEQ ID NO: 325605 - DNA, 74 bp, Homo sapiens
gtggaggggcggccccacggcgagcatgagacctgtcggccatggagcctaatgatagtaccagtaccgctgtg

SEQ ID NO: 325606 - DNA, 113 bp, Homo sapiens
tgcggtgatggagacacccgtgggtgatgcagacgcaagcaccatgctcgacagctgaccaaggccatgatgcgaaaggccacggccagccgcctggtcacgcagcgcgatgc

SEQ ID NO: 325607 - DNA, 75 bp, Homo sapiens
cactctctcttcttacaacaaattccacaacaactgctacaggtttgtggtaaatatgccagctctagaacacat

SEQ ID NO: 325608 - DNA, 100 bp, Homo sapiens
gtttggaacttgcacggaagggaacagcatcatctgagggttctccataaacacggttagccttccaagctgctgtcctgccagttgatatgaacatggc

SEQ ID NO: 325609 - DNA, 96 bp, Homo sapiens
gtgacctgcaggtattgggagatccacagctaagactccaggaccctctggaagcctagaaatgcaaatgcagccctgaggatttggctactgcat

SEQ ID NO: 325610 - DNA, 97 bp, Homo sapiens
acgggctttaggctggaagcgccttagaggagccatttttccagtggttctatagatggtaataaccaacttgtaatcaaaggaagattccaacaga

SEQ ID NO: 325611 - DNA, 98 bp, Homo sapiens
agcggaaccatctgggagccttcctgatccgggagagtgagagctccccaggggagttctctgtgtctgtgaactgggagtgtccactcgccttccac

SEQ ID NO: 325612 - DNA, 80 bp, Homo sapiens
ttctgcagagagagtgcgcagaaggattccgggagcacagttccgccgaatggactcaccctgtcacccaggttggactg

SEQ ID NO: 325613 - DNA, 100 bp, Homo sapiens
gacggggactccatcgaggacgtgctgacccagatcgacagcgagcccggttcctgccatctccctggcttatgagcaggctgagagtgacatcatgaag

SEQ ID NO: 325614 - DNA, 75 bp, Homo sapiens
cgcagtctggaaagctttaggagttcacagtctgaagacctaactgcagcatgtctgtatttggagatggggcct

SEQ ID NO: 325615 - DNA, 75 bp, Homo sapiens
taggcaggcgttgaggaagaagccacccgagcggactcccgaggttagctccattcagaaccaaatgcagtccaa

SEQ ID NO: 325616 - DNA, 74 bp, Homo sapiens
cttacgtctgcggaagtgcagctgcctcagttcttagcgcaggctctccctgcatgtcctatccaggccacctg

SEQ ID NO: 325617 - DNA, 74 bp, Homo sapiens
ctaagccagaccggtcctcgtttgtaccgtccctcttcagagtgcctggaagagctgggatgtctggttgagtc

SEQ ID NO: 325618 - DNA, 75 bp, Homo sapiens
gaacatggagaacccccagcttggagcgcaagaactctaagaaggagctgatgtggaggagcagctgagacagtt

SEQ ID NO: 325619 - DNA, 100 bp, Homo sapiens
aaactggaacttatgctgtagacatttctttgtggtttatctaaaaaccaaagactcacagatgaatgcttctcacccggaaacaaacttgccagttggg

SEQ ID NO: 325620 - DNA, 100 bp, Homo sapiens
aggcggcaacagattgcctgcattggaggcccgcccaacatctgcctagatcggctagaaaactggatcactactcttggaatcaaagataaatccaaat

SEQ ID NO: 325621 - DNA, 100 bp, Homo sapiens
ctcgtactgagaaaatacaaggagctggacatcgagcctgagggaggggaaaggcgcagggttcctcatgggtgcctcctgtggcgggggcaacatgaag

SEQ ID NO: 325622 - DNA, 100 bp, Homo sapiens
gcggccgagcgggcggcttcctggcctgggcgctccggtggcggcggaggggacggcaaaacagaacagaaaggcggagataaaaagaggggtgttaaaa

SEQ ID NO: 325623 - DNA, 75 bp, Homo sapiens
actccaggacagcatccaggcctcattggacagcattcgaggtttttagaacttcagccataaaaatgggcagaa

SEQ ID NO: 325624 - DNA, 94 bp, Homo sapiens
aaaaaacttcagcatgtgccaggaacacaacctcaccttgatcaggcttcggtagattgcaaatgacctgctttctttcggatcccgggctgct

SEQ ID NO: 325625 - DNA, 74 bp, Homo sapiens
aaaaataccacgacaaaaccaccctaatggcagaaacggtggacacaagcgaaatggtcaacggcgctacagaa

SEQ ID NO: 325626 - DNA, 100 bp, Homo sapiens
gatttacaaactggccaagaagggccttactccttcacagatcggttggatggcaagcatgtggtgtttggcaaagtgaaagaaggcatgaatattgtgg

SEQ ID NO: 325627 - DNA, 82 bp, Homo sapiens
gcttcctgtacagcctgcaaaactgagcagtatagcatcaagttctagaggaattgggagccattgcaaatctgagggtcag

SEQ ID NO: 325628 - DNA, 98 bp, Homo sapiens
ctataatcaagtaaaaacaatagctcaaggaaacctttccaacacagatgtccaagctgccaaggctattgagtggccagacttccccaacaaatgcc

SEQ ID NO: 325629 - DNA, 90 bp, Homo sapiens
cacaccctacgttaccgtgctcaagctccaacagacagaagcagagctcaggaaggtggatgaggccatcgccctattccagaagatgct

SEQ ID NO: 325630 - DNA, 100 bp, Homo sapiens
tggggagtggcattgccaacctttacagacctatccaagttcaaagggtgaggtgggtttcccaggattagccgggagcccaggaattcctggatccaaa

SEQ ID NO: 325631 - DNA, 86 bp, Homo sapiens
gtgaaaaataccacgacaaaaccaccctaatcttcccagacccgtcagattttgaccgctgctgcaaactgaaggaccgtctgccc

SEQ ID NO: 325632 - DNA, 117 bp, Homo sapiens
gccctcagtaccagagacagaagcagatggattcgtccttttaggaagatgagaatgtgcctactgctcctgatcctccaagtcaacatttacgtgggcatgggacaggcttttgct

SEQ ID NO: 325633 - DNA, 82 bp, Homo sapiens
gtccggcttggatatcttcggggacctgaagaagatgaacaagcgccagcacccagtcagcttgaagagtttcaaatggacc

SEQ ID NO: 325634 - DNA, 96 bp, Homo sapiens
caaatacccaagcctaggacaaaagcctggaggctccgacttcctcatgaagagactccagaaaggggatgtgggctctcttgatgagaagatgaa

SEQ ID NO: 325635 - DNA, 101 bp, Homo sapiens
gattggataaccaagaaatgactaatcaagagtctgccgtacatgtgaaaatggaactttatattgctgttggaatatctggagccatccaacatttagct

SEQ ID NO: 325636 - DNA, 100 bp, Homo sapiens
gagtagtcgctggagtccgcgcctccctgggttgaaatcacaaagattagacacctttttagataggtgttcttcagcaccactgacaacacggttctga

SEQ ID NO: 325637 - DNA, 100 bp, Homo sapiens
accgagaccgtgaccgagagcgtgaccgagagcgcgaatatcgtcatcgttagaagctgcaccacagtacctacagccatttgtttccgacagaaatatg

SEQ ID NO: 325638 - DNA, 97 bp, Homo sapiens
gcagttttctcagctgcctgctaacatagctgtttgcagttctaaggtacctcatcgcccatccttatcaagcttagaaacgttaatggtttcacag

SEQ ID NO: 325639 - DNA, 100 bp, Homo sapiens
ggaaaaaggaagtttgtcctgtcctggatcagtttctttgtcatgtagccaagactggagaaacaatggtggtgtcatcacttctgacatgattgaaatg

SEQ ID NO: 325640 - DNA, 74 bp, Homo sapiens
gaagaagtacctgtcgtagggagatttgggtagaagccctcatgctgagaaaaaatgtgagcgctattggcctt

SEQ ID NO: 325641 - DNA, 75 bp, Homo sapiens
ttctccaggaccttgccagaggattgccatcttttgcatgctactcacctactacatgtggatcaaggcagtaaa

SEQ ID NO: 325642 - DNA, 90 bp, Homo sapiens
cacgcgggcgagcggctgtgtggatgtcggcgaagccgcgggcgagatcaggatcctcatgaccagccaaagagaagaagaattaggaag

SEQ ID NO: 325643 - DNA, 74 bp, Homo sapiens
tgtgagcagaggggagagcggccgccgccgctgccgcttccaccacagaactggtcatgctgctggagtggtgg

SEQ ID NO: 325644 - DNA, 90 bp, Homo sapiens
atatcctccaggaatactggccagacgtagctgggtgcgaagaatcaaattggaaattatggaatttgtgaatttcctgaagaatcccaa

SEQ ID NO: 325645 - DNA, 100 bp, Homo sapiens
cttgccctgtctcctcgcagatgagatggactcaccctgtcacccaggttggactgcactggcctcaacctcctgagttcaagtgatcgtcccacctcag

SEQ ID NO: 325646 - DNA, 100 bp, Homo sapiens
gactgtgatagagaaggcgaaaacatcgggtttgagattatccacgtgtgtaaggctggtgcggagctctggactgggattaagaaggggcccccacgca

SEQ ID NO: 325647 - DNA, 90 bp, Homo sapiens
caagcttaggaccacccaccatgcctatccagatattgatgatgttaagaagttcaaaccgggttacctggaagctactcttaattggtt

SEQ ID NO: 325648 - DNA, 100 bp, Homo sapiens
caacagccccacgttcctgcaggcttcaggagctgctggtgggggcctccctatacagctctggcaggctgccctgagcacgctcaaccccaaccccacg

SEQ ID NO: 325649 - DNA, 101 bp, Homo sapiens
cacccctgcactactatgagaccgttcgcatggcagccatcaaagaggtaacagaaggggaaattggccccttcagctccatcaaggtgcccatcgtcttc

SEQ ID NO: 325650 - DNA, 75 bp, Homo sapiens
ttatcgaggacagcagaacaaagggggtctaccttctgcttccctggaaaggatgaatttacatcatttgacaag

SEQ ID NO: 325651 - DNA, 90 bp, Homo sapiens
ggagtcgcaggcctgctgacactgaggatgggatgtcctcttgccctcaaccttgggaagaatgttggtgaaaagcacagaaaccagtga

SEQ ID NO: 325652 - DNA, 98 bp, Homo sapiens
ggcctttctgtgtcctactccttgcagtggacccagctgcggatccgtaaagagaacctaacacggctgtttgagaagatgcaggcttatcagtatga

SEQ ID NO: 325653 - DNA, 75 bp, Homo sapiens
catcgccagctgcacactcttggggctctacctctttttcaaagtagtactgaaatatactgtcccaggctacag

SEQ ID NO: 325654 - DNA, 74 bp, Homo sapiens
gtgctttgcccaaggagatggtctcattaagagagaaaaggaacagttccgtaagctctttattggtggcttaa

SEQ ID NO: 325655 - DNA, 80 bp, Homo sapiens
agtgcccaacagacattttgctgctgctacaaaacctctcccggagctcctcgccaccctcactgctggaccaactgcag

SEQ ID NO: 325656 - DNA, 75 bp, Homo sapiens
gagaactcagcgaggattctgagttgacggactggacaaagcttctatagcaaactcagatggccccacagcagg

SEQ ID NO: 325657 - DNA, 100 bp, Homo sapiens
ctgggatgggagcgcactagagtttaactggcacccagtgctcatggtcaccggcttcgtcttcatccagggcatcggtcagaaatgtgaattccaggat

SEQ ID NO: 325658 - DNA, 101 bp, Homo sapiens
cttacgaagccaaaatcaaggatgtggatgagaaagcagacatcgcactcatcaaaattgaccaccagattgcaggacaaacaacgagtaaatgtatcgag

SEQ ID NO: 325659 - DNA, 85 bp, Homo sapiens
tggacggcaacctcattatccgctatgatgtggaccgggccatctccgggggctccattcagtttgtgatggacgcctctgaccc

SEQ ID NO: 325660 - DNA, 88 bp, Homo sapiens
ccctgctgatgtcagtgttatatcctccaggaatactggccagcgacttcaggaagaaatcaccaaacagtctccaacgttgcaaaga

SEQ ID NO: 325661 - DNA, 100 bp, Homo sapiens
caccatcaagttcttcaggaatggagacacggcttcccccaaggaatatacagctcagatttcttttatccaagatattggaaggctccctctgaagcga

SEQ ID NO: 325662 - DNA, 82 bp, Homo sapiens
tacgagtgcaacatctgcaaggtccgcttcaccaggtgtgcttcccgcacagctgcagccatggggtctgaggaccacggcg

SEQ ID NO: 325663 - DNA, 74 bp, Homo sapiens
cagtctcctggagcttccagccagagggggccgacactactgtgtcggtagtcaaaccacacactccattaata

SEQ ID NO: 325664 - DNA, 96 bp, Homo sapiens
cctcgctggaggcagtttctggacaaatatcagtggatgggttcatgcgctatctgagtggagaagaaaacggagtcgtttcacctgagaaactgg

SEQ ID NO: 325665 - DNA, 74 bp, Homo sapiens
aagattcatacgcagctggcagatattatcatagttgctgcagggtctttttggagttcctgagctgagtgccc

SEQ ID NO: 325666 - DNA, 82 bp, Homo sapiens
gctaaagcagcgtgcgttcagccctgggaacggtggcagccgaagttaggaagcagatctccggacaatatagtggttctcc

SEQ ID NO: 325667 - DNA, 98 bp, Homo sapiens
ccctctccatgaaggttgtcaatcaagggactgggaaagaccttgatcccaacaatgttatcattgaggactcagaatattatgactatggacatggg

SEQ ID NO: 325668 - DNA, 96 bp, Homo sapiens
acttgcaaaagtatctcatatgaccagtgtattctaccttgtaaatactgttatttgtatatactgtaaatgatgacatcggtgggcactaaccga

SEQ ID NO: 325669 - DNA, 83 bp, Homo sapiens
ggacaagcttaataaaataaccgtccccgccagtcagaagttgaggtgtggatgaggtcaccattgtcaacattttgaccaac

SEQ ID NO: 325670 - DNA, 83 bp, Homo sapiens
cgcagagcattggcaggaggggcaaggtggaacagaattaccccctctacattcgcagcacccctacggagaacgagctgaag

SEQ ID NO: 325671 - DNA, 75 bp, Homo sapiens
ctaatgttcttagtgacattagtgaggacttgctgcgtttaaagaaacaaatgagagtattttgtcagatatgtc

SEQ ID NO: 325672 - DNA, 75 bp, Homo sapiens
acgaagttcagcccagaggagaaactcgctcgccttcagaagacaggaactgtggctgcaccatctgtcttcatc

SEQ ID NO: 325673 - DNA, 75 bp, Homo sapiens
cccatcgcgttttgccagcgataatacgcctcagatgtagatgagtgtgcccaagggctagatgactgccatgcc

SEQ ID NO: 325674 - DNA, 50 bp, Homo sapiens
agcttcttcctatttgccatggatttaaggaccatagtacagctatggat

SEQ ID NO: 325675 - DNA, 98 bp, Homo sapiens
agtcatggaactctggggctatgttgctgccaggttaatgttcgtgaagaaattgaagagttttttccaagaatgtggaagataaatcaagataaaag

SEQ ID NO: 325676 - DNA, 80 bp, Homo sapiens
ttctctccctctgcccccccttccccacgcaaccccagatccatttacactttacaggtgaggtggctttgaccccgggt

SEQ ID NO: 325677 - DNA, 50 bp, Homo sapiens
gaagccgctgcccctgctacaggtcaagttgaagaagcaagattaaaaga

SEQ ID NO: 325678 - DNA, 74 bp, Homo sapiens
agaagatcctggtcccctgctttaaccatcgaaaatgagaactggaagaagttcgggaactcagagtttgaccc

SEQ ID NO: 325679 - DNA, 75 bp, Homo sapiens
ccaacaggctgtttggagaaaaaacatacctcttccttcaaaagaatcgcattctgattttccatatggatcatt

SEQ ID NO: 325680 - DNA, 100 bp, Homo sapiens
accaacatagccatcgacttcggggagcagtttaagctatgaagaaggacatccctcacactctgaaacagatctccttcagagacagagttttgcagcc

SEQ ID NO: 325681 - DNA, 100 bp, Homo sapiens
gaggcatgcagctggggttttggctcaggctgtgctgcaggcgctggggtccgtggtggcagtggaggagcgctcgctcacagggacctgggatttgagc

SEQ ID NO: 325682 - DNA, 100 bp, Homo sapiens
cccaggagagaaacaagaagctggaggctgtggggacaggaattgaacctaaagccatgtcccaggtaatcacagacctggaggagcagctaaaccagct

SEQ ID NO: 325683 - DNA, 100 bp, Homo sapiens
gaggatcatccaaacatcacgggacttcgttaaatcagtgcttcggggcacttagcacagcgcctggcgcaagatggaacaagaggctgagaggcgcagg

SEQ ID NO: 325684 - DNA, 83 bp, Homo sapiens
gctgctgaagtaatgcaatggtctcaatctctggaaaaacttcttgccaaccaaataatctcaggggcgatataatcaatgag

SEQ ID NO: 325685 - DNA, 98 bp, Homo sapiens
ttcattccagtgattaaaactgattgtgcagaatattctaagaggtcagaaattgatttcaactattgcagaaagtgaagattcacaggagtcagtgg

SEQ ID NO: 325686 - DNA, 75 bp, Homo sapiens
ttggttgcatctgctaaagaggatcctgccaacattttacagttgggaagtttgtgagggatttccaattaattt

SEQ ID NO: 325687 - DNA, 73 bp, Homo sapiens
caaggacaagaagagaatgcaggatgccgctttccacctagaagaaggatgaagtggccgtggagacgaccac

SEQ ID NO: 325688 - DNA, 90 bp, Homo sapiens
cgcggctggtgggcgctgctggcgctgcagctgcacttgctccgggcgctggcgcaagatctcctccctggttcgaagggctgccctcac

SEQ ID NO: 325689 - DNA, 83 bp, Homo sapiens
attttgtcagcttgtcgtcaagatcaatgtccgagttaccaccatggatgcagagctggagtttgcaatccagccaaatacaa

SEQ ID NO: 325690 - DNA, 97 bp, Homo sapiens
ccatctgccttctgcataggccaaacaggttccggagtctcaccactgcatttttcagagacgccatgggcttcttattaatgtttgacctcaccag

SEQ ID NO: 325691 - DNA, 74 bp, Homo sapiens
tcagctaatgtctacctcgaatcaaagcttctcaataggtttggcatggacaagatctatgaaggccaagtgga

SEQ ID NO: 325692 - DNA, 100 bp, Homo sapiens
ccatctcgctgcccgacgatgtccgcaggcgagctatgccaagaccaagacgagagccgaggtgcggggcggtggccggaagccttggccgcagaaaggc

SEQ ID NO: 325693 - DNA, 80 bp, Homo sapiens
cctcacccgcgcctgcgacctcggtgacggccctgctcgggaggccctccagtctctgagccagcggcttcgggtgcagg

SEQ ID NO: 325694 - DNA, 110 bp, Homo sapiens
atggagattcaaggcctgcttcagtctgtgagcaccagggagcaggaaagccaagcggcttcaatgatccatcctaaagaggtgccccctgaggccatcttgctggcagt

SEQ ID NO: 325695 - DNA, 100 bp, Homo sapiens
caggactcccgacttgacacgatattttttgctaagcaggctaaaataaatgaagctgtagaatgcttactgtccctgaaggctcagtataaagaaaaaa

SEQ ID NO: 325696 - DNA, 88 bp, Homo sapiens
cagtagtgaaggcaacagtctgcccacctgtggacaccagagtatgaagagtgtaaagacctcataaaatttatgctgaggaatgagc

SEQ ID NO: 325697 - DNA, 90 bp, Homo sapiens
ccgggacctgctgctggacccggcctgggagaagcagcagcgcaagagtctcacattcccagtcaggaggtcccaggcacccaggtggga

SEQ ID NO: 325698 - DNA, 100 bp, Homo sapiens
gtgacatcatcaatgtgtccaacaggtgagggagattctgggccgctgcacctgccctgaccagtttcccatgatcaaggtctcagaggggaagtaccgt

SEQ ID NO: 325699 - DNA, 75 bp, Homo sapiens
cccagacaagtccccagggaatgccacagcatcctccagcacctcagtggactaaagaggatggacatagaactt

SEQ ID NO: 325700 - DNA, 75 bp, Homo sapiens
caacttcaaagacgttctcaaggagaaggcagacctgggactatggcaaggagtctcaggccaaggatgtcattg

SEQ ID NO: 325701 - DNA, 90 bp, Homo sapiens
ggcacctgcgcgaagctggccaaagcctgcccagacggctcacctgtgcgggatggaacaaaagaaaattggcttcttcaaccagcagta

SEQ ID NO: 325702 - DNA, 101 bp, Homo sapiens
tcattattgaggacaaagcgaatgatgaacagatctttgactgggtagagggccaggaaggaatactgggagaatcttcggatagcctcaggccggccata

SEQ ID NO: 325703 - DNA, 74 bp, Homo sapiens
ggggaggcagcgcgggatcccagcctcaggcgtgcgcggacggtgtgcggacgcaaacatgcagatctttgtga

SEQ ID NO: 325704 - DNA, 96 bp, Homo sapiens
cgcggcgctgcggaccctgaaggttatcttatgatgaggcttttgctatggctaatgatcccttggaaggcttccatgaagtaaaccttgcttcac

SEQ ID NO: 325705 - DNA, 100 bp, Homo sapiens
aatgaccaggtgtaaagtgcaagagtaatatgctatgactgaggaagtaacagctagcagtcgccactatgttgacaggctatttgaccctgatccccag

SEQ ID NO: 325706 - DNA, 75 bp, Homo sapiens
gcgacccggtgtgtgggccagcggagctccggaatcccgttctgcttccagaagtggaagtgctcacggatcggg

SEQ ID NO: 325707 - DNA, 115 bp, Homo sapiens
ctgcgctgccgccaacaggggacaaaaccagccgctccgactccagggctcctgtctacgaccaggctttgaaatcaacttcatcaagtctcagagcagcaacatgctgacgccc

SEQ ID NO: 325708 - DNA, 49 bp, Homo sapiens
attctataagcagttaggatctggaggtttgaagatgccgcatttggat

SEQ ID NO: 325709 - DNA, 90 bp, Homo sapiens
agttatataaagaagaccttaatcaaggaattttacaacagtttgaacactggcctcatatttgcacgtcctatatccagtgtaaagaag

SEQ ID NO: 325710 - DNA, 126 bp, Homo sapiens
ccatgtggagcgggtggagatcatcatgaaagagaccgtggatgctgaagttaacaagcacaagccctggctggagcccacctaccacggcatagtcacagagaacgacaacaccgtgctcctcga

SEQ ID NO: 325711 - DNA, 75 bp, Homo sapiens
ctccctgtctgggaccttctccctgcctggacccctactattgcaacaaggacctatatccagactttgcctgac

SEQ ID NO: 325712 - DNA, 101 bp, Homo sapiens
ctcaaggctcggaagaatgtggagagttttctagaagcctgtcgaaaaatgggggtgcctgagacaagtgggtttggactcggatgaacccttcgggggtc

SEQ ID NO: 325713 - DNA, 75 bp, Homo sapiens
gggcttcatagcattcgcctactccgtgaaggtctgcgaggaacagaagtgcgaggaggaggtcttcccgctggc

SEQ ID NO: 325714 - DNA, 89 bp, Homo sapiens
catcaccaacctccggcccgtgggcgaggacttccggtggtacctgaaggtttattgatcatctaatggtgatgtttggtgaaacaccc

SEQ ID NO: 325715 - DNA, 83 bp, Homo sapiens
tttacttggtgcaggaaggcagtctttgctacgtacagcaaaaggtaatgctatgggctatgtacgaatgataagatctggtg

SEQ ID NO: 325716 - DNA, 98 bp, Homo sapiens
ttggccctgtgatccctcaagactggtccacggagtgtatgaccacaaacagccatcaagatggtttccacggtgatgtgtacctaacagtgaagctg

SEQ ID NO: 325717 - DNA, 73 bp, Homo sapiens
aaatagcagataaggattctgaagataactgggatgacgatgatgatgaaaaaaaagaggaagcagaagtaaa

SEQ ID NO: 325718 - DNA, 100 bp, Homo sapiens
gggatccccagcccctgcagaatgacccaccaggatctgaggttggcatggattacagaagctgcatcctgagacccggcggttccgaggatgccagcgc

SEQ ID NO: 325719 - DNA, 98 bp, Homo sapiens
aaaatcccatgaggagaaggcattctaatttagcccaagaggagagggtttgaccgcttcggaccagatggcacgggcaggaaacggaagcagttcca

SEQ ID NO: 325720 - DNA, 50 bp, Homo sapiens
ctcaaacaccaccaagtcaaggatacagtatctccagatgaaatggccac

SEQ ID NO: 325721 - DNA, 50 bp, Homo sapiens
atagcttcttttggagaaaggattaagaatcaactgaaccatcttcttgg

SEQ ID NO: 325722 - DNA, 75 bp, Homo sapiens
attcacataatttgaaccagcagcaacgtgagcaaaaaatcgtggaattgccattccagtggatttggacagcca

SEQ ID NO: 325723 - DNA, 85 bp, Homo sapiens
ggactgggctggccccggaagcccccacgggctctacctgaccctgcagaaagcataacccctactgtagaactaaatgcactgt

SEQ ID NO: 325724 - DNA, 51 bp, Homo sapiens
tgagcgtcgacgctggtcgtgggggcggagaacccagactcccatggttat

SEQ ID NO: 325725 - DNA, 75 bp, Homo sapiens
caagaggatgccctgatggcagttagcacactggtggaaggtgtgatccctcacatccacaaatctctgattgga

SEQ ID NO: 325726 - DNA, 88 bp, Homo sapiens
tccaagccaaaatcacagctttgagtgagaaacaggtatcatgaactgatcactaaatatgggaagttggagcctttggcagaagtgg

SEQ ID NO: 325727 - DNA, 100 bp, Homo sapiens
tctgctaacaccagatagtggaaagaaaccatgtgctgaaatgtttgacgacactgatggtttgcttcttccagaccagctggtcttgcttctggagcat

SEQ ID NO: 325728 - DNA, 90 bp, Homo sapiens
caaccaccgccctggccatctaccatgtgtgggtaattccagaattgattggccataccattgtcactgtattactgctcatgtcattgc

SEQ ID NO: 325729 - DNA, 83 bp, Homo sapiens
gcagtcggcttgtcctggctcttgccctcatcctggttctggaatcctcagttcaaggcaagaattggatccatgtaacgctg

SEQ ID NO: 325730 - DNA, 98 bp, Homo sapiens
ggtgctggagctatacagcggcgtgggcggcatgcaccacgcgctgagagacatatgtagagtgtgtcggtcagaaggaacacctgagaaaccgcttt

SEQ ID NO: 325731 - DNA, 80 bp, Homo sapiens
gagatccaagtgcgcgccctggcgggtccggaccaagagccatccaaaactctgtttgtcaaaggcctgtctgaggatac

SEQ ID NO: 325732 - DNA, 90 bp, Homo sapiens
ccacttatgtttgtaaatgtgagtggaagccatgaggccaaaggcagttgtattgatctctcaaaggccttggttctgacagaaattggc

SEQ ID NO: 325733 - DNA, 75 bp, Homo sapiens
cgcggagcccggcttccgacgtgcagcctggcagtgcagtgagatggggttttgctgtgttgcccaggctagtct

SEQ ID NO: 325734 - DNA, 74 bp, Homo sapiens
tccgccgctcaccccgcggccgcaccttcccgccttctcaggacaaccctccatatgataagggagccttcaga

SEQ ID NO: 325735 - DNA, 95 bp, Homo sapiens
tgcagagccagatgatccacaggatgctgtagtagcaaatcagccgattacacctcaacaagaaggcaactgacaaacagccttatagcaagctc

SEQ ID NO: 325736 - DNA, 75 bp, Homo sapiens
cttcgtgcagcagttcacggacatggagcacaacaggggaaatgtttcaacgtgcgcaagcgttgcggcggcggg

SEQ ID NO: 325737 - DNA, 50 bp, Homo sapiens
ggaagataccacaatcagaccctccgacctgagaaattagatgttgaaac

SEQ ID NO: 325738 - DNA, 75 bp, Homo sapiens
tccccgccccatcggttgttgtctgggcggttgacttttgtgccctggtaattctgtatcctgtttaccgtttac

SEQ ID NO: 325739 - DNA, 75 bp, Homo sapiens
gaaattcatctttaaggacgaagagagcccttgaagataaggatggtcaaacaaaataatatcatacctggagaa

SEQ ID NO: 325740 - DNA, 100 bp, Homo sapiens
aaccacacaccagcggctgcaggactgggcacagcatgagatccaaaggcagggcaaggaaactggccacaaaacggaaagatgctgaaggatgggagac

SEQ ID NO: 325741 - DNA, 105 bp, Homo sapiens
caatgaaccttgggtgatttgttctgtatcagaagacaatatcatgcaagtgtggcaaatggttgtacatcctggagacctgaagaattctgttgaagtcgcact

SEQ ID NO: 325742 - DNA, 110 bp, Homo sapiens
gagaggcagagagatccaagcgcacagaaaaacacaagaagattcagccctgtcatcttgtgcaaagaatggaagttggatacactttgtgacttgtacgagacactgac

SEQ ID NO: 325743 - DNA, 100 bp, Homo sapiens
caaagccagacacttgccgaagatggatatcaccggtctctcaggtaaatttggaggttttggttcagttagtggaaaaattgaaatagaaatcaagatc

SEQ ID NO: 325744 - DNA, 95 bp, Homo sapiens
gtgtgattgactttgatgagaacactgctctggatgatgcagaagaggagtcctttaggaaggaccgtataatagacgctggccccaaaggaaac

SEQ ID NO: 325745 - DNA, 82 bp, Homo sapiens
ggacatcagccccaaacaggacgaaggcgtgctgaagatgtgaagttcatttccaatccgccctccatggtggcagcgggga

SEQ ID NO: 325746 - DNA, 83 bp, Homo sapiens
gaaagtcctctcgggagaagcagcgcctgttcccggggcagatccaggttcagctcaccatggatgatgatatcgccgcgctc

SEQ ID NO: 325747 - DNA, 60 bp, Homo sapiens
gcaccaccgctgcaagagccggttgatattcactgatggactccaaagaatcattaactc

SEQ ID NO: 325748 - DNA, 122 bp, Homo sapiens
actgaggaggccgagagatgaggccggagcccaccaagttctgggaagtcatcatcagatttgaaatatttaaagtggatacaaaactatttcagcaatgcagacaattaagtgtgttgttg

SEQ ID NO: 325749 - DNA, 84 bp, Homo sapiens
cagccactgggcttatacagtatgcattggaccagggcgtgaacgtcacccagagtacaggggctcaggtccaggtggcagggg

SEQ ID NO: 325750 - DNA, 73 bp, Homo sapiens
gacagcactgtagaacagctttatgaaacagcttgcttcctacaggaagagtctaacctgtctctgcaagctc

SEQ ID NO: 325751 - DNA, 50 bp, Homo sapiens
ggagatgaagcctaagaatatgatcaggactcagaattcatgattgaaga

SEQ ID NO: 325752 - DNA, 82 bp, Homo sapiens
cggggttcgggtgtctcgtgtgtgaacatcacaggtattgacctgatggacatggcttcggacatcctgcagcccaaaggag

SEQ ID NO: 325753 - DNA, 89 bp, Homo sapiens
cgtccccggccgggacgcgggtcgcgtcgttgtcctccgcgagcgtccggattgcagagtccctgtgaagcaggaagagtgagggcagg

SEQ ID NO: 325754 - DNA, 130 bp, Homo sapiens
gccggcgcgaggacagcgcgtgcccgcgaggagccgccgcgcgcccgcgccctccgcgcgacgccagctcaccatggatgatgatatcgccgcgctcgtcgtcgacaacggctccggcatgtgcaaggcc

SEQ ID NO: 325755 - DNA, 126 bp, Homo sapiens
acaaatttgatttccggagtcagtcattttactgtcaagacatttcttcggcattctgcaacaggttttgactggatcatctcgtcaaagttattcacctggctatcaggatttcagtaagtggga

SEQ ID NO: 325756 - DNA, 50 bp, Homo sapiens
ggggccactcagagtcgcccgagaaggccgagaactactggtggcgtggc

SEQ ID NO: 325757 - DNA, 83 bp, Homo sapiens
gacaaacagcccgcccgaccccgtcccgaccctggccgccccgagcggagcctggaggcattgaagttgatatcgatgtggag

SEQ ID NO: 325758 - DNA, 75 bp, Homo sapiens
tacagcaagaaagaccatcaagtttaccacggtcttgcgagtggctggttccctgcagaagagcacagaagtgat

SEQ ID NO: 325759 - DNA, 101 bp, Homo sapiens
ggggcaggagtgcatcaagtgccacatcaacgtgtatccacacaagcaggtgacggggtttgacagcgtggatgatgagtccaagcacagcgaccacatgt

SEQ ID NO: 325760 - DNA, 83 bp, Homo sapiens
gtgggactggatgctacaaactgtttgaggataactgacttaaaatctggggtgaaaatgggatggaggattgtgtcatggcc

SEQ ID NO: 325761 - DNA, 75 bp, Homo sapiens
ctgcagaaggtctctggagacatcttcagcaggtactttgaactcaagtaaacaaaagggaagattttctcgttg

SEQ ID NO: 325762 - DNA, 98 bp, Homo sapiens
tacagagatgtgatgttggagaactatagcaatctggttttcttggtgaagctgtggtctaccaatctagacaactcagtggcaagcattgaggcaaa

SEQ ID NO: 325763 - DNA, 102 bp, Homo sapiens
acagtttacctctggatacactacttgtggatgttgaacctaaggtgaaatctaagaaaagggaagctggtgatgatgaacagtctacacagatggctgcaa

SEQ ID NO: 325764 - DNA, 100 bp, Homo sapiens
tttcagacagacctcatctataacctccttgaaaaactgggatacatggatctggcctcaagactggtggtttattcagtcaccatgaagctgctgctgc

SEQ ID NO: 325765 - DNA, 100 bp, Homo sapiens
tttacatgaaaaaaagggagataagatgtgtccaggcatcgagagtaaacatgaggttacgatcctgggaggacttaatgaatttgtagtgaagttttat

SEQ ID NO: 325766 - DNA, 100 bp, Homo sapiens
gaaagaaagagccctggactgtgaagagtgaggagaccatagctgcacagccagggacatggcttgcagtgtggcaggcataacttctgatgctaatgtt

SEQ ID NO: 325767 - DNA, 101 bp, Homo sapiens
cctgccctgaggagtccccgctgcttgctggagtcacatcagaagccgcgcagactatcaccacggctcctgatgcctcagggcctgaagcaaaagtccag

SEQ ID NO: 325768 - DNA, 80 bp, Homo sapiens
ctgagaggggcgcatgcaacaacaacttttggaagggatgatcggctgaatgtaacagaggaactaacgtccaacgacaa

SEQ ID NO: 325769 - DNA, 99 bp, Homo sapiens
gtggtggcccaggaggcggcaggacggccaagaccagcgcgagggccctgggcaaggcccgacaggtccaagaaaaagagtctgaatctaccactccgt

SEQ ID NO: 325770 - DNA, 100 bp, Homo sapiens
ggaggctctctccatgggagccctagcatccacagtgcagatactgtggatggtagggaagaaaagtctgcttctgattcttctggaaaacagtctactc

SEQ ID NO: 325771 - DNA, 98 bp, Homo sapiens
aagcagacggaagtggctccagcttcctatgatgacagttaccttgcctccagaggtgaagtccccagtggagcctatggctactcttacatgcccag

SEQ ID NO: 325772 - DNA, 75 bp, Homo sapiens
gatgagcccttgaagcacagcagtcgtcctcttgagttctggcgccttgactactgggaagatgacttgcggcgc

SEQ ID NO: 325773 - DNA, 100 bp, Homo sapiens
catgtcagggaacttgctgagcaactattcaaaaatgatcaccagccttttgcaaatgcacacgatgtgctagcccgctcccgcagtcgagccaacgtgc

SEQ ID NO: 325774 - DNA, 90 bp, Homo sapiens
gtctgctctgtggactcaacagtttgtggcaagacaagctcagaactgagaagctgtcaccacaggtccaaggttggcatcggaaagcca

SEQ ID NO: 325775 - DNA, 75 bp, Homo sapiens
gaggaaacacctcaggacacggcctacaacaccaagagtgtcaacagcatctccaccctggagcctgtgagccgg

SEQ ID NO: 325776 - DNA, 75 bp, Homo sapiens
cggtaaactaccgaagtctgcttctgcttccaaaggagaaccgcagtgaaagactggtcaaacaaatggatttta

SEQ ID NO: 325777 - DNA, 83 bp, Homo sapiens
ccaagacatccctgctgagagagccaaggtcctccagcagcctgacctgagtgggttagtgatccagagaaaccagcaggcca

SEQ ID NO: 325778 - DNA, 83 bp, Homo sapiens
tttcgaccttcaatccagttccaaggactccacgggccatcactggtgcaagctatatttaacggagatcctgatgaagttcg

SEQ ID NO: 325779 - DNA, 90 bp, Homo sapiens
gtagtttcaaaaggtggcctttccactggagttgcttcacttagctctacaatcaacccatgtggagcttcagtttcagcgactcacccg

SEQ ID NO: 325780 - DNA, 82 bp, Homo sapiens
ctgtccattgtcctccccatcggatagaatttttgcggcatttgaagagctttttccagattatgtttaaaattgaaaccaa

SEQ ID NO: 325781 - DNA, 96 bp, Homo sapiens
cggcattccagtgcaaaagttcggagcaggacggcttacctgttttctagatttgtcaaatctctcaaactcgttcaaaacaagccatgactcctc

SEQ ID NO: 325782 - DNA, 80 bp, Homo sapiens
aggttttcaggaaacttgcagcaaagccattcgggttggagtaattggaagagagaagggcacagttacctaagtatcaa

SEQ ID NO: 325783 - DNA, 90 bp, Homo sapiens
gtgaacgcgctgcacctctacctgtggctctttctgctgggcctgcccttcaccctctacatggccacaatgctgcttggagcctctctg

SEQ ID NO: 325784 - DNA, 74 bp, Homo sapiens
ccgcggtcttcccaggcgtcgcggagagcagcatctctgcgccggatgtcatctaacagattccctggatcatc

SEQ ID NO: 325785 - DNA, 83 bp, Homo sapiens
cgggtggcttacagacgctgccagcatcgccgccgccaggatttttagactctgaggagcagttggagctaatccacattatg

SEQ ID NO: 325786 - DNA, 90 bp, Homo sapiens
ggaggcgcgggaggtgttcgagaacgaccccgagacggtttacccaaggtccagcctagcccctaggcaccatgtcggacagtgatctag

SEQ ID NO: 325787 - DNA, 90 bp, Homo sapiens
ggaccaacttgggtcctaaaggcaccatgaaaatgggacagtgggaaggtggaccctgtctacgagaccctgcgctatggcacctccctg

SEQ ID NO: 325788 - DNA, 51 bp, Homo sapiens
ggatggaggaggcgatgcacatgatcatggaagggaagtggttgctgtgta

SEQ ID NO: 325789 - DNA, 75 bp, Homo sapiens
ctatgaggtagatattaaaccagacaagtgtcctaggagagtgaacaggtctcgctctcgaagcagacattcccg

SEQ ID NO: 325790 - DNA, 82 bp, Homo sapiens
ggatctggtgtaccaggcgaagctggccgagcaggctgagcgatacgacgagaatctcgatgctggcctggagcagaaactg

SEQ ID NO: 325791 - DNA, 76 bp, Homo sapiens
aaagatccaagaccattcttcaagtttgcaaagaaaatgtcactgaaattcacaaatgcaaaacggattgaaggac

SEQ ID NO: 325792 - DNA, 74 bp, Homo sapiens
cgctccgcgctctggcgctacggtctggccgtcggctgcggcgccatcggcccatggacagaccttcacgttcc

SEQ ID NO: 325793 - DNA, 83 bp, Homo sapiens
ctgcggtccacggccaggtgaacaatggtctctaattaacagaagatggcaaagcccagccacagcagctatgtccttcagca

SEQ ID NO: 325794 - DNA, 100 bp, Homo sapiens
gtggccctcgccctcctctggggatcgctgtgcgccgactacgtctactttgagaactcctccagcaacccatacctgatccggagaatcgaggagctca

SEQ ID NO: 325795 - DNA, 101 bp, Homo sapiens
cgtccgcaagaccgggcagatctggcccaacgatggcgagggcgccttccatggagacgcaggtcagcccaaggctgccccctcggtcactctgttcccgc

SEQ ID NO: 325796 - DNA, 83 bp, Homo sapiens
ctcagttggaagcagccgatccagcctgcggagcctgtggggcaggtggcagcacaccctgggccccccactccccgccgcaa

SEQ ID NO: 325797 - DNA, 104 bp, Homo sapiens
tgaagcggcccaaagacgccaatcgcccgtactgagcgccggcgggagcgtcccccgggggagaccaggactcgcacagatggagtcttgctctgtcgcccagg

SEQ ID NO: 325798 - DNA, 87 bp, Homo sapiens
tctccagagaactaaataattctaccaatggcatcgtcatagagccgagcgaaaaggcgaaggcagcagccacattggcagtgaggc

SEQ ID NO: 325799 - DNA, 50 bp, Homo sapiens
aggaacatctcttcccagcggctcagagacggggtttcgccatgttggcc

SEQ ID NO: 325800 - DNA, 75 bp, Homo sapiens
cggcgaacgcggagagcacgccatgaaggcctcgggcacggtttctggtcagaattgctgtgaggaaaagaggaa

SEQ ID NO: 325801 - DNA, 83 bp, Homo sapiens
cacaaacgccgcaccaggtcttgtagcagcgcctcctcggtgacttaagagattaaaattaatttggttgctgttggttctga

SEQ ID NO: 325802 - DNA, 99 bp, Homo sapiens
ggcggagagcggcctgcgggcgatcgggccgaggctccagcccccttttggacatcgttggcggccggaaggcgaggccccgccagttcccgttcctgg

SEQ ID NO: 325803 - DNA, 83 bp, Homo sapiens
taacttcgatgacaccattgcagaaggaataaccttcatcaagttttatgctccatggtaacttacgacctatttctccgtgg

SEQ ID NO: 325804 - DNA, 82 bp, Homo sapiens
cagaaagcggcttatcgaacagagccgggagttcaagaagaacactccagagcaaaatgatgcttcaacacccaggccaggt

SEQ ID NO: 325805 - DNA, 75 bp, Homo sapiens
gcgggtcctacagagacagttatgacagttacgtatatgccatccgcgaggcagccaccagcaacctgaagaagc

SEQ ID NO: 325806 - DNA, 100 bp, Homo sapiens
aacggctttcagttgagctgaccagctctctcttcagaacagagccaatggcttggaatgagatgttcattctggacagagtggaaggtgatacttgttc

SEQ ID NO: 325807 - DNA, 98 bp, Homo sapiens
agcgaccagctcactaagaacatggcctagaatatcctgcagtggtagagtttgctccattccagaagatagccaaaaagaagctgagaaaaaaagat

SEQ ID NO: 325808 - DNA, 75 bp, Homo sapiens
caaattaccggaaaggactgttcttgaggtattcaggtcagaagagatcaattctacagaaatttccagtggttc

SEQ ID NO: 325809 - DNA, 82 bp, Homo sapiens
aatgtcggggatggacctccagatttccttactggagttgatccccctcatattgtgtacagcatgtctacatcctgagcct

SEQ ID NO: 325810 - DNA, 75 bp, Homo sapiens
aagcaagagaaaaagaacattactgtcttggtgcttttgaagatgatgatatcacgcacgttgaaggaagtgtag

SEQ ID NO: 325811 - DNA, 90 bp, Homo sapiens
attgaatattattacatgtggaaaactactgacagatatgtgcaacaggaggcaggtggaagtcatcataaagtttctgtttcacccgtc

SEQ ID NO: 325812 - DNA, 90 bp, Homo sapiens
agagctggcccacacgacagagctgcacgtgctggacgtggcggggaaccggctgatcattggcttcatcagcaaacagtacgttactag

SEQ ID NO: 325813 - DNA, 74 bp, Homo sapiens
gagctattgaaaaaatgaatggaatgctcctaaatgatcgcaaagtgtacttggattatggagaagagaattgg

SEQ ID NO: 325814 - DNA, 100 bp, Homo sapiens
ctggtccactgcatggtgttccggttcccgggcttcccggatctgtatgagcctgtcatggaggccatcaaggtaactctggcagccaatggaaagtcag

SEQ ID NO: 325815 - DNA, 100 bp, Homo sapiens
gaccaactggtggaacccctgggagaaaaatattctgacagcccagttacaggaaatgaagaaccagagtatgaatcttttccaaaggagagatgaaatg

SEQ ID NO: 325816 - DNA, 74 bp, Homo sapiens
gcaaggctgtccccttccaggtggcccagaaagagaagacttgcactatctgccagatgctgcttcctaaccag

SEQ ID NO: 325817 - DNA, 51 bp, Homo sapiens
ctcaacaatgtttttgttcaacagacaatgcaggcagttaacaagaagatg

SEQ ID NO: 325818 - DNA, 110 bp, Homo sapiens
aactaggagatgcagaggacccaggcacgtaatgcgtcagaatgtgaagcgagcaacatttgatgaagtcttagaactcatggccacaggatttctgcgtggagggtcag

SEQ ID NO: 325819 - DNA, 149 bp, Homo sapiens
ctggactgtggtgagccaagtgaaaatagcgaggaacccaaactgtggggaatgcatgaaaggcgtgatcaccgaaggccaatgatgaggccaatcagagtgatacaagtgtctccttgtcagaacccaagagcaaaagcagccttcac

SEQ ID NO: 325820 - DNA, 74 bp, Homo sapiens
tctggggcaactcagaagaacgtagtgggcagcagtcagtgacaggtgtaacctctgtggatgacagcaacagt

SEQ ID NO: 325821 - DNA, 75 bp, Homo sapiens
aaaattactgtatatgcacatgctgggctaccctgctcactttggacaggatcacagaagaactgcagcttcctg

SEQ ID NO: 325822 - DNA, 95 bp, Homo sapiens
cttgacagcggctttcaacccccacctcagcccagcaattcggtgaaatgacaatggatgctctgttggctcgattgaaacttctgaatccagat

SEQ ID NO: 325823 - DNA, 100 bp, Homo sapiens
agctatttccggttccggtgtcagttcgaggcgccgccgccgccgccgcagccgccggagccgcaatgcctaaaggagtgcacagccagagaacaacaca

SEQ ID NO: 325824 - DNA, 75 bp, Homo sapiens
cggaagcgaccgaggccttctttgccatgaccaagctctttcagtccaatgatgctcatttataagtgctcctgt

SEQ ID NO: 325825 - DNA, 82 bp, Homo sapiens
gcgtcgaagacatggaccagggctacggagcttcctgcctgacacagctcacttcaagaagtgcacaatgtcagaacgtgga

SEQ ID NO: 325826 - DNA, 74 bp, Homo sapiens
atttaaccaagttccaacaaaagaatgctgccgcagtctccaacctgtcccagtatttcagcccagcctcggtg

SEQ ID NO: 325827 - DNA, 75 bp, Homo sapiens
cggcggcagcgggtcttgggtcctccgagagcagcagcgtatgacttctctttggaaaagaaaaccattgagtgg

SEQ ID NO: 325828 - DNA, 121 bp, Homo sapiens
gcctgcggatgaaggaccagtgtgacaagtgccgggagatcttgtctgtggataagtatgctgtgcgcttcatccctcgggagaatggcgtttacctgattgacgtcaagttcaacggcac

SEQ ID NO: 325829 - DNA, 96 bp, Homo sapiens
gcctgcgtgtcggcggagtcgccttgcccctcttgctcgccttgaaaatggaaaagatgctcgcaggctgctttctgctgatcctcggacagatcg

SEQ ID NO: 325830 - DNA, 100 bp, Homo sapiens
agagtgacctttgcatctgcctgtccagccagcatggaaccaaagcggatcagagagggctaccttgtgaagaaggtcttaaaattttggtagcagaaag

SEQ ID NO: 325831 - DNA, 100 bp, Homo sapiens
ggctgctgtcttcaggaccattgcaagcccgtgatgctgatgagcgagagaagtggatccatgccttagaagaaacaattcttcgacatactctccagct

SEQ ID NO: 325832 - DNA, 98 bp, Homo sapiens
taacatattactggcatcttcaatctgtccccaaagctccagagatagatccagtagagtgtttggtggcagataactctgtaacagtggcttggaga

SEQ ID NO: 325833 - DNA, 75 bp, Homo sapiens
gaggaaaggtttacaagcaggccacgattgaatctctgaagagcattagtttggatgaattcaagtcattttgcc

SEQ ID NO: 325834 - DNA, 75 bp, Homo sapiens
ccggttttgccgcctccgcctttgccttcgcagccgcctccaggacaactacacctttgcccaacctgggattca

SEQ ID NO: 325835 - DNA, 83 bp, Homo sapiens
gctcatctcagctgaacaccagtctaccattccttcaaagtcagggaagtcaaagatgcatccctgagttcttcctagcaggc

SEQ ID NO: 325836 - DNA, 101 bp, Homo sapiens
ttttcaggaccaaaattgtggaaaagtcactctggagcttgatcctggatagtgtttgtatgatgtgcacacgtctctgcaaatgcttgtttgaagattgg

SEQ ID NO: 325837 - DNA, 98 bp, Homo sapiens
gcggccgtggacaacatgatggtcagaaaaggggacacggcggtgcttaggaatccactgcgaagaagacgtcaatgaatgttcttcaaacccttgcc

SEQ ID NO: 325838 - DNA, 75 bp, Homo sapiens
ctcctccaactacagccccgtggagatgtggaatgggggctgccagatcgtctgcgaaacttgtatctgttttaa

SEQ ID NO: 325839 - DNA, 100 bp, Homo sapiens
cgaacagtgctgagtggcggcagcctctacatcgagatcccgggcggcgcgctgcccgaggggagcaaggacagctatcagttgagggatttgcagttga

SEQ ID NO: 325840 - DNA, 74 bp, Homo sapiens
aatgttccataagcgtggcaagaaaaatgggaagttctcggtcctgtacaatgggttcactggtcgaaaaatca

SEQ ID NO: 325841 - DNA, 75 bp, Homo sapiens
tttctcttacaattgaactgcttcagaaagcacaggaagaagcattgcatgcatttattcagccagagattctgg

SEQ ID NO: 325842 - DNA, 98 bp, Homo sapiens
aacaggtactgcttcctgagcaccgccagccaccggcaccaagaccggccacatcccagcactgcccacctctgagtgctgcagcagctcccagtcca

SEQ ID NO: 325843 - DNA, 100 bp, Homo sapiens
gagcaccttttggcccaatgaatatcaggttccatttctacattcggactctacatataaaataaagattcacacttttaataagacattgacacaagaa

SEQ ID NO: 325844 - DNA, 75 bp, Homo sapiens
tgtcccaagccctggtgccaggtgtccatccccgtgctgagatatgtggtagatggtggctttgtgaagcagtta

SEQ ID NO: 325845 - DNA, 89 bp, Homo sapiens
cttgcctgtgtcccacttgttcgcggcctatagcactgccagtgaaagatgtagaagataaacctgaacaacaaaccagaacaagagag

SEQ ID NO: 325846 - DNA, 118 bp, Homo sapiens
cgccagccgcaccatgccgctcctaagcctgcacagccgcggcggcagcagcagtgagaggtgcgcgcggagccatggttatcatgtcggagttcagcgcggaccccgcgggccaggg

SEQ ID NO: 325847 - DNA, 75 bp, Homo sapiens
tgatgagtatgatgcacctgcagtaggttagtggttacttggatgattgtacctgtgatgttgaaaccattgata

SEQ ID NO: 325848 - DNA, 100 bp, Homo sapiens
gatggatgttaaaaatcaacaccaggactacagtaaggctgaaatcattgaagtgcttggagtgcagaactgaaagaggacctcagcagccatgtcgaag

SEQ ID NO: 325849 - DNA, 50 bp, Homo sapiens
ttcgaggccggcacggtggccacgctggcacccgacagctacaaagtgca

SEQ ID NO: 325850 - DNA, 74 bp, Homo sapiens
gcagctgcctcagttcttagcgcaggtttattgttggccaaaaccaggctttgattgaaccaggatgaatgcgg

SEQ ID NO: 325851 - DNA, 99 bp, Homo sapiens
gcgcggaaatctggaaccgggatggcgacgtctacactgagtcggaggcgaaggaacccaagacagaccaggatgaggagcattgccggaaagtcaacg

SEQ ID NO: 325852 - DNA, 75 bp, Homo sapiens
aaccctaccttcattttacaataggagaattctgcctaagccaactcgaaaaagccgtacaaaaaataagcaaaa

SEQ ID NO: 325853 - DNA, 102 bp, Homo sapiens
ggacccgcgcaggaggaggcggcggggacaccggcgagtccccagcagggcccctgggctcccggaagatgccttcaattaagttgcagagttctgatggag

SEQ ID NO: 325854 - DNA, 90 bp, Homo sapiens
cggggagagacggccaagcagcaccagcgtgcctttgggtgataaggggtacaacacagaccagttctctccctatgctgccccctcccc

SEQ ID NO: 325855 - DNA, 90 bp, Homo sapiens
accccggcggcagacgcaggttcgggaccatgagctgccattcaaactcctccccacgacactctgaagcagcgacggcacagcgggaag

SEQ ID NO: 325856 - DNA, 100 bp, Homo sapiens
caatgcggccgcgagaagcagcgggggggcaggcgatcgaagttaacaagcacaagccctggctggagcccacctaccacggcatagtcacagagaacga

SEQ ID NO: 325857 - DNA, 51 bp, Homo sapiens
gatgatgtgggccatggtgtcaaggattgtaagtggaaaatgtatatggag

SEQ ID NO: 325858 - DNA, 74 bp, Homo sapiens
caacgtgctcgtgggtggaaacaccccaaggaagcccagggtccgtctgcattttgtggagctgggctccggcc

SEQ ID NO: 325859 - DNA, 98 bp, Homo sapiens
acccggcggacaagcggcgggacgccaggacgcggcgagcaagagcctcagcttaagggtatagttaccaagctatacagccgacaaggctaccactt

SEQ ID NO: 325860 - DNA, 75 bp, Homo sapiens
gcagcctgcacacccaggaagcagggcggtccctcatcaagaaggtacctgtggaaaagtgaaaagccactctac

SEQ ID NO: 325861 - DNA, 74 bp, Homo sapiens
ttgccacctggttcagcttggccagatcgagcggagaaatggtgtgtggtctgcttcagtgacttcgaggcgcg

SEQ ID NO: 325862 - DNA, 75 bp, Homo sapiens
tctcatccgtatgtataacatcaagaagcctgaactgacatcaactcccaatttcgtggttgaagttataaagaa

SEQ ID NO: 325863 - DNA, 82 bp, Homo sapiens
cgctccctcacacaccggcctcagcccgcaccggttctgccctgatgtttcctggaataatgctgaggactgcctttcgggt

SEQ ID NO: 325864 - DNA, 96 bp, Homo sapiens
tccccttctacaacttccaagacagttactacatcaggaatggcggcgctagatagtaaggcatcagggaagatgggaatgcgagctgtagtctat

SEQ ID NO: 325865 - DNA, 100 bp, Homo sapiens
gtcactttacagaaacagtgtgtaccattccgacgttacaatggtggagttggcaggtgtgcgcaggctgagcggaaggaggagaaaaaggcggctgccc

SEQ ID NO: 325866 - DNA, 82 bp, Homo sapiens
gagctgtgcagccgcgaggaggcgcgggaggtgttcgagaacgaccccgagacggccagctgcgggccgtccagcggctgtg

SEQ ID NO: 325867 - DNA, 82 bp, Homo sapiens
ggaacagtttgaggacctcctggtgcgcatcctgctgctggctgcccttgtctcctttgcaccagttgttctgcaaactcac

SEQ ID NO: 325868 - DNA, 102 bp, Homo sapiens
ctagccgggcctgagctgtgctagcacctcccccaggagaccgttgcagtcggccagcccccttctccacgatgacggtcgaaccaaacccattccaaagaa

SEQ ID NO: 325869 - DNA, 99 bp, Homo sapiens
ggtgtatcaagtaatggtgcaaagcctgaagtatccagatggttcccatcagctggtgtgagatgcagtgccctaagacccacactaaagaattccgga

SEQ ID NO: 325870 - DNA, 75 bp, Homo sapiens
attcattgcctccagtaatcaatggcagaaatctgaagctatcatggaacaattgaagtcttttcaaataattgc

SEQ ID NO: 325871 - DNA, 100 bp, Homo sapiens
agtattaacaaaagatatacaagaaggagatacattaaatgcaatagcccttcagtactgttgtacgggcaatggagatcttaaaagaaagtggacctgg

SEQ ID NO: 325872 - DNA, 101 bp, Homo sapiens
cgagatgctgggcctcgaggagggggaccttgaagacgacttcgaccctgcccagcacgaccagctcatgcagccttcgtgaccctgctgaatggggagca

SEQ ID NO: 325873 - DNA, 100 bp, Homo sapiens
tccttttccctctccctttccctaaggtgctagaaagcttcaagatcatggattatagccttctgttgggaattcatttcctggaccattccctcaaaga

SEQ ID NO: 325874 - DNA, 100 bp, Homo sapiens
cttaatgacctccttgtcctggagtctcccttaatacaggatacctgggatgaactcctaattggtagtgtagaagtgaaaaaggtaatggcatgcccca

SEQ ID NO: 325875 - DNA, 98 bp, Homo sapiens
cgaggccggcgaagccatgggcgccgggaccccgccgccgccgccgccgccgccgtctggccccaggtgaccattgtgaggtagatattttgttctaa

SEQ ID NO: 325876 - DNA, 97 bp, Homo sapiens
ccagaggtcgtggaggtggccgtggaggcagaggtggcatgggtactaaggctcgtacgtctgcatcgattatcttacgtggggcaaatgatttcat

SEQ ID NO: 325877 - DNA, 100 bp, Homo sapiens
gcagcccaaagtcgaatgattcagacttgcaaggaatcccgttctgcttccagaagtggaagtgctcacggatcggggaaatctgcaaggcatacccctg

SEQ ID NO: 325878 - DNA, 74 bp, Homo sapiens
gaagatcggcagcggctccttcggagacatctatctcgggctgggttacgacccctacaaccctgagctgccca

SEQ ID NO: 325879 - DNA, 108 bp, Homo sapiens
cctctccagaaaaacagtagcagtttcctggtcctgttcctcatcaacaccaaggatctgcaaaaccagcctggacaccaagtctgtgtcagaaggccacctcaagag

SEQ ID NO: 325880 - DNA, 88 bp, Homo sapiens
ggcgctgttgctgggctcggcgtgctgcgtttcaccagtgatcattaaagaatgggcagcttacaaaggaaagtctcctcaaaccccg

SEQ ID NO: 325881 - DNA, 98 bp, Homo sapiens
gctgctccatcactccaatcacaggcaacaactctgacaaatcagcattaaagggcagtatttaaagtcagttggcaagcagtggaataagatttttg

SEQ ID NO: 325882 - DNA, 82 bp, Homo sapiens
ggacgcccccaggcaggtggtcaactttgggcctggtcccgccaagctgccgcactcatgagaaagatcagtctaaagaaaa

SEQ ID NO: 325883 - DNA, 100 bp, Homo sapiens
aagaaaagtggagattacgtcaggagtctggagcacctattcttacagatgatgttagtttacaagtgtttatggatcacttgaagaaacttgctgtgtc

SEQ ID NO: 325884 - DNA, 74 bp, Homo sapiens
tggtgaggtgctatctcggagacacatgaaggtggcattttttggcagtcagattgttcgatatggtgagattc

SEQ ID NO: 325885 - DNA, 82 bp, Homo sapiens
ccctcgagaagctccagatggcgtcttccgtgggcaacgtggccgacagcacagagaaccatggagtctggcagtaccgccg

SEQ ID NO: 325886 - DNA, 97 bp, Homo sapiens
ctgtgggaaggtgtcctgtgtcactcccaatttctgagtttcttgcagaacataaattattaggaaacattaaaaatgtggccaagacagctaacaa

SEQ ID NO: 325887 - DNA, 82 bp, Homo sapiens
agacagggatacggtactgtccatggacctctgagctgccctttccacatcgctgataaagtggagaattttcatgaagaac

SEQ ID NO: 325888 - DNA, 83 bp, Homo sapiens
aacatgggaccaccaccaccttggcaaggaatggttacccatgcagttgttactgtaccagcctattttaatgatgcccaacg

SEQ ID NO: 325889 - DNA, 83 bp, Homo sapiens
ccccttcaagtctttgtggtgcctcattcccataacgacccagctgcagaaccttggcctgaaaatgctacattatatcagca

SEQ ID NO: 325890 - DNA, 83 bp, Homo sapiens
ctccttttcgtttccggaaacatgcaaccatgtccaagggacctgcagttggtattgatcttggcaccacctactcttgtgtg

SEQ ID NO: 325891 - DNA, 100 bp, Homo sapiens
tttgccctgggaaatagtaaccctgccaaatacatcagcttgtaggagacagaggctctgcgaacatcaatagatgcttatgacaactttgacaatatct

SEQ ID NO: 325892 - DNA, 75 bp, Homo sapiens
atgattggtagctaagactcccgaatacttcagaagtggggaaatggggcatggtctagtggcccagtcaggacg

SEQ ID NO: 325893 - DNA, 74 bp, Homo sapiens
gtgtggattcctcagagagtgaacttggaatcttggacctcatccagatgatgtctaccgtagaaaagcctcag

SEQ ID NO: 325894 - DNA, 101 bp, Homo sapiens
tgacccttttgtgcctgaccctactgggagatctataaggacaggcagaaattctcagaacaggttttcaaagtggcctcctcagacctggtcaacatggg

SEQ ID NO: 325895 - DNA, 114 bp, Homo sapiens
gacaccgtcgccttcccggccgcgtcggagtccggcggcgacctgcctctgaaacatggcaggctcggatgctgggcaaattggatcaaggcagttcagatgtgtagcaaaccc

SEQ ID NO: 325896 - DNA, 100 bp, Homo sapiens
ctgagcccccatcattgggagaaatccccactcctccaagaaccaacccccaaattggctgggacagagtgtgaacatggctacgcctcttcattcccgt

SEQ ID NO: 325897 - DNA, 100 bp, Homo sapiens
ttgcagctacctgcacttctagatgcctgagggaagacatgctggagaccctggttcccaaggcagagggtgaccgtgtgatggtggtgctgggcccaca

SEQ ID NO: 325898 - DNA, 106 bp, Homo sapiens
cctcaagaagcagctccacgaaaggcagccgcggatcgccgcgctcagcgacaaacaattttaacttctagtcatggcgaatgatcgcaggagagcacagactgga

SEQ ID NO: 325899 - DNA, 100 bp, Homo sapiens
ccttggcgtacacggtgtgcaaggggagtcgtggcgtcgtctgcgaccgctgccttctcgggtggctagaggtgcaggtagctaatttaacaagtccaca

SEQ ID NO: 325900 - DNA, 83 bp, Homo sapiens
cagacctgctgtgtgtgcttctgcgccccaggtgttgtgtgtgggggtgcagatcagaccaaacattgtctggcttgcactgt

SEQ ID NO: 325901 - DNA, 75 bp, Homo sapiens
gcagctctgaagaacccccctatcaacaccaagagtcaggcagtgaagcatccacctccagatcgacaggcagta

SEQ ID NO: 325902 - DNA, 82 bp, Homo sapiens
agccgatccagcctgcggagcctgtggggcagcaggagcattggtttgaaaaggccctacgagacaagaagggcttcatcat

SEQ ID NO: 325903 - DNA, 80 bp, Homo sapiens
cgatccagcctgcggagcctgtggggcagattgtgcttcaagaagaccatagggaagaacgcattttcatcttgctgcaa

SEQ ID NO: 325904 - DNA, 83 bp, Homo sapiens
ctcggagcctgagcgggaggtgcgagttgtgagtacagaggtggtcagagcccaagaagaatgggaagctgtggacaccatcc

SEQ ID NO: 325905 - DNA, 82 bp, Homo sapiens
cgagaagagcagagcggagggagccccagacacgaccctgacgaccagtacaagctcacggaggacacccggcagctgggcc

SEQ ID NO: 325906 - DNA, 127 bp, Homo sapiens
ctagaatccagaatagccctcagaagaaagattctggaggaaaggtttacaagcaggccacgattgaatctctgaaggcatacttttttgatgcaccagagatggaccatctcccaacaactacagc

SEQ ID NO: 325907 - DNA, 75 bp, Homo sapiens
ggaaacgatggcctggcaggaaatccgacatgccatcatccttctgacagatgtcaaggcggataagaaggcggc

SEQ ID NO: 325908 - DNA, 102 bp, Homo sapiens
gtttatactcccactgtgggtctggcttgccaacaatatagtttggtgtttcggaagccaaggttctgcaaatttctgcaagaatggaaccaaaggagaagc

SEQ ID NO: 325909 - DNA, 90 bp, Homo sapiens
ccgctgccgaaatgaagtataagatcttgcaggagagagagttactgcctgtgaagaaatttgaaagtgagattctggaagcaatcagcc

SEQ ID NO: 325910 - DNA, 95 bp, Homo sapiens
gggggcctcactctgcgcctgggcctccaccagcaggtctccacctctgggcaggagagttgccgaccacctcgggggtgctttctctgcgcttg

SEQ ID NO: 325911 - DNA, 74 bp, Homo sapiens
ttatgctcgagtccatattgcagaagatcaggaagggcctgtcccagtcggctttaccctatcgacgcagcgtc

SEQ ID NO: 325912 - DNA, 100 bp, Homo sapiens
gcgaagctggccaaagcctgcccagacggctcacctgtgcgggatggaacaaaagtgttcctaaacccaaaggaaagaaaaccaaagatatgaaaaaacc

SEQ ID NO: 325913 - DNA, 91 bp, Homo sapiens
gctgagtgctaaactgtgtggggcgcggatgggatccagctgttagtcgggtaggcatagctatcatggtgaacttacttcagattgtgcg

SEQ ID NO: 325914 - DNA, 75 bp, Homo sapiens
tcccggggccggtaaagggacccaggtggcaatgcagtggtggatggttgtggcaaggcccagaacagcacggag

SEQ ID NO: 325915 - DNA, 100 bp, Homo sapiens
acatataaaaatctattgtaaaaatacggaaaagaatggcagcggaaacgcagacactgaactttgggcctgaatggtagcacaggcggagtgcagcgga

SEQ ID NO: 325916 - DNA, 83 bp, Homo sapiens
gtcgcgcgcggccgagtcgcggaggcgcctccgctgcagtcgctgcgtctccaaggaagctcttcgtgggcggtcttgactgg

SEQ ID NO: 325917 - DNA, 107 bp, Homo sapiens
gcgaacacctcactattgatggtgtagcgctttaggggaagggacagggtcttgctctgtcacctaggctggagtgcagtggcatgatcgaattcctgggctcaagc

SEQ ID NO: 325918 - DNA, 90 bp, Homo sapiens
gagactaacatgtatgaaggtgtaggaagaatgaagatgagaatgtgcctactgctcctgatcctccaagtcaacatttacgtgggcatg

SEQ ID NO: 325919 - DNA, 74 bp, Homo sapiens
tttcacccgcatggaaaaccaagtgatgatgaggagtctgatgaggaagctgtgaagaaaaccaacaaatgtgt

SEQ ID NO: 325920 - DNA, 88 bp, Homo sapiens
aagacctattttactgataagaaaacacatctttacacactaagtacaggtgaacaaaggcagagtaaactgtcaccccagatgcagg

SEQ ID NO: 325921 - DNA, 82 bp, Homo sapiens
cgccgcatggaggccggctgaggagcgccgctgcctcgcctcggtgacttaagagattaaaattaatttggttgctgttggt

SEQ ID NO: 325922 - DNA, 89 bp, Homo sapiens
tgttctttcacggaggatactggcagagcggaaggatggatgacatggctgtggatagtgatgaggaggtggattatagcaaaatggac

SEQ ID NO: 325923 - DNA, 101 bp, Homo sapiens
taagagcaaagctacttccattccagaaagatggcatcatttttgccctcaaaagaaatggcaggcctcccagtagcattggatgcaggaaaaaatacatt

SEQ ID NO: 325924 - DNA, 100 bp, Homo sapiens
agctcattaaggacggctctctgctcattggggcgttgaggaaaatgcacagcggtattgatgagtagatccttggattcagaggttggctgaaacgcac

SEQ ID NO: 325925 - DNA, 101 bp, Homo sapiens
aatacagtcatggctcactgcagcctcaacctcccaagctcaagcagcaggaagatcttttgagggtgtttcagtcacctccagtaacacgggcgtgccag

SEQ ID NO: 325926 - DNA, 83 bp, Homo sapiens
ggaaccccagcgactcttttatggtgctggagaatctggtaaaagcaccattgtgaagcagatgaggatcctgcatgttaatg

SEQ ID NO: 325927 - DNA, 75 bp, Homo sapiens
aaggtacagagggtggttcaaaaggcatcaagacgagtggggagagtgaagttatttgcagtgacttaaaatttg

SEQ ID NO: 325928 - DNA, 75 bp, Homo sapiens
gccaggcagccccagagccatgaaacgaggagtgaaaaggctctcagtgtctgagttaaatgaaatcctggaaga

SEQ ID NO: 325929 - DNA, 100 bp, Homo sapiens
tcagcatcccccggctgccctaggggccaggaccggcgtgacagcctccagagcctgtggggcccggatagtcagccgaccagaggaactgagagaagat

SEQ ID NO: 325930 - DNA, 87 bp, Homo sapiens
cttcttgtgggaaccaaacaaggacatcttcttctctataggattcggaaggacgttggaaaatcaagaagatctgggcctgtggga

SEQ ID NO: 325931 - DNA, 82 bp, Homo sapiens
gaggaagtcgcctctgtgctcgtgagtccagggatctaaggctgaaggggatgctaagggagataaagcaaaggtgaaggac

SEQ ID NO: 325932 - DNA, 51 bp, Homo sapiens
gattccagaagatttaactacgtggtccggattgactggggcgactttggg

SEQ ID NO: 325933 - DNA, 98 bp, Homo sapiens
tcttaattggagaatcaagtagaaaacatcctgccattcactgtaaaaaaactagatgaacggcgcaaaaggaggcaagaagaatgggagaaagttcg

SEQ ID NO: 325934 - DNA, 74 bp, Homo sapiens
atccggggacagctgagctggcatcagaagacctacgccttcagatatctcttccaaacgcatgatgaaggagg

SEQ ID NO: 325935 - DNA, 100 bp, Homo sapiens
ctcgactgctgagcgtcgtgggctccgagagggacgcgggcggagggcaaagtgtttcccatgatgaattgcttgacttagcaaagtttcatttcggtga

SEQ ID NO: 325936 - DNA, 90 bp, Homo sapiens
atccgccagctcaagtggaaggagcacttgctctgaaatttggggactgagtacaccaaatacgatagatcagtgggatacaacaggcct

SEQ ID NO: 325937 - DNA, 51 bp, Homo sapiens
acgtgaggccgtggatgcaggcattaagactctgtccttggaagcacctgc

SEQ ID NO: 325938 - DNA, 111 bp, Homo sapiens
attctttgccacctggaagcggactgggaactttctctgcaattgcacaatcctcttatcctgatgccagtgagatgaacctggtacctcagatggaaatgcagaaatcac

SEQ ID NO: 325939 - DNA, 83 bp, Homo sapiens
agcaataccaggatagctgttgtttcagagaaagaccctacagcttggggcctgggctcctctgaccatcctcattgagaaag

SEQ ID NO: 325940 - DNA, 100 bp, Homo sapiens
tcagtgagaccaacccccaggactgctccttgtctctcaggaggccctgaggaagatcatcaaaacactggctgtgaagaatgaagaaattcagagcttt

SEQ ID NO: 325941 - DNA, 88 bp, Homo sapiens
ccgagtgctgcttggcggcgagggttacgactcactgattaaaaagagggactttttcaaatactttgcacttttgattgtgtattat

SEQ ID NO: 325942 - DNA, 101 bp, Homo sapiens
gcctcgtccagcctaggttccacccttttctgggaacgtgagtatcaaccaagactcagattgatggacaacttttcttaattaagcaccttttgatactt

SEQ ID NO: 325943 - DNA, 100 bp, Homo sapiens
gcagccgcaccacattggcgtggccgtcaaggagctggacctctacctggcctacttcgtgcgtgagcgaggttatgaagacagtatggagtttccagac

SEQ ID NO: 325944 - DNA, 101 bp, Homo sapiens
ctcgaatacattgaagccaactatggtcagaagagatcaattctacagaaatttccagtggttctgttgaggctttatggaattcagcatgtcaaaattca

SEQ ID NO: 325945 - DNA, 82 bp, Homo sapiens
cttcgagtgggtctacaccgaccagccgcacgccgaccggcgccgggagatcctggtgtactaatggtcacttgatgtgcgc

SEQ ID NO: 325946 - DNA, 100 bp, Homo sapiens
accaaaagaggaagatagtcttgggacccttgcatggtgtttcaaagggtggtgaagaactaaggtgatttgatgaaggctgctgcaggagagttcgcag

SEQ ID NO: 325947 - DNA, 51 bp, Homo sapiens
accattgctgcctacctgcccctcaaggttgacctgacagttcaagaaaag

SEQ ID NO: 325948 - DNA, 106 bp, Homo sapiens
cgagatttgggagagacgctctgaactgactgccccgcatcaccggagcgtcccagctgcgaggagcttaagagttggacagtggaggaccttcagaagaggctct

SEQ ID NO: 325949 - DNA, 100 bp, Homo sapiens
cagcctcctgagtagcaattacagtgttgaacagtcatcggatctacaggaccagttgaatcatctgttgaaatagaatgacatgtaagagtgctgtagg

SEQ ID NO: 325950 - DNA, 97 bp, Homo sapiens
ccttggtccaacacaaattgcctccttatgtctccaacatggaccgcctgggggactcggaactttcattttatctatgggccattggatcctgtaa

SEQ ID NO: 325951 - DNA, 73 bp, Homo sapiens
cgcgccaccgagtccggaccggagactttggggcctaactaggaagacagagatgtcaatgaccccatgccca

SEQ ID NO: 325952 - DNA, 82 bp, Homo sapiens
gtcgagggcgccatggcggtgaatgacggctttcccatggtttggcatggacattgggggaactctagtaaagctctcgtac

SEQ ID NO: 325953 - DNA, 75 bp, Homo sapiens
ccggcctgtgtggtggactgtggcacgggtgcacttggaggctcctcagctcttcatatcccagcttttccagga

SEQ ID NO: 325954 - DNA, 87 bp, Homo sapiens
ggtcgaggccatctcctgggccgcctggcggccatcgtggctaaacagggcctgctttcttccccgggcgatgtgcagagatctttg

SEQ ID NO: 325955 - DNA, 100 bp, Homo sapiens
ttcctgacttcttccatcctctggaaatcagctgtgaaacattgcttctcagactgtagccagattgaaagatgttgcccgtcggatttcatcatgtctg

SEQ ID NO: 325956 - DNA, 74 bp, Homo sapiens
ccgtgatgagggccgtgttgacgtggagagataaagccgagcactggcatgtggcgtcatagtagaattaatca

SEQ ID NO: 325957 - DNA, 100 bp, Homo sapiens
gcttggttaaaacctgacacttttaacagggatgattctctgaacgactgtcggatcatcttcgtggacgaagtcttcaagattgagcggccgggtgaag

SEQ ID NO: 325958 - DNA, 100 bp, Homo sapiens
tcaggatgttccgcttcatgagggacgtggagcctgaggatcccatgttcctgatgctgaacacccaaacccaggagttcggtatcctggcaccacacgg

SEQ ID NO: 325959 - DNA, 100 bp, Homo sapiens
ggagaaccagaaacatatctattatatcacagcctctgcccccattacttgtgagctgctgaacaaacaagtcaaggtgagcccggacatggccatcttc

SEQ ID NO: 325960 - DNA, 82 bp, Homo sapiens
ggtgccctcagccccgtcctcttgtcctcctcagcctcgaatgcatacacagccacagctatcaacagcaccaacttctgca

SEQ ID NO: 325961 - DNA, 75 bp, Homo sapiens
ggaaagtgccgctttaaggagaactgcaggttgactttgatcaacttcaggataatttatgtcagatggagagaa

SEQ ID NO: 325962 - DNA, 50 bp, Homo sapiens
gaatccttgcagcactaaaatttgaaggccttacgaccggatatgggcta

SEQ ID NO: 325963 - DNA, 82 bp, Homo sapiens
ctcacaaagacccaagagaaattgaccccattgtcaccagaagagaagctgcagtaaaggaagatgaagaagaagtttcaga

SEQ ID NO: 325964 - DNA, 76 bp, Homo sapiens
acacctcccacctgtcctcaggcatatcaaagaatatggttgagccccttatacccacgaattgctgatggaaccc

SEQ ID NO: 325965 - DNA, 100 bp, Homo sapiens
gggggcctctccagggagtgctctgttcacggctccatcgctgttagcatattctcaagatgcctacctgaaaggcaacgaagcttatagcggcaatgcc

SEQ ID NO: 325966 - DNA, 100 bp, Homo sapiens
cggcaccgctgcgttacccggaaccgccgggccgaacagcatgacgtccgctttggagaactacatcaaccgtgattgcagagagcctgtcggtaattct

SEQ ID NO: 325967 - DNA, 74 bp, Homo sapiens
tgagtgcttctttcttggagctgaccatgggtgtccgcaatgttgccagtgtctgtctgcagattggctaccca

SEQ ID NO: 325968 - DNA, 83 bp, Homo sapiens
gccttccggggacagccagccctcgctggaccagaccatggccgcggccttcgggcctacttggaagtgcaccagcaggagca

SEQ ID NO: 325969 - DNA, 100 bp, Homo sapiens
tggtggcataggttatgaagctaatcctggcgttccaccagcaaccatgagtggttccatgatgggaagtgacatggttcatcctaagttccactataaa

SEQ ID NO: 325970 - DNA, 100 bp, Homo sapiens
tacctcatggagcacaaacgcatcaatgggcccttcctcatcatcgtgcctctctctcttgccacttgcctagtgaggcttttccgaacctggaaggaga

SEQ ID NO: 325971 - DNA, 100 bp, Homo sapiens
aggaagtgacgtacgtccggtgtaatggcggcgcggtggagctctaggagtatgctgctgctgttccgctttgcgtcctcgctacaaacgcctggtggac

SEQ ID NO: 325972 - DNA, 100 bp, Homo sapiens
agttccagtgacagtgaggcaaatgagccatcccagagtgcatctcccgaggttcgttaccgtgaacgcatcaccattcttcgagggaatcatgagagca

SEQ ID NO: 325973 - DNA, 98 bp, Homo sapiens
cagaaggactgggatgatacaccttttccacagggaattgagttgagcttactcacatagcatattggtatatcaaaatgaaatgcaaggaaccaaaa

SEQ ID NO: 325974 - DNA, 100 bp, Homo sapiens
ttgagaaacactttgagaagacactactaggcaaataaaattttggaccattaacttaaagacgagaatacatgtatgaagtagaaatccagacataccg

SEQ ID NO: 325975 - DNA, 90 bp, Homo sapiens
ggaagtcagaggtggcgacttcaactccgtcggaggcaactcactttgttggagggatgtataggggccattatgctgtgatgaacaacc

SEQ ID NO: 325976 - DNA, 75 bp, Homo sapiens
ccggcaccttctgtgcgtcctggactcctctgagaaacagatcaggatcctcatgaccagccaaagagaagaaga

SEQ ID NO: 325977 - DNA, 75 bp, Homo sapiens
aacaacagaaaactcaaaaaccatctggtgctgtggattgcaaccttgaatccttgttagatgacttggataaag

SEQ ID NO: 325978 - DNA, 100 bp, Homo sapiens
gtggtggtgtcttcctgtctcaacgatacctattttctagtgctgagatcctgagacaatggtgattttcaaagccaagtcaaaatattctccagaatta

SEQ ID NO: 325979 - DNA, 98 bp, Homo sapiens
tccaccccgtgtccacagcagtcctagaggagcagcattcggccagagcccccttgctggattatatctacaggtggtgggatcagcaagttgatttt

SEQ ID NO: 325980 - DNA, 83 bp, Homo sapiens
tgactacctgctgtacaccctcaacaaacaccagcgctttgggaagctcttcgtgggcggtcttgactggagcacgacccaag

SEQ ID NO: 325981 - DNA, 90 bp, Homo sapiens
ggcggcggagcgcgagagcttcgagcggactcaggtgacagagctgaatgaacctctctccaatgaagatcgaaatctcctctctgtggc

SEQ ID NO: 325982 - DNA, 100 bp, Homo sapiens
cccctccgtggtgacagcctctgggtcctcggtcggtacagtctctgcacctcgcgccccagcagtgtcaaaaacggtatttcgctgcctggcacaagct

SEQ ID NO: 325983 - DNA, 101 bp, Homo sapiens
attcagacgagtctttagatacctctggacagtgccacatcgcttatccaggcagctaaaaacctgatgaatgctgttgtcctcacggtgaaagcatccta

SEQ ID NO: 325984 - DNA, 82 bp, Homo sapiens
gaaaaccaaaactgctcttctagtgccaaacgccctgatcatagcaacagtcacagacaggaaagtgctaggtggcgacagt

SEQ ID NO: 325985 - DNA, 75 bp, Homo sapiens
atagggacctgtctgaatgtaggtttgacttgcagtatccagaggaaatgtggagaaacacagttgtacagaagg

SEQ ID NO: 325986 - DNA, 100 bp, Homo sapiens
ggcaagctccagagcctgccggaaggctccctcggtcgcgagtatctccgtttcctggatgtgaacgagaaaatgcacaagctcttggaggtgtacgagc

SEQ ID NO: 325987 - DNA, 82 bp, Homo sapiens
tctgcttcgtattgaattgcttcatttggggaaagcactcatcaggagcgattttgatcttggctcctacaagagaaattgc

SEQ ID NO: 325988 - DNA, 118 bp, Homo sapiens
caaagagttatggatattctggtggggagatgaacccaacctagtgggtgtaatacatcatgaactgcaggacaatgcagatcttcgtgaagactctgactggtaagaccatcaccct

SEQ ID NO: 325989 - DNA, 100 bp, Homo sapiens
catcatttttgccctcaaaagaaatggcagagctaacacatgagtttctacaaatattggagaaaacgcctaataggttgaagaagattcgaaactggag

SEQ ID NO: 325990 - DNA, 83 bp, Homo sapiens
ccgccacagcacaacacaggtctgggagggatccctgtagcaggaattacatgaacgacagccttcgcaccgacgtcttcgtg

SEQ ID NO: 325991 - DNA, 75 bp, Homo sapiens
ttttttttcaagaactgccgtcttctttgcctgcactaatgaaagtgaagtcactgcttttgctgtcttggatca

SEQ ID NO: 325992 - DNA, 50 bp, Homo sapiens
gtgctacccggtgtactggaaccgaagtgtttggattgtgagctatttca

SEQ ID NO: 325993 - DNA, 96 bp, Homo sapiens
ccacaaacatgtaaggattgaaaggcttgtaatccaaagttactttggtattaatgctccctggaaatgctttctacgtcgatagctcagctccta

SEQ ID NO: 325994 - DNA, 82 bp, Homo sapiens
cagaaagccgcctcttggtttgcgtcctgcactgaaaggaaatgacggattttattcgacggaggcgccttgcacgacttgc

SEQ ID NO: 325995 - DNA, 82 bp, Homo sapiens
tcggtcctccacctgtccgctacgctcgccggggctgcggccgcccgaggaattgcattttgtgaaaaaagaacaagaattt

SEQ ID NO: 325996 - DNA, 75 bp, Homo sapiens
gccggagctaacctcggggaccgagatgcaggtacatgtcccagagcaagcacacggaggcccgggagctcatgt

SEQ ID NO: 325997 - DNA, 82 bp, Homo sapiens
cggaccctggaagagaagagggtggctaatgattaaggttggaagtactccatgacacacactcggagaaagtcccttccca

SEQ ID NO: 325998 - DNA, 100 bp, Homo sapiens
ggaatgggacaagacccatctttatgcaaagccagcgttacagtaatgttccagactgtgtacagtgccctgggcctgagggatgcctgccgctccctgc

SEQ ID NO: 325999 - DNA, 50 bp, Homo sapiens
ctgcacttgacaaccagcatgccgagatggatctgaacgtctatgacact

SEQ ID NO: 326000 - DNA, 48 bp, Homo sapiens
cttccagctgtttgaccgaacagagcagttgaagacatctcttcatcg

SEQ ID NO: 326001 - DNA, 98 bp, Homo sapiens
tgccgcggctacgctgaggctctccgctcaggtctgtgggttctggcaccacctgagcccactgggcatctggtcatccctggcacctctcctttgga

SEQ ID NO: 326002 - DNA, 106 bp, Homo sapiens
cagagatggacggtcactcagcctatggagggaagcagtttaagtgcacggtgtgtgactacacagcggcccagaagccacagctgctgcggcacatggaacagca

SEQ ID NO: 326003 - DNA, 74 bp, Homo sapiens
gaccaagctggagatcaaacatctccaagacgacatagatccacatctccttccccttctcgactgaaagaaag

SEQ ID NO: 326004 - DNA, 98 bp, Homo sapiens
gatgcttcccccagggtcacttctcagacctcagagctgggtgtgaccgagcacgtggagggcgatccctgcaaattcgccttgtggtctgggcgcac

SEQ ID NO: 326005 - DNA, 75 bp, Homo sapiens
ccagacacatgagggaagacatggagtacataggcctggactcagaataactgcacaaagacttgcccacctgaa

SEQ ID NO: 326006 - DNA, 101 bp, Homo sapiens
actgccaagagaagcttctgagagaggtagacgtttttaaggagaaacacgaactttatattgctgttggaatatctggagccatccaacatttagctggg

SEQ ID NO: 326007 - DNA, 100 bp, Homo sapiens
cacccatctgtacatcctatgtcaactgcttctcaggtagcaagtacatggggagcactatgttggccatggaaatgctatcaatgagctgaaattccat

SEQ ID NO: 326008 - DNA, 50 bp, Homo sapiens
cctagcgcaatgaggcgggcagcactgcgaggttgcagaacttgaagcta

SEQ ID NO: 326009 - DNA, 51 bp, Homo sapiens
attacctacagctggtatgacagaccctgactgcacctgccccatttgctg

SEQ ID NO: 326010 - DNA, 75 bp, Homo sapiens
gaatgccacagcatcctccagcacctcagtaaaccaagaggagttcattgctattatgactggtgacatttaaag

SEQ ID NO: 326011 - DNA, 75 bp, Homo sapiens
ctgatttcatcctcaagtttccgcacagcttcttggacacttaatgattgttggcaagaaatgtgctgctgatct

SEQ ID NO: 326012 - DNA, 74 bp, Homo sapiens
tgagagccggacgggcactgggcgactctgtgcctcgctgaggctgagatgccgcggcagtttcccaagctgaa

SEQ ID NO: 326013 - DNA, 94 bp, Homo sapiens
tccattggtaaattgatcaggatttttggcctaccctccaaagaaaagtgatgtcttggcattgcccattttcaagcaggaagattccagcctt

SEQ ID NO: 326014 - DNA, 98 bp, Homo sapiens
gcaagatagccatttcctcaccgacgccgacatggtcatgagcttcgtcaacctcgcacttgcacctcctgcgccgccgccccccatccaaggatatg

SEQ ID NO: 326015 - DNA, 82 bp, Homo sapiens
cggcgctcgagggcgtgctcagcaaatacaccaacctcctccagggctggcagaacaggcatcaagcatgatggaaccatgt

SEQ ID NO: 326016 - DNA, 50 bp, Homo sapiens
aagaccccagttatggatgggagctgaagaataagttcatgaaaaaattg

SEQ ID NO: 326017 - DNA, 50 bp, Homo sapiens
aagaaaggattcgttacagccagagattgaatgtgaaggctgtgtctgag

SEQ ID NO: 326018 - DNA, 75 bp, Homo sapiens
accgcatctttgccaacactgaaagctatcttaaagttaaacatgaagtttctggagagacagtggtatttcaag

SEQ ID NO: 326019 - DNA, 100 bp, Homo sapiens
cccaggtctccgtgcagcccaacttccagcaggacaagaacatagataccctggagcgaatagccgggctggaacaggaggacttggtggaggcgcacgg

SEQ ID NO: 326020 - DNA, 132 bp, Homo sapiens
acacttcaccctctcgcctcgggtctcgggggccgctctgggatcccggccaccagcaattgtccgtttggaaattttagcattcaggtgccaggaatgcagatgggacagccagtgccagaaacaggccca

SEQ ID NO: 326021 - DNA, 75 bp, Homo sapiens
gggaatcggtcgcctggaggaccagtatttcccatggaggattgatatcagtaaatgccattatttagtggattt

SEQ ID NO: 326022 - DNA, 83 bp, Homo sapiens
cggggtcccaggaagggcggcccaggtgtggacactgccagcggctgcagccgacttggaatgacctgggagacaaatacaac

SEQ ID NO: 326023 - DNA, 110 bp, Homo sapiens
attattttgggtcttcttcttaatcccatatctggacatctggaacatccatggaacttagtgatttggcccgtgaccctccagcacaatgttctgcaggtccagttggg

SEQ ID NO: 326024 - DNA, 98 bp, Homo sapiens
ctgagcacgagaaccggatcagccacatctgtactgacaacgtgaagacaggcattgcaaacacactgggtgagaagatgacagaggaagaagtagag

SEQ ID NO: 326025 - DNA, 96 bp, Homo sapiens
caggaaagagatgcgccaattgtaaacaaagtggtgacacgtgctggagaatctggtaaaagcaccattgtgaagcagatgaggatcctgcatgtt

SEQ ID NO: 326026 - DNA, 100 bp, Homo sapiens
ctcgcctgcgaagcatcacgtccgcttcccgacgctgagggcagccccgtccaggcatcgagagtaaacatgaggttacgatcctgggaggacttaatga

SEQ ID NO: 326027 - DNA, 75 bp, Homo sapiens
aacatctcaccaatttcaaatccggatttgcagatttacagaatggctgcacattaatggaaagagaagcataaa

SEQ ID NO: 326028 - DNA, 90 bp, Homo sapiens
aggactcagatgagcaactggattatactgtactgcccatgaaaaaggatgttgaccggacagcactgccccccaggtgttgagtaccag

SEQ ID NO: 326029 - DNA, 101 bp, Homo sapiens
cgctccagaagcttcactttgcgtttgctgccaattgatggggcaaatgatctcttttttcagccacctccactgactcctacctccaaagtttatactat

SEQ ID NO: 326030 - DNA, 75 bp, Homo sapiens
gtttgaagtattggaacgagcaagaaggatgaatcgaccttatcagaagcttttagagaagcaaatcttgctgcg

SEQ ID NO: 326031 - DNA, 98 bp, Homo sapiens
aaggcccgggagaggcagcgagccttgttcgggagtctagcagttctcgctcaccaaccccaaagcagaagaagaagaaaaagaagaaagatagagga

SEQ ID NO: 326032 - DNA, 109 bp, Homo sapiens
gcctcctcggagtccttggggacggagcagcgcgtcgtggggcgagcggcaggtgagaagccctaccactgcaactgggacggctgcggctggaagtttgcgcgctcag

SEQ ID NO: 326033 - DNA, 90 bp, Homo sapiens
tgaaaagctagagaaatcagatgaaagtaacttgcctgaaatttctgagtatgaggtagaacgtcatgacatgaataccttaagcctgcc

SEQ ID NO: 326034 - DNA, 50 bp, Homo sapiens
gggcggcgtgcggcctagcgtctcagagtgaattactggaactgaaacgg

SEQ ID NO: 326035 - DNA, 124 bp, Homo sapiens
ctacattgaacgggtgcagcgggaaaaggctaatggcacaactgtccacgtaggcattcaccccagcaagctggttatattctgggcactaaatgaaggcgtttctaggcaatttgattcgttc

SEQ ID NO: 326036 - DNA, 100 bp, Homo sapiens
atgtggacagcagagggattcttaggagagcttactcacatagcatattggtatatcaaaatgaaatgcaaggaaccaaaaataacataattgaaggcag

SEQ ID NO: 326037 - DNA, 75 bp, Homo sapiens
aaatcatctccatattctcaggcacagagaaagcttggctgaagaggaaataaaaacagaacaggaggtggtaga

SEQ ID NO: 326038 - DNA, 100 bp, Homo sapiens
gagctgaccctgggagacatcgacgggggaaggatttgaaagaacagcatgatcagaaagtatgtgagagggagatgcagcgaatcactctgcccttgtc

SEQ ID NO: 326039 - DNA, 100 bp, Homo sapiens
gagaccgtgaccgagagcgtgaccgagagcgcgaatatcgtcatcgttagaagaaaagcaaactcaagttcctgcctcctcaggcggagcaagaagactc

SEQ ID NO: 326040 - DNA, 75 bp, Homo sapiens
ctcgcctgcgccccgcacccctccgagcagcccggggatccagcacgcaggaagtgctctctggcgtggtggtca

SEQ ID NO: 326041 - DNA, 51 bp, Homo sapiens
accagactggctacgtggagtactacagacagggtcttgctctgttgccca

SEQ ID NO: 326042 - DNA, 97 bp, Homo sapiens
ttttgatgtggatgatgccaaagttttattagtgtggcaaaggagcagagaactttgacaagttcttcacacgaggacagcccgtcttaacaccacc

SEQ ID NO: 326043 - DNA, 100 bp, Homo sapiens
tcccctttctcttggttttgtccgtctggtggtctcgaacctgggactcggcgaatgcggattcgatcattcacatcgggtgttttgaatgctgtatcaa

SEQ ID NO: 326044 - DNA, 75 bp, Homo sapiens
cagcgtcctcatgtggggggtaaaccactcggttaatttggagtggcccctggagtcagtttcctacaccatccg

SEQ ID NO: 326045 - DNA, 100 bp, Homo sapiens
cttgggtgaaattgttaggcgtggagagggagtgatgtcttccagactcggtgctgtacccgccctgtctcctatatataatctggttccagtgaaaatg

SEQ ID NO: 326046 - DNA, 100 bp, Homo sapiens
gtccaaagcagtcgtaagaagaggtcccaatcccccactctttccgccctaatggaggtctccagtttcgtttggtggtaatccatttgcttccttggtg

SEQ ID NO: 326047 - DNA, 87 bp, Homo sapiens
aagatgaggaggtcgctgagagctgggaagaggcggcagacagcgggggtgaaggttgccgaactgtccccctggctggacatgtgg

SEQ ID NO: 326048 - DNA, 100 bp, Homo sapiens
aaactttgaggacaggaatgcatttgtcacgggcattgcaaggtacattgagcaggctacagtccactccagcatgggacaggtgcctggtgctgctctt

SEQ ID NO: 326049 - DNA, 81 bp, Homo sapiens
gcagtaccgcctccttcccagccgcgcggcttcctccagacctctcggcgcggggcctcactctgtcatccaggctggagt

SEQ ID NO: 326050 - DNA, 88 bp, Homo sapiens
gctgcacctcagcctgtgtggccgtctataagctgtttttggaaggaagaaagatggaaagcggtgcagttctgctggaatccaaatc

SEQ ID NO: 326051 - DNA, 50 bp, Homo sapiens
agattactctgcaacagctaaagttggttgaatctggcgatgtggaaccc

SEQ ID NO: 326052 - DNA, 82 bp, Homo sapiens
ggattcgttactgctttgcaacgcgcacctaactccagattggtgtctccgctgtgcctggctccgtatttccggttactga

SEQ ID NO: 326053 - DNA, 74 bp, Homo sapiens
gagaccgcggccgggaccgaggatctcctgggaggcccccgtggagaagaagactgagtgtatccagaaaggga

SEQ ID NO: 326054 - DNA, 73 bp, Homo sapiens
aaaattcttgaaacatggggagaactgttgtcaaaatgatgactctgaaggagtttgccataatgaatgagga

SEQ ID NO: 326055 - DNA, 98 bp, Homo sapiens
ccactattttcttcctgcccctcgttgatgagagcattcgaagtgacctcagcagggcatccagggtcgttggtttgattcagaagagaagaaagggg

SEQ ID NO: 326056 - DNA, 75 bp, Homo sapiens
atggtggtgtagatatgaatgaaccacttatggaaataggagaggtagcagcaattgcagagacagatgaatctg

SEQ ID NO: 326057 - DNA, 59 bp, Homo sapiens
tttgaaatgggctgggaaaagccatctcctattcaggtccaaccagctgtacatttgga

SEQ ID NO: 326058 - DNA, 50 bp, Homo sapiens
ccagcgcctcttctaccggggcaagcagggtaacaagatgctcaactata

SEQ ID NO: 326059 - DNA, 97 bp, Homo sapiens
ctccagtaagggagggcaagaagatatgaacctgagccttcagtcaagaccctccagcttgcctatatccaaacacagcctgtgagcttctgacttg

SEQ ID NO: 326060 - DNA, 75 bp, Homo sapiens
ctgacatgacaaggagccgtcgtcgttaggcttgttagcagtggcacaagatcttacagaggatgaagaaacagt

SEQ ID NO: 326061 - DNA, 100 bp, Homo sapiens
gccgcattactacaggagaaagaacatttccatcaaaccctgagagctttattaccagacatgatctttcaggttccttttgaggatggccacacagaca

SEQ ID NO: 326062 - DNA, 100 bp, Homo sapiens
ttcacactgcagaactgggttctggactttgggcgtcccattgccatgaaccattgttccagacttctttgtagggcaagagccttgggacccctctggc

SEQ ID NO: 326063 - DNA, 82 bp, Homo sapiens
cgcgtgtctaggtgagtcgcggtgggtcctcgcttgcagttcagcgaccacgcggagcgtgctttggacaccatgaattttg

SEQ ID NO: 326064 - DNA, 75 bp, Homo sapiens
gggactctgaacttccctggtcgaacagttttttctaatggctattcaaggtcacgagaagagaatgccttctag

SEQ ID NO: 326065 - DNA, 110 bp, Homo sapiens
gccttggtcagtttcccccccagactgctgcttccccggatgagcagaaggtgtttgccctctgggagtctggagacatgagtgatcagctaacaggcctcacctcttcc

SEQ ID NO: 326066 - DNA, 97 bp, Homo sapiens
ggggcagtggtggcgaggacagctggccgccgatattcaccaagcgcttcgctacaagattgctcgctgtaagcagctcatctgtgaccccagctac

SEQ ID NO: 326067 - DNA, 80 bp, Homo sapiens
cgacaagccgctggcagccgcggatctcaccgccgctcaggtgaaaatgcctcgtgtaaaagcagctcaagctggaagac

SEQ ID NO: 326068 - DNA, 100 bp, Homo sapiens
gaaaataaaaaatggcagtaaccctgagacaaccacttctggtggttgccactcacctgaggatatatcattctctgctggaactgggtgagaagcgtaa

SEQ ID NO: 326069 - DNA, 83 bp, Homo sapiens
gtctggagtgcgtgggggaccggctgttggcgggtgagcatgggtttatgcgtcttaggcattattgtgatggcgagcaccaa

SEQ ID NO: 326070 - DNA, 108 bp, Homo sapiens
caacggcagaagcttcaccacaaaagcgaaatgggcacaccacagacatccttgaaatacaatattctcccagaaaaggaagagttcccctttgctttaggagtgcag

SEQ ID NO: 326071 - DNA, 100 bp, Homo sapiens
cggccgcaggcgggacccggcggggcgcaccacagagaccggcttcaatatcttcacccagcatggaagatgatccctatgatcttgaagatgtttctgc

SEQ ID NO: 326072 - DNA, 83 bp, Homo sapiens
gccaaagaactggctaggcaaataagctttaagacatatctgaagagatggattaagaatgctttggattaaggattgtggag

SEQ ID NO: 326073 - DNA, 100 bp, Homo sapiens
ctcttgggttccatgctgacctgtaaagctgccatgaggactatgattcaacaacagggagggtctattgttaatgtagcagataatctcagtgatacct

SEQ ID NO: 326074 - DNA, 100 bp, Homo sapiens
tttatcttaaacttagcagagaggattttctgtcatggaaaaagcttggggtattaatctctggagaagacacatccacagttagcactttcttcagatg

SEQ ID NO: 326075 - DNA, 100 bp, Homo sapiens
ggccagcggagccctgggctggggcaggagccggcttcaacggaccacaccaaaatgccatctcaaatggaacacgccatggaaaccatgatgtttacat

SEQ ID NO: 326076 - DNA, 100 bp, Homo sapiens
gaagcggccccagcactcccagctgcgcagggcctgccaggtggcgctcgtgtaaacaggaacatcgataagtagtgtaaaaacttgcacaatgaaatcc

SEQ ID NO: 326077 - DNA, 74 bp, Homo sapiens
ttggcatcctcctcactcgctacacagcccagcagttccgaaatggctttcctcggagacgggtggcatgggga

SEQ ID NO: 326078 - DNA, 75 bp, Homo sapiens
aaacttcagtgatttagatcagatttatccacctatcaatgtgctgccctcactatcacggttaatgaagtctgc

SEQ ID NO: 326079 - DNA, 74 bp, Homo sapiens
gagcgcgaatatcgtcatcgttagaagaacaacatagacgtttgtcctgaatgtggtcacctgaaacagaaaca

SEQ ID NO: 326080 - DNA, 100 bp, Homo sapiens
gtttgctgcggcaaggacgagccggggcgctgaagttcgccgtgtcccaccaagattctctatcccacccactaatcatgaaatcatgccaggcggaagc

SEQ ID NO: 326081 - DNA, 100 bp, Homo sapiens
tggggctggcactaagccatggcccagggaagactgggggacccactaggccagatcttgaagatactcacagggaagatagtggtggggcatgccatcc

SEQ ID NO: 326082 - DNA, 100 bp, Homo sapiens
agatggtggccaggaagaacacggtgctgggtaggccaggtttcagcatcgcagacaagaagcgcaggacaggctgcattggggccaaacacagaatcag

SEQ ID NO: 326083 - DNA, 100 bp, Homo sapiens
tactggaggtgtacgtggccatctgcagggtgattctgggggtccacttgtctgtaatggtgtgcttcaaggtatcacatcatggggccctgagccatgt

SEQ ID NO: 326084 - DNA, 98 bp, Homo sapiens
ggaagaggtggccataccgttgaccgctcctccaactaaccaacataaatgaatgcgaagttgagccttgcaaaaatggtggaatatgtacagatctt

SEQ ID NO: 326085 - DNA, 75 bp, Homo sapiens
gcgaatatcgtcatcgttagaaggattgacttctaaggactcttggtacatgaggaagaaacccggaaggggaag

SEQ ID NO: 326086 - DNA, 88 bp, Homo sapiens
tgatgacgaagctcccaaaaggcagactcgtcgaagagcggctaaaaacgttagggacccccatcaaccgaatccccatcatggccaa

SEQ ID NO: 326087 - DNA, 82 bp, Homo sapiens
tgccttctgcgccagccacacaaaagttcccaaggtcctggtgaaaggttgatgataattagaagcatgctttccactgaac

SEQ ID NO: 326088 - DNA, 98 bp, Homo sapiens
ttccgagttagaaatcctacaaaggaccttccagagactgctgctactttgaaacgtacgatagaggccctgatggacagaggagcaatagtgaggga

SEQ ID NO: 326089 - DNA, 100 bp, Homo sapiens
aagaccattcagatgggatctttccggatcaatccagatggcagccagtcagtggtggagatttctaccactccaaacgccggctgatcttctccaagag

SEQ ID NO: 326090 - DNA, 75 bp, Homo sapiens
gtccgagccagccgctgttttgccggaggagcccctcaggccgtcattgaatctttgggaattattatttataaa

SEQ ID NO: 326091 - DNA, 83 bp, Homo sapiens
ctctagtaacccgcgaaatgatgggatagcgttgcaaatccttaaaagagtcttaacggtagctacagcaagctgggtagcag

SEQ ID NO: 326092 - DNA, 87 bp, Homo sapiens
aatatggcggaggcggaaggggaaagcctggagtcctggctcaggcgccctgcgtccggcagaggaggcgagcatcccgctcaggtg

SEQ ID NO: 326093 - DNA, 100 bp, Homo sapiens
agttagcagtcacgacctccagcacaggtattgttgcagcatctggcagtgagactgaggatgaggacagcatggacattcccttggacctttcttcatc

SEQ ID NO: 326094 - DNA, 82 bp, Homo sapiens
gcgggatcccagcctcaggcgtgcgcggacggtgtgcggttaccatggtttgggaccacagagatcacgtcaacaacagcct

SEQ ID NO: 326095 - DNA, 50 bp, Homo sapiens
ggtagaagaagatgaacccacagatttgagatgcccgagtggtaaaagac

SEQ ID NO: 326096 - DNA, 100 bp, Homo sapiens
ccagcgctttggatgccgagagcgagtatctggttcactaccttatggttctgtctgccaactgggcctatgtgaaagacgcctgccggatgcagaagta

SEQ ID NO: 326097 - DNA, 109 bp, Homo sapiens
ggcgggcgggcgagcgaggggctaacttcagcggtggcaccgggatcggttgccttgagcctggcagatgtaattgttaattctgtaaacccacatgatattacagttg

SEQ ID NO: 326098 - DNA, 75 bp, Homo sapiens
aagaaaaaagtaaactacttgaaaaatttagccttgttcaaaaagaggtactggttttggattaggaattgtttt

SEQ ID NO: 326099 - DNA, 100 bp, Homo sapiens
attgaatgttttatgaatgatgttgatgtatctggaactatgaataggttagctgctgaatcaaagcttcaaacagaagttaaagaaggaaaagaaactt

SEQ ID NO: 326100 - DNA, 50 bp, Homo sapiens
cgagggcgcctacggcatggtgtggacggcccccaagttacatgaactac

SEQ ID NO: 326101 - DNA, 100 bp, Homo sapiens
ggatgacatatttttggacctgaaacagaaattctggaacacctatatggttaatttggagtggcccctggagtcagtttcctacaccatccgaggcccc

SEQ ID NO: 326102 - DNA, 75 bp, Homo sapiens
gccttggagaacagcacgtccccgctgagtggaatgaagccaagagtgatgaaagaagctgtatctactccatca

SEQ ID NO: 326103 - DNA, 73 bp, Homo sapiens
ttggccatcccaaagctattctgggggcaacagaggtgcccctgggcgctgggattgctctagcctgtaagta

SEQ ID NO: 326104 - DNA, 75 bp, Homo sapiens
cccagcagatggagaatagaccctctgtccaggcagcattaaaacttaagcagaactgataaatttcaaacggaa

SEQ ID NO: 326105 - DNA, 75 bp, Homo sapiens
gaatttccatgtcaacatagtccagtgccggtggtggtgtgcacattgagccccggtatagacagttcccccagc

SEQ ID NO: 326106 - DNA, 82 bp, Homo sapiens
gatgttgatcactgaaaatgatttatgcaagtttaagatatgtgtcacaaagatgtctacacggaactgccagggaatggac

SEQ ID NO: 326107 - DNA, 82 bp, Homo sapiens
actagacacaaacttcctggcaccttgattttggacttcatagcctctagaactagccccccaagatgaacccagtggtgga

SEQ ID NO: 326108 - DNA, 100 bp, Homo sapiens
tacttacaagacctggtgaaggtggaacggggctcccaggacctccactaatcaccagaacaaaatgtgcagactgagaactatgagcagagaatacgtg

SEQ ID NO: 326109 - DNA, 90 bp, Homo sapiens
agggcggtaaggatttcaacatgcctctgacaatctctagtttcgatcctttggtacagaagacagaccgacagatcgtccaataccacc

SEQ ID NO: 326110 - DNA, 100 bp, Homo sapiens
tcttcctcgagaggcaggcaggggatcccggacgacagagcgggatgccaccagcttgtccaaagggaagttccaggagctcctggtgggcatcgttgtg

SEQ ID NO: 326111 - DNA, 75 bp, Homo sapiens
gccccaggatgccgtgggccgcagccactcaggactgtcaaagatcaggatcctcatgaccagccaaagagaaga

SEQ ID NO: 326112 - DNA, 90 bp, Homo sapiens
ggacagaggcaagcaggggcgccgtgggtgccagagaggcggaagaggaggcctgatggggttgtgggctgcacactgcagaaagataca

SEQ ID NO: 326113 - DNA, 74 bp, Homo sapiens
tcggtgctgtggtgcagagctagttcctctccagctcagccgcgtagatcggcttcagctccccaggaatatga

SEQ ID NO: 326114 - DNA, 95 bp, Homo sapiens
actatggcaacaagtacaagcggcgggtgccccggcggagctggagtttgttcagatcatcatcatcgtggtggtgatgatggtgatggtggtgg

SEQ ID NO: 326115 - DNA, 82 bp, Homo sapiens
aagcctggagactcgcaacaagatcccctatgagagtcccatcttcagcagagtcacaaggacatagtagctgaggggttgc

SEQ ID NO: 326116 - DNA, 51 bp, Homo sapiens
acaaacattttggaaattacagactgactggagctctcccgtgtcagctcg

SEQ ID NO: 326117 - DNA, 50 bp, Homo sapiens
ctacagtcatcacaatggtctggatgtgatgtcttggcattgcccatttt

SEQ ID NO: 326118 - DNA, 82 bp, Homo sapiens
cgaaaggtggttttgatcaccggggctagcagatgacttcaaacctgcttctattgacacttcttctgaaggataccttgag

SEQ ID NO: 326119 - DNA, 75 bp, Homo sapiens
ggcgcagggaaggagggcgtccgagtcaacaaccgcttcgagctgacttgcctcctcatgcggcagcagcacgag

SEQ ID NO: 326120 - DNA, 96 bp, Homo sapiens
gtttgttgatggcaacaaccctttccaagcagttcaagaagggtgttttgaatgctgtatcaaatgcctggggggcattccctatgcctctctgat

SEQ ID NO: 326121 - DNA, 75 bp, Homo sapiens
aaggtggcctaccaggaggccaggggtgtcgccatgcttcgctgatcctgcaagctccactttctgtgtttgaag

SEQ ID NO: 326122 - DNA, 51 bp, Homo sapiens
cccaaggcgctgccctgcgcaggcattcgttcagtcagagagcataataga

SEQ ID NO: 326123 - DNA, 76 bp, Homo sapiens
agggaatgccacagcatcctccagcacctcaggaaattgcaagacctaacatggctgaaagagaaacagaaacatc

SEQ ID NO: 326124 - DNA, 96 bp, Homo sapiens
cggggctgcgccgtccccagctcaggaacctgttttgttcactggaacaatgaggaaaaacctggatccctttaatgagcacacggatgaggaact

SEQ ID NO: 326125 - DNA, 90 bp, Homo sapiens
gatgagcgaagttatagcaaatcaaggtccaccgtttatatcagagagccttacagaagttacctctttgtgcatcactgtggaaagatg

SEQ ID NO: 326126 - DNA, 96 bp, Homo sapiens
tgatcatcaccatgctggtcgccaccgccgtctgctgttacctcttggcataattggaatatcatttggagaaagtgtcatggaagttctgcgtcc

SEQ ID NO: 326127 - DNA, 80 bp, Homo sapiens
aggcggcgccatcttcgaacttagacttccggaaggactttggcgagggtgagaagccctaccactgcaactgggacggc

SEQ ID NO: 326128 - DNA, 100 bp, Homo sapiens
aggacatctgggggccacaaatgctccttctcctggagacgcaactcaagatgaatgatggaccactctgcaaatgcagcgcaaaggcaagacgcacagg

SEQ ID NO: 326129 - DNA, 50 bp, Homo sapiens
aaccgcgcggccgaaccctccggaacaatggcgctgtcttcagtggcaca

SEQ ID NO: 326130 - DNA, 75 bp, Homo sapiens
ccaccaagcatcccattacagatagaagaggaaacaacagttccaggccaggtgcgatggctcatgcctgtcatc

SEQ ID NO: 326131 - DNA, 100 bp, Homo sapiens
ctactcaccgatttgaagattcaatatactaaggttaaacccatccagagtaatggctgcggccttacccaggaccctgggggagttgcagctgtataga

SEQ ID NO: 326132 - DNA, 75 bp, Homo sapiens
cgtaatgagcgtcaaaattatccgaaaccgcctcactgggcaccaccaggaccagctgatcattccagcccacag

SEQ ID NO: 326133 - DNA, 51 bp, Homo sapiens
tatgttatgggctatttgtgtagcagaagggcaaagcccaacaccttcccc

SEQ ID NO: 326134 - DNA, 98 bp, Homo sapiens
ggagtcggacctctatgccatgaacttcaatcccatcatttccagaaaggacatcacaggtgtgagatcaaccatgagttccgttgcagttttgaccc

SEQ ID NO: 326135 - DNA, 96 bp, Homo sapiens
aagaaacagaccaaatgtgcagagcattggggagtcagcaatgtccgttgtgttaaatcagctgctgcccatgattaagcctgtaacccagagaac

SEQ ID NO: 326136 - DNA, 75 bp, Homo sapiens
cgacgcagaagacgggtgatttctgcatttccatctgagcaaccccaaggtccaggtggaggccatcgaaggggg

SEQ ID NO: 326137 - DNA, 90 bp, Homo sapiens
tgcgaggcctcccgggctccgggaaaactacactggccaggatcttaaatgtatttcggcattgggttgaacatcatttttatgactttg

SEQ ID NO: 326138 - DNA, 100 bp, Homo sapiens
cgcatcatggaaaagcagttgctcgaagaactcgagcgacagagacaagctgagcttgccgcacaaaaagctagagagccctggtacctgacagtgtaaa

SEQ ID NO: 326139 - DNA, 100 bp, Homo sapiens
gttgatactcacatggtggaattatattgcccttggccaaccctaaagccatcaagatagcagatgtaagtgggatctgtggatctgaaaattcacagtg

SEQ ID NO: 326140 - DNA, 74 bp, Homo sapiens
caaaactcccgaagccccagctggagcagccctactctgatagatgtactgccaaatctgtcgaaagggagata

SEQ ID NO: 326141 - DNA, 82 bp, Homo sapiens
cagaaggggagacacattttatgttgtgtcatttcgaagggcacagaccccacaggctcctcggacactgggtccatcacct

SEQ ID NO: 326142 - DNA, 76 bp, Homo sapiens
ctgtgataaagttggtcagtctcgcactggtcatttccctcaaagcttctgaagagtcatcctttgagaaaacaaa

SEQ ID NO: 326143 - DNA, 76 bp, Homo sapiens
ggtaatgttgcatctgtggagctaaagtgacattccaagcctgcagtatatctgaggccagatacctttatgatca

SEQ ID NO: 326144 - DNA, 90 bp, Homo sapiens
tgggccagccacctggtgtccgccctggtacctgacagtgtaaagaaggagctcctacaaagaataagaacattccttgctcagcatgcc

SEQ ID NO: 326145 - DNA, 100 bp, Homo sapiens
tgtggccattgagcacagcagccgtcctatcaatgtgattaagtagaggaccgaaaacactttggagctgtagaagctaaaccagaattgtccctagaag

SEQ ID NO: 326146 - DNA, 75 bp, Homo sapiens
gaagagacctggagccgacagacgggcaacgggcatgaggaggtagttgcatgcgcctgggatggacagacatat

SEQ ID NO: 326147 - DNA, 82 bp, Homo sapiens
gcctcgataaacagggccgtgccgcagatgcccaccggaatggagaaggaagaggagtcgacctgcctagagctggaacgtt

SEQ ID NO: 326148 - DNA, 50 bp, Homo sapiens
gcatttcatggctatcatctacacagctcatggtgacacccagcactgcc

SEQ ID NO: 326149 - DNA, 101 bp, Homo sapiens
ccgccggctaccatgtccgcccaggcgcagatgcgggccctgctggaccagctcatgggcacggctcgggacgagtttgtgaagatgatgtctcgctgagg

SEQ ID NO: 326150 - DNA, 83 bp, Homo sapiens
gatctcattaataagaagattactcccccttttaacccaaatgtgacaatgcagatcttcgtgaagactctgactggtaagac

SEQ ID NO: 326151 - DNA, 50 bp, Homo sapiens
actggctgagggcagagactctcccggagccttcacgtaaatgggtccag

SEQ ID NO: 326152 - DNA, 50 bp, Homo sapiens
ctgaaccgcgcggccgaaccctccgatctggtggctggacccagagctga

SEQ ID NO: 326153 - DNA, 90 bp, Homo sapiens
gagctgaatatcgaggccaaggacaggatcccagtttcctacaagcgaacaggattctttggaaagatttttttcccaggaagccatccc

SEQ ID NO: 326154 - DNA, 100 bp, Homo sapiens
ttcaaaaaggataaggagatcatagcagagtacgatactcaggtcaaagcccgaggagttgcagaaagaacaccaagcttcatgtatccccagggcaccg

SEQ ID NO: 326155 - DNA, 75 bp, Homo sapiens
tcagagttctttgtggatggacttgattctgatgagaggtgacttaagagattaaaattaatttggttgctgttg

SEQ ID NO: 326156 - DNA, 100 bp, Homo sapiens
aaatcgcctcccgagaagaagttgaggcgctatgaaagaccacagcaagattctttcattcgtctcctcctagcctgggggaccaggctcgaactgaccc

SEQ ID NO: 326157 - DNA, 73 bp, Homo sapiens
tgggaatttccaaggggattcaaacttcaacagaatgtggcaaccagattttccgcagatttccagtggcccc

SEQ ID NO: 326158 - DNA, 75 bp, Homo sapiens
tacccacctagaagaggtgatgatagctttggagacaactatgctccaggaagcccaggtgtttcgaggacttgc

SEQ ID NO: 326159 - DNA, 82 bp, Homo sapiens
cggcgggaaccggctccggagcgagaacgcgcggttgtgagtcccggcccagcccctccacccccctgcccccccgatgcga

SEQ ID NO: 326160 - DNA, 71 bp, Homo sapiens
acgtgacggtcatcggcggcgggctgatgggcgccggcattgcccaggcattagtatcatttgaagacgtg

SEQ ID NO: 326161 - DNA, 100 bp, Homo sapiens
gccagctctgccatcgatgtgttgggagaaaccttgtctccagaaaatccatcaaagatgcccttcccctataaggtgctcaaagccctggatccagaaa

SEQ ID NO: 326162 - DNA, 75 bp, Homo sapiens
gtgctgtaaacatcaaaagaagacggtgggatcaggagatgcacactgatttatgtcagtacatggacaagcacc

SEQ ID NO: 326163 - DNA, 95 bp, Homo sapiens
cttgccaaccctcccaagaagttcagaggtgctttggaaataccagccagctcatgcatcttaagataatataaaatcaatggactctgacctcc

SEQ ID NO: 326164 - DNA, 100 bp, Homo sapiens
tacagaaccttgtgttttacattgaagctgcatataaaactgctgttacaggaaatacaggaggcagaggaacaaataaaagacaccacgagaaacagac

SEQ ID NO: 326165 - DNA, 99 bp, Homo sapiens
ttcaatcaattctttgtgactcctcgatcttcagttgagaaattgagggtgctgcaaaggaagcttgaggaacacgaagaatccttggtgggccgtgct

SEQ ID NO: 326166 - DNA, 100 bp, Homo sapiens
ttgtgacctgccagcttcaggatgcagatgggaagttcctctccaatgacacggtgcagctgaacgtgaagcggcttccgttacaagatgaggtctgtgt

SEQ ID NO: 326167 - DNA, 83 bp, Homo sapiens
cccagaccctggagcctcagttggaagcagccgatccagcctgcggagcctgtggggcagcctgacatttaccccggtaactg

SEQ ID NO: 326168 - DNA, 100 bp, Homo sapiens
atagctgttgatggctcaggaactaaaattccaaatcctttatttgatctggctggaataacgtgtggacactttctggtacctttttggaccttctttg

SEQ ID NO: 326169 - DNA, 75 bp, Homo sapiens
caacgatcggaactcggacacgctgatccaccttgagatcaagccggccatccggaaccagatcatccgcgagct

SEQ ID NO: 326170 - DNA, 78 bp, Homo sapiens
tggggcctcattttggatatctgtgataaagttggtcagtctcgcactggtggtgccaccgaacatcgcagaactgaa

SEQ ID NO: 326171 - DNA, 100 bp, Homo sapiens
tcttcttcctcttcttcctcctccgctaccaccaccacaccagaaactagcaccagccccaaatttcgagaagaagttgacagacagctgtgcagagatg

SEQ ID NO: 326172 - DNA, 100 bp, Homo sapiens
ctgggaagagagcagccaggggcggacgaaaccatcggtagactccacaaggaagtcctggctgagcaaggttggaagccctagttctcgcattgaccgc

SEQ ID NO: 326173 - DNA, 75 bp, Homo sapiens
cctgtttggagagaacagcgatctgaactttctggggaacagaccagttgtgttcttcctgtccaagatccggtc

SEQ ID NO: 326174 - DNA, 75 bp, Homo sapiens
tccctgcttaacgagaaccatagagtgttgcggagataggaacatgggagagaaacaatctgggtaacatgaaag

SEQ ID NO: 326175 - DNA, 58 bp, Homo sapiens
gtgattttcctgcatggattgggagatactggccactgaagatcctggtgtcgccatg

SEQ ID NO: 326176 - DNA, 96 bp, Homo sapiens
gtaatgctggtggtctgcatcaccaccggatcaacttcgacaaataaaatattattcatctgtgccagaggaaggaggggcaacccatgtctatcg

SEQ ID NO: 326177 - DNA, 74 bp, Homo sapiens
cggggaaccgcagcgcagtgacagtgcagaaccccggcgcggcccttgaactgataaatttcaaacggaagaga

SEQ ID NO: 326178 - DNA, 97 bp, Homo sapiens
tgcaatgacgagggcctggagtgtgtgcccactgaggagtccaacatcaccatgcagagaacggagaccaacctgggctgaagaaagaagattaaat

SEQ ID NO: 326179 - DNA, 145 bp, Homo sapiens
cagattcctctgtgcttgcagtctggctggaagaccttcagagagaagaaagctccattccgaaaacctgtgaaacaagacactggccaggttcttctggatatggtgcacaaccacctgggtgtgactgaaaaggaatattttg

SEQ ID NO: 326180 - DNA, 75 bp, Homo sapiens
cgaaagggaccgaaatggagagcaaaggtttacccaaggtccagcctagcccctaggcaccatgtcggacagtga

SEQ ID NO: 326181 - DNA, 80 bp, Homo sapiens
aaacactggaatcctactttttctgtttcgacacagccccaactgctggtacctgagaaactggactatccacacctgga

SEQ ID NO: 326182 - DNA, 90 bp, Homo sapiens
ctgatgtcaatcttgagggctagctgaggctggagtttggagtttgacccgcttggaggctctctcagcagcgggcatataggaggaagg

SEQ ID NO: 326183 - DNA, 100 bp, Homo sapiens
gtggaattgaagcagttggtggcaaattaagggaatttacactgggagagtgcttagccttcaagaattattgatccaagtgggaaagttaaatcctgaa

SEQ ID NO: 326184 - DNA, 108 bp, Homo sapiens
ggctccctcctcccagggccaggcgccgctcagaacggtgattgcccacagtgagtatcaaaagtccaaaagaatttccatctttctgagcatgcaagatgaaattga

SEQ ID NO: 326185 - DNA, 100 bp, Homo sapiens
cgaaatggtctgaggcagagtgtggttcaggttggttctggacattacacagcatacgcaactcacgaaggccgctggttccacttcaatgacagtactg

SEQ ID NO: 326186 - DNA, 100 bp, Homo sapiens
gcggggaaggagtccagattgggtccccctcacagtaccaaacgattccctggttatgattctgaaagcaaggaatttaatgcagaagtacatcggaagc

SEQ ID NO: 326187 - DNA, 100 bp, Homo sapiens
gattctggtgatgtacttcatcatgctcttctgtatcacgatgaagaggcaaatcaagaccatcatggaggagcagctggtactgaagcgggtggccaac

SEQ ID NO: 326188 - DNA, 102 bp, Homo sapiens
caataggccacattactctgaaatccatacatcagcaggaagcttgaccacatattatcccctccacccatgccgtttcggaaatgcagcaacccagatgtg

SEQ ID NO: 326189 - DNA, 100 bp, Homo sapiens
cctcacctcaagcacacccaatggacagcatgcctcaccaagtcacatgacaagcaattcttcataaagggaccagctaaagaaaacagctgtgctgcca

SEQ ID NO: 326190 - DNA, 101 bp, Homo sapiens
ggactcaatgttctcgatgccaatctctgcttgaaaggagaagacttggattctcaggtactaggttttgacaagcttgcatcatgcgtgagtataagcta

SEQ ID NO: 326191 - DNA, 98 bp, Homo sapiens
gaggacatctgggggccacaaatgctccttctcctggagacgcaactcaagaaagacgcttctggggccagcttatggttcccctattgagcagacac

SEQ ID NO: 326192 - DNA, 100 bp, Homo sapiens
gaggccacccagcctcctagacagaagccttgaagaaccaatgtactgatgtggggattaaagagggtccactttccccagcacaaacctcacaagtcac

SEQ ID NO: 326193 - DNA, 80 bp, Homo sapiens
agagggatccttcacccgtgtctgcagcccctgtcaaagggaacaggaagcagtccacggagggtgacgccctagaccca

SEQ ID NO: 326194 - DNA, 90 bp, Homo sapiens
ctgctctggcctcctcaccctcacggtctccctgtgcaccgcgcccatccccagaaagcacgcagatggctcttcttaaggccaataagg

SEQ ID NO: 326195 - DNA, 100 bp, Homo sapiens
cacctcccaggacgactgtgtcagcaaagagcgcagctcctccaggttttagctgaattttgggacatggccactgcttcaccaaggtctgatactagta

SEQ ID NO: 326196 - DNA, 83 bp, Homo sapiens
agcacccccaccgtcagcagctacagccctccacaggttgtgaccgagattcccgacgagagagactgaggggaagagaggaa

SEQ ID NO: 326197 - DNA, 82 bp, Homo sapiens
tttacatgacagaaatcacctatgtttacagcgacaggtcctggatgcctcatcccttagtttcaacaccagattgaaatgg

SEQ ID NO: 326198 - DNA, 100 bp, Homo sapiens
gtcaccgagatgcagaggatactcagtcaaccaacatttactgagcatctacttcgtgccacgctgaccggaaaggagattgagattgacattgaaccta

SEQ ID NO: 326199 - DNA, 112 bp, Homo sapiens
gcttcataccagctgaagagcgacaagccgctggcagccgcggatctcaccgccgctcaggcattttgaaagcgaagcagaagccgtagaatcagcggcgagcctgttgaaa

SEQ ID NO: 326200 - DNA, 100 bp, Homo sapiens
caaaatgtggccagattgcagggagtatcaaatatgagaaagctaggccatctgaataactttactaaggctctagaccaagatagaacagcccttcaga

SEQ ID NO: 326201 - DNA, 87 bp, Homo sapiens
cagcggactaataaaggccatggcgccagcagaaatcctgaacgggaaggagatctccgcagttttactacccttggatgctgctgt

SEQ ID NO: 326202 - DNA, 100 bp, Homo sapiens
cggccaccgactactgtcagcagctgtgccagcggatactctgttttcaaggaagctgaatgggaaatacagacttgagcgacttgttccaactgcagtg

SEQ ID NO: 326203 - DNA, 96 bp, Homo sapiens
gagatcgtgcagggggtgctgcaacagggcacggcgtggaggaggaaccagaccgcggccagagcgttcaggggaatcccggaggcaagacacttg

SEQ ID NO: 326204 - DNA, 98 bp, Homo sapiens
ttttaaagggaaacgatggggagcccagctgctgtaagtaaagatgattccattatttcaagtcttgatgtcactgatattgcaccaagtagaaaaag

SEQ ID NO: 326205 - DNA, 100 bp, Homo sapiens
ttgaaattgctcaggatcgcaatattgccattcagattgtagaaggcatgaaacaaaaaatgtggagtattgaaaatattgccttcggttctggtggagg

SEQ ID NO: 326206 - DNA, 100 bp, Homo sapiens
gtcttctttgcctgcactaatgatctttaatctcatgaagtacgacagctacagccgcttcttaaagtctgacttgtttttaaaacacaagcgaaccgag

SEQ ID NO: 326207 - DNA, 83 bp, Homo sapiens
tacgtgtcccccgaggatctggaggcacagctgcagtctgacgagagggatgggggctccggaggtggcgcccaggctctgag

SEQ ID NO: 326208 - DNA, 74 bp, Homo sapiens
tgccgcccaagtcctgcagcacccctgggttcaggggtggagccacatgttcctcctgatcgaggaccaaggtg

SEQ ID NO: 326209 - DNA, 99 bp, Homo sapiens
gttcttcttcgagtatttgtagaaggatggcgttcaggaagtggcttatattcactcaaaccagaatgtaattggatcgagcaaagctgaaaatcacat

SEQ ID NO: 326210 - DNA, 88 bp, Homo sapiens
ttgcccaccccatcggggaacctggctgaagaatctgttggttcagagatggttctaggttttctgtctcaactggtctctgacaagc

SEQ ID NO: 326211 - DNA, 82 bp, Homo sapiens
tctggactactgttgaaaaaatttccagtgaggatgacgactcatttaatttacataacagcaatagtactcaccaagaaag

SEQ ID NO: 326212 - DNA, 139 bp, Homo sapiens
tgatcaagcaaggtacctgcaggacccatttgtgtccattgatctcttggagcagctggggatcatgctctttcagacccggttgcaaaggagagctgcatgctcaacctgctgctgtccctgccggaggccaacctgc

SEQ ID NO: 326213 - DNA, 75 bp, Homo sapiens
ggagtagcaagtggccatggggagcctcagcggtctgcgcctggcagcagatccacatttattctcttggaatga

SEQ ID NO: 326214 - DNA, 80 bp, Homo sapiens
aaaagacagtgacgacaaaacaccagatgatgaccctgagcaaggaaaatctgaggtactttggaagtgttgctgaaatc

SEQ ID NO: 326215 - DNA, 100 bp, Homo sapiens
aagaaagtacctcgtctcaaaacctggctgctatcagagaagaagggtgtttggggtgtgttttacaaagattgcaggcctaagtctacctcttcctccc

SEQ ID NO: 326216 - DNA, 100 bp, Homo sapiens
tcggctgtgggagagaggctaggcctctgaggaggcgaatccggcgggtatcagagccatcagaaccgccaccatgctttctgtatgagcccaatagcca

SEQ ID NO: 326217 - DNA, 100 bp, Homo sapiens
ctgagcgacccagcccgcgagcgagggtcaaatacaacctgaactccctgtcacatgatacagccactgggcttatacagtatgcattggaccagggcgt

SEQ ID NO: 326218 - DNA, 118 bp, Homo sapiens
gggaacagctgcggtgctctgccatattgtgtcttccccggccggtccctcgcctcccggccgagctgacgaattaaacaaccaccatgtcgagcaaaaaggcaaagaccaagaccac

SEQ ID NO: 326219 - DNA, 75 bp, Homo sapiens
gagggattctggcatcagggaggctttcagccggagaagcgagtttcagctgactagacgcttgaagcaaagctg

SEQ ID NO: 326220 - DNA, 100 bp, Homo sapiens
ccctgaggaagcaggaggtggatttgcagcagctcatcagagactctgccgagagttctaatacccgatttacaattacattgaactacaaggatcccct

SEQ ID NO: 326221 - DNA, 100 bp, Homo sapiens
agttccctcacattagccagtgtgaagacctccgaaggaccatagcctcgctcaaggagcacccccggggcaccctcctgtccgatggcagcccggccct

SEQ ID NO: 326222 - DNA, 97 bp, Homo sapiens
caaagtctgctcaaatctcctgctgtgaaccagcagaatttttgaacagatttggaagtcaaaccagaaacttcaggctctactacgatggcaagca

SEQ ID NO: 326223 - DNA, 100 bp, Homo sapiens
cttatggcggcgctggagagggggcgctgagctgttgggatcgtcagtatttaaacagatcacatcatgcgtgagtacaagctagtggtccttggttcag

SEQ ID NO: 326224 - DNA, 50 bp, Homo sapiens
tggagtaggagacaggtctccgcgctactttgaaacatatgatacatttg

SEQ ID NO: 326225 - DNA, 100 bp, Homo sapiens
tcgacgctgggctttcgggtcccgcgcccagtgatgtcattcccagcagaaggtgtggagtcagcgctcaaaaacaacatcgaagatgtgcggttgttcc

SEQ ID NO: 326226 - DNA, 82 bp, Homo sapiens
aaaggatgacatatttttggacctgaaacagaaattctggaacacctatatggtaaggggcctggataccaagaagtgactg

SEQ ID NO: 326227 - DNA, 80 bp, Homo sapiens
gcccctcggacggccacgagactcgggtgtgatgaatgcagactctgctaccattttggctgtttggatcctcctttgaa

SEQ ID NO: 326228 - DNA, 50 bp, Homo sapiens
gcctgtcgtcgtggtggccaacaagcagggcccttggaagaaaatcctcg

SEQ ID NO: 326229 - DNA, 50 bp, Homo sapiens
tatacagctaaagccatggaaagatctgaattctacaaacacattgtgct

SEQ ID NO: 326230 - DNA, 100 bp, Homo sapiens
aaaatcaatcagcttcctcttttccttggagagcctgctatgcttgatgacctcacacaagatctgactgtatcccagctcagtgatgttgcggattatc

SEQ ID NO: 326231 - DNA, 75 bp, Homo sapiens
cgaggaggaggcgctgcgtcagtaccagcagaagagcatccggccccaggtggtgacaacctttgagcttcccgg

SEQ ID NO: 326232 - DNA, 100 bp, Homo sapiens
ttgccttagcgacataccagtctctgtacccactcaccttgtttgtcccaggactcctctatctcctccaggtagatcatggcaaccatagaagaaattg

SEQ ID NO: 326233 - DNA, 75 bp, Homo sapiens
ccgtagcggcttgttggataagcatgcttttcacttccactgcatctctcgctggctcaaaacacgacaggtgtg

SEQ ID NO: 326234 - DNA, 50 bp, Homo sapiens
gtttagcaccgaatggagcatggtggaataagtgggctctgagtcgtggg

SEQ ID NO: 326235 - DNA, 75 bp, Homo sapiens
ggatgtcaacaattttttggagcttctcagatgaccaagatggtgctgcagatggtgctgaggatggagaaccca

SEQ ID NO: 326236 - DNA, 75 bp, Homo sapiens
cttgaactcaggtctccattcccagagctacagagacttctgaagtggagagtctgcgacctcctcggttcttca

SEQ ID NO: 326237 - DNA, 82 bp, Homo sapiens
ctggccggacagggccgcctgtcgccggcacaggaagtcctggagaacctgaaggaccgctggtaccaggcggacagccccc

SEQ ID NO: 326238 - DNA, 100 bp, Homo sapiens
tctccaaacatgatcgtttactgcaaagtttatcttgcagattatggactttcctacagatattgtcccaatgggaaccacaaacagtatcaggaaaatc

SEQ ID NO: 326239 - DNA, 100 bp, Homo sapiens
aagctcgcacatttgacttggaagcaatgtttgaacaaactcgaagaacagctgtggaaagaagttgcaaaacactggttggcaaacatgaattgactgg

SEQ ID NO: 326240 - DNA, 80 bp, Homo sapiens
atggcttggagcacttcctattccactggattgggaaagaccatggcagatgaaaggttgtatcaaagttcttaaggacc

SEQ ID NO: 326241 - DNA, 89 bp, Homo sapiens
aaagaatgaaccttggtataaattcttttcggaattggagtttgggaaaccggagcttcagaaatacgagcagttcatctttgcagatc

SEQ ID NO: 326242 - DNA, 100 bp, Homo sapiens
tgggtgcagatgcagtgtggctctggatagcaccttatggacagaacccctgaacagtgcccaagtgttgtctctttgttgtcagagagttacaaccctc

SEQ ID NO: 326243 - DNA, 100 bp, Homo sapiens
agcctacttacaagtatgatacgggctctgacgactgggataccagatttggagcaagaggtggtggtggccttcccccgaagaaatttggtaatcctgg

SEQ ID NO: 326244 - DNA, 100 bp, Homo sapiens
ctacaggaacctgctttctctcgatgaggataacatccctccagaagatgatgagtttgatgcctacatcattgtgtctttcgtgaatgccaccctagtg

SEQ ID NO: 326245 - DNA, 80 bp, Homo sapiens
tgtgatttgcttgaagatatgagttactatgcgagtcagaagaaaacatttgaaattaatcccagacacccgctgatcag

SEQ ID NO: 326246 - DNA, 130 bp, Homo sapiens
tcttacaccactcccaagaagaataagcacaagagaaagaaggttaagctggctgtcctgaaatattataaggtggaatccatagagctccccatggacaacaagaccaataagaggcgtgggttctgct

SEQ ID NO: 326247 - DNA, 100 bp, Homo sapiens
gtcaggtgcgcccgccaggtgagcgcgctccctggcaccgttggcccccggagggtcgggcccagttgcggcgagcggatcatggaagggaagtggttgc

SEQ ID NO: 326248 - DNA, 82 bp, Homo sapiens
tcctccccgcgccccctccccctcgccatgaaggatttgaagcattcattaccatctggacttggtctctcagaaacccaaa

SEQ ID NO: 326249 - DNA, 100 bp, Homo sapiens
cgggtcttggccccgtccttacctcacaggtaggagcattgcttttcgtggtgaaagaggcaatgatgaatctgccatcgaaatgattaaagtatctcat

SEQ ID NO: 326250 - DNA, 100 bp, Homo sapiens
tgtaccatgagggggagcaggtggaatatgcagaaatggtccccgaggaggggctgtcccccgaaaacctgtgtctgaaatgcccatggaaagagaccga

SEQ ID NO: 326251 - DNA, 132 bp, Homo sapiens
aaaaactaggggaaaggaaaccatgcaacagtcaaccttctgagctttcttcagagacctcagaacacagatatgtagaactcttcttgaattctacagcaggagcaagcggtggtgcttatggtagccaaa

SEQ ID NO: 326252 - DNA, 100 bp, Homo sapiens
cgagctaacccggcctctggacaagagtaaacctagcctttaagcaacctggaaagaggctagaacaccaaggaattagaattgaatttgtaggtcaaat

SEQ ID NO: 326253 - DNA, 82 bp, Homo sapiens
gggacgcagacgccaaggcccctccggccagggccgggagccgggccggcctagccaggaggctactcacagtcgaactaca

SEQ ID NO: 326254 - DNA, 100 bp, Homo sapiens
aaccacagccctggagatgcctgaccgggagaacacgtttgtggttaagggcaccagctgagagacagaatttttggaagaacttaggaaagaaactaag

SEQ ID NO: 326255 - DNA, 100 bp, Homo sapiens
gtcaaggaggcggcaaaaaaaaagtctgctactactacgacggaccagtcctgcctctgttgtagaagacatgtggtgtatataaagtttgtgatcgttg

SEQ ID NO: 326256 - DNA, 75 bp, Homo sapiens
ggcagctcaatgacagtcaagtggaaacaactgtctgcacatccaaatccataatggctgctgctggagtacctg

SEQ ID NO: 326257 - DNA, 100 bp, Homo sapiens
ggaaggaaaaacctgtatgtggaaccacctgctgtggaaaatctctgttctcacaaagtctccccaatgctctacaagcaactgcgtcaggcctgtgaag

SEQ ID NO: 326258 - DNA, 101 bp, Homo sapiens
aagaggaaggctacagatgctgcataccaggataagaccatcatcatgtggaaactgaccagggatgagaccaactatggaattccacagcgtgctctgcg

SEQ ID NO: 326259 - DNA, 98 bp, Homo sapiens
gagagtcgtgaagcagttgagaaagaatttgagcctctgctgaattggatgaaagataaagcccttaaggacaagcaacagcatttgatcgagctgat

SEQ ID NO: 326260 - DNA, 83 bp, Homo sapiens
ccccagctccatcaacctcacgctgcacctggacttaattcagtgcacaaatgagatgaatgtgaacatcccacagttggcag

SEQ ID NO: 326261 - DNA, 100 bp, Homo sapiens
agacgccaaggtaattttgacccagaggagcaatgatgtagccacctcctaaccttcccttcttgaacccccaggttttacttgtaatggacacaaggac

SEQ ID NO: 326262 - DNA, 51 bp, Homo sapiens
gatacaccttttccacagggaattgagttgaacttggagcgtgatgcccag

SEQ ID NO: 326263 - DNA, 75 bp, Homo sapiens
cagattcgcagtggtcgcttcttctccttgatgctgtgaaacaagctatgcagaagcatcttcttcaaggctggt

SEQ ID NO: 326264 - DNA, 75 bp, Homo sapiens
cgacaaagatggggttgtcctctttaagaagtctatccagaagttaaaggagagattgctcgtaaagatgaaaag

SEQ ID NO: 326265 - DNA, 89 bp, Homo sapiens
gcccgcctggtacttcccaagcttgaaggacacacctgtgagaagatgccccttggtgtggccactgcaaggctctggcccctgagtat

SEQ ID NO: 326266 - DNA, 75 bp, Homo sapiens
gcgagctcctgggcatcccgctggaccagatgagggaatctcgctgggaagctgacaccctggacaaagagggac

SEQ ID NO: 326267 - DNA, 76 bp, Homo sapiens
gagaagcgggctttccaggacaagtactttatgataggaagaaatgttggctatttggcgatgagaggtggtgaac

SEQ ID NO: 326268 - DNA, 101 bp, Homo sapiens
cgttggaacagttcttctaattgagaaaatgctgctgtgaagacccaattaaagctttcacataaatgaagctacagctatcatgatttagtgcccccaaa

SEQ ID NO: 326269 - DNA, 98 bp, Homo sapiens
gctttttcaagggagctgataaagaacttcttcccaaaatgggtcctctggtgatgttcttgagacgttcaatttcttagaaaatgccgatgacagtg

SEQ ID NO: 326270 - DNA, 100 bp, Homo sapiens
cagagcagatgaattaaaccaaactggacaaatccttgtggagcaaatgggaaaaggtgcaatggatgagcttcatagtctggatccaagaaggcaagag

SEQ ID NO: 326271 - DNA, 100 bp, Homo sapiens
ccgccagtggagcccccgcgcgcccggccggcccggagcaccgagctcgcggcacggtaggagggatcatagacggtatttctatgtaaacgaacagtcg

SEQ ID NO: 326272 - DNA, 101 bp, Homo sapiens
cgggcgcggacgcgcagcatggcggtggaggacgaggggctccgggtcttccagagcgtgaagatcaagatcggcgcctgtgtctggcagagctggtgtga

SEQ ID NO: 326273 - DNA, 83 bp, Homo sapiens
cgaagaagcatcgttaaagtctctcttcaccctgccgtcatgtctaagtcagagccggaagaattaacctcgagtctgcacgc

SEQ ID NO: 326274 - DNA, 83 bp, Homo sapiens
cccgcggccgcaccttcccgccttctcaggcgccatgtcagaaccggctggggatgtccgtcagaacccatgcggcagcaagg

SEQ ID NO: 326275 - DNA, 82 bp, Homo sapiens
gtgaaaatgaagccagaccgagacgagagtttcgctgttaaacacaacaaagaatttctcttgtcaatggccaacagaggga

SEQ ID NO: 326276 - DNA, 75 bp, Homo sapiens
ccaagcatatggaaatgtctctaaaagtggatccttctaaagtaaatattctggtacctggtgctggactaggaa

SEQ ID NO: 326277 - DNA, 85 bp, Homo sapiens
cttttacaagaaaccaaacaagcctttgaaagatgtcataggcaaatggttatgagccttagagtttctgaactccaagtactgt

SEQ ID NO: 326278 - DNA, 82 bp, Homo sapiens
cctcccgcccggaaagctgcccagccaccagcaaccccccaggacaaattattggattccagcacagtgactcacttattca

SEQ ID NO: 326279 - DNA, 75 bp, Homo sapiens
tgcggtgatctcagggcaagggttgccacgaccacccagaacctcaccagacaatgcagatcttcgtgaagactc

SEQ ID NO: 326280 - DNA, 75 bp, Homo sapiens
tggaggaaacttcagtggtcgtggtgatgccttcagtgaagaggccaacaggaggtttgaacgctaccctggcca

SEQ ID NO: 326281 - DNA, 74 bp, Homo sapiens
cggcttaaatgatgtattttgtgatcgcagcgatgaaaggaccaacttggaggccttgcagaagaagctggagg

SEQ ID NO: 326282 - DNA, 74 bp, Homo sapiens
agaggaccaacatgggcattttgtttatgagcaaggtggtgatcagggaagtggctttgggaccacaggtaaag

SEQ ID NO: 326283 - DNA, 83 bp, Homo sapiens
caggaagagcaaagccgagctgcagtgcgaaaacaggagatcattaagattacagaacagctgattgaagccatcaacaatgg

SEQ ID NO: 326284 - DNA, 101 bp, Homo sapiens
tgattctgaagagggtctggaggagccttctcaagaacagaggaaagcaaagatatcctgttagtggatctaaactctgaaatcgacaccaatcagaattc

SEQ ID NO: 326285 - DNA, 96 bp, Homo sapiens
tggggaacacgacccttatcgacgaggacgtgtatcgcctctggctcgatggttactcgggtacggttcctggagcagcagaacaagatgctggag

SEQ ID NO: 326286 - DNA, 50 bp, Homo sapiens
tcaagagcacagtcttatgtaagggcacaagagactatagtccccggcag

SEQ ID NO: 326287 - DNA, 75 bp, Homo sapiens
tcagccagtacgtgtgtcagcagacaggcctgcagataccccagactcctgaggaagaagagattttaaacaaaa

SEQ ID NO: 326288 - DNA, 82 bp, Homo sapiens
ggacgcggcagcccgtggagtcggctgagggaaaagcgaggcaaggcaggcggcttggatttacactgggcaacgtggttgg

SEQ ID NO: 326289 - DNA, 50 bp, Homo sapiens
cgtggagtgacggtcacaccgcggcgatctcggcccctttccaaacactc

SEQ ID NO: 326290 - DNA, 100 bp, Homo sapiens
cagcaagtccatgtacctcacggttaaaagtacccactgatggtaatgctggcctgctggctgaaccccagattgccatgttctgtggcagactgaacat

SEQ ID NO: 326291 - DNA, 86 bp, Homo sapiens
gagagcgtgaccgagagcgcgaatatcgtcatcgttagaaggtgtcttcagtgccctgggtttgcctgtgacccaatgcccactgg

SEQ ID NO: 326292 - DNA, 100 bp, Homo sapiens
tgatcgccccagggatcaggagctgggctcaaaatgcagagaactcaaagatattcatttcggccagtgttacaagatctcagatgaaggcatgatcgtc

SEQ ID NO: 326293 - DNA, 106 bp, Homo sapiens
gggatctttccggatcaatccagatggcagccagtcagtggtggaggaggaggcaaaacagattcagaatctgcagaaagcaggcactcgtacagactcaagggag

SEQ ID NO: 326294 - DNA, 90 bp, Homo sapiens
tctgagggccccggcccctggatgcacagccccggcgctgcaaatgcagccctgaggatttggctactgcatataacaacagggggcaaa

SEQ ID NO: 326295 - DNA, 101 bp, Homo sapiens
gtccgagccagccgctgttttgccggaggagcccctcaggccattcctcacctattcctacctcttggccttcaatgtgtggcttctgcttgcacccgtga

SEQ ID NO: 326296 - DNA, 74 bp, Homo sapiens
cgcgcgccagcaagaagatcctgctgcccgagcccaggtcccaggtgtgacaccttcagcaggtctcagggaag

SEQ ID NO: 326297 - DNA, 75 bp, Homo sapiens
tgtttgcaaagcacctgaactgtgtgtaatgctgtgtcatggagctaaaatcggatttttccaaggagatatcag

SEQ ID NO: 326298 - DNA, 75 bp, Homo sapiens
gggcatacatctttcttcgacaaagggtgaagctttgttctaagaatatttgtttcatctagtttatgagtccaa

SEQ ID NO: 326299 - DNA, 82 bp, Homo sapiens
gtccttggcccgcggaggggtctgcgcagtgcaggcagataccgtttgacaccaccaaatcaaagaatcttcaggatggcag

SEQ ID NO: 326300 - DNA, 74 bp, Homo sapiens
ggcacatgaacggtggagtcttcaaagacttcccaagtaagaagcggaagaggagccgctggaaccaagacaca

SEQ ID NO: 326301 - DNA, 100 bp, Homo sapiens
agccacttcacatagtcctcgagtccctgaagagagaaggcaaagaacctctggtgttgaaagggaataccttggcaagcagctccagtccgagcagccc

SEQ ID NO: 326302 - DNA, 100 bp, Homo sapiens
caaaatatcttggctcacgtatttaagagcctgaatattccaggtgaccaagaatatggcccaggtgaccaaagccctggacaaggccctgagcaccatg

SEQ ID NO: 326303 - DNA, 100 bp, Homo sapiens
tccagggcgtggtctccccgagccaagcaggcccccaggccctccttctctacccggaacgccgggatcgaggctcaggaggtgtttcatagagaactaa

SEQ ID NO: 326304 - DNA, 90 bp, Homo sapiens
ctgagtctttgaggacacagcctcgctggaggcagtttctgtatactgcatgataaacacaggaactcaaatggatttagaggttaaagg

SEQ ID NO: 326305 - DNA, 80 bp, Homo sapiens
tttatccacaagaatcaagatcttccctctctgagcagtgaccccagttttgcccgtctgggtcagatggtcttggagta

SEQ ID NO: 326306 - DNA, 75 bp, Homo sapiens
gggcgcttctccgctgcgtgtaggtgaagggggcttcctgaccgagggcagcccaatggatccaatggtgatgaa

SEQ ID NO: 326307 - DNA, 75 bp, Homo sapiens
gcggcgagcagaactacggcgagcggaatcgagagctccagatcatgagaaagctagatcactgtaacatagtcc

SEQ ID NO: 326308 - DNA, 80 bp, Homo sapiens
gtgctgggcaccggcctgacggcatgaatgctttacagttgcagaacctggcgacgctggctgctgctgcagctgcggcc

SEQ ID NO: 326309 - DNA, 50 bp, Homo sapiens
cagctcatgggcacggctcgggacggccgagacgcatccagagctttcgt

SEQ ID NO: 326310 - DNA, 75 bp, Homo sapiens
cgggagctggaggagctgcgctcggagaacgactatctcaaggtgaatggaagagaatccgaagaagaaaatctc

SEQ ID NO: 326311 - DNA, 137 bp, Homo sapiens
cccatctggagcaaggaaaaaaaccttcgactatgcagagacatgagatggtagccaacccctcaggtgtcatggagaaactccagctgggcccagagattctgcagcgggaaaatccaaggcttatttatgccagg

SEQ ID NO: 326312 - DNA, 74 bp, Homo sapiens
caggatctttccaagcaggcctgcgaaggaaacttacccaaagggaagtctatgcaccagcaaggaatactgaa

SEQ ID NO: 326313 - DNA, 90 bp, Homo sapiens
ggaagagaagaaagacgcagctgaagcaaatttttcagaacataaaacaagaatatagtcgttatcagaggtggagacatttagaagttg

SEQ ID NO: 326314 - DNA, 89 bp, Homo sapiens
ccttgcatgatggaaacaccatggctgcggcggcccagctctctctgacacagagaaagagatgacttgatgtctgcactagtttccgt

SEQ ID NO: 326315 - DNA, 75 bp, Homo sapiens
aaatggtcccggctgctgcagggcgggggcgtccccaggagccggacagctgaaaatgtgtgtctgacatgcaag

SEQ ID NO: 326316 - DNA, 141 bp, Homo sapiens
ttaaatggcccacatcaggacagctgttccttggccatcccaaagctattctgggggcaacagagtttttgaatcagagccgacaggcacttgaattgaaaatggaaaaccctactgctggtggtgctgcggtgatgaggc

SEQ ID NO: 326317 - DNA, 98 bp, Homo sapiens
acatctgggagaatatttaatggaaaatcgcttggttaaaacctgacacttttaacaggtagctgtagccatacctaatagacctcctgatgctgtac

SEQ ID NO: 326318 - DNA, 96 bp, Homo sapiens
cttgatcctgaaaagccatctgggccatgatccaaaggaaccagagcagttgagaaaactgtttattggtggtctgagctttgaaactacagatga

SEQ ID NO: 326319 - DNA, 50 bp, Homo sapiens
tgggtgtaatacatcatgaactgcaggaggagaggagacgccgtgagcgg

SEQ ID NO: 326320 - DNA, 75 bp, Homo sapiens
gtgtatttacatagacatttcaacacatcactttaattcgccaaaatgacgaacacaaagggaaagaggagaggc

SEQ ID NO: 326321 - DNA, 100 bp, Homo sapiens
cgtgttcgtccgcggagatctctctcatctcgctcggctgcgggaaatcgggctgaagcgactgagtccgcgatggaggcaagatgatgatgaatgaagt

SEQ ID NO: 326322 - DNA, 102 bp, Homo sapiens
cccctgctcctcctcctcctgccgctcctggccctgctactgctgctatgctggaagtactgtgcctgctgcaagaaaccagcctggacaccaagtctgtgt

SEQ ID NO: 326323 - DNA, 101 bp, Homo sapiens
cgcaggaccgtggagaagacttggaagctcatggacaaagtgaatgtttcatccatttgtggaccaaaagatggagttggtttttatttttaaaaagataa

SEQ ID NO: 326324 - DNA, 100 bp, Homo sapiens
tgaactgagcgtatgtgccacgccgcccaggagacccctctgctgcaccacttcatgaacaagctgactgacctggagatacttgcattgctgattgctg

SEQ ID NO: 326325 - DNA, 80 bp, Homo sapiens
gttttgaagagttctgcgttttgccagtcacctctcaactgtgtgccaaaggcccgccatgttcatagaggataaagcag

SEQ ID NO: 326326 - DNA, 100 bp, Homo sapiens
atggaagagagcaaggcaaagtttgagaacctctgcaagctcatgaaagaaatcttagataagaaggttgagaaggttatcaatactctggctgaccatc

SEQ ID NO: 326327 - DNA, 96 bp, Homo sapiens
ccgcggatcgccgcgctcagcgacaaacaagttgcacactgggccacagaggatccagcaaggatgaagaaatggagcagcacagacttgggggca

SEQ ID NO: 326328 - DNA, 75 bp, Homo sapiens
agccggagctggaacggccgggggcggcggcagcggcggcgctgaggaatgccagaggattcaacatgagcatac

SEQ ID NO: 326329 - DNA, 50 bp, Homo sapiens
caaagcttcagcatgtcatgtggttacccatgcagttgttactgtaccag

SEQ ID NO: 326330 - DNA, 82 bp, Homo sapiens
ccccgaaggccctatcaggacatggagtatgaaagacgagtattgggaaagggtcgttgtggtgcatagacccagagtatag

SEQ ID NO: 326331 - DNA, 101 bp, Homo sapiens
cttcccaggaccctcagggagagcgggcagccttccaggtggacagactcctttctacgaaaccgttcaagttctgaccatgaagctacagccatgatgaa

SEQ ID NO: 326332 - DNA, 100 bp, Homo sapiens
aagagaaagagagagagtttcaagaagtgtaattgtggcttgtatcaacactgttactttcgtacattgagctccactggttcaacagcctctcctccag

SEQ ID NO: 326333 - DNA, 89 bp, Homo sapiens
gccggtgcccgctcagaagttctcggcgctcacgggaggagtctgctactagtcttatcagctcttaaaaacagaaactcatctgtcca

SEQ ID NO: 326334 - DNA, 100 bp, Homo sapiens
ccagactgccctccacttgtgcagaagggtgaatgccatgtcaactttgttcggaagttccatgccattgcagtgtcaactaggcctcagttacttttca

SEQ ID NO: 326335 - DNA, 82 bp, Homo sapiens
ggttattcgagtgaccgagaccgcggccgggaccgagggcctgggttctgaggaaaacgcaatggtggccatggacttgggc

SEQ ID NO: 326336 - DNA, 98 bp, Homo sapiens
cttctgagacggcggcagcagcggcattcagcattgatctggtagccttgctccagaagcctgttcctcacagtcaagcctcagaagccaactccttt

SEQ ID NO: 326337 - DNA, 76 bp, Homo sapiens
tcgactccaaatggttgaaaacagatatacaggcaattttatatgatgacaaaggagcatgtttggagagtctgtt

SEQ ID NO: 326338 - DNA, 76 bp, Homo sapiens
aattagtaattagtaatccttacagcagaaagctgcctgcctctcaaacatcacatggtgaccactccaacactac

SEQ ID NO: 326339 - DNA, 75 bp, Homo sapiens
ggagaaccaactggtcccgaaagaggtgattcgcatctaggtggcggcagtcgagaaggctcgtttaaagaaaca

SEQ ID NO: 326340 - DNA, 73 bp, Homo sapiens
gaaaacaacatcatgcagtggaatgcagttatatttggaacctcaagaaggcatgaagccagcccctgcagtg

SEQ ID NO: 326341 - DNA, 88 bp, Homo sapiens
ttcatgcagtctctcattggcttctttgagactgaaatggcagacaatgattgaagctcacgttgatgtcaagactaccgatggttac

SEQ ID NO: 326342 - DNA, 100 bp, Homo sapiens
gggagcctgtggaaatagactggagtctgggtagtgtcgtttcctagagaatggtctcgaagtaacttctcggccggaaggtggtggtcgtacgctgtga

SEQ ID NO: 326343 - DNA, 97 bp, Homo sapiens
ttccgctgcctggccttcgagtgccctgagaactaccgccgctccgcagccacccaggacggcaaccttcccaccctcatatccagcgtccaccgca

SEQ ID NO: 326344 - DNA, 82 bp, Homo sapiens
cctggcctgggcgctccggtggcggcggagccctccagaatacccatcatatagcccctgaggtggcatggtgatgtctcca

SEQ ID NO: 326345 - DNA, 100 bp, Homo sapiens
ccaacttcctctatgccaccgaaatttgggaccaagctgaacagctttccaaagagcaaaaagacttcctagcatgggctgttgtgctggagagaacgag

SEQ ID NO: 326346 - DNA, 75 bp, Homo sapiens
cacctggatccaggataacggaggctggttggctggggaacagaccagggaattggtggatttggagaagagccg

SEQ ID NO: 326347 - DNA, 100 bp, Homo sapiens
aaaggagccccgcgagtggcgcgccggggatgaaaatgtttataggaggccttagctgggacactacaaagaaagatctgaaggactacttttccaaatt

SEQ ID NO: 326348 - DNA, 100 bp, Homo sapiens
tagaactctttatctttctgtggatccttacatgagggtggaagagaagtaccagcggaacctttttcctattttttctccttctgcgctgaaaccagaa

SEQ ID NO: 326349 - DNA, 100 bp, Homo sapiens
caacaacagctctgctcatggctctcaaagaaccagcggacctgagtcttcaatgaaaggacatggtctgctatacagctcagactctcgtccgaatcct

SEQ ID NO: 326350 - DNA, 100 bp, Homo sapiens
caggacagtcagtctggtactaacaatgcagatcagggagctgattttggatggatctttacagttgatccaggaaggtctcaaaagtggttttctttat

SEQ ID NO: 326351 - DNA, 97 bp, Homo sapiens
gggagatgaaaacacacccacctcacaggctgttgtgaggactaagggtgcggcagtgcctggtacatggattttctattgcagcagaccatgctac

SEQ ID NO: 326352 - DNA, 96 bp, Homo sapiens
aggaccgtatttgagcgggcaatagacacagattctaacttgtggaccgaagggatgctccaaatgggagccaagaaccatggggtagtcatgcca

SEQ ID NO: 326353 - DNA, 100 bp, Homo sapiens
tgttatctgggaaattaaagttctacgtaaagagagtatggagctcgtaaaattagatttgcagatttacagaatggctgcacattaatggaaagagaag

SEQ ID NO: 326354 - DNA, 74 bp, Homo sapiens
gcccgggcagccacccccggccctgctgccacagcagagcggttctggtgaggttggaaggatgcagccacccg

SEQ ID NO: 326355 - DNA, 90 bp, Homo sapiens
ggacagtacaattttgaccatccaggttccatcaatggtgagcaccagcctgaatgcagaagcgctccagtatctccaagggtaccttca

SEQ ID NO: 326356 - DNA, 110 bp, Homo sapiens
gacggatgaaaagaatgaacactgtccttcaaaacgaacctcaaaggaagaccttctgcaggctgattttgaaggtgctttaaagttctttagagttcagcttccaaaga

SEQ ID NO: 326357 - DNA, 100 bp, Homo sapiens
ggcgcctccgtcgccaagccgcgccgtcgcggggctcccgggagcggcccttagcgaccccgcccgggccccctcagcagcgatggattttgggtgggga

SEQ ID NO: 326358 - DNA, 100 bp, Homo sapiens
tggaagaactcctttaatgaaagctgcaagagctggtcatgtttgtactgttcagttcttaattagtaaagagtcatcaccagtgttatcgccaaggaag

SEQ ID NO: 326359 - DNA, 90 bp, Homo sapiens
cccgcttgtgttgctcaggacgtggggcttgcaggccacaaatgcagtgtctccactcaaaggtcctaaaaaggtggggacgctgtggcg

SEQ ID NO: 326360 - DNA, 50 bp, Homo sapiens
ggtgtctcgtgtgtgaacatcacagattaacgtcttcaaggacccagttg

SEQ ID NO: 326361 - DNA, 99 bp, Homo sapiens
gtacctcactgcagaggtgctggagctggcaggtcccacgtacctcggagatttatgtccaccgaagtggtcgaactgctcgagctaccaatgaaggcc

SEQ ID NO: 326362 - DNA, 50 bp, Homo sapiens
cctgcctcgaagacctgaggagcaagggtgactctcctattccatctgtt

SEQ ID NO: 326363 - DNA, 96 bp, Homo sapiens
ttgtgggccgccgtcggcagcaagaacagagagagaggtggacagatctgagagatactgaggagaacaaggggtctgtggaaatcatgagaaagg

SEQ ID NO: 326364 - DNA, 101 bp, Homo sapiens
agatgtcatgatggagaattatggaaacctggtctcactggctgacatagcccagagatacaggataagcaaatacccaaccctcaaattgtttcgtaatg

SEQ ID NO: 326365 - DNA, 82 bp, Homo sapiens
atgcgcgagatcgtgcacatccaggcgggccagtgcggcaaccagatcggcgccaaggtgaaagaacttgtcctggacaaca

SEQ ID NO: 326366 - DNA, 75 bp, Homo sapiens
ttctctcaattcaccacttggatcacagcccacaggtgctgagaacaagagaaatcaagtgaaggaaggaggcgg

SEQ ID NO: 326367 - DNA, 74 bp, Homo sapiens
gtgagaagcaagaaggccctggacacagcaatatctctgggctttcacagaccgcaacagatgaccaaggaagt

SEQ ID NO: 326368 - DNA, 82 bp, Homo sapiens
tgactgagtacctgaaccggcacctgcacacctggatccaggataacggaggctggatcgagctgggagcattagtaccctt

SEQ ID NO: 326369 - DNA, 100 bp, Homo sapiens
aagaaagattctggaggaaaggtttacaagcaggccacgattgaatctctgaaggcagctgagattctactacaaaatggagcaaaccctaatcaaaaag

SEQ ID NO: 326370 - DNA, 95 bp, Homo sapiens
ctcaaacctttcagggttgtggaatctacgaaagtaggcggtacgaaccctaatggaggcagttttgaggaggtcctcagctccacggcccatgc

SEQ ID NO: 326371 - DNA, 76 bp, Homo sapiens
tcctggcttcttactcagtccatcttctgcttagtatgtgtattcagacaggtccccttcccctgagcccatctac

SEQ ID NO: 326372 - DNA, 96 bp, Homo sapiens
gccgattcctcctccttggtcgccgcgtccttggctggcgtaagatggctgtgccacccacgtatgccgatcttggcaaatctgccagggatgtct

SEQ ID NO: 326373 - DNA, 90 bp, Homo sapiens
gttaaggattccaagtaactcttatttgaagtgatgagagcctatttacaacagctaaggcaagagactggactgagactttgtgagaaa

SEQ ID NO: 326374 - DNA, 96 bp, Homo sapiens
aagaattcctcactaatgagctctccagaaaattgatgcagtatgactatgaatatgatgaaaatggtgacagagtcgttttaggaaaaggcactt

SEQ ID NO: 326375 - DNA, 76 bp, Homo sapiens
caccaaataagctatatactttggttacctatgtacctgttaccactttcaaaaggggtccactggacggggcctg

SEQ ID NO: 326376 - DNA, 100 bp, Homo sapiens
caagaggatgtgttctatgaagatgacatttggcctggagaaaatgagaatgggttatcaatagtctggctgtctatcgtcatcgtgagactgactttgg

SEQ ID NO: 326377 - DNA, 98 bp, Homo sapiens
tatgcagtttcgggaccacctggaggaggtgttgaaaggggttgcagagcctgaggcctgtgatcagatgtacgagagcttagcgcgactccattcaa

SEQ ID NO: 326378 - DNA, 98 bp, Homo sapiens
acaaatcaacacaaaccccaagtcctccttgccaggccttcaaccactatctcagtgcaatggctgtccagaccaaaacgaagaagacgttagccaaa

SEQ ID NO: 326379 - DNA, 87 bp, Homo sapiens
ggggacggtaggagcctccgtgcggagaccactgttcaaggccacaggtcatcatcagatttgaaatatttaaagtggatacaaaac

SEQ ID NO: 326380 - DNA, 100 bp, Homo sapiens
agaacagtcagagggaattgttaagaagtatttctctgaacagccattgaagaatcttctgctttcaacttctgaggaacaaatcgaaaaatgtttcata

SEQ ID NO: 326381 - DNA, 100 bp, Homo sapiens
caaattcaaaaaggataaggagatcatagcagagtacgatactcaggtcaaagactggctggacagattcgaaggttgtatggttcaaacaaaaaagctg

SEQ ID NO: 326382 - DNA, 131 bp, Homo sapiens
tcaggacctgacccaaccactgtctacgtggacatgagagccctgagacacgacagtactatactggcaattgctggagaagattttgcaattgttgcttctgatactcgattgagtgaagggttttcaat

SEQ ID NO: 326383 - DNA, 98 bp, Homo sapiens
acagaaagggaacaaaccctgcaggttctaagaagactcttcccggttgatcgtggattatttgagattgttgatccatttcagatacttgtggcagc

SEQ ID NO: 326384 - DNA, 100 bp, Homo sapiens
gcatatgatattgctggatccaccaaagatgtcaaagtctttcttaatggaaataaactgccagaagagagaagggcacagttacctaagtatcaacgta

SEQ ID NO: 326385 - DNA, 100 bp, Homo sapiens
cacggccaacgtgggctcgctcttcgacgacgtgacagagctgaatgaacctctctccaatgaagatcgaaatctcctctctgtggcctacaagaatgtg

SEQ ID NO: 326386 - DNA, 90 bp, Homo sapiens
ccgccaccggcccgacctcatgtgacttcatggtcatgacgattttcttcaatgtgagcaggcggtttggctatgttgcctttcaaaact

SEQ ID NO: 326387 - DNA, 75 bp, Homo sapiens
ccagggcagagggcacctgagcggctggagagcctgttggagaaacacaaagagcaacaacgaactgtctacaga

SEQ ID NO: 326388 - DNA, 90 bp, Homo sapiens
gcgctttgcaatgaaatctcgaaggggacctcatgtccctgtgggacacaatgcccccaaggcgctggctgtgctggtcactaccttcca

SEQ ID NO: 326389 - DNA, 100 bp, Homo sapiens
tctgcggctctcggtgccctctccttttcgtttccggaaacatgttcccgaggagagatggatgccgcgtccccttcgcagcgacgagacttccctgccg

SEQ ID NO: 326390 - DNA, 100 bp, Homo sapiens
ccttgttccctcagctctaagggccgcgatgttgtacctagaagactatctggaaagaaggattacggccaggagatacaaccagcactttctgtggtac

SEQ ID NO: 326391 - DNA, 75 bp, Homo sapiens
atcattgctgcctggaccgtccgtgtctgtgaaaggggtattccctcagcggatactacacccatccatttcaag

SEQ ID NO: 326392 - DNA, 75 bp, Homo sapiens
ctcagcctcctgattagctgggattacaggctttgtctggcatacggaggatctgatgtgtcaagatgtttttac

SEQ ID NO: 326393 - DNA, 75 bp, Homo sapiens
ctcccaagtagctgggactgcaggtctctaattaacagaagatggcaaagcccagccacagcagctatgtccttc

SEQ ID NO: 326394 - DNA, 83 bp, Homo sapiens
tgccgcgtctccgcgttcccagcccgggtccccgcgttcacagccccagcgcagcgccgtgccgtccctgcagtgacaccgag

SEQ ID NO: 326395 - DNA, 97 bp, Homo sapiens
aaggtgggagcggagagcgcaggcgtggtgatgtagtcaaggtgatcgtctccgtccaggtattgatcctcctccccctctccctcccccctccacc

SEQ ID NO: 326396 - DNA, 75 bp, Homo sapiens
cccctgaggccccagaactatcttttcgaactctcttgatagagcccaagcagccaagaataaaggcaataaata

SEQ ID NO: 326397 - DNA, 50 bp, Homo sapiens
ctgccctcaccctcaggactaggcagaggagaagaaggaagttgtggaag

SEQ ID NO: 326398 - DNA, 100 bp, Homo sapiens
ttgtgtggtcgcgtctcggaaaccggtagcgcttgcagcatggagaactgcgctatcctcaaggagctggtgacgctgcgggcccagaagtcccgcctgc

SEQ ID NO: 326399 - DNA, 75 bp, Homo sapiens
ggcccatcgacatcctggagatgctgagcagagccaaggatgagtatgagaggtgtaaggcaaacattggtgggc

SEQ ID NO: 326400 - DNA, 97 bp, Homo sapiens
aacacttgcagagggaatctggtcaaacatggaatgggggttgaaaaataccggccacagaccctgaatgatctcatttctcatcaggacattctga

SEQ ID NO: 326401 - DNA, 75 bp, Homo sapiens
tagaaccaacaagggtctcaatgcccacagaaaatattggaatggaagttggatacactttgtgacttgtacgag

SEQ ID NO: 326402 - DNA, 100 bp, Homo sapiens
gctgaagggggctctttatataatggatcctcctttgtatttggaactggaccctcagcaccatctgccagtccagcatttggtgctaaccagaccccaa

SEQ ID NO: 326403 - DNA, 100 bp, Homo sapiens
ctcatgtatggcaagagctctactcgtgcggtgcttcttctccttggcatacagctcacaggtatgaagaggagatcaacaaacgcacagcagccgagaa

SEQ ID NO: 326404 - DNA, 145 bp, Homo sapiens
ctcaccctctacccctgtggcaatgcctgcactattgatgggctccctgtccggcagcctacccggctcactcagggccccggagctccacccatgtccccttggtgctgccgcttcttgtacttctgctgctggccccggctag

SEQ ID NO: 326405 - DNA, 100 bp, Homo sapiens
agggacttgatcaggctctgccctgtctgacagaactcattctcaccaataatagtctcgtggaactggaagacaactgttagttttgtggcttactgct

SEQ ID NO: 326406 - DNA, 75 bp, Homo sapiens
aaaaggatttccaaaaactacaatcataaagaaatccaacttaccttgtcatgcggaaacaggaaattataaaag

SEQ ID NO: 326407 - DNA, 75 bp, Homo sapiens
agccatgcctaactgacttcttgaggtccctggctctgtcactgaatacaaggtcttggcactggactctgccag

SEQ ID NO: 326408 - DNA, 75 bp, Homo sapiens
cgtcgccgccgccaccgcggccgagaccgcgcagccggcgggagacaaggacggcagcaaggtgacaacagtggt

SEQ ID NO: 326409 - DNA, 100 bp, Homo sapiens
ggcaagagcccgcaggctaccttccccgggcaggggcgctcaacccaaccggctccagggcactggaatagccaggccagaagaaggaaggcctgtggtg

SEQ ID NO: 326410 - DNA, 82 bp, Homo sapiens
agaaattctggaacacctatatgtgtactaatggtcacttgatgtgcgctggctgttttatccacctactagcagatgcccg

SEQ ID NO: 326411 - DNA, 82 bp, Homo sapiens
cccgtactgcccgtggcatgagggagccggaagagctgatgcccgcacagatgaagctgccactgagaatattttaaaagct

SEQ ID NO: 326412 - DNA, 100 bp, Homo sapiens
cccgaagaagaaaggattcgttacagccagagattgattcagaccaggatgtagcactcaaacttgcccaggagcgagctgaaatagttgctaaatatga

SEQ ID NO: 326413 - DNA, 100 bp, Homo sapiens
gccttacgtggacacagtatgcatccatgaaggaagagtctgtcttccgggaaagtatggaaaacccaaattggtggtatcacggaaaacttgacagaac

SEQ ID NO: 326414 - DNA, 83 bp, Homo sapiens
gaaaaagaacattactgtcttgggaaagtacggtggccagactttaaccaggaagcttatgttggagggacgatggtccgctc

SEQ ID NO: 326415 - DNA, 90 bp, Homo sapiens
caccaacatggcccatgttacccaggctatgtccaaactgggtcttcggcaggttacaggagttactagagtcactatccggaaatctaa

SEQ ID NO: 326416 - DNA, 80 bp, Homo sapiens
cgaggtggccgaatcttccttcaggatatcaagaacagctttgctgagccatcaaggtctaatggaagcatggttcggca

SEQ ID NO: 326417 - DNA, 96 bp, Homo sapiens
gtcaccatgagggcgctggtcctgctcggctgcctcctggcctcgctcctgttctcaggacaagcagccttgccaacattccactaacccccgaga

SEQ ID NO: 326418 - DNA, 83 bp, Homo sapiens
ccttttctctgccttgcttgcttgagcttcagcggaattcgaaatgataccctcaaaaagttatggataaaatacttagtatg

SEQ ID NO: 326419 - DNA, 82 bp, Homo sapiens
ctgcccggtgcccgaggaggcagccaagctcgtagcctgccactccgtgcacatcaacgagtgtgtgacggacctgcacacg

SEQ ID NO: 326420 - DNA, 100 bp, Homo sapiens
gtttacagtgcagtcttatcgaaggatgtgcatgaaggacagcctcttctcaatgaaggacagaataacgggctcccagattcacaagccccaccaagag

SEQ ID NO: 326421 - DNA, 76 bp, Homo sapiens
gcatggcatggccccgcaggtcttcacccaggccctggagtgcatgcgcagatataacttccccaagtcacacagt

SEQ ID NO: 326422 - DNA, 83 bp, Homo sapiens
ctttctctcagtcgtgagggaggcgtcgacggcgtgcgcatttcacaggacatgcaacgccagtttcgtcactgatgttcact

SEQ ID NO: 326423 - DNA, 100 bp, Homo sapiens
cgggtggtcaccgagaagtccccgaccgactgatatcaatgagtgtttgagtatcagtgccccgtgccctatcgggcatacatgcatcaacacagagggc

SEQ ID NO: 326424 - DNA, 100 bp, Homo sapiens
atgagtggaaaggtgaccaagcccaaagaggagaaagatgcttctaaggaagcagctgacacaggatgatgatactgatgcggttgagattgctatcgac

SEQ ID NO: 326425 - DNA, 50 bp, Homo sapiens
gtccagcccagcgattctcagtcagatcttatgccttcattcatccggca

SEQ ID NO: 326426 - DNA, 100 bp, Homo sapiens
acgtggaatcataagcgaaacagcacactgtttgaataaagagcgagtcgttgtaaggctcctctctatgatctggctgctcatgaagacaaagttctga

SEQ ID NO: 326427 - DNA, 88 bp, Homo sapiens
catcacccaccaacaacaccacaataatccacagccaagttgcggtccagcacagagctccatccagacctgctcacagattgcctca

SEQ ID NO: 326428 - DNA, 83 bp, Homo sapiens
atttcttcggcattctgcaacagtgtaggaagaatgatgatggagacacagttgttgtggttgagaaagatcatttcatggat

SEQ ID NO: 326429 - DNA, 83 bp, Homo sapiens
gtttagaccagctagagaccatacagacctaccggtctgtcagtgagatggcttctaacaagtactatgagatgtcctatggc

SEQ ID NO: 326430 - DNA, 87 bp, Homo sapiens
ttttatcttctggcaaagggacatcattcctgtattatagtgaatttggataaagagagggcagtgctactacaacgccggaaaagg

SEQ ID NO: 326431 - DNA, 75 bp, Homo sapiens
tcccggcagacgaagcgagccccctggtggaagccagcagaaccagacatgtagactgccaaagtgtatgggatg

SEQ ID NO: 326432 - DNA, 101 bp, Homo sapiens
atgctttatggaactatcacagacttctgtacagaagagagttgtccagtgatgtcagctggcccaaagttgcaaaagcttctcatttcagagagatgcca

SEQ ID NO: 326433 - DNA, 87 bp, Homo sapiens
catgtcttcatttgcttccacaagaaccgcgaggacagagcacttgcacctcctgcgccgccgccccccatccaaggatatgccttc

SEQ ID NO: 326434 - DNA, 100 bp, Homo sapiens
ctgagtcaggatgtaatgcggagtttcaccaacttcagaaatggcaccagtatcattcaggtgatggcccgctccctctccccacccccggagctggaag

SEQ ID NO: 326435 - DNA, 100 bp, Homo sapiens
ctggaagagcgtttgacctgtgctgacaccacagcggcccttctcacgtcccatctcctgcagttgtcatcctgtgaccaagagcaccagtctgccctgg

SEQ ID NO: 326436 - DNA, 51 bp, Homo sapiens
aagcaaagaagagttgagcacaatcagcatttacagccgaacaataccagc

SEQ ID NO: 326437 - DNA, 82 bp, Homo sapiens
cctggttggagggacagccccaggatgccgtgggccgcagccactcaggactgtcaaaggtatcgagaaccttccctgcgaa

SEQ ID NO: 326438 - DNA, 75 bp, Homo sapiens
gcatgaagaccccggcggacacagcccgcggcgccatggctcacgtcggctcccgcaagcgctcgaggagtcgca

SEQ ID NO: 326439 - DNA, 100 bp, Homo sapiens
gacgctgcgcacaacatgggcaaccacctgccgctcctgcctggcctctctgctgatggtggtgccaagcgccaggagcacctatcccgattttccatgc

SEQ ID NO: 326440 - DNA, 80 bp, Homo sapiens
tttgaccagatgaacggagtggccggaggtgaccagcgccatgtccagccaggtggtgggcattgagcctctctacatca

SEQ ID NO: 326441 - DNA, 73 bp, Homo sapiens
ttacttccaagtcatcaccagaaaggttattcagcttctcaaggctggaaaagcgaaggaagtttcctacaat

SEQ ID NO: 326442 - DNA, 100 bp, Homo sapiens
ggactgatctccatgtcctgttgtggggcttttacagcctttggccaagcaggtgtgtcctgcagagaagctgagctgtggacccaccagccacaagtgt

SEQ ID NO: 326443 - DNA, 100 bp, Homo sapiens
gcatgccccgctacgagctggctttaatcctgaaagccatgcagcggattaactgctgaagtactgatcgagttctgcatttcttcaatgaggaactaca

SEQ ID NO: 326444 - DNA, 50 bp, Homo sapiens
ccagcaccagcaagcggcattggctgcgtttgaagcagaccgccgcgcct

SEQ ID NO: 326445 - DNA, 100 bp, Homo sapiens
tctcatggaaagtggagcgtgcagacagctatgacagaggggaagtggttacctggaaggaaaggagctgcagaacttgatccaggagctccagcaggcg

SEQ ID NO: 326446 - DNA, 100 bp, Homo sapiens
ccgggacctgtggcgaccactgcctggctaccactgatgttctctcaaggcccaagagctcttcagtcagcagaaccgcatgcacgagtctctcatgctc

SEQ ID NO: 326447 - DNA, 90 bp, Homo sapiens
ggagaatatggtgcagaggccctccacggatggccatgagctacccccaccaattgcctttgatgttgaagcccccacgacgttaccgcc

SEQ ID NO: 326448 - DNA, 87 bp, Homo sapiens
tgactgttaccggctcaggaaaagccggccacgcagtggcctgaattattggaacaactttggaaagccagagctgaaaaaaagaaa

SEQ ID NO: 326449 - DNA, 96 bp, Homo sapiens
ctagccgcgggaccatcaaagtcatcgacggcacctcgggggccacactgcaggcctccgcgctcagtgttgatgcggatgaaattaaaaggctag

SEQ ID NO: 326450 - DNA, 83 bp, Homo sapiens
cgccagccaagaagcatgtgcgactgcaggagagaaccaaaaacttttgctagaaaatcagcttttacgagagaaaactcatg

SEQ ID NO: 326451 - DNA, 100 bp, Homo sapiens
cagtgaagatatgatacccacagtgggcttcaacatgaggaaggtaactaaagctgtgccctcctggctgaagaagccccaagacagccagctggaggag

SEQ ID NO: 326452 - DNA, 75 bp, Homo sapiens
gtacatcccagctttctgcgagctccccctggacgaccaggtgcatctctggacatgctttcttctacacggggg

SEQ ID NO: 326453 - DNA, 75 bp, Homo sapiens
tgtcactcaagccaaggaagtaatccaagaaaaagtcgctggagtcgatcaactctaggctccaactcgttatga

SEQ ID NO: 326454 - DNA, 98 bp, Homo sapiens
tgatttcttcacagaacacactcaaggtgtgaacaaagactcctatctgatcctggagacgctgcccacagagtatgactcgcgggtgaaggccatgg

SEQ ID NO: 326455 - DNA, 75 bp, Homo sapiens
ctgtcgagcagcggacgccggtctctgttccgcaggatggatcagttcttaagagcagccccggtaactggagga

SEQ ID NO: 326456 - DNA, 100 bp, Homo sapiens
aaaacagtctgagcaggagctagcctatctggaaaggagagaacgagagggaccactgaagaaagaccgaattgcaaaggaagaaggagcttaatgccag

SEQ ID NO: 326457 - DNA, 49 bp, Homo sapiens
tcagggctccttcttaactaaagttccagaaagctgagtctgatctgga

SEQ ID NO: 326458 - DNA, 50 bp, Homo sapiens
agagaccttggagtaattcgtcgacaggtgcagattcactttataggaac

SEQ ID NO: 326459 - DNA, 99 bp, Homo sapiens
gctcggggccgcgctgcacctctggctgcggctgcgctccccgccgcccgcctgcgcctccggggccggccctgcagaaaatggacccaagtggggtca

SEQ ID NO: 326460 - DNA, 114 bp, Homo sapiens
tggatgtggaattttgcactacctgtggagaaaagggagcaagtaaaagatgttcagtttgcaaaatgctagtcctgtcttggaacctgcttcttagagggcctggactaacat

SEQ ID NO: 326461 - DNA, 100 bp, Homo sapiens
tctcgatctgcatgctctgtgttggactagtgctggggttcctcatctcgtcagtgactttctttactccactgggcacagaccccacaggctcctcgga

SEQ ID NO: 326462 - DNA, 74 bp, Homo sapiens
atcaacaagcacataaggaaattagtggagaatttttccctagattggtgtaaacagccagacgtgggccttcc

SEQ ID NO: 326463 - DNA, 97 bp, Homo sapiens
tgtctgctggaactgttggagccgcagtgcagcctaattttgacttcagcacatgcagatgacaatccaggctctccaggatgaattgcggatccag

SEQ ID NO: 326464 - DNA, 75 bp, Homo sapiens
cttctgtttgcagccccatttggcctgctgggggagaagacccgccagatcattggggtggatcccgaagggtcc

SEQ ID NO: 326465 - DNA, 100 bp, Homo sapiens
agctgtcggacctcgcagtggcaatgagaagaagcaaaaggagggtaattttgatattgtctctggaactcgctacaaaggaaatggaggtgtatatggc

SEQ ID NO: 326466 - DNA, 98 bp, Homo sapiens
cattggatgttttgtccagggcagcatctctggtgcatgctgatgacgaaaaacgtaaggaaactgaggcacacgttggaatgactatcttgggtggc

SEQ ID NO: 326467 - DNA, 74 bp, Homo sapiens
gctgcgagccgaccatgtcttcatttgcttccacaagaaccgcgaggacagagttggagaaggaacgagagaag

SEQ ID NO: 326468 - DNA, 100 bp, Homo sapiens
ggaacatcgagcgcatctgcttccttctgcgaaagtcgttgaagaaagttggaaaagattctactgtcttactaatctgcatcaccgtgtttctttcata

SEQ ID NO: 326469 - DNA, 97 bp, Homo sapiens
cgacgggacctgaagtgcagacccctaagaaccttctgaggaaaggaggccatacagaaattgaacctcagcacttctgtcaagctttccacagaga

SEQ ID NO: 326470 - DNA, 50 bp, Homo sapiens
cttttggcccaatgaatatcagaaaccagcaaatatcctagtaatgggag

SEQ ID NO: 326471 - DNA, 80 bp, Homo sapiens
catcgccagcttcgccaccctcgaggccttgcagtggtgctcatcggggactcaggcgtgggcaagagcaacctgctgtc

SEQ ID NO: 326472 - DNA, 100 bp, Homo sapiens
ccatcctgccgcagctggcgcagcccacgctcatgatcgacttcctcacccgcgcctgcgacctcggcatttgaccaagccgtgaccaaggacacctgca

SEQ ID NO: 326473 - DNA, 74 bp, Homo sapiens
tccttggctgctgagtggtgacagtagcccagcccgccggccagctggcagcctgataggcagattccatttca

SEQ ID NO: 326474 - DNA, 80 bp, Homo sapiens
aggacacttactcacccccaggtccagtggtatgagagcccaagaagatgaaaggattgttcttgttgacaacaaatgta

SEQ ID NO: 326475 - DNA, 86 bp, Homo sapiens
gctgccaagaaatctcccaaaatctccagagctagcaaatcacccaaactcccaagccttgcagtctcatcctactcaagtgtggc

SEQ ID NO: 326476 - DNA, 74 bp, Homo sapiens
ggaagaaaacacaggagccggagcagaagcaaagagcctctacttggaaggaaaaatgaaatggaaaaacaaag

SEQ ID NO: 326477 - DNA, 75 bp, Homo sapiens
caggaagagccgccgtccgcaccgggaccggagaggaagcggaggattgtcagtggcttcgccccgaggagagct

SEQ ID NO: 326478 - DNA, 98 bp, Homo sapiens
agagtggagattcaaaacctaacatatgctgtcaaattatttaaacaggccccttcacagatgtagtcactacaaatcttaaattgcgaaatccatcg

SEQ ID NO: 326479 - DNA, 97 bp, Homo sapiens
cacaatgcagattcttttccgacatctcagaagggaccagttactctccacaagaaaattcacacaaccacagtgctcttcatagttcaaattcaca

SEQ ID NO: 326480 - DNA, 98 bp, Homo sapiens
ttcagaggtccccaggagctgctgctggcgagcccgctactgcagggacctatggaaagaccacagcaagattctttcattcgtctcctcctagcctg

SEQ ID NO: 326481 - DNA, 75 bp, Homo sapiens
gagaaggcactcaagtttatggatgcagagattgtgcggacccgggatcccgaaaaactcgcttcctgtgacatc

SEQ ID NO: 326482 - DNA, 88 bp, Homo sapiens
ggccgtggcccctgcagcggaaccggacccagtccctgagccgcccctacacccacaggaggacccctcgctggaaaggcattttaag

SEQ ID NO: 326483 - DNA, 89 bp, Homo sapiens
gcgagttacatgttgagccatttcaggcggccttctgatctgtttaccacgtgagcaagcagctcggttctgtgcagagataaagtccc

SEQ ID NO: 326484 - DNA, 100 bp, Homo sapiens
tgtaaggtgcgcagcagaaagcatttaaccagcatggctacttcatattttggaaagcagtttttaagacaactctcaggagaagtgattttgcaaattg

SEQ ID NO: 326485 - DNA, 76 bp, Homo sapiens
ctttatctcagtttcatgctgccgtaggcctcatgcattgtgcgtcagcagcaatgtttatggtgaaaaatggcaa

SEQ ID NO: 326486 - DNA, 95 bp, Homo sapiens
ggaaaagagccctggatggtgaagaaggagggaacaagaggcccatgccctgttctctttgccatgaaggaggataatgagaaggtgcctacttt

SEQ ID NO: 326487 - DNA, 98 bp, Homo sapiens
cgagataccggcgccatgtccagcgctcggacccccctacccacgctgaacgagagggacacggagcaggaacttgctactaccagcaccatgcccta

SEQ ID NO: 326488 - DNA, 100 bp, Homo sapiens
agcagactctgaagatgatcagacaaggcaaagcgaaattggtcattctcgctaacaactgcccagctttgaggaatgtatcctgtcaggtataatgtca

SEQ ID NO: 326489 - DNA, 82 bp, Homo sapiens
tccatttagatatgatgaaacttcgtagatttttaggtgtttcccatgatgaattgcttgacttagcaaagtttcatttcgg

SEQ ID NO: 326490 - DNA, 100 bp, Homo sapiens
ggctaagcgaggcggaggcgatcggtgctgattcggcgcgatttgaggagctgctgctgcagaaagcccagttcagctgggatccagagactgtcggcct

SEQ ID NO: 326491 - DNA, 50 bp, Homo sapiens
ccagcagttatccgggaaaaacagaattgcattttgtgaaaaaagaacaa

SEQ ID NO: 326492 - DNA, 100 bp, Homo sapiens
aggatatcgacgtcgtgatccagaagtccagagctgaggactgcctgtttgcagagctctcagcatggcggctcctctacgtcacttgcgtccaccaaag

SEQ ID NO: 326493 - DNA, 75 bp, Homo sapiens
gcggctcagttgtccatgaccctgaaggtccaggagtacccgaccctcaaggacttgaaaatactggaaatctgt

SEQ ID NO: 326494 - DNA, 100 bp, Homo sapiens
tcaagttgctactcgggacgctgcacctcccgcgccgcacggtggacgagactttatattcagagcaccaatcaaattaagcaagcctggggaacttcgt

SEQ ID NO: 326495 - DNA, 96 bp, Homo sapiens
gcagccggagcccgggaggggccgcgccgccaccgtctgaactaggatgtcccgacatgaagaggcaaatttctggagatgtgcaatgatctctta

SEQ ID NO: 326496 - DNA, 99 bp, Homo sapiens
tctcgctctgggtctccaggcccgcgaccgtccgccagtcgtcccgaggtgagaagccctaccactgcaactgggacggctgcggctggaagtttgcgc

SEQ ID NO: 326497 - DNA, 83 bp, Homo sapiens
tctcccaggcgaccggctccgcagcaagatggcggacgagaaggacagggaaggacccattccaacaatctcgtaaaacatgg

SEQ ID NO: 326498 - DNA, 100 bp, Homo sapiens
gccttccccaggcagtggaaccttcgggctcctacgcaaacatgcagatctttgtgaagaccctcactggcaaaaccatcacccttgaggtcgagcccag

SEQ ID NO: 326499 - DNA, 96 bp, Homo sapiens
ccaggatgacagctggagaatggagtcaggtccaactggccctccaggagatcctggacgcaatggactccctggctttgatggtgcaggagggcg

SEQ ID NO: 326500 - DNA, 96 bp, Homo sapiens
ggcgtgtatccgcggccgtagcagccgggctggtcctgctgcgagccggcggcccggagtggggcggcggtgagaaggcaaccaaagtgcaggaca

SEQ ID NO: 326501 - DNA, 100 bp, Homo sapiens
tccagttcatccctgagccttgagctcccagtcgcagcgttgggccggagcactagcctcacggagaaggatctgaaagaagccaaggcgcggagccagc

SEQ ID NO: 326502 - DNA, 83 bp, Homo sapiens
agcttgtgaaactgagggaatagcaataatgacgatgaggacctgacaccagagcagaaggcagagcgtgagaaggagcggag

SEQ ID NO: 326503 - DNA, 88 bp, Homo sapiens
tcgcctcctgcgtcatcaacttaggcgagtcagatgtaatgggaagaggccatgcacgcctggtgcatgttgaagagcctcacacgga

SEQ ID NO: 326504 - DNA, 102 bp, Homo sapiens
gtccgggagccccagggcagccgccccgccgagtcgcaggagggtgtgaagacagagaatgaccacatcaacctgaaggtggccgggcaggacggctccgtg

SEQ ID NO: 326505 - DNA, 82 bp, Homo sapiens
cagggccagtccggccccgggcagcggacaccctgaaggtcccggtgctcacttggacatgacaatgcagatcttcgtgaag

SEQ ID NO: 326506 - DNA, 101 bp, Homo sapiens
gctgggcgaggacgaggacgaggacgagatggacctggagcccaacgtaagactttgaccccgacgcaggcttcagtgattgccgcggatcagaagcctga

SEQ ID NO: 326507 - DNA, 98 bp, Homo sapiens
tgtccacgcacctggacgacgcccggcgccagcacatcgcagattgctgctaaaattgattcaattcctcacttgaataattccacacctctagtgga

SEQ ID NO: 326508 - DNA, 97 bp, Homo sapiens
aaagcagaaaacagccacaatgcaggacaagtggacactcctcccgagagctggatgacagcagcagtgagtccagtgacctccagctggaaggccc

SEQ ID NO: 326509 - DNA, 100 bp, Homo sapiens
ggaggaggtgccgctgccgtggccgcccggctgccgggagccgacagcttcgcgccggtactatactggcaattgctggagaagattttgcaattgttgc

SEQ ID NO: 326510 - DNA, 96 bp, Homo sapiens
ctggaagtaaaagatgttctgaagactttagtcctctctcacctgatgtgcctatgagattagtactgaagagcagctaaggcgcctgcaagagga

SEQ ID NO: 326511 - DNA, 100 bp, Homo sapiens
aggaaatagtggcaggtgacagtctgcatgtgcagttttcaggaggcactggctacaattaggcttctcgacgtcctgtgcgaaatgactgtgaatactg

SEQ ID NO: 326512 - DNA, 100 bp, Homo sapiens
gtgttcttcgacattgccgtcgacggcgagcccttgggccgcgtctcctttgagggtgtccgcaatgttgccagtgtctgtctgcagattggctacccaa

SEQ ID NO: 326513 - DNA, 109 bp, Homo sapiens
agcgaaggccgccgaacctgcctggctagccggcgacttgagtgacgaggcacggccgagcagatgaggactgtgtggacgaccgggccagacaccgggaggaacggct

SEQ ID NO: 326514 - DNA, 110 bp, Homo sapiens
ctgtgcgctaaccccggagcccggccccggggaactagggagcgtctccggctgcacagcgctcagactctatcaagaagaatatctaatccgtaccttgaacatacgcc

SEQ ID NO: 326515 - DNA, 82 bp, Homo sapiens
aaggacaggcagagctaaacaagacttaaaaggaattgtattcgtcatccagagtcaaagtaattcttttcatgcaaagaga

SEQ ID NO: 326516 - DNA, 100 bp, Homo sapiens
gcggaacccggcagcaggcctgatccagttttagaaagagcgttttcgctacgtaaagcacattcgataaaggatatggaaaatactttgcagctggtga

SEQ ID NO: 326517 - DNA, 100 bp, Homo sapiens
cgccgccatgacgaccgcgtccacctcgcaggtgcccccacttgactctcgccccagctccccagccctctacttcacccacgatgccagcctggttcac

SEQ ID NO: 326518 - DNA, 90 bp, Homo sapiens
agacaatggagggatgcttgtatggtctccatatcacagtatcccagatgccaaatttctcggtaaaatcaggagtgctgttgggagtgc

SEQ ID NO: 326519 - DNA, 100 bp, Homo sapiens
caaggaaaaggacaaggggaaatggaaggggcctccagggtctgcagacaaggcagggaaccaacgtccaagaggcccagaagatactcaacaacagcgg

SEQ ID NO: 326520 - DNA, 97 bp, Homo sapiens
acctccctttccttatcaagaaggatgcacaagatgaggtaacgtatcttgggaaggagcttttaaggtatgtttctgaggatgcacccatacttcc

SEQ ID NO: 326521 - DNA, 50 bp, Homo sapiens
cggaccggagactttggggcctaactagggaagcagtttaagtgcacggt

SEQ ID NO: 326522 - DNA, 90 bp, Homo sapiens
ctttcaggaaggagccattatttatgtcatcaagaagaatgacgatggttatgatgtgattgctcaagcccaatctgggactgggaaaac

SEQ ID NO: 326523 - DNA, 90 bp, Homo sapiens
gaagtctgcttagggtgaaacaaatacctttgaggtttaaatcaggacacagcaggccaggaaagatacaggactatcaccacagcctat

SEQ ID NO: 326524 - DNA, 96 bp, Homo sapiens
aagaacagctgtggaaagaagttgcaaaacactgggagagcctgacaaggagctgaatcctaagaagaagatttgggagcagatccagcctgatct

SEQ ID NO: 326525 - DNA, 75 bp, Homo sapiens
aggattccaagtaactcttatttgggagctcactcagtgggtttgatgtggtggatgctggctcgggaagttctg

SEQ ID NO: 326526 - DNA, 75 bp, Homo sapiens
caaattcgagctgtccgactctgagaatggtcctgggaactccaacaagggagcaaatcagagaaatgaacccaa

SEQ ID NO: 326527 - DNA, 75 bp, Homo sapiens
tgcttttatattcatctcaaaaacaaaattctgaactcaggacttggcaagtgaacctgatgcagcacatgaagc

SEQ ID NO: 326528 - DNA, 50 bp, Homo sapiens
acacacaccatcatggtcctgttttacagctcccagcacagtaggaaaga

SEQ ID NO: 326529 - DNA, 50 bp, Homo sapiens
tcattgctgttcctgctagcaattcaggcaactacactgcgctgcatcgg

SEQ ID NO: 326530 - DNA, 100 bp, Homo sapiens
aacttcgccaactccgctgcctttgccgccaccatgcccaaaacgggctaccctgagaggaatctacatgcagagaagttcaggagactgaactaacgga

SEQ ID NO: 326531 - DNA, 100 bp, Homo sapiens
agcattgtgtctggtggctatgggggctctggtgatggactcatccccacagggaacacagccgcacccgggtctgtgccagctgtggttggcagtgccc

SEQ ID NO: 326532 - DNA, 100 bp, Homo sapiens
accctggtctccctggacagccaggtcttataggacctcctggacttaaaggaaccatcggtgatatgggttttccaggctctgactacacccggataac

SEQ ID NO: 326533 - DNA, 123 bp, Homo sapiens
ttagcccgtcagtccctgctctgtgcgcgcctccatctgggccatggatggtttaaggaagaaatctctaaacgttttaaatcacatactgaccaacttgtgttgatatttgctggaaaaatt

SEQ ID NO: 326534 - DNA, 83 bp, Homo sapiens
aagctcttacagtgcgtggaccacagcacccatcctgactgtgccttaaagtcacatgtagactgccaaagtgtatgggatgc

SEQ ID NO: 326535 - DNA, 110 bp, Homo sapiens
cacatttgtcttctgagctgctggcagttttgaggttgaaggtcgaggagctggaaggcgagcggagtcggctggaggaggaaaagaggatgctggaggcacagctggag

SEQ ID NO: 326536 - DNA, 101 bp, Homo sapiens
ggccgcagaccagcgcccgaaggccgacacgctggccctgaggcaacggctcatcaggggactcgggcaagggtgccgaagatagacaagaggcacacaga

SEQ ID NO: 326537 - DNA, 100 bp, Homo sapiens
gagaaaggaagcaggcccgttggaagtggttgtttggctggggaacagaccagggaattggtggatttggagaagagccgggaattaaatcacagctaat

SEQ ID NO: 326538 - DNA, 100 bp, Homo sapiens
gggcagagccgtgcatggggctgctccccaggacctgagcaggaacctggagttttcagccttgttatcagctacagctctgaattatctgctgtcttta

SEQ ID NO: 326539 - DNA, 83 bp, Homo sapiens
cgggaagaggagtgcggaacccgcgggaggtgcacattcaggttcccgagcacaaacatcaagataacgttcactgccctgtc

SEQ ID NO: 326540 - DNA, 75 bp, Homo sapiens
gttcagtgcagtgtctgacttgtgacagggtggagagttctacttcaggtttcactcctggtggaggaggctctt

SEQ ID NO: 326541 - DNA, 100 bp, Homo sapiens
ggattggtctatgaaacatcagttcttgatcctgatgaggtgcccctgggcgctgggattgctctagcctgtaagtataatggaaaagatgaggtctgcc

SEQ ID NO: 326542 - DNA, 100 bp, Homo sapiens
cagaagtgaaacgccaggctctctggaggccaggagatggtgtttgtggccagtcctcacaaaacacagcctattgtggagatcctgttaaaaaatcagc

SEQ ID NO: 326543 - DNA, 75 bp, Homo sapiens
cttggagagaggagaacgaacatcttctggacctttgtccagaaatgcactcggtgatggaaagagagccactat

SEQ ID NO: 326544 - DNA, 80 bp, Homo sapiens
agttctgcgttttgccagtcacctctcaactgtgtgccaaaggctcacagcctttgtcctgaagtccttcgcacaggctc

SEQ ID NO: 326545 - DNA, 100 bp, Homo sapiens
gaaactttttaccagcaggtgaagcagctgtcagaggctcctgtggatttggcctcgaagctgcaggcctgggcaatatttaagggaaagtataaggagg

SEQ ID NO: 326546 - DNA, 75 bp, Homo sapiens
ttttggatgatgatggatccatttctcctattgaggagtcaacgattcaagccaaaactcgagaatttagggaac

SEQ ID NO: 326547 - DNA, 90 bp, Homo sapiens
atcaacagtaaggatgtcaaagttcaggataaacgtcttgtacccggaggtggagcaacagaaattgaattagccaaacagatcacatca

SEQ ID NO: 326548 - DNA, 82 bp, Homo sapiens
ccgcgcggccggccggccgactaggggtcattgatgcagtcattctcagtctcctcggagggagtctgaagatgcttaaaga

SEQ ID NO: 326549 - DNA, 98 bp, Homo sapiens
ttgctcaccccgcaggagaacgagtccctcttcactttcctcggcaagaaatgtgtgggtcactttccgtatcctgatccttcccagtggacagatga

SEQ ID NO: 326550 - DNA, 100 bp, Homo sapiens
agaagagcccagctagcaccttcgccctctccagccagttttccctgatgcagttctccaacaaattccaaacacacttcactttcgaggaattcaggcg

SEQ ID NO: 326551 - DNA, 51 bp, Homo sapiens
cgtcgaaagcggattccaaggaatccaggtgagatcggactggaactgttc

SEQ ID NO: 326552 - DNA, 90 bp, Homo sapiens
tggtcaagacctacaaatcttttgaattttttctccccgacaatgaagagggcctgaaaatcaggaacggtctctctgtgctgatccgcg

SEQ ID NO: 326553 - DNA, 82 bp, Homo sapiens
tatagtcctgattcaagtgttggcggatggaagggaggagactcctgaccctcagaatggcccggaggctgtttgatgtcct

SEQ ID NO: 326554 - DNA, 100 bp, Homo sapiens
gagccagccatgtttggcactgaatcttcatgtgctactcgtgagcagtagtcgccatccagacagatggattgtccctggaggaggcatggagcccgag

SEQ ID NO: 326555 - DNA, 79 bp, Homo sapiens
ctgatcagagacatgcttcgacgaattaagggtgtgggccgaagatatgctcatgtggtgttgaggaaagcagacattg

SEQ ID NO: 326556 - DNA, 98 bp, Homo sapiens
ggtgagtggtgcactgacagtgcttatgaaggacgcaatcaagcccaatctcatgcagacactggaggtacaggtttgcagattccgccagcagcaca

SEQ ID NO: 326557 - DNA, 75 bp, Homo sapiens
attgtgagagaattctcacaggcttatcactggataggatttttgggccttggtctcatgggaagtggaatcgtc

SEQ ID NO: 326558 - DNA, 89 bp, Homo sapiens
gccgctgtcctcgtccccagcggtcccgcccaacgcccgactctcatgtgcagtctttgccaacaaaaaaaattaccaagaaacctatt

SEQ ID NO: 326559 - DNA, 89 bp, Homo sapiens
gtggccttagctgtgctcgcgctactctctctttctggcctggaggctatccagccttcgagagctgtgcccaggagtgaacaaccagc

SEQ ID NO: 326560 - DNA, 82 bp, Homo sapiens
gctggatacccaggatgcggaggcccttgtggggctgtggccactagggtctggccttaccaaggcagtgaaggagagtaca

SEQ ID NO: 326561 - DNA, 100 bp, Homo sapiens
ccatggtgcattgcagttgcgtgttgttcagaaagtttaaaattggtggtgaatggtggacatggatcgattataaccgcttccaggagctcatccagga

SEQ ID NO: 326562 - DNA, 90 bp, Homo sapiens
cgcagaaagcaggcgaacccgcggcgcaataacgaggatgatgtggacctggaagccctggtgaacgatatgaatgcatccctggagagc

SEQ ID NO: 326563 - DNA, 51 bp, Homo sapiens
gggagacagatgcgaggcggcggtcagtctacatcggtaaactctgcaaaa

SEQ ID NO: 326564 - DNA, 100 bp, Homo sapiens
aagcacgagggcgcgctcgagacgctcctgaggatctctatgaagcaccagaattatcagtgaagaatatattaaatggctcacgggctactgtaaagca

SEQ ID NO: 326565 - DNA, 90 bp, Homo sapiens
acggagtacaaaaacggcccttggatgatggagcaacacctccaccatcttctggtcccacctaccagtgtctgaagggaacaggtgaaa

SEQ ID NO: 326566 - DNA, 100 bp, Homo sapiens
gtgaccatagagctggaatcgccagctcccggcactgctacctctgacccaaagcagctgagatctgtatctgtggacctgaatgttgatccctcgcttc

SEQ ID NO: 326567 - DNA, 98 bp, Homo sapiens
ctcatcacccggctgctggagggtgccagtgacggggtggcccgtgagctgatgacgaggactggcttttaatccttggtggtgattaagagaaagct

SEQ ID NO: 326568 - DNA, 75 bp, Homo sapiens
ttctcggcctggaggagggggtcgcgcgaagtgccagatgcaggcggggaagggaaggtgctgagctactggtgc

SEQ ID NO: 326569 - DNA, 75 bp, Homo sapiens
cgccatcaccgacctcatcagtgagctgtccctgctggaggagcgcttccgggaatactcccccagttgcaagag

SEQ ID NO: 326570 - DNA, 90 bp, Homo sapiens
aagtggggctcatgaaccgcgccgtgcaactgctcatcctggcctacgtcatcggatgcttgctttaaatcgagtaacagcatcgcaccc

SEQ ID NO: 326571 - DNA, 75 bp, Homo sapiens
gtcagccgcatcttcttttgcgtcgccagggtctcccttgatctgagaatggctacctctcgatatgagccagtg

SEQ ID NO: 326572 - DNA, 100 bp, Homo sapiens
gtctcatgcgggacctcctgctgcactggggccccgggccccccatcagggctccgcagctctggcaggctgccctgagcacgctcaaccccaaccccac

SEQ ID NO: 326573 - DNA, 75 bp, Homo sapiens
ctggctgagggcagagactctcccgatccccctgaggtgaccgtgtttcccaaggagcctgtggagctgggccag

SEQ ID NO: 326574 - DNA, 83 bp, Homo sapiens
tctccttgcagctgcttagacgctggatttttttcgggtagtggaaaaccagaacccagcttagactagaaagtctagaagac

SEQ ID NO: 326575 - DNA, 50 bp, Homo sapiens
gctgcgaggaaaatggcggcgggagccgacatcggcctggctgcctgggg

SEQ ID NO: 326576 - DNA, 75 bp, Homo sapiens
gcgctctggctgtgctgcgcgacccccgcgcatggttttgggatttgagattgacgcggtgaactctgtccagtt

SEQ ID NO: 326577 - DNA, 75 bp, Homo sapiens
ttcttcgagtatttgtagaaggtacaagccagctgccatgttgtgagcacataccacatagctccatggagatgc

SEQ ID NO: 326578 - DNA, 96 bp, Homo sapiens
cgagagctctagccgtcgaggagctgcctggggacggtctgaaaaagattttggaagtggggggctctctacaggaccctcctggggagctcgcag

SEQ ID NO: 326579 - DNA, 75 bp, Homo sapiens
ccaacgagatcttccgccactacgagttgattcttcaccacactgaaaccattaggaaaaatccttgtggttaac

SEQ ID NO: 326580 - DNA, 97 bp, Homo sapiens
gaatgctgcctttttatatggtcttggtttggtctacttccattataatgcatttcagtggatcttatggttggtgatgaggcaagtgaattacgat

SEQ ID NO: 326581 - DNA, 100 bp, Homo sapiens
catctgtagagactgatttgcaacccttccgggaagccatagctctgcatggatccgacgtctaccttcttccagtttggagcgtccatccagcagcaag

SEQ ID NO: 326582 - DNA, 100 bp, Homo sapiens
gatcatgccgcagccccactgacccaggagtaggggcctaagggtgttctaagaacggaagcatctgggctggatggaatttagcatcaagcagagtccc

SEQ ID NO: 326583 - DNA, 104 bp, Homo sapiens
gcgtcggacctgcacgagctgtctgttgatattcactgatggactccaaagaatcattaactcctggtagagaagaaaaccccagcagtgtgcttgctcaggag

SEQ ID NO: 326584 - DNA, 75 bp, Homo sapiens
cgatttaaaacttcgccagaatttttgattgcttatgcgtcaactgcagatggatattcagcagatctgcccctc

SEQ ID NO: 326585 - DNA, 101 bp, Homo sapiens
tacagcccgggggaatcttttttcactgtctttggggttttcttcccagcggctacaggttgcccccaagtttcctggcagtgtgtgatactgaggaggtg

SEQ ID NO: 326586 - DNA, 74 bp, Homo sapiens
ctgcagagagagtgcgcagaaggattccgggagcacagttccgccgagtcacgatggccgaggcctcagaagac

SEQ ID NO: 326587 - DNA, 74 bp, Homo sapiens
ctgccatcgcaccgacccgctccaccgcttccacaccaacaggtggaaccgtcccaaaatgtcccttgctcaga

SEQ ID NO: 326588 - DNA, 83 bp, Homo sapiens
ggaagaccaagatcatcgagatggttggtcaaagaaaaagtgatgtatgaaaaagaggcaaaacaacaagaagaaaagattga

SEQ ID NO: 326589 - DNA, 51 bp, Homo sapiens
atgcaatagcccttcagtactgttgtacgtttattggtagtttgaaacagc

SEQ ID NO: 326590 - DNA, 100 bp, Homo sapiens
tttggcattgacatttaattttagggtcctttatatagaagggagagtgaagtcagcactgtgcttaagctggataacacagtggtggggcagacgtctt

SEQ ID NO: 326591 - DNA, 75 bp, Homo sapiens
ggctcttccagcggctcccggggcgcgtctgagcatgcaatgatgctacctgttctgacccatcatatccgctac

SEQ ID NO: 326592 - DNA, 100 bp, Homo sapiens
tggataacgggaggtgaatttccatgtcaacatagtcctgaataacccaaatgcacatggcgattttttaaaaataaatagagcatatgaagtactcaaa

SEQ ID NO: 326593 - DNA, 98 bp, Homo sapiens
attctccagtccctttctcagcctgaggctgtttccatgaaacagaatcttcatgccaggatatcagcacttttccagccattaactccaggctctcg

SEQ ID NO: 326594 - DNA, 50 bp, Homo sapiens
cgccatcatcctcatcatcatcataggtggttatcactaggctaaaactg

SEQ ID NO: 326595 - DNA, 100 bp, Homo sapiens
cccccctgccggggagggcccagcgcatccgacagaaatgggacgtcggtcatcagatactgaagaagaaagcagaagcaagagaaaaaagaaacaccgt

SEQ ID NO: 326596 - DNA, 100 bp, Homo sapiens
atctgaatcagatggtacagattgctgcagtggaaaatcagaatgaaacagtgattcagagtgcatataaaagcctcatacaacacttggaagaaataag

SEQ ID NO: 326597 - DNA, 75 bp, Homo sapiens
agggtttttcgggaaaaagcacctgacttccttcctcttctgaacaaaggactactgttcgaagatttttggaag

SEQ ID NO: 326598 - DNA, 75 bp, Homo sapiens
cccagtggccctgcagccgcagcaggaatgaaggatcaactgcctgtagtcaccagtaaagtgtacaatgcagta

SEQ ID NO: 326599 - DNA, 100 bp, Homo sapiens
ctcttcagcatctacgggaggcaaacttgtaaaacctggaacagcagcatcattgtcaaaggagaaagcttcgagctgatgtgacaactgctttccccac

SEQ ID NO: 326600 - DNA, 48 bp, Homo sapiens
cgtgaggaccccccaatccgcgtgagagcttggggcttccttggtcgc

SEQ ID NO: 326601 - DNA, 100 bp, Homo sapiens
ctctaagaagaagacccaagaggaagtggctgccctgaagcgggagaaggatcgtctggtacagcagcttaagcagcagaaccgaacaatattttgggag

SEQ ID NO: 326602 - DNA, 73 bp, Homo sapiens
ggtgtcggagtctgacagcagtggggagaccaagctccagtggctgttggacaattatgagacagcagaagga

SEQ ID NO: 326603 - DNA, 100 bp, Homo sapiens
atggctttggtcacggtccagcggtcacctacccccagcaccacctccagcccctgcgcctcggtattttgaaggtggcgtctcatctgtctacctctgg

SEQ ID NO: 326604 - DNA, 90 bp, Homo sapiens
atcaacatcatgattgagccacaagccacacggaaggcccaggtaggaatgaattgatagccagatacatcaaactcaggacaggcaaga

SEQ ID NO: 326605 - DNA, 75 bp, Homo sapiens
tttaggccaaggagctactgcaaatgtctttcgtggaagacataaggtcacaaggcacttaaagcattgttgagg

SEQ ID NO: 326606 - DNA, 50 bp, Homo sapiens
tgaagacagatgcaccaacgagttaaatccagatgtgaatgttttccaac

SEQ ID NO: 326607 - DNA, 100 bp, Homo sapiens
aagggtcctaaaacaggatcagtaaagaaggaaaaagcagtaaagccagaggaagctcatgccagttactatgggagaatgaatgtgagagaggttctca

SEQ ID NO: 326608 - DNA, 75 bp, Homo sapiens
gccgactggtgaatgaacagaaagagcttgctcaggcttacaggaaatggataaatgacagaaggcagggacttg

SEQ ID NO: 326609 - DNA, 83 bp, Homo sapiens
gctttatgcagaaatttgccagttctagaaatataataggagcatattaatgaaaagtgccataaactgaaaaaccaaacatg

SEQ ID NO: 326610 - DNA, 96 bp, Homo sapiens
ttggtcctcctggtgaaaaagtgtaataatgtcctttatatcagaggtgtggaagaagaggaagaagatggggaaatgagagaatagcatcttttg

SEQ ID NO: 326611 - DNA, 75 bp, Homo sapiens
tctggcatcctttaagaatgagggtgccgaaccagatctaatcagttgatcatggccttgccaggttggtgacag

SEQ ID NO: 326612 - DNA, 75 bp, Homo sapiens
gggtcactgtcctggaagccaccaccctgcagcctcagccgagccgctgccgctcatggatttgtgccgtcgctc

SEQ ID NO: 326613 - DNA, 51 bp, Homo sapiens
atgaacacacacattccagagaactgtggtctgaggaaaaaaaacctgtcc

SEQ ID NO: 326614 - DNA, 120 bp, Homo sapiens
gtggttccagcctccggagctcgcccaagccgcgtccccagagagcgccctgagagaacagggtggccgcttggtccagccaatggtaatgatagtaaaaaatttaaaggagaagataaa

SEQ ID NO: 326615 - DNA, 74 bp, Homo sapiens
cccgcctccctcccgcgcgtgctgcgggtctgctcgggggtctacttcgagggcagaatatgaagttactccag

SEQ ID NO: 326616 - DNA, 75 bp, Homo sapiens
gttttttaaagagtatggacaaatagaatctgtacgatttcgttctctgcgatgaagaacgatacagatacaggg

SEQ ID NO: 326617 - DNA, 102 bp, Homo sapiens
aaaaaacagatttcataaaaatagtggtctttgaccccttgaggttctctcaggagaattctgatcagagacacccctatgcctacttaccattctcagctg

SEQ ID NO: 326618 - DNA, 100 bp, Homo sapiens
acctggaggaggtggagttctgtgtggaagtgtatgtggtagaagaccaaagaagagatgagctaggaccatccacctgcctcacagcctgctggacggc

SEQ ID NO: 326619 - DNA, 100 bp, Homo sapiens
aaccccagggacctggaaagacagacaggatggggaggaggttcttcagtgtatgcctggttcttttgaagtaaccagtgatcttttttgcttaccctca

SEQ ID NO: 326620 - DNA, 75 bp, Homo sapiens
gcccgctctccaagaagccgctcaggcactacctggcagcaccatctaaacctgtatcatctgctgtggtcccag

SEQ ID NO: 326621 - DNA, 138 bp, Homo sapiens
ccagcgccctggccctctcgctgttgctggtctctggctccctcctcccagggccaggcgccgctcagaacggcctcattgctacgatttcagagtaccctggtaatagctgagcatgcaaatgattccctagcaccc

SEQ ID NO: 326622 - DNA, 100 bp, Homo sapiens
ttcatgccctgggttctgcccgcacggacccccatgtcgtgatatcattgggcttgcagaaactggctctggaaagacaggcgcctttgctttgcccatt

SEQ ID NO: 326623 - DNA, 87 bp, Homo sapiens
gcaaactccctggtctctgttggtgtagaagccaaaatcagtgctcgccagaaacccagagctaattatttagaagaccgaaaaaat

SEQ ID NO: 326624 - DNA, 147 bp, Homo sapiens
ggaagtacatgtgtcgtatcatagttcattttatgtgggaggatgttcagcagcgcggcagagtcatggggcttcttggacacttaatgattgttggcaagaaatgtgctgctgatctgggcctgaataagggttatcgaatggtgg

SEQ ID NO: 326625 - DNA, 75 bp, Homo sapiens
ggtctatgccagtgaaaaagagcaacatggagacctgtgcagaccaggtcttatcgaatgttacttagcctccaa

SEQ ID NO: 326626 - DNA, 82 bp, Homo sapiens
gaatgcagccctgatgcatacattacagcggcatagagacatattgcagtactgccaaatctgtcgaaagggagataatgaa

SEQ ID NO: 326627 - DNA, 100 bp, Homo sapiens
ctgagccggcggcgggaggagctagggctggagcctctccagcctcccgcgaagatgccatggacaatattaccaggcagaaccaattctacgataccca

SEQ ID NO: 326628 - DNA, 99 bp, Homo sapiens
gcagcccctcggagccagaggagaggcgcccccgccggccgccgcgccgcccggcagcctcggcaggggccaccaaggacatggggaagatgctggggg

SEQ ID NO: 326629 - DNA, 83 bp, Homo sapiens
gaacgtcaccgaggagaagtaccaggaggcgttggccaaggggccggtgcataaacttctcccgagttccatctcagtaaaag

SEQ ID NO: 326630 - DNA, 82 bp, Homo sapiens
tcaatttgaactctgcatcttcatggtttacagaaattggtgcagatcaaatgatgccgtttggaaaaatttcccagcagtt

SEQ ID NO: 326631 - DNA, 51 bp, Homo sapiens
ggacatggaggagaaggtccgcttcaacaggattcctggttttcaagcctg

SEQ ID NO: 326632 - DNA, 75 bp, Homo sapiens
tggcttcctcgattctgcattaggtacaagtagtcaagtttcttcattaaggagacctgaagaggatgatatggc

SEQ ID NO: 326633 - DNA, 87 bp, Homo sapiens
gattcgcagtggtcgcttcttctccttgtatctcagagatgttaactgtcctttcaagattcaagatcgacaagaagctattgactg

SEQ ID NO: 326634 - DNA, 75 bp, Homo sapiens
ctcaacacacttttctccagggacttggatgttgtgggtgatggtatgcagtgtcctccttcacctttgcttttt

SEQ ID NO: 326635 - DNA, 75 bp, Homo sapiens
tccgtcacaggggctatttgtttggatatcctgaaagatcaatggtagcaaattatggagttggaggacagtatg

SEQ ID NO: 326636 - DNA, 100 bp, Homo sapiens
gaactgttccttcagccaaagaaacaagccgtggaataggtgtatcaagtaatggtgcaaagcctgaaattgatcagggaccatgaaaagaaacttgtgc

SEQ ID NO: 326637 - DNA, 73 bp, Homo sapiens
ggcactgttgctgctgcgggagatggacaatctaaaatatgtaaatcagttgaagaaggaaaatgaacgtgcc

SEQ ID NO: 326638 - DNA, 74 bp, Homo sapiens
agacagctcgagatccagaagggaagatttattactaccatgtgatcacaagataaagtcagacctaaagccaa

SEQ ID NO: 326639 - DNA, 87 bp, Homo sapiens
ttgtgtccccaaggaaggatgagaatagctactgaattgcaggaagaggcagaggaagaggaagaggaagaggacgtggccgtggca

SEQ ID NO: 326640 - DNA, 75 bp, Homo sapiens
cggggcccaaccacaagacgactcaataggaggaagtgataacaatccatattcctcatttggagcaactctggt

SEQ ID NO: 326641 - DNA, 78 bp, Homo sapiens
acgctgcacctcccgcgccgcacggtggacgaggctgaaggggatgctaagggagataaagcaaaggtgaaggacgaa

SEQ ID NO: 326642 - DNA, 83 bp, Homo sapiens
gcctccggggacaagaaactagagcaaataaccgttttgaaattggtgtcgtagtcattcttcagcacaattcttaattggag

SEQ ID NO: 326643 - DNA, 90 bp, Homo sapiens
aattaactataaaggagagcgccaaaccattactgatgatgtggaggttaacagctatctttctcgtgacgacagcatgtacgatccctg

SEQ ID NO: 326644 - DNA, 105 bp, Homo sapiens
tttttggattcctgtacaggagtggtgcaggttgccaagagggtgatcctgttgtcgggcacaccagccatgtcccggcccgcagagctctacacgcagatcatc

SEQ ID NO: 326645 - DNA, 76 bp, Homo sapiens
gcaccatgcattatgatgggcatgtccgcttcgaccttcccccacaagattctgcctgatcaatgcaggagtcctg

SEQ ID NO: 326646 - DNA, 90 bp, Homo sapiens
cgtattagagtcacctaggagcttaagtggcttttgatgcatttccaagtagaataagtttcatgatcaacatgggagactcccacgtgg

SEQ ID NO: 326647 - DNA, 75 bp, Homo sapiens
tgctttttctggtgtcctgaacctggaagttgtgctttttaaggtttgatgagaagagggcagtgcagcagctga

SEQ ID NO: 326648 - DNA, 75 bp, Homo sapiens
aagaaacaagccgtggaataggtgtatcaagtaatggtgcaaagcctgaaaatcctcactatggatgggctcatt

SEQ ID NO: 326649 - DNA, 100 bp, Homo sapiens
ctggattccagcagtatcctcaaatgatgaagaacgagagcttcaaatggatcctgcagactatggaaagcaacatttcaatgatgtcctttaagtccta

SEQ ID NO: 326650 - DNA, 97 bp, Homo sapiens
ctgcaggcagcaccggaggcccaggtctccgtgcagcccaacttccagcaggacaagggcgtgatggtgggcatgggtcagaaggattcctatgtgg

SEQ ID NO: 326651 - DNA, 105 bp, Homo sapiens
aaacgaaagacgtcgactttgcagtcgtcctcaaggacagtcattttgtttactcattcagccctgttgcaggtcccaataaactcttcataaggttgacagaag

SEQ ID NO: 326652 - DNA, 98 bp, Homo sapiens
catcttcaagcaaggtggaattaagcatggacagaactgtgtttctcacccaggaggagggttgtttttcaccattcagaacattgcctgaagcaggt

SEQ ID NO: 326653 - DNA, 74 bp, Homo sapiens
atggcggcggtggatatccgagtcaggtgacacacagtcttttgcacagaagctccagctccgggtgccctccg

SEQ ID NO: 326654 - DNA, 75 bp, Homo sapiens
tggttagtgctgccagcatctgtgccaaggatgaagtcgtcttcttcggtgaccacttccgagacccaaccctgc

SEQ ID NO: 326655 - DNA, 100 bp, Homo sapiens
cacaaccgtctccagccttggtctgagtggactgtcctgcaggtgaaagaacttgtcctggacaacagtcggtcgaatgaaggcaaactcgaaggcctca

SEQ ID NO: 326656 - DNA, 116 bp, Homo sapiens
ctcaatatctgtcttcggtggactccttcggcagtccacccaccgccgccgcctcccagggcgtgatggtgggcatgggtcagaaggattcctatgtgggcgacgaggcccagagc

SEQ ID NO: 326657 - DNA, 74 bp, Homo sapiens
cagaaattcatggaagatatgatgccaaaggtcaagagcaatctgaatccaaatgcaaaggagtttgttcctgg

SEQ ID NO: 326658 - DNA, 100 bp, Homo sapiens
agaagccatgggattcacgggacctttgaaatacagtaaatgggatcttaagattgaaagtgatgttcaagaaccaactgaaccagaggatgaccttgac

SEQ ID NO: 326659 - DNA, 75 bp, Homo sapiens
tcaaaacagagcttttggaatctgaacaagggaccagcatctcagacatgtcgaaaaagatgttttgatccctaa

SEQ ID NO: 326660 - DNA, 100 bp, Homo sapiens
tggtcgccatcaagaaagtattgcaggacaagagatttaagacaatgcagatcttcgtgaagactctgactggtaagaccatcaccctcgaggttgagcc

SEQ ID NO: 326661 - DNA, 51 bp, Homo sapiens
atctaatcatggaatttctccctggaggtctctttttcagtcatgcaggag

SEQ ID NO: 326662 - DNA, 100 bp, Homo sapiens
gaggccaagcggagggtgcgcgagctctaccgcgcctggtatcgggaggtgccgaacactggtggtgttcccactgatgaagagcaggcgactgggttgg

SEQ ID NO: 326663 - DNA, 83 bp, Homo sapiens
gggcaacttcgctgtggtgaagctggggcggcaccggatcaccaagacggaggacatggatttgattgacatactttggaggc

SEQ ID NO: 326664 - DNA, 74 bp, Homo sapiens
tggattttttgactttgagacatttgatgtggatgaatatgaacattatgagcttaacagagcgttccaaaaag

SEQ ID NO: 326665 - DNA, 83 bp, Homo sapiens
cttgactcccatggccagcacgaggatcaggaatcaggtagcaatgtacagataaagagtactttaacgcccatgcgtgttca

SEQ ID NO: 326666 - DNA, 51 bp, Homo sapiens
tttgttcccttagcagaaattatggttccattaagtgaatttgacttttcc

SEQ ID NO: 326667 - DNA, 95 bp, Homo sapiens
gcaaggaagcggaagcggagaggcggtcgggatccgctgcgcgagctgtctcggtcccacgtgtgcgatatgtcttctccgactactatgaagaa

SEQ ID NO: 326668 - DNA, 90 bp, Homo sapiens
ctgctgcctccccggagctcccgggccagtaggttggcgtgcagtggtgtgatctcagctcattgcaacctctgcctcccggactcaagc

SEQ ID NO: 326669 - DNA, 80 bp, Homo sapiens
ttattctgcaagacaaagggaagaaataaaattttcccatactgaatactctggatgaatattttgaatatgatgcagag

SEQ ID NO: 326670 - DNA, 102 bp, Homo sapiens
cctgcctgaatggcgggaagtgtgaagcggccaatggcacggaggcctgcgtgtgagaagccctaccactgcaactgggacggctgcggctggaagtttgcg

SEQ ID NO: 326671 - DNA, 90 bp, Homo sapiens
tcgcctcgggtctcgggggccgctctgggatcccggccaccagcaattgtccgcattagtgccagcagtagttcccaagggctgtctcag

SEQ ID NO: 326672 - DNA, 100 bp, Homo sapiens
cggggacgctgccgtgcgcgccagagatcccagactgcgtggagcaggtgtcagcatttgcaggtatacaggaacagtcctagtgatgcactatttaatc

SEQ ID NO: 326673 - DNA, 75 bp, Homo sapiens
agcgaagccttgaaaaagctgccctgagacggtgtcccgccgaaagctgggctcaaaatgcagagaactcaaaga

SEQ ID NO: 326674 - DNA, 100 bp, Homo sapiens
gcaagtgaacaccttgactaaaccgacttctgatccatggatgccatcaggtattgttgcagcatctggcagtgagactgaggatgaggacagcatggac

SEQ ID NO: 326675 - DNA, 82 bp, Homo sapiens
aggtgttcgagaacgaccccgagacgataacgaaggaggcccaacttcattcaataaggagcctgacggatttatcccagac

SEQ ID NO: 326676 - DNA, 98 bp, Homo sapiens
agaatctgctgtcgcctgcagctgctcgcctgtctccgtcggaagggagcccaagctttgcagagatcccagtcacccaggcctgcctcatggaggac

SEQ ID NO: 326677 - DNA, 100 bp, Homo sapiens
gcggcgctccaccggcgtggtcaacatccctgccgcagaggctgacttatccttgtataatgaattccgattgtggaaggatgagcccacaatggacagg

SEQ ID NO: 326678 - DNA, 112 bp, Homo sapiens
cgctccgtggccttagctgtgctcgcgctactctctctttctggcctggaggctatccagcatggactttctggccgagaccagccagtggagctgctgaatcctgcccgcg

SEQ ID NO: 326679 - DNA, 98 bp, Homo sapiens
gtgggcccacgggggcttcaagcccactgggatcgagggcctcaaacccaacaacacgcaaccagtcatgatcagccgcacactggggcccgaggtcg

SEQ ID NO: 326680 - DNA, 82 bp, Homo sapiens
aagccatacaaagtaagctggaaagcagatggtactcgtcacttatataagaagaaccttgatgtgaccaagatccggaagg

SEQ ID NO: 326681 - DNA, 96 bp, Homo sapiens
atgaagattcaccaaataagctatatactttggttacctatgtacctgttaccactttcaaaatgcgtcagcatttatcccgtttgccaaccattg

SEQ ID NO: 326682 - DNA, 82 bp, Homo sapiens
actgggggcagtccgcgagccccgcactctctcgatgagtcggagaagtcccattgtcctgggtcacataatgccagctgag

SEQ ID NO: 326683 - DNA, 75 bp, Homo sapiens
tggcctgcagctcaagatgagcatcttgcagagacgaaaccagacagagggtcaagtttacagatgaccgtgtct

SEQ ID NO: 326684 - DNA, 97 bp, Homo sapiens
cgtgaacatagctttaatagggatcacccagtatactccataccagcctgaggtgtctcaggggaggctggagagtttactcaactaccagaccatg

SEQ ID NO: 326685 - DNA, 98 bp, Homo sapiens
gcgcccccgcagcccgtcacccacctcatctttgacatggacggacttcttctgggtcttctctgttggttgaaatgtctatgattttatctgcctca

SEQ ID NO: 326686 - DNA, 82 bp, Homo sapiens
ccccactggccatctataactctatcaggtctgtgctgccaacatagtctcacaagatggtgaacagaatggtctcatgggg

SEQ ID NO: 326687 - DNA, 100 bp, Homo sapiens
acctactttatagtcctgattcaagtgttggcggatggaagggaggagactcctgaccctcagaatgctggagaatgctggaggagaccttaaggatggc

SEQ ID NO: 326688 - DNA, 130 bp, Homo sapiens
tttacttgtaaatatgcagattatatttctagggacaaacctatcacatttactcaggctgagtcatcactagagagtgggaagggcagcagcagcagagaatccaaaccctaaagctgatatcacaaag

SEQ ID NO: 326689 - DNA, 74 bp, Homo sapiens
acggctgcagcgtcgcggtgcatcaaggtgctggagaatctggtaaaagcaccattgtgaagcagatgaggatc

SEQ ID NO: 326690 - DNA, 133 bp, Homo sapiens
acttgctcctccttgccttccaccatgattgtgaggcttccccagccacgtggaactgaaaatatttgcaatacctgccacgtccaaggttcagctgaggccaatgtaaagccagtattataggacacttctc

SEQ ID NO: 326691 - DNA, 75 bp, Homo sapiens
ggaggaccggcctgccggcccccagaacaaggtaccacgaaaggcagtggtagaaaagccagctcgggcagcaga

SEQ ID NO: 326692 - DNA, 82 bp, Homo sapiens
gaaattctattgagaacatagccaatgagactgtgaacgtgctgtggaatatatgggaggacgtgggatggtggcggagctg

SEQ ID NO: 326693 - DNA, 85 bp, Homo sapiens
ttcgtggttcacccgctgccgggcaccgaggaccagctcaatgacaggccttctccacagtaggcactcctgactacattgctcc

SEQ ID NO: 326694 - DNA, 100 bp, Homo sapiens
cccccttgttctggtgctgaaggacctcaactttcagggcaagaccatcaacctggttgaagcatatgtcctgtgagcttaggggtgctacaagttgacc

SEQ ID NO: 326695 - DNA, 100 bp, Homo sapiens
ctcagtgtggacatcaggaccatgtcaagtagagatttgctcaatgcattgaagtcagtcattaatgaccctgtgtgtgtggaggtcattgcaaaggaag

SEQ ID NO: 326696 - DNA, 125 bp, Homo sapiens
ggatttttcaaaaaaactaaacggaaggtagtgccaccttctcctatgactgagtacaggggctcaggtccaggtggcaggggatatgctacccaactcaactgagcgggccatcactattgctg

SEQ ID NO: 326697 - DNA, 83 bp, Homo sapiens
cttgaaaagactgggcttgtccttgctggtgcatgcgtcgtcggcctctgggcagcaggaatatattaaaggaatctgtgaac

SEQ ID NO: 326698 - DNA, 83 bp, Homo sapiens
agcgactgagtccgcgatggagaaacttcagtgctctcaagaaggaaaatatttatgaaaacaataaactggtgagtggcccc

SEQ ID NO: 326699 - DNA, 51 bp, Homo sapiens
ttctataagcagttaggatctggaggtaagaaataagacttgcatttgtga

SEQ ID NO: 326700 - DNA, 75 bp, Homo sapiens
ctgagccatgcccatcgcagccgccccgaaggagccaggtgctgttccagaattcaaagaagagaaactgcagct

SEQ ID NO: 326701 - DNA, 74 bp, Homo sapiens
cctggttcctgaagatgaggcaaatataggggcatcaggactgttccctgatgtgggtggaggttatttcttgc

SEQ ID NO: 326702 - DNA, 75 bp, Homo sapiens
cgcgctgctaggcattgaggagaaggcagcggacaaagagctgcaagctttcttcctggtggcagatgacatcat

SEQ ID NO: 326703 - DNA, 75 bp, Homo sapiens
aggcacagagaggaaatggctctcagaggcaaggatgcgacgccacaggtcatcatctggatcatcccattctgg

SEQ ID NO: 326704 - DNA, 82 bp, Homo sapiens
gtgctgggcaaggggggctatggcaagggagtgcatccgccccaacccttttccccctcgtctcctgtgagaattccccgtc

SEQ ID NO: 326705 - DNA, 50 bp, Homo sapiens
tgatttaaacaagagatttccacagaagggtcagttaaatgaaagcatgg

SEQ ID NO: 326706 - DNA, 82 bp, Homo sapiens
tcggccgaccagggacctgcccgcctgcggctgctccggcttaaagcttttcaagccaggccaagaagctgtgaagtaccag

SEQ ID NO: 326707 - DNA, 75 bp, Homo sapiens
agtgcagtttcgatggaaaatgaagtgtttcctgaggttataggcgggtgtttgaggagtacatgcgggttatta

SEQ ID NO: 326708 - DNA, 90 bp, Homo sapiens
agactgcattgagattttagttggctggcttatttattgacaaaggtgtcaaaacaaccaactctagtgctgctgacccaagggaatacc

SEQ ID NO: 326709 - DNA, 111 bp, Homo sapiens
tccgtatactgcagcaggattggctgcagcagctacattagcaggtagtaaacctattgatggcaattttgctgactgtggaagtgactcatccaaactccatgccagctg

SEQ ID NO: 326710 - DNA, 109 bp, Homo sapiens
cggagtaagagcagtttgaaggcgattgttgctgagtcactgaacaataccagcatcaaaggcttttattcaaggcttccgttacaagatgaggtctgtgtatgctcac

SEQ ID NO: 326711 - DNA, 100 bp, Homo sapiens
cacgtatacaaaggaaactcagactccagttatggctcaacccaaagaagacaagttggatggcttgaggactggtactaaaaggaaacgtgactgggag

SEQ ID NO: 326712 - DNA, 95 bp, Homo sapiens
ttttggcattgacatttaattttagggtcctttatatagaagggagagtagcaaaagatacagatattgtggatgaagccatctattacttcaag

SEQ ID NO: 326713 - DNA, 74 bp, Homo sapiens
cttgttggctcaggagtgaagctgcagaccttcgtgccaggcccagacatgtccgtccttgtaagttaaaagct

SEQ ID NO: 326714 - DNA, 74 bp, Homo sapiens
ccaagaagcatgactgatccacagaatatggagacgccacaggtcatcatctggatcatcccattctggttccc

SEQ ID NO: 326715 - DNA, 100 bp, Homo sapiens
cggcagaggatccagtgttcaccatcctggccccggaagactttgggattccagaagacagaggtttgagtgtaaaacacaaaataacaaaaccacaaca

SEQ ID NO: 326716 - DNA, 74 bp, Homo sapiens
gcagagaacagctctttgcatccggagagtggacaagaaaatatgccatctctatggcccgaaaaattggagca

SEQ ID NO: 326717 - DNA, 96 bp, Homo sapiens
ggcatctctcaaatcgctgacttacctaaggtaggagcaacggtgggaatgccctctgaggaatgcagtgatgtccatcagtcacctctcacccag

SEQ ID NO: 326718 - DNA, 100 bp, Homo sapiens
ccggcggcggagcggccggtccacggaggagattcgaaatcagagcaaagcctctgggtctgggctctgtgagggagatgaagtggtttccatcaatggc

SEQ ID NO: 326719 - DNA, 75 bp, Homo sapiens
cagcgcagtaccaccttccagagatttgtaggacagtcccatctggacagcaacattgagaatcaagagattgtc

SEQ ID NO: 326720 - DNA, 109 bp, Homo sapiens
cagcgtccctgtgacctggccgatgaggaagtactgagcctgttggaggaactggcccggaaacaggaggacgtgcccgtggttgacacgagctgtgtccccagctgtt

SEQ ID NO: 326721 - DNA, 100 bp, Homo sapiens
cggctttggagcaggcgctgggcgagccgtgcgatctggacgcggcgctgctgaccgacatcgaagtgggtaattccagaattgattggccataccattg

SEQ ID NO: 326722 - DNA, 101 bp, Homo sapiens
ctggaatcgagagaagactcctcaacaagttgctgcaatgtctgtgtctaatctatcatggaacgcaaatttcccaagtttgtatccaaagaaatggaaaa

SEQ ID NO: 326723 - DNA, 100 bp, Homo sapiens
cgcgacctggccagctgccgcgactgggaggagcgccggaacgccgaggcccagatggctcgttcggaacaccacctggatacggctgcgctgcagaccg

SEQ ID NO: 326724 - DNA, 100 bp, Homo sapiens
cctgtgacctgcaggtattgggagatccccagctaagacgccaggtcctcctggaagcctagaaatgacgacagtgaaggagtcagccacagaggagaag

SEQ ID NO: 326725 - DNA, 82 bp, Homo sapiens
cttggactgagtcctgcaggacacagggtcaagaaagtgactcatcagagacctctgtgcgaggaccccggattaaacatgt

SEQ ID NO: 326726 - DNA, 100 bp, Homo sapiens
agatgagaaggttcagttggcaaaccagatatatgacttggcctggagctgctgaagactgctattgggaaagctggctacactgataaggtggtcatcg

SEQ ID NO: 326727 - DNA, 100 bp, Homo sapiens
ggccagtgtcatgcagaagattatacctcactattctcttgctcgatggctactctgtaatggcagaatttgccattttcagtggaaaacaagtggtcgt

SEQ ID NO: 326728 - DNA, 51 bp, Homo sapiens
gtgacctcatagagaacaaagtggtactccaaagattcaggtttactcacg

SEQ ID NO: 326729 - DNA, 75 bp, Homo sapiens
acacgggacccgcttcgaggccgctttggcgccaaatcctgagaattcagaaggagctggcggacatcactttag

SEQ ID NO: 326730 - DNA, 100 bp, Homo sapiens
ggcatctctgggtgggcaacttacccgagaacgtgcgggaagagaagatcatcgagcatttcaaacgttgcagagctattttgctgcatgtgaggatgag

SEQ ID NO: 326731 - DNA, 96 bp, Homo sapiens
gagcacctgggggaccgcttgcagcggggacgcgaggacccgggctgggctttcctcacccggatctgtacccccgatttggtggtattcctggct

SEQ ID NO: 326732 - DNA, 75 bp, Homo sapiens
tggaacatacaaataccttgaagtccaatatgaatgtgtcccttacacagtacctgacacgtccacttaccagta

SEQ ID NO: 326733 - DNA, 106 bp, Homo sapiens
tggagtgtccgctgtgcccgggcctgcaccatgagcgtcccggccttcatcgacatcagtgaagaagatcagccactatggaaggaggggtcaggattacagcaga

SEQ ID NO: 326734 - DNA, 83 bp, Homo sapiens
agatcatattcattggaggacactggaagatgggaagaaagaagcagctgccagtttcccagcgaggtggtcattcagagcct

SEQ ID NO: 326735 - DNA, 82 bp, Homo sapiens
tcagcgttcttcattctctcctttaaacgaggagagttcatcccgttcttaaactgggtttgaattttctcggagaaagaca

SEQ ID NO: 326736 - DNA, 75 bp, Homo sapiens
catcggaagtggtgccttcagcacagcatcatggcagaacaggatgtggaaaacgatcttttggattacgatgaa

SEQ ID NO: 326737 - DNA, 98 bp, Homo sapiens
ggcgcaaggactcggtggtcatgctgctccaccacgtggtcactctcatcctcatcgtctcctcctacgccttccggcggaagtcacttttcaagaag

SEQ ID NO: 326738 - DNA, 113 bp, Homo sapiens
cagagtttgatcgactgaatgagatcaaaggtcacctggaaattgccttattggaaaaacatttcttacggtgcttcaaggatgaccgcatcgtcttctggacttggatgttc

SEQ ID NO: 326739 - DNA, 82 bp, Homo sapiens
gtacaaatacccctttgaattaattatggctggatcatagacggtatttctatgtaaacgaacagtcgggcgagtctcagtg

SEQ ID NO: 326740 - DNA, 75 bp, Homo sapiens
ttactactatcctcattatctccaaaccaaggtgtcttcaaaaacaaacatatttaaaagattttacttctcatc

SEQ ID NO: 326741 - DNA, 105 bp, Homo sapiens
gcattttcctgatccaaacaagcttcattgttttcagctaacagtaaccccaggacttccttcgctgggcatctggctgggattcttgttggactaatgtacact

SEQ ID NO: 326742 - DNA, 83 bp, Homo sapiens
tcacctggcggtgcccgaggagtagtcgctggagtccgcgcctccctgggacctatatccagactttgcctgacactgcaggg

SEQ ID NO: 326743 - DNA, 73 bp, Homo sapiens
gccaggcctggatgggccccatctgccagctggccttcccgatgttcgtggtagccgaggccgatgcgggctc

SEQ ID NO: 326744 - DNA, 82 bp, Homo sapiens
gggcgctgcctggcccaggcgcacacggaagtggtcatcatcagatttgaaatatttaaagtggatacaaaactatttcagc

SEQ ID NO: 326745 - DNA, 100 bp, Homo sapiens
ctggttgatgcgctgcgggcagccgtggtggaccggaaaggtaaagggagaagatgaggaagagaacaatttggaagtacgtgaaaccaaaattaagggt

SEQ ID NO: 326746 - DNA, 96 bp, Homo sapiens
ctggattttatatttacttctgtttatattggtaaaataaaaggagcttctaaaggttgtgttacagccaaagatgaagaggaagcctttctggat

SEQ ID NO: 326747 - DNA, 101 bp, Homo sapiens
tggagatcaccctgttctagtgtgtggaggcttccaccaggaggtaattaatgtggacctgattcatattgaaaatagaattggtgacattattaaatcag

SEQ ID NO: 326748 - DNA, 87 bp, Homo sapiens
gcacggagcggccgggggctcggccgggccgtcccggcctgcgcagcctgaggatctaagcctttcccacgttatggttataaaccc

SEQ ID NO: 326749 - DNA, 114 bp, Homo sapiens
aagagttactctcaccagagtgtcagcaatgggaccttctcttcggatgaggagaccctggaagacaatctaagactctagccttgtcacctcatcttgcccccttggttttgg

SEQ ID NO: 326750 - DNA, 51 bp, Homo sapiens
cccttggcggcgcgagcaggaaggcacaaatatttaaacatggaaaacgtg

SEQ ID NO: 326751 - DNA, 82 bp, Homo sapiens
tccttctccactttcgccagcccgtgccgcgagcgcggcctgcaggagcccttcagatatttcaacactcctctcagcatcc

SEQ ID NO: 326752 - DNA, 100 bp, Homo sapiens
cccacccgagagccgcgagcgcccggccgaacccgcgatggaataatgcccagcggcccgccaggtcccggaaagaaccggaggctgaagcaggccaaag

SEQ ID NO: 326753 - DNA, 100 bp, Homo sapiens
tgggtcgcttggaagaagccaaggaaactctgatgaggaagaaagtgcttcagaatctgaactttggaagggtccactaccagagacagatgaaaaatca

SEQ ID NO: 326754 - DNA, 100 bp, Homo sapiens
tccataccggagcgcaatggcgtccaaccccgaacggggggagattctgctcacggaactgcagatggaacttgctaaggaagaaaagtgtgaatttctg

SEQ ID NO: 326755 - DNA, 110 bp, Homo sapiens
gcgagctgagtggttgtgtggtcgcgtctcggaaaccggtagcgcttgcagcatggctgaaggtgatgtggccgccctcaaccgacgcatccagctcgttgaggaggagt

SEQ ID NO: 326756 - DNA, 101 bp, Homo sapiens
aggaaggaagatcctggaagaagaaaattcactagcagagtatcatagcaggaatttggataaagagagggcagtgctactacaacgccggaaaagggaaa

SEQ ID NO: 326757 - DNA, 75 bp, Homo sapiens
ggctattggactgacttttcttatgctgggatgtgccttagaggattatgggtttccgccagctgtggatgcctt

SEQ ID NO: 326758 - DNA, 105 bp, Homo sapiens
tgcgctgtcctaaatgtggcgacttgtgcacacatgtagagacctttgtatgaagaggggaaggaaggaagagcttttccatttggtgctccaatgtctcctgct

SEQ ID NO: 326759 - DNA, 100 bp, Homo sapiens
gcatcaagcaggtccggacccactggctgctggagcttgtcaccaccaggcgtccgagctgggccacagcctgaacgagaacgtcctcaagcctgcgcag

SEQ ID NO: 326760 - DNA, 105 bp, Homo sapiens
agatgaggtgatggcaacggccaacttcggcaagatccagatcgggatttacgtggagatcaagcgcagcgatggattgaaagaaggtggcaagaggaagaagca

SEQ ID NO: 326761 - DNA, 75 bp, Homo sapiens
tcatgcccgtaatcccagcattttcggaggccgagatgaggagctctatgctggtgtgtacatcgattttatggg

SEQ ID NO: 326762 - DNA, 75 bp, Homo sapiens
gagagcgaccagctgctgatccgaccccttttgctgctttgtggtgcacaagcggtgccatgaatttgtcacatt

SEQ ID NO: 326763 - DNA, 100 bp, Homo sapiens
aagaagtcggtcttttgattacaactatagaagatcgtatagtcctagaaagaatctgtcttgaactatcgtttcgatcctctcggcattgttgatggtt

SEQ ID NO: 326764 - DNA, 71 bp, Homo sapiens
ggcggaatccagggccgacccgggccggaccgaccccaggcggcgcctgtgcacgtcgggcgtagttcggc

SEQ ID NO: 326765 - DNA, 90 bp, Homo sapiens
ctgcagaaggtctctggagacatcttcagcaggaatttccattcaggaaatgccagctgcaggacgtggtcactcagcccgaagccgagg

SEQ ID NO: 326766 - DNA, 75 bp, Homo sapiens
gacagtcgcgggcacccctacgtcgtgtggaaatccgagaggtcctgctgtactagccaccaaagcagctgctgg

SEQ ID NO: 326767 - DNA, 100 bp, Homo sapiens
tcctgcccgcagcccgggccacctccaggagggaagagcagttggcagcagtgccagagttccgcggtcttgggcccctcttcaagtcctcgcctgagcc

SEQ ID NO: 326768 - DNA, 82 bp, Homo sapiens
cgacgtgggcggtgggccccagccccacagaccagcccagcattcagaacgtgctggccaaagcgctctatgacaatgtggc

SEQ ID NO: 326769 - DNA, 51 bp, Homo sapiens
ggaagggacaagaagatactgccctgtctgcagatctccaggggagcccac

SEQ ID NO: 326770 - DNA, 87 bp, Homo sapiens
gcaggaccggcacggcgaaaccttcaccttcagatttgagaagtataataaggatggagctacgctctttgcgaccgtaggctacat

SEQ ID NO: 326771 - DNA, 100 bp, Homo sapiens
cttctctgaagcttcctcatccttcatacgactgaccctggagctgaaggccaggttttgcagtggtctgagtcccacaggatcacatgttgaatggtgt

SEQ ID NO: 326772 - DNA, 74 bp, Homo sapiens
atatttaatgctgcacgggaccttctcatcaatgaacaccggagtcaagggtccagagaaggaggagaagttga

SEQ ID NO: 326773 - DNA, 100 bp, Homo sapiens
ccccctaaagaaactggaggcccaagacgcaaacatgcagatctttgtgaagaccctcactggcaaaaccatcacccttgaggtcgagcccagtgacacc

SEQ ID NO: 326774 - DNA, 100 bp, Homo sapiens
tatgaccaggtgctccacgaagacgaaaccacggaatactcccccagttgcaagaggcgcaggaccgtggaagacttcaacaaattctgcacctttgtct

SEQ ID NO: 326775 - DNA, 75 bp, Homo sapiens
tggttgtctggatgactaatgtagtttagacactctgcaatatcaccaaaaagttcgctgcatagaaaatcaaga

SEQ ID NO: 326776 - DNA, 75 bp, Homo sapiens
gagtccggagctaccaaaaccatcctcctggccagcatccttcagaaaaagcatccccgaggaggaagacgaatc

SEQ ID NO: 326777 - DNA, 98 bp, Homo sapiens
ctcctgagtagctgggattgcagggatcatggcccaagttgcaatgtccaccctccccgttgaagatgaggagtcctcggagagcaggatggtggtga

SEQ ID NO: 326778 - DNA, 100 bp, Homo sapiens
cccatggttacacttgtccgggggagaccttgaatttggtgtggaagaaataacatcagtagttcagcaggggaaatgctgtctgtagctgagcacttcc

SEQ ID NO: 326779 - DNA, 100 bp, Homo sapiens
cttctgctccgactgcttttcccacgggcgtcatctatagtccggaggacagccccagggcagaggcctctggactcacaccacccggcaagaactgctc

SEQ ID NO: 326780 - DNA, 75 bp, Homo sapiens
tcagcgggatctctgaagtcctcccaactaggcagagaaatcggtcacagggattatggacccagaacagatgct

SEQ ID NO: 326781 - DNA, 99 bp, Homo sapiens
agagctacaaaacagtggaaagactgattcggaactttggaaaaactgtgaggattaaagcaaggagagccaatcatgactggcaaaacacagaccagc

SEQ ID NO: 326782 - DNA, 75 bp, Homo sapiens
ccaatgctgaagtaagattgtcttggaaatactaagttggtcaccaggagactaaagtccatcaaaaacatccag

SEQ ID NO: 326783 - DNA, 50 bp, Homo sapiens
gattcctgtctaagaaaaggaggatttgcggcgctggcggcggccctggg

SEQ ID NO: 326784 - DNA, 75 bp, Homo sapiens
caacctgaggtggcactgaagaggcttctcacggcattcagcagcagcgttgctgtaaccgacaaagacaccttc

SEQ ID NO: 326785 - DNA, 82 bp, Homo sapiens
catccgcaaaggctttctcgcttgtcaccttgccatgtggaagaaactgggtttttcgttggaatatacgttgcacatttat

SEQ ID NO: 326786 - DNA, 50 bp, Homo sapiens
cactacatcaaggactgcccccaggcagggactggctgccaacccctccg

SEQ ID NO: 326787 - DNA, 100 bp, Homo sapiens
cgggggaggcgccgggaagtcgacggcgccggcggctcctggctgaaggtgatgtggccgccctcaaccgacgcatccagctcgttgaggaggagttgga

SEQ ID NO: 326788 - DNA, 50 bp, Homo sapiens
cgagtcttgaagattcatgaaaatagtattattgattccacagaatacag

SEQ ID NO: 326789 - DNA, 75 bp, Homo sapiens
agcattttactactgagctgcaaagataagccaatggacacgtcagtgttatctgaagaaggaggagagcctttt

SEQ ID NO: 326790 - DNA, 101 bp, Homo sapiens
tgccccagggctgcggggacgtgacatgtcctgagaagatggctgcagatgtccagcccccaatccatcctgcctcatcttgcctgcagcattgacaacca

SEQ ID NO: 326791 - DNA, 82 bp, Homo sapiens
ctcctctgtaaaatgaagggttggtagttggcaaaaaaggagaaagccactaaggtacaaaagacactggacaaccatattg

SEQ ID NO: 326792 - DNA, 98 bp, Homo sapiens
attcgcagtggtcgcttcttctccttgagcatcctggccagaacaagccaaggagccaagacgagagggacacacggacaaacaacagacagaagacg

SEQ ID NO: 326793 - DNA, 98 bp, Homo sapiens
caaggatctggaaagcatcatcagacccaagtgccaagttatttactttcccatcaggtttcctgatgtgagcaggaaaaactggtctacttcctgga

SEQ ID NO: 326794 - DNA, 100 bp, Homo sapiens
cgtgatgctggagaactgcaggaacctggcctcactggggtgtgtttgaccatcgaatgaagtgctggcagaaatgggaagatgctcaaattactttgct

SEQ ID NO: 326795 - DNA, 99 bp, Homo sapiens
cgtcactgcgggagttgcaggagggcctgcagcagggggaacttgaggttaagaacatggacatgaagccggggtcaaccctgaagatcacaggcagca

SEQ ID NO: 326796 - DNA, 74 bp, Homo sapiens
tttcgtacagtgggcaagttgggcaggactcatcttaaaaatcatgtgaatgatgagaagacagcagctgatta

SEQ ID NO: 326797 - DNA, 75 bp, Homo sapiens
ggacaagggagatgaggaggaggaaggagaagagaaacttgcagctgcagctactggaggttctgttctcaatgt

SEQ ID NO: 326798 - DNA, 83 bp, Homo sapiens
cagtaaaactactcatgtcagctgttctgcaggatcccatgagaaggagaactatgccatttttgggtcaggactggagatct

SEQ ID NO: 326799 - DNA, 50 bp, Homo sapiens
agtgactttctttactccactggtctgagcacttcaagacgacatcgcag

SEQ ID NO: 326800 - DNA, 100 bp, Homo sapiens
ccaccccctctgcccactatgcccactctcaccagcctcccatcttccaccgacaagccgtcggaacatgaatgaagcctcttctctgcttagtgccacg

SEQ ID NO: 326801 - DNA, 100 bp, Homo sapiens
ggggcagaccgctggggactgcgggcggcgctgtgtccgtcgccatgacaggtctcagccacctttgcggctagtcttgtcagcagcccggccattggag

SEQ ID NO: 326802 - DNA, 90 bp, Homo sapiens
gcacgctgaggccgaggcggagaaggggcttcctgagcgtcccagtacactgacagaggtgcctggctgctacaaaccatgcaatgagcc

SEQ ID NO: 326803 - DNA, 100 bp, Homo sapiens
ctgaaacaggactgttgctatgacaacagggagaaccccatctccagctggaacgtgaagactgacatcaatttgccctatcttacaatggattcttctg

SEQ ID NO: 326804 - DNA, 100 bp, Homo sapiens
atttcctgttccatccgcccagcgaccggcccttcatcccctatggtcatcatcctgaaccacccggggcagattagcgccggctactccccggtcatcg

SEQ ID NO: 326805 - DNA, 84 bp, Homo sapiens
agtgcattatcccaatctcggcttactacaacctccgcctcccagggaccattgacatttatggatgtggccatagaattctct

SEQ ID NO: 326806 - DNA, 100 bp, Homo sapiens
aagttcatctccttctgcatccttaactgagaatgagtattatgatgacacattcccctccatgaaggagcagatggttttcgagaaaaatgtcttcaac

SEQ ID NO: 326807 - DNA, 101 bp, Homo sapiens
atctgatcctaattcccttgctgatgatattggaatgtcgttgtctgctgggtcttcccctcttcattcccccaagattactccacatacttctcctgctc

SEQ ID NO: 326808 - DNA, 74 bp, Homo sapiens
cccaactcatgttgacgggcagccagctagctgggttgaaaacaccacacactgtgagtttgcctacctgcggg

SEQ ID NO: 326809 - DNA, 82 bp, Homo sapiens
gcatctcctcctgctccccatcgccatcccctatgcagaaaaggttaagaagttcttacaagagttctaccaggatgatgaa

SEQ ID NO: 326810 - DNA, 100 bp, Homo sapiens
gccccgaagctaagagcccccttcagtcgcagcctcactctagaatccacattcatctcaatggaaggatcctgccttaagtcaacttatttgtttttgc

SEQ ID NO: 326811 - DNA, 90 bp, Homo sapiens
aaacctgtgtaccatgcactgaagactttagaagacagctttccatcgacactaggccctttagaccagcctctgaagggaatcctagcg

SEQ ID NO: 326812 - DNA, 89 bp, Homo sapiens
cgggcccgggcatggtggtctggggcaacgcggaagatttatcagcaagactgttgaacgcataactgcccaagatgcctgtccctccc

SEQ ID NO: 326813 - DNA, 100 bp, Homo sapiens
ccagtgatgacacaaaatcccagatctacctgacgggcctgcgagggttgaagattgtgaagcaatagcctaagctttctgtatgagcccaatagccaag

SEQ ID NO: 326814 - DNA, 82 bp, Homo sapiens
cagccgcgcgctgagggtctcggggcgggcgccgcgggacctctccgggccatggcatgatgccttcttctgtagagtgggc

SEQ ID NO: 326815 - DNA, 75 bp, Homo sapiens
tcccagaagttgttctaacgctgcctttgctttaaaacagtattacttgcggtttcaagtgccccatttgctcca

SEQ ID NO: 326816 - DNA, 100 bp, Homo sapiens
ccgcgctacgtggtctccatggggaggagcagctgatgagccagatccgggagacgcagcagctctgccaccagaccctgttcatcttcgatgaagcgga

SEQ ID NO: 326817 - DNA, 75 bp, Homo sapiens
tagacagcccatggagggtagatctcggtgatctgtgaaaatggttcgctattcacttgacccggagaaccccac

SEQ ID NO: 326818 - DNA, 83 bp, Homo sapiens
cgaggccggacgcacctctgtttgggggtcctcaggatcagttcttaagagcagccccggtaactggaggaatgggagccgtt

SEQ ID NO: 326819 - DNA, 90 bp, Homo sapiens
ctaaaaacagacaagaatatgaagacatagctgtgaagctgggaactgatctagaataggactgttgacatttagggatgtggccataga

SEQ ID NO: 326820 - DNA, 51 bp, Homo sapiens
catttctgaagcgagcgtcttcgatggtgcactttacaggtccccgatgaa

SEQ ID NO: 326821 - DNA, 98 bp, Homo sapiens
gaagacctgttgcggaaggttcgcgccaaggagaccaggaagcgagcactcagcagtcagaggctaactgttctgccatgtttggaaaactgatgacc

SEQ ID NO: 326822 - DNA, 89 bp, Homo sapiens
tcgcggatttgcaccccgtggggtggtgcacacagaacaacaaggtgttgatgccgccggacgcaaacgtcactgctgcctccactccc

SEQ ID NO: 326823 - DNA, 101 bp, Homo sapiens
ttgacttgtttggaggtgttgatacatttgtccgactccataaccagaagactggccaggaagtggtgtttgttgccgagccagacaacaagaacgtgtac

SEQ ID NO: 326824 - DNA, 88 bp, Homo sapiens
aagataggcggccatggtccaaccttgaagataagaccatcatcatgtggaaactgaccagggatgagaccaactatggaattccaca

SEQ ID NO: 326825 - DNA, 90 bp, Homo sapiens
aaagtgaaaccagtgttgctcaactctaagttacctgtggatatccttggaagagctgacattttggatgtcaatcagatatttaaagat

SEQ ID NO: 326826 - DNA, 95 bp, Homo sapiens
cacgctgcgggcccgggccatggccgccgccgatgccgagagctccaaacgagaatggaagccgctggaggaccgtagctgcacagacataccat

SEQ ID NO: 326827 - DNA, 83 bp, Homo sapiens
gttttctagaagcctgtcgaaaaatgggggtgcctgaggcagccagataagctggtggtggtatggacccgtcggaaccgacg

SEQ ID NO: 326828 - DNA, 82 bp, Homo sapiens
cgacaagccgctggcagccgcggatctcaccgccgctcagggcacattcaggaccccgcgagccagcggctgacgtggaaca

SEQ ID NO: 326829 - DNA, 51 bp, Homo sapiens
caacagcctggcgtccgccacgattggccttaagagaaggacggagccaca

SEQ ID NO: 326830 - DNA, 75 bp, Homo sapiens
gcccttcatggaaaccactgggaggacctgggctttcaggaaatgtggatctgagagaatacttgtctgaagaag

SEQ ID NO: 326831 - DNA, 94 bp, Homo sapiens
cgtcggttgagcggcggcgaacatgcgcttttgacacattggaggtgagaagccctaccactgcaactgggacggctgcggctggaagtttgcg

SEQ ID NO: 326832 - DNA, 100 bp, Homo sapiens
atcagatcaaccaccaaagtgggaaacattgaaatcaagatatgaggccccaggattcctggcgaggtcctcctccccttttccagcagcaaaggtttga

SEQ ID NO: 326833 - DNA, 98 bp, Homo sapiens
tcccgtgttaaaagaaaacaaggcgattccgcagtccccccgttccctggaggtcctgtggaatgacgatcgtcaccggattgaggagaaacgtaaaa

SEQ ID NO: 326834 - DNA, 73 bp, Homo sapiens
gtgacggtggccctgtcagtggctctcttggccctcctgaaatggaggaaaacggcaaaccagttaaatctca

SEQ ID NO: 326835 - DNA, 74 bp, Homo sapiens
tgtgatgtgctgaagccaagaaggccagaaatgtacacacaggagagctggctgcagtaaaaatcattaaattg

SEQ ID NO: 326836 - DNA, 98 bp, Homo sapiens
gtgtcagcactgagcgaggccagcacctttgaggaccctcagcgcctctaccacctgggcctccccagccacgtccagaatgacagggtccagaaact

SEQ ID NO: 326837 - DNA, 98 bp, Homo sapiens
caaatacttgtgcactgggagagatggagtgaaggtacctgagcgcaggaaccatggtcttcattgctgcctcagcattagcggaagtgccacgggcc

SEQ ID NO: 326838 - DNA, 100 bp, Homo sapiens
gactgtgctggcgctgggggcgctggcgggcgttggcgtaggagggcgccctgcgtccggcagaggaggcgagcatcccgctcaggtgatgaggaacccc

SEQ ID NO: 326839 - DNA, 75 bp, Homo sapiens
ctgggaaatgattaaaatggatcctgacctcagtctaacacacaagagttgatctctctaatgtattagatcttc

SEQ ID NO: 326840 - DNA, 88 bp, Homo sapiens
aaagatgcagtagaagcataccaacttgcccagcgtctgcagtctatgactgaacattcttcacgatctgaaaggaaaagaagagatt

SEQ ID NO: 326841 - DNA, 96 bp, Homo sapiens
gtcatgcagaactgctcaggactataagcactactatgggtgcaagatccagaacatgagtcgggagtactgcaaaatcttcgcagcagaagcccg

SEQ ID NO: 326842 - DNA, 76 bp, Homo sapiens
ccgaggcccccctgaaccccaaggccaaccgcgagaagatgacccaggtcctggtgcttgatggtcgaggccatct

SEQ ID NO: 326843 - DNA, 98 bp, Homo sapiens
tgaccgaattaaaatttatacttcgcaaaactcagcaattttttgatgagcccacttataagaagcgaaggttggatgagtgtgaagaagccttccaa

SEQ ID NO: 326844 - DNA, 90 bp, Homo sapiens
cttttccgcccgcttcgatcgcctcgcgccggctgctctttccggacagcccacctgaggatattgaccataaggactcatatctcatta

SEQ ID NO: 326845 - DNA, 74 bp, Homo sapiens
gctggcctgcggcgcctgggcgctctgaggtgtttggagaagagggattgaccctgaatcttgaagacgttcag

SEQ ID NO: 326846 - DNA, 51 bp, Homo sapiens
gaagctgagaaccatgctcattgcacagccagagaacaacacatcacacac

SEQ ID NO: 326847 - DNA, 82 bp, Homo sapiens
agatgacaaccatagcccagtgccaatgcatcttctgtactctggacgattactgagagccaatcagattagtttcaactgg

SEQ ID NO: 326848 - DNA, 100 bp, Homo sapiens
aagaagcagttcaaccgcgacgtgctggagtgccgacgccaccgccgagcccatgatcctggaacagtacgtggtggtgtccaactataagaagcaggag

SEQ ID NO: 326849 - DNA, 50 bp, Homo sapiens
gcaacagttttcaaaagttatagatgagcctcctgacaaggtgatccggg

SEQ ID NO: 326850 - DNA, 98 bp, Homo sapiens
aatctccctgctccgcagcgacatcaccaagctggaggtggacgccatcgtcaacgccggccaccagcccctcgggttccaagatgcagctactggag

SEQ ID NO: 326851 - DNA, 100 bp, Homo sapiens
tcctggaatcaaatagtgttacggcaacaaggctaaatttattgtgaagaaatcagaagatgaagaagacgccgctaaagatacttatattattgaatgc

SEQ ID NO: 326852 - DNA, 83 bp, Homo sapiens
cttttaacgagtattccaaatttgatggcaaggaggaggaagccaagaatctggtgagcgaagccatcgcagctggcatcttc

SEQ ID NO: 326853 - DNA, 75 bp, Homo sapiens
cagtgatggaccgtgctagtgacctgactgatgccttcgtggaggccttgacaaaattcttgaaatgtgttaatt

SEQ ID NO: 326854 - DNA, 50 bp, Homo sapiens
caaaggttgcagcaaccaaaagccaggtcgacaaagatgctgaattagtg

SEQ ID NO: 326855 - DNA, 82 bp, Homo sapiens
gagaatggcgcatgcgcatattcagggcggaaggcgcgctaagagcaggacaatgaaaagcgaaccccattgcacgccgcag

SEQ ID NO: 326856 - DNA, 75 bp, Homo sapiens
ggcccctcatgtaacctcagagatctgggcagaatgggagctgactgatatggtggtgtgggtgactggagcctc

SEQ ID NO: 326857 - DNA, 100 bp, Homo sapiens
cagccccagttatgtggacgagctgttaaaccagagacaaagcatggaggacacaagaatgggaggaaaggcggactctcaggaacttcattcttcacgt

SEQ ID NO: 326858 - DNA, 101 bp, Homo sapiens
gacgcagcaagcggggcgctgtgtccccaagctccccgtcctcggacaatgcagatcttcgtgaagactctgactggtaagaccatcaccctcgaggttga

SEQ ID NO: 326859 - DNA, 75 bp, Homo sapiens
ttcatgccgcagcctcctagctgggattacagctaaaaagctgtcccgtcttacatattcatcaagatgtccagc

SEQ ID NO: 326860 - DNA, 74 bp, Homo sapiens
gcttaaaggaagcagaaaatgtgtggcggattactgggacagatggaacgtccttgtgaagacctttatctgag

SEQ ID NO: 326861 - DNA, 76 bp, Homo sapiens
tgtgtgtctagatgtaattaatcaaacttggacagctctctatgtttctgatgaagaattgaaaagaagagtagct

SEQ ID NO: 326862 - DNA, 83 bp, Homo sapiens
ccgatccagcctgcggagcctgtggggcagccctggcctcccacgactacatcctgaagattgtgcccacggtttatgaggac

SEQ ID NO: 326863 - DNA, 100 bp, Homo sapiens
atgaacctcaaactgaatcctctaaaggccccatacaatgaagtagacattggtggaaacatttagattctggactctacttataatatccctaactgct

SEQ ID NO: 326864 - DNA, 101 bp, Homo sapiens
ctggagtgcgtgggggaccggctgttggcggttctgggaggtgatcagtgatgaacatggcatcgaccccaccggcacctaccacggggacagcgacctgc

SEQ ID NO: 326865 - DNA, 82 bp, Homo sapiens
cctgccctctcgctttccctctcgcgtctctggctgcaggtgtgggcaagagcagtttactgttgcgttttgcagacaacac

SEQ ID NO: 326866 - DNA, 83 bp, Homo sapiens
ctccacgtagcccagcgccggcacgcgcgaggcccttccagggtctccctccactgctgtagtaacccgggtccggggcctcg

SEQ ID NO: 326867 - DNA, 90 bp, Homo sapiens
ggaccctcttcgcgggcgattcgcgtagcctcaggcaggccccccgggcattctggccctgctggacgaggagtgctggttccccaaagc

SEQ ID NO: 326868 - DNA, 83 bp, Homo sapiens
ccctaaaattgccaaggaactgggatttcaacctgaaagtggaggctgcgaaaatagaagtctcaggggatccagaactgcag

SEQ ID NO: 326869 - DNA, 82 bp, Homo sapiens
caagatgaggagcccctggcctgcccggacgagttcgatgacttcgtcacctatgagccgcttacaaacacgcagatggcaa

SEQ ID NO: 326870 - DNA, 75 bp, Homo sapiens
atgttgccaaaatgtttcctaaagttcgtgaatctcaacttgatgaactggacctcacagacaaacacagagaag

SEQ ID NO: 326871 - DNA, 100 bp, Homo sapiens
cctcttcatattggcgatcctgttgtatttgggtctcgctgtgctagaatattccgtctagttttgcagaagaaacacatagagcagaagcaagtggaag

SEQ ID NO: 326872 - DNA, 98 bp, Homo sapiens
cttccccacttcttacactccaaactcagccgggacagacctctgctgccgccgcccccacgtcaaaatgcagatcttcgtgaaaacccttaccggca

SEQ ID NO: 326873 - DNA, 123 bp, Homo sapiens
aagagacccaggggaagacccaaaggcagcaaaaacaagagtccctctaaagcagctcaaaaggcgaggattaaatccaccacacagggtgaaatctatctccatgacaacattcacacaaca

SEQ ID NO: 326874 - DNA, 50 bp, Homo sapiens
ccctcatcgagctcttcgtcaaggcaatccggctcatccaggcctgcgtg

SEQ ID NO: 326875 - DNA, 83 bp, Homo sapiens
cttggatatcttcggggacctgaagaagatgaacaagcgccagacctgcctagagctggaacgttacctccagagcgagccct

SEQ ID NO: 326876 - DNA, 100 bp, Homo sapiens
tacatgcccaagaggggacttgatgttaacaaatgtgagattgccagacaaaactgtgtggagttttatcctatattcataattacattgtggatggctg

SEQ ID NO: 326877 - DNA, 100 bp, Homo sapiens
cggaaaatagcctttgccatcactgccattaagcactctacacccccaagtgcatatgggtctgtcaaagcctatactaactttgatgctgagcgggatg

SEQ ID NO: 326878 - DNA, 82 bp, Homo sapiens
ggccaaagcctgcccagacggctcacctgtgcgggatggaacaaaaggaagggaaaaggccgaggcatcagcgtgtgaagac

SEQ ID NO: 326879 - DNA, 100 bp, Homo sapiens
gcagacacaactacgaggtggcgttccgcgggatcttgcagaggagaggtaactaggatttctacctcaaccgcgagacctatgcaaggacggtgtggac

SEQ ID NO: 326880 - DNA, 83 bp, Homo sapiens
cagcatcatgcagccgccgccgaggaagatattaataaggcagcggaaagaagaaatatgaatacggctccatcaagacccag

SEQ ID NO: 326881 - DNA, 100 bp, Homo sapiens
ctcgggagctggctgaagatggctactctggagttgaggaattgactttaaaattaggaccatagagctcgatggcaagagaattaaactgcagatatgg

SEQ ID NO: 326882 - DNA, 75 bp, Homo sapiens
gctgtcccgggcctaccccctggactccctggagaagcagatggaaaagtgtaaggcaaacattggtgggcaccg

SEQ ID NO: 326883 - DNA, 74 bp, Homo sapiens
ttcatatcattgtcttccacagatgtgtcaccaaaccagaatccggggcaccagctaccagagccctcacggca

SEQ ID NO: 326884 - DNA, 75 bp, Homo sapiens
gacttcctagtgtgtactttttcatcccaggaacaggggaaaattggagttgtcttcaacattggcacagttgac

SEQ ID NO: 326885 - DNA, 100 bp, Homo sapiens
caaagatgtcaaatcggaagttgccatgctgtatcctgagctctacaaggatcttctcaaggtggcttcccacacttctgactcggacgttccttccggt

SEQ ID NO: 326886 - DNA, 97 bp, Homo sapiens
cagccaattatggaagcacttagagcgaatgacaacagagctgctcaaggcgggaactctgagctaagcagtggaggtttctctggatctggagaga

SEQ ID NO: 326887 - DNA, 88 bp, Homo sapiens
gcaaagctgaaggagaagtatgagaaggatgtggatgaagcttacatgaacaaggtagagctggagtctcgcctggaagggctgaccg

SEQ ID NO: 326888 - DNA, 100 bp, Homo sapiens
cctatgggaactggcttctcgctgtactgctgcagatgggagaaaactggttgtcctggatgtttgaaaagttggtcgttgtcatggtgtgttacttcat

SEQ ID NO: 326889 - DNA, 100 bp, Homo sapiens
tctacgtggatcagtatttgtatcactactgtgttgtggatccccaggaggttgatactgcctctccaagcccaatggaaacatctggatgtgcccctgc

SEQ ID NO: 326890 - DNA, 89 bp, Homo sapiens
aacctagaaatcatacgcggcaggaccaagcaacagcaggccatccgggccacctttagaaacacggaaaggggtgccctcctaaccac

SEQ ID NO: 326891 - DNA, 75 bp, Homo sapiens
cacgaattgggtcgatctgtgacagatatcaatgaactgagccatgttcaaatccctgttatgttgatgccagat

SEQ ID NO: 326892 - DNA, 80 bp, Homo sapiens
ttgttaaggattccaagtaactcttatttggacagaactgtaccgctctctttttggccagctccaccctcccgacgaag

SEQ ID NO: 326893 - DNA, 75 bp, Homo sapiens
tggcctggaggctatccagcctccttcccgaactcacaaatcctgacgagctcctgtcttatctggacccccccg

SEQ ID NO: 326894 - DNA, 97 bp, Homo sapiens
gctctactccaggccccgtccgcccgggggcgccgcccaccgcgcctcgctcggtgcatctgcagacgcagcaggaggtgaagctgcgcatgacggg

SEQ ID NO: 326895 - DNA, 100 bp, Homo sapiens
agccctcgcccggcgctccagtagcaggacccggtctcgggaccagccgcccacaggtgctgagaacaagagaaatcaagtgaaggaaggaggcggagtt

SEQ ID NO: 326896 - DNA, 51 bp, Homo sapiens
attctcactctcacaaccaatgagctgaccatactccctggagccttctcc

SEQ ID NO: 326897 - DNA, 102 bp, Homo sapiens
cgcgaatatcgtcatcgttagaagatggaaaaattgtacctgcattacttgagagcagagagctttagaaaagctctgatttatcaaaagaagtatcttttg

SEQ ID NO: 326898 - DNA, 106 bp, Homo sapiens
gccagcggccgagcgggcggcttcctggcctgggcgctccggtggcggcggaggtcaaaatgcagatcttcgtgaaaacccttaccggcaagaccatcacccttga

SEQ ID NO: 326899 - DNA, 100 bp, Homo sapiens
ttcactgtatgaaaatgactgcatatttgacaaatttgaatgttgttggaatggatctgacaggtagagtggaacccccagctattagaggtcccacccc

SEQ ID NO: 326900 - DNA, 83 bp, Homo sapiens
gcccgcggccggccagccgaagatggtggcggctactcctcctgatacacaatcatcatcttactagttctctgtgttgctcg

SEQ ID NO: 326901 - DNA, 100 bp, Homo sapiens
aaatacacatattgtaaatattgaatctttcattctttctggatatgttatcatgtggaacaaggcaattgaactttggcaaccagaacgccaggttcca

SEQ ID NO: 326902 - DNA, 50 bp, Homo sapiens
gtcaagatcagcaacactatttctggtatattgagatcttcagaagtagc

SEQ ID NO: 326903 - DNA, 90 bp, Homo sapiens
caatttttcatccttggatgatgaaggagatactcaaaacatagattcatggtttgcccagaaaaattatatggcatttctggactctca

SEQ ID NO: 326904 - DNA, 75 bp, Homo sapiens
ccggattgcctcaaggatgtcatatctatgagtaccgcgagagcaacaagactttccttatcccagttgattgtg

SEQ ID NO: 326905 - DNA, 100 bp, Homo sapiens
ccgagtggatcggggacggagagaacacgagcccatcagtattctaccttgtaaatactgttatttgtatatactgtaaatgatgacatcggtgggcact

SEQ ID NO: 326906 - DNA, 101 bp, Homo sapiens
aatggggtagatattaacacctgtaaccagattgcagagggaatggcatacatcgagcggaagaactacattcaccgggacctgcgagcagctaatgttct

SEQ ID NO: 326907 - DNA, 75 bp, Homo sapiens
tcattctcatatttcaccaataaaggaagtgtttggattgtgagctatttcagaactgttctcaggactcattat

SEQ ID NO: 326908 - DNA, 123 bp, Homo sapiens
ctttggcatggcccatcccctaatttctgaccagaagccctccctctaccctaaggtacaccaggggttggaaaaaccacactaggcaaagaacttgcgtcaaaatcaggactgaaatacatt

SEQ ID NO: 326909 - DNA, 90 bp, Homo sapiens
tggaggccaggtttactggagtaggtgttagtaaggcagccgaggccggggccggggctacaggggccgaggaagccgtggaggatcgcg

SEQ ID NO: 326910 - DNA, 75 bp, Homo sapiens
ttctactggacttcatgcttagatacatgtataacaagctttctaaaaccaatttttccaacaacaacgatttcc

SEQ ID NO: 326911 - DNA, 75 bp, Homo sapiens
aggaagctgggaaaccacaaaggaatggatcagtggtcaattggtcaggacagggactacagaaattaggtccaa

SEQ ID NO: 326912 - DNA, 90 bp, Homo sapiens
agaaaagcgagaccgcgtgcgaggaccgctcaaactttggaacaaataccgaatttccaacattccatcactaatattcctcgacgccac

SEQ ID NO: 326913 - DNA, 100 bp, Homo sapiens
ccgcaaaacaccttcctggacaccatcgccacccgttttgacggaacacgatcagctcagctactatttaataaaacaaaatctgtagaattcacgtttt

SEQ ID NO: 326914 - DNA, 83 bp, Homo sapiens
ttcagaactactagcagataatttggggggacttcatattcagaagtctatataaaggtgttgactttaaggtgaaaacaatt

SEQ ID NO: 326915 - DNA, 100 bp, Homo sapiens
gttcgagatggagcgggcgcactgggaggtggaacgggccgaactgcaggatcagtttgacaacttagaaaaacacacacagtggggaattgatattctt

SEQ ID NO: 326916 - DNA, 75 bp, Homo sapiens
agagcctcgagaagggacaaatgtaacacgattatcaggaagtgactgcttttcaggaagccttggacgctgcag

SEQ ID NO: 326917 - DNA, 51 bp, Homo sapiens
atccactactgccagaccagaaggttggacgtgataagtatgagcctgcag

SEQ ID NO: 326918 - DNA, 83 bp, Homo sapiens
agaatttgctactgagttagcttgggaaattgacaggaaagcgcttcatcagcacaggtgctgactgggttacttttttaaac

SEQ ID NO: 326919 - DNA, 73 bp, Homo sapiens
tgtttcagtggaatgggcagaaggaggtgccacaaagggcaaagagggggcaatggcggcttcctgtgttcta

SEQ ID NO: 326920 - DNA, 46 bp, Homo sapiens
tcttcagtggataataccaaaatggccaaacatggtgatccatgtg

SEQ ID NO: 326921 - DNA, 82 bp, Homo sapiens
tagactacaccctcatgagggtctgcaagcagatgataaaggtgttacagcacatgaaggccgtgcaggcagatcaggagcg

SEQ ID NO: 326922 - DNA, 83 bp, Homo sapiens
agacatttcttcggcattctgcaacaggttatcaatactctggctgaccatcatcatcgtgggactgactttggtggaagtcc

SEQ ID NO: 326923 - DNA, 80 bp, Homo sapiens
ctccgcgtcccgctcgctgggagagagatcaggcctttgtgacactaaccacaaacgatgcctacgccaaaggtgccctg

SEQ ID NO: 326924 - DNA, 75 bp, Homo sapiens
aagaaaatacaaatcacacgcataatggatgaaaggaaccgacaggaactgcaagcacatgttgaccagataact

SEQ ID NO: 326925 - DNA, 101 bp, Homo sapiens
atgtgattcagaggctgagacctgtgcatgctcatctctatttgcagccaggaatggaagatggttttaagacaattatctcctatattgatgagcaattt

SEQ ID NO: 326926 - DNA, 99 bp, Homo sapiens
cccggttccccggcccacagtgggggtgtgcaaacccgagagaactgggatttggaatgccctgacagataattatgggaatgtgatgcctgtagactg

SEQ ID NO: 326927 - DNA, 71 bp, Homo sapiens
aaaccaaagaagttatcttcagtgtgggaagaggagttgtacgcatgtcagagaggttgcaggctgttttc

SEQ ID NO: 326928 - DNA, 97 bp, Homo sapiens
gaggaggcggatcccccggcgtcagagtattgggaaagggtcgttgtggtgcatagacccagagtatagacaaaatctaattcaggctttgaaaaag

SEQ ID NO: 326929 - DNA, 100 bp, Homo sapiens
ctaccacccaaccttgaggcacagtgaagacatcggtggccactccaataacagcaggtcaagagcaatctgaatccaaatgcaaaggagtttgttcctg

SEQ ID NO: 326930 - DNA, 73 bp, Homo sapiens
atcccaggttgccttggaaaatgccaacgccgtgtctgaagattctataccagactgttacaggattgaagaa

SEQ ID NO: 326931 - DNA, 97 bp, Homo sapiens
catggaggctcaagctgggtctactcaagccttcatctcctcgtcctccaggcagcacaagccattgtggaatctccaccaggtgtacagaacggtg

SEQ ID NO: 326932 - DNA, 97 bp, Homo sapiens
gaggattatggatgaacgtaacagacagggctgatcccttatccaacatggttctaaccttcagtactaaagaagatgcagtttcctttgcagaaaa

SEQ ID NO: 326933 - DNA, 100 bp, Homo sapiens
ctctgccttgctgatctgagctcagacctgccaatttaccagagataattgataacaccctgtaacagctgagtgatagtgatacagacttactacaggc

SEQ ID NO: 326934 - DNA, 74 bp, Homo sapiens
gaggaggaggtggagttgctgcccttccggagtccgccccgtgaggagaatgcgggccaatccgagcctacatc

SEQ ID NO: 326935 - DNA, 80 bp, Homo sapiens
acttcgatgatcgtgtgtcggatgaggagaaggtccagtggtttacgtcttggatcttgcagatagactgatctcaaaag

SEQ ID NO: 326936 - DNA, 80 bp, Homo sapiens
gtgagcgggaacttggcagtggtccagaagcttcgctttctggtggacagaggcagcttgctggattttctcaagaaccc

SEQ ID NO: 326937 - DNA, 98 bp, Homo sapiens
ctgggacttcccgtccgcggcgtggagggaggaggaagccaagaatctggtgagcgaagccatcgcagctggcatcttcaacgacctgggctccggaa

SEQ ID NO: 326938 - DNA, 100 bp, Homo sapiens
gttcgtccactccacctggacctgccccatggaggtgctgcgggatcacctcctcggcgtgagcgacagcggcaaaatgatgaggagtctgatgaggaag

SEQ ID NO: 326939 - DNA, 83 bp, Homo sapiens
gtacaccgcgtccctggcctgcaccacacctacgatgtcctcttcctgggcactggctgaaggcggagctggagatattcggg

SEQ ID NO: 326940 - DNA, 100 bp, Homo sapiens
ccctccagcctggtgtcaccaccgtcatcgacaatttctacatctgcccgaccaacaagaggaaggagcgatctctctttgagtcggcatggaagaagga

SEQ ID NO: 326941 - DNA, 82 bp, Homo sapiens
tggattctcttatcaaggctaccatagctgggggtgaaactaatctggattcactccctctggttgatacccactcaaaaag

SEQ ID NO: 326942 - DNA, 100 bp, Homo sapiens
atgtggatgggctgcccccaaaagtgactggcccgcctcctggcacaccccagccccggccacatgaaggatggaactgcaggatccaaagatgaatgga

SEQ ID NO: 326943 - DNA, 100 bp, Homo sapiens
aggactgggctaatgctaatgtcagcagacagattgaggacactgtattatacggttactatagaagaaggtagataatgactataatgcccttcgagaa

SEQ ID NO: 326944 - DNA, 89 bp, Homo sapiens
gtacttctgccactgctgctccgtggagatcgtcccgcgcctgccggtaactaggatttctacctcaaccgcgagacctatgcaaggac

SEQ ID NO: 326945 - DNA, 100 bp, Homo sapiens
acgacatcatcgtcttcgcctatgcctgccaggctgctggtgcttatgggcaacgttccagaccgggggggccgcccaaatgagctggagcctcccatgc

SEQ ID NO: 326946 - DNA, 75 bp, Homo sapiens
gttaaggattccaagtaactcttatttgttggttgaatctggcgatgtggaacccatggatatggagggctgact

SEQ ID NO: 326947 - DNA, 90 bp, Homo sapiens
gcttgctccctacgatgagaactggttctacacgcgagctgcttttcatgcaacacccaacacttataagcggaagaacacagaaacagc

SEQ ID NO: 326948 - DNA, 78 bp, Homo sapiens
ccgacggctgctcaaacatcaggaattctgcttggtcagaatcgtgatggcattgtgttcagcactgatgactatttt

SEQ ID NO: 326949 - DNA, 97 bp, Homo sapiens
gggagccagagggcgggggtcctcgccgggaccctcctgtgggcccaggggcccagatagctaataaccgaacacctggaagatggacccagcggta

SEQ ID NO: 326950 - DNA, 100 bp, Homo sapiens
cccggcgctcggcatggctctcctggtgctcggtactccaaagattcaggtttactcacgtcatccagcagagaatggaaagtcaaatttcctgaattgc

SEQ ID NO: 326951 - DNA, 100 bp, Homo sapiens
ctcactgactgcagcatcgacctccggggctcaagtgatcctttcatctcagcctcctcagtagctgagactacaggagctcgcccgtcagcgaggagtc

SEQ ID NO: 326952 - DNA, 75 bp, Homo sapiens
ctcctctagaggaaaatatgctgaaagagacattgtgcaggtggaacaatccaaagttttaatcaaagaaggtgg

SEQ ID NO: 326953 - DNA, 50 bp, Homo sapiens
ctgaccgaagaacagattgctgtcggatatgttgcggtcactatctaaca

SEQ ID NO: 326954 - DNA, 82 bp, Homo sapiens
gagcagcgccagcggccgagcgggcggcttcctggcctgggcgctccggtggcggcggaggaacccaagacagaccaggatg

SEQ ID NO: 326955 - DNA, 100 bp, Homo sapiens
ggtgcctctggcagtgacgaggacgaagtgtccgaggttatcaatactctggctgaccatcatcatcgtgggactgactttggtggaagtccttggttac

SEQ ID NO: 326956 - DNA, 75 bp, Homo sapiens
agtcaatggagcagagaatgatccctttgttagaccaaatttaccacaactgcttataccagccagtttgtatcc

SEQ ID NO: 326957 - DNA, 100 bp, Homo sapiens
tttcgtttttcggatgatgccttcaatactacctttatttccaccataggatgccaaagaagagtgaatggcccacaaagagcctggtagcacatacgct

SEQ ID NO: 326958 - DNA, 82 bp, Homo sapiens
tactacagaaatcttggcaattgcttcagaaaaaatgaaagaagcagtcagattggttgctccttgagggcaggacagttct

SEQ ID NO: 326959 - DNA, 95 bp, Homo sapiens
tggtggtcctccaccagacagtgtgtactctggcgtgcaacctggaattggaacggaggaatatgccaatttacaagtgagtgagccccaaatcc

SEQ ID NO: 326960 - DNA, 100 bp, Homo sapiens
tattgtagatctagaagtcactttggaagaagtatatgcaggaaattttgtggaagcaaatcctgatcctaactgttgtcttggagtatttgggctgagc

SEQ ID NO: 326961 - DNA, 100 bp, Homo sapiens
gggaaatcagccctggacctggcagatccttcagcaaaagctgtccttacagtttgcagtgttgatgtgggtatttacctatgttggtgccttgtttaat

SEQ ID NO: 326962 - DNA, 100 bp, Homo sapiens
gcccgccacaagatgaccattgctgcccttgagtctaagttggcccaggctgaggagcagctagagcaagagaccagctctgaccacaaagccgagctct

SEQ ID NO: 326963 - DNA, 100 bp, Homo sapiens
cgggcgctccggctgtaaggagccgcggcggggggaaaatggagcccttcaccaatgccaggactaaaagaagtggtagaatcctgtcgaggaaaaaatc

SEQ ID NO: 326964 - DNA, 99 bp, Homo sapiens
ccgtgaaagcccccaacaccacgacaatccagtttcctgctaatttgcagcttcctccaggtccaatgatgcatcagcagcctccttctcagcaataca

SEQ ID NO: 326965 - DNA, 100 bp, Homo sapiens
agcaccaagttcacggccaacgccttggcactaggctgttatactttctgctgagtgccctgggcctgacggtctgtgtgctggccgtggcctttgccgc

SEQ ID NO: 326966 - DNA, 100 bp, Homo sapiens
gggagtcgctgtgatccggggccccggaacccgagctggagctgaagcgcaggctgcggggcgcggagtcgggagatgagaatcccaagcagcacattcc

SEQ ID NO: 326967 - DNA, 75 bp, Homo sapiens
gcacagtggctttaagatcctcaactgccaaaaggcaatggccacgaaggaagacaggaggtccgaggagaaagc

SEQ ID NO: 326968 - DNA, 76 bp, Homo sapiens
aagagaatggaattgaagtttcaaaaaaacgcacacaatcagatactgtgtggattctttaaacgctctaggtacg

SEQ ID NO: 326969 - DNA, 75 bp, Homo sapiens
atatctcaaaccacttctcagacaagttccatcccacctttgagtcaggttactctggccaggacttcgactggg

SEQ ID NO: 326970 - DNA, 82 bp, Homo sapiens
ctcctgctgccttcccgtcgccgctcccgaagcttttccagcattttgaaagcgaagcagaagccgtagaatcagcggcgag

SEQ ID NO: 326971 - DNA, 95 bp, Homo sapiens
tttgcttccaaatacaagctgtatagctggggatgttcaaaagaagtctggctaaacatgttaaaaaaggagagcagatatgttcatgacaaaca

SEQ ID NO: 326972 - DNA, 50 bp, Homo sapiens
gtgaaatgcaaagactgtgaggagaggtgtaaatgcagacaaagttggaa

SEQ ID NO: 326973 - DNA, 75 bp, Homo sapiens
cccttgtactacagacacagccttggttttctgggaaaaagaattcgacaccaaattttggaacttaaaaagaag

SEQ ID NO: 326974 - DNA, 100 bp, Homo sapiens
gaggcgggcagccggggcgtccagtcctggaatcaagatgtgagaccaagaaattatttctgaagaaagaaatttatgaaatagaatcaacccagtggga

SEQ ID NO: 326975 - DNA, 101 bp, Homo sapiens
tgttcctattcgggcatcttggctcctccttgagcaggggtgatgtgcaagctccaggaaagagatgaaatcggacgaattgaactagtccagaagctggc

SEQ ID NO: 326976 - DNA, 75 bp, Homo sapiens
ctttgtcatgtagccaagactggagaaacaatgttcaaaatgagcctgtttggaacaacctcaggttttggaacc

SEQ ID NO: 326977 - DNA, 105 bp, Homo sapiens
ctgggtctggagacgccgtggcagcctgaacggagtgtgcgacggattgggaggtatcgagaaccttccctgcgaacttcagaggaacttccagctgatgcgaga

SEQ ID NO: 326978 - DNA, 100 bp, Homo sapiens
ctgggaagccaacgaccacacgcaaagctggcagggcggagatgctggaccacgccgtcctgcttcaggtgatcaaagaacagcaggtgcagcaaaagcg

SEQ ID NO: 326979 - DNA, 99 bp, Homo sapiens
ttggtgtcgtttttccttgagctgaacgtcttgcaacagtggccgcacgcatagctacagcctccgcttggcgtcccgatgctctccaccagcggcccc

SEQ ID NO: 326980 - DNA, 75 bp, Homo sapiens
acagcattactgattcccaaatggatgatgttgaagttgtttatacaattgggcagcagcgttctcggatgctag

SEQ ID NO: 326981 - DNA, 83 bp, Homo sapiens
tcgcaatattgcaatataggggaaaagcaggtgctggagaatctggtaaaagcaccattgtgaagcagatgaggatcctgcat

SEQ ID NO: 326982 - DNA, 74 bp, Homo sapiens
cgcatcctatggctcaaagaaagatgattatgctcccggggagctttctgtgaagtgagaccagatgataaaag

SEQ ID NO: 326983 - DNA, 100 bp, Homo sapiens
actccaaaaaggagacataagaaaaaaagcctcccaggagatgagaaacctggatgagtgtgaggtgtgccgggacggaggggagctgttctgttgcgac

SEQ ID NO: 326984 - DNA, 101 bp, Homo sapiens
cgatctctgcggggcaagatggcggcgcccagacaggcctggagcacgagctcttgtccctggcaaagcgaaagcgcagtgactctgaggagaaggagccg

SEQ ID NO: 326985 - DNA, 100 bp, Homo sapiens
tcattctccctgggtacatcgacttcactgcagaccaggtggaaaatctctgaaggaaatggaaacaccgttgtcagcacttggaatacaagatggttgc

SEQ ID NO: 326986 - DNA, 100 bp, Homo sapiens
aaaagcattgctggtatttcgaaggactctatccaacctattatatggaagactgagagcgaggcgcgggagatcgaacacgtcatgtaccatgactggc

SEQ ID NO: 326987 - DNA, 100 bp, Homo sapiens
cgggtcttccagagcgtgaagatcaagatcggtattgttgcagcatctggcagtgagactgaggatgaggacagcatggacattcccttggacctttctt

SEQ ID NO: 326988 - DNA, 50 bp, Homo sapiens
ttcctaacagtggatttacttgttatcctgaatacatgtctaacaatttt

SEQ ID NO: 326989 - DNA, 97 bp, Homo sapiens
atgaactcactggagatgcaaagaaaagtgtggagatggagacaccccaatcgactcgccagaggatcttaatgatttaagaatggagggagtaaca

SEQ ID NO: 326990 - DNA, 100 bp, Homo sapiens
ttattcggagtactattatccaatatatgaaatcaaagattgtctcctgaccagtgtcagtttaacactgtgtttcagatgactcggtaaagcagtacac

SEQ ID NO: 326991 - DNA, 100 bp, Homo sapiens
agtccccaaaattacattgccaagggaaatcgtggaacacatggtccagcactttaaaacacagatctttggggatcggaagcccgtgtttgacggcagg

SEQ ID NO: 326992 - DNA, 100 bp, Homo sapiens
ttcacaaatttggaatctgccttctactccatcgtgggactcagcagccttggtgctcaggtgccagatgcaaagggagaactaatgccgacgtgatgac

SEQ ID NO: 326993 - DNA, 75 bp, Homo sapiens
gcgagtttcctgtgaccaacagtcgagcgcgaaaggtcttatatccagatggccaggctcagatgattcacccca

SEQ ID NO: 326994 - DNA, 75 bp, Homo sapiens
caaaataaaactaacagtctatgatgtcaaggataagtctcatgacacccttcctgcagatttcacaaaactgca

SEQ ID NO: 326995 - DNA, 74 bp, Homo sapiens
cagcagctgctgaagacagcactcaaagtacctgggggacagggtgtctgagaaagtgaagaccaaggttattg

SEQ ID NO: 326996 - DNA, 101 bp, Homo sapiens
agttaccgggagaggctgtgtcaaagacaagccaaacggctcctgggacagattgtggaccgctgtcgaaatggacctggctttcataatgacatagacag

SEQ ID NO: 326997 - DNA, 82 bp, Homo sapiens
cgcgcggagcgccccttcgcgtcccctgcaccatgagctggggcaccgagctctggagctccacgcaggagatcggtgagga

SEQ ID NO: 326998 - DNA, 100 bp, Homo sapiens
acaattagcccacagagtggcaacttccgccaattgctacttcaaaggtctctaattaacagaagatggcaaagcccagccacagcagctatgtccttca

SEQ ID NO: 326999 - DNA, 75 bp, Homo sapiens
tatgaatcaacaaagtgatactgcagacttgcttggaggaagaagcgtgtggagggccctggctccctgggcctg

SEQ ID NO: 327000 - DNA, 143 bp, Homo sapiens
gcactacatccagcacgagtgggctcggttcgagatggagcgggcgcactgggaggtggaacgggccgaactgcaggtgctgacagctgcagaagaaattgtacatggtgctgtacagaaggtatttctccactgtgccatct

SEQ ID NO: 327001 - DNA, 98 bp, Homo sapiens
gtagcagtttcctggtcctgttcctcatcaacaccaaggatctgcacttcagcgcctgctcctggtcatcactaaccagatttacttggagtacatgt

SEQ ID NO: 327002 - DNA, 96 bp, Homo sapiens
tggaggcctcgggtgctccgaaagcggtaccttcgggggcccccccgcacccattgatgaccttccatcagtgcccgtgtttgacagaactctgcc

SEQ ID NO: 327003 - DNA, 83 bp, Homo sapiens
ctaaagcagcgtgcgttcagccctgggcagctcttcagtgggtcatctgtgtgtcacagcctcagaagaccagcgagatggct

SEQ ID NO: 327004 - DNA, 100 bp, Homo sapiens
ggttaggccgagctttgcgggaaagcagcgggatcgcttacacctgagacgaactacagaacagcacgtaccagaggtggaagtccaagtcaaacgcaga

SEQ ID NO: 327005 - DNA, 74 bp, Homo sapiens
aaacctcgagtccctgtgatcaagaaatgcacctatggcatcaagtgcaagttctaccacccggagaggccgca

SEQ ID NO: 327006 - DNA, 75 bp, Homo sapiens
cagccgactggagcaggcagcagcccagttgagccccatatgggggttggcaggcagcagagaggcccctttcaa

SEQ ID NO: 327007 - DNA, 74 bp, Homo sapiens
agtcttccgcaggaaggagatgtgccactcatctctgcccagctgctgccctccccaggaggcctccatggctt

SEQ ID NO: 327008 - DNA, 75 bp, Homo sapiens
ctgctctcactgcggagaggtgtttggtgcagaaggagaaggaagccaacatccttttggagccatgaatattgt

SEQ ID NO: 327009 - DNA, 75 bp, Homo sapiens
ccgagcgggcggcttcctggcctgggcgctccggtggcggcggaggtgtttgagaagtcccccctgcgggtgaag

SEQ ID NO: 327010 - DNA, 134 bp, Homo sapiens
ccgggcgcagccggagccggtgccgcagctgcgatggccgtggccgtggggagaccgtctgatctagtgaaaagccatttgatgtatgcggtcagagaagaagtggaggtcctcaaagagcaaatcaaagaact

SEQ ID NO: 327011 - DNA, 82 bp, Homo sapiens
cagagtataacaatcagtgccgagcaattgtgatgagatattctgctgagtggaagaactggaagaagttcgggaactcaga

SEQ ID NO: 327012 - DNA, 100 bp, Homo sapiens
ggaacatgacgcaggtgcaggtgtctcttctcgccctggcggggaaggctacagcatgctggccatagggattggaaccctgatctacgggcactggagc

SEQ ID NO: 327013 - DNA, 80 bp, Homo sapiens
gtattgccgcggtggaaatggaggatatgttcaaggaatgagtgatttactttcccctcttttatatgtgatggaaaatg

SEQ ID NO: 327014 - DNA, 74 bp, Homo sapiens
tgaaaaatatatccgcagggttcggatgagaccaggtaaaaatgcatttgcaaagggagaaaatgaaggccaaa

SEQ ID NO: 327015 - DNA, 75 bp, Homo sapiens
tctccttgcctgattgtttgcaggttgtcagagaagtacaggtactgggcctaatcgctacgtgcctctttggct

SEQ ID NO: 327016 - DNA, 96 bp, Homo sapiens
tctgagagagggaagtcgcctctgtgctcatctgccgacaccccaggccatcgagccccaggccatcgtgcagcaggtcccagcccccagtcgaat

SEQ ID NO: 327017 - DNA, 107 bp, Homo sapiens
gatgcttttgatatctggggccaagggacaatggtcaccgtctcttcagtgttctaagaacggaagcatctgggctggatggaatttagcatcaagcagagtcccct

SEQ ID NO: 327018 - DNA, 83 bp, Homo sapiens
aagaaatcaatgttattcagaataaaactgatgttaggccggggtttgaagtctcacgcctacattcacagtgtccagtttag

SEQ ID NO: 327019 - DNA, 100 bp, Homo sapiens
atatgacttggcagatcaactacatgctgcaggtgtgcaactgaggaacatggctcaagaaactaatcacagccaagtgcctatgctttgttccactggc

SEQ ID NO: 327020 - DNA, 82 bp, Homo sapiens
aatcaacccagaacggagagctccctcctagaaaagggttacacatcattttggaatgactgtatatcatctggattacgtg

SEQ ID NO: 327021 - DNA, 101 bp, Homo sapiens
aagaagggcaggcccccaagcagcagcaggactcagaggcgagagtggccccagccgggccagaagcaggaacgccacagaagtatgatcccactttcaaa

SEQ ID NO: 327022 - DNA, 90 bp, Homo sapiens
gcagcacgtggccaccaacctggggcgcacacttttccttgttgacaatcaccacgaggtgtacctctggcaaggctggtggcccatcga

SEQ ID NO: 327023 - DNA, 75 bp, Homo sapiens
ccactggacgctcatcagagggaagatctttttcctcaattgatgcctgtcttagatgtcaagctgaaaacaaac

SEQ ID NO: 327024 - DNA, 88 bp, Homo sapiens
gaaaagctgaaagggagacgtttgcatttcatgagacccttgaacagcggctgcttgtaactgaactgatgcggctcttaggtcctag

SEQ ID NO: 327025 - DNA, 100 bp, Homo sapiens
cgcccgtattggcatggcagaggagatcaaacacatgttccacgtggcttgggtggacccagaagacccccacaaagttcctaaaagtaaagctctagag

SEQ ID NO: 327026 - DNA, 82 bp, Homo sapiens
gccgcccagagactgctgagcccgtccgtccgccgccaccacccactccggacacagcttcctgggtctgcaggtccagccg

SEQ ID NO: 327027 - DNA, 50 bp, Homo sapiens
ctgcagtccctcgtccagccacccccagtggacgtgatgctgaatccagg

SEQ ID NO: 327028 - DNA, 50 bp, Homo sapiens
atttcaccacaagaagggctgccagcagaaacactatggagtgttctggg

SEQ ID NO: 327029 - DNA, 82 bp, Homo sapiens
gtggaaaatgcgctcgggctggaccagcaggttccccctaaaggactcaaaacgtctaatccaatggttaaaagctgttcag

SEQ ID NO: 327030 - DNA, 83 bp, Homo sapiens
attcgcagtggtcgcttcttctccttgggaggagagtgaaagtgtgctgacactcaagggcctgactcccacagggatgttgc

SEQ ID NO: 327031 - DNA, 83 bp, Homo sapiens
ctgggggccacaaatgctccttctcctggagacgcaactcaagactgcctcttcaaggtgtgccccatgaaccgctactcggc

SEQ ID NO: 327032 - DNA, 100 bp, Homo sapiens
ctgcggagttagcagtcacgacctccagcacagtgctgggcctaaaggagataacatttatgaatggagatcaactatacttggtccaccgggttctgta

SEQ ID NO: 327033 - DNA, 82 bp, Homo sapiens
cctgtacagcctgcagaactgtggagccatcgaagcccccacccacaggctgacagaggcaccgttcaccagagggctcaac

SEQ ID NO: 327034 - DNA, 75 bp, Homo sapiens
ttgtttgtggatcgctgtgatcgtcacttgtatacgctcaacggcaagaaagtggaagttgccgtcaaacagatc

SEQ ID NO: 327035 - DNA, 100 bp, Homo sapiens
tttgtctactgcctcattcctggaaattgcactggaactgtctgattaaggccatttgtgtaggaccagaaaacatgcagataatgtatccagctatatt

SEQ ID NO: 327036 - DNA, 100 bp, Homo sapiens
gaatctactcctgagctggatatggacaaagatctcagtggatataaaggttcaagtggatccaaacttctacagcaaaaacttacttcttttaggaaag

SEQ ID NO: 327037 - DNA, 100 bp, Homo sapiens
ctccaaggggtggagctgggaacattcctcataaagcgagtcgtcaaggagttgcagaacgagcctctgactccaggttatcatggattcccagcgcggg

SEQ ID NO: 327038 - DNA, 101 bp, Homo sapiens
gcttactgttgcgtggttcgttattaacagatatgattctataacagactcttccagaaatgatatgaagaggaaatttgccctgacaatggaatttgttg

SEQ ID NO: 327039 - DNA, 50 bp, Homo sapiens
ctgcgcgctgctcgcccggctgcagaacaactctgctcatggtgattaca

SEQ ID NO: 327040 - DNA, 100 bp, Homo sapiens
agaacgacaagaaaacatactggtagaaccagacacagatgagcagagcaccagtctctaacaaccttgaatgctactgcttggagagaggagagtaaca

SEQ ID NO: 327041 - DNA, 100 bp, Homo sapiens
caaaagctgataccagagctatacagctgctattaggcagaactgggatggataattggataaaattgtctgggtgtcagaatattactagtaccaaatg

SEQ ID NO: 327042 - DNA, 82 bp, Homo sapiens
gcgaacgcggagagcacgccatgaaggcctcgggcacggccgggttctgagcttgttccgcctccctcccccgggaatggcg

SEQ ID NO: 327043 - DNA, 90 bp, Homo sapiens
cagcagatattgtcataaatctgttactttcctacagagatatccagagttcacatgagactctgaatatagtggaggagaagaagcggg

SEQ ID NO: 327044 - DNA, 100 bp, Homo sapiens
gcatgagtgctatcagatatgggcccagctggagcacgaggctggaacccaattgcacagctgatttagaagaaagttttaatgaacatgaactggagcc

SEQ ID NO: 327045 - DNA, 82 bp, Homo sapiens
catcaacctgcgtgaggtcaacctgcgcccccagatgtcccagggttgtggtctctccatgctgcccaggtcggactcctag

SEQ ID NO: 327046 - DNA, 83 bp, Homo sapiens
ttcagatcttcacagcacagttcctgggaaggtggagccaccagcctctccttgcaattctgtggtgttcttggtcacacatt

SEQ ID NO: 327047 - DNA, 97 bp, Homo sapiens
attgggagcctaattgatttcattcttatttcaatgcagggcttttttccagacttcaagctcccattccaacagtaagagcttcttccacatcaca

SEQ ID NO: 327048 - DNA, 75 bp, Homo sapiens
gcaccacagatatatgggttatttcaagttattcaggaccttgttgtatcagtgttgacctatcctctgagccat

SEQ ID NO: 327049 - DNA, 100 bp, Homo sapiens
ttcagcctgagcgacgtgccccaggcggagatctcggattgaccgactcatcagtcacggggccgacatcctgaagcctgtaatgctcaggcagggagaa

SEQ ID NO: 327050 - DNA, 98 bp, Homo sapiens
ttcaagataactccagccagagcatggacaccacgttgctgaaaacatgctttgggactgccactgaatttatcttttgcggttttatgacaaagtta

SEQ ID NO: 327051 - DNA, 100 bp, Homo sapiens
gctaagtggatcctctggccagctgactgcacttcttttttgagaaaggaaggaatatatcctgactgattgaaggaaaatcacctcggcagtgtttgaa

SEQ ID NO: 327052 - DNA, 51 bp, Homo sapiens
cccggcttcccgtctcgtcaccctctggcttaggtggagaaaagcagggct

SEQ ID NO: 327053 - DNA, 75 bp, Homo sapiens
ggcatttcaaagggaaaccgttgaaatgcataacctgcaaaggagtcattcccgatgatcctcgtggccaacaag

SEQ ID NO: 327054 - DNA, 83 bp, Homo sapiens
gaaagaaattcttcaatttgaataaattggaggattcaagatatggtaggagtcaatcccaccagcattgactcagtcgtaat

SEQ ID NO: 327055 - DNA, 100 bp, Homo sapiens
caaacgtctacactgtacatgctttttattacaagactacggagcataggaggaaaattcatcatctgttggttagtctgctgctaattggaattgctgc

SEQ ID NO: 327056 - DNA, 101 bp, Homo sapiens
cgcggctcctgttgctcctcgggctctcggccggcgggactttgaacatgtcggggatcgccctcagcagactcgcccaggagaggaaagcatggaggaaa

SEQ ID NO: 327057 - DNA, 75 bp, Homo sapiens
cccacggccggcagcgcttccaaaaaaggagaagcgggctctagggaactggaagttgctggccaaaggtctgct

SEQ ID NO: 327058 - DNA, 75 bp, Homo sapiens
tttacttcaagcaggggctgatttactgatgtagaaggccaatccttaagacaccgagacaagcggcttagtttg

SEQ ID NO: 327059 - DNA, 74 bp, Homo sapiens
tgaagacctcagaccggcaccagcgacgcttccctgacttctcctacatcacccagaacggccgcctaacagac

SEQ ID NO: 327060 - DNA, 100 bp, Homo sapiens
gacagataaatcatcctgagctacacatggtactcagtaatctagctgcagttttgatgcacagagtgaacatgaaaagatcattttgtataaaaaaaat

SEQ ID NO: 327061 - DNA, 90 bp, Homo sapiens
tgcacatcattggcgccttacggacatccaaggacctgagggcactcgctttgctcctgtcagtacacactcccaaacagttaaacccag

SEQ ID NO: 327062 - DNA, 75 bp, Homo sapiens
acaggacccgctttctaccattaagtgtgctggatcgaaggggtattttgccactggaggaaagtggaagtcgac

SEQ ID NO: 327063 - DNA, 75 bp, Homo sapiens
gacttgaacttaatacagcaagaaagaccatcaagtttaccagatcagtttgacaacttagaaaaacacacacag

SEQ ID NO: 327064 - DNA, 100 bp, Homo sapiens
caccgatggaatcccagaggaaactgacggagacgcagatgtggacttgaaagaagctgcagcggaggaaggcgagagctgccccagaagaatcagcgcc

SEQ ID NO: 327065 - DNA, 80 bp, Homo sapiens
agcgcagaaagcaggcgaacccgcggcgcaataacgagtggagactgctgcacggactctggaaccatgaacatatttga

SEQ ID NO: 327066 - DNA, 100 bp, Homo sapiens
tggagggtctcagccgccgcctctgcggttggatttctcacgatgtccagtgttatctccatgtctgcccctttcttcctggggaagatcattgatgtca

SEQ ID NO: 327067 - DNA, 98 bp, Homo sapiens
acagcttcgctctactgctcggcagggcagctggcctctgggcaccggcggcccctctgcctcgcggaaaagtgggctaccttgagaatggagcgagg

SEQ ID NO: 327068 - DNA, 73 bp, Homo sapiens
accacaataaaagagacctctacttagctcagcaattcttaccttgtttatcaccagatcttcaatctatgga

SEQ ID NO: 327069 - DNA, 98 bp, Homo sapiens
tttggtttacatacaggaaaaactttccagccattggctagcatcccattctctgtggttggatccaatcagttgattgaagccaaaggaaagaaggt

SEQ ID NO: 327070 - DNA, 83 bp, Homo sapiens
gacgggtctggagtgcgtgggggaccggctgttggcggattggtttatcttggaagctaaagggcattgctcatcctgaagat

SEQ ID NO: 327071 - DNA, 49 bp, Homo sapiens
cctgaagaagctagaaccaacattccaaaatatgcccggtgctatccgc

SEQ ID NO: 327072 - DNA, 75 bp, Homo sapiens
cttccaaaagaagttaccaacatttagaatttctacttattctgaggaaaatgtttataggaggccttagctggg

SEQ ID NO: 327073 - DNA, 100 bp, Homo sapiens
ccaagatgccggcctattttcagaggccggaaaatgccctcaaacgcgccaacggaatagccaggccagaagaaggaaggcctgtggtgagtgggacagg

SEQ ID NO: 327074 - DNA, 100 bp, Homo sapiens
acgatgattgaccccacttccaaggaagaccccaagttcaaggaactggtcaagaggaatgtttgctgggggattgaaggagatggaacaggaagaggtc

SEQ ID NO: 327075 - DNA, 100 bp, Homo sapiens
tccctggttaatgtgggccatgtctggtttggtgcacctcgatttggaggaagtagggcagggcccttatctggaaagaagtttggaaaccctggggaga

SEQ ID NO: 327076 - DNA, 100 bp, Homo sapiens
cagaaggatatcgacgtcgtgatccagaagtccagagctgaggactgcctgtttgcagaatccagctcaaatgtcagaagaattgacgttagtttgagag

SEQ ID NO: 327077 - DNA, 83 bp, Homo sapiens
gtctgaaaattccagtgacagtgattcatcttgtggttggactgtcatcagtcatgagggtcaatgatcatgtaaattagata

SEQ ID NO: 327078 - DNA, 136 bp, Homo sapiens
ccgagtggaagctcttcatctacaacccgaccaccggagaattcctggggcgcaccgccaagagctggggtgcacatgaacttgaacagatgcagctgattttagaatctattcctgttgtacatgaggaagatcg

SEQ ID NO: 327079 - DNA, 90 bp, Homo sapiens
gggatctttccggatcaatccagatggcagccagtcagtggtggagagcttacgatgtgaagaacttcatcttcatgcagaaaatctgtc

SEQ ID NO: 327080 - DNA, 100 bp, Homo sapiens
ttaaaggacacttgagcaccaaaagtaatgcgtgagtgcatctccatccacgttggccaggctggtgtccagattggcaatgcctgctgggagctctact

SEQ ID NO: 327081 - DNA, 100 bp, Homo sapiens
tttctcaagcactgtgatcttcaaatgtaacagcttgcctgattgctgtggccaaaacagatggtgaagttcaagtacgcagagctgccatacatgtggt

SEQ ID NO: 327082 - DNA, 90 bp, Homo sapiens
caagctggagtttacacaggcaaactgtcagaaaagagtagcctgggctgtctggaaatctgagggatcatggcccaagttgcaatgtcc

SEQ ID NO: 327083 - DNA, 75 bp, Homo sapiens
catttctcctattgaggagtcaacctccagaacctgggtatcaacccagcaaacattggcttcagtaccctgact

SEQ ID NO: 327084 - DNA, 76 bp, Homo sapiens
gctatcatcctgccaaactccaggctcagatgtcacagatttgatggtagagtggtggcaaagcttccttttaccc

SEQ ID NO: 327085 - DNA, 82 bp, Homo sapiens
gatcttgtaagcatacatctgccactctctaggacccttgctgcaactggatgatgctcgcaacaaagctgacaatcaagaa

SEQ ID NO: 327086 - DNA, 106 bp, Homo sapiens
acgtgctgggggtcatcgacagctgcaaggaggccgtcaccttcaaggccgtcagacaaggtttctgagtcccttcaacatgatcctgggaggaatcgtggtggtg

SEQ ID NO: 327087 - DNA, 100 bp, Homo sapiens
aggagacggtcagagtccaaggtccgggtatcttaccagacgcaagatggctgtcctctctaaggaatatggttttgtgcttctaactggtgctgccagc

SEQ ID NO: 327088 - DNA, 100 bp, Homo sapiens
tggaaaatgccagcctagtgtttacagagaatgtgatcaatgggcaggactacgaagtgatgatgcagattgactgtcaggtgatggacaccaggatcct

SEQ ID NO: 327089 - DNA, 75 bp, Homo sapiens
ccaaggggattcaaacttcaacagaatgtggcaaccagttggaactgataatgggagagaagcaattgaaagtgg

SEQ ID NO: 327090 - DNA, 98 bp, Homo sapiens
gcataacctctgagggttaccattactattatgatcttatctcaggaggtgctgggactgtacaacactctgaaccctgaagcatctgcctcgccttg

SEQ ID NO: 327091 - DNA, 89 bp, Homo sapiens
atcagagatcggcggagaccctcgaagtgcgcaaacttgacactcaccctgaccgactacatgaggaaataattgacttttataacttc

SEQ ID NO: 327092 - DNA, 89 bp, Homo sapiens
acccaggaagccgcgggcaaactcagactcgaagtggtaagcatccgtggcattcaagacgaagatccccctgacgcccagctcctgag

SEQ ID NO: 327093 - DNA, 124 bp, Homo sapiens
cagtacgagctggttaggaggcacagggcgtcggacctgcacgagctgtctggtctcagccggtcgtcgcgacgttcgcccgctcgctctgaggctcctgaagccgaaaccagctagactttcc

SEQ ID NO: 327094 - DNA, 82 bp, Homo sapiens
gggaatttcttcgaaaaaagcttattgggaagaagtttttcagaagaagtgaagtcaagatgaagaaccatttgcttttctg

SEQ ID NO: 327095 - DNA, 74 bp, Homo sapiens
atgtgtcttgttgcatttggtaatttagcagaacttgagacgagttgtactgctgtcacaggaaatggacgctg

SEQ ID NO: 327096 - DNA, 97 bp, Homo sapiens
ggactgcggcggcgccggcctccggggagaaacggttttaattacaacaagaacggctgctgataattttagcacccagtatgttttagatggcagt

SEQ ID NO: 327097 - DNA, 99 bp, Homo sapiens
ccgccatgcaaggctggcgcgtctccatggagggcttatttcaaaacctttgtccctcagttccaggaggcagcatttgccaatggaaagctctaggaa

SEQ ID NO: 327098 - DNA, 119 bp, Homo sapiens
ggcggatctggacacccagcggtctgacatcgcgacgctgctcaaaacctcgctccggaaaggggacacctggtccgtggcactcaggtagttggttctgacatgactgtgacagttga

SEQ ID NO: 327099 - DNA, 99 bp, Homo sapiens
ttcttggaagtcgatgtacatcagtgtcagcaaaagagcagtggctcaggcagcagtgtagcagatgagagagtggattatgttgttgttgaccaacag

SEQ ID NO: 327100 - DNA, 98 bp, Homo sapiens
aatcctatcctactctggcagcccatcccggtgcacacagttcctctttctgaagatcaggtatggctctgtgggggcagcatggaggtccttccttg

SEQ ID NO: 327101 - DNA, 90 bp, Homo sapiens
ccggagaagcgagtttcagctgagaaagatgctggtttcgagttttggagatccttgttttttatggaacacagttctgtaaaattttca

SEQ ID NO: 327102 - DNA, 100 bp, Homo sapiens
gtgaagaccaactatgttgtttggggggtcccgggattcttgagctgtgcccagctgacgagcttttgaagatggcacaataaccgtccagtgatgcctg

SEQ ID NO: 327103 - DNA, 122 bp, Homo sapiens
ctttcttggcccttgttcccccaaatgtctgactctgactctcggactgagaaacgcaagacaatgcagatcttcgtgaagactctgactggtaagaccatcaccctcgaggttgagcccag

SEQ ID NO: 327104 - DNA, 74 bp, Homo sapiens
aaagaagaaggagagtgttcagcaagactaagtttgacggtgagaacatgtatatgagcatgacagagccgagc

SEQ ID NO: 327105 - DNA, 75 bp, Homo sapiens
ttagtggaggaggtgcagctcaacttctaccagttcctcggggtgcagcaggctaccaagcagtttctcgaagag

SEQ ID NO: 327106 - DNA, 119 bp, Homo sapiens
ggcggcgccggcagcggacagctcggacagcgcccagggccggagcccgagcccttggagagtatgaagagtgtaaagacctcataaaatttatgctgaggaatgagcgacagttcaag

SEQ ID NO: 327107 - DNA, 89 bp, Homo sapiens
cttcatcaaagccgtctctagcagtggcagtggactcggctccggaggtggcagttaagatggaatcttgctctcttgctcagactgga

SEQ ID NO: 327108 - DNA, 90 bp, Homo sapiens
ccaccaccctcgtgtctgccaccatcttcgacttgagcgaagttttatgcaagcccttcagatatttcaacactcctctcagcatcctcc

SEQ ID NO: 327109 - DNA, 87 bp, Homo sapiens
acaatgcaggactgctctcctactacacggctccaccgaggacaccgcgtccagcttgtgtggcgaggaggacacagaggacgagga

SEQ ID NO: 327110 - DNA, 50 bp, Homo sapiens
agaagcacggcaccaaaaacaagcgcgcaaagtgaaaaggagagcttgtt

SEQ ID NO: 327111 - DNA, 75 bp, Homo sapiens
gttccaccaggccgggaagcccatcgggttctgcggggagtgtctccagccctgcctgcaggtgccatccccgct

SEQ ID NO: 327112 - DNA, 100 bp, Homo sapiens
atggtactgatgtaaccaggtgcatatgtggttttacacatgatgatggatacatgatctgttgtgacaaatgcagggatgaagaattttctgtgagttc

SEQ ID NO: 327113 - DNA, 82 bp, Homo sapiens
atgggtggagtacagatctctgcagttacaggaacatcgtctgcttcatgatgaagctactgaatctttacatcaaacgtgc

SEQ ID NO: 327114 - DNA, 75 bp, Homo sapiens
cagaaggcagcggcggcccaggccagcattcccgcacaaagcttcgaggcgcaccaggacgaggcagtgagcgtg

SEQ ID NO: 327115 - DNA, 83 bp, Homo sapiens
ggaaaatatcccaaggactaatctgatcgggtcttccttcatgtccagctgtcctcagttaatcccccgtctttgtcaccacc

SEQ ID NO: 327116 - DNA, 100 bp, Homo sapiens
cactgaggatcagattttgaagagagatatgccaccagcatttattaaaaagtgaagtcactgcttttgctgtcttggatcaagaccagaaagaaattat

SEQ ID NO: 327117 - DNA, 75 bp, Homo sapiens
ttcgtggtcgtctggtcctactacgcgtacgtggtggagctctgcgtgtgcaccaccttccatggtcaataatga

SEQ ID NO: 327118 - DNA, 50 bp, Homo sapiens
ccatcatggcccacatgactgtggagggggcagtacccaaaggaaacgct

SEQ ID NO: 327119 - DNA, 96 bp, Homo sapiens
acagaatctgccggatggtgctggccacttgcttgggatcctttatcctggtcatcttctatttccaaaatttgagagggaagatctgatctccta

SEQ ID NO: 327120 - DNA, 87 bp, Homo sapiens
ctttttagaattgcacttggaggacaagatcttgcttctgaaatatctacctgggatggagtgatagtaacaccttcagaaaaggct

SEQ ID NO: 327121 - DNA, 106 bp, Homo sapiens
caaatggagctcagaaagctgtatggacctctgtgtgggtcactcctggaagcaaggcggctctagctaatttatgtattggagatgtaatcacagccattgatgg

SEQ ID NO: 327122 - DNA, 87 bp, Homo sapiens
ggccgcagagctaaatgggggcctctccagggagtgctctgttcacggctccatcgctgttagtcaaaatgcagatcttcgtgaaaa

SEQ ID NO: 327123 - DNA, 82 bp, Homo sapiens
ggattccaagtaactcttatttggaaagcaatctcccgggcaggcctccagcatctggctcctgcacatcccctcagccttc

SEQ ID NO: 327124 - DNA, 101 bp, Homo sapiens
gactcgtcggcgaatgcaattaggaactgttctgccggaatttgaaaagtgcctcacaagctccgggtggataaggcagctgctgcagcagcggcactaca

SEQ ID NO: 327125 - DNA, 101 bp, Homo sapiens
acctgatcacctgtctggagcaaggaaaagagccctggaatataaagagacatgagatggtagccaaacccccaggttatggaggttttgatgactatggt

SEQ ID NO: 327126 - DNA, 155 bp, Homo sapiens
catctcctattctgccaatcactgaattctcagacatacccagaagagcaccaaagaaaccattgacaagagctgaaatctggagttttgatctccttttgccacttcatgaattgaggggccacaacggctgtgtgcgctgctctgccttctct

SEQ ID NO: 327127 - DNA, 98 bp, Homo sapiens
gcgaggccgcagagctaaatgggggcctctccagggagtgctctgttcacggctccatcgctgttaaaatcccaagttgaccgtcaagtccaacgctc

SEQ ID NO: 327128 - DNA, 90 bp, Homo sapiens
tggacgcagaggcgggccgaggacgaatctggtcaacctgtagttccgttggacagacagtttctcatccatgaactaaatgcatttgaa

SEQ ID NO: 327129 - DNA, 100 bp, Homo sapiens
tcccggaccacctgcccagcgttggcgaggagccccgggaggtgcttctgcggctgtacggagccatcttgcaggctaatctagacgaaatccagatgag

SEQ ID NO: 327130 - DNA, 82 bp, Homo sapiens
gggggagtcgtaaacaaccctgaagagaacagccaggcctgattggaggtggacacaaaggaagaggcagccagacagctac

SEQ ID NO: 327131 - DNA, 89 bp, Homo sapiens
gggagagcaagaccatcatgctgcgcggccttcccatcaccatcacagagagcgatgctgaccggttccctgatgtgttacctgcttct

SEQ ID NO: 327132 - DNA, 76 bp, Homo sapiens
ccagtgcagaagcagacccgtgccggccagcgcaccaggttcaaggtcccagcatttgagggtgatgatggattct

SEQ ID NO: 327133 - DNA, 100 bp, Homo sapiens
ctggaaaaaatgacatccagcgacaaggactttaggtagctacagcaagctgggtagcaggcagatccaaaggatatcatgaagtttccagggcctttgg

SEQ ID NO: 327134 - DNA, 85 bp, Homo sapiens
gcagtccacccaccgccgccgcctcccaggagcttactccacgggaacagcctctagataatctgagttgttgaaaatacgaagc

SEQ ID NO: 327135 - DNA, 100 bp, Homo sapiens
gcgtggctggggaggcgaggccggacgcacctctgtttgggggtcctcagttccaagatgagatgggattctccaacatggaagatgatggcccagaaga

SEQ ID NO: 327136 - DNA, 100 bp, Homo sapiens
actcaagtcaccgtggagctccgccgccccgaaactttcaccgcgagcggagccagtcttggtgctctgtgttcacctggttcatctgaggagctgcatc

SEQ ID NO: 327137 - DNA, 96 bp, Homo sapiens
tgaagtcttgcaggactcactggatagatgttattcgactccttcaggttatcttatgatgaggcttttgctatggctaatgatcccttggaaggc

SEQ ID NO: 327138 - DNA, 90 bp, Homo sapiens
tgttgcacactgggttgcagcctatggcctgttatttgtctcaacaaaagaagttggccaccctgttcaagggcttaggagaaagtcaac

SEQ ID NO: 327139 - DNA, 100 bp, Homo sapiens
ctggggtactacggctacagcaagggcccccagatgccgacggccctctctacctcccctacaagacgctggtctccacggttgggagcatggtgttcaa

SEQ ID NO: 327140 - DNA, 74 bp, Homo sapiens
gacgatagcgaggtcacctttgcattgcactcagctcctacagaagaagggaaaaaagagctgctgttcctaag

SEQ ID NO: 327141 - DNA, 76 bp, Homo sapiens
aattctctacatttgtgaaagtcagtttctgaggaatttcatcaggtctactctaatgtgatgctgggattgaatt

SEQ ID NO: 327142 - DNA, 83 bp, Homo sapiens
gattgctcctggagcagttgtatgtgtagaaagtgaaatcagaggagatgtaactatcgcgttacagtgtttctgccacctct

SEQ ID NO: 327143 - DNA, 100 bp, Homo sapiens
cccgaccccacccgacaggccagagactgatgtcctcaagtgtgtggtcagcacagaccctggcctccgctcccactggctggtggctgcactctgcagc

SEQ ID NO: 327144 - DNA, 75 bp, Homo sapiens
tcgtgtctgccaccatcttcgacttgagcgaagttttatgcaagaacatccacgtgtgcctgggtggcctgttcg

SEQ ID NO: 327145 - DNA, 85 bp, Homo sapiens
ctggatcaggcattgatgatgatgaagattttatctccagcaccatgtgggcgaaatgctgaaaacttcgaccgatttttcaccc

SEQ ID NO: 327146 - DNA, 75 bp, Homo sapiens
ttatgtgcgaacatgtaacaagaatccaaagaaaacaaaatggtggtatcatgcatgtttttggcccagaggagc

SEQ ID NO: 327147 - DNA, 100 bp, Homo sapiens
aagagtggagctgaagctaagaaattggaggagacatcacagctttcccagatcgggaggaaaaatatggaatgtgttttaccgctgactgaacacaacc

SEQ ID NO: 327148 - DNA, 100 bp, Homo sapiens
cggcgacgtgctgtccaaccgcaagatgttctacctgctcaagaccgccttccccagcgtccagtggatctcttagagttgagtacaacaaatgaaattt

SEQ ID NO: 327149 - DNA, 100 bp, Homo sapiens
aaaataaaggagctgctgtctggaattggcaacatctctgagagagagaagaagaaggaggttcctgctgtgccagaaacccttaagaaaaagcgaagga

SEQ ID NO: 327150 - DNA, 50 bp, Homo sapiens
ccatggagacacccagagtatccaggctcatccacctgcagacatggggc

SEQ ID NO: 327151 - DNA, 83 bp, Homo sapiens
gtcgagaggaaactgttgtgcctcttcatattggcgatcctgttgtgtacaatgactcttcttgcttttcacctaagttgaat

SEQ ID NO: 327152 - DNA, 80 bp, Homo sapiens
tgaactctgaaaaacagagtggaggagcaagtacagcgagcagtgaatacagcagtccagttaatcttggtggcagcttc

SEQ ID NO: 327153 - DNA, 90 bp, Homo sapiens
cttttggatctaagcaaaaagaagtttgtatcaacccataccactataagagagtggagagtccagctcaatgtcaattgctgcaagctt

SEQ ID NO: 327154 - DNA, 101 bp, Homo sapiens
gtggccccgacatgattccttacttctccgccaacgcggtcatctcgcagaacgccatcaaccagctcggcgtcttcgacatcttcggaacattgctgccc

SEQ ID NO: 327155 - DNA, 50 bp, Homo sapiens
tggctctgtgcaacggagactccaaggttcagattcagaacaagaaagtg

SEQ ID NO: 327156 - DNA, 100 bp, Homo sapiens
cttgactactcgcatcgcgcactttttggatcggcatctagtctttccgcttcttgaatttctctctgtaaaggagacaatgcagatcttcgtgaagact

SEQ ID NO: 327157 - DNA, 97 bp, Homo sapiens
ctatatcacatgtttatgttctatgctccctaatgaagatgctattaaggagtatttgtgtggaagtaatcgaaaagacaacatatttattgatcct

SEQ ID NO: 327158 - DNA, 100 bp, Homo sapiens
gaagaagataacaatcaagatgaatatgaccctatggaagcagaagaagctgaggatgaagaagatgaacatcgatatattgaactcttcttgaattcta

SEQ ID NO: 327159 - DNA, 75 bp, Homo sapiens
tagagaggaccccggtacatctgaaagccgggaaatggtgcgtataacccgtatatagagataattgaacaaccc

SEQ ID NO: 327160 - DNA, 51 bp, Homo sapiens
cggcatctgtcttgagctcccagcaagggctcagggaggactgacaggact

SEQ ID NO: 327161 - DNA, 82 bp, Homo sapiens
tttaagaaagaagatgttaactttcaggtatgatctcgtgaaatcttgagagaaactgaatgacgaatgaaactattgttcc

SEQ ID NO: 327162 - DNA, 100 bp, Homo sapiens
aacccaaagatccccgttcctggagattctgattgaggtgacgcggcgcacggcgcggatggtggccgagtggcagtgtgtgggcttctgccacggcgtg

SEQ ID NO: 327163 - DNA, 75 bp, Homo sapiens
atgacttcaagactcggatatgcaaaaaagtctgtggccactacactcagacaaaattgcttacccagtacatat

SEQ ID NO: 327164 - DNA, 83 bp, Homo sapiens
cgcgctcccgcggagccggagccgcagaggctcccgggctggactcaggcttctcagggtgtcttttatgaataatcaaaagc

SEQ ID NO: 327165 - DNA, 100 bp, Homo sapiens
tgggcagcgggaagcgaggccccagtgtgagatcaaggtggcccagcccaaagaagtctatcagcagcagcagtatggctctgggggccgtggaaaccgc

SEQ ID NO: 327166 - DNA, 74 bp, Homo sapiens
acaaaggaagacttgtaacctggagaagagtattatcagaaaatccacccagcttcaccattactgtgacgtct

SEQ ID NO: 327167 - DNA, 75 bp, Homo sapiens
gtggatttccctaaaagaacgagtccagctcgaggatctagtttgaagcactaagaagaataagacatcagtttg

SEQ ID NO: 327168 - DNA, 100 bp, Homo sapiens
gccgctgctgctggtgttagcgctcagtcaagggtctaaaattcccaggactccacagctttgcaccagataagcctggaggaatactaatgatggatct

SEQ ID NO: 327169 - DNA, 75 bp, Homo sapiens
atgactatgaggggcaggagcatgatgagctgagcttcaaggctggcccttttagacaatgaagatgatgaaatg

SEQ ID NO: 327170 - DNA, 100 bp, Homo sapiens
aacatggcggcggcgggtgttgtgagcgggaagctcccggagccctgcctgttccctgtccatccaggccagcagctgaaggagcctcacctgcctccct

SEQ ID NO: 327171 - DNA, 74 bp, Homo sapiens
acctgcccatggtgcagctgtgggccgcccacgcccatgaaggattatgaagaagctgtgctcttgctgttaga

SEQ ID NO: 327172 - DNA, 100 bp, Homo sapiens
cagcgagttggtcggtcccggggtcacccgctacgggaagcaggcctcgccacaggaatgctgtctctgcaatttgagaggaggtgctcttaagcaaacg

SEQ ID NO: 327173 - DNA, 100 bp, Homo sapiens
ccgcctcccccggctcagcccccggccgcggcgggacccgaggaggaatgccagctcctgagcaggcctcattggtggaggaggggcaaccacagacccg

SEQ ID NO: 327174 - DNA, 50 bp, Homo sapiens
ggattcgggatgacttcgggcggctggaaaaggattttggtctgagatgc

SEQ ID NO: 327175 - DNA, 100 bp, Homo sapiens
gacccgaaatccttcctgtaccgcttatgccaggccgatcccgacctggactcagacaagctggacccacaaaccgtggagaccaagaactggcacacgg

SEQ ID NO: 327176 - DNA, 51 bp, Homo sapiens
tgctaatccagtggaaatcaggagagatttctaccactccaaacgccggct

SEQ ID NO: 327177 - DNA, 60 bp, Homo sapiens
ttcaaaggctgtcgcaaggaggaagctggacatccgtggcaaactttacctggcccccct

SEQ ID NO: 327178 - DNA, 75 bp, Homo sapiens
gaggagatccggcggcagggcaagctgtgcgacgtgaccctcaaggtcagcgacatcaaattccaggcacccacc

SEQ ID NO: 327179 - DNA, 50 bp, Homo sapiens
gggacctcgcagggagccatccgatgttatgaagacagtatggagtttcc

SEQ ID NO: 327180 - DNA, 93 bp, Homo sapiens
ccggaagcagcacatggtgaatgccacacccttcaagattgctcgaggccagaacctgacgacccggcgacggcgacgtctcttttgactaaa

SEQ ID NO: 327181 - DNA, 95 bp, Homo sapiens
agaaactgacaaaaacatttctgaggagttccatctggaatatgacaaattagaagaacggcctcacctgccatccaccttcaactacaaccctg

SEQ ID NO: 327182 - DNA, 101 bp, Homo sapiens
ctttccttctggaacaccagcatttggtgaggattcatcaacctccagtatgatgtctgtgaactttgatgttcaatcaaatcagagtgatatcaatgatt

SEQ ID NO: 327183 - DNA, 82 bp, Homo sapiens
aaacatcgagacgctgcagaacgcggagtgtcacaccctccgcagattgttctgcccattcataactgggaaccagaagagg

SEQ ID NO: 327184 - DNA, 75 bp, Homo sapiens
cgccgccgccgcctcggccgaccagggacctgcccgcctgcggctgctccggttgtatcacggactgattcaccg

SEQ ID NO: 327185 - DNA, 100 bp, Homo sapiens
ttttgaaagttgtgggtcagctgaccagcaaatgcagccctgaggatttggctactgcatataacaacagggggcaaatcaagtacttcagggttgattt

SEQ ID NO: 327186 - DNA, 87 bp, Homo sapiens
cggcgctggagagggggcgctgagctgttgggatcaggatcctcatgaccagccaaagagaagaagaattaggaagcataaatcaaa

SEQ ID NO: 327187 - DNA, 75 bp, Homo sapiens
gaagaatggaatgaccctcctgctgtggaagagaatggagactacacatatgtggaaagagtgaagatacccttg

SEQ ID NO: 327188 - DNA, 83 bp, Homo sapiens
gtgctggcggcggcgggtcaggagcagccgcagcgacggcggcgacagcagatttttggaagtaccagcacagtgacgcttcc

SEQ ID NO: 327189 - DNA, 75 bp, Homo sapiens
ggcactgctgagggggcgcgaggggaacggaggccagagctgcggtactccaaagattcaggtttactcacgtca

SEQ ID NO: 327190 - DNA, 90 bp, Homo sapiens
aagacgtggggatgcaggatgtccatttcaacgagggttatgatgatggctacgggggtgaatatgatgaccagacctatgagacttatg

SEQ ID NO: 327191 - DNA, 97 bp, Homo sapiens
aagaagctcatgagcagcctgcccaacttctgcgggatcttcaaccacctcgagcggctgctggacgaagggcaggaagatcccaacagtttgcgcc

SEQ ID NO: 327192 - DNA, 100 bp, Homo sapiens
atgtgttgagtcaagatgaactgcgcaaaaagctataccagacgtttaaggatcggggtatactggatacactcaaggctgctggtggtctacccttgga

SEQ ID NO: 327193 - DNA, 100 bp, Homo sapiens
tttcctgcaggctatggaacacactgaagttcttcagcttctcagccccccaggccctgaagaggaaagtgaggatgactctcatctcgaaggcagggat

SEQ ID NO: 327194 - DNA, 83 bp, Homo sapiens
cttcgcggtggtcaagcgggccacgcacctcgtcaccaaggccaagctgctgtgacttactcgaagcctcgattggccacatt

SEQ ID NO: 327195 - DNA, 50 bp, Homo sapiens
gcggtggctgcggttgcgggaccgccgatcaaagtccagatctccatctc

SEQ ID NO: 327196 - DNA, 75 bp, Homo sapiens
gaaaagtgagaggtcagactcctaagcggaccgagaaagtcgttacgaggaagaagaagaacaaagtcgaagtat

SEQ ID NO: 327197 - DNA, 100 bp, Homo sapiens
gcggctccaccccttccacgtcatccgcatcaacaagatgttgtcctgtgctggggctgacagggtgtccgcaatgttgccagtgtctgtctgcagattg

SEQ ID NO: 327198 - DNA, 99 bp, Homo sapiens
cgggcacattcgaggagtgccaccggaagtgcaagggatgccaggccaaggtggagcaagcggtggagacagagccggagcccgagctgcgccagcaga

SEQ ID NO: 327199 - DNA, 76 bp, Homo sapiens
cgggatttacgtggagatcaagcgcagcgatggcctccggtgtggctgtctctgatggtgtcatcaaggtgttcaa

SEQ ID NO: 327200 - DNA, 75 bp, Homo sapiens
ggccgtcccactgctggagttcctgtccaccttctgacgaagacactgttagcctcaatgtgccaatgtcaaaca

SEQ ID NO: 327201 - DNA, 98 bp, Homo sapiens
cccatctccttctctaagagatgcctgcagcctgccatgggacgtggggtccaccggtacagaaagctctgggtgtgcggcagtaccatgtggcctca

SEQ ID NO: 327202 - DNA, 90 bp, Homo sapiens
gacagcgcagaccgccagcgcatgcaggactgccagcgggagctccagagcctgctggtggaggaggtaaatgggcttgatactgtgaga

SEQ ID NO: 327203 - DNA, 100 bp, Homo sapiens
agaaatggcggacttctacaaggaatttttaagtaaaaattttcagaagcacatgtattataacagatgtgctggtggacggacagccatgtgaccgcga

SEQ ID NO: 327204 - DNA, 98 bp, Homo sapiens
tcattcctgcctttgagcggactcccttttaaggtgctgttggcagcagcggtctgcacaaaagcaggaaaggctattgtttctcgacagtttgtgga

SEQ ID NO: 327205 - DNA, 50 bp, Homo sapiens
ctcctgagtagctgggactgcaggtatttatttgaactgaaggaagatga

SEQ ID NO: 327206 - DNA, 83 bp, Homo sapiens
agctgaccctgggagacatcgacggaatgtatcctgtcaggtataatgtcagtgaatggcaagaaagttcttcatatggatcg

SEQ ID NO: 327207 - DNA, 101 bp, Homo sapiens
gggaatccatttggtacatcagcttgcctcaagtctggaaagaaattggcttgggctcatcaaggttaactacatcctggaatcgcgagctagcactgccc

SEQ ID NO: 327208 - DNA, 73 bp, Homo sapiens
cagaatattggtcaagttgctgaccttgaaaacacggctcgatgaactgagaatgttcttagagaatgagact

SEQ ID NO: 327209 - DNA, 74 bp, Homo sapiens
gaattccgccgcaacctccccatgcacctccgaagggcctacatgagtacagtcatgttcacggccaccatgcc

SEQ ID NO: 327210 - DNA, 82 bp, Homo sapiens
tgaagttgggaactcagaccgtaccttgcaacaagatgttaaggacatgttcacttccagatctctcaaagctgttcagaac

SEQ ID NO: 327211 - DNA, 88 bp, Homo sapiens
cagaggaaactgacggagacgcagatgtggacttgaaagaagctgcagcggaggaaggcgaggaaccaaccggtgagccctctcctaa

SEQ ID NO: 327212 - DNA, 99 bp, Homo sapiens
actgaatatctccaaatctgtgtccttcactgtgaagtcaggagtcattggattcaaaggctaacaatttgtccagtctgtccaagaaataccgccagg

SEQ ID NO: 327213 - DNA, 100 bp, Homo sapiens
tacattctcaggtggagacctgttcgagactataagaggcttacccccatttctgtgctggaccatgcactagaatctttagataaccttcggcctgggg

SEQ ID NO: 327214 - DNA, 100 bp, Homo sapiens
gtggcttatgagtacctttgtcatttggaagaagcgaagaggatggtgcgtccaaggttaaccatttatgtttgtcaggaatcactgcagttgagggagc

SEQ ID NO: 327215 - DNA, 86 bp, Homo sapiens
catcacggggccgacgttaatcggagggaccgggccaacattggccagaaggaagacttcgaggaagccaggaagaaggcactgaa

SEQ ID NO: 327216 - DNA, 100 bp, Homo sapiens
gcagtggcgaagggaatcgcaaggctcttccctgaccattttctactgtccctgcgcgagaaaatgtcactgaaattcacaaatgcaaaacggattgaag

SEQ ID NO: 327217 - DNA, 74 bp, Homo sapiens
aaatggatggaacgaatacacctcaatgtctctggaggcccgggcagtcctgacctttgccctggacagcgtgg

SEQ ID NO: 327218 - DNA, 100 bp, Homo sapiens
aacgtggtctgcatccggtataagggagagatggtcaaggtcagccgcaactacttcagcaagctgagtgtgacaagtttaaccaatgtgggacatgcaa

SEQ ID NO: 327219 - DNA, 75 bp, Homo sapiens
ccccgctcttccctgggtggactggaggaggccgcgccgatgaacctgaccgagttaatatgatcctctgttgaa

SEQ ID NO: 327220 - DNA, 51 bp, Homo sapiens
acggagagaacacgagcccatcagggcttaacctctaaggagcgcaagacc

SEQ ID NO: 327221 - DNA, 100 bp, Homo sapiens
agtcggcacctgaaggacatggagctcctacagaagaagggaaaaaagagctgctgttcctaagtaacgcgaacccctcgctgctggagcggcactgtgc

SEQ ID NO: 327222 - DNA, 100 bp, Homo sapiens
agattaatccagaagagtatgaacatccaaatccctggaaagagagtttccagcagttgctttggacatcagacagtgcaggagaagaatgtgatgcggc

SEQ ID NO: 327223 - DNA, 100 bp, Homo sapiens
tacactacttaagtatggaacaaccacattgtgcaacacatcattggacaacccaacccagagaaacaaggatcagctgatccgggcagccgtgaagttt

SEQ ID NO: 327224 - DNA, 83 bp, Homo sapiens
gtcgcgtgtctaggtgagtcgcggtgggtcctcgcttgcagttcagcgaccacggtcagaagttgagtagcaggggcctagga

SEQ ID NO: 327225 - DNA, 96 bp, Homo sapiens
tgcgcgagtggagctctgaagaagctctgagcggagttgtgttcttccccaggttatcctgaatacatgtctaacaattttccttgcaacgttagc

SEQ ID NO: 327226 - DNA, 75 bp, Homo sapiens
aagactcgctatatggggaaggattatgccaagggctttggtggccagtatggaatccagaaggaccgagtggat

SEQ ID NO: 327227 - DNA, 95 bp, Homo sapiens
actggagctctgggctgcggcgcacgccttgcccgcccagattgttctctggggccggactgagaaatgcctgaaggagacgacggaggagatcc

SEQ ID NO: 327228 - DNA, 80 bp, Homo sapiens
ggcaccttgcgcttcttgcagtcgatgaggagcgggaaggcctcctgcaccctggagaccgtgtgggaagacaagcacaa

SEQ ID NO: 327229 - DNA, 98 bp, Homo sapiens
ttgctatggtgacagactatggggcctttatcaaaatcccaggctgtcggaagcaagcaagtgctgtgaaacttaataagcagcagacggacatcgct

SEQ ID NO: 327230 - DNA, 100 bp, Homo sapiens
cttgggctcacttccacaaatgtatgatctcgtgaaatcttgagagaaactgaatgacgaatgaaactattgttcctgtttcacacagaagaaaactgag

SEQ ID NO: 327231 - DNA, 83 bp, Homo sapiens
cgcggttcttctccagcgccctggcctccctcaccttggacacctcgcttgggtcagcccaaggccaaccccactgtcactct

SEQ ID NO: 327232 - DNA, 100 bp, Homo sapiens
gccagctgcagccctggccgcgcactcgcctcagctgagcctgggtcgagtcccagacaccagaagtctgaatttggagaaggctggggtagatactagc

SEQ ID NO: 327233 - DNA, 50 bp, Homo sapiens
gtcacctctcaactgtgtgccaaagcaacatggccaatctttcctaagct

SEQ ID NO: 327234 - DNA, 82 bp, Homo sapiens
agagactgctgagcccgtccgtccgccgccaccacccactccggacacagagtgaagacatttccacctggacacctgacca

SEQ ID NO: 327235 - DNA, 97 bp, Homo sapiens
taaatacccgtgtctgaagtcttcaggcgagctcaccacatgctacaggatggaaagagatgctgcatttacacagaaaaaggcagaaagggcatgc

SEQ ID NO: 327236 - DNA, 75 bp, Homo sapiens
gttccttgaaaagggaggaacggcgacatcctgacctagagcccatcctaaggtctctttaatgtggggaacaag

SEQ ID NO: 327237 - DNA, 100 bp, Homo sapiens
cgagtttgtcatcatgtgagagagaatagggcggtggccagtttgaatactcccttcataccagcaaatcccaacatgtcccctttggagagtatcaaag

SEQ ID NO: 327238 - DNA, 100 bp, Homo sapiens
aacggctggcccagccaatcctggagctgctgttgcagcacttgttccccaaacaagtgctcctacattctgggcaaagcccaacaccttcccccactgg

SEQ ID NO: 327239 - DNA, 82 bp, Homo sapiens
tggggccagggaaccctggtcaccgtctcctcagtacaagccagctgccatgttgtgagcacataccacatagctccatgga

SEQ ID NO: 327240 - DNA, 100 bp, Homo sapiens
ctcgatgacttcgcgggacagagctggagctcgtgggtggagcgggccgacctgcccgcggctgacgcctcctgacaaggtgatccgggcgggccccgca

SEQ ID NO: 327241 - DNA, 90 bp, Homo sapiens
cgaggaggaccacctgcgggtcatctccatgcagaaggggggcaacatgaaggaggggggagccaaaagggtcatcatctctgccccctc

SEQ ID NO: 327242 - DNA, 76 bp, Homo sapiens
cgttcccctctgctgaggcagagctccagtgaacagtgcaggttaaacccatccagagtaatggctgcggccttac

SEQ ID NO: 327243 - DNA, 100 bp, Homo sapiens
cattctatgctgtggaaaagaaagcatactgcgagccctgctacattgcaacatcagatgctgacctgaaagaacatatggttggaatcatattcagcag

SEQ ID NO: 327244 - DNA, 97 bp, Homo sapiens
tttcaggcagaaaacaagtctcgtctggacgtttaagctatgaagaaggacatccctcacactctgaaacagatctccttcagagacagagttttgc

SEQ ID NO: 327245 - DNA, 80 bp, Homo sapiens
ctgaacttccctggtcgaacagttttttctaatggctattcaagacctgcctagagctggaacgttacctccagagcgag

SEQ ID NO: 327246 - DNA, 74 bp, Homo sapiens
gcctagacctgaactcttcagataatcagagtggaggaagtacagccagcagagaaggaagccaacatcctttt

SEQ ID NO: 327247 - DNA, 100 bp, Homo sapiens
gtgacccgcaggcaccgggagatccagaagtgaaacgccaggctctctggaggccaggagatggtgtgtgctcatattgtccaagctattcgcatggaag

SEQ ID NO: 327248 - DNA, 90 bp, Homo sapiens
cggcggtgccggagcgcgagcagagcggagacccccaggtcctgcgggcgcgccatcccaggcctcaggacctgagttctccgacgccca

SEQ ID NO: 327249 - DNA, 115 bp, Homo sapiens
tcctgccgtccttctccactttcgccagcccgtgccgcgagcgcggcctgcaggagatgaaggatttgggggcagagcacttggcaggtcatgaaggggtccaacttctcgggtt

SEQ ID NO: 327250 - DNA, 100 bp, Homo sapiens
ttcggagtttcttccttctggtgggttcgtggtctcgctggctcaggagtgaagctacagaccttcgcggttgtttttcaccattcagaacattgcctga

SEQ ID NO: 327251 - DNA, 80 bp, Homo sapiens
cttcgctgtggcatggcggacgaggggaagtcgtacagcgaaaataaagcagttggagtgatgaagtcgggccatgtatt

SEQ ID NO: 327252 - DNA, 88 bp, Homo sapiens
gaagcgcggcgtcgtcttcccccatcgcggctgcgaaggatgcctgaggaaacccagacccaagaccaaccgatggaggaggaggagg

SEQ ID NO: 327253 - DNA, 100 bp, Homo sapiens
aggatgggatccggctcctccagctaccggcccaaggccatctacctggacatcgatggacgcattcagaaggcttgtccagccggaagccctgagggca

SEQ ID NO: 327254 - DNA, 51 bp, Homo sapiens
cctgcctctccctgggctctggttcattttaatcgtgatggatccttgata

SEQ ID NO: 327255 - DNA, 100 bp, Homo sapiens
caaggtgattggacgatcagccacagacaagcaacaagaacttctgatcatggccctccacccccgcagagtccggctaaagccctggctggtggcccag

SEQ ID NO: 327256 - DNA, 75 bp, Homo sapiens
gcgagtgggagcaccaggatctcgggctcggaacgagactgcacgatcatgagcgtcttgttgttcatcgagcac

SEQ ID NO: 327257 - DNA, 100 bp, Homo sapiens
tggagaacagtgtggcgcgattatgcatggcaatgccgtcaccttctgtgaaccatatggcccacgagaactggagcctcactgtgtcgccaggctggag

SEQ ID NO: 327258 - DNA, 82 bp, Homo sapiens
cgagacacaccaggccggcaggctgagaaaagcgagaccgcgtgcgaggaccgctgtttgcagacaaggtcccaaagacagc

SEQ ID NO: 327259 - DNA, 74 bp, Homo sapiens
tggcatcctcttgggcatattctctgctcaggctcaaatgaccatactagtgccaaacccaagtctgaaatcca

SEQ ID NO: 327260 - DNA, 87 bp, Homo sapiens
tagataacagccatcctattgaacttatcttaatggccatgcagaaaccccagtatatcgattctcgttggctgatggaactatagt

SEQ ID NO: 327261 - DNA, 100 bp, Homo sapiens
tagcaaaaaaattacaacaaaaatattacagcagattgagatatccttggaacagaagatcttattgtggaagtgacttccaatgatgctgtgagatttt

SEQ ID NO: 327262 - DNA, 100 bp, Homo sapiens
attgtcttggaagttccaaagttgcaacgatttctggctagttgcacatagtgatttagatgaaagagctattgaagctttaaaagaattcaatgaagac

SEQ ID NO: 327263 - DNA, 100 bp, Homo sapiens
catccgggaagagcgggaccggctccggaggagggtctttgaagaaactggttttgatatcaaagactatatttgtaaggatgattacattgaacttcga

SEQ ID NO: 327264 - DNA, 76 bp, Homo sapiens
ttcaggagtcctcagctagtgacatggtcggtttaagggaaaccacaggctccgagagtgatgggggtgactcaag

SEQ ID NO: 327265 - DNA, 101 bp, Homo sapiens
ctatgggccgctgtcagggctcgaggatgccagtttttagggccaggcttccgtatccatgattatttgtactttcaagtgctgagtcctggggacattcg

SEQ ID NO: 327266 - DNA, 82 bp, Homo sapiens
gtccgcgagccccgcactctctcgatgagtcggagaagtccccagaaatgatggaagaattgcatagcctggacccacgacg

SEQ ID NO: 327267 - DNA, 99 bp, Homo sapiens
ggagctgacggtggaggttcgcggctctaacggggctttctacaagcatatgagctatttgcattcatcagtcacatgggaacatccacaatgagtggt

SEQ ID NO: 327268 - DNA, 90 bp, Homo sapiens
gcggagcggcgccgcgtagcttccatccgccagctgccatgagcgagcgcctccgtcccaggtgagtcctgcaaatgttaagtgatttgc

SEQ ID NO: 327269 - DNA, 75 bp, Homo sapiens
gaagagaccctgcaaagatcctgggagaccaaggtctctaaggacatctccatgcggctgcataaggagctcgag

SEQ ID NO: 327270 - DNA, 50 bp, Homo sapiens
aggccctcatcggcttcagcacctgtctataagaaggagaaagctcgagt

SEQ ID NO: 327271 - DNA, 75 bp, Homo sapiens
gaacgccactcagcttttgcggcacttggagtgatgaatcaccaacaccagcagcagatggcccccagtaccctg

SEQ ID NO: 327272 - DNA, 96 bp, Homo sapiens
gtgtgaggcggcccgtcctggctcccttgtccgggaagcccgcccagactgtgccctgtccacggtgcctcctgcatgtcctgctgccctgagctg

SEQ ID NO: 327273 - DNA, 77 bp, Homo sapiens
atctcttcaaatgagcaggaccaagtcaccaggagactaaagtccatcaaaaacatccagaaaattaccaagtctat

SEQ ID NO: 327274 - DNA, 50 bp, Homo sapiens
ccgcagaagcttattaaagttaaggtcaatgtgacggtggactacattag

SEQ ID NO: 327275 - DNA, 101 bp, Homo sapiens
acggaggacgagctgcgggtgcggcacctggaggaggagaaccgagtgaacaacgtgggaatgtcgtatgagtatcctgaatactttttggatgttcctga

SEQ ID NO: 327276 - DNA, 102 bp, Homo sapiens
cgccccaccgtacttgcaagaaagcagccccagaggtttatgtagaagtttctaaaatgaaaatcaatgttactgaaattcctgacacattgcgtgaagatc

SEQ ID NO: 327277 - DNA, 82 bp, Homo sapiens
aggcggctgaggtgcgagccgagcatagcggcctgaccacaggggtggccttcgggcatcacgccaagttcatcgcttcaac

SEQ ID NO: 327278 - DNA, 75 bp, Homo sapiens
tcagaagacagagggttttcttttgagtttggtaactctcattcgacatccatctgaactaatgaatgttcctct

SEQ ID NO: 327279 - DNA, 82 bp, Homo sapiens
tgaatttgaaagctagacaggatcgtcaggctgaaggaatcttggtaaatgggcctactgaacttgacgcactggtatttgg

SEQ ID NO: 327280 - DNA, 98 bp, Homo sapiens
tgaaaatatgttttcagaggcatagaatcttcaggaaaatactggagttcctgagatctcaaggttatcaagttatacccaaccagcagcaaaactac

SEQ ID NO: 327281 - DNA, 75 bp, Homo sapiens
aagtgatcagttccctggaaaagtctagagattctgataagatgccagtatggacagaatagcttatgatgctta

SEQ ID NO: 327282 - DNA, 75 bp, Homo sapiens
acgacacaacaagccggaagtggaagtcagtattcatgtgattgaacggcgtgctcttcctgagttcttcaatgg

SEQ ID NO: 327283 - DNA, 50 bp, Homo sapiens
gcccaacacatccccagaccgagttgtccgaacagacagcctgaaggggc

SEQ ID NO: 327284 - DNA, 90 bp, Homo sapiens
gctgcactgacggcgggtgcccgcgcctcagggagtgcatccgccccaacccttttccccctcgtctcctgtgagaattccccgtcggat

SEQ ID NO: 327285 - DNA, 100 bp, Homo sapiens
ttcaaaggggaaagcaaggccaaagacagggagaagagagagtggactccagagattgtcatttcaggacactttgatggtgtccaagacctagtctggg

SEQ ID NO: 327286 - DNA, 100 bp, Homo sapiens
ccaagatgcacacttcgagttttatcaatcaaaggatgctgaatatgcatattttgattttcctgaacttctttcattgaggaccgctttaattctccac

SEQ ID NO: 327287 - DNA, 100 bp, Homo sapiens
cttcacagcacagttcctgggaaggtggagccaccagcctctccctgcttagaccatgctcagcctccaagcagccttgtcatcgacaaagaatctgaag

SEQ ID NO: 327288 - DNA, 49 bp, Homo sapiens
tggcaagctacaataatggggccagtcgaggcctgatgagtgaggccag

SEQ ID NO: 327289 - DNA, 83 bp, Homo sapiens
ctggcgagccgcagtgaggccaacgccgtgttcgacatcctggccgtgctgcagagatgccctgtatccaagcccaatatggg

SEQ ID NO: 327290 - DNA, 80 bp, Homo sapiens
cgagttcgatgacttcgtcacctatgaggaatagctattcagtcagacagaaccacttatcacgttttgcagtatctcct

SEQ ID NO: 327291 - DNA, 75 bp, Homo sapiens
atggacactggagtagaagtctctgatattggaagccaagaatctaagtctggctcccgtccccgcaagccacca

SEQ ID NO: 327292 - DNA, 74 bp, Homo sapiens
tgatgatcacgcagctggctggcttcagtggaccagctccaccgaggacaccgcgtccagcttgtgtggcgagg

SEQ ID NO: 327293 - DNA, 80 bp, Homo sapiens
gtcgccgccacctcctctgatctacgaaagtcatgttacccaacaccggtcctcctgcatatgcccaagaggattgggag

SEQ ID NO: 327294 - DNA, 100 bp, Homo sapiens
gaagtcctagaagaaatttggagtgtgcgtgcgcgccgagcgagctcaggccccggggcctccagcggcaccagcggagaccacggtgagctcgtcgtcc

SEQ ID NO: 327295 - DNA, 74 bp, Homo sapiens
cggccatggcggcgactactgccaaccccggatgatgacctggaagaaggtgaagtgaaggaccccagtgacag

SEQ ID NO: 327296 - DNA, 83 bp, Homo sapiens
acggagagaacacgagcccatcagcaggaggccactgtctgcagctcccgtgaagatgtccactccagacccacccctgggcg

SEQ ID NO: 327297 - DNA, 50 bp, Homo sapiens
ggactgcagtgctgcagtgccaggaagatttcgatgtcgatcattttgtg

SEQ ID NO: 327298 - DNA, 73 bp, Homo sapiens
tgcagcctcgtgcggacgctcgtgcacagatacactactggtgcctggatgatctgtaccgggagatggtgag

SEQ ID NO: 327299 - DNA, 75 bp, Homo sapiens
gtttcctgtgtccagcgctgccggagccgcctgagcctacaacacagcagtcccctcaggatgagcaggaaaagc

SEQ ID NO: 327300 - DNA, 101 bp, Homo sapiens
gaaaatacgaatccaatgccacagcgctgaggctggccttgcagtacaggtgcactttacaggtccccgatgaaccaagagaaccctccaccatatccagg

SEQ ID NO: 327301 - DNA, 95 bp, Homo sapiens
ccgcccaccccacgtgcccggcccccgggctacactcggagcccctgtcacaatgatgattattccccaccttctaagagacaaagaccaacgag

SEQ ID NO: 327302 - DNA, 87 bp, Homo sapiens
aacttttgttggaggaagaaccaacaaccagtcatggtcaggagcgagaacccgagcagcgccatgagcaacactaccgtcgtcccc

SEQ ID NO: 327303 - DNA, 100 bp, Homo sapiens
gatgctgcctgtgtgtcccccaggggcaggggggctgcctcctccacaattagaccaaggaggtgctcctcttgcaggaacaaacaaagaaaccaccatt

SEQ ID NO: 327304 - DNA, 98 bp, Homo sapiens
cagcaatcacagaagccgacaaggcgttcaagcgaaaacatgaccgctgagcccatgagaggaaatactatgtgaagtatgccggaaaacatttaaac

SEQ ID NO: 327305 - DNA, 96 bp, Homo sapiens
caatgttactgcacacagatggggcgcatgaacgtcccggagggatagctgggagtatggccaccctgctccacgatgcggtaatgaatccagcag

SEQ ID NO: 327306 - DNA, 82 bp, Homo sapiens
gggttatggtgggaggagccgatactgagcttcttcctatttgccatggcttcaagaaacacaggatcaacttacagctact

SEQ ID NO: 327307 - DNA, 100 bp, Homo sapiens
cttcggttagccagccacgaagttctcgcgagagtcgtctcctcgataccaaacatagggcctgattacattccaacagaggaagaaaggagagtcttcg

SEQ ID NO: 327308 - DNA, 76 bp, Homo sapiens
tcatcgagtatgagcagttcatcgcagatcaatgagctgagcaatgttcctgttcctgtcatgctaatgccagatg

SEQ ID NO: 327309 - DNA, 83 bp, Homo sapiens
caggagtcatcggacgccagaatctggcccagggccccggccagtgcccagccccgctgggagacccggccagcaccacggac

SEQ ID NO: 327310 - DNA, 100 bp, Homo sapiens
gcctcctgctgctgggcgatacactatcaaagttctctttgcatctcaggcaatggatcacttggagtcctttattgctgaatgtgatcggagaactgag

SEQ ID NO: 327311 - DNA, 83 bp, Homo sapiens
gagaaggaggggtatgagccacacatccccgaccacttgcggcctgagtatgatctgactgcagccatgagcagcaatgagtg

SEQ ID NO: 327312 - DNA, 100 bp, Homo sapiens
tctcattgccctcaccatcgccctcttcaccatctatgtcctctggacgctgtttcttgcagaacataaattattaggaaacattaaaaatgtggccaag

SEQ ID NO: 327313 - DNA, 49 bp, Homo sapiens
agctgcctcagttcttagcgcaggaacttctgattgacaaatttcgtga

SEQ ID NO: 327314 - DNA, 51 bp, Homo sapiens
agaaatttgtgctcaaaacccccaagcaagaggaaaacttgggcaacttga

SEQ ID NO: 327315 - DNA, 100 bp, Homo sapiens
aagtgctcctgcggctgtatggagcgattttgcagatggatgttttcactccagaatgcaaattcaaggaatctgtgtttgaaaactactatgtgatcta

SEQ ID NO: 327316 - DNA, 78 bp, Homo sapiens
tcaacttcaaccctcacttcgatttggaggacagagactgcaagagaagaaactgaggcctggaatttgattaactca

SEQ ID NO: 327317 - DNA, 74 bp, Homo sapiens
cacccctctccgtccatggccccagatgacacttcagcttctcaataggtttggcatggacaagatctatgaag

SEQ ID NO: 327318 - DNA, 98 bp, Homo sapiens
ccggctgatgggacgcctggcttcccagtgcatggcgctcaagtctgtgcgccggtgaggacgcttgagcggaagttagaagcaaaaatgatcaagga

SEQ ID NO: 327319 - DNA, 100 bp, Homo sapiens
aatatttatggagcatatattatggaacacagtggtatcacggaaaacttgacagaacgatagcagaagaacgcctcaggcaggcagggaagtctggcag

SEQ ID NO: 327320 - DNA, 82 bp, Homo sapiens
attgtgcagacgctgtaaggccaaaacgaggatttgtgttgtgaggtgtcgtgaaaactacccctaaaagccaaaatgggaa

SEQ ID NO: 327321 - DNA, 50 bp, Homo sapiens
ttaaggaagcacatatatagagctcaggcaggaggaagagcgcaggcgcc

SEQ ID NO: 327322 - DNA, 75 bp, Homo sapiens
agatttggaatcaaggctgcagaggaaggcaacagcccccaggggagcaaccagggagtcaaaatcacaccggac

SEQ ID NO: 327323 - DNA, 100 bp, Homo sapiens
gattactttagtatcaatatctgctacaacatcacattttcatgcatcattttttcaaaataggatctggcatttccttgtgctcataatgagaatagtt

SEQ ID NO: 327324 - DNA, 101 bp, Homo sapiens
gatagtggaaagaaaccatgtgctgaaatgtttgacgacactgatggtttggtaagtaaggaggtctctgtaccatggctcgtacaaagcagactgcccgc

SEQ ID NO: 327325 - DNA, 100 bp, Homo sapiens
agagcctcgtaccaatctctctgtctttaaaagatgaggtgacttggtgattttcctggaaaattataggaaaatgtttataggaggccttagctgggac

SEQ ID NO: 327326 - DNA, 100 bp, Homo sapiens
cccactttcccctgagcctcagcacctgcttgtttggaagttaacagccaggtccttgcctgctgtgcagtctgatgaaagacttcagcctctgctcaat

SEQ ID NO: 327327 - DNA, 100 bp, Homo sapiens
tgcggccaagactccgtcctgcaagtgcttagatgagtacgaagatgatgaagcagggcagaaagagcggaaacgagaagatgcaattacacaacagaac

SEQ ID NO: 327328 - DNA, 151 bp, Homo sapiens
cttgggctcagccccccagctgaccctacagctgtacataagtgtcatgcagcaggacgtcactgttggaagaagtgctgactccagcacagatcaagtcaatttgtcaggcaattctggactctgggaagcagtatgccataaagaagag

SEQ ID NO: 327329 - DNA, 100 bp, Homo sapiens
gtaatcccagcgaccgccagggcaaggggctcaaatagtttacctctgctgagatctgtcttggacaaattaagtgctaatcaacaaaatattctgaaat

SEQ ID NO: 327330 - DNA, 50 bp, Homo sapiens
gcttgccacccagctgcgcagcttcgatgtggaagctgttgctgccctgg

SEQ ID NO: 327331 - DNA, 102 bp, Homo sapiens
gaagacaagcttcggatgatggagacagaaatccaaggagatgggtgttcagatgataccatcttccaaaatcctatggtacaagaagctatacgaatgggg

SEQ ID NO: 327332 - DNA, 74 bp, Homo sapiens
agagcttcatcaaaaatagtgatagctttgataaagcctctggatttgtgtttactcgtttggatggttccatg

SEQ ID NO: 327333 - DNA, 74 bp, Homo sapiens
cagtttctggacatttactggctcatgatttccagatgcagtttcgaaaatgggtcttgacaatgttcacaaac

SEQ ID NO: 327334 - DNA, 99 bp, Homo sapiens
cggcctgggaggtgcgtcagatccgagctcgccatccagtttcctctccactagtccccccagttggagatctgtagaaaatccattagaggaagccgt

SEQ ID NO: 327335 - DNA, 100 bp, Homo sapiens
gtcaagagcgtgccctacttcaaggataagggtgacagcaacagctcggcgggctggaagcaataacaattggtcgtcttggttacgtttgtcctcaaga

SEQ ID NO: 327336 - DNA, 98 bp, Homo sapiens
tcagggatcaaagagcaaacagattcagtggcctgcattggtttgatgaacttgtgaaaaaattcaaagtcgaatatcatgctggtggctctacccag

SEQ ID NO: 327337 - DNA, 82 bp, Homo sapiens
aagcgcagcccgttgtggtgatacgagccggagatgccttctgcaggtacaatgccagggagtactacgaccacctgcccga

SEQ ID NO: 327338 - DNA, 100 bp, Homo sapiens
acccaagagcagtggattcccagtgtccccacgagctgtgtggtccatgatgagctcatggggcattcagaatgggaccacaaacgagggccaagaggat

SEQ ID NO: 327339 - DNA, 87 bp, Homo sapiens
ctgggtgggagccacctgtgtgatgatgcctgagttcagccctcagcagagctacttcctcagccgagcccagagcctgtgtggccc

SEQ ID NO: 327340 - DNA, 51 bp, Homo sapiens
gctgtggaaagaagttgcaaaacactggatgcccagcctacagagtctgag

SEQ ID NO: 327341 - DNA, 90 bp, Homo sapiens
gcaacagccccttcgtcccaagaatgggtaccacagaccatgtcatcgtcctggcgtccacgaaccgagctgacattttggacggtgctc

SEQ ID NO: 327342 - DNA, 82 bp, Homo sapiens
cctcagcctcagagtcagatgcagggggtgataatgagaagcaatggactagaggattcaagtggaagagtcttcatcaccc

SEQ ID NO: 327343 - DNA, 90 bp, Homo sapiens
ggagttcaaacccattgctgagaagctaacaggttgcccccaagtttcctggcagtgtgtgatactgaggaggtgagcttgtttctggag

SEQ ID NO: 327344 - DNA, 50 bp, Homo sapiens
tgggaccacatcagtaattattcttgtggatccaaacttctacagcaaaa

SEQ ID NO: 327345 - DNA, 75 bp, Homo sapiens
ggacaagtatgctgcaagtgagaacatatttaacagtaccgggaccctctggtgataatggcatcagtgttacaa

SEQ ID NO: 327346 - DNA, 100 bp, Homo sapiens
cggactgcgagtctctttgcggcgctacactagagcagagtacgagtctgaggcggagggagtaatggtgccttattaagtggctggaggttcgtaaagt

SEQ ID NO: 327347 - DNA, 96 bp, Homo sapiens
attggatgcagaagaagtatcaaatccgctgctaaattacattggagctgggctatcagtagtaaggtatgattttgtagaagttgaggaacccag

SEQ ID NO: 327348 - DNA, 88 bp, Homo sapiens
ccacgtctcgtccacgacctccctagccacaatggtgcgcatgaatgtcctggcagatgctctcaagagtatcaacaatgccgaaaag

SEQ ID NO: 327349 - DNA, 75 bp, Homo sapiens
agctgcctggaaatccctgggccctctggccccaagggctaccgtggacagaagtccagggaccttgacccagcc

SEQ ID NO: 327350 - DNA, 75 bp, Homo sapiens
tgaagctccccatcaagggaatgaacttcacaagtaaccaacgagtagacctttacaagtggaaagacggcagtg

SEQ ID NO: 327351 - DNA, 100 bp, Homo sapiens
gcgcgatcttaagcgcgcatctgtggaaacaattaaggtgaggacgcttgagcggaagttagaagcaaaaatgatcaaggaggaaagcgactaccacgac

SEQ ID NO: 327352 - DNA, 75 bp, Homo sapiens
ccacacagtgtccagatacgaggcactggatgtgtgtgagaagtggggagaaatgccaccactacaacccaaaca

SEQ ID NO: 327353 - DNA, 75 bp, Homo sapiens
ccccgctcagctcctggggctcctgctgctctggctcccagagggtaaaactgattattatgctcggaaacgctt

SEQ ID NO: 327354 - DNA, 51 bp, Homo sapiens
caaagctgaagtctacacgaagcaggaaggtgggagtcaatcattttgaca

SEQ ID NO: 327355 - DNA, 89 bp, Homo sapiens
aagacaattgatgacctggaagatgtgatggaagacctctataactacataaatccacataatggcaaacactctcccatggtggccaa

SEQ ID NO: 327356 - DNA, 75 bp, Homo sapiens
caagtctgcaatcttaccagggaggccaagcgaccacccaaagaagatcgaacaccagggggacaagctggagat

SEQ ID NO: 327357 - DNA, 74 bp, Homo sapiens
tcttctgcctcagcctcccaaatattaccaaatctctcttggtgactgagttgggctcttccagaacaccagag

SEQ ID NO: 327358 - DNA, 95 bp, Homo sapiens
tgacagggaaggaaccaagattcaactggcagtttcccacatgggtgtactcgtgttccaggccaacatagccgaggtagaggtctccatccctg

SEQ ID NO: 327359 - DNA, 49 bp, Homo sapiens
agggatgataattgggcctccaagacctcttagcaaatatccggctgtg

SEQ ID NO: 327360 - DNA, 97 bp, Homo sapiens
tcgtatacgtggattccagaggggtgacagcgaaatgcacgtgtggttctcaaatataggcattctgatgggaacttgtgtgttaaagtaacagatg

SEQ ID NO: 327361 - DNA, 100 bp, Homo sapiens
tgtggctctgtgacctgcaggtattgggagatccacagctaagactccaggaccctctggaagcctagaaatgctggcccggtgatcatgtccattgagg

SEQ ID NO: 327362 - DNA, 89 bp, Homo sapiens
gcatggaggtcgtatctatccagtcttgggaacgtactgggacaactgtaaccgttgttacagaatgtctgaaggggacagtgtgggag

SEQ ID NO: 327363 - DNA, 82 bp, Homo sapiens
ccatgccgctcctaagcctgcacagccgcggcggcagcagcagtgagagtgtgtgttttaatagaaaagttgtcactttcca

SEQ ID NO: 327364 - DNA, 83 bp, Homo sapiens
ctgcgctgccgccgctctgaggagttaaaggtacaatgactcttcttgcttttcacctaagttgaataagcaccctgtgcact

SEQ ID NO: 327365 - DNA, 75 bp, Homo sapiens
ctcgaccgcgtcttctgagtcagggttacagctgaagtaaagcacaacatcaccaacactgtggtatgcagagtg

SEQ ID NO: 327366 - DNA, 98 bp, Homo sapiens
ttcgaagcgccagactttcggagactgtggaacccttaggagaaatcttgagagtggacagcaattgtgaagatcgccagagagttctgtgtttcatc

SEQ ID NO: 327367 - DNA, 73 bp, Homo sapiens
ggacctttggacaaaactaaaagaatgtcatgatagagaagtacaagatctctcaaaggccttggttctgaca

SEQ ID NO: 327368 - DNA, 99 bp, Homo sapiens
gaccctggagggtatccgccagttctacatcaacgtggaacgagaggagcgagctggacgccactgtggggctctgagagtcctgaattcttactgggt

SEQ ID NO: 327369 - DNA, 75 bp, Homo sapiens
tgcaacagcaagcacatgcagaagaatcccccagggcccagagatacaaactggactctcaggacaaaacgacac

SEQ ID NO: 327370 - DNA, 126 bp, Homo sapiens
actctgtgctttcctaagataggaacccagaagaggactgatcatttcttgcagctctaaaaaccatggctcggtctcttcaagaaaatgaggaggaggagattgggaacctagagcttgcctggg

SEQ ID NO: 327371 - DNA, 133 bp, Homo sapiens
cgcgtccgccccgcgagcacagagcctcgcctttgccgatccgccgcccgtccacacccgccgccagatgaggataggaattcactcaggctccgtgctggctggagttgttggggtgcgaatgccacgttat

SEQ ID NO: 327372 - DNA, 78 bp, Homo sapiens
gtggaaattcccagaggactttggagaccaggcattgaatgccccagaggagcccgaaacctcccaggcttggtgcag

SEQ ID NO: 327373 - DNA, 75 bp, Homo sapiens
atcaaatcagagagaaggaatccaccttcttacgctatggcagtaacaacatgctgtaccccaaggaagacaagg

SEQ ID NO: 327374 - DNA, 74 bp, Homo sapiens
tcagattggccatgtctatcctgcaaccaccatcatggcagtggagtttgacgggggcgttgtgatgggttctg

SEQ ID NO: 327375 - DNA, 83 bp, Homo sapiens
gccgggactcccgccgctgctaaatatatccgtaggaatggagagggaccggatctcagacaatgcagatcttcgtgaagact

SEQ ID NO: 327376 - DNA, 75 bp, Homo sapiens
tggagaattatggaaacctggtctcactgggtaatggaactgctggtccatctgaataaacgtataaaaagccgc

SEQ ID NO: 327377 - DNA, 100 bp, Homo sapiens
cgacggtggtggtgactgagcggagcccggtgacaggatgacttcccaagtaagaagcggaagaggagccgctggaaccaagacacaatggaacagaaga

SEQ ID NO: 327378 - DNA, 98 bp, Homo sapiens
caccgcagcactggagctgtcctgaaggtactctcgcaggaaatgggaattctacttgtgtgggaagaattttaaatcgtttctccaaagacattgga

SEQ ID NO: 327379 - DNA, 100 bp, Homo sapiens
aagaagaatgagaactataagagcctggtgagacggagctatcggcgccgcggcaagagccagatcatgtttcactccttcggcaacaagcaagggcccc

SEQ ID NO: 327380 - DNA, 98 bp, Homo sapiens
atttccttccagaaatgatggtggatcattgctctttgaattccagtcccgtgttgatgacaacaagaaactaggagaatgggtaggcctttgtaaaa

SEQ ID NO: 327381 - DNA, 88 bp, Homo sapiens
atagatgacaatgatctctaccgatgggaagtccttattattggccctccagatacactttaggtggttctcttcccaaagtggaagc

SEQ ID NO: 327382 - DNA, 75 bp, Homo sapiens
tgcgacacacgggccaaatatcgagagggacgacggcctcgtgctgtgaaggtggcaaaggaaaccagagaaaac

SEQ ID NO: 327383 - DNA, 96 bp, Homo sapiens
atgttgctcacacaaagcctgtttggtggtctcttcccacggacgcgcgagacaatgaggagagtcgacttcaatgttcctatgaagaacaaccag

SEQ ID NO: 327384 - DNA, 90 bp, Homo sapiens
caaggacacctacagccccgacgaacatttctgggtgacactcaacaggattcccgacagttaaatctcacacagaaacagatgagaaac

SEQ ID NO: 327385 - DNA, 100 bp, Homo sapiens
ccgggacgcgcggccgccgccgctgcagacgacgagtccgccctcgtcccgcgcccccggggctcgcggagccagggcgcctgatggacatcttgcgctg

SEQ ID NO: 327386 - DNA, 74 bp, Homo sapiens
aagctctcgaggctgctaagagactaaatgccatggacaatattaccaggcagaaccaattctacgatacccaa

SEQ ID NO: 327387 - DNA, 90 bp, Homo sapiens
gccagctccgttgtatactcagccaccaaagattacaaggaccacggctataggtgcgagtactccagaaggaactggctgcatccacct

SEQ ID NO: 327388 - DNA, 50 bp, Homo sapiens
tggatgggatggtgcatccttacaaagctttgtgtccctggtgatgttgg

SEQ ID NO: 327389 - DNA, 83 bp, Homo sapiens
acttatcagtatcttatatgttagcttgacctatgcagatcttattccaggtgatgtacagttcattgattatgaatattctg

SEQ ID NO: 327390 - DNA, 82 bp, Homo sapiens
tggctacagcttcagaagaccgaagcgttcgtatctggaaggaggctactcacagtcgaactacaactccccggggtccggc

SEQ ID NO: 327391 - DNA, 75 bp, Homo sapiens
tcggaacccgtggtcctccgcttcatttcagtgcattcagaacaagcccctgtattttgctgatcggctgtatga

SEQ ID NO: 327392 - DNA, 74 bp, Homo sapiens
aagtaaatgctgtcttttcccaaaagacaggctcttcacctgaaggtaatgcaggtggtgaaggagcaggttat

SEQ ID NO: 327393 - DNA, 100 bp, Homo sapiens
tctacctccatcaggaccccagatgtctgacagccctgtgtgacaccaagataagtaacggctttttggtggtgctggagttggcaagactgtactgatc

SEQ ID NO: 327394 - DNA, 85 bp, Homo sapiens
gcgtatccgcactgtccagcccaagcctgactatgtaacacttacacagtggcagtgaagtcggtcattttgccatcggtccccc

SEQ ID NO: 327395 - DNA, 75 bp, Homo sapiens
caagatggcggcggagctggtggaggccaaaacaatgcagatcttcgtgaagactctgactggtaagaccatcac

SEQ ID NO: 327396 - DNA, 90 bp, Homo sapiens
ctgctcccatcattgatgtggtgcgatcgatcttgtggagaattttgatgaggcttccaagaatgaggcaaactgaattgagtcaacttc

SEQ ID NO: 327397 - DNA, 100 bp, Homo sapiens
gccagccctacagcagtgctgtttactcattggaggaacagtaccttggcttggctcttgacgtggacactggtgctgccagaatactccatccatagcc

SEQ ID NO: 327398 - DNA, 100 bp, Homo sapiens
cagacccccttccatagctcctactggttccagcaacagatagaaatgctttaagttcactctggggaaagctggcctctgaaatcttaatgcagaattg

SEQ ID NO: 327399 - DNA, 75 bp, Homo sapiens
acggtccccactttcccctgagcctcagcacctgcttgtttggaaggaacttgtaatagctggcatcgttgagaa

SEQ ID NO: 327400 - DNA, 100 bp, Homo sapiens
gccaggactgatgcagatgcccctcctccaccagaggactgggaggagcatgtcaacaggtacttaagagattatggcatcagaaacccacaatgttaaa

SEQ ID NO: 327401 - DNA, 73 bp, Homo sapiens
aggctggcagcctccccgggtgcctccgcgggaagaaacccttttttcttggagccagcaataattatcacaa

SEQ ID NO: 327402 - DNA, 95 bp, Homo sapiens
acttcgacctgagctgggaggccactagcagccagttccggcccgaggacaccgactaccagcaggtgaaaggtgtagcagtcactcggcctaca

SEQ ID NO: 327403 - DNA, 80 bp, Homo sapiens
acttggtgaatggagatgcagctcagcagcttcgcttttttgcaaatgcattcactttgacaccatataatggaacagaa

SEQ ID NO: 327404 - DNA, 100 bp, Homo sapiens
gttcgactgctagagccgagcgaagcgttgtgaactaaaggccgacaaagattatcactttaaggtggataatgatgaaaatgagcaccagttatcttta

SEQ ID NO: 327405 - DNA, 75 bp, Homo sapiens
aagtccagagctgaggactgcctgtttgcaggtgtttgatgcgatcatgaatttcaagaaagaggagacagcaaa

SEQ ID NO: 327406 - DNA, 50 bp, Homo sapiens
gcaggagattatgaccttaacatcagtgacatgtcctatttgtgtgtctc

SEQ ID NO: 327407 - DNA, 158 bp, Homo sapiens
catggcgtcctccgcgcagagcggcggctcctccgggggacccgcggtccccaccgtgcagcggggcatcatcaagatgcagtcagtctcctccaaacagaaagtcaccggtttggacttcattcctgggctccaccccatcctgaccttatccaaga

SEQ ID NO: 327408 - DNA, 100 bp, Homo sapiens
cgaatgggaagccaagtgccatcttcaaaatttcaggtcttaaatctggagatacaactcgtcaacgaatcaaattcagtgatgacagagtatgcaagag

SEQ ID NO: 327409 - DNA, 100 bp, Homo sapiens
aaaggatttgacaagactaaaaacacttctctcagaaacagagtgtgattcgtcatcgagatgttcgatcctgtcactatggtgtaatagacaaattccg

SEQ ID NO: 327410 - DNA, 75 bp, Homo sapiens
ccaaaagacagctccagttttacaggtatggaagagttaattatgttctggctcgaagaatagaacttttagaag

SEQ ID NO: 327411 - DNA, 100 bp, Homo sapiens
gggggcggcgtgcggcctagcgtctcagcctcaggcccagagccagcacgagacatccgctgcgagttctgtggtgagttcttcgagaaccgcaagggcc

SEQ ID NO: 327412 - DNA, 74 bp, Homo sapiens
attcacaatgtccatatatagaatttgaatcatttgacaagttggactaaatgctcttccttcagaggattatc

SEQ ID NO: 327413 - DNA, 75 bp, Homo sapiens
agacaacccaaccggtatacaatgggcaatctagagcagccatgatacctcccaagcagccacgacagcccaagg

SEQ ID NO: 327414 - DNA, 82 bp, Homo sapiens
cggcggaaaaccgaagttggaagtgtctcttagcagcgcgcggagaagaacggggagccagatgccatggacaatattacca

SEQ ID NO: 327415 - DNA, 75 bp, Homo sapiens
ggattttgcacttgtgcagaccgggcgagcagagtaagaagcaggaaacgttttgatggtaaattacaatcagaa

SEQ ID NO: 327416 - DNA, 78 bp, Homo sapiens
cgctcggctgcgggaaatcgggctgaagcgactgagtccgcgatggagggccatgaagcccccaggaggagaatcgag

SEQ ID NO: 327417 - DNA, 96 bp, Homo sapiens
tttggggctatagaaaagacggcatctgctacctttgagagtgccagcatgggtggtaaagtaccacctgctactcagaaagctaaatcagaagaa

SEQ ID NO: 327418 - DNA, 100 bp, Homo sapiens
attcttcaccaaatttgtagatgaggggaaagccactgttcggttaaaggagcctcctgtggatatctgtctaagtaagagtttcgctcttgttgcccag

SEQ ID NO: 327419 - DNA, 117 bp, Homo sapiens
gggggcaaggccctgagtgagaagttccaaggctcgggtgcagccactgagacgatcctgaaggacacgcaggtgactcgacaggccttaaatgagatctcggcccggcacagtgag

SEQ ID NO: 327420 - DNA, 88 bp, Homo sapiens
ctaatggtaaccgaaactcaaagttaatggagccaaatttaataaagctgcagtattgaagtatgagaacaatgttatgaatatcagg

SEQ ID NO: 327421 - DNA, 75 bp, Homo sapiens
tcttgaatgacatccgagcgaaagagaaagaggtaaatgggcttgatactgtgagagtgcctatgtctgtcgtga

SEQ ID NO: 327422 - DNA, 86 bp, Homo sapiens
ccctaaccacactatttatatcaacaacctcaatgagaagatcaagaaggatgatgaggagcgggaaggcctcctgcaccctggag

SEQ ID NO: 327423 - DNA, 50 bp, Homo sapiens
cacatactggattttgccaatcttcaggtgggtgtacatggcattagaat

SEQ ID NO: 327424 - DNA, 75 bp, Homo sapiens
ccgatttaaagctgagctgcgaggaaaatggcggcgggaggtgcacattaaagatccaaagtcatgactgactcc

SEQ ID NO: 327425 - DNA, 100 bp, Homo sapiens
cgaagacaaagcagagttggaaagtgatccaccttacatggaaatgaaggttcctccagaagaaattaattatttaacacgaattcactacaaagctcag

SEQ ID NO: 327426 - DNA, 76 bp, Homo sapiens
atgaaaatcttcacagtgctgttactaaagcctgcctttccagaaactcccatcaagactgaagcagacgttttgg

SEQ ID NO: 327427 - DNA, 51 bp, Homo sapiens
gaaaactgaacccacagaagattctggcccgagctgctcactgagggagtc

SEQ ID NO: 327428 - DNA, 76 bp, Homo sapiens
cgccgctctccgagctcgatccgctgctcgcacgggagccagctgggtgatttggaaatagtgggatttattgata

SEQ ID NO: 327429 - DNA, 90 bp, Homo sapiens
ctgcaacctacggggtgtacttgggaacgaggggtgaagcggcccaggtgaggtgtggacgaatgtggaacctcgctctgtggctgtgtt

SEQ ID NO: 327430 - DNA, 100 bp, Homo sapiens
ctgaggccagggcatgaccctgtgcgggagaggctcaagcgggacctgttccagtttaacaagggcagctggtggaatttttgaagaaaatggaatctcg

SEQ ID NO: 327431 - DNA, 73 bp, Homo sapiens
atttatcgggctcggcgcaggcccgcggggagcgcagcccggcggaggtgctggagaatctggtaaaagcacc

SEQ ID NO: 327432 - DNA, 88 bp, Homo sapiens
gcgaagaggctggactcggattcgttgcctgaggccaagtcctgtatctgccatgtctgtggcgtccacctcaacaggctgcattcct

SEQ ID NO: 327433 - DNA, 117 bp, Homo sapiens
ggggaccctcagctggacacggccatcgggcagtggctccgctgggataaggctctagtcgatgccggggacaaaccagcaacatttgtcggatcgcggcaatggattggatctatt

SEQ ID NO: 327434 - DNA, 51 bp, Homo sapiens
tggggtgagagactatagcaagcagtaaccctccactgagtgaagaaatgt

SEQ ID NO: 327435 - DNA, 75 bp, Homo sapiens
actttcaagaagttggtgaagggccatgcctactctgtgaccggggccaagcagagacgagttgtactgctgtca

SEQ ID NO: 327436 - DNA, 75 bp, Homo sapiens
tgagaagtcgtcctcttcagaaagaactcccccactggaaaggattctgaaagaaatgaagtcagccctcagaaa

SEQ ID NO: 327437 - DNA, 83 bp, Homo sapiens
tatagtgatcttcatcctcagagggaaacattcactgcacagaaccgctgctgctgttcttgaagggtttttcagagtcggag

SEQ ID NO: 327438 - DNA, 101 bp, Homo sapiens
gctcctccgccccgagttctccatcccctggatcccgggctcgcgggggcgcggagaagaggatccaggaaagggagtaccctgacttctaccggaagctc

SEQ ID NO: 327439 - DNA, 51 bp, Homo sapiens
gggaagagtgtgactgtggtactccaaagtactatactggcaattgctgga

SEQ ID NO: 327440 - DNA, 74 bp, Homo sapiens
gatgaaggtggcaaagtgctgcttccaaagctcattgacttttctgctcagatctcccttgagtttagaaatct

SEQ ID NO: 327441 - DNA, 100 bp, Homo sapiens
aagaagagaagcagaattatacctagaagtctactaatggacagttagtcacccacctacatgttgaggtgctaactttgagtacatcatcgcagaaaaa

SEQ ID NO: 327442 - DNA, 90 bp, Homo sapiens
cagcggcaggctcaggtgcagccgctgacatcgatgaatgtggaaatgagctcaatggaggctgtgtccatgactgtttgaatattccag

SEQ ID NO: 327443 - DNA, 98 bp, Homo sapiens
cctggaccaaacaaatgggatttcccctcatttatgtggaagctgaacagggtttggagaacattgattaaggaagcattttcctgattgatgaaaaa

SEQ ID NO: 327444 - DNA, 90 bp, Homo sapiens
ggacaacggcctgcgtgtggcctccgagcagtcctctcagcccacttgcacggtcttcaataaactcatcaggagatataagtatttgga

SEQ ID NO: 327445 - DNA, 74 bp, Homo sapiens
cttatacagattttgaaagggcaaagtttacttcagaggtactggtcttcttggacattaatctttgaatactt

SEQ ID NO: 327446 - DNA, 82 bp, Homo sapiens
agcaggtctaccgggccacgcaccgcctgctgctgctgggggtattccctcagcggatactacacccatccatttcaaggct

SEQ ID NO: 327447 - DNA, 106 bp, Homo sapiens
gctgataggctgcgctaccggaatgtcatccagcgagtgattaggaaactcgaactatctaccagtttcattacaagaattggccagaccatgatgtaccttcatc

SEQ ID NO: 327448 - DNA, 82 bp, Homo sapiens
gggttgtcaccggcttccgcatccaagatgaagagtggttgtgtcaaaccgattggtgacatctccatgctgtattgtcaca

SEQ ID NO: 327449 - DNA, 75 bp, Homo sapiens
caacagaatcctctgaaacttccacagaggaagtgctcttcagaaaaggttgcgtgatagagaaaaggaaatgga

SEQ ID NO: 327450 - DNA, 90 bp, Homo sapiens
ggaactgcagaagaagctgtctctgctgatagactccttccagaataactcaaaggtgggaatggaagtggccccacatctcaaagaaac

SEQ ID NO: 327451 - DNA, 100 bp, Homo sapiens
gccttgaaaaagctgccctgagacggtgtcccgccgaaagtgatgcggctgactaagcctactttattcaccaatatcccagtaacatgtgaagagaaag

SEQ ID NO: 327452 - DNA, 100 bp, Homo sapiens
aaagatccccgttcctggagattctgattgagcgtccgtctccaagagagtatgaagagagtgcgtctgtagggcagggaagatggcggacaagcgcaaa

SEQ ID NO: 327453 - DNA, 100 bp, Homo sapiens
tgcgatggggcgagaaaggtcccactgcagccctccaagcaggcgagaaccactgtctctgatcaacgtgcggaagaggaacgtggaatctggggaagaa

SEQ ID NO: 327454 - DNA, 75 bp, Homo sapiens
aacagcgaggaagaagaggacgacgacgacgaggaagaggaggtttctgagatcttggcatatacagaagggctg

SEQ ID NO: 327455 - DNA, 100 bp, Homo sapiens
gcgggacctgttccagtttaacaagtgttctggacttggtgcctctttctgttatatgctttcctatttagttgggagaccagttgtatacaaataccta

SEQ ID NO: 327456 - DNA, 95 bp, Homo sapiens
tcagcagggagacctggataaggcacttttgctcacaaagaagcttcttgaactagtgtgtggattctcatgccatataacttgtgtaaacaaag

SEQ ID NO: 327457 - DNA, 101 bp, Homo sapiens
agctaagtccccagattggaggaggctggctctggtcttcgatgcacaggagtggccgttatggaacgcagaacaatgctaaagtagctgtgctaggggcc

SEQ ID NO: 327458 - DNA, 75 bp, Homo sapiens
gagtggttgtgtggtcgcgtctcggaaaccggtagcgcttgcagcatggagaagaatttggattggtttcctcgg

SEQ ID NO: 327459 - DNA, 74 bp, Homo sapiens
gggagcggagacctcgctgcgctcatggcgtcgcccgggtacatgtcccagagcaagcacacggaggcccggga

SEQ ID NO: 327460 - DNA, 50 bp, Homo sapiens
ccggggtggtcctcttccctttgtcggtgctggagaatctggtaaaagca

SEQ ID NO: 327461 - DNA, 80 bp, Homo sapiens
cccgtcccgaccctggccgccccgagcggagcctggaggttgtgaccgagattcccgacgagagagactgaggggaagag

SEQ ID NO: 327462 - DNA, 100 bp, Homo sapiens
gaatccgccgtgcaaatctgtccgcccccttggccactgatcccccgaagagcttctgtcgccgctctagggaaatggctagtgatgagctgaaagagat

SEQ ID NO: 327463 - DNA, 100 bp, Homo sapiens
ccgatactgagcttcttcctatttgccatgggatctcgaggacctggaagaagcagaggagccagacatggaggaagacgatgatcagaaagctgtgaaa

SEQ ID NO: 327464 - DNA, 109 bp, Homo sapiens
ccgcgtccgccgattcctcctccttggtcgccgcgtccttggctggcgtactgtgccctgtccacggtgcctcctgcatgtcctgctgccctgagctgtcccgagctag

SEQ ID NO: 327465 - DNA, 98 bp, Homo sapiens
acggagcataggaggaaaattcatcatctgggtctccgtctctccaccgggggcttcatccttccagggaggagaagagggactccagaatggctgag

SEQ ID NO: 327466 - DNA, 100 bp, Homo sapiens
gccgaaggcccgagcgcccgaggcgtctgggatggtgtgggaccggaaactatgtgaagcaacactctggattttgaaagacatcttttcatcatgggac

SEQ ID NO: 327467 - DNA, 75 bp, Homo sapiens
ctgggctcgcggcgtctccggggaaagccgtggccccgagggcggatccgagggctaatttcatataccgagtat

SEQ ID NO: 327468 - DNA, 85 bp, Homo sapiens
ttgaaaggtgtactgcaaggaacaaaatgtttgtaaattctccttttaccaaggttttgcacactagggaccaagaagccctcgg

SEQ ID NO: 327469 - DNA, 82 bp, Homo sapiens
gaagacctggaagacagatctggttttaaaatcaaagatgggaaaatcggagaaaattgcccttccccatggccagcttgtt

SEQ ID NO: 327470 - DNA, 75 bp, Homo sapiens
atgattttgagccatacttaagtagccagacaaatcagatctcttccgttccctgctggcagttcatcagctgga

SEQ ID NO: 327471 - DNA, 100 bp, Homo sapiens
gcactctaatgaagcaatacattgagtttgtggcagacagacttatgctggaactgggttttagcaagttacagaatgtctgaaggggacagtgtgggag

SEQ ID NO: 327472 - DNA, 101 bp, Homo sapiens
gaagcatgctctggaaatgttcccagaacattgcacgatgcctcctgatctgaacagaattaagacgaacgagctttcacaattgcagcagatgaagatcc

SEQ ID NO: 327473 - DNA, 90 bp, Homo sapiens
gcgcgaagctggccaaagcctgcccagacggctcacctgtgcgggatggaacaaaagccagtgagctcctccgacagcgaggcccccgag

SEQ ID NO: 327474 - DNA, 96 bp, Homo sapiens
ctgtgaagagaggagttgagaacatctctgttgacattcattgtgatgtcaccgggtgcgcatcaatgtacctccacacagagggcttctctgggc

SEQ ID NO: 327475 - DNA, 95 bp, Homo sapiens
cgacggtccctcagcccagccaccatgagcaccaagcagatcacttgcagagtggagactgctgcacggactctggaaccatgaacatatttgat

SEQ ID NO: 327476 - DNA, 80 bp, Homo sapiens
ctggtggggattgacagccacgggaagtctgcgctcctcagaccaccggcaggtgaacagcctgatgcagaccgaggagt

SEQ ID NO: 327477 - DNA, 100 bp, Homo sapiens
tccctggtctgggccatgtctggctgtgatgctcgggagggagactgttgttcccggagatgcggcgcgcaggaagagcattaagaagttggttttgaag

SEQ ID NO: 327478 - DNA, 82 bp, Homo sapiens
tgcgtcaagtacactgaaattcatcctgagatgaggagggccctcctggacccgggagcggaccctggtggcggtgaagccc

SEQ ID NO: 327479 - DNA, 100 bp, Homo sapiens
gcttttttacctgccaatcaaactgctacaagacaacaccctgatctggcatggacatccatctcttcctgtactctataccctgtctagccaggctaca

SEQ ID NO: 327480 - DNA, 50 bp, Homo sapiens
catttggcagaataaatgaaccagatggttatgtccttcggagttaccta

SEQ ID NO: 327481 - DNA, 75 bp, Homo sapiens
tcaatttcatacagaaccttgtgttttacattgaagctgcatataaaactgctgccatccgggatggtgtcattg

SEQ ID NO: 327482 - DNA, 82 bp, Homo sapiens
agggcatttccttcgggatgtattcggctgaagagctcaagtgatgatgaacagtctacacagatggctgcaagttgggaag

SEQ ID NO: 327483 - DNA, 100 bp, Homo sapiens
gggaggacggcgtgcgagagactcacgggacgcgacgcgccccgcctcccccgtccggtccctctctccacggttgtttacattcagagctctatcaata

SEQ ID NO: 327484 - DNA, 80 bp, Homo sapiens
gcaggtcacgaggacggagggccatgtgttgggtcagcaccatcagtgttctaagaacggaagcatctgggctggatgga

SEQ ID NO: 327485 - DNA, 100 bp, Homo sapiens
gtgcccctgggcatcaccaacatagccatcgacttcggggagcagttctagacctggaaggcctcctaagaggactcaaagtgtcacctccccagagaac

SEQ ID NO: 327486 - DNA, 100 bp, Homo sapiens
tccacattgagagcaaaatctacaagatgatgcagggaggagggcagtcagggcgacagcaagaatgccaagaagaagaacaacaagaaaaccaacaaga

SEQ ID NO: 327487 - DNA, 100 bp, Homo sapiens
ggacagggcacaacaaccgtttctgtccggttccagttgttggcaaaggagaggaagaggaagaggaagatggcatgcggctttgtctgccagccaaccc

SEQ ID NO: 327488 - DNA, 83 bp, Homo sapiens
ttgctgcggtgtttgaccgagacataaactgcagaagagcagcctctgtgtcccgacccaggctaagcttgagcatggctgag

SEQ ID NO: 327489 - DNA, 100 bp, Homo sapiens
tcatcctctccaaagacgccacccacgtccgcgacttccggctcttcgtgcccaaccacaggccggatcacctcaacagtcacgtcagacaagtgcactc

SEQ ID NO: 327490 - DNA, 82 bp, Homo sapiens
tgtttgtggatcgctgtgatcgtcacttggtcagaaacccttcccttgtcaaaaatgcgatgccttcttttctaccaaatct

SEQ ID NO: 327491 - DNA, 97 bp, Homo sapiens
cagatcgccggggaggcagcgcgggatcccagcctcaggcgtgcgcggacggtgtgcgggggatggagaagtttatgtttgggatgtgaactcaagg

SEQ ID NO: 327492 - DNA, 100 bp, Homo sapiens
acaagctgtaccaggacgaaaagattgctgctaaaattgattcaattcctcacttgaataattccacacctctagtggacccctcagtatatggatacgg

SEQ ID NO: 327493 - DNA, 85 bp, Homo sapiens
ggtgtgcaggtgcggttgcggcgagccagcgggctgacgcacgaggcacacaggaaggaggtggagcaggtgtatctgcgctgtg

SEQ ID NO: 327494 - DNA, 82 bp, Homo sapiens
gacagcggccccctggagggggcagtcccgggagaacctgcggcggccggagcgactccgtgggaaggaggcttgtttaaac

SEQ ID NO: 327495 - DNA, 75 bp, Homo sapiens
tcagtttgatgcgtcacactacgacagtgagaaaggagtacagaacctgctaaggccatcaaacctattgatcgg

SEQ ID NO: 327496 - DNA, 96 bp, Homo sapiens
cgtacaaagtgagacctgtggccatcaagcaactctccggagctgctgctcttcctccagaacctgcccacagcccactgggatgatgaggacatc

SEQ ID NO: 327497 - DNA, 50 bp, Homo sapiens
atggttccatccctaaacttatacgatttcagactttggaccatgaagac

SEQ ID NO: 327498 - DNA, 96 bp, Homo sapiens
ccctacacctcggagcatgtgcccaggagaagctcggcacagtgacagaggcacccagggctcagcaagctcatggcccagcttgttggactcaga

SEQ ID NO: 327499 - DNA, 50 bp, Homo sapiens
gacagatctgagagatactgagtgctcttaaagttccgtacagataaagg

SEQ ID NO: 327500 - DNA, 74 bp, Homo sapiens
gcagcggagagcgagagaggggagcagcgttacagtgtttctgccacctctgtacaaaagacaattttacttgt

SEQ ID NO: 327501 - DNA, 75 bp, Homo sapiens
aggtttactggagtaggtgttagtaaggtctcggcgcggaagatggccggcggcgtggacggccccatcgggatc

SEQ ID NO: 327502 - DNA, 95 bp, Homo sapiens
ccagaaacccctgcgtccgccacggcccagttatttctcaaactctgaggctgcggagttcacacattgaaatctgtcatctttttcagagagaa

SEQ ID NO: 327503 - DNA, 51 bp, Homo sapiens
ccatcatagtcaactgcgtggaagagaagatggactcaccctgtcacccag

SEQ ID NO: 327504 - DNA, 75 bp, Homo sapiens
acctctccttttccctctccctttccctaagctcggccgcctgtcagtgcaatgctgccccatgtggtgctcacc

SEQ ID NO: 327505 - DNA, 75 bp, Homo sapiens
atacttatcagtatcttatatgttagcttgacctatgcagatcttattccagcaatcagccatgactgcctttgc

SEQ ID NO: 327506 - DNA, 100 bp, Homo sapiens
ggcggcggcgtaggacggaggcgtcgctagctgagatctgtatctgtggacctgaatgttgatccctcgcttcagattgacatacctgatgcgctcagtg

SEQ ID NO: 327507 - DNA, 75 bp, Homo sapiens
cagaaactggaggagtcccgctcgaagctagggtgagcttgtcggccacagactgctacattgtgcatgagatct

SEQ ID NO: 327508 - DNA, 75 bp, Homo sapiens
ggtccggacagcttctatttgggtggtgaggtttctgaagaattatccctgaaactgccaccaaatgtggtagaa

SEQ ID NO: 327509 - DNA, 75 bp, Homo sapiens
gaggattcttcatatgtgatcaaccttatgaacctgttagtgaaaaatgtactctgacctgaatcctgaattttc

SEQ ID NO: 327510 - DNA, 113 bp, Homo sapiens
gaaatgacacctctgggcttgagaataagactgttgttgtcaccacaattttggtttattcagaaaacatgtccactgcaattagggaggtaggagtttggagacagaccaga

SEQ ID NO: 327511 - DNA, 96 bp, Homo sapiens
tatgaacaatccgtctggatcacggatgtaggaagtggttttgatgatgatggttcagaatttcatgaacatatatttctggagaaacacctggag

SEQ ID NO: 327512 - DNA, 100 bp, Homo sapiens
cctctaacaacggaaaatgcttccagtgaaattctttcttcaccaaaggacatggatgaaaatgaaagcaaccagtctctgatgacaagcagccaatatc

SEQ ID NO: 327513 - DNA, 83 bp, Homo sapiens
gtttgtgcaggacaccgacatggaacagggactcactggggtgacatcgacctagtggtgtttgggaagtgggagaacctacc

SEQ ID NO: 327514 - DNA, 97 bp, Homo sapiens
tttccgttgccaaacccaggacaaggtttaatagactacaacttccactgtttccgaaaagctattcatgaggtttttgaggtgggtgtgacttctc

SEQ ID NO: 327515 - DNA, 80 bp, Homo sapiens
gcgccgaggcggccacccgagacgcggcgcgcacgctccggcctgcgacaatgcagatcttcgtgaagactctgactggt

SEQ ID NO: 327516 - DNA, 82 bp, Homo sapiens
tagaatcaaggatttcagcaacaatgcctctgttcaaactcccagggtctgcggaagagggagctgctgaaggagctgctac

SEQ ID NO: 327517 - DNA, 90 bp, Homo sapiens
gcccgcgcccttgcccctcggccgggcggacgtgaagcagccgacacgagtcgttgttcataaaacagcttttgaaagttgagagcacac

SEQ ID NO: 327518 - DNA, 100 bp, Homo sapiens
atggatttcaatccctccgtatgcacatgtgggtagaggacgtgttagacaagttcatgagatctccaagacgacatagatccacatctccttccccttc

SEQ ID NO: 327519 - DNA, 101 bp, Homo sapiens
ataatttatgaagctccgttgactaccgtggagagatcataatttggggttcaagattccaggattttcaagaaagacatgtctgacaaaatgtctagctt

SEQ ID NO: 327520 - DNA, 82 bp, Homo sapiens
agcttacaatcatggcagaaagcaaaggagaagcaggcgtgtcacctgttggttaccacagagaagcgcttcctcaaagaca

SEQ ID NO: 327521 - DNA, 82 bp, Homo sapiens
gatgaaagcctacgggatccgctttgacgtgatggtgaacggcaaggagaagaaggaagttgtggaagaggcagaaaatgga

SEQ ID NO: 327522 - DNA, 93 bp, Homo sapiens
tcatccgggcacttcataagggatccgcagctgctcccgctctccagggactgcatcatgctctgttgcctgaacagcggcaccagcttcgtg

SEQ ID NO: 327523 - DNA, 75 bp, Homo sapiens
tcgccgaggcaccgaggcactcagaggagtacctggagtagaacagaaaaattattatgtctgtgttcccttggg

SEQ ID NO: 327524 - DNA, 82 bp, Homo sapiens
gactttttcagagactgggacttggagcagcagtggagccttcacgtaaatgggtccagtcatgcctcccagtaagaagcca

SEQ ID NO: 327525 - DNA, 100 bp, Homo sapiens
gccttcaagtgcatgatgtgcgatgtgcggaagggcacctccacccggtacctgttcgcgctgcaggtgaagcaggacttggctcaaggcaggttgacgt

SEQ ID NO: 327526 - DNA, 100 bp, Homo sapiens
agctttgccacaaagcccagtctgtgtctcaaatcaaccacaagctggaggtggtgatctttgtgaagtctgtgcagcggtgcattgccttggcccagct

SEQ ID NO: 327527 - DNA, 75 bp, Homo sapiens
tcggccgccatggtcttcagcgtcaggatggctaaaggtgaccccaagaaaccaaagggcaagatgtccgcttat

SEQ ID NO: 327528 - DNA, 153 bp, Homo sapiens
gttaaactggaagatctgagatctaaagctaaaattgcctttggacagtctatggatctacattataccaataacgagtggaagaacgcagttttgttgaaaagcacagatggccgtcgaatatgtacttgaagcagcttgcggaatacagga

SEQ ID NO: 327529 - DNA, 90 bp, Homo sapiens
gaatccctgccccatctgtcgagatcacaagttgcatgttgactttagggtgcaccccctgtggatgtgctccgggccctgaggttcccc

SEQ ID NO: 327530 - DNA, 95 bp, Homo sapiens
atggctgccgcgccgccgctacgggaccgcctgagctttctacaccggcgccgtgccgtccctgcagtgacaccgaggtgctcctagccgtctgc

SEQ ID NO: 327531 - DNA, 100 bp, Homo sapiens
ccttgaaaaacagcctgcttatgtaaagccagagaggtttgtgaaccttggcattgagcctcccaagggcgtgctgctctttggtccacccggtacaggc

SEQ ID NO: 327532 - DNA, 100 bp, Homo sapiens
agttcattggatcaaacatgtcacaagagtcggacaactccggaccaaaatttaacagtgccatccgaggaaagattgggttgcctcatagcatcaaatt

SEQ ID NO: 327533 - DNA, 80 bp, Homo sapiens
tcgtggcaatgttttgaaactggcaaaatcaggaagagagaagggcacagttacctaagtatcaacgtaatcttcctcgg

SEQ ID NO: 327534 - DNA, 90 bp, Homo sapiens
agcgtgaccgagagcgcgaatatcgtcatcgttagaagtattggtaaaggttttcaaggtgtcatgaaaagatggggatttaaaggccag

SEQ ID NO: 327535 - DNA, 98 bp, Homo sapiens
aattggatcgagaacagcaggcagaacattttctggagaaattaaagcttaccatcggcaggatcccaaattcagagacattccatgctgcatcctgt

SEQ ID NO: 327536 - DNA, 83 bp, Homo sapiens
ctcagggacaaagagatctggacagaatcgccggacagcaagccctggatgaaaacatggacctcttggaaggtataactggc

SEQ ID NO: 327537 - DNA, 97 bp, Homo sapiens
aacgtgattgagcgccaccctgtggacatcagcgccatccccgagcagcggtggaagctgacttcccaagtaagaagcggaagaggagccgctggaa

SEQ ID NO: 327538 - DNA, 76 bp, Homo sapiens
tgatactgaaggggtcgtcactgtactggtatagcaatcaaatggttttcaaatggaacattttgatgcatcactt

SEQ ID NO: 327539 - DNA, 90 bp, Homo sapiens
gacttaactgccgaaggaaaatgtcactgtcccattggccatattttaggttggatgcatcataatatggatctagtaggagacaaagcc

SEQ ID NO: 327540 - DNA, 123 bp, Homo sapiens
ttcagaaggatatcgacgtcgtgatccagaagtccagagctgaggactgcctgtttgcaggagctgtggagtccaagtgtgactgccaagaggaatccagcaaagccaaaaagcccaagcatg

SEQ ID NO: 327541 - DNA, 99 bp, Homo sapiens
acgctacacgaagaactaagaatattattagcacaagagcaccatactttgagggaagagaatggagactacacatatgtggaaagagtgaagataccc

SEQ ID NO: 327542 - DNA, 100 bp, Homo sapiens
agaacttgaggaagaggcccaacgggattctctcgggcctagccgtccttggaacccgatattcgggctgggcggttccgcggcctgggcctaggggctt

SEQ ID NO: 327543 - DNA, 74 bp, Homo sapiens
ggtcgtctgcatcaacaacataaatttccagagaaaatctgttgtggtaaaacttccttttcctgtagatcaaa

SEQ ID NO: 327544 - DNA, 76 bp, Homo sapiens
aagcccaaggctctggcagcagcggaccggctccagaaaatattccccggtgtgggccaagtgctttcggggcaaa

SEQ ID NO: 327545 - DNA, 75 bp, Homo sapiens
cgcagagcaagcgcggggaaccaaggagacgctcctggcactgcaggagttcatgatcaagtgttgcccacacca

SEQ ID NO: 327546 - DNA, 50 bp, Homo sapiens
agccccttgcagaagacgccgtacgagccgagaccgacccgcccgcccgc

SEQ ID NO: 327547 - DNA, 100 bp, Homo sapiens
gaaggcttggctgcagtagacatcggctccgagagaggaaggtatgaagaggagatcaacaaacgcacagcagccgagaatgactttgtggtcctaaaga

SEQ ID NO: 327548 - DNA, 124 bp, Homo sapiens
cgcgaaccaacggttagcggtggcaggggctgactgagagcgtctgcttgtactatactggcaattgctggagaagattttgcaattgttgcttctgatactcgattgagtgaagggttttcaa

SEQ ID NO: 327549 - DNA, 82 bp, Homo sapiens
tcagcctcccgccggccgtctccttaacaccgaacaccgctgaccccgcactacatctacccaccagccatcgtgcagccca

SEQ ID NO: 327550 - DNA, 100 bp, Homo sapiens
aaagaaaaagttcaaaaactgaaggactctgaagctgagctacaaaccactgagtaagcaaaaatcagaggaagagctcaaggacaagaaccagctgtta

SEQ ID NO: 327551 - DNA, 100 bp, Homo sapiens
aatacccagaactgcctcccgattttatctttggagaagatgctgaattcctgccagacccctcagctttgcagaccgagacaacacttggactcagttc

SEQ ID NO: 327552 - DNA, 100 bp, Homo sapiens
agatagatgtgtcctatgaataccgcttcctggagttcacgactctgagtgctgatccggggatttctttcacggtttgataatgtccttcccgtcagcc

SEQ ID NO: 327553 - DNA, 74 bp, Homo sapiens
ccaggagagcaaggcccagaaagaggaatagcgggttttgcagcaattgttgcatatggattatataaactgaa

SEQ ID NO: 327554 - DNA, 50 bp, Homo sapiens
attatactcagtggctgcaaaaagctatttttatgattcccacaaatcca

SEQ ID NO: 327555 - DNA, 101 bp, Homo sapiens
atccccgcccgacttcggaaggaccgggaggcaaagttgttgacctcctgtactggagagacattaagaagactggagtggtgtttggtgccagcctattc

SEQ ID NO: 327556 - DNA, 98 bp, Homo sapiens
cgggcaccatgagcgacgtggctattgtgaaggagggttggctgcacaaacgaggttgtgcagcctgactctgaagaagctggtggtcttcaaggagc

SEQ ID NO: 327557 - DNA, 75 bp, Homo sapiens
ggagaacacaaagaagtgtgatgctcctgagaaccatgtctatgcccaaaggtagagttctggataaaaacctgg

SEQ ID NO: 327558 - DNA, 100 bp, Homo sapiens
cgggaagtgcttggggatggagtgcctccaaaggttgctgaggtaaccaatggtcaaggtgaaaataagatgaaaaatttacctgtgcctgtctatctca

SEQ ID NO: 327559 - DNA, 82 bp, Homo sapiens
ccacaagacatttcctgctcggaaccttgtttactaattgtttccacttgagcggcacagtgacagaacctgcaatacaatc

SEQ ID NO: 327560 - DNA, 90 bp, Homo sapiens
ggccgcctagagtggttcagccacaaggagggcaattgaaggaacagactaaaaatcgtgtcctggaaggaaactacaggtactaccagg

SEQ ID NO: 327561 - DNA, 51 bp, Homo sapiens
gtgccctctccattccactgctgtggcaggagaaattgtcgtaaatgaagt

SEQ ID NO: 327562 - DNA, 100 bp, Homo sapiens
agaatattcctatgaccctggaattactgcagctagatgaggaagaggagcgaaggaaaaggcgccgggagaagaacaaagtcgcagcagcccgatgccg

SEQ ID NO: 327563 - DNA, 75 bp, Homo sapiens
cagggtccctgaagagggaagacacgcggaaacaggatgaatttttagatgtgatctactggttccgacagatca

SEQ ID NO: 327564 - DNA, 100 bp, Homo sapiens
gttttccggggccctctcagcaagaacgggaacaaaactctgcgaatgtctgcgacaacgagctcctgcactgccagaacggagggacgtgccacaacaa

SEQ ID NO: 327565 - DNA, 96 bp, Homo sapiens
attgatcccaactacagatttccaacgtgcaaaggtttcttcaatatttatcaccctgaatttgctgacacaatatcttccgcctggtgctgggca

SEQ ID NO: 327566 - DNA, 100 bp, Homo sapiens
agcaaatgttacttgttccacgtttcttccatgtcagagctggctttatgtgctggggcagaagagatccgatagctatgttctgctggagcattctgtg

SEQ ID NO: 327567 - DNA, 75 bp, Homo sapiens
agaaaaacctgttaaatgcaaatttggtaaaataccatgaagattttgaaaaaacaaaggggagaggctttactc

SEQ ID NO: 327568 - DNA, 83 bp, Homo sapiens
cagacatgcgccagcacgcctgaaagggctattgcaagacacgaagtccgagaaattgagcagcgacatacaatggatggccc

SEQ ID NO: 327569 - DNA, 74 bp, Homo sapiens
aacggcctcgtgttcggtttgatgcatctgtgggtcttgcagatatgatgtctcctggtgaatccaaactgccc

SEQ ID NO: 327570 - DNA, 88 bp, Homo sapiens
cagaggatccagatattagcacagcagaccttggtgatgtgctacaggccagaagcggactcctagaagaggggagcagcaaggatgg

SEQ ID NO: 327571 - DNA, 100 bp, Homo sapiens
tccagcttcaccacgcggctgcacaactgcaggaacaccgtcacgctgctggaggagcttttctgggagaagaggctacaaggacttagtgcatcagatg

SEQ ID NO: 327572 - DNA, 75 bp, Homo sapiens
gagtgtcctggacccagctgagcgggcggtcattcgcatcgcaggcaccgggagcctggccgctgcagtggagac

SEQ ID NO: 327573 - DNA, 75 bp, Homo sapiens
cccaggacctcttggaagagggtgacacttggacagaaacactggcctatgtgctcttctggggagttgcaagca

SEQ ID NO: 327574 - DNA, 80 bp, Homo sapiens
aggtgtcattacagtgatcatcataggcttatgtcttgctgcaggttgtgaaaatcttggagaagcacgaccccttgaag

SEQ ID NO: 327575 - DNA, 99 bp, Homo sapiens
atgtcttcttagaccgtgttttccaggagtgtctcacttatgatggagaaatggacattctgagcatgtgagacctgaggactgcaaacagctataaga

SEQ ID NO: 327576 - DNA, 82 bp, Homo sapiens
gcacctggagggaaaacaacacacattgcagcactaatgcatgatcaggatcacgcagatttgcgaagccatttcttcacag

SEQ ID NO: 327577 - DNA, 101 bp, Homo sapiens
gtccgcatcgccacagctgaaggctgcgagggactaagagcagatatctggagtccatctttcaccatcttctcctgagattgtactggaccgtgaccact

SEQ ID NO: 327578 - DNA, 100 bp, Homo sapiens
caccaggacatcccagagtctgggaaatggttcttgggtgtctctggggagtccctgggccagaccttcctccagactccagcccacctcttcggagcag

SEQ ID NO: 327579 - DNA, 97 bp, Homo sapiens
cgtttctcgagggaaaggctgctgcctcctgctctgtcctcatccccggcttagtgttgttaataacagtactggtagtggaagggattgccgtggc

SEQ ID NO: 327580 - DNA, 75 bp, Homo sapiens
ggaagccctaatccagttcctggaacaggtgacgcggcgcacggcgcggatggtggccgagtggcagtgtgtggg

SEQ ID NO: 327581 - DNA, 100 bp, Homo sapiens
ccatcatgcagcttccgcagggtccaaccgtgactgccagatcgaccagcaccaccggaaccagtgccagtactgccgtctcaagaagtgcttccgggtg

SEQ ID NO: 327582 - DNA, 100 bp, Homo sapiens
cagaagtgggactggagcgaagtagaggatgccgaggagaaaacagcaggcacccaagcgggcggcagcgccagcagccctgtggtggcgacgacgatgg

SEQ ID NO: 327583 - DNA, 98 bp, Homo sapiens
catctcgcagtacagcggcaagatcaagcactggaaccgcttccgagacgctctgacgcccgctctgcggcttcggtgtttgaacaggccacagtcca

SEQ ID NO: 327584 - DNA, 100 bp, Homo sapiens
ggccaggagggctacgtgccgcggaactacttcgggattctgtgctgaacgcctccggtccctgctgcatactctggagatcaccgaccttgctgacttc

SEQ ID NO: 327585 - DNA, 98 bp, Homo sapiens
caatcaccccattaacccaaagggcctggaggttcaaaccttgtactactcagctgatcacaagctgcttgatgggaacctactagatggacaggctg

SEQ ID NO: 327586 - DNA, 100 bp, Homo sapiens
ccttgtctcagctgctgaagctgcaaagtggaagatgctttctacaaaggtgaactcaggctgaatgaggaaaaattatggaagaaaagcagaacggtga

SEQ ID NO: 327587 - DNA, 95 bp, Homo sapiens
ctggaatatgaagagacatgagatggtggatgaacccccaggttttcttccgccatctgtgacagcttcttgatctgtcccaaggtgggtggctg

SEQ ID NO: 327588 - DNA, 98 bp, Homo sapiens
tggcaatggcctacgtcgtcataccgggcttccttgccctgtccgggcatctgcaaacatagagaattctgggcttccacacaactccagtgctaact

SEQ ID NO: 327589 - DNA, 75 bp, Homo sapiens
tttcagtaaggataattctttcagaatgctttatcaaagccccctgtgctgtttgaggcgtgaaactcacctcag

SEQ ID NO: 327590 - DNA, 75 bp, Homo sapiens
cgagacaacagtggccttctgatgaatactttaaatgagaccaacaggagttgcacaggtacgatctactggaat

SEQ ID NO: 327591 - DNA, 74 bp, Homo sapiens
ttcaccgagatctacgagttccatggtttggatccagctcgagtcaacgtccctgtcattggtggccatgctgg

SEQ ID NO: 327592 - DNA, 100 bp, Homo sapiens
caaaggaatttccaacttatgaatacataaaatttgtaggaaattttcgctcttacaacaatgcaatccccaaggtgagactggagacaatctatatttg

SEQ ID NO: 327593 - DNA, 100 bp, Homo sapiens
tggacggcattcagtgttttgggagaaaatgtgtaattcaaagaagatactgatgtgttgaaaaaatggaatttttggtactgtgctgtttacttattat

SEQ ID NO: 327594 - DNA, 90 bp, Homo sapiens
aaactgttttggatgatcttgaccccgaggttgcaagaaagctcaagtagcctatggagaggatgcaaggcttccagctgatgccctcag

SEQ ID NO: 327595 - DNA, 76 bp, Homo sapiens
ttctctgaacgcaagaactacaagctgcaggaggtccggaccctatttgtcagtggccttcctctggatatcaaac

SEQ ID NO: 327596 - DNA, 75 bp, Homo sapiens
agacgaccaccatcctgctggacgggcggcgggtgaagctgcagctctgcccgtggaccgggagcccgtggaccg

SEQ ID NO: 327597 - DNA, 82 bp, Homo sapiens
gaagctggccgagcaggctgagcgatacgacgattcttctgctgatcgacattgagcagtcctacatcaacacgaaccatga

SEQ ID NO: 327598 - DNA, 82 bp, Homo sapiens
ctgctcccccagggacggacccctacacagctggattggctgcagcagcgacactagtttgctgatggccgccaaagttgga

SEQ ID NO: 327599 - DNA, 75 bp, Homo sapiens
aatgtctatggtgaagtcttttgtacagtggttaggatgttccagatgaccttgatggtgcccccatcgaggaag

SEQ ID NO: 327600 - DNA, 83 bp, Homo sapiens
atcctggtcatcttctatttccaaaaccaagatcactccatggatgaaatgacagctgtggtgaaaattgaaaaaggagttgg

SEQ ID NO: 327601 - DNA, 100 bp, Homo sapiens
ataaacttgaccagtctgagattaagagcctactgatgtgtttcctctacatcttaaagagcatgtctgatgctcaaaagccaaaagtctctgagaacga

SEQ ID NO: 327602 - DNA, 50 bp, Homo sapiens
tggcggagcagacctactcgtgacgccctgctggcggacttggagtctac

SEQ ID NO: 327603 - DNA, 126 bp, Homo sapiens
cacctctgcgacatcaagccggaaaactttgccatccggagcgacttcacacatcctggtggggaagaagttttaagggaacaagctggaggtgacgctactgagaactttgaggatgtcgggcac

SEQ ID NO: 327604 - DNA, 100 bp, Homo sapiens
ccgggagtcgctgtggcaaaaggcaggccagaaagcagacccagggaggatagcacatgtcttcggctacactggtgaaggcatcgtgcctgctccacag

SEQ ID NO: 327605 - DNA, 73 bp, Homo sapiens
acagggaagtgcatcacatgtcagagctggagataagatgggtagactgctacttcccttttacacatccttc

SEQ ID NO: 327606 - DNA, 109 bp, Homo sapiens
gtgcattcccatcctcgctcccacctgtcagccttctaccccatgagaaagaccagatggatcctgtgcaaaaagcggttattaaccatacatttggagtatccattcc

SEQ ID NO: 327607 - DNA, 75 bp, Homo sapiens
gttctcgaatcattctttgtacagaaattgaaaggcttcaaagctagcaggcaggcaatccaggcagtcgttaaa

SEQ ID NO: 327608 - DNA, 98 bp, Homo sapiens
ctgcagactgcctcaacagagtgataggttccttttgaggatggccacacagacaaccacttacctcttttagaaaataatacacattaacacctccc

SEQ ID NO: 327609 - DNA, 74 bp, Homo sapiens
tgtgaacctgctggccgagtggctcattcagacaggtgtacgcatgatcagcctctcctattcccgaatctcct

SEQ ID NO: 327610 - DNA, 80 bp, Homo sapiens
gagagagattgctcctggccccctcaccacaccctctgtcccaggacagtcattttgtttactcattcagccctgttgca

SEQ ID NO: 327611 - DNA, 100 bp, Homo sapiens
ggaaaaggtcccggagagctgagcagtcaagatggattgcaagtcaagtagctgctttggaccttggctataagcctggggtggaagcaattcggaagaa

SEQ ID NO: 327612 - DNA, 100 bp, Homo sapiens
gtctcatgtatgagatttacgtggagacctgtgggcaaaacactgagaaccaagtcaacccggccacctttgggaagatccagtgtagcatcaaacccca

SEQ ID NO: 327613 - DNA, 101 bp, Homo sapiens
ggcggcgagcccttccttataggcgtcagcgggggaacagctagcggcaaggactggggttcagactttccgcagagaccatgatcgtttctgggtcctag

SEQ ID NO: 327614 - DNA, 50 bp, Homo sapiens
gggcgctcggtgcccgggccgggcagcgtcgagggcgaggcccccagcag

SEQ ID NO: 327615 - DNA, 48 bp, Homo sapiens
ctccttttccctctccctttccctaagtactgtaagattgatgttaaa

SEQ ID NO: 327616 - DNA, 75 bp, Homo sapiens
tttctcttgactgagaatggtgccacgtgtggtctgtaagtagagatcttgcagctgctatagatcgaatggaca

SEQ ID NO: 327617 - DNA, 90 bp, Homo sapiens
ggcaaaaatggaaccttgaaacctggagatagaatcgtagagtcctgacacagctctccctgaggagcagccacattccagctcccagtg

SEQ ID NO: 327618 - DNA, 88 bp, Homo sapiens
ctccccggcgatgcctcacaactccatcagatctggtgaaaggtgtagcagtcactcggcctacacccacagcatcgaccttgtgaac

SEQ ID NO: 327619 - DNA, 100 bp, Homo sapiens
caccttcaatgtcactgtcaccaagactgacaagagcacagaggacatacggatcgatgagaggacagtcagccccttcctgcaattgtcagatgatcga

SEQ ID NO: 327620 - DNA, 110 bp, Homo sapiens
atgcggtttccaagcacacgggtaattggtacgcctcagagaccggcagcgtcaaacaccctggtggtaggaagcccacacacccccagcactcactttgcctctcagaa

SEQ ID NO: 327621 - DNA, 82 bp, Homo sapiens
tgcatgcgtcgtcggcctctgggcagcagaaactatgttccaacttcctgtcaacaatcttggcagtttaagaaaagcccgg

SEQ ID NO: 327622 - DNA, 88 bp, Homo sapiens
cgccaggagtcagcaaaacacactaaagattgggcagtcactggggagaacatgacacctttgaggccctgtgcatcgagccgttttc

SEQ ID NO: 327623 - DNA, 113 bp, Homo sapiens
ccgggaccctccccttggaccgagccgatcgccgcggggcagttcgggccggctgtcctggcgcggaattgaatgatctggcacgggaccctccagcacagtgttcagcaggt

SEQ ID NO: 327624 - DNA, 101 bp, Homo sapiens
ccaaaatattttgcttggtacacaaaatggatctggtacaggaggatcaacgggacctgtgattcgcctttgccagtctcatctcgtgtctgctttgttaa

SEQ ID NO: 327625 - DNA, 100 bp, Homo sapiens
atccaagggagcagctgtgaaattggcagactttggcttagccatagaagttcaaggggaccagcaggcgtggtttgtcgggaacatgccctgtgtgccg

SEQ ID NO: 327626 - DNA, 98 bp, Homo sapiens
ggcgactgaagacgatgggacccactgccctgcattcggcgagtctgcggacaccagaactgacctgggagcgagtgagatctcaagttgaccatgtg

SEQ ID NO: 327627 - DNA, 113 bp, Homo sapiens
tcctgccgtccttctccactttcgccagcccgtgccgcgagcgcggcctgcaggagggacccagacatggagctgcgggaagaagcctggtctccggggccgctggattctga

SEQ ID NO: 327628 - DNA, 75 bp, Homo sapiens
ttgaagaaatacagcttggtgaagagttactagctcaagatggtgctggatctttgccttggccagggggttccg

SEQ ID NO: 327629 - DNA, 75 bp, Homo sapiens
aaagaaagctctgctatgtgtcagttccgctctatcaagctgaaggaagacattctgtcctgcacttttgctgag

SEQ ID NO: 327630 - DNA, 83 bp, Homo sapiens
tggcgggtgccctggctaccatggaccatcctgctggtcagcactgcggctgcagaatctggtagcccagagaccaagaaacc

SEQ ID NO: 327631 - DNA, 83 bp, Homo sapiens
aaaaatgtcacccttggacaagcagcagccgctcttctaaaacattcaaaccaaagaagaatatccctgaaggatctcatcag

SEQ ID NO: 327632 - DNA, 82 bp, Homo sapiens
tggactccaccaacgccgacggtatcagcgccctgcaccagggggatatgagactttctactcggaatatcctgagtgttgc

SEQ ID NO: 327633 - DNA, 100 bp, Homo sapiens
gggcttctctgaggcggcgagagatggtcaggtctggagctcgaccgggccaggctatgtggttgatgttgcagaatgatgagccggaggacttcgttat

SEQ ID NO: 327634 - DNA, 100 bp, Homo sapiens
aggatggctactatttcaccaatctggactgaaatgcaactgcagaagcaacatgtgaccttttagagatgcttgtgggactgcataaagtgaagaggga

SEQ ID NO: 327635 - DNA, 152 bp, Homo sapiens
tttttggaccttttttcatttccatttctaccttgtatgcctcaatttgctggatttaagcactgctgcactttatgagtgtaaacaggaacatcgataagtagtgtaaaaacttgcacaatgaaatccgaagccaaggatggagaggagga

SEQ ID NO: 327636 - DNA, 99 bp, Homo sapiens
gccgtgacctgcaggtactgacagatccgtagggaggacaccgtgacttcccggacgctgggaaatgactgtgccctgtccacggtgcctcctgcatgt

SEQ ID NO: 327637 - DNA, 73 bp, Homo sapiens
ataagactaaagaaaacattttggaagaattcagtaaagtcacagcagccatggcaatgacaggctcaacacc

SEQ ID NO: 327638 - DNA, 75 bp, Homo sapiens
ctttgagtgagcgctatgacaaattgaagagctccttaataagcatttatagtcagtttttggcagcaatagaat

SEQ ID NO: 327639 - DNA, 103 bp, Homo sapiens
ccccggtccatggtggtcatcgaggtgttcacccccgtggtgcagcgaatcctcaagcataacatggaaaaggggaagatagtgatgtactcagtataaatgc

SEQ ID NO: 327640 - DNA, 101 bp, Homo sapiens
cccagcgtggatgagggcgcctgcagatcccggctagggcacggaccgcctaggccgagaaatcgagctatagcagattatcttcgttcaaatggctatga

SEQ ID NO: 327641 - DNA, 125 bp, Homo sapiens
aaagattgcaaggtgaataaagaagtggagcgtgtcctgaaggagttccaccaggccgggaagcccatcggtgtactaatggtcacttgatgtgcgctggctgttttatccacctactagcagat

SEQ ID NO: 327642 - DNA, 82 bp, Homo sapiens
gggaaccctggtcaccgtctcctcagagcaatcgcaggcgctggctcagtcaataaaggatccgggcccaacacgcacattc

SEQ ID NO: 327643 - DNA, 100 bp, Homo sapiens
cttcacccagcatttcatccctcgtcgaaaggattggattggcatctttagagttatcaatactctggctgaccatcatcatcgtgggactgactttggt

SEQ ID NO: 327644 - DNA, 50 bp, Homo sapiens
caaaattctgaactcaggacttggcaaagagctcagaaatatgctcagca

SEQ ID NO: 327645 - DNA, 89 bp, Homo sapiens
gttccaaagacaatgatgagaagattgtgcagaatgctatcatccaaacaataggtttgttggcatccaaagctgttggggttgatggt

SEQ ID NO: 327646 - DNA, 74 bp, Homo sapiens
tgacggctccttctgcgtctgtgaggccaatgcaaatatggtgtcctcagaccgaagccaactttcctttctgc

SEQ ID NO: 327647 - DNA, 80 bp, Homo sapiens
aaagcgacaagtggaggcgccgctctagcggccgggactctgaactatggcgaaatggtggagtcaatgaagaaagtagc

SEQ ID NO: 327648 - DNA, 85 bp, Homo sapiens
aggacctcacttccccggggtgtaataatgttaactgaggcaatgaatttccaagggaagttaaagtatcttcatggacagaaaa

SEQ ID NO: 327649 - DNA, 75 bp, Homo sapiens
caaagacctttatgccaaggataagcgttttcaagcctttgtaaaggccaagccgtacaaaaatgatccagaaat

SEQ ID NO: 327650 - DNA, 97 bp, Homo sapiens
cagatgcgggccctgctggaccagctcatgggcacggctcgggacgggagaagaaatgggtgaccgttggtgacacatccctacgaatctacaaatg

SEQ ID NO: 327651 - DNA, 100 bp, Homo sapiens
acgacttaaggattcagagaaagagaactctttgttaaagaagagaataagatttttggaagaaaagggctctctaaatacgtacagattctgcgataat

SEQ ID NO: 327652 - DNA, 75 bp, Homo sapiens
ccagaatgtcatgacctacctcaccagcatccccaggaagcgcaacaggaaaggagagaagaatggcaagggcct

SEQ ID NO: 327653 - DNA, 95 bp, Homo sapiens
ggaaagaggagaggcacccgatatatgttctctaggccttttagaaaacatggattttgaatgtggaaatgacgtggaactgtcttttaccaaga

SEQ ID NO: 327654 - DNA, 82 bp, Homo sapiens
agggcctgccctgctcctggtggcacccagtggcctgtactactggtactccaaagattcaggtttactcacgtcatccagc

SEQ ID NO: 327655 - DNA, 100 bp, Homo sapiens
gccataaaaggaaatttagatgggttttccagagatgcaaaaatgcaccctactccagcatcgcaccccaagaaaccagagagccttgggattttaaaag

SEQ ID NO: 327656 - DNA, 75 bp, Homo sapiens
cccatctaatcacagactcctatttgaagtatttgacgaaaatagactggtttgccagaacccaataaagatgcc

SEQ ID NO: 327657 - DNA, 87 bp, Homo sapiens
accgaggcccccctgaaccccaaggccaaccgcgagaagatgacccagatctgcaccaaaaacagcgctgggaaccacaccaaccat

SEQ ID NO: 327658 - DNA, 75 bp, Homo sapiens
tgttagcagagaggacagtctccggaatattctttggagttgaattgctgacattgcctaagatactgagccata

SEQ ID NO: 327659 - DNA, 100 bp, Homo sapiens
gcagcctggcactgttttcacttgcctttggaaatgaaggtgcagaaaccatgggaggtatcttgcaatatattcagaactctccctcctagtgacagca

SEQ ID NO: 327660 - DNA, 82 bp, Homo sapiens
gggggcttggcggcttttctcctcagttttctggagtgctttggaggagaggtgaaaggtgtagcagtcactcggcctacac

SEQ ID NO: 327661 - DNA, 97 bp, Homo sapiens
aggtctgagctcgggctccccgagcagtttgagtccccttgcccgctccttcagacaatgcagatcttcgtgaagactctgactggtaagaccatca

SEQ ID NO: 327662 - DNA, 83 bp, Homo sapiens
gttactggcagtatcttttaaacctgcctagagctggaacgttacctccagagcgagccctgctatgtttcagcctcagaaat

SEQ ID NO: 327663 - DNA, 74 bp, Homo sapiens
tggcggcgaacgcggagagcacgccatgaaggcctcgggcacggggccgcctctgtcatctcactagacatttg

SEQ ID NO: 327664 - DNA, 123 bp, Homo sapiens
cttcctgcaggctggccatggcgcttcacgttcccaaggctccgggctttgcccagatgctcaaggagggagcgaaaaaatgcactcggtgatggaaagagagccactattctgaagaacact

SEQ ID NO: 327665 - DNA, 74 bp, Homo sapiens
tttccccgtcagcatcccagccgtgctcacgggggggccctcagcctcttggccttgaacgggctgttcatctt

SEQ ID NO: 327666 - DNA, 75 bp, Homo sapiens
tttggcccaggcacccggctgacagtgctcggtgcagagcattgtagaccaaggagccatggataggagaagtat

SEQ ID NO: 327667 - DNA, 80 bp, Homo sapiens
gatccagcctgcggagcctgtggggcagaaatgtcctggccccgtacgcggtgccctcggagctggtgctggtggaggag

SEQ ID NO: 327668 - DNA, 100 bp, Homo sapiens
gcagaggacgcggccaggcgattcggtgaagcgattcctgcaggcgttggttcccctctttgacctggtcacaagctacctaactaagaagtttgctgaa

SEQ ID NO: 327669 - DNA, 83 bp, Homo sapiens
tcggggccgagcgggaggcagccgtggccgagacaatgcagatcttcgtgaagactctgactggtaagaccatcaccctcgag

SEQ ID NO: 327670 - DNA, 82 bp, Homo sapiens
gctgtccgtccgcagtaccgacgcctgcagggggatatgagactttctactcggaatatcctgagtgttgcgtggatgtaaa

SEQ ID NO: 327671 - DNA, 100 bp, Homo sapiens
cggatgagtacgataccgaagcgggctgtgtgccccttctccacccagagagtgtggaaggagaacaccatgagaaagctgtggaactactcaaggctgc

SEQ ID NO: 327672 - DNA, 83 bp, Homo sapiens
ttggaggtggcattgttgggagcgctgttttcgtgatcttcagaccccaggttctttgctctacgaactcgacggggacccca

SEQ ID NO: 327673 - DNA, 51 bp, Homo sapiens
caagaagtttctaggaaaggccggacaccagaataccctctaccatctgct

SEQ ID NO: 327674 - DNA, 90 bp, Homo sapiens
gaactacagcaacttggtctcactggatttggagtcagcatatgaaaataagagtttacctacagaaaaaaacattcatgaaataagggc

SEQ ID NO: 327675 - DNA, 74 bp, Homo sapiens
tacaagatggttgccgggtcatgttaattgggaaaaaggtgccgtgagcgatgtggagatgcaggaacactatg

SEQ ID NO: 327676 - DNA, 83 bp, Homo sapiens
cgctccgcagccccgggcacggcggaggcagcggagccctgggccatcggcaaaagaatggaccccagcaggaaaagcaaagc

SEQ ID NO: 327677 - DNA, 76 bp, Homo sapiens
ctggcctgctccaggatggtgctgcggaactccatgctccactgactgttgttgcagatgggcttttctccaagtt

SEQ ID NO: 327678 - DNA, 106 bp, Homo sapiens
cttctgctgctggtggggctcacggcgcctgccttggcgctggccggctacatcgaggctcagtagatgaaggcgtttctgagggcttgcctacacttcaaagcac

SEQ ID NO: 327679 - DNA, 60 bp, Homo sapiens
cctacagcctactggtgactcggctgcaggcattcccatcaagagcaccatggacaaccc

SEQ ID NO: 327680 - DNA, 99 bp, Homo sapiens
cttggatcccattcacctgaggcacccgaagaagagaccatccatatttccaggggtcaggagagtgctggtattgtgactagtgatgggagttcggtg

SEQ ID NO: 327681 - DNA, 100 bp, Homo sapiens
ctgggcagtgccttctatgacatggccagagtctgcaggacagacttggcagcaggtaccccctgtgaggaacactgaaatggatcacgacggaaccccc

SEQ ID NO: 327682 - DNA, 100 bp, Homo sapiens
ctttttggacgatgtgcggcggatgaacaagcggcagtgattcgcctttgccagtctcatctcgtgtctgctttgttaagttccatgatccagactcagc

SEQ ID NO: 327683 - DNA, 100 bp, Homo sapiens
cgccgtgacctgcaggtactgacagatccgtagggaggacaccgtgacttcccggacgctgggaaatgtcggatacgctaaaaatcaagcagttgcccag

SEQ ID NO: 327684 - DNA, 134 bp, Homo sapiens
agtacggaatgacctacaatgacttcttcatggtgctaacagatgtggatctgagagtcaaggttgagcaatgtttaaagcgtttgaaaaacatgaatttggagggctcaattcaagacctgtttgagttgttt

SEQ ID NO: 327685 - DNA, 100 bp, Homo sapiens
ggcggcggcggcggcggcggctgctgctgctgctgcccgcgtccgaggctcgcgggcggcgggcccggaccacctggtggcccatggtagaatggcagaa

SEQ ID NO: 327686 - DNA, 75 bp, Homo sapiens
gggcaaccaatcaatgaaacagacacacctgcacaggttttgaacgaagaatgtgatcagaactggtacaaggca

SEQ ID NO: 327687 - DNA, 51 bp, Homo sapiens
agccgcgcagccctcggagcacggtgctggagaatctggtaaaagcaccat

SEQ ID NO: 327688 - DNA, 100 bp, Homo sapiens
gtagctgtcgtttggtttgatcttgttgactatgaggaagttctagattgagctaagagaacgagagatagaacgactgtcagttgctttggatggtggt

SEQ ID NO: 327689 - DNA, 100 bp, Homo sapiens
ctggagtctgcgaaggccgggacccggttccccggcccacagtgggggtgtgcaaacccgagagaactggggtctcctatggacagaagtgcgggcaagg

SEQ ID NO: 327690 - DNA, 83 bp, Homo sapiens
ccaagatgcggatccgggcctttccggattctaacattttcagagaaccttttggaaagaacaagcctacttcaataaatgaa

SEQ ID NO: 327691 - DNA, 80 bp, Homo sapiens
agcgggagctggacggcgagcgcgagcggcgcgagaaaatgcagctgactttgcctgtagcctcatagaacccatcccat

SEQ ID NO: 327692 - DNA, 100 bp, Homo sapiens
gaagatgaccttaacacagtagcagctggaaccatgacaggcatgttgtataaatgtacaggtatagtggaggattacaagccaccgttctacgatgtgg

SEQ ID NO: 327693 - DNA, 74 bp, Homo sapiens
ttgttttcccctcggcactaggcagcggaggagcccgaccgacccgtggaagatagatgataagcctgtaaaaa

SEQ ID NO: 327694 - DNA, 90 bp, Homo sapiens
ctcgactacggcgagcctgagcgcggcggcggcccacgcgcagcgacagggagagaatcctgcaaaaatgtctctctatccatctctcga

SEQ ID NO: 327695 - DNA, 101 bp, Homo sapiens
gccgtcttcccggcgagtccgcgacggtcgccgcccacggcgagtcctgacacagctctccctgaggagcagccacattccagctcccagtgcgcccctct

SEQ ID NO: 327696 - DNA, 82 bp, Homo sapiens
agttcctgccgtctgctcttctgcctcttgatctccgccaccgtcttcaggccaggttcattttccagacactgaaagagca

SEQ ID NO: 327697 - DNA, 100 bp, Homo sapiens
ctgggcttcccggctcccctggagcccgcggaccaaaggggtggaaaggtgaatgcgtctgttccaaggggtttccctttccactcatcggagattcaga

SEQ ID NO: 327698 - DNA, 75 bp, Homo sapiens
cctcaggcgtgcgcggacggtgtgcggatgggtctaggaaagacaatccaggcaattggaattacttacttctat

SEQ ID NO: 327699 - DNA, 87 bp, Homo sapiens
gctgacgtggagcggtacatcgcctcggtgcagggctccaccccgtcgcctcgacaggaattgtactctcagagatgttgagaaaag

SEQ ID NO: 327700 - DNA, 75 bp, Homo sapiens
tctgtacagcctgcagaactgaagagcattaagaagttggttttgaagaaccttaataatagcaatctcttttct

SEQ ID NO: 327701 - DNA, 100 bp, Homo sapiens
ttttacgaatgcttttcaagcgaaatcctgcaaacagattaggacagtcattttgtttactcattcagccctgttgcaggtcccaataaactcttcataa

SEQ ID NO: 327702 - DNA, 83 bp, Homo sapiens
aatggagcaggtgaaagtgcagatcgccgtggccaacgcgcaggagctgctgcagctggagcagttcaacatgatggagaacg

SEQ ID NO: 327703 - DNA, 75 bp, Homo sapiens
aaaacagccaccttcagtatctcagtcctccagtgtttggatattcaggcccgccagctcatcctgcagtatggc

SEQ ID NO: 327704 - DNA, 121 bp, Homo sapiens
cacttatttttataagagatattaagcccggactgaaaaacttaaatgtcgtctttattgtcctggagataggtttttcgttggaatatacgttgcacatttatggcgattctgagtgtga

SEQ ID NO: 327705 - DNA, 90 bp, Homo sapiens
agaccgtgaccgagagcgtgaccgagagcgcgaatatcgtcatcgttagaaggccaccagcttgggctccccacggagggcagcaagtgg

SEQ ID NO: 327706 - DNA, 90 bp, Homo sapiens
tggctttattgacctcgactcccatgcggaatcagagatcattgatttcttcctgggggcctctctcaaggatgaggttttgaagattat

SEQ ID NO: 327707 - DNA, 75 bp, Homo sapiens
cgcgagaccaggacggcgcgggaactctacgccaacgtggtgctgggcaggtcgagtcccgggcgctcaccatgt

SEQ ID NO: 327708 - DNA, 75 bp, Homo sapiens
aaggagttcaatcacttggcgtgacttcactacttttaagcaaaagaatcgtcagtatttaaacagatcacatca

SEQ ID NO: 327709 - DNA, 76 bp, Homo sapiens
gcggcgcggggaccgctgtgctctcgaatacttggctttctctgactcaagtaaatgggtttttgagcaccctgaa

SEQ ID NO: 327710 - DNA, 100 bp, Homo sapiens
ggccgccaagaagcacggcaccaaaaacaagcgcgccaaaagaatgcaatggtgtaaagattccagttgatgccagtaaacctaatccaaatgatgtgga

SEQ ID NO: 327711 - DNA, 100 bp, Homo sapiens
ggctgtatggagcgattttgcagatggtacccatgaagagattatgaactacttgaaggtggagactgtacggtggtgtgttggagctggcttgtaatgt

SEQ ID NO: 327712 - DNA, 51 bp, Homo sapiens
ccctgacctaatgttatcgcggaatgatgagcctttgtggtagaaacccag

SEQ ID NO: 327713 - DNA, 100 bp, Homo sapiens
tgggggccgcccatgaaagcgcagccatggcgggagttaaagttcctcgtaattttcgcttgttggaagaacttgaagaaggacaaaaaggagtaggcga

SEQ ID NO: 327714 - DNA, 90 bp, Homo sapiens
cacggtcctcctggctgtgctcatatacacctgagacatcatctcattatgttgcccagactgatcttgaacttctggactcaagcaatc

SEQ ID NO: 327715 - DNA, 75 bp, Homo sapiens
cctacatggcactagaagaacgcttagcccaggctatggagttgatattcactgatggactccaaagaatcatta

SEQ ID NO: 327716 - DNA, 74 bp, Homo sapiens
tggctgccggctcctgtgacttcaagtgtcgtgcagtcattggagaaatcgatgaagaaacagattctgcgctt

SEQ ID NO: 327717 - DNA, 83 bp, Homo sapiens
gcccctgcagcggaaccggacccagtccctgagccgcccctacacccacaggttggtgttcgaggaagagacattgttgttct

SEQ ID NO: 327718 - DNA, 50 bp, Homo sapiens
ccgcagcatagactgggacttgggcgtctctggccgagcctctttttgtg

SEQ ID NO: 327719 - DNA, 101 bp, Homo sapiens
ccggcgccgtcgcgccactcctccgaggagaagatgtcaaccggacactagaaggtggaaggaaacctcttcattatgcagcagattgtgggcagcttgaa

SEQ ID NO: 327720 - DNA, 90 bp, Homo sapiens
gtgagtcattcaaacagcatgacataactgacaagttggatggcttgaggactggtactaaaaggaaacgtgactgggaggccattgcca

SEQ ID NO: 327721 - DNA, 90 bp, Homo sapiens
aaatcagaaaagcaagataaagttcagcacacagtatgtatggattgcagtagctacagtacatactggcatttataagacgctgtttgg

SEQ ID NO: 327722 - DNA, 80 bp, Homo sapiens
tttatggggtggacaactaagacatttagaattgcaaaatgccaatcactggaagagtggtggctgaatgttgcctatct

SEQ ID NO: 327723 - DNA, 75 bp, Homo sapiens
ccattatttatgtcatcaagaagaatgacgatggaagaacacccaaacccaggaaagagataccctggaatacag

SEQ ID NO: 327724 - DNA, 90 bp, Homo sapiens
ctgtgttctgcgtggggacggccgcctagagtggttcagccacaaggagcccctgcctgacttctcacgagtccctggtctgacattgcc

SEQ ID NO: 327725 - DNA, 109 bp, Homo sapiens
gtcttatagttgagaatttatcctcaagagtcagctggcagggtaaaaaacttgttgctgcaagtcaagctgccttaggcttataacatcacatttaaaagcatctcag

SEQ ID NO: 327726 - DNA, 74 bp, Homo sapiens
gcctttgaaaaagtcgaccaaattgttgaaggtgtcttctctttagggatggtgaggttggaaaaaggctcctg

SEQ ID NO: 327727 - DNA, 75 bp, Homo sapiens
tcggattccttatgcagagtggccgacttgatttcctcctctgatgctcctcttcagcctttggtatcctctcct

SEQ ID NO: 327728 - DNA, 83 bp, Homo sapiens
tctgcggctctcggtgccctctccttttcgtttccggaaacatgttggagaccttccccagacgcctccaggggctgtcccag

SEQ ID NO: 327729 - DNA, 87 bp, Homo sapiens
aggatatcgtgtctggagcagtggagcccaaagacccctggagacatgccacaatggtgcgcatgaatgtcctggcagatgctctca

SEQ ID NO: 327730 - DNA, 100 bp, Homo sapiens
tgaaactatggctaaattacatattccagtaatggtggatgaagttgttcattgtttgtcaccacaaaaaggacagatcgagtgcagggagcaggaggcc

SEQ ID NO: 327731 - DNA, 100 bp, Homo sapiens
tttaacggcgggaactgacgtagtgttaaacactgtcgtgtatcgctggcacagcacaaggacattataggttgctccttgagggcaggacagttcttat

SEQ ID NO: 327732 - DNA, 75 bp, Homo sapiens
gaagaactaagaatattattagcacaagagcaccatactttgaggagccagagcccagaggtggagcagttaggg

SEQ ID NO: 327733 - DNA, 90 bp, Homo sapiens
ttcacatcaagtccagggttaagtacagaaggtctgcaataatttccctctactcattgattgtttcccaggaactcacaacaaagtgct

SEQ ID NO: 327734 - DNA, 134 bp, Homo sapiens
aaccaggactgctccgcgcgcccctgagcctcgggctccggcccggacctgcagcctcccaggtggctgggaagggtctttttggagttcctgagctgagtgccccagaaggatttcatattgcacaagaaaaa

SEQ ID NO: 327735 - DNA, 82 bp, Homo sapiens
gacaggacgaagccggagtgtaggcggcagaggattcgctcccagagcagctgcggccagttacagaatgtctgaaggggac

SEQ ID NO: 327736 - DNA, 75 bp, Homo sapiens
gtgctgctttctttaggacgaaaggtattattaacccaaagaatccaaaggaagctccaaagtccttcagcttcg

SEQ ID NO: 327737 - DNA, 82 bp, Homo sapiens
ctgaatggctttggtgggatgtgtatgaccttcacctcattaacactcttttgaaacagatggtcaccatgtttagatatta

SEQ ID NO: 327738 - DNA, 100 bp, Homo sapiens
tgcatcatttttatggatgaaatagatgctattggttagtggttacttggatgattgtacctgtgatgttgaaaccattgatagatttaataactacagg

SEQ ID NO: 327739 - DNA, 83 bp, Homo sapiens
gttgaagctatagtgaaaaatgtacctgagtggaatccagtgccgagaaccagacaaggtgcagcagtgatcaatggctctca

SEQ ID NO: 327740 - DNA, 100 bp, Homo sapiens
cctccttccgcgcgagtctctggagaagccgcagcgcgagttgccgccgctgctgcccggggccggccacctccaagatccctacactgatcatgctttt

SEQ ID NO: 327741 - DNA, 100 bp, Homo sapiens
cccggcttcccgtctcgtcaccctctgtttttgaagagccggaagatccaagcaacagatcatttttctctgaaattatctcttcgatttcggatgtgaa

SEQ ID NO: 327742 - DNA, 75 bp, Homo sapiens
catgggccggaagcaggggggaacgctggacgacctgaacgcctttttacccaagtcagccggtgtatcagtcag

SEQ ID NO: 327743 - DNA, 100 bp, Homo sapiens
ccagaggagagttctccaaacatgatcgtttactgcaaaatcactccaagaactgaggcccctgtcagcagtgtcagtaatagtttggagaatgccctgc

SEQ ID NO: 327744 - DNA, 80 bp, Homo sapiens
ccgaaatttgggaccaagctgaacagctttccaaagagcaaaaaggtactgatgctttgggttggaaaaaattgtacaca

SEQ ID NO: 327745 - DNA, 74 bp, Homo sapiens
caggctcagtctgcggccaagactccgtcctgcaagctgctctgttaaaagcgaaaatgaaacaattgcctgcg

SEQ ID NO: 327746 - DNA, 85 bp, Homo sapiens
atcctagtggaggacgcccctgtgaatggagaagctgatgccatgagcttggatggagggtttgtctacatagcgggcaagtgtg

SEQ ID NO: 327747 - DNA, 75 bp, Homo sapiens
aagagaagaattcagaagaaacaaaagtgccaccgaagaggtatcagcagatgttgcacacaaacttggtatacc

SEQ ID NO: 327748 - DNA, 137 bp, Homo sapiens
gtaaagatgaatgctgcttcgatgcaaatcaaccagagggaagaaaatgcaaactgaaacctgggaaacagtgcagggaactctaatgatccaggacaaagaagttaccctggagtatgtatcaagcctggattttt

SEQ ID NO: 327749 - DNA, 70 bp, Homo sapiens
gttcatctttactttttaccaaaactcaaggaagtagcacaagttgggctcctggatttggatttggaat

SEQ ID NO: 327750 - DNA, 101 bp, Homo sapiens
acctcctggaagccaaaaatggtatcgtgatttccgatacccacctggacacccccaggagtataaacacaacatctactattggcatgtgattgcagcca

SEQ ID NO: 327751 - DNA, 74 bp, Homo sapiens
tgacatgtactccctctccggggatccgttttggaactgaaagaacacaaactggatggcaaattgatagatcc

SEQ ID NO: 327752 - DNA, 90 bp, Homo sapiens
gcctggtgcaccaggcagagggaacagccgagagggtgacctctctgggcaaggactggcatcggccctgcctgaagtgcgagaaatgtg

SEQ ID NO: 327753 - DNA, 100 bp, Homo sapiens
tccacccagtatttcaagagtcacttctttacttggtgcaggaaggcagtctttgctacgtacagcaaaagatatataaactctcttcacaagaagaaag

SEQ ID NO: 327754 - DNA, 75 bp, Homo sapiens
gggaggtgcccctgcgttgtaccatccgcctgtgggacacctaccaggtgggatgtgtgtgggctgaaattccga

SEQ ID NO: 327755 - DNA, 80 bp, Homo sapiens
acgtcagtacacactttcctgattactgttttaaaatcaaagatgggaaaatcggagaaaattgcccttccccatggcca

SEQ ID NO: 327756 - DNA, 90 bp, Homo sapiens
aatttgttccttatagctacttctctcgggatgtagcaagaaagattgagcttctagagcctcagagatggaattcgccgttttgccgcg

SEQ ID NO: 327757 - DNA, 82 bp, Homo sapiens
ctcgcggaccaccctgctccgaaaactaagccgcccacgcagaacatgaacctgggccctggagccctgactcagagcggct

SEQ ID NO: 327758 - DNA, 82 bp, Homo sapiens
agcacactgaaggaggctcagttcaaagacctgttcttaaaaaaagacagaatgttgctgcgggatgtaaaagctcttaccc

SEQ ID NO: 327759 - DNA, 140 bp, Homo sapiens
cactcacccaggacacactatggtgcttcagccaagtgaaaggcactatcgagattggaaccacagaaggttattaatgctgcactggctttagcagcaaaaccacagagtaaactggcccaagagaacatggatctttt

SEQ ID NO: 327760 - DNA, 75 bp, Homo sapiens
gcccaaagaacaagtgagggggccatgactgttggcaacacttacggtaatttttcgttagcaaccatgtttccc

SEQ ID NO: 327761 - DNA, 74 bp, Homo sapiens
ggcaataaacctaaaccgacctatactgtacagtgaacaggtattgccaaatgcccatgcccatgggctataat

SEQ ID NO: 327762 - DNA, 75 bp, Homo sapiens
tcgtggtggaggacttcgtgaaggattcgggcgcctgcttcagtgctgcatcttcctcccgtgaggctggccgag

SEQ ID NO: 327763 - DNA, 83 bp, Homo sapiens
cgccgctggttcgtgctgggcaatggtttgctctcttactacaggaagctcttcgtgggcggtcttgactggagcacgaccca

SEQ ID NO: 327764 - DNA, 87 bp, Homo sapiens
tgtccgggctacctgtttgaagagattgctagccttcaataatctggagaatcttgtctttggcaaaggattccaagcaaagatctt

SEQ ID NO: 327765 - DNA, 82 bp, Homo sapiens
gcaaaaccaacgcctggctcggagcagcagcctctgaggtgaaatgacaatggatgctctgttggctcgattgaaacttctg

SEQ ID NO: 327766 - DNA, 75 bp, Homo sapiens
atgtgtctccagcccacacttccaggtggcagaggaggagtacctgctacaggagctgcgcaagattgaggcccg

SEQ ID NO: 327767 - DNA, 100 bp, Homo sapiens
gaacaattgttgtagcaggtctaaaagttcaggtccaggttcaacagaagaggtggaaggtggagaccaactccaggctggattcggtcttgctgctctc

SEQ ID NO: 327768 - DNA, 83 bp, Homo sapiens
cgacgaaatcctccaggaggagatcaaggagtacaaggatgaccgagtgggagacagcagcaccagcggtggcagagacccca

SEQ ID NO: 327769 - DNA, 90 bp, Homo sapiens
cgagatttgggagagacgctctgaactgactgccccgcatcaccggagcgtcccagctgcgaggagggccgttgctccagggagaactgc

SEQ ID NO: 327770 - DNA, 142 bp, Homo sapiens
gcttgatgacgctcagaggctcctctaccgcaatgtgatgctggagaactttacacttctggcctctctggagctgcctggattgacaagtgccgccccaacctgctcatcacagagtccacgtacgccacgaccatccgtg

SEQ ID NO: 327771 - DNA, 122 bp, Homo sapiens
cgggacagagcggtcggtgacagcctcaagggcttcagcaccgcgcccatggcagagccagaccatactgtggattatcccccagaaagctgttcgttggattctagtcatgattgccctgg

SEQ ID NO: 327772 - DNA, 101 bp, Homo sapiens
ggtatctgtggcaggagcttttcgtaaagggaagtcatttctactggacttcatgcttagatacatgtataacaaggatcttcagcctgttaaacaagaaa

SEQ ID NO: 327773 - DNA, 100 bp, Homo sapiens
gtcatttcgtaccctttggagaatggtcaaagaattgactgtagatccaactgctgctggtgatgttcgtccaataatgcaccatccaccaaaccagatt

SEQ ID NO: 327774 - DNA, 74 bp, Homo sapiens
gaactacgaacccctggacgggagagtctgccggcggagaatataaggcaaccggtgaccaaaaacactttcag

SEQ ID NO: 327775 - DNA, 74 bp, Homo sapiens
aaggattccaagtaactcttatttgattaaaaggagcccaagccccatctcatcctagcacaccctcctccact

SEQ ID NO: 327776 - DNA, 82 bp, Homo sapiens
tttggcaaagctggggattggccagctgactgctcaggaagtaaaatcgctcatgatggagcagtccaagaagtcctccctc

SEQ ID NO: 327777 - DNA, 102 bp, Homo sapiens
cgccagggaggagatcccctcagttctgcgctgctcccgttccccctccccagagcaaggtactccaaagattcaggtttactcacgtcatccagcagagaa

SEQ ID NO: 327778 - DNA, 98 bp, Homo sapiens
gtgggtgagcggcgcagcggcggcagcggagagcgagagaggggagcaggatgtcttccaagcgaccagcctctccgtatggggaagcagatggagag

SEQ ID NO: 327779 - DNA, 74 bp, Homo sapiens
agtctgaagtgctcatcaacagcaaggtgaagttgaacaaattgctatgatgaaaccaaaaggccagactgaac

SEQ ID NO: 327780 - DNA, 75 bp, Homo sapiens
cggcgctatggaggagctcgatggcgagccaacagtcactccgcggcgagtcctttgcacatgttggcaacacac

SEQ ID NO: 327781 - DNA, 74 bp, Homo sapiens
tggtcaaaaggtcaactaaaagcattgtttctagaacatgagtaaaggcatgacttcctggcaccacagggaaa

SEQ ID NO: 327782 - DNA, 80 bp, Homo sapiens
aggacagtagagtgaaaagtgcagctgcaaccaatctctcagccctgtattatatgattttccgcagatttccagtggcc

SEQ ID NO: 327783 - DNA, 75 bp, Homo sapiens
ctgttgtctcgtcgtcatcgtcatcttcctgtcagtctgcagctactcagcatcagtctccgagagttgaagacc

SEQ ID NO: 327784 - DNA, 51 bp, Homo sapiens
tctctgttccaaatgctttgctgcctttctgagaaaagtctacagcattct

SEQ ID NO: 327785 - DNA, 130 bp, Homo sapiens
cctctgctggcatctgcgattgcatttttcctgttttaacaacggctgtgctagacgaagtggtgaagcccaattttcggctttgtgagaaaccttaccatcaaacacgatggccagcaacgttaccaac

SEQ ID NO: 327786 - DNA, 100 bp, Homo sapiens
tgatcatcaacattcgaggaggcagtgctcagaaccacacgttgcagaggctgcaacaggtgctgcacgcaggctcagggccctgcctcccccatctgct

SEQ ID NO: 327787 - DNA, 75 bp, Homo sapiens
cgcactctctcgatgagtcggagaagtcccggtgacagcagtattcgctattttgagatcacggatgaatccccg

SEQ ID NO: 327788 - DNA, 51 bp, Homo sapiens
cctttgcagtctcgacataagtgtacccagcataaccccattgaagagctg

SEQ ID NO: 327789 - DNA, 50 bp, Homo sapiens
ggccgctttggcgccaaatcctgagctgctgatgcaaggaatcccctggg

SEQ ID NO: 327790 - DNA, 75 bp, Homo sapiens
tctatggatctgctctaaaccttatagcctgcttatgggggaaggcagactccaggttaaaagcgcttaatgcaa

SEQ ID NO: 327791 - DNA, 75 bp, Homo sapiens
cccgctacctcatgggggagacgcagctgtgcaccacaagtgacctgaccaacggtgcagatgggatgctggcca

SEQ ID NO: 327792 - DNA, 76 bp, Homo sapiens
tccttggcagccacatgttctcctgctggactttgaagaatatcctgaacatagaacgaactttttcttactactt

SEQ ID NO: 327793 - DNA, 50 bp, Homo sapiens
ccttagcattggccgaagagttaaggtgaagactgatgagaagagtctgt

SEQ ID NO: 327794 - DNA, 50 bp, Homo sapiens
agcccacggacaccacctcaacgctggttttccaagaattgatataaagc

SEQ ID NO: 327795 - DNA, 83 bp, Homo sapiens
actgctgctccgtggagatcgtcccgcgcctgccggagtggagtcaacatatcaatggagcaagtcacagtcgtcgatgccag

SEQ ID NO: 327796 - DNA, 100 bp, Homo sapiens
gagccggagccgacgggcggtggccgcactgggaccccggaatcccgcgcgctgcccacgattcgcttctgaggtgttcaggcgcttcgtggaggttggc

SEQ ID NO: 327797 - DNA, 90 bp, Homo sapiens
cgcgaaccaacggttagcggtggcaggggctgactgagagcgtctgcttgatgagaagccggcttgcccaggagcgcagtgtgaagctgg

SEQ ID NO: 327798 - DNA, 75 bp, Homo sapiens
gaaaaccctcagaagaatttaatggatatctcacctgaaattcttagaggttgtgcctatggacctgaggtggac

SEQ ID NO: 327799 - DNA, 101 bp, Homo sapiens
cacggagggggccgaattctgctggaggcagcgccatatcctggaggtgaaggtccatccgccatgtggcccctgtggcgcctcgtgtctctgctggccct

SEQ ID NO: 327800 - DNA, 80 bp, Homo sapiens
cctggagcaggcagcatcctcaaatggaagattattataagtataggcctcatgttttatgtagttcatcgagctcaagt

SEQ ID NO: 327801 - DNA, 51 bp, Homo sapiens
aagcaccttggacaaattgaaaaattttgaagcagtgggaagaatattctg

SEQ ID NO: 327802 - DNA, 82 bp, Homo sapiens
taattaaaacatttttcagggacgtagccatccagaggttttaaaatcaaagatgggaaaatcggagaaaattgcccttccc

SEQ ID NO: 327803 - DNA, 51 bp, Homo sapiens
ccgttccctggaggtcctgtggaatggaatgccatatggcagccgagagaa

SEQ ID NO: 327804 - DNA, 87 bp, Homo sapiens
tgggagttcccaattaacaatgaagcagccacccacacagaatatgcctatgggtcctggagggatgaatcagagcggccctccccc

SEQ ID NO: 327805 - DNA, 82 bp, Homo sapiens
ccccgactcaacgtgagacgcaccgcccggactcaccatgcatcttcctcacggcaattctgggcctgcccgaagccctgat

SEQ ID NO: 327806 - DNA, 100 bp, Homo sapiens
tcggtctctgtcttggcacctgcaggaaacaagctcctacttccagaaaaagtgctcctgggactccaggataccaggcccccaccatgaagggtttcac

SEQ ID NO: 327807 - DNA, 101 bp, Homo sapiens
tcgggccgagatgtctcgctccgtggccttagctgtgctcgcgctactctctctttctggcctggaggctatccagcgatgacaaggagtatgtgggcttt

SEQ ID NO: 327808 - DNA, 100 bp, Homo sapiens
agggcgccttggacagcggagagcccccccagtgcaggagtcctgagggggagcaagaggacaggcccaggaagtacacgagaagctccgaggatggctg

SEQ ID NO: 327809 - DNA, 75 bp, Homo sapiens
aaaagctcctattctgattgctacagatgtggcctccagagggctaggttaatgttcgtgaagaaattgaagagt

SEQ ID NO: 327810 - DNA, 100 bp, Homo sapiens
tgctcgatctcagagctcagacacagagcagcagtcccctacaaggctggacggcagtctggaaacgaccaatgagatcttggactctgcctctcacgac

SEQ ID NO: 327811 - DNA, 82 bp, Homo sapiens
tcactgtgttatgtcttcggaactgggaccaaggtcaccgtcctagctcaagaggtttggatatggaccttcttcaattcct

SEQ ID NO: 327812 - DNA, 122 bp, Homo sapiens
ccgccttcgtctccgagtttgcgactcgcggaccggcgtccccggcgcgaagaggctggactcggattcgttgcctgagtaccgtgtgactgtgccgctgatgggggctgtgtccgacctgt

SEQ ID NO: 327813 - DNA, 78 bp, Homo sapiens
ccagccggaaagtacgagtcggctcagcctggaggttggcaaggccacaggcttcctcaagaactttctgatcgagcc

SEQ ID NO: 327814 - DNA, 100 bp, Homo sapiens
atggacttcagactggtggactgttcatcattctgttgaagaaacgcttaacccaggttttgactctgggaggagggctgccttatttggagcaccttaa

SEQ ID NO: 327815 - DNA, 100 bp, Homo sapiens
accaccaccatctccatcacccaccaacaacaccacaataatccacagccaaggtccagtggtttacgtcttggatcttgcagatagactgatctcaaaa

SEQ ID NO: 327816 - DNA, 97 bp, Homo sapiens
acgacatgctggcctcgctggtccctctccaagatcctggatgtggccagtttggaggtgctgaacgaggttaaccgaaggtccctgaagaagctgg

SEQ ID NO: 327817 - DNA, 83 bp, Homo sapiens
tgcacagccgcggcggcagcagcagtgagagagacatgaggctgagctggttccgggtcctgacagtactgtccatctgcctg

SEQ ID NO: 327818 - DNA, 90 bp, Homo sapiens
gagaaagataggcggccatggtccaaccttgaagcaagctgtgtaatgttcttgatcgactaaatgtgattgcagaaagtgtggtgaaga

SEQ ID NO: 327819 - DNA, 100 bp, Homo sapiens
ctggaacaaggaccgcacccaaagtgaaattcgttattctacatggaagaaagctgtgatgaagtcaatgggttgggttacaactcaatctccagaaagt

SEQ ID NO: 327820 - DNA, 75 bp, Homo sapiens
gccgcctgctccaaactccaccagccccgtgtccttcattgccacgtacagctgctacaggagctgagagaccct

SEQ ID NO: 327821 - DNA, 83 bp, Homo sapiens
tctgtcttcggtggactccttcggcagtccacccaccgccgccgcctcccagagctccaagagtcaggatcgcaagtcagaaa

SEQ ID NO: 327822 - DNA, 50 bp, Homo sapiens
cggcgctgcgatccgcgcatataacgtgcgatgtatgatgtatggctttg

SEQ ID NO: 327823 - DNA, 100 bp, Homo sapiens
tacgcttggtttcggcatccttcttacgtcgggtggttttactggagtattggaactcagcagtatatgaacctctagaaaatgaagggatagaaatcac

SEQ ID NO: 327824 - DNA, 87 bp, Homo sapiens
tcaccatggcacctttatggaggagttcaaggcaattgaaggaacagactaaaaatcgtgtcctggaaggaaactacaggtactacc

SEQ ID NO: 327825 - DNA, 98 bp, Homo sapiens
agccaaacgaggagaggaattgctgtggatctttccattgatgagtccagcttgacaggtgagacaacgccttgttctaaggtgacagctcctcagcc

SEQ ID NO: 327826 - DNA, 75 bp, Homo sapiens
cacccaaggctgctctccgctatgctgctgttcgtaccctcaataaggaccgggactttgtagccaagcagaagg

SEQ ID NO: 327827 - DNA, 101 bp, Homo sapiens
tatctgtactgccggcacctcaaccagatgaggaagtacaactttgagtttgtcagaggaatggctgtgaatggatgcctggaaggaccatcctctaattt

SEQ ID NO: 327828 - DNA, 90 bp, Homo sapiens
acgacgtgaaggagcagatttacaaactggccaagaagggccttactccttcacagatcggcctagactcccgaggcttcctctttggcc

SEQ ID NO: 327829 - DNA, 75 bp, Homo sapiens
cttgagattatcatcggctgagggtggaagcggcccccgcagacgctcggcagggccaattcctgtccccccagc

SEQ ID NO: 327830 - DNA, 99 bp, Homo sapiens
gacaacatgatggtcagaaaaggggacacggcggtgcttaggatggatagaatgacagaagatgctcttcgcttgaatctgttgaagcggagcttggac

SEQ ID NO: 327831 - DNA, 100 bp, Homo sapiens
cacaaaatcccagatctacctgacgggcctgcgagggttgaagattgtgaagcaatagcctaagaacaccttccaccatgaccacctcagcaagttccca

SEQ ID NO: 327832 - DNA, 100 bp, Homo sapiens
caacgtgcggtgggaccacgagagcgtgatgaaggtggagaatcagaacttcttggagaggatcttccacttgaaccttctgtcaccaaagcagaaagga

SEQ ID NO: 327833 - DNA, 80 bp, Homo sapiens
atcctcgctcccacctgtcagccttctaccccatgagaaagaccaggtctgctgagaacagacccagtccctgaggaagg

SEQ ID NO: 327834 - DNA, 51 bp, Homo sapiens
gcggagaagcacgcagatggaatgataggagagtcccgtattctcagagta

SEQ ID NO: 327835 - DNA, 98 bp, Homo sapiens
agcactattggcagctgcagagccagatgatccacaggatgctgtagtagcaaatcagtagccatccctgccattggggctcagtattccatgtttcc

SEQ ID NO: 327836 - DNA, 97 bp, Homo sapiens
tctgaggcggcgagagatggtcaggtctggagctcgaccgggccaggtgccgtgtggacaggcgacaacacagcagaatggagcaacttgaaaattt

SEQ ID NO: 327837 - DNA, 75 bp, Homo sapiens
atatcattatgctgacctctgacgagctgcaatttggttatgagatttttcgaaagaaagcagtggaacttgggg

SEQ ID NO: 327838 - DNA, 100 bp, Homo sapiens
gatatgatcgtgtgtctgtgatgcgtccacagccaggagacacggtaaaggccgaggggcaaagaaaaggaaagcatctggctctgaaaatgaaggcgat

SEQ ID NO: 327839 - DNA, 83 bp, Homo sapiens
cagtcagaaggggaacggatctgtgtgcccacagctcctggagccccacaggcgtcacaatgtagcagggaccccaggcgtcg

SEQ ID NO: 327840 - DNA, 83 bp, Homo sapiens
ctccagagagctatggctgcagaagcagaagcgtcccgcgaggcccgcgccaagtgccaccatggcaactgcaccatacaact

SEQ ID NO: 327841 - DNA, 76 bp, Homo sapiens
agacggccaaactcatcctggaagtgtaagctggagcaacaggcgtgcctgagcagcaagcagctggcggtgcgat

SEQ ID NO: 327842 - DNA, 100 bp, Homo sapiens
ggagacacgccgcttcatcgagctgcctttacaggacgaaaggaaactctgatgaggaagaaagtgcttcagaatctgaactttggaagggtccactacc

SEQ ID NO: 327843 - DNA, 98 bp, Homo sapiens
accgagagccggacaatggcaaggaggagcaggaacggttatgaagacagtatggagtttccagaccatagtagacatttgctacagtgtctgagcga

SEQ ID NO: 327844 - DNA, 83 bp, Homo sapiens
tccaaaggcctggcccggcggctcagccccatcatgctgggtctaattggtagctgcaccaattcaagctatgaagatatggg

SEQ ID NO: 327845 - DNA, 87 bp, Homo sapiens
gaaagagtactgattcctgtcaagcagtatccaaagctgttgcagctaattgcaaaatcccagttaacttcattgagtggcgtggca

SEQ ID NO: 327846 - DNA, 50 bp, Homo sapiens
cgccggtcccgaagggcctcagctagatcatgagcgtcttgttgttcatc

SEQ ID NO: 327847 - DNA, 75 bp, Homo sapiens
agcccacaggtgctaaagagagcagtaccctgatggagtcccttgcagccgaggacagcatagcagctaagatct

SEQ ID NO: 327848 - DNA, 83 bp, Homo sapiens
gagaccgcggccgggaccgaggacgctgggtcgggccggcagcccgcgttgcgcccgcacgtgcacaagcagacggagaagac

SEQ ID NO: 327849 - DNA, 86 bp, Homo sapiens
tgccgtcgccgccgccaccatgcccaagagaaaggtgtggacactgccagcggctgcagccgacttggaatgacctgggagacaaa

SEQ ID NO: 327850 - DNA, 100 bp, Homo sapiens
gtttaccatggaacccgtgaccaagtggagccccaaacaagtggtggactggactagagatcaaaggtccatcatcaaaacaccaaagactcaagacaca

SEQ ID NO: 327851 - DNA, 98 bp, Homo sapiens
gggcagcggctgcctgggcactatggaggtgaagagcaagaaaatgcatccgatgcagatttatggctcctgaacagttgcactgtaaaaaacccagc

SEQ ID NO: 327852 - DNA, 75 bp, Homo sapiens
tacttcctaggcagaatgcttggaaaggagaaatacgaatgtgctttaaagcgagcaagtattaaaattgtgact

SEQ ID NO: 327853 - DNA, 78 bp, Homo sapiens
tgacatctcataaacggctggttatgaaagacagtgcaaaagactctcacaactcctgaagaaattatttgaaaccca

SEQ ID NO: 327854 - DNA, 96 bp, Homo sapiens
gagaataaactgccagtagtagaaaaattcttgtcagacaagaacaatccagatgtttgtgatgaggtgaccattgtgaggtagatattttgttct

SEQ ID NO: 327855 - DNA, 98 bp, Homo sapiens
cgaggagtccatggacttcctggataagagcacagcacacggaccctgactactcggctgcctatgtcgtcatagaaactgatgcagaagatggaatc

SEQ ID NO: 327856 - DNA, 50 bp, Homo sapiens
acgggtcctgtgactcagatcatccaggtcagaatggcggcagcggagca

SEQ ID NO: 327857 - DNA, 85 bp, Homo sapiens
gctctcaagtttgaaactcctgcaccaaactattacaatgtgatctgcaactctttcaccatctgtaatgcggagatgcaggaag

SEQ ID NO: 327858 - DNA, 100 bp, Homo sapiens
gtgcaagtagtgattggagaacaaagaggtgaaggagtattgtattaggggaatattcctacctcttagataaggaaacgccagaggaagttatagctaa

SEQ ID NO: 327859 - DNA, 75 bp, Homo sapiens
gccttatggagtatacgggcaaccatggaatcaacaaggatttggagtagaatggagtcttgctctgtcaccagg

SEQ ID NO: 327860 - DNA, 80 bp, Homo sapiens
gcgccggcgagatgcctttgttcaccgccaaccccttcgagcaagacgtggacatatctgaagagatggattaagaatgc

SEQ ID NO: 327861 - DNA, 82 bp, Homo sapiens
gagcccgtcattagcgtgaaaaccacaagcaggtccaaagagagagaactgtggctgcaccatctgtcttcatcttcccgcc

SEQ ID NO: 327862 - DNA, 80 bp, Homo sapiens
tgagtctgtttgggatcccgctgtggtacttctcgcagtccccgcgcgtggtcatccagaaaagaagaagccgacgtggg

SEQ ID NO: 327863 - DNA, 75 bp, Homo sapiens
attgcaagcattctatccaaatgaggtgtgctctgaacaagccgagacggggccgtgccgagcaatgatctcccg

SEQ ID NO: 327864 - DNA, 75 bp, Homo sapiens
gtcgcccgcgattctcagggattgatcgcctcttcagtccaacgtggagcacctgacggagaaaatgaagaccac

SEQ ID NO: 327865 - DNA, 101 bp, Homo sapiens
tgcgggactcagtcccatcactccaaggagagaaggaccattgccaactatttggtgtggagaatggtttattccagaattccaaaccttagcaggcgctt

SEQ ID NO: 327866 - DNA, 90 bp, Homo sapiens
ttggtatgtcagtgtggactccgtgttggcagcagtgctgttaccactctgggtgatccagccaaaggctgaacaactttttaaagcaac

SEQ ID NO: 327867 - DNA, 90 bp, Homo sapiens
aagaaaagtgactacttcatgcctttctcagcagaccagcatctcagacatgtcgaaaaagatgttttgatccctaaaataatgagagaa

SEQ ID NO: 327868 - DNA, 98 bp, Homo sapiens
cacccgccaccgtcgccggccgcccgcacgtccgtccgagcgagatgcgagaacacttttggctaaaaatctcccttacaaagtcactcaggatgaat

SEQ ID NO: 327869 - DNA, 90 bp, Homo sapiens
gtttgttcaggaaccaccagtgacagagtaactgaagtggtgaaaaactacagaggagaggactactgtaattcccagccttgttccttt

SEQ ID NO: 327870 - DNA, 100 bp, Homo sapiens
cccgcggccaaacggtgcctgcggtgcctgagctgagtgaggccgaggccgggaggccgtgcccggagatggaacttgctaaggaagaaaagtgtgaatt

SEQ ID NO: 327871 - DNA, 110 bp, Homo sapiens
cgtggtgaccatcgctccaaccaaaaccgtgaatggtgtctggaggagtgagagccggcagcagcctcccgcgacgatgcccctcaacgttagcttcaccaacaggaact

SEQ ID NO: 327872 - DNA, 100 bp, Homo sapiens
gagtcatttccttcgtacccacagtgcttcatgagagaatcagcatgattcttcagaggctcttcaggttctcctctgtcattcggtcagccgtctcagt

SEQ ID NO: 327873 - DNA, 82 bp, Homo sapiens
caacctgctgggcaccttcatctggaataagcctccacctcctggatgccctcccaatgctgctcagcttgcagtcatgcag

SEQ ID NO: 327874 - DNA, 75 bp, Homo sapiens
aaagaagcaagaaagtacattttcaactgtttagatgatatggcccagttccaagatgagatgggattctccaac

SEQ ID NO: 327875 - DNA, 100 bp, Homo sapiens
aaatggctccctccgagttaagaagaagaagaggacagtgctccagtgaaagtggaagaacaaaggaagatgagtcaggatagtgtccatcacacctcag

SEQ ID NO: 327876 - DNA, 83 bp, Homo sapiens
tcaaggataagggcgacagcaacagctctgccggctggaagatcatggagctttgtggtgcaacaagacttggttattttgga

SEQ ID NO: 327877 - DNA, 96 bp, Homo sapiens
gaatgtctttcctaccatctaaaatacgaaggtttctggctggacacctggatttcattagcatcatgacctacgattttcatggagcctggcgtg

SEQ ID NO: 327878 - DNA, 100 bp, Homo sapiens
gcatcggaagcttcactgaatagccctcgagactttgatcctgctcttggaatgatgactggaattccaccaataactccaatgatgcctggtttgggaa

SEQ ID NO: 327879 - DNA, 90 bp, Homo sapiens
ttgctcggttaaagcatcaagaaaagttccatctgggtttcccaggcagctgcagacttgaaacagttctgtctgcagaatgctcaacat

SEQ ID NO: 327880 - DNA, 83 bp, Homo sapiens
tcgtgcctcatggatccaaattaaagggccactgctctccaggaagataaggcttttaaagcagcctagcactagaaggtgag

SEQ ID NO: 327881 - DNA, 83 bp, Homo sapiens
cgcctcttggtttgcgtcctgcactgaaaggaaatgacggattttgatttgcctcaaagggcactgcaaaaattgaacagagg

SEQ ID NO: 327882 - DNA, 98 bp, Homo sapiens
gcaatcataaagtcatccctgtgtatgtaggagtgaatataaaaggacttcatctcctcaacatggaaactaaggttgctccttgagggcaggacagt

SEQ ID NO: 327883 - DNA, 100 bp, Homo sapiens
ttgtctggagcaagggaaagaggcctggagtatgaagagacatgagatcatggtggccaaacccacagatgctgagtttgtgtgtgaacggacactgaaa

SEQ ID NO: 327884 - DNA, 100 bp, Homo sapiens
aaagacttagcttttaaattaaaaaggaagctattcaccattgaggtttgcctgcaatgagatttcattctctacatttaaaggacatcctttctgagct

SEQ ID NO: 327885 - DNA, 98 bp, Homo sapiens
ctcgagtgcacggagcgtcccttccatcaggagaggttgcgacctttccttccccagcaataaactggtctctggagatcactgtagaattgtagtgg

SEQ ID NO: 327886 - DNA, 100 bp, Homo sapiens
cgccagcgaggctcgggagcccagatgatgtgctgactaaagacgcgggtgagtgtgtgatctgcctggaggagctgctgcagggggacacgatagccag

SEQ ID NO: 327887 - DNA, 123 bp, Homo sapiens
cacagagacgcccctgctggacctcatgagcgacgcgctcatcctggctaaatcggaagccttaaggagtgcactggagatggagaaacacaagtgaacacgcacagacagtgaatgagatat

SEQ ID NO: 327888 - DNA, 101 bp, Homo sapiens
atgtagatgtgagagccacatcaacccacctcacagcacttcattatgcagctaagggccattatgctgtgatgaacaaccccaccagacagcctttggcc

SEQ ID NO: 327889 - DNA, 100 bp, Homo sapiens
cccaggggaagttacacgaggttggtcatgaaagagattccttgcagagacagctcaacacggcacttccacagataacaagacctctgccagaagaacc

SEQ ID NO: 327890 - DNA, 99 bp, Homo sapiens
cggagcccgagccgggagagggagccgccgcagccgccggcgctgtggaggtagcatctccgcccccacttactgatactcctgacactacagcaaatg

SEQ ID NO: 327891 - DNA, 76 bp, Homo sapiens
acatgaaggtgcatatcaaagagtctcacatgctctgctgggatgaaacaggcgcctatttaatcgacagagaccc

SEQ ID NO: 327892 - DNA, 50 bp, Homo sapiens
ctcagcaaccagctagctactcgagaggccctggccaacgtcaacattgg

SEQ ID NO: 327893 - DNA, 100 bp, Homo sapiens
acggacagcccatcgtgtgaactatagagtttgtggacagatttatattgaatttttgacagcagctgtatatcttctaagattccgctcctcaccacca

SEQ ID NO: 327894 - DNA, 102 bp, Homo sapiens
cgcccgggaggaaggaacgaggcaaggagctaaagcagcgtgcgttcagccctggggcggctatgagaggttttcctccgagtacccagaattctgttctaa

SEQ ID NO: 327895 - DNA, 98 bp, Homo sapiens
cctcctggaccgtccaagaagagcctgtggtgctgaccgacacaaatcttgtgtatcctgccctgaaatgggaccttgaatacctgcaagagaatatt

SEQ ID NO: 327896 - DNA, 100 bp, Homo sapiens
aacccgcggtggagcgggacacgaacgtgacggagtctcactgtgttgcccaggctggagtgcagtggcgccatcttggctcactgcagtgcgcctctgc

SEQ ID NO: 327897 - DNA, 90 bp, Homo sapiens
ccgggcttccagccctgagggtcgccacctcccttccccacagctaggaaccaaggaccagttgctcttctgtgatgactgcgatcgtgg

SEQ ID NO: 327898 - DNA, 76 bp, Homo sapiens
ggtcacttaagttttccgtgtgcgggttgcaaggagcgtgcgtgcgtctgatggttatctatgatctccatgaaag

SEQ ID NO: 327899 - DNA, 100 bp, Homo sapiens
cttcgttctgtgcggcgacctcatccacgccatgccaggaccttttttctatcagtgcttatgtttatgctcagaaaccacaaatggacattcacagttt

SEQ ID NO: 327900 - DNA, 90 bp, Homo sapiens
ttggatttaccaacatggtggaaaggaccacgcccggcagcaaagatctctccaggtctgtccacgttctctgtgggttcattgccggac

SEQ ID NO: 327901 - DNA, 83 bp, Homo sapiens
tattgggagatccacagctaagacgccaggacccactggaagcctagaaatgatcatgtatcagttggaggacttggagacag

SEQ ID NO: 327902 - DNA, 83 bp, Homo sapiens
ctagagacagcttgctttctgtcgtggcaatgttttgaaactggcaaaatcaggtggatagatacttctcaagacatcacaca

SEQ ID NO: 327903 - DNA, 80 bp, Homo sapiens
tggctgagacgtcttcgtgccacggtgctgcctcctttccaagcgcgacccgttgaggtgggacgagagactgagaaaag

SEQ ID NO: 327904 - DNA, 82 bp, Homo sapiens
ctcagccctaccagcactggtcatgtctaaagggcaaacttgaagataaatcttttgactccagctctttagaggatctaaa

SEQ ID NO: 327905 - DNA, 100 bp, Homo sapiens
aactggacggggccccctgttgacttacaccctcaggactttttgtcatctgttttgttccagcaattcagtgagggcagtgatcacaaccagattcaac

SEQ ID NO: 327906 - DNA, 100 bp, Homo sapiens
ggggtggtgaccatcgaaaggagcaagagcaagatcaccgtgacatccgagcttctcaataggtttggcatggacaagatctatgaaggccaagtggagg

SEQ ID NO: 327907 - DNA, 74 bp, Homo sapiens
ccaccagtgccagaatcatctgtgaaaagactctcagctttccaaaacagcaccagtggcagttcgcagcctcc

SEQ ID NO: 327908 - DNA, 75 bp, Homo sapiens
gtcggcgagcccccgcggcgacagccaggcccagacatgtccgtccttgtaagttaaaagcttccatgggagcct

SEQ ID NO: 327909 - DNA, 100 bp, Homo sapiens
agctccaaagcctgaactgatagctgcagagaagaaatatttttctttaaagcctgaagaaaagggcacttcgaggagaaattgcgcctctgaaagagaa

SEQ ID NO: 327910 - DNA, 90 bp, Homo sapiens
aaaaccccggagtcttcctgatccatggacccgatgaacatagacacaggtaatactgcattgcatgattgtgcagaatctggaagtttg

SEQ ID NO: 327911 - DNA, 75 bp, Homo sapiens
gcgtggagtgctggacctgccaacacccaggatgtggaagatgtgaaatttgtcatcaattatgactaccctaac

SEQ ID NO: 327912 - DNA, 100 bp, Homo sapiens
caacccggggatgggcccgcggctgcgaggattctcaaagttggattggtggaaacaatgaaccattgacaggctttacatggcgaggtggctgtgaaag

SEQ ID NO: 327913 - DNA, 150 bp, Homo sapiens
ctggggagctgtcgtctgccgacgagaagcggtaccgggccttgaagcgcaccgcagagagagagctgctgatggtttttgtctgatgaaaatagtctggagtataaatattacaagctgaagttggcagaaatgcagcggatgagcgag

SEQ ID NO: 327914 - DNA, 98 bp, Homo sapiens
aaagaaaagaaaattaataggaggaagtctcaagaaacaaagtgtacaaagagagcacttcctaagaagagtcagacagggtctcgctgtgtcaccca

SEQ ID NO: 327915 - DNA, 75 bp, Homo sapiens
cggggcttgtgagttcatgaaagactcccaagacagctgggctgcgaccaatggaaacaaaggacattccagtag

SEQ ID NO: 327916 - DNA, 83 bp, Homo sapiens
ccaagaagatcatcattaaggacggaggcacggcctccggtgtggctgtctctgatggtgtcatcaaggtgttcaacgacatg

SEQ ID NO: 327917 - DNA, 100 bp, Homo sapiens
ggggcaagaactgaagtgatgatggcaggcacaagaagcagaagcgctgagtgagcctttgaccaagccagttggcaaaatcagttcaacaagtgttaag

SEQ ID NO: 327918 - DNA, 101 bp, Homo sapiens
gccatcccaggtccgcaacccggagaagcaagaaatggtggagtcaatgaagaaagtagcagggatggatgtggagctgacagttgaagaaagaaacctcc

SEQ ID NO: 327919 - DNA, 74 bp, Homo sapiens
cagcaccttcaggatgtccggaagagagtgcagatacaaactggactctcaggacaaaacgacaccagccaaac

SEQ ID NO: 327920 - DNA, 90 bp, Homo sapiens
aatgtctttcctaccatctaaaatacgaaggtttctggctgggttttttgcatgtctgacacccatgactccacctggaccttatggctc

SEQ ID NO: 327921 - DNA, 98 bp, Homo sapiens
tcggggccggcctcgcaaggcgcttcccctttccagagagccagaaagaagactacaaagctgatgaagacccagcattattccagtcagtcaagacc

SEQ ID NO: 327922 - DNA, 73 bp, Homo sapiens
gcaggggtgggcgccatctttgacagggaagacatctggtttgacgacgtggacccagcggatatcgaagctg

SEQ ID NO: 327923 - DNA, 100 bp, Homo sapiens
tataagaacctggttcctaagcctgtaccacctccttccaagcttcgtgctctgtctgatgatggagtatctgatcttgaagacccaaccttgactcccc

SEQ ID NO: 327924 - DNA, 75 bp, Homo sapiens
catcgtcatcctgctgctgaagatctggaagacgcgctcctgcgccgaagactgtgcagtctttgtaactgatga

SEQ ID NO: 327925 - DNA, 101 bp, Homo sapiens
acctggttccagctgcagcacgtggacgctgactcggaagtgcaggtatcgagaaccttccctgcgaacttcagaggaacttccagctgatgcgagagctg

SEQ ID NO: 327926 - DNA, 76 bp, Homo sapiens
tctatccatatgctgccatctcctatgaagaatggaatgaccctcctgctgtgggaaatgatcttcattggttagc

SEQ ID NO: 327927 - DNA, 82 bp, Homo sapiens
gaggacaaagagcccctcatcgagctcttcgtcaaggaggttctgggggaagagaagctgaaggagatactgaaggagcggg

SEQ ID NO: 327928 - DNA, 100 bp, Homo sapiens
cggagtagtcctcatggccgccccgccggagcccggtgagcccgaggagaggaagatatcttaatgcaattcagacaatgtgtccacacattcttcgcta

SEQ ID NO: 327929 - DNA, 75 bp, Homo sapiens
cttctgcatccatattctggtgtaactgtggacatcaccattcaggaagaacacttcagttatggaagatcaaaa

SEQ ID NO: 327930 - DNA, 100 bp, Homo sapiens
ggaagatgcctccctgcacgcccgccgcgcacagagcataaagaatctgcgctgaggaggcaggagaagaaagccgtgttttaactcaaatgggtgatga

SEQ ID NO: 327931 - DNA, 100 bp, Homo sapiens
tcacggcggacgttcttgttctgtggagaataacggctgcacctggagattgacgcagagtgggcggcggtggtggttgattcctgtgttagtgaatggc

SEQ ID NO: 327932 - DNA, 83 bp, Homo sapiens
ggtgaaaagggtcctcctgctcacagtgtgaataacagagattgtggacggcaacgcaaagatgaccctgggaatgatctgga

SEQ ID NO: 327933 - DNA, 100 bp, Homo sapiens
agatgatgactcaggctgtgctttggaagagtatgcctgggtcccgccgggtctgaagcctgaacaggctcgcgttggacgacgccattcgacacaagcc

SEQ ID NO: 327934 - DNA, 87 bp, Homo sapiens
cgaggggaacggaggccagagctgcgagacagggtttcaccatattggccaggctggtctcgaactcctgacttcgtgatctgccca

SEQ ID NO: 327935 - DNA, 82 bp, Homo sapiens
ggagctggacggcgagcgcgagcggcgcgagaaaagccaaatctcctcagccacctgttgaagaagaagatgaacacttcga

SEQ ID NO: 327936 - DNA, 82 bp, Homo sapiens
caagttctcagtacccttctcagcctcctgtgaccactgttgccataaggatgagtttaccattattcctgtactggttgga

SEQ ID NO: 327937 - DNA, 98 bp, Homo sapiens
cggtggagtcatggcagtgccctttgtggaagactgggacttggtgcaaaccctgggagaaggtgcctatggagaatgatccagtattcctggaagaa

SEQ ID NO: 327938 - DNA, 71 bp, Homo sapiens
cctgctgacttacgcttgtttgagggttttttgattaactcaaaaccagagaatgcctgtgaacccatagt

SEQ ID NO: 327939 - DNA, 90 bp, Homo sapiens
cagcaaagagtggatccgacctttggcttcagggcagagcggcttgggtaaatccaccttaatcaacaccctcttcaaatccaaaatcag

SEQ ID NO: 327940 - DNA, 74 bp, Homo sapiens
ggtgtagaagtggcagcacggcaggtaacatttgtcgatcacccattgcagaagcagttttcaggaaacttgta

SEQ ID NO: 327941 - DNA, 98 bp, Homo sapiens
ccgacctgctggaggcgcaggccctcaagctggtggaggggccggacgtccgggctgtgctactcatggacgccgaaaagcgtatccggttactgcag

SEQ ID NO: 327942 - DNA, 75 bp, Homo sapiens
actgtgtggaacagggccagccagtccagcatggccgaaacagaagccctgtcgaagcttcgggaagacttcagg

SEQ ID NO: 327943 - DNA, 51 bp, Homo sapiens
ttggcaatcacgtattttcaaaagacagatgggaccgtgttcagaattcac

SEQ ID NO: 327944 - DNA, 80 bp, Homo sapiens
ctggcaaccgccccgtctgagaagtgtgtgatggatgatgacaatgaagtaagggaccgagccaccttctacctaaatgt

SEQ ID NO: 327945 - DNA, 118 bp, Homo sapiens
aaacaagttcttggcaagagaggcatcctccttgaagtatttggctgaggagttttcaatcccatctcagaccagtatccttcaggggttctcttactctgatttgcggaaatttggc

SEQ ID NO: 327946 - DNA, 82 bp, Homo sapiens
tgcgccgcgagagctgcagctgcgccgccgccctggcgcaggccacgcccgggatgtttcagcagcccctgagaaggaagag

SEQ ID NO: 327947 - DNA, 95 bp, Homo sapiens
ctgtttgtattttggctgctgcaggagccattttagggttgtctcctcacagactatgagctccttgaaagagggaatcgtgtcttactcatctt

SEQ ID NO: 327948 - DNA, 98 bp, Homo sapiens
ggcagcaactgaggcagcggcaggctcaggtgcagccgctgcaaactctggagatgaacctcaccaacctggttaagcgcaacagcgaactagaaaat

SEQ ID NO: 327949 - DNA, 82 bp, Homo sapiens
tagagcttcgcggagacggcggaagcggagagcaacagcgcgccggtggtctcatggattataaccatttggatatttggtt

SEQ ID NO: 327950 - DNA, 80 bp, Homo sapiens
tccttcagcttcaaagttccccaagaagaactggaaaatgccagcctagtgtttacagaactgccattggatgtccagaa

SEQ ID NO: 327951 - DNA, 74 bp, Homo sapiens
cagcggaggtgggtcttcgtgctgctcgacgtgctgtgcttactggtcgttcaaatctgaacatcaatgatgta

SEQ ID NO: 327952 - DNA, 90 bp, Homo sapiens
attttttagtctaaatgatgggcagtcatggtcccagaaacgtcactatcaagaagacagcaactctggaaagtggcttctaactcggcg

SEQ ID NO: 327953 - DNA, 100 bp, Homo sapiens
ggagaaggttcgaggcctacagaacctagcctatcagctggggctggatgagtgtggagccgccaccaaaatgcagattttcgtgaaaacccttacgggg

SEQ ID NO: 327954 - DNA, 50 bp, Homo sapiens
cgacgaacactacgagtaccggtcaaaatgcagatcttcgtgaaaaccct

SEQ ID NO: 327955 - DNA, 74 bp, Homo sapiens
tacaaccagagccaggaattacaggcaaattgtaatgaaattgttttggcttcaacacatgatgttcaagaact

SEQ ID NO: 327956 - DNA, 83 bp, Homo sapiens
atctcggtgctgcagacggcgagacctcctgcacaggagcaggaactcaaagcagccgctgatggcgtactatctgaagtgag

SEQ ID NO: 327957 - DNA, 100 bp, Homo sapiens
tcgatttctagaaactgacagtgaagaggaacaggaagaaattacagaagacatccccgtgaagactttgaatatgaagactgtgtatgtttctgtgtta

SEQ ID NO: 327958 - DNA, 100 bp, Homo sapiens
aatggcgtccaaagtcacagatgctatagtctggtatcaaaagaaggtgcgtatagcagcaaaattcatcattcatgcccctcctggagaatttaatgag

SEQ ID NO: 327959 - DNA, 50 bp, Homo sapiens
caggtgggggcggcgacctgagcaccagaccccctggttgtggaatacga

SEQ ID NO: 327960 - DNA, 100 bp, Homo sapiens
taatggcccggttggcccgggacgagtggaatggggagtcaggcctagggaaatccaccctcatcaacagcctcttcctcaccaacctctatgaggatcg

SEQ ID NO: 327961 - DNA, 75 bp, Homo sapiens
gcagctggaagaggagctgttccaggccctggccaacgtcaacattgggagcctcatctgcaatgtaggggccgg

SEQ ID NO: 327962 - DNA, 82 bp, Homo sapiens
gaaccgctctcgcttcgtcctacacttgcgcaaatgtctccggcaaaatgtttagaaagtgagaaggatggagtgcttaata

SEQ ID NO: 327963 - DNA, 75 bp, Homo sapiens
cgggcaccgaggactccgctcctgcccagtttcggtgtctgaactgctcagcttcgcaagtctgctctcaggatg

SEQ ID NO: 327964 - DNA, 96 bp, Homo sapiens
agaaaattgagacggagctaagagatatctgcaatgatgtactgggactttgaacatgtcggggatcgccctcagcagactcgcccaggagaggaa

SEQ ID NO: 327965 - DNA, 74 bp, Homo sapiens
tgctgggcaggtcatgagtcaccatgaaccaggcgaggaggggccaactgcaggtgaggggtttgataaagtca

SEQ ID NO: 327966 - DNA, 100 bp, Homo sapiens
agacaggcgtggacaacccggctatcatggtgaacttacttcagattgtgcgggaccactgggttcatgttcttgtccctatgggatttgtcattggatg

SEQ ID NO: 327967 - DNA, 82 bp, Homo sapiens
ccttggcagcacctttgtggcctatctgcctgactacagaaaacggtccggatgtaccccttccagattcacagcatcgctc

SEQ ID NO: 327968 - DNA, 97 bp, Homo sapiens
agcaactacatcaatgctgccctcatggacggtttacagccgtctatgaaagcataggatccctcaggcaagttctcgaggccaagatgaagctgga

SEQ ID NO: 327969 - DNA, 98 bp, Homo sapiens
ccgaggccgcggtttccccctgggcctccccagcagcagccatgggcagtggtttgtgatgaaaatggttccaagggctatggatttgtacactttga

SEQ ID NO: 327970 - DNA, 100 bp, Homo sapiens
gtgggcgagaacgtccactgcgggccggcgaaagctggttatgaagacagtatggagtttccagaccatagtagacatttgctacagtgtctgagcgagc

SEQ ID NO: 327971 - DNA, 101 bp, Homo sapiens
ggaggcgtcgggcgtgagcggaaatgaggaggagatggtggaggaggctgaagacatcgctattgcggttccgaggcagtgggaagagatgcggcccctgg

SEQ ID NO: 327972 - DNA, 90 bp, Homo sapiens
taaccagttggctttgctggcagtgtatacgggatcttagcaacatcaattgtgaagagcttggtccattgcctcctggatgggagatcc

SEQ ID NO: 327973 - DNA, 117 bp, Homo sapiens
tgcttggatagaggcctccgaacaggagtaaagaatggctgttgaacatccacaaggcacctgcaaggtctcacagatttcaagcctggctactggattggtgtccgctatgatgag

SEQ ID NO: 327974 - DNA, 100 bp, Homo sapiens
tgttccttcagccaaagaaacaagccgtggaataggtgtatcaagtaatggtgcaaagcctgaagggggagttaacaaaatgttccacgggatccaggac

SEQ ID NO: 327975 - DNA, 73 bp, Homo sapiens
tcacagatgatacctttgatccagaacttgcagcaacaatagattgcaggcctctgctcaccaaaaggcctta

SEQ ID NO: 327976 - DNA, 75 bp, Homo sapiens
ggggaggtcacctgacgaggaggtctctgacattgacagagcctggacgttggaggaagccccaggacgttggag

SEQ ID NO: 327977 - DNA, 100 bp, Homo sapiens
catgcccctcaggctggaacttgccctgtctcctcgcagatgagcaaggagcaaggaccaaccccagtggagaaaaagaagaaaggaaaaaggaaaagtg

SEQ ID NO: 327978 - DNA, 74 bp, Homo sapiens
tgcacagatgtctgaggacaaccacctgagcaatactgtacgtagccagatgagctccgacaagaaatgctgga

SEQ ID NO: 327979 - DNA, 130 bp, Homo sapiens
cagcttaaggacaacacctgtgtggtggaattccagttcatgctgcccacatctcatccaaacagcttaccacagtgcggagactcctttctgaaaaggccactcacgtgaacactagggatgaagatga

SEQ ID NO: 327980 - DNA, 75 bp, Homo sapiens
gtggaaatgcaggccccgaaacttctgtggctgaaagaggtgagacaggggaaaaggtggaaacagacatggaga

SEQ ID NO: 327981 - DNA, 100 bp, Homo sapiens
catgttttggctttggggctaggaatcttgtggaagaagaatgaagttgctgattatgaagctacaacattttccatcttctataacaacactctgttcc

SEQ ID NO: 327982 - DNA, 100 bp, Homo sapiens
cttcatctcattgctcagcgcggacctagacctggaatcgcccaagtccctctactcgcgaggatatagtttctttggtcccacgcctgcggcacatcat

SEQ ID NO: 327983 - DNA, 87 bp, Homo sapiens
ctcgtccaactggtccctcagtcacacatgccagagattgctcaggaagcaatggaggatgttgccttatggctgtttagcaacagg

SEQ ID NO: 327984 - DNA, 83 bp, Homo sapiens
gggcgcgtcaggccgcgacgagggcgctgagacaatgcagatcttcgtgaagactctgactggtaagaccatcaccctcgagg

SEQ ID NO: 327985 - DNA, 75 bp, Homo sapiens
cacggagttccggtacaagctcctgcgggccggcggggtgcgagacaagaagcttctcaatgacctgaatggagc

SEQ ID NO: 327986 - DNA, 97 bp, Homo sapiens
tgcccagaatgcccttcgggagcaggaggatgcattagcacaacaggcctttgaagaggctcggagaaggacacgcgaatttgaagatagagacagg

SEQ ID NO: 327987 - DNA, 75 bp, Homo sapiens
agttcgaagagttggatactcagcgtcgctggcagccgctgtacttggaacctggccactgctccttggtccttg

SEQ ID NO: 327988 - DNA, 82 bp, Homo sapiens
gtccccgatcgggccgtgtccgccgcggccctgcgaggtccgaggggggtgagcccctccagactccgaataggagatcaag

SEQ ID NO: 327989 - DNA, 83 bp, Homo sapiens
tgtggtgcctccatctcgtctcatggcattgctgggacaggaagcggtgactttcaaggatgtgatagtggactttacccagg

SEQ ID NO: 327990 - DNA, 90 bp, Homo sapiens
tagcatcttctgtcatgagaagtggcgatcaaaattgagcttacaagaccctatgaaaaaattagttgagaaagaagagaagaagaaaat

SEQ ID NO: 327991 - DNA, 98 bp, Homo sapiens
gatattcatgaactacatagagctcatgcaaatgaacaaggtgtagatcaaagcccaaagcctttaattattggcccagaggaagactatgacccggg

SEQ ID NO: 327992 - DNA, 82 bp, Homo sapiens
gcagttcgggccggctgtcctggcgcggagccttcacgtaaatgggtccagtcatgcctcccagtaagaagccagaaagctc

SEQ ID NO: 327993 - DNA, 100 bp, Homo sapiens
gacctgctggcattgaatgatttatagctaagactccaggacacccctgaagccgagaaatggtttattcagaaaacatgtccactgcaattagggaggt

SEQ ID NO: 327994 - DNA, 100 bp, Homo sapiens
aaaagaggcgaaaggaagcaagcagttcagaagagccaaggaataaacatgcaatgaacccaaaagggctcctggaacagctcatccttatgatagtggc

SEQ ID NO: 327995 - DNA, 90 bp, Homo sapiens
tgaaagattgaaagcaaatgacaacttgaagttttcccaggaatatgaggaatgtcgttgtctgctgggtcttcccctcttcattccccc

SEQ ID NO: 327996 - DNA, 90 bp, Homo sapiens
ccgcctctgcgtgggccggccgggagggcctcgggggactgactggtgttgctgcctatgttggctggcaaagctcctcaattctcaagc

SEQ ID NO: 327997 - DNA, 116 bp, Homo sapiens
gctggccaagaagatcatcattaaggacggaggcacggccattccccgatttaaccagaaaggagaagtatataaggcacagataatgaatgtgagctggtcagctgatcacagag

SEQ ID NO: 327998 - DNA, 90 bp, Homo sapiens
aagacgggccattttccagacctcatccaggagcctcctcaacaagcccaagagtgagatgaccccagaggagctgcagaagcgagagga

SEQ ID NO: 327999 - DNA, 83 bp, Homo sapiens
cggctgccgggctacggggcagatggactcggagcgccccgccggtcatgatgatgggcagcgcccgagtggcggagctgctg

SEQ ID NO: 328000 - DNA, 50 bp, Homo sapiens
ggtgcttttggtgaagtgcagttgaagagaagccagattgctccaaggcc

SEQ ID NO: 328001 - DNA, 100 bp, Homo sapiens
ccactgccgcaggaggcgtgaggaccccgtggtttaatggatggggctttaacctacccagaggtcagtctctgctggacaagtggaacctcatccctga

SEQ ID NO: 328002 - DNA, 100 bp, Homo sapiens
taaatgcaatagcccttcagtactgttgtacggaattacatgaacgacagccttcgcaccgacgtcttcgtgcggttccagccagagagcatcgcctgtg

SEQ ID NO: 328003 - DNA, 100 bp, Homo sapiens
cttactcgggagctggctgaagatggctactctggagttgaggatctagtgaaaagccatttgatgtatgcggtcagagaagaagtggaggtcctcaaag

SEQ ID NO: 328004 - DNA, 98 bp, Homo sapiens
atgaagggtggcacattttacagaataagtcagatgactttctgtatgactacattgcaattggagctgatgaggaagaattaggatctcaaattgaa

SEQ ID NO: 328005 - DNA, 83 bp, Homo sapiens
atggcgaccaccgtcagcactcagcgcgggccggtgtcgtgaaaactacccctaaaagccaaaatgggaaaggaaaagactca

SEQ ID NO: 328006 - DNA, 106 bp, Homo sapiens
aagattcgaggcggcgggggacaagtcggcgccccagagcggacgagaggtggcgagaggcgtgctgaccagtctgccaggagacagcgtgactctgacctgcccg

SEQ ID NO: 328007 - DNA, 100 bp, Homo sapiens
ctcatcatgatggacttggagctgccgccgccgggactcccgtcccagcaggtcccgaagatggcatattcataaagacatcttctgatgattgtgaaca

SEQ ID NO: 328008 - DNA, 75 bp, Homo sapiens
gcagaatgtgatttgcttgaagatatgaggattgttaaaatgagtcttcggaagcaaacccctagtgacttctta

SEQ ID NO: 328009 - DNA, 75 bp, Homo sapiens
tccacatgtgggtactgcattcctaccggtgtgacagacatcaacatggctggagagcctaagcctgacagaccc

SEQ ID NO: 328010 - DNA, 96 bp, Homo sapiens
gtttacatcactggccgccatctggacacccttcgcgttgttgctcaggaggtcctctccacccggatcctggccatgaaggcctcgctctgcaag

SEQ ID NO: 328011 - DNA, 75 bp, Homo sapiens
aaacacatgctcattacatcgatgttgccaggcatgcccaagagaatcgtaaatgcaaaaattgcttgccttgac

SEQ ID NO: 328012 - DNA, 100 bp, Homo sapiens
aagagacctccagcaagcagaggttcgatacaagaggctgttttcctagcgtggcttgctgcctttggtaagaacatgtcgtccatcttgccattcacgc

SEQ ID NO: 328013 - DNA, 98 bp, Homo sapiens
tacttgattctaatggccatgtggtgctgacagattttggtctgagtaaggagtttgtggctgatgaaggccgttgctccagggagaactgcaaatat

SEQ ID NO: 328014 - DNA, 100 bp, Homo sapiens
gagtccctctaaagcagctcaaaagcatcatcatggacacagccattatgcctctgagtcgcttccctccaagaaggaccaggaggagggggtgatggag

SEQ ID NO: 328015 - DNA, 83 bp, Homo sapiens
atctggaaaggagacttcaaagcttccatcactgggacagaaagggaccagtgtaccatgagtactgtgagtgtccggaagat

SEQ ID NO: 328016 - DNA, 90 bp, Homo sapiens
accatagcatttgattatgagtatagtaactgcacagacgcagtcttcagcaaggaagtgctgggaacgccctggagtgaacccaggaag

SEQ ID NO: 328017 - DNA, 100 bp, Homo sapiens
tcggtgttccacgtgaagctcaccgacagtgccctgagggccttcgagagctaccgcgccagacaggagtacgaccccagcaaagcgacctttgtgaagg

SEQ ID NO: 328018 - DNA, 100 bp, Homo sapiens
accgggatcgtgaccgagaccgtgaccgagagcgtgaccgagagcgcgaatatcgtcatcgttagaagatccatatgtcaaacttctgcttgatgctatg

SEQ ID NO: 328019 - DNA, 80 bp, Homo sapiens
gaaccaattgttttacagtctgttccacatgatcattgtaataagctcaacagacagtcagctaaaactgtggaatgtag

SEQ ID NO: 328020 - DNA, 132 bp, Homo sapiens
tggcattgaacttatttctaagcaacaaatttacagacgccttagaattgcttcgcccctgacttcacagagaatgcagttgtcttgacttcaggtctgtctgttctgttggcaagtaaatgcagtactgtt

SEQ ID NO: 328021 - DNA, 90 bp, Homo sapiens
tgcggttccggggagctcggctccaagttctggctggcgaagaaccatgacatggtggtggtgtctcccatcctggaacgagacagcgag

SEQ ID NO: 328022 - DNA, 100 bp, Homo sapiens
ccggcgtccgcggcagctgataccagagtcttgctccggccgcggccagcggagccctgggctggggcaggagccgaatgagatgctggaggaaggacat

SEQ ID NO: 328023 - DNA, 82 bp, Homo sapiens
cagcgagccgccgacccgccgagcaaaatggtaaggtactcaactgtgtggggtactacataaatcctgaaagactacaata

SEQ ID NO: 328024 - DNA, 74 bp, Homo sapiens
gaccctggagggtatccgccagttctacatcaacgtggaacgagaggagtataagctgatgtacgggatgctct

SEQ ID NO: 328025 - DNA, 101 bp, Homo sapiens
cggacactttgttattggagaaacatgcagattatatcgcatcctatggctcaaagaaagatgattatcgggcagttgcaggagatgcctctgagtcagca

SEQ ID NO: 328026 - DNA, 50 bp, Homo sapiens
gaatctgaatccagaagagtcactaagacataaatgaatgcgaagttgag

SEQ ID NO: 328027 - DNA, 100 bp, Homo sapiens
aaaagaagtccaagaagcaaaaaagggactgctaagaagataccaccaggatgtgatcttcgtggtggaaagctaaattttaaaaccaccccaatggatg

SEQ ID NO: 328028 - DNA, 75 bp, Homo sapiens
gtcgggggctgcgcgggggctgtggctccgggactgcgatcctgccagttttactgagataactaaagactgtga

SEQ ID NO: 328029 - DNA, 121 bp, Homo sapiens
cagcgctttacaggggttatcgcacttaagcctcggaacaactttaccaggacccagatgatgtggtaccagttggccaaagaagagcctggtgttggtgcatgtgctttggactagcatt

SEQ ID NO: 328030 - DNA, 75 bp, Homo sapiens
gggaaaagcaacgtggggcattccagatctgaagaaaacccttgctgtgttattagataacattttgcagcgcat

SEQ ID NO: 328031 - DNA, 97 bp, Homo sapiens
tttaccaaaggctatctagctagggagtgatggagcccagatccgaatccagactcctgggagagttggctctcaaggttctgatttagattcatca

SEQ ID NO: 328032 - DNA, 50 bp, Homo sapiens
caagctcggcggacggcagtgccccagatatgaagatcaatgatgcagac

SEQ ID NO: 328033 - DNA, 100 bp, Homo sapiens
aacatttgtagcattgatttcccggatctggtaacatggcaaaagatggagaggaggtgggcaggaggaacggccctttgtggcccggtttggatttgac

SEQ ID NO: 328034 - DNA, 75 bp, Homo sapiens
cacgaccattatatgctggaatggttccttctcctgacccctgaggattaccagcgatttctagacctgggcatc

SEQ ID NO: 328035 - DNA, 82 bp, Homo sapiens
ttctttcttcagccgaggccgccgccgcctctccttgctgcagccatggaagcgggacaaggagaaccggcatcggaagcgc

SEQ ID NO: 328036 - DNA, 100 bp, Homo sapiens
ggaggctgctggcaatggcctacgtcgtcataccgggcttccttgccctgtccgggttatatcaacatgccccctttcctgttgctggaagccgtctgtg

SEQ ID NO: 328037 - DNA, 82 bp, Homo sapiens
ctccttcggcagtccacccaccgccgccgcctcccagcaagaggtggaaacatacagaagaagcaaggaaattacagttaga

SEQ ID NO: 328038 - DNA, 96 bp, Homo sapiens
aaaaaccacaaatgtttttctgttttgcctgaatacatgatttaaacaagagatttccacagaagattaccccacattcctaagcatgttcatatc

SEQ ID NO: 328039 - DNA, 98 bp, Homo sapiens
agatggggtggcagtgaccctcacttcctgctgtatccccagacccaaaggtgtgagctgtcagtggagaagtccacagtgctgcagtctgagctgga

SEQ ID NO: 328040 - DNA, 101 bp, Homo sapiens
cacagaccctggaagaaagcccctctcacacaggtattgatgaagatgaccctactgctgatgataccagtgctgctgtaactgaagaaatgccacccctt

SEQ ID NO: 328041 - DNA, 83 bp, Homo sapiens
tgtgtcccacttgttcgcggcctatagggagtaccctgacttctaccggaagctctacggcctcttggacccctctgtctttc

SEQ ID NO: 328042 - DNA, 75 bp, Homo sapiens
ctcagcctcctgagcagctgggattacagatacactgcctctaggactgggacagatagccactgagtacctgct

SEQ ID NO: 328043 - DNA, 152 bp, Homo sapiens
ttttgtggtccacaagaggtgccatgaatttgttactttttcttgtccgggtgcggataagggacccgacactgatcagggaacagtacactgggaagctccgagtgagatcacactccttgagtccaactcacagagaagatggacaaaat

SEQ ID NO: 328044 - DNA, 100 bp, Homo sapiens
gaattcagcacggatggaaagatggagatgaacctctaacacagtggaaaggaaccgttctggatcaggtacttcgtcagtttgtaagacatgagtccga

SEQ ID NO: 328045 - DNA, 100 bp, Homo sapiens
atgcagctggtggaactagatgtgtctcgaaatggtactgtgtgcagaaatgtgattgagattcaagtcagggcctctctgcccttttccctccagaaac

SEQ ID NO: 328046 - DNA, 90 bp, Homo sapiens
cggcgacagagcgagcgcggcgcggggccaccatgggggcccagctcagcacgatggatttgcagccgctgcaagtgtgtggaagggccg

SEQ ID NO: 328047 - DNA, 100 bp, Homo sapiens
ctctgaccactctccagcaccagcttccagttagtggatatagcacaccatccccagccaagtcatcttagtgggatttggggaagcaacagggctgtgt

SEQ ID NO: 328048 - DNA, 82 bp, Homo sapiens
cagaaggtctctggagacatcttcagcagcctttgaaacttctgctggtgtgagtgccctcaggggttccccaggaatatcg

SEQ ID NO: 328049 - DNA, 96 bp, Homo sapiens
gcaaaagatgattttacatccattattgggaaatgtcaagccactgaggcggctcccagctgcgttggcgacatggccgacacccccagagatgcc

SEQ ID NO: 328050 - DNA, 100 bp, Homo sapiens
tgaaaatgttagaagaactcgtgagccggattgatgccctgggcgctgcctatggcacagccaagagcggtaccggcattgcggccatgtctgtcatgcg

SEQ ID NO: 328051 - DNA, 130 bp, Homo sapiens
gatgttgaagattttgctagagctgaaggctgtgataatgaggaagatcttcaaatgggcattcacaaggagcagatgtctcaagtattagatgccatgtttgaaaaattggtcaaagatggggagcatg

SEQ ID NO: 328052 - DNA, 100 bp, Homo sapiens
gtgggcagcaggagctcctgacttgggaccatggtgattcttcagcaggttcatgtgtgcccagctgcccaaccccgtcctggacagcatcagcatcatc

SEQ ID NO: 328053 - DNA, 82 bp, Homo sapiens
agaagaagaagagcatgatcggcatgtccaccaaggcaggtctggccgtgggcctgggcttcggggcactggcagaggtcgc

SEQ ID NO: 328054 - DNA, 98 bp, Homo sapiens
caggaaaatggccacagggctcctgagagccaaaaaagaggcccggaggctgtttgatgtcctgcacgagcccttcttgaaagtaccctgatgacccc

SEQ ID NO: 328055 - DNA, 100 bp, Homo sapiens
agagcttgctcctgctccagttgcggtcatcatgactacgcccgcctcccgcagaccatgttccatgccttgcatcccagggatgaagcccacttgatca

SEQ ID NO: 328056 - DNA, 83 bp, Homo sapiens
tggaactcctttataagtgtcagctgtgagagagtaatgccttctagctttttcctgctgttgcggtttttcttgagaattga

SEQ ID NO: 328057 - DNA, 98 bp, Homo sapiens
ctgcatcccgcgtccagcacctacgtcccgctgccgtcgccgccgccaccatgcccaagagaaaggagcaggccgggctctcgccatgggtcactgtc

SEQ ID NO: 328058 - DNA, 114 bp, Homo sapiens
cattgtttctctccctctgcccccccttccccacgcaaccccagatccatttacactttacaacctgcctagagctggaacgttacctccagagcgagccctgctatgtttcag

SEQ ID NO: 328059 - DNA, 88 bp, Homo sapiens
gtgctgctctgttgcctggctttgctgccccaggaggtcctggacattcaaaataacctttaccagcttttgttaggagtgataaacc

SEQ ID NO: 328060 - DNA, 104 bp, Homo sapiens
atgagcagcctgcccaacttctgcgggatcttcaaccacctcgagcggctgctggacgaagtacctggagtagaacagaaaaattattatgtctgtgttccctt

SEQ ID NO: 328061 - DNA, 100 bp, Homo sapiens
cactactggttcatacctctagagggcagacttgcaattgtgaccaaatatattacaaagggctggaaagaagttcatgaattgtataaagaaaaagcac

SEQ ID NO: 328062 - DNA, 100 bp, Homo sapiens
gcagagccctgagaagttgcgcgatgccatcaaagtcatgcagaggttcgcggggctgccggagaccggccgcatgggctggagtgcagtggtgccatct

SEQ ID NO: 328063 - DNA, 100 bp, Homo sapiens
cagatttcaaaaggacgtaatactccactgtgcgacaggaattagcttaccgaaaggagatggtgagagctgacctaattaacaaaaaagttggaatcag

SEQ ID NO: 328064 - DNA, 100 bp, Homo sapiens
cctgcctcagcctcctaagtagctgggactacagatcctgtgccggtatcagaatatctggaacatcaacctgcagttgcggcccagcctcataacaggg

SEQ ID NO: 328065 - DNA, 51 bp, Homo sapiens
cctgctctgctctaacaacatttgcagttgcagtggtgcagaatggctgac

SEQ ID NO: 328066 - DNA, 100 bp, Homo sapiens
ggaacctgcggggcagaggcggcggccgcagcggcgcagctgatagcaggaacagttccagagaggtggatcgcatggtctccacgcccatcggaggcct

SEQ ID NO: 328067 - DNA, 50 bp, Homo sapiens
gcaatctcctatatgatatagtatgaaaatgaaagtcttcagaatggaag

SEQ ID NO: 328068 - DNA, 100 bp, Homo sapiens
cagcgggagctggacggcgagcgcgagcggcgcgagaaacacatgattaagtaccggtacatcccgttcacacatgggaagagaaggtacagaggcaagg

SEQ ID NO: 328069 - DNA, 83 bp, Homo sapiens
cttcagtgagcaaggcatcaacgagtttctcagtgataagacagaggcaaccacaaagcttcatgacatggtagaccaactgg

SEQ ID NO: 328070 - DNA, 96 bp, Homo sapiens
ccatctcggagctcacggagagccgcctgaggagcggcacagtgtgagccactgccccatgttgtgttgatgccaatctgccatgctagcctgtct

SEQ ID NO: 328071 - DNA, 96 bp, Homo sapiens
tggggacagtgaccgtggggttcctcgcccagagcgtcttggcgccagaatttatacatatttgctagagaaatccagacttgtttcacaacctct

SEQ ID NO: 328072 - DNA, 83 bp, Homo sapiens
aacagacaaaagttttcctaatgcctacaacactgccatggaatgattacggacctgaagccaaagaacaagatgcgctagtg

SEQ ID NO: 328073 - DNA, 124 bp, Homo sapiens
agcatcgcttgtcctgagctggttgccggggcaggggcggaggcggaggcagaggtggaggcgctttgaaaggttgcacagtgaattaaaagatgctgttgaaaaaaaattggaggcctttccc

SEQ ID NO: 328074 - DNA, 76 bp, Homo sapiens
aataacccttgatcctcctcctaattgcagctgcagaaccttggcctgaaaatgctacattatatcagcaattgaa

SEQ ID NO: 328075 - DNA, 100 bp, Homo sapiens
ttaagaataaactgaaagtgcgaactgcctatccgtcattgagacttattcatgctgtcagagggtttctaagcatgaattgaggaacagaagaagcaga

SEQ ID NO: 328076 - DNA, 97 bp, Homo sapiens
cagctacagggtgaccaacgcaagaacatatgccagttcctcgtagagacgagatgcagcgactgtgtgtgtatgtgctgatctttgcactggctct

SEQ ID NO: 328077 - DNA, 75 bp, Homo sapiens
cctgaaagtcttcctcaaaataacaatccaggccaggagtggtggctcacacctgtaatcccagctctgggaggc

SEQ ID NO: 328078 - DNA, 147 bp, Homo sapiens
ccatcctgggcccagctgccggctacctgattggaggtgccctgctgaatatctacacggaaatgggccgacgacgtcgagtgtggaggacaccctggaggaggagatggaaccctcctgtttgctggggctcggcccccggtgagg

SEQ ID NO: 328079 - DNA, 74 bp, Homo sapiens
acgccctgggaacccccgcaacatgggcacgaacccacagatctggaggacctactataatttaatttaattct

SEQ ID NO: 328080 - DNA, 74 bp, Homo sapiens
gaatatccagtttgagccatcggatctaagatccaaaagtcggcgtggcacaagcctaatggaagatgatgaag

SEQ ID NO: 328081 - DNA, 90 bp, Homo sapiens
tatgaacaaaaccagtctgatgtgatgatgccaataatgacccacagtggtctgaggaacagctgattgctgcaaaattttgctttgctg

SEQ ID NO: 328082 - DNA, 100 bp, Homo sapiens
tttggattaaggaacagcgagctgtttgacccctttgacctcttcgatgtgcgagactttggaaaggttcgagaacttgtcttggacaattgcaaatcaa

SEQ ID NO: 328083 - DNA, 100 bp, Homo sapiens
gccaagccggcccgctggaagagctgcagggaccagacggggagcagacggaacaagcgtgctgatgtttttggctttcacccccaaccagtgaccaaag

SEQ ID NO: 328084 - DNA, 96 bp, Homo sapiens
cgccacggtggatcagcgcctacccgagtgtgcgaagctagccaagtgtggcaaaggagcagagaactttgacaagttcttcacacgaggacagcc

SEQ ID NO: 328085 - DNA, 82 bp, Homo sapiens
ggaaccctggtcaccgtctcctcagaaatttcagcagatttcaaggagccgccatccctgccagggaaggagaagccatccc

SEQ ID NO: 328086 - DNA, 119 bp, Homo sapiens
cggtgaccacttttggaccaaaggcctgtgtgctgcagaacccccagaccatcatgtgagaagccctaccactgcaactgggacggctgcggctggaagtttgcgcgctcagacgagct

SEQ ID NO: 328087 - DNA, 100 bp, Homo sapiens
cgggcggggtggagcagccagctgggtccggggagcgccgccgccgcctcgatggggttcgatacaagaggctgttttcctagcgtggcttgctgccttt

SEQ ID NO: 328088 - DNA, 51 bp, Homo sapiens
tcagctctttgatcctatgacagggtatgtctctgtgccagactgtcgtcg

SEQ ID NO: 328089 - DNA, 87 bp, Homo sapiens
cgaagatgctgtctggaataggggctgaaggagagtctatacgagatactccagccaaaaatgcacaaaagtcaaatcagaatggaa

SEQ ID NO: 328090 - DNA, 98 bp, Homo sapiens
ttcaaagttcagcaacaagtaatagttcagaggaagcagaaagtgaaggagggttgaaatcggctcgagatgttgtatctaggactggtcattcattg

SEQ ID NO: 328091 - DNA, 100 bp, Homo sapiens
caaggagcacgaggagggtcgggactcggaggaggggccaaggtgtggctcctctgaagacctgcacgattgctgcgaatgtggctgtgggagggcttct

SEQ ID NO: 328092 - DNA, 75 bp, Homo sapiens
ggctgggagcgtgctttccacgacggtgacacgcttccctggattggatgggcggacaatttcatggccgagggc

SEQ ID NO: 328093 - DNA, 50 bp, Homo sapiens
agttcgagaccagcctgagcaacatgtgtggcggagaccccgcggctgac

SEQ ID NO: 328094 - DNA, 100 bp, Homo sapiens
gcgaggaggagctggacaatgaagactattactcgttgctgaacgtgcgcagggaggattttgcctaccattttacagtatttgtcttctattttggagc

SEQ ID NO: 328095 - DNA, 51 bp, Homo sapiens
ggcaaatattacacttctctccttgcgaggattaaatccaccacacagggt

SEQ ID NO: 328096 - DNA, 100 bp, Homo sapiens
atcgatctaagatggcgactgtcgaaccgattagtgatgatgaaccaggttatgaccttgatttattttgcatacctaatcattatgctgaggatttgga

SEQ ID NO: 328097 - DNA, 88 bp, Homo sapiens
ttccggtcgctggtgcagcttcacctggccgggctgcgtcgcttcgatgccgcgcagctccatggtgatccgggacctgaccctgcgc

SEQ ID NO: 328098 - DNA, 88 bp, Homo sapiens
ggaaatggcacttgagtatgaaagatcaacacgttgggtcaaggtagcacatttgccaagaggcaaatttctggagatgtgcaatgat

SEQ ID NO: 328099 - DNA, 82 bp, Homo sapiens
cctccgggcacacccggctccccggacgcctcggtgtccctggtggtgaatgtggccagcgagtgcggcttcacagaccagc

SEQ ID NO: 328100 - DNA, 95 bp, Homo sapiens
gatgttgtcaaggtggcctaccaggaggccaggggtgtcgccatgggacaccaatgagttgtgtcttccctctgtccactctcagcaccttcact

SEQ ID NO: 328101 - DNA, 83 bp, Homo sapiens
gtggaattttggagatattcaaagatgacttcaaacctgcttctattgacacttcttctgaaggataccttgaggttggtgaa

SEQ ID NO: 328102 - DNA, 90 bp, Homo sapiens
caggaacgtcgcggacgccaccaggtattttgaaggtggcgtctcatctgtctacctctgggatctggatcatggctttgctggagtgat

SEQ ID NO: 328103 - DNA, 75 bp, Homo sapiens
ggaagatctgaaatcaacttagcttgtgagagctgggaagtttcagaggaaatctggcattttttaaagtttgcg

SEQ ID NO: 328104 - DNA, 83 bp, Homo sapiens
gcccggctgccgggagccgacagcttcgcgccggaatagcctaacatggcagaccagagacagcgctcactgtctacctctgg

SEQ ID NO: 328105 - DNA, 90 bp, Homo sapiens
gaaaccaaggagtctgcaatgaataatgctgccccccaggttcgcctaatagtcttggctacttccctacagctgctaatcttagcggtg

SEQ ID NO: 328106 - DNA, 100 bp, Homo sapiens
accgtggagaaatcagaaggggttctttggcatggacacaagttcagtgggaggattagaattgactgatcagactcctgttttattagggagtacggcc

SEQ ID NO: 328107 - DNA, 75 bp, Homo sapiens
gtgcgggagagccccttgcagaagacgccgtacgagatcaaatttttggctctcatctgcacaaagtgtgtgaac

SEQ ID NO: 328108 - DNA, 97 bp, Homo sapiens
ccacagtgtgcacagatgaacgaagttatggcagagttagctaaagaactccctcaagtttcatttgtgaaggtggcagcaaatgcacacattcctc

SEQ ID NO: 328109 - DNA, 50 bp, Homo sapiens
aaataattgcagcccttattaaaccatttggacaatgctatgagtttctc

SEQ ID NO: 328110 - DNA, 100 bp, Homo sapiens
cttacctcagatgatcttctctacttggaatttctgcagaagtttgagaggaacttcattgctcagggtagaaaatctggtgtattaactgtgaaaattt

SEQ ID NO: 328111 - DNA, 85 bp, Homo sapiens
agggttcgttctggagtcatgagtgaaaaggaaaatcaggaaaatgtttccaacctggtgattgaggacacagagctgaaacagg

SEQ ID NO: 328112 - DNA, 97 bp, Homo sapiens
agattccgatttgacgggcaaccaatcaatgaaacagacacacctgcacaggtggacattgaagtggacctaattcggttttccttttaaaagcccc

SEQ ID NO: 328113 - DNA, 96 bp, Homo sapiens
ctaagacgctgtttcagagcgtttgggtcctctgaggccccttgaccagcctgtgaagttgaagcagggaaagtataccaggtctcctcaaaagag

SEQ ID NO: 328114 - DNA, 87 bp, Homo sapiens
cctacatcctgggcgtcttcccaggctgtcatataactcctgagaatagtggttcttaactctactatagggtatgaccccatcatt

SEQ ID NO: 328115 - DNA, 99 bp, Homo sapiens
ggaagttacacgaggttggtcatgaaagagattccttgcagagacagctcaacacggcacttccacagggaccactgacatttagggatgtggccatag

SEQ ID NO: 328116 - DNA, 100 bp, Homo sapiens
aaccttttccctaatacgtacctcattgtgggagactccgccgtggtcatggaggagggaagtccgggcgaggttcctgtgctggtggagcccccagggt

SEQ ID NO: 328117 - DNA, 80 bp, Homo sapiens
cctcaacgatgacgtggtcaagggttcataaattcatggaacgtgaaggtcgcagacctcgtcttcttgtagcaaaaatg

SEQ ID NO: 328118 - DNA, 100 bp, Homo sapiens
tacctattgtccaaagcagtcgtaagaagaggtcccaatcccccactctttccgccctaatggaggtctccagtttcgatatctccggagcatttggata

SEQ ID NO: 328119 - DNA, 83 bp, Homo sapiens
ctccatcacccaccaacaacaccacaataatccacagccaaggtttgactatggagagcgcttctgggacatcaaaggcaagc

SEQ ID NO: 328120 - DNA, 82 bp, Homo sapiens
gcgctactctctctttctggcctggaggctatccagcagcccaaatcttgtgacaaaactcacacatgcccaccgtgcccag

SEQ ID NO: 328121 - DNA, 100 bp, Homo sapiens
tgacaaaggctttgccgcagttcatcttcctccctgtgtactttccatttgccttcctggttacagcagatgaatggaacagcaaccatacgatagaaat

SEQ ID NO: 328122 - DNA, 100 bp, Homo sapiens
aacatctccacatcgctgtccccacccagccagggcagcgccagcactagctcagacgcaagctatcatggtgaacttacttcagattgtgcgggaccac

SEQ ID NO: 328123 - DNA, 82 bp, Homo sapiens
tggagaacctgaacaagtcccagctgaagctgggcatctggggcggtgaaagaaaagatgttgtcccggttaagagtagttt

SEQ ID NO: 328124 - DNA, 100 bp, Homo sapiens
accagttcctcggggtgcagcagaaagggctattgcaagacacgaagtccgagaaattgagcagcgacatacaatggatggccctcggcaagatgccact

SEQ ID NO: 328125 - DNA, 96 bp, Homo sapiens
gagaccccgaaaacggaagcgcagggagaaggaagaggtgtttgaaaagttggttgaatctggcgatgtggaacccatggatatggagggctgact

SEQ ID NO: 328126 - DNA, 98 bp, Homo sapiens
ttcagaagaggtttggctttccagagggcagtgtagagagttgaacaatgaccatagttgacaaagcttctgaatcttcagacccatcagcctatcag

SEQ ID NO: 328127 - DNA, 82 bp, Homo sapiens
ctgctgcctctgtcactcctggtgaccagcattcaaggctgagaagaaagccaaggtcattgcaggaatgaatgctgtggaa

SEQ ID NO: 328128 - DNA, 50 bp, Homo sapiens
tccatctcttcagagatgaaccagtggtgatcgccgctcgggaatgcggg

SEQ ID NO: 328129 - DNA, 92 bp, Homo sapiens
ctggaccaggaggaggttttcaggaccaaaattgtggaaaagtcactctgggggatatgagactttctactcggaatatcctgagtgttgcg

SEQ ID NO: 328130 - DNA, 75 bp, Homo sapiens
ttggtttcgggatctcggtgctgcagacggcgagacctcctgcacaggatggcactggatctttaaaacgcagtg

SEQ ID NO: 328131 - DNA, 75 bp, Homo sapiens
aagtcgagtatctggtgaagtggaaaggatggcccccaaaatcgacgacatcgcggatggcgccgtgaagccccc

SEQ ID NO: 328132 - DNA, 95 bp, Homo sapiens
tggtccaattgaatcaattaattgtgaagcctcagtttaggtcatctggtggttcagaacactcaacagagggctctgtatccttgggggatgga

SEQ ID NO: 328133 - DNA, 83 bp, Homo sapiens
tttcacagcactctgggcgaaaattggatgtgaaaatgaagccagaccgaggtggatggaagcatgcctaggggaagatctgc

SEQ ID NO: 328134 - DNA, 50 bp, Homo sapiens
cagctcccccgcctcggggagggcaccagagacaaagcatggaggacaca

SEQ ID NO: 328135 - DNA, 75 bp, Homo sapiens
caagagcagcggaaaatgatccagtcacagggggggccctcagcctcttggccttgaacgggctgttcatcttga

SEQ ID NO: 328136 - DNA, 98 bp, Homo sapiens
ggccactctgaggacgccaactcaggtgatgcagaagatggggaagaatatgatgacccttttgctgggcctccagacactatttcattagcctcaga

SEQ ID NO: 328137 - DNA, 90 bp, Homo sapiens
actgaagcaaggaatgccttaattgaacaaagaaaattcctgttccaagagaaaataaggcaacatcaatgaaggagagaagagccagcc

SEQ ID NO: 328138 - DNA, 100 bp, Homo sapiens
gaaaacctcaagtttgtggagattttaagaaatgggtccttgatggcaaagaagaggttgagaaacaacatagagaaaatattaaaaaactaaattccat

SEQ ID NO: 328139 - DNA, 100 bp, Homo sapiens
gacaccttttgacatgagcatccagcaatctgcacatcgtgctgccacacgaggcttcattcgttatggctggcgctggggttggagaactgcagtgttt

SEQ ID NO: 328140 - DNA, 50 bp, Homo sapiens
gaacatcatgaattcccaagaaggagttgtcgccgtgatcctgaaggcgc

SEQ ID NO: 328141 - DNA, 95 bp, Homo sapiens
gaggagcggcctgcgccgccgcgcgagaggaaaaatctgagtggatgacaacaacctgcaatcacgcactttatgctatttgtgatgtttttacc

SEQ ID NO: 328142 - DNA, 100 bp, Homo sapiens
cagccttaccaagcaacaagtgaaattgaggtcacaccttcagtccttcgagcaaatcccgtaccagctttggatctcggacagcaactccagctcaaag

SEQ ID NO: 328143 - DNA, 82 bp, Homo sapiens
gcttcgagtgacccgggtgccgaggagcgggaagagttgctgggatggactcaccctgtcacccaggttggactgcactggc

SEQ ID NO: 328144 - DNA, 90 bp, Homo sapiens
ggaatggctaatgtaaggtcccagagaaggttaatttacctaatcaaggtcacacggcttcaaccactcccagaagacgtccttcactcc

SEQ ID NO: 328145 - DNA, 75 bp, Homo sapiens
attcagcagggactcgtgaaacagcaggatgaagctgagctgtctctcttgctgcacaacgtggtcctgctctcc

SEQ ID NO: 328146 - DNA, 82 bp, Homo sapiens
cccaggagaagccgcccaaagaactggtctctaattaacagaagatggcaaagcccagccacagcagctatgtccttcagca

SEQ ID NO: 328147 - DNA, 50 bp, Homo sapiens
cactctcgtctctgttgctgctcgagagatgccacccagatgaacaacgc

SEQ ID NO: 328148 - DNA, 101 bp, Homo sapiens
ggcatattagcgctagccctgcagacagaggtgtgctgacgacctgctacaacagaaaaggacagaataacgggctcccagattcacaagccccaccaaga

SEQ ID NO: 328149 - DNA, 51 bp, Homo sapiens
cttttatacactcttagtgctgtccaggatgatgactttgagttcactggc

SEQ ID NO: 328150 - DNA, 100 bp, Homo sapiens
ggcccaggtgctgcggcctggggctggagtccgattgccgattcagcccagcaggttgcccccaagtttcctggcagtgtgtgatactgaggaggtgagc

SEQ ID NO: 328151 - DNA, 75 bp, Homo sapiens
gaagaatcagaaatctttactgattccaatgtacagcttcttccattgagtattctactagaccaagagacactg

SEQ ID NO: 328152 - DNA, 82 bp, Homo sapiens
tcggcagggcaggcagctccaggaggccctgggcgctgcctatggcacagccaagagcggtaccggcattgcggccatgtct

SEQ ID NO: 328153 - DNA, 75 bp, Homo sapiens
aagagctatggtgaaacaccactgaagcattgccaagagtgctgcagcagctcccagtccagtgctaggaaacat

SEQ ID NO: 328154 - DNA, 82 bp, Homo sapiens
ttcacaagatccaatcccttgtccttaaaaggtacaatgttagctgttctaaaaaatttgcacttagtcgttggaatcgtaa

SEQ ID NO: 328155 - DNA, 96 bp, Homo sapiens
atgtgatgttggagaactatagcaatctggttttcttgggatctaaaatgtccactgaggcacaaagagttgatgacagtccaagcactagtggag

SEQ ID NO: 328156 - DNA, 83 bp, Homo sapiens
agacactgaacgaggagccagtggacaaccctccatatgataagggagccttcagaatcgaaatcaactttccagcagagtac

SEQ ID NO: 328157 - DNA, 83 bp, Homo sapiens
ctgccttccctccctggtcctcttcagaccccctcttagttcttcgcggctaacgcctcaaggaataggttctcctagtgtct

SEQ ID NO: 328158 - DNA, 75 bp, Homo sapiens
gagcgtttgggtcctctgaggccccttgaccagctcatttttgaaggtatccgaggtcctggaatagaaggtgac

SEQ ID NO: 328159 - DNA, 98 bp, Homo sapiens
gcacaccggcgagccaagttccgcagcctggcatggcttctggggacctttacgaggcctggcctcgccctgtggatgatgatggccttgcccccgtg

SEQ ID NO: 328160 - DNA, 97 bp, Homo sapiens
ttgtactggcctgctgctggcccgcagggggtcattgtcattcgaagatgtggctgtgggcttcaccagggaggagtggcagtttttggaccagtct

SEQ ID NO: 328161 - DNA, 100 bp, Homo sapiens
gtactgccccgttacttatttttacaaaatcccagtgttccaatgcagaagttgcaggatatccagagagcaatggagctgctatccgcatgccagggcc

SEQ ID NO: 328162 - DNA, 82 bp, Homo sapiens
aattcctcatttgcaagagagacagttactggaacatagagattttataggcacaaacacagagcagtctaaagcaaccgag

SEQ ID NO: 328163 - DNA, 87 bp, Homo sapiens
gcagcgcccgtcaggggggcaccgcggagcaaggaatactcccccagttgcaagaggcgcaggaccgtggaagacttcaacaaattc

SEQ ID NO: 328164 - DNA, 98 bp, Homo sapiens
gcggtggccactgcgctgcggaacatggccttggacgtcagaaataaggagctcatcggtatggaaaagttgaggccactcgcatattgttagagaaa

SEQ ID NO: 328165 - DNA, 50 bp, Homo sapiens
agatagtgcctttcagccctaccaggtacttgaagaagcagaagctcaac

SEQ ID NO: 328166 - DNA, 102 bp, Homo sapiens
gacctatcaggacagagttcacatccatgtgaaaggccagccaccagttcaggagcacttgggagtgatctagacatgtcatgctgcccaaggacatagcca

SEQ ID NO: 328167 - DNA, 50 bp, Homo sapiens
aggaggccagctctacaggcgcgaacacttgccaagtatttcaatccttg

SEQ ID NO: 328168 - DNA, 100 bp, Homo sapiens
ggcatttggtggacacttttgcttgcagttaggtcaagtggagttgtgtgacttcattgagacacattacctgaatgagcaggtgaaagccatcaaagaa

SEQ ID NO: 328169 - DNA, 82 bp, Homo sapiens
caaagacaaggctaaggacttcatgcccgccagcaaaggctgaaggggatgctaagggagataaagcaaaggtgaaggacga

SEQ ID NO: 328170 - DNA, 75 bp, Homo sapiens
caggcggtgacccgctaccggaaggccatcgccaaggttcgagaacttgtcttggacaattgcaaatcaaatgat

SEQ ID NO: 328171 - DNA, 101 bp, Homo sapiens
agataaacacttggaagagggtcggctttatcctcctttgaataccattagagatgtttctctgaaaattgcagaaaaggaatcccagtcagaagttccag

SEQ ID NO: 328172 - DNA, 82 bp, Homo sapiens
gcgtcctgcactgaaaggaaatgacggattttctcctgagactggacagactgcaggacaattccagacacggacagcagag

SEQ ID NO: 328173 - DNA, 100 bp, Homo sapiens
catcatccagggacgtgccagaaaccacaagaaaacatggggaggggtgctgactccagcacagatcaagtcaatttgtcaggcaattctggactctggg

SEQ ID NO: 328174 - DNA, 100 bp, Homo sapiens
cgagaaagtcctctcgggagaagcagcgcctgttcccggggcagatccaggttcaggctgtgtggcttgcgcatcctgcagccctacgccgagaggatcc

SEQ ID NO: 328175 - DNA, 50 bp, Homo sapiens
gcgagttctacatgatcggctccgagacaatccacgttgctattgtctgc

SEQ ID NO: 328176 - DNA, 98 bp, Homo sapiens
gggttctggactttgggcgtcccattgccatgaatgtcaaaactggaccaatggggccaggctgaagtattgaactttctgctacgctaccaaccccg

SEQ ID NO: 328177 - DNA, 100 bp, Homo sapiens
taaaaacagaacaggaggtggtagagggcatggatatctctactcgctccaaagaagcatcaagtgtacctgatttgtgaacctatcttgcttcagttgg

SEQ ID NO: 328178 - DNA, 101 bp, Homo sapiens
gaaagctgcggcctgtatcaccagaggagattagacgtagcagattaggacactttcttcatgagcaacaaaccccaaagatacaaagacaagctaccaga

SEQ ID NO: 328179 - DNA, 75 bp, Homo sapiens
atggagggaggtttggcagatggagaacctgatcgaacttcggaactgtggctgcaccatctgtcttcatcttcc

SEQ ID NO: 328180 - DNA, 100 bp, Homo sapiens
attgctgtccactgcacagttcgaggggccaaggcagaagaaatcttggagaagggtctaaaggaagttattccaacttttgacatggctgtcaatgaaa

SEQ ID NO: 328181 - DNA, 104 bp, Homo sapiens
ctgggcttccacacaactccagtgctaactcaacagttcacacaaaagatgttggacaatttctacaattttgcttcatcatttgctgtctctcaggcccagat

SEQ ID NO: 328182 - DNA, 75 bp, Homo sapiens
gtcagagcccgccagaccttcctctgaaggcaaagtgacctgtggtggtgcgcgtgggcagggcgcggggacatg

SEQ ID NO: 328183 - DNA, 75 bp, Homo sapiens
gcgaggctcctcactgcagcgaagggtgctgaccttaaggaaagagccaaaatgagttccagtgaagttggtcct

SEQ ID NO: 328184 - DNA, 100 bp, Homo sapiens
aggaagtgagagcagcggcagccggcggtgcagcagccggccgacccagagtgctactgcagcactggggtgtcagttgttggtccgacccagaacgctt

SEQ ID NO: 328185 - DNA, 100 bp, Homo sapiens
tctgctttcgacttagaaaaaagaaccagatgtcaaaactgatttcagaaatgcatagttttatccaggaggagggccagagatggatgactacatggag

SEQ ID NO: 328186 - DNA, 98 bp, Homo sapiens
tctccatctgctgctgcctcttcatcctcttcctcttcctctcggagctcaccggatttataacgacagaagtccgcccagctgggaaggaaggtggc

SEQ ID NO: 328187 - DNA, 76 bp, Homo sapiens
tccagcagcaactactgcactaccagaccaccaagcagaacctctggcctgatcacttgaacggacatatcaagca

SEQ ID NO: 328188 - DNA, 87 bp, Homo sapiens
ctcctcaggcagttcagacaaagacagttcagctgagagctcagcccctgaggaaggaacagtaagaggaccttgtgcatgaataat

SEQ ID NO: 328189 - DNA, 83 bp, Homo sapiens
ctgtcctgcttcgtcaccccagaccttgccagagacctggcaaatgacatcatgacactggccacggcatatgcctccaagga

SEQ ID NO: 328190 - DNA, 74 bp, Homo sapiens
ggagctagttagctgtctgttgtctgtagcccagtgaaactggaacgccaagctgaagaagaacgaatacggaa

SEQ ID NO: 328191 - DNA, 107 bp, Homo sapiens
aggcggtatcaaatggaaagtttttccaaatattcatctgtacagtgatcttgagcctgaatggctggacagtgtgcagaaaaatggagagctgttttatttggaat

SEQ ID NO: 328192 - DNA, 83 bp, Homo sapiens
ccggcccccggctcagcccccggagtgcggagccgaccaggccaccagcccctcgggttccaagatgcagctactggagacag

SEQ ID NO: 328193 - DNA, 100 bp, Homo sapiens
cacagaagcattaccatgacgctctgaacatcatcgacatggccctgagtgaatacccagaaaatttcataaataggaaggttgttgattactcacagtt

SEQ ID NO: 328194 - DNA, 74 bp, Homo sapiens
caatgaggacaaccccacactgggacgcaattaccagctctggctgggtcgccacaacttgtttgacgacgaaa

SEQ ID NO: 328195 - DNA, 73 bp, Homo sapiens
aaggaaggaatatatcctgactgattcctgctgagggatgcccaagaagttccagggtgagaacaccaagtcg

SEQ ID NO: 328196 - DNA, 83 bp, Homo sapiens
cagcaaacagacatttacaaacagatacgtgctaataaggtcaaaatgcagatcttcgtgaaaacccttaccggcaagaccat

SEQ ID NO: 328197 - DNA, 101 bp, Homo sapiens
cctccctccttgtggccctgggaggaagccatggactctaccaagtctgaacccctgaagggatcaccagagaagtgaccggggaggtgcgtcctcatcat

SEQ ID NO: 328198 - DNA, 104 bp, Homo sapiens
gctgtcctttcaggaaggagccattatttatgtcatcaagaagaatgacgatggaccgccgggagagcctgcccacctccccaccctggacgccgggcgcgtcc

SEQ ID NO: 328199 - DNA, 75 bp, Homo sapiens
tgtgggagatcgtgggcgagctgggcgacggcgccttcggcaaggtttacaagaatacctcctctgaaaaatggc

SEQ ID NO: 328200 - DNA, 76 bp, Homo sapiens
gtggggacggccgcctagagtggttcagccacaaggagatcacgaggaatacaacaccaatgtatagaacaccaga

SEQ ID NO: 328201 - DNA, 100 bp, Homo sapiens
cagtggtcgcttcttctccttggtgtacaaagataatcaatgctgattcggaggacccaaaatacattatcaacgtaaagcagtttgccaagtttgtggt

SEQ ID NO: 328202 - DNA, 100 bp, Homo sapiens
ctcggtgaaaaccccagaccaagccatcctctggctgtggaagaagcataatatggtgaacggccgcctggcagaacaccttccaccatgaccacctcag

SEQ ID NO: 328203 - DNA, 100 bp, Homo sapiens
tgctgaaaactaccctcactgcctttggatttgcttcagctgacctcatcgagtgagggccccaaggctgttgcagctcctcgacctgatcggttggtca

SEQ ID NO: 328204 - DNA, 102 bp, Homo sapiens
cctcctgagtagctgggatcacagccaagacaatgcaaactccagtgaacattcccgtgcctgtgctccggctgccccggggccctgatggcttcagccgtg

SEQ ID NO: 328205 - DNA, 82 bp, Homo sapiens
ggagacttgccggcttatggtttcaatgctggataaatctgacccggtcgtctcgtaccgcgagacggtcagtgaagagtcg

SEQ ID NO: 328206 - DNA, 50 bp, Homo sapiens
taagcccagggacagccaggcagcgtggtaccatgcgacgacgctatgaa

SEQ ID NO: 328207 - DNA, 138 bp, Homo sapiens
ttatagtcctgattcaagtgttggcggatggaagggaggagactcctgaccctcagaatgcaaaaaatggccccatttatgatgtagtttggaattctagttctactgagttttgtgctgtatatggttttatgcctg

SEQ ID NO: 328208 - DNA, 76 bp, Homo sapiens
acagagccggtgatatgatctgtcctgaatgtggcttggttgtaggctaatggaggttggcaggatgctactaccc

SEQ ID NO: 328209 - DNA, 83 bp, Homo sapiens
ctgctttggacgtgggagtcacctgaaagccaggaaatggcctctccatattgctgtggtgcagggtaacctgccagctgtgc

SEQ ID NO: 328210 - DNA, 96 bp, Homo sapiens
cctcaagtggctggacggaccggtaattaggcaggtgcaattaaaaactagcatttctagtcagtatgtaattcggatgcagccgactaatagatg

SEQ ID NO: 328211 - DNA, 75 bp, Homo sapiens
gccacctgatactgtatggaggatggcctagagggctgaactgatgcttgaagctacatccgatactcccagatc

SEQ ID NO: 328212 - DNA, 74 bp, Homo sapiens
ggggactgttggtctcggccctgcggaagatatcagacaccccgaagaactttctctcttaaagaaacccagag

SEQ ID NO: 328213 - DNA, 88 bp, Homo sapiens
cggtgccagctaactccccaccatcaaaagtatcttctgctgtagcctggcacaagctgacaagctctctactgatgatctgaactcc

SEQ ID NO: 328214 - DNA, 99 bp, Homo sapiens
ggctttcttattgcagcaaaaattcccgtaccaatgtcagtgctagggaaagaacatgaggttcccttggaaatcattcaagaggaagatggaaggggc

SEQ ID NO: 328215 - DNA, 100 bp, Homo sapiens
cctctccaggatgtctacaaaattggtgagttggtcaaacgccatgctggggtgctaggacttggtgcatgtgttctttctagtccttacgatgttccca

SEQ ID NO: 328216 - DNA, 74 bp, Homo sapiens
aacagaaccaaaggctattggatcagctcagcaggggctacttctacaagtccgaacagccagtccagcaaaat

SEQ ID NO: 328217 - DNA, 155 bp, Homo sapiens
cacagatccgctcagctttatcggccgcatccggcctttggcggagaaaaccggcatctgcaaaattcggccgcccaagcagggaatacagcagacagcccctcctcaacagacagtgcagtattcactttcacagacatcaacctccagtgagg

SEQ ID NO: 328218 - DNA, 51 bp, Homo sapiens
aggttcgaagctgagtatgtgacaggctttttcttctggggtggatctttc

SEQ ID NO: 328219 - DNA, 75 bp, Homo sapiens
catcaagagacctatcaagacctgtatccaggaaaagattgagaaaatcatgagttctattggagaagggattga

SEQ ID NO: 328220 - DNA, 100 bp, Homo sapiens
tccgcctgtgttacgtgttgatgaccggcagcggctggcccgggagcgacgtgaggaacgggagaaacagctaggtaacacaagtggcaagacagccggg

SEQ ID NO: 328221 - DNA, 50 bp, Homo sapiens
attgcctgctttgattccctaaagggcatttgacactcttgcaaaagcat

SEQ ID NO: 328222 - DNA, 96 bp, Homo sapiens
ccggtggttgctgttgcttggcctggtgggcccagtcctcggtgcggcgcggccagggctcctcgcacctaccccagcaactcaaattcaccacct

SEQ ID NO: 328223 - DNA, 100 bp, Homo sapiens
atctatagagaagaccgcccaagtctgcccttgtttgaggccttcacagcatgtggttttgtgcagatctcctccctggttcgaagggctgccctcacac

SEQ ID NO: 328224 - DNA, 85 bp, Homo sapiens
agacacatcatggatcagaggtcattagaggaaggagaggggccaatagattgtcaagacattgccaataagggagctaaacaga

SEQ ID NO: 328225 - DNA, 101 bp, Homo sapiens
cgacttcaactatggcagcagcgtggcctccgccaccgtgcacatccgaatggacacgatgaggcgagtggtacgacagagcaagtttcggcatgtatttg

SEQ ID NO: 328226 - DNA, 82 bp, Homo sapiens
ggaagagccggggccgtggctgacatggagcaggtcatcatcagatttgaaatatttaaagtggatacaaaactatttcagc

SEQ ID NO: 328227 - DNA, 75 bp, Homo sapiens
gggaccaatcaccaactcacgtttgtctttgtcagcgccacgtgagacacctacaacgagatgccttaagccagc

SEQ ID NO: 328228 - DNA, 89 bp, Homo sapiens
atcaggaatagattctcttgaccatgtgacatctgatgctgtggaacttgcaaatcgaaggcagtccttgatggagatgcagagtcgtc

SEQ ID NO: 328229 - DNA, 101 bp, Homo sapiens
agtagcaggtgggatcgaggccattgtacaacttatcaacacaaggcagccacaggccaaaatcattgtattggttgctatcaagatcatagataagaccc

SEQ ID NO: 328230 - DNA, 83 bp, Homo sapiens
gccaattgagattcggagttaaaacaggtaaagtccatggttccctggcccgtgctggaaaagtgagaggtcagactcctaag

SEQ ID NO: 328231 - DNA, 75 bp, Homo sapiens
caggaatggctaaaaatgtttcagacatcttcatttgattgtacaccatctcccagcaagacaccagttgaaaac

SEQ ID NO: 328232 - DNA, 50 bp, Homo sapiens
cccacggaaagtggtatctcgggaatcagaggcggggtttcaccatgttg

SEQ ID NO: 328233 - DNA, 75 bp, Homo sapiens
ggccgcctcagccatggacgcgtccctggagaagtgattttggctactaccgtccagaaaatgactccaagtgtg

SEQ ID NO: 328234 - DNA, 100 bp, Homo sapiens
tgagccctgtgaggatttgaggaacgatgagcacagcccatcctatcaacagatcaactgtatcgacagtgtcatcagggagattcttcaagcaatcact

SEQ ID NO: 328235 - DNA, 75 bp, Homo sapiens
cggccaagctccgccgcgcccgcggcccgcggccgccatgaaggatttgggggcagagcacttggcaggtcatga

SEQ ID NO: 328236 - DNA, 90 bp, Homo sapiens
tccctaataaatctgcactgtcagcttgagctagaaggcttccgttacaagatgaggtctgtgtatgctcacttccccatcaacgttgtt

SEQ ID NO: 328237 - DNA, 100 bp, Homo sapiens
tggcagagcgtattgcgggcatggaccctgtcgtgcagaacccaagacagaccaggatgaggagcattgccggaaagtcaacgagtatctgaacaacccc

SEQ ID NO: 328238 - DNA, 100 bp, Homo sapiens
tggacctgagcctggagctgcgggcggaggtaaagagagatgaatctggagcaatacatgttactaagcaaaagcatcttcacctatactatgacctcat

SEQ ID NO: 328239 - DNA, 83 bp, Homo sapiens
ctccttcggcagtccacccaccgccgccgcctcccaggcaaacccaccacgagtagctcagaagcatgtcgcttctgtggttc

SEQ ID NO: 328240 - DNA, 78 bp, Homo sapiens
agtttggctacaacactggagtcatcaatgccccccagaaggtaacaattctgtttgcggacctccacgcatacctgg

SEQ ID NO: 328241 - DNA, 51 bp, Homo sapiens
cgccagtcaataggaagtacgagtgcagaaggagaagacagcctgaagaag

SEQ ID NO: 328242 - DNA, 74 bp, Homo sapiens
aaaaacagaaaaataataattacatctgcaaagaccttatttccaggtgaaagaacttgtcctggacaacagtc

SEQ ID NO: 328243 - DNA, 96 bp, Homo sapiens
cagggtacattgaagaccttaagaagtttctaaaacgtggttgaccagattgacaccctgacctctgacctacagctggaggatgagatgactgac

SEQ ID NO: 328244 - DNA, 98 bp, Homo sapiens
aataaaggagcaagaaatgttcaaaggaacaacatctttaccatctcatctcaagaatggagggtacaacaaataacactgtgactccaacctcacaa

SEQ ID NO: 328245 - DNA, 75 bp, Homo sapiens
tcccagatatagccgttggtacaaaggttctgcggggagtgtctccagccctgcctgcaggtgccatccccgctg

SEQ ID NO: 328246 - DNA, 99 bp, Homo sapiens
gttcaaggaggccttccagctgtttgaccgaacagacttgcctaacgatatctcacctctactcccatgaattcacctttgattccagtgtgaactgtc

SEQ ID NO: 328247 - DNA, 100 bp, Homo sapiens
gaatatcatgctggtggctctacccagaattcaattaaagtggctcagaaagccaagatgacagattttgatcgttttaaagttatgaaggcaaagaaaa

SEQ ID NO: 328248 - DNA, 112 bp, Homo sapiens
cgggagtggtgcgtgatgtggctaagatgctgccgactctgggcggcgaggaaggcgtctcccggcaatcatcctcttccagtggtagcgtgtttgggtctggaaacactgg

SEQ ID NO: 328249 - DNA, 83 bp, Homo sapiens
gaaaacaagaggccccagagggaaaagaagcccaaagttttaaagctcaaagtctccactgcctcctgaagaagaggcaaaag

SEQ ID NO: 328250 - DNA, 75 bp, Homo sapiens
tctccaggatgtctacaaaattggtgcagcagcagtgagcggggttcccggagaggccagcgtggggacagccgc

SEQ ID NO: 328251 - DNA, 100 bp, Homo sapiens
gaaaaggttgtgaaaccttttaactctccacagtggagtccattatttcctctggcttcctcaaattcatattcacaggatttctctctgatcaaacgga

SEQ ID NO: 328252 - DNA, 75 bp, Homo sapiens
gaggtgctctacgaaatctttcgctccctacacaccctggttggacagaatgagtccctggaacgccagatgcgt

SEQ ID NO: 328253 - DNA, 82 bp, Homo sapiens
ataaaattcaagcggtcatcgatgcgggagtatgtaggagacttgtggaactgctgatgtatttaaaccatgtcagagctgc

SEQ ID NO: 328254 - DNA, 83 bp, Homo sapiens
catgtcatctcccagtccgggcaagaggcggatggacacggacgtggtcaagctccctgaaaagcaaaggcctcatctccatg

SEQ ID NO: 328255 - DNA, 74 bp, Homo sapiens
tgtgtaagaagtactccagggaaacctcccaggtcagctggccgccggcacctgtgagattgtgaccttggacc

SEQ ID NO: 328256 - DNA, 75 bp, Homo sapiens
gaaaaccagctgaggtgtccgtaaagattccagagaagcctgtgaacaaagaaactggaggcgaccagtgcccag

SEQ ID NO: 328257 - DNA, 51 bp, Homo sapiens
cagtggtcgcttcttctccttggtgatgtgcgttcagattaagtgtttcca

SEQ ID NO: 328258 - DNA, 82 bp, Homo sapiens
ctgaggcggaacaggccgggcaccaaggcgcaggtttctctggaaacccccctggtaagtgtggaggaggcgggacactctg

SEQ ID NO: 328259 - DNA, 50 bp, Homo sapiens
gttcctggagattctgattgagttcatagccctgatgaagcaagttactc

SEQ ID NO: 328260 - DNA, 83 bp, Homo sapiens
cccatcttcggcatgtccttcgcctgccagtcaaagaagcttccggttctgaggtcctggaggtgccatttccctctctgttg

SEQ ID NO: 328261 - DNA, 100 bp, Homo sapiens
cgtgaagaagcaggaggctaagaaagtggtgaatcccctgtttgagaaaaggcctaagaattttggcattgcatcagcaggaattgctgtgtcccagagg

SEQ ID NO: 328262 - DNA, 85 bp, Homo sapiens
tgtcgctgggctgcaccccgggcggggacgtccgccgggcacgggagggggccaagatgccggaaacggggtctctgggggatcc

SEQ ID NO: 328263 - DNA, 98 bp, Homo sapiens
taaggagatcatagcagagtacgatactcaggtcaaaggtcctatggcagcgtatacaaagctattcataaagagaccggccagattgttgctattaa

SEQ ID NO: 328264 - DNA, 90 bp, Homo sapiens
gctgaaatcattgaagtgcttggagtgcagaactgaaagagattgctaagaagcctcgaacgccaacctctggtccagtaatcacgaagc

SEQ ID NO: 328265 - DNA, 74 bp, Homo sapiens
ctgaagagggaagacacgcggaaacaggctgaaggtgatgtggccgccctcaaccgacgcatccagctcgttga

SEQ ID NO: 328266 - DNA, 82 bp, Homo sapiens
ccggagcccggcgctttccccgcaagatggacggtttcgccggcagtctcgtcttatagctggatcagctaccaagagaagt

SEQ ID NO: 328267 - DNA, 100 bp, Homo sapiens
ccttgactccatgaagcttaccccctcaggcaggctggcagagagcagggatcactgagattctgatgaacagaccttctgcccgcaatgccttggggaa

SEQ ID NO: 328268 - DNA, 99 bp, Homo sapiens
ctaaccacaggcatcagttggtactcgccatgaaactcaaagatcgagaggttccagttacagccatcccttgtcataacttttgaactgtatttggaa

SEQ ID NO: 328269 - DNA, 92 bp, Homo sapiens
aagaaagtagtacaaaactcaagatttttccttcctcagactctcagctggattacggtgggatcatggcagggctgggctccgatccctgg

SEQ ID NO: 328270 - DNA, 50 bp, Homo sapiens
ccctgccacccaagagaatgctgggagccacgccgcaatgaagagcttct

SEQ ID NO: 328271 - DNA, 100 bp, Homo sapiens
tatgctacagatagatgttaaggacatctgcaaatctttcaccaatgaagaagctgccaagatcctgctggctgagttcaacctgggctgtgatgtgcaa

SEQ ID NO: 328272 - DNA, 100 bp, Homo sapiens
ttcgcgcccgccgacccgcgccctgctccctctcagcacctgggcggacgcctgccacagtgactcaggtcactcaaggaactatccgaccagctgccaa

SEQ ID NO: 328273 - DNA, 90 bp, Homo sapiens
gatcatgatacagttgataaaattgttgtcacgccgatgatggagctgaagcccaacgcaggtagcgaccgtgcctgggtctggaacacc

SEQ ID NO: 328274 - DNA, 82 bp, Homo sapiens
gccgcgcgggccgggaggggacggccgccggagccgcgaggccaagagagtgtgctgggcagacgatgctggacacgatgga

SEQ ID NO: 328275 - DNA, 101 bp, Homo sapiens
agagaagcagctgttgctattggaggaggtgaccaagaatatggcccaggtgaccaaagccctggacaaggccctgagcaccatggacctgcagaaggtct

SEQ ID NO: 328276 - DNA, 88 bp, Homo sapiens
tcagacagggcagaccgaggagtttggaccgagctgctcctggaacacctggagtgcctggtgtccaggcacgagaggtcactgcgca

SEQ ID NO: 328277 - DNA, 100 bp, Homo sapiens
acagcaatgacctctacgaactccagctggtaggtgagtgctgtcctcggctcactttcctcaagctctccggctgccacggtgtgactgctgacgctct

SEQ ID NO: 328278 - DNA, 88 bp, Homo sapiens
cttggaattacctgctgcgatttttcttcacagccagtttctgatatggagtctggagaacggttaccatcctcagcagcctcctcta

SEQ ID NO: 328279 - DNA, 101 bp, Homo sapiens
ggagaagaaggaagaaagtgaaagcgatgtggtccttcttagtcccaaggaccctgacaggcatctgcagcatgtggggcggctcccactattccaccttt

SEQ ID NO: 328280 - DNA, 96 bp, Homo sapiens
tcggtggactccttcggcagtccacccaccgccgccgcctcccagagctggaagtcgagtgtgctactcaactcaggagatttggagacaaactga

SEQ ID NO: 328281 - DNA, 100 bp, Homo sapiens
gactttactgaagaggaggaagcccagactatagaatctaactggcggtgtggacgacacaacttgcagaggattcagtgccgctctgaaaatagtaaag

SEQ ID NO: 328282 - DNA, 100 bp, Homo sapiens
agtgaacagacacgggtgaatgctgctaaaaacaagactggggctgctcccatcattgatgtggtgcgatcgaccttgttcccatcaggatacctaatcc

SEQ ID NO: 328283 - DNA, 100 bp, Homo sapiens
gttgtccgagcatctgggaatgagcgtcaccctggacccacagtcggccagtgggtacctgcagctgtcagaggactggaagtgcgtgacctacaccagc

SEQ ID NO: 328284 - DNA, 75 bp, Homo sapiens
cgaagatccggactctgggtgttttgctaccgtgaccgtttaggttcatcatgcctagtggcgtataagaagacc

SEQ ID NO: 328285 - DNA, 85 bp, Homo sapiens
gaagagcaatgacattgggggcctgtggaaattttcagtgcatgaatacctcagaagtaaactctgttcactgtatgaaaatgac

SEQ ID NO: 328286 - DNA, 82 bp, Homo sapiens
tcagcgtcgctggcagccgctgtacttgttgcagatctgatctcttctgaacacctcatcgtgtctccatccctgggaatct

SEQ ID NO: 328287 - DNA, 115 bp, Homo sapiens
ccctcaccgccctcaccacccctatccagacggctgcccttcaagtaccactgctcattgggaactttggtctcagcttagagcaatcccgggcccagatggccctgtggacggt

SEQ ID NO: 328288 - DNA, 100 bp, Homo sapiens
aggcaggcctatctggctccagattgccgagtctgcttacagattcactctgggctcagttgctggaggtgaccaagaatatggcccaggtgaccaaagc

SEQ ID NO: 328289 - DNA, 75 bp, Homo sapiens
gggtccctgaagagggaagacacgcggaaacaggtgacaatggaatggactctgatatggaagaggaagcagatg

SEQ ID NO: 328290 - DNA, 74 bp, Homo sapiens
atagacattgaccccgaggagacgcattagcagcaatccttggagcagtgccattcctggggacatactgggca

SEQ ID NO: 328291 - DNA, 100 bp, Homo sapiens
ccagctgccaattcatcaatttgagaagctatttttatgattcccacaaatccaccaccaacattcagaaagccagaactttggtccgatgatttcaccg

SEQ ID NO: 328292 - DNA, 75 bp, Homo sapiens
tgaagcagctggctagtggcttattacttgtgactgggtctgagtgcccggaccgcttggctatggactttggtg

SEQ ID NO: 328293 - DNA, 101 bp, Homo sapiens
ggccccctggaccccccggtgaacaggggcttccgggccttgctggaaaagaagggacgaagggtgatgctggtcccaaaggtgctgatggctctcctggc

SEQ ID NO: 328294 - DNA, 100 bp, Homo sapiens
gagcaagatggcgattccgggcaggcagaggaggtgcgccagtctgtaactcctgccgagccagtccagtactatttcacgctggctcagcaacccaccg

SEQ ID NO: 328295 - DNA, 82 bp, Homo sapiens
ctttagccatgtggatacctacggagcacgagaaatacggcgtggatttggagcaagaggtggtggtggccttcccccgaag

SEQ ID NO: 328296 - DNA, 82 bp, Homo sapiens
cagtaaaagagtgtgtaggagcatcaaaccagaattgtcgaacacctgatgctgttgagaaggatgccctgcagtggtctcg

SEQ ID NO: 328297 - DNA, 100 bp, Homo sapiens
aggcccctcttctcctccaacccagaactggacaatctggagacgaagtcgcagacgtcggtgacactcagcatcgtccactgccctcccgtcaccaccg

SEQ ID NO: 328298 - DNA, 100 bp, Homo sapiens
cctgcaaccaggacgctctccaggaggcgggcacattcaggtgacgatgcctggggagcctgtggacgtggcatgtggcgtggaccacatggtgaccctg

SEQ ID NO: 328299 - DNA, 76 bp, Homo sapiens
caggctgctcttggctctcaacttattcccttcaattcaagtaacagggacagagcagaatgggctgatatagatc

SEQ ID NO: 328300 - DNA, 98 bp, Homo sapiens
caagacctcatcaacaattaaggtggataagattgtggaccagctgcagcagttaatgcaggtgtatgacttggctgcccttcgggattattggagct

SEQ ID NO: 328301 - DNA, 80 bp, Homo sapiens
cctgaggggggttgttttgatgaaagtgaaagttccatgccattgcagtgtcaactaggcctcagttacttttcagtttg

SEQ ID NO: 328302 - DNA, 95 bp, Homo sapiens
gtgaatgcccctgaattttacccttcaggttattcttccagttacacagaggctttcgagctacccttggatgattgtgaagtgattgaaactgc

SEQ ID NO: 328303 - DNA, 82 bp, Homo sapiens
ctgcttcccatcgaagctctagaaatgaatgtttccatctcttcagagatgaaccaggattttttatcaagcagaaatgcat

SEQ ID NO: 328304 - DNA, 100 bp, Homo sapiens
tgtgccctgcacctgcctcttcccccattctcagtgaaggagtacctcctggcaactatgggaactatggctatgctaatagtgggtatagtgcctgtga

SEQ ID NO: 328305 - DNA, 51 bp, Homo sapiens
gttccttgaggaggtttgaaaaaggcacattcactgaaatccccgccagca

SEQ ID NO: 328306 - DNA, 100 bp, Homo sapiens
accgggatggcgacgtctacactgagtcggaggcgaaggatatgtgatggcgtccagtttggagctgggataaggttcctgtagccgacacccctacagg

SEQ ID NO: 328307 - DNA, 113 bp, Homo sapiens
aaaggagttcgagcagatcgacaagtccgggagctgggcggccatttaccaggactcacaccacccggcaagaactgctcactacggctccctgccccagaagtcacacggcc

SEQ ID NO: 328308 - DNA, 98 bp, Homo sapiens
taacgctgcctttgctttaaaacagtattacttgcgagtggagcctttcaggctggcatggagagcttaaggggcaactgaaggagacacactggcca

SEQ ID NO: 328309 - DNA, 114 bp, Homo sapiens
ccacgactgggagcagccgccgccgcctcctcgggagtcggagccgccgcttctccaacaatgcagatcttcgtgaagactctgactggtaagaccatcaccctcgaggttgag

SEQ ID NO: 328310 - DNA, 74 bp, Homo sapiens
cagataccgtttgacaccaccagacttcatagacctcacgttgtcgaagactcaacgaaagactccaaccgtta

SEQ ID NO: 328311 - DNA, 82 bp, Homo sapiens
gcagaagcctacgctaccaaagaaattgttgccaaggtcagagaagtctcccagcccgactggacgcctccaccagaagtca

SEQ ID NO: 328312 - DNA, 75 bp, Homo sapiens
gggcaaacaggattccacagtgtcctctggaaaatggtatgttcgcaattcgtgctgatcatgattttgtagtac

SEQ ID NO: 328313 - DNA, 117 bp, Homo sapiens
gttgagcacggcgagcagtctcaggcctttagtgatgatggttttctgtctcaactggtctctgacaagcctctgactgaatgtatccgtgctggccactatgcagcaagcatcata

SEQ ID NO: 328314 - DNA, 74 bp, Homo sapiens
cgctgtgatgcctgcagagctgtggcttaccagcttcttggacacttaatgattgttggcaagaaatgtgctgc

SEQ ID NO: 328315 - DNA, 75 bp, Homo sapiens
ggccggatggaaatcctaatgacagtctccaaattcgcctccatctgtaccatgccatggccatgcagaaaatct

SEQ ID NO: 328316 - DNA, 75 bp, Homo sapiens
tttcgcctttatcgtggtggagtccaccctggctgtggtgtgggcagaagaaaaagctagtgatcaacagtggca

SEQ ID NO: 328317 - DNA, 50 bp, Homo sapiens
tctcacattggccggcaacttgttccagtgtaccatagagagcattttcc

SEQ ID NO: 328318 - DNA, 90 bp, Homo sapiens
ccaagaggaggacagttcgctacacagcaatgcatcgagtacgctggggaggaggaggaggaagggagcggcagcagtgaaggatttgac

SEQ ID NO: 328319 - DNA, 101 bp, Homo sapiens
ctacctggtaatagaggacttgaagcagaaagcaagtgaatacgagtcagaagaccgagacatgggtgcccggcaccgcgcccgagcccactccattcaga

SEQ ID NO: 328320 - DNA, 100 bp, Homo sapiens
cttctatattagaagaaaatcaggctctttgcacaataacttcatttcccagagaagagaaggtgttcttagatcagaagatgccattgtattaggtgac

SEQ ID NO: 328321 - DNA, 100 bp, Homo sapiens
ctgctttctctcgatgaggataacatccctccagaagatgaaaggagaatcacttgaacccaggaggaggaggttgtggtgagccgagattgcgccattg

SEQ ID NO: 328322 - DNA, 96 bp, Homo sapiens
ccctgcagtacctgcagaaggtctctggagacatcttcagcagcctgcctgctccgcttcagcggactctcgctggtctacctgctcttcctgctg

SEQ ID NO: 328323 - DNA, 99 bp, Homo sapiens
gaaggctatttcgccgctggcgtcaggactattttcacgttttaatgccgagaggtctctgtgacgattttgtcctggaatcaagatgtgagaccaaga

SEQ ID NO: 328324 - DNA, 89 bp, Homo sapiens
atcactactcttggaatcaaagataaatccaaatactgcatatcagaaacaacagaaccaactgtgagagcggagctgatggaacaggt

SEQ ID NO: 328325 - DNA, 90 bp, Homo sapiens
gctcgggccagcccttctctgccgtccctgggaggcagagctttgcggtgctccgtggggctgtcctgggactgcaggatggaggggaca

SEQ ID NO: 328326 - DNA, 74 bp, Homo sapiens
ttcgtgcccgaaacgccgaatataatcccaaggggctggtggcagcagcgtcgtcataggtaatattggtgccc

SEQ ID NO: 328327 - DNA, 100 bp, Homo sapiens
tgcagtcggcactgctactgcgaagacagctggcagagtgaagacatttccacctggacacctgaccatgtgcctgccctgagcagcgaggcccaccagg

SEQ ID NO: 328328 - DNA, 100 bp, Homo sapiens
ccagctcccgtagggagccgtgggcgctcggtgcccgggccgggcagacgaagttatacggaagcgtctcctcattgatggagatggtgctggagatgat

SEQ ID NO: 328329 - DNA, 83 bp, Homo sapiens
gtgcatgaactcggtggaggagaagagaaactccaagatgctccagaaggtcagcccaaggccaaccccactgtcactctgtt

SEQ ID NO: 328330 - DNA, 83 bp, Homo sapiens
ctcctccataaaaacaagtgtgtgcatctggctgttagaagaattcatgctcatccggggtcaaagaattgactgtagatcca

SEQ ID NO: 328331 - DNA, 100 bp, Homo sapiens
cgactgcccagagtccgcggccggggcgcgggaggcattgaatgccccagaggagcccgaaacctcccaggcttggtgcaggaaggagagcccttcagcg

SEQ ID NO: 328332 - DNA, 100 bp, Homo sapiens
tcgaggccctgctgcacgacctcagctcccagaggatcaccagcgtggggccggcggcggcggctgccccgagggacgcggccctaggcggtggcgatgg

SEQ ID NO: 328333 - DNA, 100 bp, Homo sapiens
gctgtacaccctcaacaaacaccagcgctttggttacagaatgtctgaaggggacagtgtgggagaatccgtccatgggaaaccttcggtggtgtacaga

SEQ ID NO: 328334 - DNA, 100 bp, Homo sapiens
gcttcatcctcggcggcggtggccgctagctccaaggaaggtgtggatgaggtcaccattgtcaacattttgaccaaccgcagcaatgcacagagacagg

SEQ ID NO: 328335 - DNA, 75 bp, Homo sapiens
gagggagggtccgagccagccgctgttttgccggaggagcccctcaggccgatgaagtgtcctcttgctagcacc

SEQ ID NO: 328336 - DNA, 73 bp, Homo sapiens
cctgcaggtggagctccggcagccgccctgttttcggctttgtgagaaaccttaccatcaaacacgatggcca

SEQ ID NO: 328337 - DNA, 100 bp, Homo sapiens
agagagggcccacacgactagaaggacgactgcctggcgcgatacaaaaatttactccacaggatccgctgaacataggatgttgccacaaaatctacct

SEQ ID NO: 328338 - DNA, 96 bp, Homo sapiens
cctgggcaagctccagagcctgccggaaggctccctcggtcgcgagtatctccgtttcctggatgtgaacgccttcctggatgctctgcagaacca

SEQ ID NO: 328339 - DNA, 58 bp, Homo sapiens
tggaactcaggcagaaattcgagaatcatttgctgtttcaaatagagaactgtgcgat

SEQ ID NO: 328340 - DNA, 113 bp, Homo sapiens
gctttttcaagggagctgataaagaacttcttcccaaaatgggtcaactgcaacttggcctcttgatccaccaaaggatgagaaacaagggtggagacatgtgagaattaaac

SEQ ID NO: 328341 - DNA, 75 bp, Homo sapiens
tgttcctggcttccctctggatgctgacagaaacaaggaattataaggctgtctgcagagatttgaaaaatggca

SEQ ID NO: 328342 - DNA, 100 bp, Homo sapiens
tcagaactgttccttcagccaaagaaacaagccgtggaataggtgtatcaagtaatggtgcaaagcctgaatgtgattcttggagcaaatacccggccag

SEQ ID NO: 328343 - DNA, 122 bp, Homo sapiens
ctttgttgctgctgcacattaggttgcagtatgtggccagttatttgcctcagtaaaagagtgaaggcttccataattaccatcacacctttccctttgactactctgcgagtgaatttggc

SEQ ID NO: 328344 - DNA, 87 bp, Homo sapiens
cattatccaacggctgctggaaggcagtcacccgcagggccaaggtggctcccgctgagaggatgagcaagttcttaaggcacttca

SEQ ID NO: 328345 - DNA, 75 bp, Homo sapiens
gctttacttttgtggtagaccgtctaagagaaggcacttctggatccagctgtgtgatagccgcactaggaaata

SEQ ID NO: 328346 - DNA, 86 bp, Homo sapiens
ctggcggagcaggaggatgggcgttcaggacctcaaggggctcggctatgagaaggggaagcctgtgggtctagtgggcgtcacag

SEQ ID NO: 328347 - DNA, 83 bp, Homo sapiens
atttgcaacacagtagtggtttctgctcctaaccaaccccgacaaaaggtggagccttttgccagcttgaccgaggccgtgcg

SEQ ID NO: 328348 - DNA, 100 bp, Homo sapiens
ctcagcaagaacgggaacaaaactctgtagaccaaattttggtacaattgaatcacactgcagcagaattcaccctgtgctaggacatccagtaatgctt

SEQ ID NO: 328349 - DNA, 50 bp, Homo sapiens
tagacccacagctgttaaagcaacagcatttgatgaatacagaaatatca

SEQ ID NO: 328350 - DNA, 82 bp, Homo sapiens
ggcgccaggaccggccgaacgcagaggtgatggtaatgcccgaaggagcagacacggtgtccaggcccagtcccgactaccc

SEQ ID NO: 328351 - DNA, 75 bp, Homo sapiens
gatctgactgaagattttacagcaggcagttcaattaacctccagaagatggctgaacctgcaggaataccagag

SEQ ID NO: 328352 - DNA, 74 bp, Homo sapiens
agtcaatatagccaacagagcagcagctacgggcagcagatcccccagtcaaccagagaggagaaaagagaaaa

SEQ ID NO: 328353 - DNA, 98 bp, Homo sapiens
ttcaatgagctcagcttccaggaggtcattgaggataagaggaaggcaaagaaaatcattgactctgaggttgatgctatgaaactgggagtaaagga

SEQ ID NO: 328354 - DNA, 98 bp, Homo sapiens
ccagacctgggaggagttcagccgcgctgccgagaagctttacctcgctgaccctatgaagaccaaaatccacacccttatcacagcccagtgccaat

SEQ ID NO: 328355 - DNA, 99 bp, Homo sapiens
agtgccgcttcggccgaaggcccgagcgcccgaggcgtctgggatggtgtgggaccgggtaaaacttccttttcctgtagatcaaatcacagatcttcc

SEQ ID NO: 328356 - DNA, 87 bp, Homo sapiens
agttcattttttgcttggtttggaaaaatttcattagaggagaatgaagtttctagattagaagacataatgcagcatttaaaatca

SEQ ID NO: 328357 - DNA, 75 bp, Homo sapiens
gcagcactgtggaggccgtcctcgaggctgaggggatctggcggtggagcgctaggatcagacgcccccgcgatg

SEQ ID NO: 328358 - DNA, 83 bp, Homo sapiens
atttaagagagctctggacaagctggaatgcatccaagagaatccctcaacatgctgggcttgtcaatgaggcagatcagatt

SEQ ID NO: 328359 - DNA, 75 bp, Homo sapiens
cctggggaacctgctcaaagccctgggtcgcttggaagaagccaagaaaacgcccactcctggatcttcacattg

SEQ ID NO: 328360 - DNA, 100 bp, Homo sapiens
cctagaccctgcccaacagaatttatatagagatgtgatgttggagaactacagaaacctcgtctccctgggtcacggtctagatcacattctcgatcca

SEQ ID NO: 328361 - DNA, 101 bp, Homo sapiens
tggagcctcagttggaagcagccgatccagcctgcggagcctgtggggcagagttatgcccagccaagtcttcagtatatccaggggcaacagattttcac

SEQ ID NO: 328362 - DNA, 100 bp, Homo sapiens
tgatgatccacttccacttaatgaatggtacaggtttgcagattccgccagcagcacagcaagctctacagatgagtggctctttggcatttggtgctgt

SEQ ID NO: 328363 - DNA, 90 bp, Homo sapiens
atgagccaaatgttccctacaataagacgcccaactgtgtttcctacttaggagaggaactgtggctgcaccatctgtcttcatcttccc

SEQ ID NO: 328364 - DNA, 51 bp, Homo sapiens
agccattgctgaaagcctgaatctctgtcaaaacgccttacaaatcctttc

SEQ ID NO: 328365 - DNA, 76 bp, Homo sapiens
ggcaacagggacatggccacctgggacgaaaagatcaaagaaatcggctggacagatgtcgggggctggaccggcc

SEQ ID NO: 328366 - DNA, 83 bp, Homo sapiens
gcctgggagcctgctccctgctcagctgctgccggatggagtgctgtgatgtgccagccgagacactctacgacgtcctacac

SEQ ID NO: 328367 - DNA, 97 bp, Homo sapiens
ctggaggaccacattacccagcttcacgagtacaatgacatcaaggatgtggggcagatgctgatgggcaaactagagctccaaacgagaatggaag

SEQ ID NO: 328368 - DNA, 100 bp, Homo sapiens
tgttttcctcacattcctcaagcaggaagggaaaaggccgaggcatcagcgtgtgaagaccgcaaagacgatcccgagtacagttgtgaacagcattgct

SEQ ID NO: 328369 - DNA, 100 bp, Homo sapiens
gcattgaccactacaagtaaaatgcgaattccacattctcatgcatttattgatctgactgaagattttacagcagctcggttggtttagcaaaagcagc

SEQ ID NO: 328370 - DNA, 100 bp, Homo sapiens
aaacttcttaacccctagaccggtttttagtccattgactatgcagcctaatggtgttcatgaaaaaaatgcacaaaatcctgcctggccggaataattc

SEQ ID NO: 328371 - DNA, 100 bp, Homo sapiens
agtacaatgacatcaaggatgtggggcagatgctgatgggcaaactaggaggtgtttcatagagaactaaggagcaactccatgaagacctggggcctgc

SEQ ID NO: 328372 - DNA, 82 bp, Homo sapiens
cagcttccagacatcgccctggatgtcttcgcgctctggctggtctcccctctgctggagacggtctcgccacattgcccag

SEQ ID NO: 328373 - DNA, 92 bp, Homo sapiens
tccgtcccccgcgggtctgctctgtgtgccatggacggatgggcaccaacaaatgcgccagccagtcgggcatgactgcctacggcacgaga

SEQ ID NO: 328374 - DNA, 83 bp, Homo sapiens
cagaagaggaggaaaatgttttgccacgtggatgtgaagatttcctctaaaagtagctgctccagtgggcccagtgggcccca

SEQ ID NO: 328375 - DNA, 75 bp, Homo sapiens
gggcgggaagatggcggctgggttcaagtacatcaggaacgtctctatcaagaatacaatttcagcaaggctgag

SEQ ID NO: 328376 - DNA, 101 bp, Homo sapiens
ggtgtaccaggcgaagctggccgagcaggctgagcgatacgacggggaatgagtttcagaatattccaggggagcaggtgacagaggagcaattcacggat

SEQ ID NO: 328377 - DNA, 90 bp, Homo sapiens
cgagtggttccgcacggccagagcttccagaatggctatgccggcatcttccatttccagatggacgaatgccttttccggtgaaccatg

SEQ ID NO: 328378 - DNA, 89 bp, Homo sapiens
cgacgtcttgcctgtgtcccacttgttcgcggcctataggtgtccctggccagtgtccttccacctgtccacaagcatggggaacatct

SEQ ID NO: 328379 - DNA, 134 bp, Homo sapiens
cccagccgaccttgagctccaggagttcgtctcttacgtctgcggaagtgcagctgcctcagttcttagcgcagctgcatgaaagcggttacgatgctggcaaagccctgcagcgcctggtgaagaagcctgtg

SEQ ID NO: 328380 - DNA, 100 bp, Homo sapiens
agtccatatgtaaccaaatattatggatcctatctgaaggtatggcatttcaaatatagatacaaccattgaaggaacgtcagatgacctgactgttgta

SEQ ID NO: 328381 - DNA, 82 bp, Homo sapiens
gggagcgctacggccccaacgcccagctcaacattggcaatgtgctccctgtgggcaccatgcctgagggtacaatcgtgtg

SEQ ID NO: 328382 - DNA, 100 bp, Homo sapiens
cggagcctggcgggcgtgggaacccaggccccgccgaggcggccaggtaaacgccctgcagaagatatggaagaggaacaagcatttaaaagatctagaa

SEQ ID NO: 328383 - DNA, 50 bp, Homo sapiens
ccggattcacatctatactaagataatatcgtctactgcattatttttgg

SEQ ID NO: 328384 - DNA, 82 bp, Homo sapiens
caacctcagctttacaaaccctgaatttataactgagatattagaaatggctactccccagtcaattttcatctttgcaatc

SEQ ID NO: 328385 - DNA, 82 bp, Homo sapiens
tgttcctggggttactgtaaatgggaaggacaggcagagctaaacaaggtttttcttcccccagtccctcagctgctgctgc

SEQ ID NO: 328386 - DNA, 50 bp, Homo sapiens
ccgaggaccaggccggcgcagccatgagaccctgcagaagtacctgaagg

SEQ ID NO: 328387 - DNA, 100 bp, Homo sapiens
gttacattccagaggatgaggcgctgatgcttcgggatggacggcagcacgctggctcttctcctgaacttcctcgcctgcctggccagcttctgtgtgg

SEQ ID NO: 328388 - DNA, 75 bp, Homo sapiens
gagggacccacagggctgaaggaagctgccttgtacccacatctcccgccagggtcaaagaaggctcttccaaga

SEQ ID NO: 328389 - DNA, 74 bp, Homo sapiens
tcagctaccacaagttaattcaggagaactaccttctcaattctgtgcaaggggaattcaagcccaaactgtag

SEQ ID NO: 328390 - DNA, 95 bp, Homo sapiens
aactagtgaatatgatactaatgaagatgggtttttcagtacgtcccggaggacctccttcccgtctacaaagaaaaagtggtgccgcttgcaga

SEQ ID NO: 328391 - DNA, 75 bp, Homo sapiens
tgggtagcctctaggaagcgctagacacatgtctcctctgagcctccggcctccataagacccaaaacagatgac

SEQ ID NO: 328392 - DNA, 80 bp, Homo sapiens
cgccggggctgcgccgtccccagctcagctgcacatcattgactcctgggcccaactgtgaccgatttaaactgcacata

SEQ ID NO: 328393 - DNA, 74 bp, Homo sapiens
agacacagtttcttaaagagctggtggagcctgtgtcccgtttcttcgagtcatggctccgatcttcatcttga

SEQ ID NO: 328394 - DNA, 73 bp, Homo sapiens
tgcgctaccggaatgtcatccagcgagtgattagaaaaagcttgtggtgaaggggggcaaaaaaaagaagcaa

SEQ ID NO: 328395 - DNA, 98 bp, Homo sapiens
ccggcctcgcaaggcgcttcccctttccagagagccagaaagaaacggcgtacacagcgtgaccgcccagtgcgcgctgcgtgtgaccatcatcaccg

SEQ ID NO: 328396 - DNA, 98 bp, Homo sapiens
gaagactctgttatcatgaatcgttcagctgtagaccgcggcttcttcaggaacttaatgagctgagagagacagaagggggtactgttctcacagcc

SEQ ID NO: 328397 - DNA, 98 bp, Homo sapiens
tcggctgcgcgctgctggctgccctgctggccgcgccgggagcggcgctggccccaaggcgctgccctgcgcagggaggaaattctgtaccttctaaa

SEQ ID NO: 328398 - DNA, 100 bp, Homo sapiens
gatgtgcgactgcttccacatggtgctgcccacctggcccggaacccccggcagcgtcaatgcaaaatcatgctgccgtgttccgtgtgggaagcgtgtt

SEQ ID NO: 328399 - DNA, 80 bp, Homo sapiens
cgctactctctctttctggcctggaggctatccagcgtggcggtggaaatcgcaaaggcaaaagcaagaaatggcggcag

SEQ ID NO: 328400 - DNA, 102 bp, Homo sapiens
agaagtcacaagacaagggtcctaaaacaggatcagtaaagaaggaaaaagcagtaaagccagaggaagtgttctggacttggtgcctctttctgttatatg

SEQ ID NO: 328401 - DNA, 83 bp, Homo sapiens
agcagctggaagatggacgtactttgtctgactacaatattcaaaaggtgcaggtgatggtcctaccagtgtgtctgttgagg

SEQ ID NO: 328402 - DNA, 80 bp, Homo sapiens
aagactgtttaggctcctagcaaaattgggaacaatcaatgagaggccggaagctgcttatcatccagactttccaacag

SEQ ID NO: 328403 - DNA, 82 bp, Homo sapiens
cgtgttccctgccactgtcttgttccgaggcggccccagagagactctgacctgtttttgttggacacccgtgtagtatggg

SEQ ID NO: 328404 - DNA, 98 bp, Homo sapiens
agtcagcaagagtgacataggagaagtgattcttgtgggtggcatgactaggatgcccaaggtccatgcctcccgcagcaacaacatgggcatcgttg

SEQ ID NO: 328405 - DNA, 100 bp, Homo sapiens
ctcttcactgaggtgctggatcacaatgaatgtctaattatcacaggttgttgtatggctcggtcagaactttctgttaccagaagacactcacattcag

SEQ ID NO: 328406 - DNA, 90 bp, Homo sapiens
ccggcccccgcagcgggacccgggagctcttgtccctggcaaagcgaaagcgcagtgactctgaggagaaggagccgcctgtgagtcagc

SEQ ID NO: 328407 - DNA, 95 bp, Homo sapiens
acggacgaggagatcgaatctctgatgaaagacggcgacaagaacaacgacggccgcattgacttcgacggaatcaaggtctgtgagaagcgacc

SEQ ID NO: 328408 - DNA, 75 bp, Homo sapiens
aatggcttttaggaatggtagcttcctggggatggtatgctggatatacagattctacgggaaaatgtgggcccc

SEQ ID NO: 328409 - DNA, 75 bp, Homo sapiens
ctggaagatgacgctggcatggtcaagctggacctggaaggatggctaccaaggctccgaggaggatgtatccct

SEQ ID NO: 328410 - DNA, 90 bp, Homo sapiens
ggagatgctgttcatctatggccactacaaacaagcaactgtgggcgacataaatacaggttattcagcttctcaaggctggaaaagcga

SEQ ID NO: 328411 - DNA, 75 bp, Homo sapiens
cgtcatgctcctgtgccagaacgcacagaccttcaacctggagggctccctggcccgccaagctgccccctgtgt

SEQ ID NO: 328412 - DNA, 100 bp, Homo sapiens
gtggatgtcatcgagaagaacgagagcggtgaaatgacaatggatgctctgttggctcgattgaaacttctgaatccagatgaccttagagaagaaatcg

SEQ ID NO: 328413 - DNA, 100 bp, Homo sapiens
ttagaggcatttcgtgatccatggttgcgctcccgtgaagagcgagtctagagaaggaatccgaagcttgccttgcgccatggactggcagccagacgag

SEQ ID NO: 328414 - DNA, 101 bp, Homo sapiens
actacgtggagcggaagaacagcctgaagaagggctccctcgtgaagaacctgaaggacacactaggtgagcgagtgctgtgctttcatgggcctcttctt

SEQ ID NO: 328415 - DNA, 100 bp, Homo sapiens
gccccagaaccggtcgaaaaccgtgtatgagggattcatctcggctcaggatttgaatttgttgaaatgagcagtcgtaaatcaaagagtaacagcttaa

SEQ ID NO: 328416 - DNA, 100 bp, Homo sapiens
ggtcactgcccaggaggcgccggggaactgcagggcgctcgaggccagagctgtaggtaaaacttgcctactgatcagttacacaaccaatgcatttcct

SEQ ID NO: 328417 - DNA, 97 bp, Homo sapiens
agaggactccaaaggaaggactggtcatctctttcatatctcaaaaccatggctcagattgggagagtcatattaataccaaatggtcagcacctca

SEQ ID NO: 328418 - DNA, 83 bp, Homo sapiens
aacctggagaacgccaagcgcttcgccatcgacatagggggggccctcagcctcttggccttgaacgggctgttcatcttgat

SEQ ID NO: 328419 - DNA, 98 bp, Homo sapiens
attccaagattctgccaaagctttcccttcttcataactgatcaccctttccatatgcagctcaaatcccagccttctatatggacacaagtcattta

SEQ ID NO: 328420 - DNA, 89 bp, Homo sapiens
ccttcggacacaatctactcctacgtcaggccagagaggaccagttgctcttctgtgatgactgcgatcgtggctaccacatgtactgt

SEQ ID NO: 328421 - DNA, 75 bp, Homo sapiens
agccaagctcgtggcctgcctctgcgtgcccaaaacagagtggagtacgagaaaagggtccgagcacaagccaag

SEQ ID NO: 328422 - DNA, 82 bp, Homo sapiens
ctcaaagctgtgaacgtggacaaggtcgtcgttgctgatagtccaactccaccgccaccacctccaccagatgacattccca

SEQ ID NO: 328423 - DNA, 83 bp, Homo sapiens
attggatatggagcctttggtgttgtctgaattcaattcgtcataatctgtccctacacagcaagttcattcgtgtgcagaat

SEQ ID NO: 328424 - DNA, 100 bp, Homo sapiens
cagctattaaaaccagggctccacagttaggaggtaaagcagctgagcagccattttcagatttaccccttctcattgaggaaaccaaactcagattgac

SEQ ID NO: 328425 - DNA, 100 bp, Homo sapiens
ggggcctgagcattctggtgtccctgctagccgactgcaatgaccaccagatgagggaccagagcggcgttcaggggactcccagcctcgctggaggtgc

SEQ ID NO: 328426 - DNA, 100 bp, Homo sapiens
ctgcccccaccctctggctggcatcgtggcgttgagctgctggctgcctctgcaccgggccttcccccagggcttttgttgtaacaccctgactttaaaa

SEQ ID NO: 328427 - DNA, 75 bp, Homo sapiens
cgccacaggccaggatgggtggaagtgaaggagttgaacaaattgaagcagggacaccaggccgactcagagtag

SEQ ID NO: 328428 - DNA, 73 bp, Homo sapiens
ttttcagtggtgccaagttcatatcctgctggtttaacaggttatcaatactctggctgaccatcatcatcgt

SEQ ID NO: 328429 - DNA, 82 bp, Homo sapiens
cgtcagcaggcatcgcccaccctgtccccgctgtcacccatcactcagccgcggcgagtcctttgcacatgttggcaacaca

SEQ ID NO: 328430 - DNA, 90 bp, Homo sapiens
ccagcgaccactgcagcctgcggacgaggccgggacttggccgagcggatcctaataaggggaaaatgaaagcataacccctactgtaga

SEQ ID NO: 328431 - DNA, 75 bp, Homo sapiens
acaactatagaagatcgtatagtcctagaaaattgttatttcaggagaatacttacagtgaaggtctttggaaag

SEQ ID NO: 328432 - DNA, 99 bp, Homo sapiens
gactgggctcttacagcggccccacctcggtctcccgccagcgcgtcgaaagcctgaggaaaaagcggccgcatgctgcagttggagaagaaacttgaa

SEQ ID NO: 328433 - DNA, 82 bp, Homo sapiens
tgtataccaactgattgggtaaaggttggaagtgctgcaggtggagaaattttcagcctgtgtttacctgagttggctgaaa

SEQ ID NO: 328434 - DNA, 80 bp, Homo sapiens
cgatatggaagaggagggcaagaagggcaagaaggaactgtggctgcaccatctgtcttcatcttcccgccatctgatga

SEQ ID NO: 328435 - DNA, 95 bp, Homo sapiens
agatgaatggaaagaattggagcaaaaagaggttgattacagcggcctcagggttcaggcaatgcaaataagtgtcccagaagcttttgttgaca

SEQ ID NO: 328436 - DNA, 51 bp, Homo sapiens
gacatgccagcccagactttcatgtttttgccaatccagaagactgtgtag

SEQ ID NO: 328437 - DNA, 99 bp, Homo sapiens
cagagccaggcacaaggatgaacattctgccgaagagaacaagacgtgtgaagactcaggtctatgttaacaatgaatgggcaaccagtgttggggaag

SEQ ID NO: 328438 - DNA, 100 bp, Homo sapiens
tcagaacagaggctcagcagtggcccggcaggcatttataagacgctgtttggcatatcgaaaagaagatcgatttgatgtgcaccagctggcaaatgac

SEQ ID NO: 328439 - DNA, 100 bp, Homo sapiens
acagttccggaaagcacagccagggggatatgagactttctactcggaatatcctgagtgttgcgtggatgtaaaacccatttcacaagagaagattgag

SEQ ID NO: 328440 - DNA, 100 bp, Homo sapiens
gttacatgtatggagaatggctggtctcctactcccagatgcatccgtgtcagagcctcacagtctactcagagaaaaataaaagaaggcaaaatgagtc

SEQ ID NO: 328441 - DNA, 90 bp, Homo sapiens
gccacaatgcctgatggaaaactgtacaacttttgcaattccagttgtgtggctaaatttcagtttgcctatctggggcgcctggctcac

SEQ ID NO: 328442 - DNA, 75 bp, Homo sapiens
ggattccaagtaactcttatttggcctgggctctaacatcttccgcctgctagacagcctgcgggccctgtcagg

SEQ ID NO: 328443 - DNA, 76 bp, Homo sapiens
tgggcgtcttcacccccaccattgaggcccgcacagcccagtccaatattgatgatgttaagaagttcaaaccggg

SEQ ID NO: 328444 - DNA, 51 bp, Homo sapiens
caccgagaagtccccgaccgactgatgtcaaaatccacaggcaacttcctc

SEQ ID NO: 328445 - DNA, 82 bp, Homo sapiens
cgtccatccatttcgtggttcacccgctgccgggcaccgaggaccagctcaatgacaggattcactccttctccagttgcac

SEQ ID NO: 328446 - DNA, 50 bp, Homo sapiens
cttcaagggggaggagtgtccagcagcctatatatgcaaacagatttgca

SEQ ID NO: 328447 - DNA, 138 bp, Homo sapiens
tttgtaaatcgtcccgataagaagaaaatacttttcttcaatgataagagctgtcagttttctgtggatgaagggacagagcagaatgggctgatatagatccggtgccgcagaatgatggccccaatcccgtggtcc

SEQ ID NO: 328448 - DNA, 50 bp, Homo sapiens
ctcttgttggcaaccagcaggggcaattgaaggaacagactaaaaatcgt

SEQ ID NO: 328449 - DNA, 75 bp, Homo sapiens
cagaagttcttccttgaagaaatacagcttggtgaagagttactagctcaagggttggaaatcgtgccaaatggg

SEQ ID NO: 328450 - DNA, 75 bp, Homo sapiens
cttcgcagtctggaaagctttaggagttcacagtagctcaaatgatacttttcccacagcaatgcacattgctgc

SEQ ID NO: 328451 - DNA, 75 bp, Homo sapiens
tggtgaagacagctagtgagatggaacgggtccgtgctactatatcggggccacagatgatgcagccaccaaaat

SEQ ID NO: 328452 - DNA, 100 bp, Homo sapiens
caacttctgcctcgggccctgcccctacatttggagcctggacacgcagtacagcaagtcctattttgtaacggattatgatccaaccattgaagattct

SEQ ID NO: 328453 - DNA, 75 bp, Homo sapiens
aaagcagtgacggaggagcttgtaccaccgacttaattcagtgcacaaatgagatgaatgtgaacatcccacagt

SEQ ID NO: 328454 - DNA, 101 bp, Homo sapiens
ctcttccccaaaggtcttgggctggcacgaagagctgcccggccagagcatcccggccaggtacaccagtactatagctgtctcccagaagagaaagtccc

SEQ ID NO: 328455 - DNA, 51 bp, Homo sapiens
ggatattctcttctgtgctgtcaaggagtccctgtgaagcaggaagagtga

SEQ ID NO: 328456 - DNA, 50 bp, Homo sapiens
gcaagaagcatgctggattgtaatcaggtttggtcaagcctcctctaaaa

SEQ ID NO: 328457 - DNA, 100 bp, Homo sapiens
cccatctgaagggaggaaatagtggcaggtgacagtctgcatgtgcagttttcaggaaagaatacccacctcatgtccaaaaagttgaaattaatcctgt

SEQ ID NO: 328458 - DNA, 100 bp, Homo sapiens
tggttcctgctgtggttttgatcatgttgttaccctcggacgtagcccggcttgtattggatcttcaaagctgctgcgggcattctatgtccccttcctg

SEQ ID NO: 328459 - DNA, 99 bp, Homo sapiens
ctgctcgggccgccgggcgcggggctgcggccgcgtcccggaggcgccgccagcacagccaggctgattcaccccaagagtggccgttcctaccacgag

SEQ ID NO: 328460 - DNA, 100 bp, Homo sapiens
ggcttcctgagcgtcccagtacactgacagaggtgtgatgaatgcagactctgctaccattttggctgtttggatcctcctttgaaaaagtctcctaaac

SEQ ID NO: 328461 - DNA, 75 bp, Homo sapiens
ttatagctctgtatgagaaggacaacacctacttaggtgcgggccagtgctattgcccaggacgcggaccagaac

SEQ ID NO: 328462 - DNA, 75 bp, Homo sapiens
tcaacacctccctacaaggaccttcctcccaagccagctgctacaggagctgagagaccctaccctcactttccg

SEQ ID NO: 328463 - DNA, 89 bp, Homo sapiens
gaaaatatccacatgatgattgattcaggaggaatcagatatgtggaaaataagagaactggaaaaacagatggaagatgcttaccggg

SEQ ID NO: 328464 - DNA, 82 bp, Homo sapiens
tgagtcgaaggtctcgtagagcttccttagtggactgggtggttatggatcaggagacagtgaagatgagaggagtgacaga

SEQ ID NO: 328465 - DNA, 101 bp, Homo sapiens
gttcaccgtgtacaagggcgccgaggtggcgcacttcatgaacgccctgcgctacgatgccatgttgatcccgctcttgaactctgtagactctgataatt

SEQ ID NO: 328466 - DNA, 75 bp, Homo sapiens
tctagatctccgtcccccaggagactgattttgcacgatttagcggaacaaatgtggaaactgactttgtagagg

SEQ ID NO: 328467 - DNA, 100 bp, Homo sapiens
ggatgtcctggtgttggatgaggcagacagacttctggacatggggtttgaggcaagggaaccggtaattgtgcattctcaaaatgggaaccagattctt

SEQ ID NO: 328468 - DNA, 50 bp, Homo sapiens
gtccgctgagcggggcgacccgaggttattaacacggggatcaaagtctg

SEQ ID NO: 328469 - DNA, 100 bp, Homo sapiens
ctaaggaaactccaaggcttgccttcaagaataactgcgaactacttgaagggaaaaggccgaggcatcagcgtgtgaagaccgcaaagacgatcccgag

SEQ ID NO: 328470 - DNA, 50 bp, Homo sapiens
ctcgcctcccggccgagctgacgaggtgctgtttgatccctgtcggactt

SEQ ID NO: 328471 - DNA, 100 bp, Homo sapiens
ctgaatccgcctgccccagcagcggcctgatctgggttccgctgattcctttcgtaaccgcaccacacccgagatatgaggccccaggattcctggcgag

SEQ ID NO: 328472 - DNA, 75 bp, Homo sapiens
atgggagcagagctcagacatgttctcaccacccttgtgctgtgctgtggctttcattgagaagctagacgccca

SEQ ID NO: 328473 - DNA, 100 bp, Homo sapiens
caaaaagctaccccggctgaagaagtggaagactccaatggagccagcaccgctctttgaccttgccatgcttgccttagatagtccagagagtggctgg

SEQ ID NO: 328474 - DNA, 88 bp, Homo sapiens
tccagattctcctgcagttataccagtgggggtgattggcgaggacaacgtggcagtcccctcacacctttataaggtaatcctggcc

SEQ ID NO: 328475 - DNA, 98 bp, Homo sapiens
aaaaaggatgaatttctagctgcattggaactagtgacagttgatgcttcagatgatgaatttgagaatcttagaattaaaggccctaatgctgtaca

SEQ ID NO: 328476 - DNA, 74 bp, Homo sapiens
agggctcgcgggtgaccgaaaggatcatgaactagtgacctggaaaggcatgtggagaccccaaggcaaaacca

SEQ ID NO: 328477 - DNA, 78 bp, Homo sapiens
cccgcgaggagccgccgcgcgcccgcgccctccgcgcgacgccaggaagctcttcgtgggcggtcttgactggagcac

SEQ ID NO: 328478 - DNA, 51 bp, Homo sapiens
gcactgctacaggactctactatggagtgctgcttttgacacaaaaacggg

SEQ ID NO: 328479 - DNA, 75 bp, Homo sapiens
tcttcgacttgagcgaagttttatgcaagattgcctcggatgatggcctgcgactgacagtctctcagctcttct

SEQ ID NO: 328480 - DNA, 80 bp, Homo sapiens
cgctggagaggggctcggcgcccggcggggactgcaggaggatacgaagcgttttcggcttcctgcccggagctgtgcag

SEQ ID NO: 328481 - DNA, 90 bp, Homo sapiens
agagagagcttggttaacttgggagaaagtttcatctgtggatggagtattgataacaacgaacttgatgcaagtgataggtttgccaag

SEQ ID NO: 328482 - DNA, 90 bp, Homo sapiens
gaagaacccatcgggcagctacacatcttgaaagagaagctcttcctgtgagcaacacagtcactcctggcggcaaaccaaacaaaacca

SEQ ID NO: 328483 - DNA, 95 bp, Homo sapiens
gcaacgtgttggaccttccggagcttctcagaagacagagggttttcttttgagctgcactgggtgttcaacagccatcactccttggagcatct

SEQ ID NO: 328484 - DNA, 82 bp, Homo sapiens
cggcgccggcgccgcggcctcttcggctgcggaccctgccattccggaggagatgattgtggaaactgagaagtgcagcatt

SEQ ID NO: 328485 - DNA, 114 bp, Homo sapiens
gcgcagtacgtttctccagagctgctcacggagaagtccgcctgtaagagatgataccacgagtcaacccaaaagttgctggggagaagttgctctttaatgaattgcatctca

SEQ ID NO: 328486 - DNA, 75 bp, Homo sapiens
gttgtcctacaatcctttgtggcttcgaattggtctagagaccatgaaacccttgggcacgccccttcagaagct

SEQ ID NO: 328487 - DNA, 82 bp, Homo sapiens
agtatttctacaccagtggcaagtgctccaacccagcagtcgtgctgggagtcctccgtcagcatcagctccggctccggtg

SEQ ID NO: 328488 - DNA, 100 bp, Homo sapiens
taatgatgagactattggatttgaggatattcttaatgcacaaccagtgtctctgaagaagatgtctcaagtagatattctcgaacagatagaagtgggt

SEQ ID NO: 328489 - DNA, 98 bp, Homo sapiens
ggctccgttaccttccaccaccccgtgcttcccgctcgatcgatccagccctatcagatccccatcacaggatatgatgatgcctatagatttggggg

SEQ ID NO: 328490 - DNA, 100 bp, Homo sapiens
ctgactttgctgtccagccagctgtaaagccttgggctcccttgcaggattcagaagtgtatttagcatctctagatccagctccaggtcccacaggggc

SEQ ID NO: 328491 - DNA, 80 bp, Homo sapiens
gccgcagagtcccaccgccacaggcccaacagcgccctggaatcctgctccttcgcccgccacagtctgctgcagacgct

SEQ ID NO: 328492 - DNA, 100 bp, Homo sapiens
gcttaatatcattaagaaggaaccggggcagaaactcctgttcaggtggggaagattctgatcaccagtccttcctcatcaaagtggatggtactggagc

SEQ ID NO: 328493 - DNA, 84 bp, Homo sapiens
agattcgcagtggtcgcttcttctccttgcacccccccaggcagcagcagcagttttcatctctggatgacaagccccagttcc

SEQ ID NO: 328494 - DNA, 98 bp, Homo sapiens
acgcatctcggcctcctctgccaccagggagctggacgagctgatggcttcgctgtcggatttcaagggccttcctccggatgctcttccccgagaag

SEQ ID NO: 328495 - DNA, 80 bp, Homo sapiens
tctcttcgtcaccttcgacctgctcttcatctccctgctctggatcatcgaactgaatactgtgccctgtccacggtgcc

SEQ ID NO: 328496 - DNA, 80 bp, Homo sapiens
cttggcgccaccgcctcatgcactgtgtaggttctgaatgatgactgacgcgggtttgggtgatacccctcacagcccct

SEQ ID NO: 328497 - DNA, 76 bp, Homo sapiens
aacggtcccgggatcggaagaaaaaggttcagaattttcacagctgtattcaggtaactgaagattttgtgtctcc

SEQ ID NO: 328498 - DNA, 82 bp, Homo sapiens
gaacatccacagaatagacctgaagacaaaaatccagaagtacaagcagtctgaattcagaaggagctggcggacatcactt

SEQ ID NO: 328499 - DNA, 95 bp, Homo sapiens
tcggaggattgctcaacaaccatgctgggcatctggaccctcctacctctggtggatccgatattgaatatctggacttctataagcctgtcgtg

SEQ ID NO: 328500 - DNA, 74 bp, Homo sapiens
tgtggcaggggtccctatgatccaacaccatattgaagcctgtgcccaggaggtcacaagccccaaagtggacg

SEQ ID NO: 328501 - DNA, 74 bp, Homo sapiens
ttgcccgagaagaaggatgtccgggagctggtggaaaagtcaggctgaccaactgactgaagagcagattgcag

SEQ ID NO: 328502 - DNA, 82 bp, Homo sapiens
tctcctctggccgagtccttgcaagaagtgaattacccgaccctgttgactatattgtggagtatgactatgatgctgtaca

SEQ ID NO: 328503 - DNA, 75 bp, Homo sapiens
agaaacctgatggccttatcaatgaagctactagatcactgtcgtcttcctgaaagatgagaagtaccattcttt

SEQ ID NO: 328504 - DNA, 76 bp, Homo sapiens
agcagcgctgccgccgcgtcctcagccaccgctccctcttcccacggatagaatttttgcggcatttgaagagctt

SEQ ID NO: 328505 - DNA, 74 bp, Homo sapiens
agggagctggaaattcctgacgttcattgatctgcatcctggtggggaagaagttttaagggaacaagctggag

SEQ ID NO: 328506 - DNA, 100 bp, Homo sapiens
tcagcaggagagaagggtgaaccaggccccatggacgccagcgtggaggaggagggtgtgcggcgtgcactggactttgccgtcggcgagtacaacaaag

SEQ ID NO: 328507 - DNA, 74 bp, Homo sapiens
cggtggccgtgctcgtcgggcccccttcgggagcccgcggcgccatggctcacgtcggctcccgcaagcgctcg

SEQ ID NO: 328508 - DNA, 76 bp, Homo sapiens
cttctgcccaacgacatcgatggcctggagaaggccattctcaagcacaacctgggtgaggctctgtcattgctta

SEQ ID NO: 328509 - DNA, 90 bp, Homo sapiens
ctttgggaagagcgccacgcggtgggcgaggggatgccctagtaaattcgcagatatatttttgccatcatggatcagtttggagatata

SEQ ID NO: 328510 - DNA, 96 bp, Homo sapiens
tactctccagctagaacaagaagtgagaaaccaagatagattcatctcgacactgaaattacaggtctctaattaacagaagatggcaaagcccag

SEQ ID NO: 328511 - DNA, 100 bp, Homo sapiens
attttactgtcaagacatttcttcggcattctgcaacaggttcagaggtccaaagaggtgacattttatggatagccatggcagggactcatcagatatg

SEQ ID NO: 328512 - DNA, 75 bp, Homo sapiens
gcggcgcagcggcggcagcggagagcgagagaggggagcagtacctggagtagaacagaaaaattattatgtctg

SEQ ID NO: 328513 - DNA, 101 bp, Homo sapiens
gaggccggccggtgccagcacctttcggcttctgagacggcggcagcagcggcattcaggttccagaatctcagcttttacctggacagaggtttcaaact

SEQ ID NO: 328514 - DNA, 97 bp, Homo sapiens
aagaccaaggacaaccctggcagcatcgggaaggaatccctttgcccacgtccagctgaagccgacagtgaccaacgacaggtctgcccccctcctc

SEQ ID NO: 328515 - DNA, 83 bp, Homo sapiens
ccccaccgccgccccctccggcgtgttcatgcccccgggggtgagcttgtcggccacagactgctacattgtgcatgagatct

SEQ ID NO: 328516 - DNA, 100 bp, Homo sapiens
acctggaggaagcccatcgagagaagagcaaaggagactgcaccatccgtactatttggagttttcctcgtcttactggatgtcactctcgtccttgccg

SEQ ID NO: 328517 - DNA, 75 bp, Homo sapiens
agaatatttaatggaaaatcgcttggttaaaacctgacacttttaacagtaattcgccaaaatgacgaacacaaa

SEQ ID NO: 328518 - DNA, 75 bp, Homo sapiens
ggtcagccatggttgtgtcagcaaaattcttggcagctagaaaccagtgcctgaaagaaactccaattaaaatac

SEQ ID NO: 328519 - DNA, 82 bp, Homo sapiens
gggacagcacctcatcccctggatgggggaccacaagatcctcatcgacagagtccctgcaggaagcatcacccaggctggc

SEQ ID NO: 328520 - DNA, 51 bp, Homo sapiens
gacctgcccgcctgcggctgctccggggatgcttgaagatggaaagaaatt

SEQ ID NO: 328521 - DNA, 83 bp, Homo sapiens
tcctgtgatccatcactcggattggcaggacctggggccaaaagccaaggctgctctttggcgtaaattgcaatcgattaggg

SEQ ID NO: 328522 - DNA, 75 bp, Homo sapiens
tcacactcagcagacctcatagctgttacaccaaatgtgaaggagctcttagattctgacagtgataaaccctgc

SEQ ID NO: 328523 - DNA, 75 bp, Homo sapiens
caactctttgatgtactactataatgggaaagcgaagcctccccagctttctgaggatgatatctggctaaaaag

SEQ ID NO: 328524 - DNA, 98 bp, Homo sapiens
cacctcctcgccagcagccgtccggagccagccaacgagcgcttgacaaaagtaagctgaagccaggaacaagagttgctttggatatgactacacta

SEQ ID NO: 328525 - DNA, 100 bp, Homo sapiens
ccggcccccgcctgcctccgccggctacagcgggaagagcggttcaaaccttgtactactcagctgatcacaagctgcttgatgggaacctactagatgg

SEQ ID NO: 328526 - DNA, 50 bp, Homo sapiens
agtatatgcaggaaattttgtggaatcaacattggcctgtgcccgagcgt

SEQ ID NO: 328527 - DNA, 74 bp, Homo sapiens
caaagataaacctactccccacaagaactggcctttaatgtggttggcatcaactaccagtcccccacagtggt

SEQ ID NO: 328528 - DNA, 101 bp, Homo sapiens
actgaccgttgtgttgtggaagaatggttatcagaattcaagcaagatgagaagatgaagtgaatttatggattctggtttttctgaattttcaaagcata

SEQ ID NO: 328529 - DNA, 100 bp, Homo sapiens
caaccgcccattcagtctacggctggggccgtcccagttcgcaatgagaaagaataatccagaatggctactctgatctatgttgataaggaaaatggag

SEQ ID NO: 328530 - DNA, 100 bp, Homo sapiens
ctacaatttttagtggagttgccatctatgttaatggatacacagttatggctgattgtcctcacacaattggtgttgaatttggtacaagaataatcga

SEQ ID NO: 328531 - DNA, 98 bp, Homo sapiens
ggtgtatctctgctcctctccagaaggcaccaccacagccgcccacttctggaaggttccatcccctgcagctcctcctccctatatgccaccacagc

SEQ ID NO: 328532 - DNA, 88 bp, Homo sapiens
agcactcctgatgcacgggacgagggagcggcacgagcaaaggccctgaaacaggagggagcgcgggaaagcaggcaggatgggagag

SEQ ID NO: 328533 - DNA, 83 bp, Homo sapiens
gatcccttcagttcaaaacataatgtgattgaccccaagactgcttctgagacagaaacagatatctgtgctgaatgggagat

SEQ ID NO: 328534 - DNA, 98 bp, Homo sapiens
ggccaacgcccaggatccgcaagctgcgcgcccacgaggctgctttgaatgctgcatcaagtgtctgggaggagtcccctacgcctccctggtggcca

SEQ ID NO: 328535 - DNA, 100 bp, Homo sapiens
caacgaggccgagctgctgcggcgccgcaactttaaagtcatgatctaccaggaattgaatgatctggcacgggaccctccagcacagtgttcagcaggt

SEQ ID NO: 328536 - DNA, 75 bp, Homo sapiens
ctgcccctccacatctgtgggatatctcatcagatacactctgtgcagttttagagagagacacactcagtattc

SEQ ID NO: 328537 - DNA, 90 bp, Homo sapiens
cccaaaaaacaaccatggcataaaatggagctacggattgaagataaaactttccaagtccttggtaatctttacagcgagggagactgc

SEQ ID NO: 328538 - DNA, 83 bp, Homo sapiens
cctgccgtccttctccactttcgccagcccgtgccgcgagcgcggcctgcaggagaggctgggaggcggcagaatgcagccag

SEQ ID NO: 328539 - DNA, 98 bp, Homo sapiens
aagacatgacttcagtggatgcagctatacttataacaaggtggtttgtgatgaaaatggttccaagggctatggatttgtacactttgagacgcagg

SEQ ID NO: 328540 - DNA, 100 bp, Homo sapiens
ccttctccaccagaatccagctcacgctgcttggagggacggtttgaagatgaggagctgcagcagattcttgatgatatccagacaaagcgcagctttc

SEQ ID NO: 328541 - DNA, 50 bp, Homo sapiens
gcgtccgcttccagctttgcgcagtgaatgaactcattcttaaacagaag

SEQ ID NO: 328542 - DNA, 75 bp, Homo sapiens
tcccaacccagaatggtcagaagtatcagaggaagggattgcggtgggccatatctactacttcctggaggacgt

SEQ ID NO: 328543 - DNA, 87 bp, Homo sapiens
ggacggggaccagcagctgtcgccgccgctctcagctactgatctacttcttgcctggaatcccatttgtttggggttggtagaagg

SEQ ID NO: 328544 - DNA, 85 bp, Homo sapiens
cagggaactcaaacagcagatgcagattgattataccggaacagagccttccagtccctgtaataaatgtttatctccggatgtg

SEQ ID NO: 328545 - DNA, 99 bp, Homo sapiens
caccgaattagaatcgcgggaaaatagagaagagtttgtttgaaggtctcgcgagatcgatacaaaattggacagctgtacatgatcagcaaacacagc

SEQ ID NO: 328546 - DNA, 83 bp, Homo sapiens
aacaccacaataatccacagccaagaaaaggtggacaagtcctattttcaagagaagatgacttttaacagttttgaaggatc

SEQ ID NO: 328547 - DNA, 98 bp, Homo sapiens
ctaaagagcaagcctaactcaagccattggcacacagttactctttcaacctgatcagaacgcaccaccaattcgtctccgacacagacgatcacgct

SEQ ID NO: 328548 - DNA, 134 bp, Homo sapiens
gtttcgggccagcgacccgctgctcagcgtcctcatgtggggggtaaaccactcggtcactcctggaagcaaggcggctctagctaatttatgtattggagatgtaatcacagccattgatggggaaaatacta

SEQ ID NO: 328549 - DNA, 100 bp, Homo sapiens
cggaagctgagtttttatcccctccacgttcctctatccagttcccgcacccttccccccaggccccattcttcaaggcttcagagcagcgctcctccgg

SEQ ID NO: 328550 - DNA, 75 bp, Homo sapiens
ctggtgtctatcaaagccatcggatggatgagcagtcacacagactttgataaggctcaattacttgaaatagcc

SEQ ID NO: 328551 - DNA, 90 bp, Homo sapiens
gcagctcatcacccagtacgagcgggagaaggcgctgcgcaagcacgctgaggagattggcccccgccgcatccacacagtccgtgtgcg

SEQ ID NO: 328552 - DNA, 75 bp, Homo sapiens
gggatcctctgtacgcccgttcactgataaaataccatgaggagtttgagaagagccgcatgggccctagcgggg

SEQ ID NO: 328553 - DNA, 100 bp, Homo sapiens
tgataagaagcacctggatgagacatttgctacagcatcccacattaagtcaacgcatactggagcatagtgaaagagtctattttgaagcttcaaactt

SEQ ID NO: 328554 - DNA, 75 bp, Homo sapiens
catcaggcatcctgactcagatgcagtaggacaagggaatgaaagctactggttgattttaaagtgcctgggcct

SEQ ID NO: 328555 - DNA, 50 bp, Homo sapiens
gtgcgtctgaagcctacaagaaagataagaaacctgatcgggaagaaatt

SEQ ID NO: 328556 - DNA, 75 bp, Homo sapiens
ccaggctggtcagtgtggcaaccagatcggtgccaagggcacaaatagtttacatttcatggaggcaagtcctgg

SEQ ID NO: 328557 - DNA, 100 bp, Homo sapiens
gctttgtggagggtacttcattgatgccacaaccataatagaatgtctacattcctttgaaaatgacccacatttcatcatttatctaccaaaaagccaa

SEQ ID NO: 328558 - DNA, 82 bp, Homo sapiens
agacctcgtaattacattctctcggccagcgcctccgcggccagaagcggactcctagaagaggggagcagcaaggatggaa

SEQ ID NO: 328559 - DNA, 97 bp, Homo sapiens
tcccaccttagcctcctaagtagctgggaccacagaagagcatagctgagagcaggattctgcctctcatgacaattggcatgcacttatcccaagc

SEQ ID NO: 328560 - DNA, 58 bp, Homo sapiens
attgacttggcaagggcttattgttcctgaggtgagtgcctttggggaagacggcgag

SEQ ID NO: 328561 - DNA, 100 bp, Homo sapiens
ctcatcggaaacatggcactgttgcctatcagaagtcaattcaaaggacctgcccccagagagattgcaggcagaggcaccaaggctggcagaatatcaa

SEQ ID NO: 328562 - DNA, 80 bp, Homo sapiens
ctttaaactacacaaaagtggaacagctttgttcaggcctttccccctggtgctcttcatcctttaccaaagagacaagc

SEQ ID NO: 328563 - DNA, 100 bp, Homo sapiens
ccgacgtggaggcagccgtcaacagcctggtcaatttgtacctgcaggcctcctacacctacctctctctgggctaatttcaggcctggttcctatgtat

SEQ ID NO: 328564 - DNA, 75 bp, Homo sapiens
gccgggagcgagctgggagggagccgcgcgcctttgtgcgcgcgccgagcatgcttttcacttccactgcatctc

SEQ ID NO: 328565 - DNA, 71 bp, Homo sapiens
gctggaaaaatttgggacaatatggcttccagacagttccagtccattctgcaagagaggcaatcactccc

SEQ ID NO: 328566 - DNA, 75 bp, Homo sapiens
gctccttatggcaaccctaagaacatggcctacacgggactcagtggcctttgaggatgtggctgtgaacttcac

SEQ ID NO: 328567 - DNA, 136 bp, Homo sapiens
aagaggattggaggtgtcagtgttaaaggaacctctacaacgaaggtgaagccacggaagataagacaattgtggcaattaataaagacccagaagctccaattttccaagtggcagattatggaatagttgcaga

SEQ ID NO: 328568 - DNA, 74 bp, Homo sapiens
accttcaaggccaaactatgcaggaacacctgctgaaggaagggttggcgtggctggacttacaggccccaggg

SEQ ID NO: 328569 - DNA, 75 bp, Homo sapiens
cagcaagtgctgcagcaagccacaggtgtacactaccagaagatcatccaccgtgacatcaaaccttccaacctc

SEQ ID NO: 328570 - DNA, 82 bp, Homo sapiens
gtctctctgctgcggcgcggggaccgctgtgctctcggtacaccaggggttggaaaaaccacactaggcaaagaacttgcgt

SEQ ID NO: 328571 - DNA, 101 bp, Homo sapiens
gagaatatgcagagcgacttgcgcgccttgtcactggagtgcaagaagaaattcccacctgtcaaagagtgtgaaaaactcaaattactgtcttccatcat

SEQ ID NO: 328572 - DNA, 75 bp, Homo sapiens
aaagggctatgaggcgatacttggaacggggtgaggtacccaagatattgtatttggagaagtagatcggtgagc

SEQ ID NO: 328573 - DNA, 82 bp, Homo sapiens
gagaacattacagcagatcaagaaatccagctcaaacttgggaagatccccatgaaaaagataagagcacgaactgctttgg

SEQ ID NO: 328574 - DNA, 109 bp, Homo sapiens
gagggaagcgtctccgttgggtccggccgctctgcgggactctgaggaaaagctcgcaccagacccaacatgagtgaagtttcctgcaagaaacgggacgactatttgg

SEQ ID NO: 328575 - DNA, 50 bp, Homo sapiens
agcggagagcgagagaggggagcagagatctattcgatcttttgctaatg

SEQ ID NO: 328576 - DNA, 74 bp, Homo sapiens
gaattttcgtatacgtggattctagaggggtgacagcgaaacgacttcctgatccatttgctaaggtggtggtt

SEQ ID NO: 328577 - DNA, 100 bp, Homo sapiens
tcccagaacccgccaatgctggggaacggaaaatgagggagttcaactctggttataggttgagtcctcaaacattaactactattgttaaacgttatag

SEQ ID NO: 328578 - DNA, 75 bp, Homo sapiens
ttctggaagctactactacgtggtgcttggaaaggcagcaaatatgaagtctatggaccctgcctcaggttattc

SEQ ID NO: 328579 - DNA, 87 bp, Homo sapiens
caccaccatctccatcacccaccaacaacaccacaataatccacagccaaggacacatgttcaaagagcataattaactttttaaaa

SEQ ID NO: 328580 - DNA, 50 bp, Homo sapiens
acaaggaattacataacatcaaacgtgggcaaggggagagccagttgcgc

SEQ ID NO: 328581 - DNA, 75 bp, Homo sapiens
gctttcatgagcacaggcatcagtcaggcagatgtttgtcgactggaatggtaagactttgaccccgacgcaggc

SEQ ID NO: 328582 - DNA, 50 bp, Homo sapiens
cccaagcccgctgagcaggatgaggagttcgcagtatgtgcagtgcgtgg

SEQ ID NO: 328583 - DNA, 100 bp, Homo sapiens
atggtgctgacaggtgctgccttctttcacaaggagttttttgagaaccctgcttttcgtcccgatgggctgaaactctatcctaccctggtgattcgtg

SEQ ID NO: 328584 - DNA, 100 bp, Homo sapiens
caaagatactaaaaatgcccatgtatagaaactatcatgccacactgatatgcattcaagatggttacctttccctgctgacagaaactggtgaagttcg

SEQ ID NO: 328585 - DNA, 100 bp, Homo sapiens
attgagtggtggtagattgaagaatcttgctctgtcgcccaggctggagtacagtgatgtgatcttggttcactgcaacctctgcctcctgagttcaagc

SEQ ID NO: 328586 - DNA, 76 bp, Homo sapiens
agctgctcggacagatgaagctccccaaggagctgcaggtgactgtatctgaattttgcagctgcagaatgtgtag

SEQ ID NO: 328587 - DNA, 97 bp, Homo sapiens
tgggagttcagtcaggacgtctacctgtccaccattgtgaccgagctcttggagcagtcggagtggcagccaacaaacgtggatgggaaggggtacc

SEQ ID NO: 328588 - DNA, 90 bp, Homo sapiens
gcgcgctgcccgaggggagcaaggacaggagtagatcccataatagatcacgttcaagacagaaagacagacgtagatctaagagcccac

SEQ ID NO: 328589 - DNA, 101 bp, Homo sapiens
tcagtttcaggcatgaccatgtgctatgcctgtaacaagagcatcacagccaaggaagccctcatctgcccaaaactgagtccaggaacacctgccttgtt

SEQ ID NO: 328590 - DNA, 100 bp, Homo sapiens
ttagtagagggcaataaatgccacatgagatgatcacctcagcagaaaactctggcaatcctttggtccagcaaggtggacagccactcatcctgaccca

SEQ ID NO: 328591 - DNA, 90 bp, Homo sapiens
tgtggatgccagcttcttcttggggaaggtgtgtttcctcgccacaggtgactgaggctgatgtgaatccaaaggcctatccccttgccg

SEQ ID NO: 328592 - DNA, 100 bp, Homo sapiens
caaacttctatatcacagaaaagtacgtagagaaatcgacactcttaatgaacgtttagctgctgaaggacaagcgattgatggagcagagctgagtaag

SEQ ID NO: 328593 - DNA, 83 bp, Homo sapiens
gaggcaaggagctaaagcagcgtgcgttcagccctgggtatatttaaagttggagttcgttgctaaagatggcagacccagat

SEQ ID NO: 328594 - DNA, 100 bp, Homo sapiens
agcagcaccgcggcccaggacgcccagggccagcgcatcggccacttcgagttccatgccaaggaagtatcgcctggggatgctggaggagaggctagtt

SEQ ID NO: 328595 - DNA, 100 bp, Homo sapiens
gggaaagcggaaggaatgtcgcgtgctctatgacctgatgaccatggctttcaaatatcaagtattgctgtgtccccgacccaaggatgtgctgctggtc

SEQ ID NO: 328596 - DNA, 100 bp, Homo sapiens
cagcacttccacagccaagtgcgggagtccacgatcccaaaaggataatcacttacaatgaagccatggatagtccagatcaatgaaggaccagactgcc

SEQ ID NO: 328597 - DNA, 115 bp, Homo sapiens
ctgaagagcgacaagccgctggcagccgcggatctcaccgccgctcaggcagcccctgtcaaagggaacaggaagcagtccacggagggtgacgccctagacccacctgcatccc

SEQ ID NO: 328598 - DNA, 75 bp, Homo sapiens
cggcgagatgcctttgttcaccgccaaccccttcgagcaagacgtggagttgcatgctgagaatttgaaaaatga

SEQ ID NO: 328599 - DNA, 87 bp, Homo sapiens
tactaccccagtggagatgcctttgcttcagggtcagatgacgctacgcactggatttcctggaacaaattttgacatttagcccca

SEQ ID NO: 328600 - DNA, 82 bp, Homo sapiens
gccaccgccaaaaaagtcaccgccgctagggtcgccgttgcatcggtgcagggcaagggctgaaatctctttaatgatggag

SEQ ID NO: 328601 - DNA, 75 bp, Homo sapiens
tccggcctggcgtgaggaccccccaatccgcgtgaggatttgacgggatctgaactatacacccaggcggccagc

SEQ ID NO: 328602 - DNA, 95 bp, Homo sapiens
gagcagatccttgcatttgtccaaggtgtagatcagaaacaaattgaagaacaaaaggaagaagaaaaaatacgggaacagcaagtgaaagaacg

SEQ ID NO: 328603 - DNA, 82 bp, Homo sapiens
ggaacccgagcagcccccggccctgtggaggaacttccccgggcgctgcctggacaggcctgcctgcgtgctgggacatgtc

SEQ ID NO: 328604 - DNA, 73 bp, Homo sapiens
tccgtacgctgcgcccgcggcaaggaatggatataaatttctctactgttctgcccgtgccatcgggatggcg

SEQ ID NO: 328605 - DNA, 114 bp, Homo sapiens
agaagaagggaaggcgcgagtgaggaaaggaggtactgtaggggcataaggaaatggtggcaggcacttcctcctaacaagaaggaagtagttaaagaaaatataaggaagaat

SEQ ID NO: 328606 - DNA, 90 bp, Homo sapiens
ggacctgcaagttggcgttattaagccatggttgctcctagagcctgatccggggatggcctctgcctccaccacaatgcatactaccac

SEQ ID NO: 328607 - DNA, 90 bp, Homo sapiens
gagctgtgcagccgcgaggaggcgcgggaggtgttcgagaacgaccccgagacggattactacagcatcccatttcccacacccactact

SEQ ID NO: 328608 - DNA, 75 bp, Homo sapiens
ccgggctagagttcattcgtttcgagctggatctgactgcttttggcttctggatgccctcctccagtacacatc

SEQ ID NO: 328609 - DNA, 82 bp, Homo sapiens
cttcgaccttggacttctcagcctccagaatggctttccttaaagtttcccatgtctcaatggactcctgaatataacgagc

SEQ ID NO: 328610 - DNA, 74 bp, Homo sapiens
aaacccacaggcacacccaagtgaggaagaggatggagatgaagatgaggaagctgagtcagctacgggcaagc

SEQ ID NO: 328611 - DNA, 98 bp, Homo sapiens
cggtttctgagggttgttcaccttgctgctcagacgctccgagaagcttcaggcagcataacacttacagacctggaatggccaaatatcaaggtgaa

SEQ ID NO: 328612 - DNA, 88 bp, Homo sapiens
ctggaaaactgtgggctcctggtgtctctggtccaaaagaaactcttccttcaaaacctgtgaagaaagagaaggaacagaggacacg

SEQ ID NO: 328613 - DNA, 82 bp, Homo sapiens
cggccccagtcagacgcaggcagccccaaagcctgaacaggcagggccagacccaggccccagcacccgcagagcagacact

SEQ ID NO: 328614 - DNA, 74 bp, Homo sapiens
ggaatccaccttcttacgctatggcaggggatcatggaagctgataaagatgacacacaacaaattcttaagga

SEQ ID NO: 328615 - DNA, 109 bp, Homo sapiens
cggagcttatactcctcccagtgacgggtctggagtgcgtgggggaccggctgttggcggggggatatgagactttctactcggaatatcctgagtgttgcgtggatgt

SEQ ID NO: 328616 - DNA, 75 bp, Homo sapiens
cgacgggttggggatggcgtgcagcgcaaccacgagacggccttccaaggatgagaacaagttgagcagtgccaa

SEQ ID NO: 328617 - DNA, 100 bp, Homo sapiens
ttggcaactgcctatgcaacgctgggcatgaggagcggagcggagaatgccaaggttgttgcttagaatatgctaccatgttggataaagaagccaaacc

SEQ ID NO: 328618 - DNA, 99 bp, Homo sapiens
ccggggcctcgaggctttttttctccagccgagaggacgcggctgtgatatacgaaggtatgggctacgtgagttcgtggtgattgcccctgctgcaca

SEQ ID NO: 328619 - DNA, 100 bp, Homo sapiens
caccaaataagctatatactttggttacctatgtacctgttaccactttcaaaaactttgtgtggacagtaatgacctcacgtttccgattgcctgctgg

SEQ ID NO: 328620 - DNA, 74 bp, Homo sapiens
aagcatgtcaccaacccggccttcaccaaactccctatcaaagaaatcggctggacagatgtcgggggctggac

SEQ ID NO: 328621 - DNA, 51 bp, Homo sapiens
agcaccagcacacctgtgaccagcatccagggcattgtggatgcctaccgc

SEQ ID NO: 328622 - DNA, 83 bp, Homo sapiens
catcatcatctacttcacaggaattgccatttgagtacgaccccagcaaagcgacctttgtgaaggtggtgccaacccccaac

SEQ ID NO: 328623 - DNA, 105 bp, Homo sapiens
ctcagttggaagcagccgatccagcctgcggagcctgtggggcagatgaggacggggacttggttgccttttccagtgacgaggaattgacaatggccatgtcct

SEQ ID NO: 328624 - DNA, 83 bp, Homo sapiens
gaaaaacagcctagactagacgcacatcaggaagacagggtgtcagatgcctgatacattcaattcatggtttcttataaccc

SEQ ID NO: 328625 - DNA, 74 bp, Homo sapiens
atttaatggtgccttgaccatggcagttggaacaaccacagggcaggtgtttgagaagtcccccctgcgggtga

SEQ ID NO: 328626 - DNA, 100 bp, Homo sapiens
agcttggcctctgtccctgaagttggtcctgagaaaagggtgccagcgatgcctggatcgcctgtggaagtgaagatacagtccagatcctcacctccca

SEQ ID NO: 328627 - DNA, 75 bp, Homo sapiens
aacatggactctgactcttgcgccgccgccttccacccggaggtccaaccgtgactgccagatcgaccagcacca

SEQ ID NO: 328628 - DNA, 110 bp, Homo sapiens
tgggaggccggccggtgccagcacctttcggcttctgagacggcggcagcagcggcattcagggtgtcaaattgagaaccaggtagatccccaccacctacagtaaaaag

SEQ ID NO: 328629 - DNA, 83 bp, Homo sapiens
aaagacagtcctcgtcagcactgactttcagctatggaatcggtgtcgtgaaaactacccctaaaagccaaaatgggaaagga

SEQ ID NO: 328630 - DNA, 100 bp, Homo sapiens
agcaacagcagcagcaacagcttcgaaggcgaccttccttgctttcagaatttcacccaggttctgacagatattctctaagccgctttcatcatgggag

SEQ ID NO: 328631 - DNA, 100 bp, Homo sapiens
tgggaagccagagccgcctgccatgccccagccagtccccacagcataacagggtcatcgtatttgtttagcactggaatccataatttcagaagaggaa

SEQ ID NO: 328632 - DNA, 54 bp, Homo sapiens
cagaagccgaaagtgttccagattctcagttgccttttcgggccttggcttcac

SEQ ID NO: 328633 - DNA, 100 bp, Homo sapiens
ggaggagccttctcaagaacagagggaacatcaacaattgccggatggacctctacttcttcctgctggctggcattcaggccgtcacggctctcctatt

SEQ ID NO: 328634 - DNA, 98 bp, Homo sapiens
ctgagccaggccccttctcagattgcaaacagtggttctgctggattgataaacccagctgctacagtttattaaccttgcaagaactcttcaggcac

SEQ ID NO: 328635 - DNA, 74 bp, Homo sapiens
aagttcaagcagctgcttgccggccccaacacggaccttgttggaaaatggatataccttatttgattatgatg

SEQ ID NO: 328636 - DNA, 90 bp, Homo sapiens
cgctggggaggttgggctgaactgcagtgggagaggagaagagatgctggcgtgaaggggttttgacacaagggcgcatatcttcaaagc

SEQ ID NO: 328637 - DNA, 76 bp, Homo sapiens
gttaatgtttacggcgaagtctactcaacgtttccaaggcattgacaagactccatcaactgaaacttttaggtca

SEQ ID NO: 328638 - DNA, 96 bp, Homo sapiens
gacgaccagtccttttacgctgatgtgcacgtggaagatggcttgataaaagcctccattatggcatgctgaatttaccaaagaagaattggttca

SEQ ID NO: 328639 - DNA, 100 bp, Homo sapiens
ttcggcggcggcgcctcaggcacctcggcccgggtttcaggcacagaactgtatatccaataatagtgaaatggatcccactaattatgacagaaatgat

SEQ ID NO: 328640 - DNA, 97 bp, Homo sapiens
ttctacagggattatgacattccatttactcaggctgaagagatcactttaacaattggccaagcatttgacctggcatacaggaaatttctagaat

SEQ ID NO: 328641 - DNA, 75 bp, Homo sapiens
gactggaaacaatggcatttacagaaagagtcaacagcagtggcaacagacatgtagactgccaaagtgtatggg

SEQ ID NO: 328642 - DNA, 90 bp, Homo sapiens
acactatggtgcttcagccaagtgaaaggcactatcgagattggaaccacagaaggcaccatactggacataccttttatgtgcactggg

SEQ ID NO: 328643 - DNA, 80 bp, Homo sapiens
ccctggggctcctgaaactcacatgggaggacatgtatgcccaggactctatagagctactaacaacatctggtatccag

SEQ ID NO: 328644 - DNA, 75 bp, Homo sapiens
gccggcaccgcattgaggcaggtgtgcaggtgcggttgcggcgagccaggtcgcaatggaagaagagatcgccgc

SEQ ID NO: 328645 - DNA, 50 bp, Homo sapiens
cgcggatctcaccgccgctcaggctacccgtacagtgaggacgcccgcca

SEQ ID NO: 328646 - DNA, 74 bp, Homo sapiens
agtaagccagcggcaggaccagcgggcgggggcccacgagtttacccaaggtccagcctagcccctaggcacca

SEQ ID NO: 328647 - DNA, 83 bp, Homo sapiens
ttgctgctccgacgcggaccccagtaccaagtgggccagatggagaacatatccccaggacagatcattgatgaacccatccg

SEQ ID NO: 328648 - DNA, 75 bp, Homo sapiens
tggctacaacgaccccatgtcaggagttacactgttagaccttatgatagccaagataacgagtgatgagccact

SEQ ID NO: 328649 - DNA, 82 bp, Homo sapiens
cgccccggcggcccgagcgcgccccaagcccgggcgccaccgctgccacctccgcgagcctcctgcccgaaggccacctgaa

SEQ ID NO: 328650 - DNA, 50 bp, Homo sapiens
taatcccagcactttgagaggctgaggcaggcggatcacaaggtcaggag

SEQ ID NO: 328651 - DNA, 82 bp, Homo sapiens
gacagctcttccaagtaccctagaaaatgcagccctggccaacgtcaacattgggagcctcatctgcaatgtaggggccggt

SEQ ID NO: 328652 - DNA, 80 bp, Homo sapiens
ccgcctccagcttgccaccaaagacctgcgactttgctcaggtaattggcgtccgtggtaaccaatcaggaagaggatct

SEQ ID NO: 328653 - DNA, 90 bp, Homo sapiens
agagacagcgacggcagccggcacagctccgaccgcgaggacgacttctccgcaggtccggcgccagctgccagtcgaggaaccgaaccc

SEQ ID NO: 328654 - DNA, 100 bp, Homo sapiens
aggagaaccgggaggcccggcggaggatcgacctcaacctggatatcagcccccagcggcccaggcccaccctgggcgctgcctatggcacagccaagag

SEQ ID NO: 328655 - DNA, 82 bp, Homo sapiens
cgggcggcttcctggcctgggcgctccggtggcggcggagactaatagggatgccaaaggaaaaatatgatcctccagatcc

SEQ ID NO: 328656 - DNA, 96 bp, Homo sapiens
ataatttggtagtggaagcctatcagatcggacagctggcttttaaaggaatgaagagactcaatagaatccagtcaatagtgtttgagactgcct

SEQ ID NO: 328657 - DNA, 100 bp, Homo sapiens
cgcgtgtgtccctgcgtgtccgcgaggatgcgtgttcgcgggtgtgtgctgcgttcacaggtgtttctgcggcaggcggcgctggcggcggccctgggac

SEQ ID NO: 328658 - DNA, 83 bp, Homo sapiens
aaccgcttcagggtgtccaagttccggcacaccgaggctcggccgccccgccgcgagggactttgaacatgtcggggatcgcc

SEQ ID NO: 328659 - DNA, 74 bp, Homo sapiens
aggatcctgagatccggagcagccggggtcggagcggtgggctgagggccatgtcagttttctgccacctacag

SEQ ID NO: 328660 - DNA, 97 bp, Homo sapiens
ggagagcatgcaggaggtgcaggcgagggtgcagagcctggagagcatgccccggccccctgagcaggtgaaaggtgtagcagtcactcggcctaca

SEQ ID NO: 328661 - DNA, 102 bp, Homo sapiens
ccagaagccactggacctgaagcagctgaagcagcgagcggctgccatcccccccatccaggttaacatgccttatgtcatgatcccagccttccccccaag

SEQ ID NO: 328662 - DNA, 82 bp, Homo sapiens
ttgacggcttggacgaagatggggagaaggaagcgagactcatacgcaacctcaatgacctgcctagagctggaacgttacc

SEQ ID NO: 328663 - DNA, 100 bp, Homo sapiens
ccagtttatgatggaaaaagaagtctttacaccgccaatccacttcctgtggcaactacagggacagagatttgggattagaatctaccttaatatcgtc

SEQ ID NO: 328664 - DNA, 100 bp, Homo sapiens
ctggaagacatttatgaaagcccaaatcacctgtacttggtcatgcagctaaaacctcggatcaattctcagctggtggcacaacaagtggcacaacagt

SEQ ID NO: 328665 - DNA, 75 bp, Homo sapiens
ccccatgggtgccgttaatcccctcctctcccaagctgagagcagccacacaggactcagaattcatgattgaag

SEQ ID NO: 328666 - DNA, 90 bp, Homo sapiens
caggaccagaatgacgtggagctgaacaggctgaactctggaatgctggcctgctggccttggcagatgttttctcagaggattcatcct

SEQ ID NO: 328667 - DNA, 100 bp, Homo sapiens
aagtgggtggtgaataaatcttctcagttcctggctcccaaggtaaaatatacccaggaccataaacagatgaaaggtagaccaagtctgattttagata

SEQ ID NO: 328668 - DNA, 92 bp, Homo sapiens
ctttgagagaccgaaaaagaaggacgtatgctctacaaggtatggatggcagaacagaaaatatcatatgataagaagaaacaagaagaatt

SEQ ID NO: 328669 - DNA, 82 bp, Homo sapiens
caggctctgtggtaccttttctaaaacattgtcaggctccagcccagtcattcattttactccctctgatttggaggtgaga

SEQ ID NO: 328670 - DNA, 101 bp, Homo sapiens
tcattgactacggaaactatgaagaggtgctactgagcaatatcaagcccattcaaacagaggcatgggatatacgtggcatttcaagtgatcagttgcat

SEQ ID NO: 328671 - DNA, 100 bp, Homo sapiens
ccttattggacagctcttccaagtaccctagaaaatgcaaccatacccttttgtgttattctactctaaatttcatgggctagaaatgtgtgttgatgca

SEQ ID NO: 328672 - DNA, 73 bp, Homo sapiens
tcaaatctcctgctgtgaaccagcagaatttttgaacagcatggacaaggacagcccggaggtccaccaggac

SEQ ID NO: 328673 - DNA, 50 bp, Homo sapiens
cacgtcataagcaaaatactgaggtctatgacacacagctggagaatgtg

SEQ ID NO: 328674 - DNA, 100 bp, Homo sapiens
cttccttgcagaggccatggaggacgaggagagacagaagaagctggaggccggcaaagccaagtggatccttcaggttccagggatttcaccagtagca

SEQ ID NO: 328675 - DNA, 75 bp, Homo sapiens
cttccgaggaccctgggagcatgcttcaagccttagaagaccttcacagttgttgatcacatagcatggtcatcc

SEQ ID NO: 328676 - DNA, 83 bp, Homo sapiens
tataggcgtgagccactgcacctggcacagtgttctggacttggtgcctctttctgttatatgctttcctatttagttgggag

SEQ ID NO: 328677 - DNA, 82 bp, Homo sapiens
tttctcagatgttggatatttgcttggaaaaacgtgtgggtacgaccttgctggaataagctctgattatagccttgaagag

SEQ ID NO: 328678 - DNA, 75 bp, Homo sapiens
tcaagcgaaaacatgaccgctgagcccatgagctgatcactggagattccatcgttagtgctgaggcagtatggg

SEQ ID NO: 328679 - DNA, 75 bp, Homo sapiens
aggaagacatctgcagtatcttctcccctgttggaccagcagagaatcgcctaccatttggtgcaagcaaaaagc

SEQ ID NO: 328680 - DNA, 100 bp, Homo sapiens
tgtagctctggagtcccaactcatgaaatttagagttcaagcaagcaagatacgagagcttttagcagagaagattcaaccctatgaaaagataaaggcc

SEQ ID NO: 328681 - DNA, 100 bp, Homo sapiens
tgccaactcttctctgacccataatgcctcagttcactttatccaaatgcatagatgccgtgatggtgctgggaaattcgcatttattcatgaatcgttc

SEQ ID NO: 328682 - DNA, 100 bp, Homo sapiens
cgcaataattccatagtcaagagcatcacagtctctgctgcactgggtgttcaacagccatcactccttggagcatctcctaccatttatacacagcaaa

SEQ ID NO: 328683 - DNA, 82 bp, Homo sapiens
agatgcttaaaaatcaccagttactttaatgagtcaccacctcccacagccctgctgcaccaggggagcaaggcttcgggga

SEQ ID NO: 328684 - DNA, 100 bp, Homo sapiens
acaagattctgaaagctgaacagagaattctggcactgcactgggtaggaaaaaggtattgggagagttgctgctacatctttaggaaatttgactaacc

SEQ ID NO: 328685 - DNA, 82 bp, Homo sapiens
ggccgccatggagcccgactcggtgattgaggacaagaccatcgagctcatgatcagccatgcagaagctggggacagaagt

SEQ ID NO: 328686 - DNA, 88 bp, Homo sapiens
ccgcctcccgccgccccggcccggcgcgcagggcagctggtggaatttttgaagaaaatggaatctcgaggccccctttcgtgcgaca

SEQ ID NO: 328687 - DNA, 73 bp, Homo sapiens
gtagctgttgtttgggctgtgtttcgaaatgaagacagattcacagttaatagaaggatctctatagttggat

SEQ ID NO: 328688 - DNA, 98 bp, Homo sapiens
agactggggcatcgcttgtgacacacttctaccccctgatggagattgccctcagtcccaataatcacgaagtgcacatctataagaagaacgggagc

SEQ ID NO: 328689 - DNA, 90 bp, Homo sapiens
tctttcttcaggaatatgtggctaatctccttaagtcggccttccctcacctacaagaaaaacccgcctagtgccaagcaaccctccaag

SEQ ID NO: 328690 - DNA, 99 bp, Homo sapiens
tgtaagtgcagatggaacacaacagctccttggtagtaactgggaagacagaaatgaagaaaatcacatgagaatgaagaattctttagcagctcaaca

SEQ ID NO: 328691 - DNA, 50 bp, Homo sapiens
ctgagggcagagactctcccgtgtttctaagacctcagagaaatttggaa

SEQ ID NO: 328692 - DNA, 100 bp, Homo sapiens
tccctctttcgcaaattctccacctttgcgaacagagggtctttaggacacagattcttaaaagtgcagtggctgctaatttacagaagattgtagatga

SEQ ID NO: 328693 - DNA, 51 bp, Homo sapiens
cattcaatccttctggagagcctgtgtgatgcggtgacggatcttgcctca

SEQ ID NO: 328694 - DNA, 90 bp, Homo sapiens
ccaggttatggagacagaacggatgatttatctggtgacagaatatgctagtggaggggaaatatttggccctcgggaccaaggatcacg

SEQ ID NO: 328695 - DNA, 100 bp, Homo sapiens
gattagattatcgtcgctatgcagacacactcttcgatatcctggtggctggcagtatgcttgttggttagtctgctgctaattggaattgctgcgtggg

SEQ ID NO: 328696 - DNA, 50 bp, Homo sapiens
tcggaatgctgctgttcgctggtgggaagaactggctgggctataccaag

SEQ ID NO: 328697 - DNA, 90 bp, Homo sapiens
cgcgctgctggacgaagagctctcctccttcttcctcaactatctcgctgacacgcaggtgtcccaccggccttccgggttccagcgcca

SEQ ID NO: 328698 - DNA, 75 bp, Homo sapiens
cggcgagtctgggcgactgcgcacgcgcggctgtggagtcattgggcgaagctgggccatgctgtttgccagtgg

SEQ ID NO: 328699 - DNA, 75 bp, Homo sapiens
tagaaaatgactttctgccggtagaaaagaaattcatctgttgccatgggagcctcactttcttgctcagaatat

SEQ ID NO: 328700 - DNA, 75 bp, Homo sapiens
aagaaggcctccgtggaggccagattgaagggcgacatggagtccaatgggaaatacatcaccaaatctggaacc

SEQ ID NO: 328701 - DNA, 132 bp, Homo sapiens
ggatgtgcggggtgcgccggcagaggatccagtgttcaccatcctggccccggaagccctgggcgctgcctatggcacagccaagagcggtaccggcattgcggccatgtctgtcatgcggccggagcagat

SEQ ID NO: 328702 - DNA, 87 bp, Homo sapiens
tgtcttcatctttacagaggaatagtctacaaaggaagacttgtaacctggagaagaggcaatgaatcgctccctggctaatgtgat

SEQ ID NO: 328703 - DNA, 101 bp, Homo sapiens
gagaagctttacctcgctgaccctatgaagactgctctggcccatttagagtctcttgcagtggatgttgaggtggccaatccaccagctagtaaggaaag

SEQ ID NO: 328704 - DNA, 100 bp, Homo sapiens
ttcgaatgcgccaagaggagctcatgaggcaggacttgcaattgtgaccaaatatattacaaagggctggaaagaagttcatgaattgtataaagaaaaa

SEQ ID NO: 328705 - DNA, 83 bp, Homo sapiens
ggagtctcagagctgtcagaaagacacacgatagtaaggagcatttagcaatgatggaaaggattcttggacctctaccaaaa

SEQ ID NO: 328706 - DNA, 83 bp, Homo sapiens
caggggaaaaccacgcagaagcaggagctgaagacctcagaccggcaccagtttttcagaagaagtgaagtcaagatgaagaa

SEQ ID NO: 328707 - DNA, 74 bp, Homo sapiens
agccgcgctgccgagaagctttacctcgctgaccctatgaaggttcaaaccttgtactactcagctgatcacaa

SEQ ID NO: 328708 - DNA, 97 bp, Homo sapiens
ccaagtttgaggcattgacagttgtgattcagcacctgctgtctgagaaagaagagattttatcgacatcgaaagtaaatttgccctaaggacccct

SEQ ID NO: 328709 - DNA, 75 bp, Homo sapiens
acacctgccaagagagcccaggccgagttccccacctgcgattgcgtcgccctggcttgaaaaacagtccaattg

SEQ ID NO: 328710 - DNA, 87 bp, Homo sapiens
aggaggcagtagccaaacacccagagccaaagccttggctggacagtcagtacgaatctgtaaaggccccagggctgtgttttcccg

SEQ ID NO: 328711 - DNA, 83 bp, Homo sapiens
tcatcattaaggacggaggcacggctgaccccgcactacatctacccaccagccatcgtgcagcccagcgtggtgatcccagc

SEQ ID NO: 328712 - DNA, 75 bp, Homo sapiens
aacttggcattttagatctaattcaacatttacctgccatgacagtggagccacagttttagcatatgctccaaa

SEQ ID NO: 328713 - DNA, 90 bp, Homo sapiens
ctagtctcaacgagagacccaagagatggtgtctggccctgcatcgtactctggcccaaagccttctacccagtatggagctccaggacc

SEQ ID NO: 328714 - DNA, 83 bp, Homo sapiens
accgggacacccgcgaggccggaaaatgttgctgctgacacgccgaccgcctgctgcttcagctacacctcccggcagattcc

SEQ ID NO: 328715 - DNA, 100 bp, Homo sapiens
tgacccgggcttcggcccccaccagagactcgagtattgggaaagggtcgttgtggtgcatagacccagagtatagacaaaatctaattcaggctttgaa

SEQ ID NO: 328716 - DNA, 96 bp, Homo sapiens
acgaccggctcctgctcaagatctcagagaaggaggaggtgaccacgcgcgaggtttacccaaggtccagcctagcccctaggcaccatgtcggac

SEQ ID NO: 328717 - DNA, 82 bp, Homo sapiens
gggagtggagcttggtttcgggatctcggtgctgcagacggcgagacctcctgcacagacacgccgctttttggatgcctcc

SEQ ID NO: 328718 - DNA, 90 bp, Homo sapiens
agcctctcagccggccgggatggctaccacggccgagctcttcgaggttggcgtgcagtggtgtgatctcagctcattgcaacctctgcc

SEQ ID NO: 328719 - DNA, 75 bp, Homo sapiens
gtgcacttccactgctcgggcgcgcctgtggccccgctgcagtgaagagccagcggtgagcctggagcagtgtga

SEQ ID NO: 328720 - DNA, 100 bp, Homo sapiens
tctccaggataatgatgatgatcagctcttttacactaaagtttacattgatccactgaaaaggggtctcactcgttgctcaggctggagtacagtggtg

SEQ ID NO: 328721 - DNA, 100 bp, Homo sapiens
gaatggccccatggtgacggtggccctgtcagtggctctcttggccctcctgaaatgggtgagcccatcactttctgtgaggagagttttgtaaagcacc

SEQ ID NO: 328722 - DNA, 75 bp, Homo sapiens
cgcctgcagaccggcctcgcggagcccgcgcgccgagccccacgtggagcaccagtattcccacaagtttacggt

SEQ ID NO: 328723 - DNA, 75 bp, Homo sapiens
cctgcggccaattcggtggaacgaggacgcggactgcgaaggcagcaaaatgatgcttcaacacccaggccaggt

SEQ ID NO: 328724 - DNA, 101 bp, Homo sapiens
gcggaaggtgggaaagggccggaaaacacacgttcctccgaaaccggtttgcaagtccttgtagagattgggaaaatgaggtacgttagtgttcgcgattt

SEQ ID NO: 328725 - DNA, 71 bp, Homo sapiens
tgggagccacgaagggactgtgtattttaaatgcagcaatgaagcttggagatacatgggtggctttgcaa

SEQ ID NO: 328726 - DNA, 76 bp, Homo sapiens
cacccgtaacatcttcatctaccatgaggacgggaagggcagctggtggaatttttgaagaaaatggaatctcgag

SEQ ID NO: 328727 - DNA, 83 bp, Homo sapiens
ctgttttctgccggctgtaaagtcatcacctcctgggatcagatgtgcattgagggttttggaaatttgcccatctgcatggc

SEQ ID NO: 328728 - DNA, 50 bp, Homo sapiens
gaaaaggactcaggtgaggactggagggaatagcatttcaaggttcagtg

SEQ ID NO: 328729 - DNA, 100 bp, Homo sapiens
tctccgcaaatttcctgccggcaaggtccctttctagagataggagaagagagagatcgctgtctcgggagagaaatcacaagccgtcccgatccttctc

SEQ ID NO: 328730 - DNA, 74 bp, Homo sapiens
catcaaaaatagtgatagctttgataagctgccagacaccctacttgaaggatcctgttggaacctgtggaaat

SEQ ID NO: 328731 - DNA, 96 bp, Homo sapiens
ttgcttcctgaaatttcctctgggacttccttccccgcggttcaggaatcgtcacccggcggcctctcattctgcagctcatcttctcaaaaacag

SEQ ID NO: 328732 - DNA, 75 bp, Homo sapiens
agactgtatccaccatgtactacctctggatgtagtacaggggctcaggtccaggtggcaggggatatgctaccc

SEQ ID NO: 328733 - DNA, 98 bp, Homo sapiens
gctgcttagacgctggatttttttcgggtagtggaaaaccagtaagactttgaccccgacgcaggcttcagtgattgccgcggatcagaagcctgagc

SEQ ID NO: 328734 - DNA, 74 bp, Homo sapiens
gtgcagagacatgcctcacccgaggatattaaaaaggcgttatcaccaatctagtgaaaatgttgaagtccaga

SEQ ID NO: 328735 - DNA, 101 bp, Homo sapiens
tatcgccacgaaatgaaccttttggaattcaaggccggtgcataaacttctcccgagttccatctcagtaaaagggaagcaggaagaccaagaaggtacga

SEQ ID NO: 328736 - DNA, 74 bp, Homo sapiens
gactatcctctggaggctgtgcgcatgcagcacctgagacgagttgtactgctgtcacaggaaatggacgctgg

SEQ ID NO: 328737 - DNA, 99 bp, Homo sapiens
aaaagtactgcccagagaattttgtagacatcaagatagctgatcagcttccttgggttttgctgatgacacaagagagctttgcctgaagatggaaac

SEQ ID NO: 328738 - DNA, 50 bp, Homo sapiens
aggatccttcaaataacttcaggaaagccgtgattctatcccactttttc

SEQ ID NO: 328739 - DNA, 90 bp, Homo sapiens
aagcagctcaggaggctgttaaactgggtcctgtagcatccacagtatcagcgttttctgtcctctcctctgggcctggccttcctccac

SEQ ID NO: 328740 - DNA, 80 bp, Homo sapiens
ctgatattgaagaggaagaactgaccagagctgatcccgagcagcgtcatgtacccctagatttatcctgcaataaaata

SEQ ID NO: 328741 - DNA, 100 bp, Homo sapiens
agcctggcctgtccagcagtggcacatggagcggtgaagagtgaagatgtgggggaatgaggctgcccaggatgcttaaatggcagaggccaagcccaga

SEQ ID NO: 328742 - DNA, 76 bp, Homo sapiens
cagagttggctgaggaaggggaagattaagtaagtttggaagaactgaagtaattgataatactttaaatcctgat

SEQ ID NO: 328743 - DNA, 83 bp, Homo sapiens
caccgacatctgcctgctcaaaggctactgcagcactggggtgtcagttgttggtccgacccagaacgcttcagttctgctct

SEQ ID NO: 328744 - DNA, 100 bp, Homo sapiens
tcagcctggactcattcagaaaagtgactgtgaagtgctgaccacactcaccccagacactggccgtatcctgtccaagctacatactgtccaacccaag

SEQ ID NO: 328745 - DNA, 75 bp, Homo sapiens
gccgttctttaatatgctggatgagctgctgaagcccaccgaattaggtcttgaggaccggcccagctcaggctc

SEQ ID NO: 328746 - DNA, 100 bp, Homo sapiens
gtgaagctggagaagctggacatcatgatccgcctggcctctcaggccaacatcgcccaggtccaggaggcccaggaggtcctgggggacccatgggtcg

SEQ ID NO: 328747 - DNA, 100 bp, Homo sapiens
atgctgaggcgcaatacaccgcttctgggtcagggtcccgggattcttgagctgtgcccagctgacgagcttttgaagatggcacaataaccgtccagtg

SEQ ID NO: 328748 - DNA, 88 bp, Homo sapiens
agcgcgggatcccagcctcaggcgtgcgcggacggtgtgcggtgccggtggtggtgtgcacattgagccccggtatagacagttcccc

SEQ ID NO: 328749 - DNA, 99 bp, Homo sapiens
taggcagcagcagccgcggagcagtagccgccgtgggagggagccatgaagcattacgagggtcctggcggcagagaccacgtcccagcaggagcggct

SEQ ID NO: 328750 - DNA, 100 bp, Homo sapiens
ttagctgtagctattaaaaaaccatctggtgatgatagatacaatcagtttcacataagcattgcactctcgagaccctctcttaataaggacttccggg

SEQ ID NO: 328751 - DNA, 99 bp, Homo sapiens
agctggaccatgttcctcattaacatctgtctgtccgcttagtcatcacatcatttcactgtggactctgtctactagtgacgatgtcgaagacaggga

SEQ ID NO: 328752 - DNA, 100 bp, Homo sapiens
aaccagaacatcgttcttcaagggttgatccattttctaagaaagattggtatgatgtgaaagcacctgctatgttcaatataagaaatattggaaagac

SEQ ID NO: 328753 - DNA, 100 bp, Homo sapiens
acaactggtcgtcttcagttaatggcaagacttgcagaggattactgattttgggcactccaagattttgggagagacctctctcatgagaaccttatgt

SEQ ID NO: 328754 - DNA, 74 bp, Homo sapiens
gaagcagctgcggaaaatgctagaagcaaattgtggctactaatttgccccctgaagatcaagatggctctggg

SEQ ID NO: 328755 - DNA, 83 bp, Homo sapiens
atttacacagatggaaccagaaaagatacgaggctctaggagaggtcatcatcagatttgaaatatttaaagtggatacaaaa

SEQ ID NO: 328756 - DNA, 75 bp, Homo sapiens
cgaccccggcccggaggaggctcatgcgggatttcaagcggctttcatgagaaggacaagaagccatattgccga

SEQ ID NO: 328757 - DNA, 75 bp, Homo sapiens
ctccccacaaagagaagtctcaagatcccaggcaccaagtatagatgagaaagtagatcttcattttattgcatt

SEQ ID NO: 328758 - DNA, 83 bp, Homo sapiens
cggctgcgtgttaggagaggacatgacagtgcttccgtctttctcccctgggggacacggttatggaggttttgatgactatg

SEQ ID NO: 328759 - DNA, 75 bp, Homo sapiens
cggtaccagccaccccctgagtatggggtaacgagtcaaggatgctatctaaatgggccttttaattcaaatcta

SEQ ID NO: 328760 - DNA, 101 bp, Homo sapiens
acctagtatttgaatttgctagtaacgtcatggaggatgaacgacaggaactttatattgctgttggaatatctggagccatccaacatttagctgggatg

SEQ ID NO: 328761 - DNA, 74 bp, Homo sapiens
cgatcctgtaactgccaaacccaagttggttggagatgtggattttgaaggttgctacaagatcaccacggttt

SEQ ID NO: 328762 - DNA, 73 bp, Homo sapiens
ggaaagaggctttgagagagtgggaaggtgtaagctgttcagatgaagatgaaaaacccagaaaacgaaggcg

SEQ ID NO: 328763 - DNA, 100 bp, Homo sapiens
tgacggctccaccatcgtccccggcgagcagggagcggagtaccagcacttcatccagcagtgcacaggtaacgatgactcggacatagacatccaggag

SEQ ID NO: 328764 - DNA, 82 bp, Homo sapiens
actgtgacatgtctgatcccttgctcccatccctgcagcatgaacaaggtatgaggatacatgggctgcacttcacagaaga

SEQ ID NO: 328765 - DNA, 74 bp, Homo sapiens
ctatggtgaaacaccactgaagcattgccaaggctcctgcaacacagcagcaatggcaatttggcggacttctg

SEQ ID NO: 328766 - DNA, 97 bp, Homo sapiens
ggaaaagactcaggacggacaagcacagtcttcggaaggctgagagacttcgaagaatgcttggaaaggatgaggatgaaaatgttaagaaaccaaa

SEQ ID NO: 328767 - DNA, 95 bp, Homo sapiens
gcggaatctgtttgagcagcttgtgcgccgggtggagattctcagtgaaggaaatgaagtccattacgtgtgaaaatgaacttgtgcaaacccaa

SEQ ID NO: 328768 - DNA, 83 bp, Homo sapiens
cgtgccccaccatgtcagacgcagccgtagacaccagctccgaaatcaccaccaagacagccctcagcgcctttttccaggag

SEQ ID NO: 328769 - DNA, 75 bp, Homo sapiens
tggcccgatcaagcctgacttctagccaaggcaccattcaggaagattacctaagagagctgctgacaaccatgg

SEQ ID NO: 328770 - DNA, 100 bp, Homo sapiens
attcattgtctcccgcatgaaggagaggattactacaagggaagacataaattcaaagcaggttgctacagtgaaagcagacctggagtctgaatctttt

SEQ ID NO: 328771 - DNA, 82 bp, Homo sapiens
ttactagatccaggcagttcctatctgctacagatcgataaagaattggctagtggtgaatactttttgaaggcaaatcaga

SEQ ID NO: 328772 - DNA, 82 bp, Homo sapiens
ggcttctgctgttgctcttctccgccgcggcactgatccccacaggtgaagcggaggctggacctggaaactgaccatcagt

SEQ ID NO: 328773 - DNA, 100 bp, Homo sapiens
gctgggcacactggcttcacgccggctccgcctcaccagcaagcgcattcccagattgatgaacataggatatgtgtgtgtgtaagaaaacgaccactca

SEQ ID NO: 328774 - DNA, 100 bp, Homo sapiens
ttccccggcccacagtgggggtgtgcaaacccgagagaactggccctccaagccacaaaactgtggtgaatggaaaagaatgtataaacttcgcctcatt

SEQ ID NO: 328775 - DNA, 100 bp, Homo sapiens
tgcctgacccgaagtaccgacccgagttatgcccaccctccaactttgcgacggaaatgtgtcatcgaaagccagaatagcctaacatggcagaccagag

SEQ ID NO: 328776 - DNA, 88 bp, Homo sapiens
cagagccccaattcctacttcatggatgtgaaatgcccagattcagtgatctcttctccctggcggaggaatatgaggactcttccac

SEQ ID NO: 328777 - DNA, 82 bp, Homo sapiens
gtttaccggatctcagctccgacgcccgaggagaaggaggagtggattaagtgcattaagttttgtagtgcatccctgagca

SEQ ID NO: 328778 - DNA, 100 bp, Homo sapiens
atggtgaagctaaagaaatttctacacctacccattggtctaaacttgatccaaagacaatgaaggacatgaaccatacgaattcatatgggatcatcag

SEQ ID NO: 328779 - DNA, 75 bp, Homo sapiens
atgctaaaagatgacagacttggacaacatgtcccaacattacatcccaacagaccttccagaacttgatacacc

SEQ ID NO: 328780 - DNA, 103 bp, Homo sapiens
atttggtggaggctctttgaagttgggttcaggagtgtagaattggcaaagttattgccagcttcctggtaagaatgattgatgttggctgatattggagtgc

SEQ ID NO: 328781 - DNA, 100 bp, Homo sapiens
cctcacccctttctacaaggagggcaagtttgcttccaaggtgtggagcagaggatcatgtggaagcagtgaaaaagctccagaactccaccaagatcct

SEQ ID NO: 328782 - DNA, 50 bp, Homo sapiens
agaagatcctgctgcccgagcccaggtgacttaagagattaaaattaatt

SEQ ID NO: 328783 - DNA, 101 bp, Homo sapiens
gttgagcagttggattcaagagcacttcccctttgccttcatcagtaactctgggtggattttaactacaactcttgtcctctcggtgatggtattgcttt

SEQ ID NO: 328784 - DNA, 75 bp, Homo sapiens
tggcggatggaagggaggagactcctgaccctcagaatggctcatgctgaagattcggttatggaccatcatttc

SEQ ID NO: 328785 - DNA, 101 bp, Homo sapiens
tttattgagaaaggagctgtttccagtcatgaggctgtggtggatctttctgtcttccgtgtgtgctaagatcgtgcagctcctggggcagaatgaggtgg

SEQ ID NO: 328786 - DNA, 100 bp, Homo sapiens
gtgccaaacactcgtgattgccgtccactcacttatcaagctgccatacctgagttgagaactccggtgtacactggggctatgaagagaccaagactta

SEQ ID NO: 328787 - DNA, 90 bp, Homo sapiens
gaagatgttcgatgtcaacaattacaaaggcaggtcggggtatgataggtcggggaagagggggctttggaggccgaggccgaggccgtg

SEQ ID NO: 328788 - DNA, 100 bp, Homo sapiens
aaagattgaattttgcattctttaattgggaagaaaaggaaggtgaatccatgttgagctgagctatagagacggggtttcgccgtgttagccaggatgg

SEQ ID NO: 328789 - DNA, 83 bp, Homo sapiens
gttcgttgtgccagcgactaaaaagagtactgccaaatctgtcgaaagggagataatgaagaactgcttcttctttgtgatgg

SEQ ID NO: 328790 - DNA, 75 bp, Homo sapiens
tcggtatgggagtcccaaaagacagctccagttttacaggctgaaggggatgctaagggagataaagcaaaggtg

SEQ ID NO: 328791 - DNA, 75 bp, Homo sapiens
caactatcgacttggagtactcgaaatgcactcggtgatggaaagagagccactattctgaagaacacttggcca

SEQ ID NO: 328792 - DNA, 100 bp, Homo sapiens
ctttttcccccttgcctggctcctgtggtggcaggctgggcacgaggaccatgctgggccggagcctccgagaacaaagtggaagatgctttctacaaag

SEQ ID NO: 328793 - DNA, 90 bp, Homo sapiens
ctccaaggccaggacctccctggatgccctgaagatcagcatccgccagctcaagtggaaggaggtggagccatcgaagcccccacccac

SEQ ID NO: 328794 - DNA, 75 bp, Homo sapiens
gaaggtcttggcccaaaagttgaactgaggaatgtcgggtcctcacaattcaaaacaattgaagatgacttggtg

SEQ ID NO: 328795 - DNA, 75 bp, Homo sapiens
gggcaactgggccatgagagggaaggaaacaagccagttccagtgtctcgccccatcctcaccctcagggttccc

SEQ ID NO: 328796 - DNA, 74 bp, Homo sapiens
acagagaatcttgtgcgggaattgctttttcatggagtgataatgaaaggagcagcagccgcattaatatccca

SEQ ID NO: 328797 - DNA, 99 bp, Homo sapiens
cgggtcaccgtcaagacccccaaggacaaggaggaaattgtgatctgcgatcgagcctcggtcaaggagttaagtgggcagaccaacatccacctcagc

SEQ ID NO: 328798 - DNA, 50 bp, Homo sapiens
tgatggccgctgacaggggacgcaggtgtgatgaatgcagactctgctac

SEQ ID NO: 328799 - DNA, 73 bp, Homo sapiens
cactcctggacaggatggattgccagggcttcctggcccgaaaggagagcctatgtcaccaccatcaggacaa

SEQ ID NO: 328800 - DNA, 89 bp, Homo sapiens
tcagaagccatgcccctcaggctggaacttgccctgtctcctcgcagatgagagtgtgaacatggctacgcctcttcattcccgtccat

SEQ ID NO: 328801 - DNA, 100 bp, Homo sapiens
atactttgcacaggaagctataagtggcttactcaattccagatatggccgaggatgggttgatcacagacgattagctgtaaacagttttcgatatttt

SEQ ID NO: 328802 - DNA, 75 bp, Homo sapiens
ggaatctatagttaatcttggcgacattgacaatgatggctttgaaggtgatgtccttgcaaatatcaatggtgt

SEQ ID NO: 328803 - DNA, 100 bp, Homo sapiens
ttttgccctcaaaagaaatggcagggttatggtggctatattgcatcaatgatcttaaaatcagatgaaaagctttttaaatgtggatccgtggttgcac

SEQ ID NO: 328804 - DNA, 75 bp, Homo sapiens
gaaatttacagaaacaaactacatctcagggttcacaatctatacagttgcataaaagtagcagaagactttgta

SEQ ID NO: 328805 - DNA, 75 bp, Homo sapiens
aacgcacagaggaacgagctgagctggcagagtcatggccgccctgctcccccaatgaaaggccagcttcgaaga

SEQ ID NO: 328806 - DNA, 102 bp, Homo sapiens
gacccagaccctggagcctcagttggaagcagccgatccagcctgcggagcctgtggggcaggaacatggagctgatccaggacacctcccgcccgccactg

SEQ ID NO: 328807 - DNA, 75 bp, Homo sapiens
gaaacttctgggggcagcctggggacttagtttcctgcttgccttcccccagatggagtctcactctgtcgccca

SEQ ID NO: 328808 - DNA, 98 bp, Homo sapiens
agggcaaagaaaatgggactggttgaccaactggtggaacccctgggtggagccgccaccaaaatgcagattttcgtgaaaacccttacggggaagac

SEQ ID NO: 328809 - DNA, 80 bp, Homo sapiens
gataaaatcagagtgtggctgcaaagtgaaaagcttgaacgccgaatacatcaagcaatggtaacatctttaaatgaaga

SEQ ID NO: 328810 - DNA, 90 bp, Homo sapiens
ggcagcggcggcgcggaggcggctgaggtgcgagccggcgccttcaggaggaagaccagcagtttagaacctcatctctgccggccatcc

SEQ ID NO: 328811 - DNA, 100 bp, Homo sapiens
acaatgactttctgaagctgagaaccatgctcatgccagtacacaacaggccggggctcctcaggagtggggcttacggcagctgtgctgagagactccg

SEQ ID NO: 328812 - DNA, 90 bp, Homo sapiens
gaggcgggggctgcacttgacaaccagcatgccgagatgattgctcgctgtaagcagctcatctgtgaccccagctacgtaaaagatcgg

SEQ ID NO: 328813 - DNA, 100 bp, Homo sapiens
gacaaagatcttaactcagtggtcatcgctgtgaagctgcagggagttgaccacatttggccatttcccagaagggccccaccccaagggtgagtggcca

SEQ ID NO: 328814 - DNA, 75 bp, Homo sapiens
ctccggccgcctggctccccatactagtcgccgatcctatagcaatggaactcagcgatgcaaatctgcaaacac

SEQ ID NO: 328815 - DNA, 83 bp, Homo sapiens
attcccgtgattgcgttacaagctttgtctccttcgacttggagtctttgtccaggacgatctgactgcagccatgagcagca

SEQ ID NO: 328816 - DNA, 100 bp, Homo sapiens
ggagagccctcagggcgtgctgttggtcagcgagtcccgcaaggctgatggggtacacacgcagaacgagatcttgtggcgggaggtggtgacacttcgg

SEQ ID NO: 328817 - DNA, 100 bp, Homo sapiens
catagtcctggtgaaagttaaagacccaacagaatacactggacctgaaagttatgtggctcaaatgattgtggcgatggatgactacagtgtgatcggc

SEQ ID NO: 328818 - DNA, 75 bp, Homo sapiens
aaggagaaattgagtctttacattcagagaattcaggaaaatcaggccaagagactttgaatcctcctcttccac

SEQ ID NO: 328819 - DNA, 74 bp, Homo sapiens
gcctcttattgatggaagaagactcaagtatagattaaatgcatttggaaacagagccctgggctccagctggc

SEQ ID NO: 328820 - DNA, 49 bp, Homo sapiens
accgagggctaccacgttctgcgggacaacagctttgagcagttcatta

SEQ ID NO: 328821 - DNA, 73 bp, Homo sapiens
ctgactaccctggaagtagcaggccgcatgcttggaggctcgtttctggcgctggagacatcaaacttactaa

SEQ ID NO: 328822 - DNA, 100 bp, Homo sapiens
tggctctttagctgaaatacttctgaagtcttctgagttgacagagcagaagcttcgtgcctgtttagagggtagtataaatgagcacagtgcacattgt

SEQ ID NO: 328823 - DNA, 75 bp, Homo sapiens
gactgggcggccggccgacccttcctgtcgctgacggcgactgcgggaggccagagacggtgccgagacctcaag

SEQ ID NO: 328824 - DNA, 90 bp, Homo sapiens
ggtgagcctcatcacacaggatccgcccctggacatggaggagaaggtccgcttcaagaagtcaaagtgaattgggcaacaacccctagc

SEQ ID NO: 328825 - DNA, 100 bp, Homo sapiens
aaggttaagctggctgtcctgaaatattataaggtggattcgaaggtctcactaggcatcgcgggcatcttgatcgtgctgagctcggtggcttgctcct

SEQ ID NO: 328826 - DNA, 83 bp, Homo sapiens
aggctttgggcggggcggagccgagagccacactttcaagtaaaccaggtgagaagccctaccactgcaactgggacggctgc

SEQ ID NO: 328827 - DNA, 124 bp, Homo sapiens
agcatatatgtcaactctaccatgtgctagagacagccaacaaaatattcatggttcttgagggtggagagattcaaccagttagcgtgaaagttggagataaagttcttctcccagaatatgg

SEQ ID NO: 328828 - DNA, 100 bp, Homo sapiens
ccacccgccggggacggtggacaagaagatggtggagaagtgctggaagctcatggacaaggttcgattgagtgaaacagacttcaaagttatggcaaga

SEQ ID NO: 328829 - DNA, 80 bp, Homo sapiens
ctggcacctaacccagcagaccgctcaccccatcgggaattgaatgatctggcacgggaccctccagcacagtgttcagc

SEQ ID NO: 328830 - DNA, 51 bp, Homo sapiens
gatcccgctctgcacattccaaaggtcatcaatgccatcgagcaggactac

SEQ ID NO: 328831 - DNA, 74 bp, Homo sapiens
gccaggccggcgcgtatggaggcggtgggacgcctgcggcgcgggctactgcagcactggggtgtcagttgttg

SEQ ID NO: 328832 - DNA, 74 bp, Homo sapiens
acctcagcactatcccaagactgctggcaacaggtttttcgttggaatatacgttgcacatttatggcgattct

SEQ ID NO: 328833 - DNA, 99 bp, Homo sapiens
agccctctcattatcagatattccttggaatggacctgttgatgaacactcttcctgatcctctcctctagaattcatctcctcctgctagcagccgcg

SEQ ID NO: 328834 - DNA, 100 bp, Homo sapiens
ataaataactacatgtaaaattaatgcagttcccgtacctgtttgaaaatggtagaatagataacatttttactgagccctattccagatttatgattga

SEQ ID NO: 328835 - DNA, 98 bp, Homo sapiens
ggaggagcctggcggccaccccctcttcctcacttccctgtactctcatcgctctcggcctccgacacgatgaacaagagaactgggcaacccatgat

SEQ ID NO: 328836 - DNA, 82 bp, Homo sapiens
gttcgctacacagcaatgcatcgagccttatgccagcctggaccatcttggaggcagtgtaggatcatggaagaactttgaa

SEQ ID NO: 328837 - DNA, 82 bp, Homo sapiens
ttgcagatgaagacggttccaaggagagtaatgatctggctaccactgggaatctgtcttgaactatcgtttcgatcctctc

SEQ ID NO: 328838 - DNA, 100 bp, Homo sapiens
aggcaccgggatcgtgaccgagaccgtgaccgagagcgtgaccgagagcgcgaatatcgtcatcgttagaagccccatcttcccgggaagccagccgccc

SEQ ID NO: 328839 - DNA, 98 bp, Homo sapiens
aaaagatctgctgcaaggaactgatagcttatggttctccattgtgatgaaagcacatggtacagtgtttctgaaagatctatccagcactccgatgg

SEQ ID NO: 328840 - DNA, 92 bp, Homo sapiens
catctccaagaacgtgctcttcgctcacctggatgacaacgagaggagtgccggtggtggtgtgcacattgagccccggtatagacagttcc

SEQ ID NO: 328841 - DNA, 100 bp, Homo sapiens
tcatatttgttctttcagcaattgttccagacaacagaaatgatggaagaattgcatagcctggacccacgacggcaggaattattggaggccaggttta

SEQ ID NO: 328842 - DNA, 100 bp, Homo sapiens
tcaatactggcccagcatttaccacacaatggccttcaccttcaggccattcagaggaggaaagagaggggaatatgaagtcagccaagccccaagtgaa

SEQ ID NO: 328843 - DNA, 83 bp, Homo sapiens
cgccaaggagggcaagatcgaggaactgtggctgcaccatctgtcttcatcttcccgccatctgatgagcagttgaaatctgg

SEQ ID NO: 328844 - DNA, 100 bp, Homo sapiens
tgccgtacgtggccctcgatgtgctctgcgtgttgctgggtttatggctacaaatgatttgatgacggaactgcagaaagattccatcaagttggatgat

SEQ ID NO: 328845 - DNA, 98 bp, Homo sapiens
ggaaaagatccctggaatatgaagagacacagtatggtagccacacccccagtcttccacctggaagccctctctggctaaggacaggcaggtgcccc

SEQ ID NO: 328846 - DNA, 96 bp, Homo sapiens
tcccaccttagcctcctaagtagctgggaccacagacgtgcccatcgagagcctgcgcctgcgcttcgccttgctgcagtccctcaacaccacact

SEQ ID NO: 328847 - DNA, 100 bp, Homo sapiens
agaagacgatctgcacttcgcattttggcattgacatttaattttagggtcctttatatagaagggagagtaggtcaattacaaggatcgtagtccctgt

SEQ ID NO: 328848 - DNA, 90 bp, Homo sapiens
aagtgagatctgaatccacaaacggagacggcagacagtcacaggcagttgacggactggacaaagcttctatagcaaactcagatggcc

SEQ ID NO: 328849 - DNA, 82 bp, Homo sapiens
cgcggagccggagccgcagaggctcccgggctggactcaggcttctcagcaaacggggattcagcgtccgatcctttggaac

SEQ ID NO: 328850 - DNA, 101 bp, Homo sapiens
ggaagacttcctggtgcaggaggctcactccgatttaaggtgcccgagtccacgctgatggactgccgtagaccatcagaagagctaacaattgctggaat

SEQ ID NO: 328851 - DNA, 98 bp, Homo sapiens
tgcagcgaatcaagcgggagttcaaggaggtgctgaagagcgaggagaatttaagcagaacggtgggaagccctatttgtctgtgattacggggagag

SEQ ID NO: 328852 - DNA, 50 bp, Homo sapiens
ccgaggactccagcacaccgagggttaatttggagtggcccctggagtca

SEQ ID NO: 328853 - DNA, 75 bp, Homo sapiens
acgtcctgggcttcgtgtctgcaaaactcatcactgctatatatgcagattatgcccggagtttgaagaacctcg

SEQ ID NO: 328854 - DNA, 75 bp, Homo sapiens
cccagcccagcgcctcggccgaacccctccgcagcaggagaacgtatttaccgggcagtcaaagatctattccta

SEQ ID NO: 328855 - DNA, 83 bp, Homo sapiens
cgacaagccgctggcagccgcggatctcaccgccgctcaggctgctgcggactctggagcgtgagaaccagcgcctggaggct

SEQ ID NO: 328856 - DNA, 101 bp, Homo sapiens
gccacacgcgtacccccgtagcggaaaaacgatgtgatcttcgtggtggaaagctaaattttaaaaccaccccaatggatgcagacagtgatgttgcattg

SEQ ID NO: 328857 - DNA, 73 bp, Homo sapiens
gcacacagacttcaccctgtgcaagtgcatgatcgaccaggcacatatgtatgtccctgggaagctgcatgat

SEQ ID NO: 328858 - DNA, 100 bp, Homo sapiens
aagctgtgtggtgcgagtaactgtacagttactcaagggaaagaagctcagtttgccagcataagtgccaaagaccatcaccagcatctgtccttcaggg

SEQ ID NO: 328859 - DNA, 83 bp, Homo sapiens
tgaagatcacaaaaatcaggggagaaagctaaggatttttcaagccacattcaattgataggatgaaaaaatttaagagaagg

SEQ ID NO: 328860 - DNA, 100 bp, Homo sapiens
ccctgatcatcaagccagacaacttctggcagaaacagaggactaattttggcagttctaaatttgaatttgaggtgcccaccagctgacctctcctcct

SEQ ID NO: 328861 - DNA, 75 bp, Homo sapiens
gttgatacagcagagacgtcatacttggaaatggctgcaggttcagaggtgtacaactatgagcctttgacacag

SEQ ID NO: 328862 - DNA, 100 bp, Homo sapiens
cgggtgaatgctgctaaaaacaagactggggctgctcccatcattgatgtggtgcgatcgtttgcagtactaccctctgggtggggcagctggacaaaag

SEQ ID NO: 328863 - DNA, 100 bp, Homo sapiens
cacaccccccgccgcagcagcaccggcgacagataacgaaggaggcccaacttcattcaataaggagcctgacggatttatcccagacggtagaacaaaa

SEQ ID NO: 328864 - DNA, 75 bp, Homo sapiens
ctggcggacatcactttagaccctccacctaattgcaggtgaagatggagctggaaaaacaagcttaataagaaa

SEQ ID NO: 328865 - DNA, 100 bp, Homo sapiens
gtagacatccttatcagcacagcacttattccagacaaaattgcttacccagtacatattaaatctcggcaagtatgatcaaaactacgacatcagagac

SEQ ID NO: 328866 - DNA, 97 bp, Homo sapiens
tgcgacctggggccctgggtgaagtgctccgccgcccttgcctccagatttgaaaaagggcgcatctatacgttcattggagaagtcgtcgtttctg

SEQ ID NO: 328867 - DNA, 100 bp, Homo sapiens
aagcaccaggcatcagagatagagtcttccctggcattgcaggagagaatctgaagggatgatggatgcatcaaaagtgtgtgctgtatttgtgggcctt

SEQ ID NO: 328868 - DNA, 120 bp, Homo sapiens
ctgctatatctgtaaagggtatctgatcaagccaacaacagtgacggaatgcctccatacatgaaaaagcaatttcggtatctactagaatccaaaggaaaaaaacctggtattatcaac

SEQ ID NO: 328869 - DNA, 100 bp, Homo sapiens
gaagaaactcttagcgcaatgattgtggtggtctgggtgggcaccaacaaccacggacacacagcagagcaggtgactggtggcatcaaggccattgtgc

SEQ ID NO: 328870 - DNA, 73 bp, Homo sapiens
agaacagcgtgggatgttcacaaaggccaggagtggtggctcacacctgtaatcccagctctgggaggccaag

SEQ ID NO: 328871 - DNA, 82 bp, Homo sapiens
gttgccttactcccagatcagtggcctgaatgcccttcaggtctccagaaatgctttgggttcatctttcattgctgcaagg

SEQ ID NO: 328872 - DNA, 100 bp, Homo sapiens
aaaagattacttggaagaatataaattccagtatgccaccacgggctgttccctgaccctgcaccatacggagaaaccagaacatgaagacatatgtgaa

SEQ ID NO: 328873 - DNA, 100 bp, Homo sapiens
tgccatattgtgtcttccccggccggtccctcgcctcccggccgagctgacgacttgtgtttgctcaaaccaattcttggtgcaaaggggcatccatgat

SEQ ID NO: 328874 - DNA, 100 bp, Homo sapiens
ccgaggaggaggagggggaagcggcggcggcaaaggagcaatacttcaagtcagctgcaatgaccctaaacgagcggttcacttcgtatcagaaagccac

SEQ ID NO: 328875 - DNA, 100 bp, Homo sapiens
aagaaattggaggaggtgcagaaggtggacagggtaaaagaaagagacttttttctaaagaatattgctgctaaaattgattcaattcctcacttgaata

SEQ ID NO: 328876 - DNA, 83 bp, Homo sapiens
cagatgtttgtcgactggaatggactattgcccagaagaaaagatgtttggttttcacaagccaaagatgtaccgaagtatag

SEQ ID NO: 328877 - DNA, 100 bp, Homo sapiens
caggactcatatgttgaccaatgcgatcttggtgcagcagatcatcaagaatatcacgccgcagggccgtaggcagccatggcgcccagccggaatggca

SEQ ID NO: 328878 - DNA, 97 bp, Homo sapiens
gagtacctttgtcatttggaagaagcgaagaggtattgttgcagcatctggcagtgagactgaggatgaggacagcatggacattcccttggacctt

SEQ ID NO: 328879 - DNA, 82 bp, Homo sapiens
atgctgaagcgagtccctgagctcccgccttatgccagcctggaccatcttggaggcagtgtaggatcatggaagaactttg

SEQ ID NO: 328880 - DNA, 100 bp, Homo sapiens
tccacactgcaatgtttttgtggaacatggaccaaactcttacccaggatctactggagcagctgttggagcccatgacgcctgtcgggatgcaaaagag

SEQ ID NO: 328881 - DNA, 82 bp, Homo sapiens
ccccacgcaaccccagatccatttacactttacagtcgggaaagaggttaaagaagacacgcaagtatgatatcatcaccac

SEQ ID NO: 328882 - DNA, 50 bp, Homo sapiens
tcagcctttggaagttttttgttggatatgtcaagtgaccagatagctgc

SEQ ID NO: 328883 - DNA, 100 bp, Homo sapiens
gaacaccaaagattgtctctggcaaagcaccccagcagtcagtgactactctagaattgctttgggtcctaaacggggtccatctgttactgaaaaggag

SEQ ID NO: 328884 - DNA, 94 bp, Homo sapiens
gaaggaacgaggcaaggagctaaagcagcgtgcgttcagccctggggagaatggggtactaagagaaaagcacgaagctgtggatcatagttcc

SEQ ID NO: 328885 - DNA, 100 bp, Homo sapiens
ccgcgccggaccctgaggcagcgaggttaaagcacgaattgggagctctcagcgacatcaccagtcagcagccaaagacctaactcagtcccctgaggtc

SEQ ID NO: 328886 - DNA, 100 bp, Homo sapiens
gcccgagtgccggcttctcccctacgcgctacacaagtggagctccttttcctccacctaccttcccgagtaatgcaggtggtgaaggagcaggttatga

SEQ ID NO: 328887 - DNA, 80 bp, Homo sapiens
cagcccaaccacatctgcaacaaccagcagcatcagagggcaaacttgaagataaatcttttgactccagctctttagag

SEQ ID NO: 328888 - DNA, 100 bp, Homo sapiens
accaggaggaggttttcaggaccaaaattgtggaaaagtcactctgaacctaaaggcagacccagaagagctttttacaaaactagagaaaattgggaag

SEQ ID NO: 328889 - DNA, 82 bp, Homo sapiens
aaccagaaccggagcatggaggcgcacaacatcctcaggccacggcgtatgcctccaaggacggggtcctgaccgaggccat

SEQ ID NO: 328890 - DNA, 96 bp, Homo sapiens
gtcgccgacatccactgcgagaactgcaagaccactttgggctggaaatatactcaaacaaaggactttttattcccttccccaaccgggaaataa

SEQ ID NO: 328891 - DNA, 100 bp, Homo sapiens
tcctgtgtgtagttgatagtttggtggtgaagagatggctgacagtgtcaaaacctttctccaggaccttgccagaattagccgatgaattacatatgcc

SEQ ID NO: 328892 - DNA, 98 bp, Homo sapiens
agccgagctgcaggaaaggctgtgcctgggatcattgatgaggaaagcagtggaaacaatgcccaggacatatttggagaagactgtgtaagtgtaaa

SEQ ID NO: 328893 - DNA, 100 bp, Homo sapiens
ccgcagagaaattcagaacctcaagcttttcaggcatcctcatataattaaactgttgtccttctattcaggccactcttcgttttccatgtactgcatg

SEQ ID NO: 328894 - DNA, 100 bp, Homo sapiens
gctgagagtccgcctgccatggactcggaatattacagcggcgaccagtcagacgaatctagaacatgatgtctatgaaagacttactaacctgcaggaa

SEQ ID NO: 328895 - DNA, 97 bp, Homo sapiens
ttagagggcctccccaggccgcctccgcccgtgaagtttgcagaatttgatcagatcatgaagtctgaccctgaccacttagcagagttggttaaaa

SEQ ID NO: 328896 - DNA, 74 bp, Homo sapiens
cacacgactacttcgagttcttcgccgccgacctgaggagggaacctgtatgacaaaatccttcgtcagaagga

SEQ ID NO: 328897 - DNA, 50 bp, Homo sapiens
ccctctcagcacctgggcggacgacggaggaaaccgaggcttggtgttgc

SEQ ID NO: 328898 - DNA, 96 bp, Homo sapiens
ctccctgtcctgaacatctttaagaatatgaatgttttctgaatttccagatcccatgtggggttcagattatgtgcagttgtcaaggacaccacc

SEQ ID NO: 328899 - DNA, 74 bp, Homo sapiens
aataaccgtccccgccagtcagaagttgagtgagaactcaacagaggcaaaagcagtagattctaacaatcagt

SEQ ID NO: 328900 - DNA, 82 bp, Homo sapiens
gcgagactcatacgcaacctcaatggcctcaacaccctcccccagcctcccattccctgctggacgccctctccccaggccg

SEQ ID NO: 328901 - DNA, 98 bp, Homo sapiens
ggcccgcgggggagccccgggagccgcacgacaccattcgcttttcacccaagatgatttgatgtcttataaaactctgatgaaccatgatggctaca

SEQ ID NO: 328902 - DNA, 80 bp, Homo sapiens
acctgtgaccacccctgaagaaattgcacagcaacttattccatatgtggaagaagatggctcaaagaatgatgatcggg

SEQ ID NO: 328903 - DNA, 98 bp, Homo sapiens
tcgggctcgtccgccatgtccgccgcagacgaggttgacgggctgggcgtggcccggccgcactatggctgtgcagaggccaagaccgttttgcccaa

SEQ ID NO: 328904 - DNA, 51 bp, Homo sapiens
ctcctgagtagctgagactacagttcgaagcattcagcaaacaatggcaag

SEQ ID NO: 328905 - DNA, 96 bp, Homo sapiens
aggcatgccaactggggtcttggcccactgatgatctcacagtgttctggacttggtgcctctttctgttatatgctttcctatttagttgggaga

SEQ ID NO: 328906 - DNA, 90 bp, Homo sapiens
gcggcggaggatgagcctgcagagcgcgcagtacctccggtatgcagtgccattcagaatcaggatttcactgtgatcgaagactactgc

SEQ ID NO: 328907 - DNA, 126 bp, Homo sapiens
cggatcctaggagatttccttgtagctgtcaatgagtatcaggaggcaatggaccagtatagtatagcactaaggtgatctttagacagtgactgagtatggatcatttgaacgaggcaactcagg

SEQ ID NO: 328908 - DNA, 100 bp, Homo sapiens
gtgaggcctccccagccatgtggaactcgcgcagggaccatgtcggcggagaccgcgagcggccccacagaggaccaggtggaaatcctggagtacaact

SEQ ID NO: 328909 - DNA, 82 bp, Homo sapiens
gtattggtctcctgctcctagagttggaatcgaagcctcttaaaatggcagatgacttggacttcgagacaggagatgcagg

SEQ ID NO: 328910 - DNA, 100 bp, Homo sapiens
tttagtttcatctctctataaagttatccaggagccacaaagtgagaaaacgttgtgtgacgtgatcctcatggtccaggaaagaaagatacctgctcat

SEQ ID NO: 328911 - DNA, 50 bp, Homo sapiens
tcatccacttcgcccaacctccagatcaactactacttcatcaacagcca

SEQ ID NO: 328912 - DNA, 100 bp, Homo sapiens
tgctccgcgctggcagtctggaaaaggcagatgtatattgatgaactcccagagggcgctgtgaagcctccagcaaacaagtatcctatcttcttttttg

SEQ ID NO: 328913 - DNA, 75 bp, Homo sapiens
tacattgacaatgtgggcaacctgcacttcctgtattcagaactgagattacctggggcaattgatgttatcggt

SEQ ID NO: 328914 - DNA, 50 bp, Homo sapiens
cctcccgattagctgggattacagatcccagattacaggaatgcagtaat

SEQ ID NO: 328915 - DNA, 49 bp, Homo sapiens
tgaatattttgctactgctggaaaggcagacatctggtccctgggcata

SEQ ID NO: 328916 - DNA, 50 bp, Homo sapiens
cgccgaggcaccgaggcactcagaggagctgctgatgcaaggaatcccct

SEQ ID NO: 328917 - DNA, 75 bp, Homo sapiens
tactatcctcggtgctgtggtgcagagctagttcctctccagctcagccgcgtacatgtcccagagcaagcacac

SEQ ID NO: 328918 - DNA, 50 bp, Homo sapiens
cgacagccaggcccgggagaaggcgcaccctacgacgcgcacaccaccgg

SEQ ID NO: 328919 - DNA, 104 bp, Homo sapiens
cgcattttggcattgacatttaattttagggtcctttatatagaagggagagtaggaacctggcggaccgaggctgtgttcagcgaggaagcactgatccaagt

SEQ ID NO: 328920 - DNA, 98 bp, Homo sapiens
gacgtcggcttctccccgcgggagcccccagcatggatcatgtttcaggcatatggagacaaacagggaccactgcatggaatgttaatcaatactcc

SEQ ID NO: 328921 - DNA, 100 bp, Homo sapiens
tgacaacattgatgagacatacggtgtgaatgtgcagtttgagtctgatgaggagattgatcccatgtttcagaagacagcagcctcatttgatgagtgc

SEQ ID NO: 328922 - DNA, 100 bp, Homo sapiens
gttcgagaagcgccgctctgagggcgagaagatccgaaagaaatacccggaccgggtgccggttcgctatcctgatcgcatcacactgatccggggcaac

SEQ ID NO: 328923 - DNA, 75 bp, Homo sapiens
aatgagaatctctctatggaagattagactggagcatgaacttgaaatatgagctccttcctcagagaagcttcc

SEQ ID NO: 328924 - DNA, 100 bp, Homo sapiens
gtccacgcctgttgaagttttatgtaaggtttgggccccatggtatccctgtgacagtatttcccaaaagggaatataaggataaaccagaagccatgcc

SEQ ID NO: 328925 - DNA, 90 bp, Homo sapiens
ggagctgttcctattgggccatcttggctccaccaccctggaattgaatgatctggcacgggaccctccagcacagtgttcagcaggtcc

SEQ ID NO: 328926 - DNA, 99 bp, Homo sapiens
ttgtagacgctgcggcccggcccggcggggtactccaaagattcaggtttactcacgtcatccagcagagaatggaaagtcaaatttcctgaattgcta

SEQ ID NO: 328927 - DNA, 76 bp, Homo sapiens
gtctggaggagccttctcaagaacagaggcagctggctaagagtcttgggcaggctggtgaaattgagcctgaaac

SEQ ID NO: 328928 - DNA, 78 bp, Homo sapiens
tttggcattgacatttaattttagggtcctttatatagaagggagagtaggcatcatgacggtgatgtcagctctgtc

SEQ ID NO: 328929 - DNA, 74 bp, Homo sapiens
gaggtttcagccagtgcatgaccttactattggcattgctaccatttatgttcgttataagcaagttcatgctc

SEQ ID NO: 328930 - DNA, 96 bp, Homo sapiens
aattgggcgagggcacaaaataaccacttaccccttctcaccgaggaagagcgggagaaagggctgaccggttccctgatgtgttacctgcttctg

SEQ ID NO: 328931 - DNA, 100 bp, Homo sapiens
atgggcgtgagaatgtggggatttataacctctccaaaggagtcaaccgattctgcctgtccaagcctggtggatagtgacaagggcatctcccttcgct

SEQ ID NO: 328932 - DNA, 50 bp, Homo sapiens
gccagtcaataggaagtacgagtgtggcccaccagcacgaatgagaaacc

SEQ ID NO: 328933 - DNA, 100 bp, Homo sapiens
ggaaggactgcctgcctccaacagataacaacgaacttgatgcaagtgataggtttgccaaggtcagacctctcatcatccggatgaactgcaatttcca

SEQ ID NO: 328934 - DNA, 100 bp, Homo sapiens
gaaagaaagaggatggagagggcaacgtttggattgcaaagtcatcagccggtgccaaagaagccagtcacctttgaggatgtggcagtgaatttcaccc

SEQ ID NO: 328935 - DNA, 146 bp, Homo sapiens
ccccgagaggggcactcacctgcccgagtcacccaaattggaagacttttaccgcttctcctgggaagacggagctcaaggagtcttgcatccggaaccaggactgcgagactggctgctgccaacgtgctccagacaattgcgag

SEQ ID NO: 328936 - DNA, 97 bp, Homo sapiens
gtcaagatggaggagtacgcgcgagagccttggtcagcctagcaacaaagaagatgtggatgatcttgtgagtcagctaagacagacagaagagcag

SEQ ID NO: 328937 - DNA, 100 bp, Homo sapiens
ctgcgccccgctctgctgtgggcgctgctggcgctctggctgtgctgcgcggcccccgcgcatggccacagtgatgttgtaatgggcctggtgtctgtta

SEQ ID NO: 328938 - DNA, 100 bp, Homo sapiens
catgaacatgcaagaaacatatactgcttacctcattgaaacaaggacctggccctcagcccctaaaatgttcctcctgctgacagcacttcaagtcctg

SEQ ID NO: 328939 - DNA, 75 bp, Homo sapiens
cagtaaaccatctatggagagtggagatggcaacacagaataccaagctgctattttacacttgaagagggagca

SEQ ID NO: 328940 - DNA, 83 bp, Homo sapiens
aaagttaggcggcactccagccccagctcgtatggaaatttcatcgataagctaagactcttcaccaggggaggatccggtgg

SEQ ID NO: 328941 - DNA, 100 bp, Homo sapiens
catggaccatcctgctggtcagcactgcggctggtgagcacctgcggatctgtccccagggctacacctgctgcaccagcgagatggaggagaacctggc

SEQ ID NO: 328942 - DNA, 51 bp, Homo sapiens
tgatgacaagggggcccaggcagcacggacttaaccaccaccatgtcgagc

SEQ ID NO: 328943 - DNA, 82 bp, Homo sapiens
ccgagatgtgatgttggagaactacaggaacatggtcttgctggtgcaagattcttcttcagtaccactgcccacattcctg

SEQ ID NO: 328944 - DNA, 82 bp, Homo sapiens
ggcagctccagcccggcccggcagcgacatggaaggtggcacaagaatggctcaactctccaaatagagagaatttctatca

SEQ ID NO: 328945 - DNA, 50 bp, Homo sapiens
gttatatcgaactcctctacagctttggagtttaacccttctgccaatcc

SEQ ID NO: 328946 - DNA, 76 bp, Homo sapiens
acgcgcccggcgcccctgagccggccgagcggcgacggaccgcgaggctcattggtgggcagtattacttatggga

SEQ ID NO: 328947 - DNA, 119 bp, Homo sapiens
cgggaaatggccgctgtgtggttgcaacggagataaattcccggaaccgcgattcggcgtgtcagatcaatgtccgagttaccaccatggatgcagagctggagtttgcaatccagcca

SEQ ID NO: 328948 - DNA, 75 bp, Homo sapiens
ctccatcagagagccctggcatgctgactaagctccaggattaccgctggtggtggagaaatttcctagtctccg

SEQ ID NO: 328949 - DNA, 75 bp, Homo sapiens
cccagagactgctgagcccgtccgtccgccgccaccacccactccggacacagactgtgccctgtccacggtgcc

SEQ ID NO: 328950 - DNA, 82 bp, Homo sapiens
ggcagatattcctccccagcatgtcagcatgaccaagcgcctctactacctctggatgtagccagcggtgagcctggagcag

SEQ ID NO: 328951 - DNA, 100 bp, Homo sapiens
ctcagcctcctaagtagctgggactacagagtcgagagaaagaacttatgggtttcagcaaatcggtaaatgaagcacgttcaaagatggatgtagccca

SEQ ID NO: 328952 - DNA, 100 bp, Homo sapiens
ttctactttgagtgctgtctccatgtttgatgtatctgagcaggttgctccactgtgcctaggaagagctggagcttgtgttgtgactgtaaaattataa

SEQ ID NO: 328953 - DNA, 73 bp, Homo sapiens
agagaatcaagctatccaaatgcgattagttgatgtggcctgcaaggcatactccaaatgcttcttccagttc

SEQ ID NO: 328954 - DNA, 75 bp, Homo sapiens
gcccggacggcacaccctacgttaccgtgctcaagattttccaagatagcctccaacacccagagtcgccggact

SEQ ID NO: 328955 - DNA, 75 bp, Homo sapiens
agccgatccagcctgcggagcctgtggggcaggaattcgatgtcttctttccgtcctgggagaggacataatgat

SEQ ID NO: 328956 - DNA, 90 bp, Homo sapiens
ttttcctccgcggtggggcgttgccatggagacgcgggcggcagttggtagctggcagtgttgtgatggcttttgaagaagtatgcccgg

SEQ ID NO: 328957 - DNA, 100 bp, Homo sapiens
cagggtgtgggcatccctgaggactccatcttcaccatggctgaccgaggtaactatggccttcgggatcagcacatggccattgcttgggtgaagagga

SEQ ID NO: 328958 - DNA, 76 bp, Homo sapiens
aggatctttgagtctagcaagtgttattatttctgccctttgtacccttacaagtttcattgtactgacaacctca

SEQ ID NO: 328959 - DNA, 100 bp, Homo sapiens
aaacaagaattacagcagccaacctatgttgccctgagttacataaatagacctggcgcactgtcatgcctacctggtagaaatgagccagctcctgcaa

SEQ ID NO: 328960 - DNA, 99 bp, Homo sapiens
cttgcctagtgggccttccttcccaggtagcctggtagactcgtctggtcatatcctggtccctggaatctatgatgaagtggttcctcttacagaaga

SEQ ID NO: 328961 - DNA, 101 bp, Homo sapiens
ccagagtgtgtttaacttctgtgctattccacagctatacctgcaggcccgcttcacttggcgaggagcccgcctgctccggcccctcctgcagttcacct

SEQ ID NO: 328962 - DNA, 96 bp, Homo sapiens
ctagtttgttgggaaagaaagatgatggactacaatatcgaccagatgtgaaaggtgtgactgcacagaaaagttacaaaacaaatttgacttttt

SEQ ID NO: 328963 - DNA, 100 bp, Homo sapiens
tgccggcctagcgtcctggaattacttcaatcaagtccaatatttccctgtattcagttgtttcattacggccacttcctgcagattatgtcccttcaat

SEQ ID NO: 328964 - DNA, 100 bp, Homo sapiens
cgttccacaggagcagagccagggctagcgcgagatctcctagaaggcgtttgttgagaattatccacagttcaagaaaatgtctgggactgtttcaaag

SEQ ID NO: 328965 - DNA, 95 bp, Homo sapiens
gacggggcgcgcgcgaagcgagcgagaaggcacggagtcgccgcggagcgcaggaaacaagctcacatcttcctgtgggaaaccttctagcaaca

SEQ ID NO: 328966 - DNA, 71 bp, Homo sapiens
ttccggttcttcctacaagaccctcaaagccaggagctcgatgtgcaagctatgtccaaactgggtcttcg

SEQ ID NO: 328967 - DNA, 100 bp, Homo sapiens
ggatggcaagatagcggcgcgggagcgtaccgttggtcaaagaaaaagtgatgtatgaaaaagaggcaaaacaacaagaagaaaagattgaaaaaatgag

SEQ ID NO: 328968 - DNA, 117 bp, Homo sapiens
caggctttcaatcaacccaaggtgatgcttttgctacgacctcattttctgctggaactgatgttgagcataccggagccaccagtgagttttatgacaagttcacaattcgctatc

SEQ ID NO: 328969 - DNA, 75 bp, Homo sapiens
ccgcagttcatcttcctccctgtgtactttccatttgccttcctgggatgtgtttcacatggtagttgaagtacc

SEQ ID NO: 328970 - DNA, 84 bp, Homo sapiens
tctctgctgcaccgacctcgacgtcttgcctgtgtcccacttgttcgcggcctataggcaacgtcacacctcctgaggacagcc

SEQ ID NO: 328971 - DNA, 75 bp, Homo sapiens
cttgaccagcacacactgcaaggagatcagcgtccttcgacctgaagcagcagctgctgctcaacaagctcatgg

SEQ ID NO: 328972 - DNA, 75 bp, Homo sapiens
ggatctcagcagggatgaatgcaaaagaattcttcgaaaattggggtcagtatagaccttctgatttgctgtgcc

SEQ ID NO: 328973 - DNA, 100 bp, Homo sapiens
tatatttgaagtcaacaagcaagatatttacaagagtttcagtaggcagttggatcagctcaccatgccttctcctatgcctgagtacctgaatgtgcac

SEQ ID NO: 328974 - DNA, 100 bp, Homo sapiens
cgttctcagactccatctccggccgggccgcgcgccccgcgccctcgtgggctggtgtctcgcagctggtctctgagcggcccctgatgttcctgttgga

SEQ ID NO: 328975 - DNA, 71 bp, Homo sapiens
gactctgggccaggagaagctgaagctggaggctgggctgggcgagtatctcttcgaaaggctcactctca

SEQ ID NO: 328976 - DNA, 75 bp, Homo sapiens
tttttaacaaaccctaatacaggagatatgtatactccaggaaataacatcaagatttgtaatgaatcagctagc

SEQ ID NO: 328977 - DNA, 75 bp, Homo sapiens
ttctgctggatcagacttcgcggcaacctccgggactctgacgggaagagcaagaagagacgtctgcaattcgag

SEQ ID NO: 328978 - DNA, 74 bp, Homo sapiens
gcaccggaagacggaggtcctctttccttgcctaacgcagccatggtgagaaaccttaccactgtgactgggac

SEQ ID NO: 328979 - DNA, 83 bp, Homo sapiens
ttcattacagccaggaggactcttcggacggggacagagagctgatgaaggttttttattggcacctcagtctcaacattttc

SEQ ID NO: 328980 - DNA, 50 bp, Homo sapiens
tggcaccactgaagtgaccgaatgagtgtgtggaccagttgacaaagatc

SEQ ID NO: 328981 - DNA, 114 bp, Homo sapiens
agacaatgccggtggaggaatttgtggctggctggatctctgacaccaatgggaatcccaatggggaagtcgatgctggtgcttctcaccttcttggccttcgcctcgtgctgc

SEQ ID NO: 328982 - DNA, 100 bp, Homo sapiens
tctcgacgcagagtggtggaggaggtccgaaggcgggccacctcaggaggcaagtggccgcagtacaatgcttgcacactgcacggtggaaaaggccagg

SEQ ID NO: 328983 - DNA, 100 bp, Homo sapiens
caaggatctggggatcttcgcactatcccaagcaaaatgatgcttcaacacccaggccaggtctctgcctcggaagtgagtgcttctgccatcgtcccct

SEQ ID NO: 328984 - DNA, 100 bp, Homo sapiens
ggccttcgcgctctgcgtcctgtttgacagcaacgcctctgccagctcctccagtaatgagggtgacagtgaccgggatgagaagaagcggaaacagctc

SEQ ID NO: 328985 - DNA, 75 bp, Homo sapiens
catttgtgtccattgatctcttggagcagctggggatcatgattggtgtgcccgtttaataaaagaatatggaaa

SEQ ID NO: 328986 - DNA, 73 bp, Homo sapiens
ttgtctccggtcgttcccgttcaggagcaggtttctgctttgggacaaccatacatctaattccttaaagtag

SEQ ID NO: 328987 - DNA, 90 bp, Homo sapiens
gagcaggcggcgcagtacaccaacgcggtgcgcgaccgggagctggacctccgggaagtcacctgcaccggtgcccgtgacgtacgagct

SEQ ID NO: 328988 - DNA, 75 bp, Homo sapiens
gaagatgggaagaaagaagcagctgccaggttggccgttgtccaatgtgttgctgttatctggaactcctacctg

SEQ ID NO: 328989 - DNA, 75 bp, Homo sapiens
ctttcggcttctgagacggcggcagcagcggcattcagaatcagctgaaccaagccagttggaagttccagccac

SEQ ID NO: 328990 - DNA, 90 bp, Homo sapiens
agagacggcggcggccgaaagcggagagatgctgggcgtggcggccgggatgacccacaggtacttaagagattatggcatcagaaaccc

SEQ ID NO: 328991 - DNA, 78 bp, Homo sapiens
gtcgatgaagaggatgatgtttttggtgaaggatctcattttgcccaacggtggtactccagcaggtacttcaagtcc

SEQ ID NO: 328992 - DNA, 101 bp, Homo sapiens
gtcacttaagttttccgtgtgcgggttgcaaggagcgtgcgtgcgtctggacaggaagatgtcacccaagcgcatagctaaaagaaggtcccccccagcag

SEQ ID NO: 328993 - DNA, 100 bp, Homo sapiens
cggggaaagcggaaggaatgtcgcgtgctgtgtgactggctacgtgttaatgaaagctattttaagccatcccctacgtgtagctccattggacttcaca

SEQ ID NO: 328994 - DNA, 90 bp, Homo sapiens
cgtgttgcagcacatcctcatccgagcctttgatttgagtgggtgttggagcgggccggagagaagtagagtgggctgcgaggagaagga

SEQ ID NO: 328995 - DNA, 51 bp, Homo sapiens
gcgatcctgggctaccggtctgtgggtttctgacgtagaagagcttacccc

SEQ ID NO: 328996 - DNA, 100 bp, Homo sapiens
ctcaacaacatttttttttggcttaacaaaacatcaaacggcatacaaatggtgatctgtgaaaatggttcgctattcacttgacccggagaaccccacg

SEQ ID NO: 328997 - DNA, 101 bp, Homo sapiens
tggaaaaagaagtccaagaagcaaaaaagggactgctaagaagataccaccagggaaatcctcattgacgattcaatttgttgaaggccaatttgtggact

SEQ ID NO: 328998 - DNA, 50 bp, Homo sapiens
tctctcggccagcgcctccgcggtgacgcggcgcacggcgcggatggtgg

SEQ ID NO: 328999 - DNA, 51 bp, Homo sapiens
gcctcccaagtagctgggaccacaggtgcccgccaccatgcccggctaatt

SEQ ID NO: 329000 - DNA, 82 bp, Homo sapiens
acaccacggggagggatttttttctattttccctacgaaaaacagatctttttaaggtttttcgttggaatatacgttgcac

SEQ ID NO: 329001 - DNA, 75 bp, Homo sapiens
gatgactctgtggtgggtccctcagcccttctgagctctgtgctgaacaaggcactacctggcagcaccatctaa

SEQ ID NO: 329002 - DNA, 90 bp, Homo sapiens
acaggcacgcgccaccactcccagtaacaaatgtggcaattattttggatctatcacctgtcatcataactggcttctgcttgtcatcca

SEQ ID NO: 329003 - DNA, 98 bp, Homo sapiens
tgtgcataactcctgccctggtctcagtgaggccacccgtgggactgatgaattacatagcccaagtagtcccagtagagacggggtttcgccatgtt

SEQ ID NO: 329004 - DNA, 75 bp, Homo sapiens
caccagcacagcaaacccgccgggatcaaagtgtaccagtcggcagcatgggctgtacgtgctgaagctgtcaga

SEQ ID NO: 329005 - DNA, 100 bp, Homo sapiens
gtgtaggaagaggcactgctgagggggcgcgaggggaacggaggccagagctgcgataccggggagaccacgacgctgcctcctgggcgccatgagttcc

SEQ ID NO: 329006 - DNA, 96 bp, Homo sapiens
aacggagcagtatttcaatgtggaggatcgaagtagaatgtatgacagtttgaatatgcactctttggaaaattcccttatcgatattatgagagc

SEQ ID NO: 329007 - DNA, 82 bp, Homo sapiens
atcatctgggagcccacaacacagctgtttgatcagcctaggtgattgtagagaaggctccaaaagccagggtgcctgatct

SEQ ID NO: 329008 - DNA, 75 bp, Homo sapiens
aacctcgagaccaacgtggaggagctgtgggtggaaggtctcctccgggctggggctgagcaagccctcggagtg

SEQ ID NO: 329009 - DNA, 98 bp, Homo sapiens
gatgaacctctaacacagtggaaaggaaccgttctggatcagacagcaccagttgcccttgaagcagaaaacagaggtgaaatgaaactagctctcca

SEQ ID NO: 329010 - DNA, 75 bp, Homo sapiens
cctggagcctcagttggaagcagccgatccagcctgcggagcctgtggggcagacttcagtgccctgaacggtta

SEQ ID NO: 329011 - DNA, 96 bp, Homo sapiens
catttcctgggaacaagctgacccttttgcggcttctattttaggtaacattgaaaatttaaagttacttggtccaagaagatgctttgttgagtt

SEQ ID NO: 329012 - DNA, 75 bp, Homo sapiens
cactggtgccctggagacccgcagcctcaaggatcacaaagcttcagtactcggaggaagactgtgctttcgagg

SEQ ID NO: 329013 - DNA, 80 bp, Homo sapiens
attgaacttcatccccagttcctgtgaagctttctggatctcgtcttccaagatgtgttcagagcaacattgttttgttg

SEQ ID NO: 329014 - DNA, 99 bp, Homo sapiens
aaggccatcatggagagtttgagtaaaggtggaaacataatggaacagaattttgagatcataatatcaatctagtgtcaatggaagtaacagtaaatg

SEQ ID NO: 329015 - DNA, 82 bp, Homo sapiens
tcatctatacacttccagtgtcgaaggctggacagaaaatgtcttctgaggctgatctggtgtctcacatctgtaatcccag

SEQ ID NO: 329016 - DNA, 100 bp, Homo sapiens
gtggatttggggatggctataatgggtatggaggaggacctggaggaaaattacgggcagaaggaggctgagaaagtggcccgggtgaaggcgctatatg

SEQ ID NO: 329017 - DNA, 75 bp, Homo sapiens
gggaaatagtaaccctgccaaatacatcagcttgtaggagacagaggtgtgtgtgtgcaggccacagcagcatgc

SEQ ID NO: 329018 - DNA, 87 bp, Homo sapiens
caaatccggaagaagatgatggaaatcatgacccgagagctttaccactcctgaaggccctaaaccccgttccagatgctctgactg

SEQ ID NO: 329019 - DNA, 74 bp, Homo sapiens
aagaaccgggacgaagccatcaaacagctgcggaagctgcaggctgttttggagtcagcggaagatcaccaagg

SEQ ID NO: 329020 - DNA, 50 bp, Homo sapiens
tacatgggagtggaatgaattatggaggtgacacgagcagtgatgaggat

SEQ ID NO: 329021 - DNA, 80 bp, Homo sapiens
ctccaggctgaccccttgagcagcagtcagcacaggccctgggaggagcggggacactgaggacctctctccaaattggc

SEQ ID NO: 329022 - DNA, 112 bp, Homo sapiens
gcacaattactccagtatcttttgatgaaacacttactgctctccagggagaagagaagtttacctttattgagaaatgtaacaaccctcgttctgtcacattattgatcaa

SEQ ID NO: 329023 - DNA, 75 bp, Homo sapiens
cattcagctcctctgtgtttgccgcctggacctgtcgcgaaatcgcctttcagaaattcctatagaagcatgtca

SEQ ID NO: 329024 - DNA, 50 bp, Homo sapiens
ccgcgggcgtcctgctccgcgatccgcaaagatgtgcgggacatcctcac

SEQ ID NO: 329025 - DNA, 101 bp, Homo sapiens
cgtgaccgagaccgtgaccgagagcgtgaccgagagcgcgaatatcgtcatcgttagaaggactatttaagaaacaactgaggcatcagaccaactttccc

SEQ ID NO: 329026 - DNA, 100 bp, Homo sapiens
cggttgtcctcaggcgctgtcagatggacacatactggattcaaagagatatgccgttattggagcagatctccgagacctgtctgaactggaagagaag

SEQ ID NO: 329027 - DNA, 76 bp, Homo sapiens
aaaatttgctggatattgatgcgccagtcactgcttcagaatggcagaagatgatccatatttgggaaggcctgaa

SEQ ID NO: 329028 - DNA, 75 bp, Homo sapiens
cagccatcgcgctttgaaaaatctcctcagattctgcttctcagaagatgcactattatagatactctaacgcca

SEQ ID NO: 329029 - DNA, 80 bp, Homo sapiens
ggatgtcggcgaagagttcaaccaggcctccaccatggacagaggccaggccctgcccctcccaggcagcctggctcctt

SEQ ID NO: 329030 - DNA, 112 bp, Homo sapiens
tggaggccgtggtgaggagcttcgccaagcacacgcagggctatggccgagtgcaagtggtgacccaggatgaaagagagcagctgtacacacctgcttccttaaaatgctc

SEQ ID NO: 329031 - DNA, 90 bp, Homo sapiens
gaattatgagaacctggtctctgtagctggacacctgttctgctgttgtgtcctgccattctcctgaagaacagaggcacactgtaaaac

SEQ ID NO: 329032 - DNA, 82 bp, Homo sapiens
taggagctgtccagatgctgaaaagagaaggtcaaacagctgaaggtgaccagcacccatgcagaaactacctagaagttgc

SEQ ID NO: 329033 - DNA, 100 bp, Homo sapiens
tgttgtcattgatggtctcaatgttgccaaaatgtttcctaaagttcgtgaatctcaacttcaaacctcggacagccaacaattcagagttttgaacagg

SEQ ID NO: 329034 - DNA, 51 bp, Homo sapiens
ctctcagaagaggaccgcggaattgcagaaggcatggccttcatcgagcag

SEQ ID NO: 329035 - DNA, 98 bp, Homo sapiens
cacagagtgcaccgtatcctgtcacttctggatgtgaggacggctgtcctcagcgaggggccgtgcacccgctcctgagcagcgccatgggcctgctg

SEQ ID NO: 329036 - DNA, 74 bp, Homo sapiens
caggcagcctcctgccagaactacttcctcatgattgtttcaggctgttttggagtcagcggaagatcaccaag

SEQ ID NO: 329037 - DNA, 51 bp, Homo sapiens
aggacacccctgaagccgagaaatgaatttgttcctgttgaagagtggctc

SEQ ID NO: 329038 - DNA, 100 bp, Homo sapiens
gtcagaggtgggcggctttgaccgagaggctgctggagctcgtgtttggacgcgcgatggatgactacagtgtgatcggccgctccctgttcaaaaagga

SEQ ID NO: 329039 - DNA, 100 bp, Homo sapiens
gatatttaagtacaatggtgggcttaattttagtggcctggtttgctttcgaccctggctcggcgcactcggacatcatcctctccaatgacaacctgac

SEQ ID NO: 329040 - DNA, 75 bp, Homo sapiens
cgcgaaggagaggccctagaaccatggatggagtggaaccctggcttccccttgagcatcgatgccaaatgccac

SEQ ID NO: 329041 - DNA, 73 bp, Homo sapiens
tgaatcagaaattgagaagctggtggagccgccaccaaaatgcagattttcgtgaaaacccttacggggaaga

SEQ ID NO: 329042 - DNA, 75 bp, Homo sapiens
gacctcagagcagatccagaagctcttagccagcactcgctatccacctccaggagctacagggagctggccgac

SEQ ID NO: 329043 - DNA, 75 bp, Homo sapiens
ggacatcactttagaccctccacctaattgcagcagagtctccttggaggtgacatggatatgggcaacccagga

SEQ ID NO: 329044 - DNA, 75 bp, Homo sapiens
cagtttgttgtagaaccaagtgaagccacaaacagatcagagtcaccttctctggctattaaaccatggaagaac

SEQ ID NO: 329045 - DNA, 71 bp, Homo sapiens
taaggatgtgcaggatcttgatggtggcaaggagagtcagtggatcggtggggaaaatgctgcttaccctg

SEQ ID NO: 329046 - DNA, 75 bp, Homo sapiens
ttagaccagacaactttgtatttggtcagtttaggggctggtgcaaaggatgagttgcacattgttgaagcagag

SEQ ID NO: 329047 - DNA, 100 bp, Homo sapiens
tatggaaactgcaatggatgttgggccatcgatgcacccctcggagctaatagcggagatgagaaacagtgggtttgcactgaaacgaaatgtactgggg

SEQ ID NO: 329048 - DNA, 50 bp, Homo sapiens
ctgggttctgctgtcaatggtgttgtccaatatgattctataacagactc

SEQ ID NO: 329049 - DNA, 100 bp, Homo sapiens
tcaaatgtgtgcagaaggaggtcctgccgtccatgcggaagatcgtcgccacctggatgctggagttggtgtggttggtacgggaactggtgaagagtgg

SEQ ID NO: 329050 - DNA, 100 bp, Homo sapiens
ccaacagaaagaagcaccgaaggaagaaaagcactagcaacttcaaagccgacggcctgtccggcactgctgaaggatttacttacaagacataaattgc

SEQ ID NO: 329051 - DNA, 80 bp, Homo sapiens
ccggcaccacccatcttgagtatctggtgtggacactgccagcggctgcagccgacttggaatgacctgggagacaaata

SEQ ID NO: 329052 - DNA, 100 bp, Homo sapiens
ccgggagcacgtcatctccatcgaggagcgcatcagcgaggaggtggggctgctgcagctccttggggaccccccgccccagcaggtcacccagacggat

SEQ ID NO: 329053 - DNA, 100 bp, Homo sapiens
ctcgccgggaccctcctgtgggcccagggtccacaggtcctggctaccctgggaagagacaagaagtaaatgaagaaagaggaagattccaggacctaga

SEQ ID NO: 329054 - DNA, 100 bp, Homo sapiens
gctgcgtgagcgagcagaggcttaaggtcttcagcggggcgctccaggaggcactcacagtttggtcagatgatgactggttgaagaagttttctgggaa

SEQ ID NO: 329055 - DNA, 75 bp, Homo sapiens
ggtttgaggcggccgtgaaggtgatccagagtttgccgaagaatgagatctcgttccgcgtgtggcagtgtggtg

SEQ ID NO: 329056 - DNA, 152 bp, Homo sapiens
agtccttatcagtggcagaagatccttctgtagtatattttcagtgctgccgtatcgcgacagtacccaagtcgggagatctggaagccctcaaaaaggaaaccattgtgttaaaggaaggttctgaatatagagtcaaaattcacttcaaa

SEQ ID NO: 329057 - DNA, 75 bp, Homo sapiens
ggagaactgtggaagcctgtcccgttgtcagagtggaaggtgcaggtgatggtcctaccagtgtgtctgttgagg

SEQ ID NO: 329058 - DNA, 75 bp, Homo sapiens
gaggaggcagagcaccgcggcgccgagcgcagacccgagagggatgctgagaacttgctggagtcacagccactg

SEQ ID NO: 329059 - DNA, 100 bp, Homo sapiens
cctgcatcatcagaaattccctcctcggcctggaaaagacagccagcatttccatcgcagtgctgctcgatcttctgctgattcaaatatggacgatatt

SEQ ID NO: 329060 - DNA, 111 bp, Homo sapiens
caatatctgtcttcggtggactccttcggcagtccacccaccgccgccgcctcccaggccaccagcttgggctccccacggagggcagcaagtgggacttggggaacccgg

SEQ ID NO: 329061 - DNA, 100 bp, Homo sapiens
accggagctgttcctgttcggccatcttggctcctccctgccagatagctcttattttgaggttgagcaatgtttaaagcgtttgaaaaacatgaatttg

SEQ ID NO: 329062 - DNA, 145 bp, Homo sapiens
atgattactgagagttcactggatgttgctgaagaagaaatcatagacgatgatgatgatgacatcacccttacagaataactgaagtgaagtgatggactccgatttggagagtagtaagacgtgaaaggaatacacttgtgtt

SEQ ID NO: 329063 - DNA, 82 bp, Homo sapiens
gccgcagccgcgagggcggctacacctgcgagtgcttcgaggacttcactgaattcagaaggagctggcggacatcacttta

SEQ ID NO: 329064 - DNA, 90 bp, Homo sapiens
gcacgatcctcaccgcaacattccttatccaatcccttaccgttcgatcctttggtacagaagacagaccgacagatcgtccaataccac

SEQ ID NO: 329065 - DNA, 60 bp, Homo sapiens
gaaacctggatctttgctagaaagagagggagttgaccacatttggccatttcccagaag

SEQ ID NO: 329066 - DNA, 100 bp, Homo sapiens
tacggatgaagcgtgccgggaagcgcttcgaaatcgcctgctacaaaaacaaggtcgtcggctggcggagcggcgtgtattaagcatcgatgtgactgac

SEQ ID NO: 329067 - DNA, 50 bp, Homo sapiens
tgaagacataaccgatcctgcaaaggtgaaacacctactggagctatttc

SEQ ID NO: 329068 - DNA, 75 bp, Homo sapiens
caccatttgccgtggccaggctagaggcctccaggatcatgtggtatgtcagcaccaggggcgtagccccacggg

SEQ ID NO: 329069 - DNA, 82 bp, Homo sapiens
tgtgtattctgttacatcaatcaaaagaatcagcatgattcttcagaggctcttcaggttctcctctgtcattcggtcagcc

SEQ ID NO: 329070 - DNA, 98 bp, Homo sapiens
ccgagggatcactatgaaatccagtgccatttccctacattatgcaacaggtacatcaggaacgtctctatcaagaatacaatttcagcaaggctgag

SEQ ID NO: 329071 - DNA, 80 bp, Homo sapiens
ggactttgtttttcctgggaactgcagttgttctacgctgctgcgtatcattcaatgttgatgtgaaaaattcaatgact

SEQ ID NO: 329072 - DNA, 75 bp, Homo sapiens
agaccggcacccagacaggtggcgacggcagaggagacttgctgtgctcagatcctccattcaagagagctacag

SEQ ID NO: 329073 - DNA, 100 bp, Homo sapiens
tctcctattgaggagtcaacgatttgtacacacagatatgacgaaagacttgaaagaagaacatttaaagaaaaatattcctcttgggaggtttggagaa

SEQ ID NO: 329074 - DNA, 98 bp, Homo sapiens
tagctttggcgaggggacggagccggatcaggagccgccgccgccatatcagagtgcagcagctgccccgagccccgtgcttggcaacattcccccca

SEQ ID NO: 329075 - DNA, 78 bp, Homo sapiens
ggattcagacgccgattcgcccaggactctgcagacagtgggcccatcccatgcccgaacctacactgtggctgttta

SEQ ID NO: 329076 - DNA, 82 bp, Homo sapiens
cgcaaccattgacgccatgtcgggttattcgagtgaccgagaccgcggccgggaccgagggagttccccttggccattctca

SEQ ID NO: 329077 - DNA, 100 bp, Homo sapiens
cctggttgtcacatacccccagcttagaggtgcttcaccctgccccaagttctttaaggaaaaacagtagtgctctgcatagtttactgaaacgagtggt

SEQ ID NO: 329078 - DNA, 75 bp, Homo sapiens
aaggtggagtttgctggcatcagtcctgagaaacatctttgtcctcacctgcatcatcatcgtctgttccctgct

SEQ ID NO: 329079 - DNA, 101 bp, Homo sapiens
ggcaagatccagatcgggatttacgtggagatcaagcgcagcgatgcgggaatgcatatcagtccacgtgggccaagcgggagttcagattggcaatgcct

SEQ ID NO: 329080 - DNA, 102 bp, Homo sapiens
gtaacagtgtgtggagatatccatggacagccgagtcgtccggaaatccattgcccgtgttctcacagttattaaccagactcagaaagaaaacctcaggaa

SEQ ID NO: 329081 - DNA, 96 bp, Homo sapiens
ctgtgatccctcaagactggtccacggagtgtatgaccacaaacagccatcaaggagatgttacagcccagatagctcttcagcctgcactgaagt

SEQ ID NO: 329082 - DNA, 74 bp, Homo sapiens
aagattttgaagaagcttgtcgagacaccttcagcagtaaacaagataaaacaacttcttaaagataagcctga

SEQ ID NO: 329083 - DNA, 100 bp, Homo sapiens
gcttctggcgctgccgcccaccttgtggccctgggctttaccatctttgtggctgtgcttgccaggcctggctccagtatctgcccaaactggaacttat

SEQ ID NO: 329084 - DNA, 101 bp, Homo sapiens
gtactgtcgccgtcaccgccgcggctccggccctggccccgatggctctgtgcaacggagactccaagttgtcgagatgtccacagaaggaggatttggtg

SEQ ID NO: 329085 - DNA, 100 bp, Homo sapiens
atctttttgtcttttggacttcagccatgtccatgatgcctaccctgtgaagatctctcaccatccaaaaaagtggtgttcccactgatgaagagcaggc

SEQ ID NO: 329086 - DNA, 97 bp, Homo sapiens
gcagctgcctgctatgctgaaaacccctggaaacttgctaaagagctgtgctgccactgcagagccccgccatggaagacacgccgttggtgatatc

SEQ ID NO: 329087 - DNA, 100 bp, Homo sapiens
atcggaggccaggtcatgcatgacgaggctgtgacgcaccttgatgaccagatcctgcagctcacagccaagaaggatcaagaaggtggagaagaaaaga

SEQ ID NO: 329088 - DNA, 83 bp, Homo sapiens
aggcagcggaggagcccgaccgacccgttcaaatctgaacatcaatgatgtactagggaactactcattgactcttgttgatg

SEQ ID NO: 329089 - DNA, 80 bp, Homo sapiens
ctcctaggtcactggcgcgatgcgggccgtcctctcggctgatgcaaacggggattcagcgtccgatcctttggaacagg

SEQ ID NO: 329090 - DNA, 83 bp, Homo sapiens
agtaacggcacagcctctcagtcaacatctccttcgcagccgcgcaaaaaaaattttgcaagaacgaggctcaaggatgtgag

SEQ ID NO: 329091 - DNA, 75 bp, Homo sapiens
cgcaggagagacacgctgggccgaccccagagcggcgctggacaggctctgacgcccgctctgcggcttcggtgt

SEQ ID NO: 329092 - DNA, 90 bp, Homo sapiens
ctttaatgagttctttaaccttgataaggtgccatgcttggcttcgactggatctcgctcttatctcccaggttggagtgcagtggtgcc

SEQ ID NO: 329093 - DNA, 96 bp, Homo sapiens
tgtgtatgagcttgatggaaaagaactctgtagtgaaagatcagcaattcatgctaaaaaagtgtcctgccctacttcaagaaatggttaatgtaa

SEQ ID NO: 329094 - DNA, 88 bp, Homo sapiens
ataatcaagtaaaaacaatagctcaaggaaacctttccaacacagatgtccaagctgccaagtcagatggcaaaaatcaagcaaaccc

SEQ ID NO: 329095 - DNA, 74 bp, Homo sapiens
cttcaagtagtcctgtgctcaacattgcttatcgcatgtaggagaatactaaccctgcacagattgtgatggtg

SEQ ID NO: 329096 - DNA, 100 bp, Homo sapiens
agagagcagtaccctgatggagtcccttgcagagccatgtccattggagcccgttcccaatcagctcgtacttacttggagagacatatgtctgaattta

SEQ ID NO: 329097 - DNA, 51 bp, Homo sapiens
aaggattccaagtaactcttatttggatttaagtgccctgtatgctcaaaa

SEQ ID NO: 329098 - DNA, 100 bp, Homo sapiens
tacgtacaatgtcacgctcccaccagcagcgcctatgagtttgtcacctggctcgatggcattaaacccgcagctcacgccacactcagggagcccagcc

SEQ ID NO: 329099 - DNA, 82 bp, Homo sapiens
aaacacttcttttattttcctgtaatatatctgtatcatcggagccatgaagactttgaatttatttcaggaacacgaatgc

SEQ ID NO: 329100 - DNA, 75 bp, Homo sapiens
gacaagtttgcagagaacgatgtgattggctgctttgcgaacctagaagtcggaatccggaagaagatcgaacat

SEQ ID NO: 329101 - DNA, 83 bp, Homo sapiens
gccaagaagatcatcattaaggacggaggcacggaacaagatcactcaaggtgaaggataatctactaataccagcactttga

SEQ ID NO: 329102 - DNA, 82 bp, Homo sapiens
cgccggaacaccctggaagccgagaaatgatcctgacattgatgctgccagtgccatgatgcttttgaatactccccctgag

SEQ ID NO: 329103 - DNA, 100 bp, Homo sapiens
gctgtactaggactgggaacggtcaccaggtgtcaagatgctgcaagtacataggactggactgggcaggctgggggtcagcctctccaagggtcttcac

SEQ ID NO: 329104 - DNA, 90 bp, Homo sapiens
tctatgagaagtatcgtaacccccaaagagaaaaagaaatgatgcaattgtatatcagagattactacagcatcccatttcccacaccca

SEQ ID NO: 329105 - DNA, 100 bp, Homo sapiens
gggagcccggccggagctgggtctggagacgccgtggcagcctgaacggagtgtgcgacggattgggagagttacactgttagaccttatgatagccaag

SEQ ID NO: 329106 - DNA, 109 bp, Homo sapiens
gtcccttcgcctccttcaccgccgcagaccccttcaagttctagtcatgttgatattcactgatggactccaaagaatcattaactcctggtagagaagaaaaccccag

SEQ ID NO: 329107 - DNA, 50 bp, Homo sapiens
catccagaaatccctggctggatcttcacctgaaccgaattctacaggag

SEQ ID NO: 329108 - DNA, 98 bp, Homo sapiens
agcagcctctgcttctcttttcccgttgaaggtgctaccgctgacgacacccctggtggatggcgaggatgagagtgtgactgtgaaatactatggaa

SEQ ID NO: 329109 - DNA, 75 bp, Homo sapiens
cgtgctggaccgcttttacaatgcagatacctcggatctgcattttcaagtgagcaaagaccgctatggagggca

SEQ ID NO: 329110 - DNA, 51 bp, Homo sapiens
ccggaggtgaggcggaactctgaggatatgaattgtctcccacggcagcag

SEQ ID NO: 329111 - DNA, 98 bp, Homo sapiens
ggaacgattgggctgagcagaggacgacatgttgcttttcgtggagtgcacgatctgattttctggagagatgtgaagaagactgggtttgtctttgg

SEQ ID NO: 329112 - DNA, 74 bp, Homo sapiens
aacagaaaattggaaaagttgttcatcaaccaggcaagtatatcgcgtcaacacagcgacctgacgggacctgg

SEQ ID NO: 329113 - DNA, 100 bp, Homo sapiens
gaagagtttttcaagttgaatatgctatgaaggctgtggaaaatagtagaatacaaatcatattcccctgaagccctctggagatacctcacagctcgcc

SEQ ID NO: 329114 - DNA, 90 bp, Homo sapiens
cgccatcgttgctgccttcttcgtcaagggcgaggacatcctagacaggagctcggagctgatctacactggggagatggcctggatcta

SEQ ID NO: 329115 - DNA, 100 bp, Homo sapiens
gcttgagcccatttcaaatgatgacctgctggttgttgagacctcccttgagaggattccttctggatggagatttctttgttgctgcctcccttgccac

SEQ ID NO: 329116 - DNA, 100 bp, Homo sapiens
aaggaacttgcagaaatcacattggaccctcctcccaactgtagatcttaccaatatatttgagtccttcctgcctcagttattggcctatcctaacccc

SEQ ID NO: 329117 - DNA, 101 bp, Homo sapiens
accagcctgcggtcccccacccgcctcccagcactcccatcaagctggaggaaggccctgagcctgtgcaattatttcgagagtcaaaatgtggatttccg

SEQ ID NO: 329118 - DNA, 100 bp, Homo sapiens
gcttcgggagcagagccggcgcccgccgagtcagaggatgtcacccccatcccctctgacagcactcgcaggaaggggggtcgccgtggtcgccgtctgt

SEQ ID NO: 329119 - DNA, 50 bp, Homo sapiens
accacgcctgcatccccatcaagacactatgtggcattgtgctttggaga

SEQ ID NO: 329120 - DNA, 76 bp, Homo sapiens
cgcctttcagaaagtggctgacatggccaccaacacacgtggttgaaggtttagaacagatgtggaaaaatgttta

SEQ ID NO: 329121 - DNA, 102 bp, Homo sapiens
ctagcatttatgcttgcaggtgttattctaggaggagcatacttgtacaaatattttgcacttcaagaatatcttgtaccggaattatcaagtgaagtacag

SEQ ID NO: 329122 - DNA, 75 bp, Homo sapiens
ctcaaccacaataacaggcggagggtcggcgtaggctgctttgtaccgcctcagtggagactggaatcccttaca

SEQ ID NO: 329123 - DNA, 82 bp, Homo sapiens
gctgcagggggccctcccagcggggccatgcccttctacaaccctgctcagctggcacaggatgaagctggaggcagattcg

SEQ ID NO: 329124 - DNA, 101 bp, Homo sapiens
aataatgctggagtgaataatgagaaaaactgggaaaaaactctgcaaattaatttgttatttgaaattacagtgcctctctctcaaggccccaaaccagt

SEQ ID NO: 329125 - DNA, 100 bp, Homo sapiens
ctcagttactggcatggcactcccaagattgcaagcgatccccctccaagaccatcccaggcctccccagacactgccacgtccactgcaagtccagctg

SEQ ID NO: 329126 - DNA, 100 bp, Homo sapiens
cagcgtttccgaggtgaaggcgccgcgccaggccggggggcggcagaggctcgtctgcttgaggaacaacgaagagttcaggtttaccttcatgaaagca

SEQ ID NO: 329127 - DNA, 82 bp, Homo sapiens
accattccgtatggagagccgggaaaccactgattgcttgtgtggagaaacagctattaggagaacatttaacagcaattct

SEQ ID NO: 329128 - DNA, 100 bp, Homo sapiens
cgggagacgagccggccgtcccgggccgggggacccgcccgccatggccaccaagatttaaggaccatagtacagctatggatactgaaccaaacccggg

SEQ ID NO: 329129 - DNA, 83 bp, Homo sapiens
ctgcgggaggtggagcacctgaagagatgccagcagacttcccaagtaagaagcggaagaggagccgctggaaccaagacaca

SEQ ID NO: 329130 - DNA, 100 bp, Homo sapiens
caatagggaaagtgaggcagctgcaaggagggcggcgggactgcactcgagtgtccagacctgctcgatggcccttccaccgcagccatccgcacgggag

SEQ ID NO: 329131 - DNA, 80 bp, Homo sapiens
cagaacccaggcccacggaggaagagccgggcagtccctggagcgggccagggatgtttcagcagcccctgagaaggaag

SEQ ID NO: 329132 - DNA, 90 bp, Homo sapiens
gcaccccattctggatggcacccgaggtcatcaaacagtcggcctatgactcgaagagatctcggctcaccaaattccacaacctgaagg

SEQ ID NO: 329133 - DNA, 146 bp, Homo sapiens
cgcggagcacggaggacggggccgggcgacctgggcaccagcaggacccgaggccaggagccaggggcccagaaggacaactacacctttgcccaacctgggattcaaatgaaagtgaaaatgttagaagaactcgtgagccggat

SEQ ID NO: 329134 - DNA, 50 bp, Homo sapiens
tctttccaaaaggtcaaggttcacaagagcttgggaaagtcgaggtgacg

SEQ ID NO: 329135 - DNA, 97 bp, Homo sapiens
atgccacctctgcaactacgcctgccgccggagggacgccctcactggccacctgaggacgcactccgtttaattagacacttcagaattttgatca

SEQ ID NO: 329136 - DNA, 75 bp, Homo sapiens
acaagtggtactaggattatacattgtaagaggtgacaacgtgaatcagtgtctgtccctgaagggtcattaaat

SEQ ID NO: 329137 - DNA, 98 bp, Homo sapiens
ggactgaagggggatcatctagaagtgaacagctctgcgctttttgttactgtggggaaaaaagttccttaggacaaggagacttaaaacaattcaga

SEQ ID NO: 329138 - DNA, 124 bp, Homo sapiens
gtcgctttcggtctctcagcggccggtttctgcgtccgctgccgcaggttccaccgcgctccagggacaagaatccttcaagaaacaggaaaaaactcctaaaacaccaaaaggacctagttct

SEQ ID NO: 329139 - DNA, 100 bp, Homo sapiens
ttcgtcgcctccttgcccgtgaccgtcgctagaactcagttgtgcgttgcggccagtcgccactgctgaaaattaggtggatttacgcaagaaaataaca

SEQ ID NO: 329140 - DNA, 51 bp, Homo sapiens
taaaaacaggctccacgaaggagccaacatcccatgcaccatcgtggagac

SEQ ID NO: 329141 - DNA, 100 bp, Homo sapiens
gtccgccctggactaccgcctggatcctcagctccagctgcactgctcagacgaggagttttgcatcccttgctttggctgagaagaggataaaacctag

SEQ ID NO: 329142 - DNA, 97 bp, Homo sapiens
cacccggtgtaccgcggcgagaagccccagctgcactacgcggttatgcaatggtctctgcaagatggtttattcttgaattggacctttttaagac

SEQ ID NO: 329143 - DNA, 100 bp, Homo sapiens
ctgggcgagccgtgcgatctggacgcggcgctgctgaccgacatcgaaggtgccctacgagacgctgaacaaacgctttcgcgccgctcagaagaacatt

SEQ ID NO: 329144 - DNA, 75 bp, Homo sapiens
ctccacattgatcagctggtttgtctggacagagcgggatgccaccagcttgtccaaagggaagttccaggagct

SEQ ID NO: 329145 - DNA, 51 bp, Homo sapiens
ctccgggtgaggccggccacgccccgcacgcacccaccaaggctccggatg

SEQ ID NO: 329146 - DNA, 100 bp, Homo sapiens
tcgagaatcaaagggccgggagcgatggtcccgttcaaaggtgagaaagtgaagctggtgcggctgcggaatccgtggggccaggtggagtggaacggtt

SEQ ID NO: 329147 - DNA, 80 bp, Homo sapiens
aaaattacttggagcaaagggcagtcggcggagcttcgccaaggctggcgcagtcggtgttacacataatattgcattac

SEQ ID NO: 329148 - DNA, 82 bp, Homo sapiens
cgaccctggccgccccgagcggagcctggaggtctcggcgcggaagatggccggcggcgtggacggccccatcgggatcccg

SEQ ID NO: 329149 - DNA, 97 bp, Homo sapiens
ggtctgggccttttgggcagcttttccggcctgacaacttcatctttggcctcccagaagttcctgccgaatcgtcttcgtcacccccggggtccga

SEQ ID NO: 329150 - DNA, 98 bp, Homo sapiens
aaggccgacgtgctgggggatgacggctccctgctgttcgagtacctgcccagaggggcccactcgctgtcccaatagcctaacatggcagaccagag

SEQ ID NO: 329151 - DNA, 100 bp, Homo sapiens
atagactgtcacagaactctgtaaatctgtctcccagcagtcacgcaaacaacttatcagtagtgacttacagtaagtgggatcttgtgtgtgataatgc

SEQ ID NO: 329152 - DNA, 100 bp, Homo sapiens
atcactttttgcggagcataatgatctgcaatatgctgctccaggcggtcttattggcacagaaagctgaaggtgctggagatgccaagtgaagtgtgtg

SEQ ID NO: 329153 - DNA, 73 bp, Homo sapiens
agaaacatatctattatatcacaggtgtttgagaagtcccccctgcgggtgaagaacttcgggatctggctgc

SEQ ID NO: 329154 - DNA, 149 bp, Homo sapiens
ctttgatgtcctctaccataatatgaaacatggacagatatcaacaaaagaactagcagattttgtaagggaacggataagttctgaacgtcgaaaagaaaagtctcgagatgcagccagatctcggcgaagtaaagaatctgaagttt

SEQ ID NO: 329155 - DNA, 90 bp, Homo sapiens
ctttgggaaagtcagtattttatatagcaacaaaagagctgtgtctgaacatcagctcctccatgacaaggggaagtccatccaagattt

SEQ ID NO: 329156 - DNA, 100 bp, Homo sapiens
tagagaagtgccttgaagatccagaaaaactaggatccctttttgttaaacacgccagaggcacccaatgagttctatgatggagaccatgacaatgaca

SEQ ID NO: 329157 - DNA, 90 bp, Homo sapiens
ctcacgtgcccatcagtgacagcaagtccattcagaagtatcttggagatggccgcttccatctggagtctgtcatgattgccaacccca

SEQ ID NO: 329158 - DNA, 82 bp, Homo sapiens
caaggctgtgcaacgcggagcgtgagaggaaggttaaataggattgcgaatcaggtggccattcagcggaagaagcagtttg

SEQ ID NO: 329159 - DNA, 90 bp, Homo sapiens
tgcgagtcttcggagcgaccccggcaggactggaaggatcaccagcacatatgcggccagtcagcagctgtcaccgtccaggcagacgaa

SEQ ID NO: 329160 - DNA, 83 bp, Homo sapiens
tccaaataaattgcaagcattctatccaaatggaaattgcaagacctaacatggctgaaagagaaacagaaacatcaaattct

SEQ ID NO: 329161 - DNA, 90 bp, Homo sapiens
gcagatgctgcattattttcagaactccacagaaaacttcattcacagactgaggctgatgtgaatccaaaggcctatccccttgccgat

SEQ ID NO: 329162 - DNA, 75 bp, Homo sapiens
cgacggcagacccagcagccagagagtgaaagggttgggaagaacatggaaagtgacctccctgccaaataactc

SEQ ID NO: 329163 - DNA, 82 bp, Homo sapiens
atgacccacttcaacaagggcccttcctatgggctctcggccgaagtcaagaacaagcccgcggcgccatggctcacgtcgg

SEQ ID NO: 329164 - DNA, 101 bp, Homo sapiens
accttactggacagtcaaatcagctggaatactacaagcaaggaaaaacagaagagtttgtaaaattgttggaagcagcacgtatagatggcaatttggac

SEQ ID NO: 329165 - DNA, 83 bp, Homo sapiens
aggagccggcgcccccgccctgtagataccatgtttgtgtggaagtgccccgtgtttgctatgccgatgctgtcctagtggaa

SEQ ID NO: 329166 - DNA, 130 bp, Homo sapiens
gggccgcgctatgccccgccccctccccagccccagacacggaccccgcaggtggcccagaaggtggtgaccttgcgcaagcagcaacagcttctggctgcctgcaagtccctgcccagctccccaagcc

SEQ ID NO: 329167 - DNA, 89 bp, Homo sapiens
caacattgcaatgataatacctcagtgttcacataactgtatgagcacattcttttagaacctgacccagtaccagcatatgctctgaa

SEQ ID NO: 329168 - DNA, 99 bp, Homo sapiens
ctcagcgccgcctccctgcttcttaacagacttcagattttcctgtccttgatcccagctggactgctcaagaagaaatggcccttttagaagctgtga

SEQ ID NO: 329169 - DNA, 101 bp, Homo sapiens
aacaatttcacctttgaattcagccagtggtcacagctggatgtttgcgacatcccagagagcttccagaaactgataaatttcaaacggaagagagtggc

SEQ ID NO: 329170 - DNA, 82 bp, Homo sapiens
tcttaatgaagttcaaagctgtgaagggagaagcatgacactggccaacactgcgtccagcatttgggtggccctcaggatt

SEQ ID NO: 329171 - DNA, 82 bp, Homo sapiens
gcttcaaagagaaaaggcaacatcctgtcacaggccatgctctggcaaaaacacatgggaaagcggaaccaccaaaaggagt

SEQ ID NO: 329172 - DNA, 100 bp, Homo sapiens
ctgcttacttcacagcagcacagctgatgaaaggtctccaaacgtccacaactatcccgatatggaagccgttcccctgttgctaaataatgtgaaaggg

SEQ ID NO: 329173 - DNA, 100 bp, Homo sapiens
aggtgctcaagccatgttttggaaaagagaactcaaggtctggcagggagaaaggagcaagttgcgagaaagaatcaaagctggcaaaggtgtgacttca

SEQ ID NO: 329174 - DNA, 97 bp, Homo sapiens
ctggtcatactaaagaacacatctggaaggccgtcgctttcgggttctctcatcgcttcgtcgttcgccaatgtttgaggagaaggccagcagtcct

SEQ ID NO: 329175 - DNA, 73 bp, Homo sapiens
attttttgcttggtttggaaaaatttcattagagacagagtggactcattggctgcatgagctttggggtgaa

SEQ ID NO: 329176 - DNA, 100 bp, Homo sapiens
catttaagaactttccttttctagaagagctaatgccaatactggggctcagagctccagctacccactttggattttgaagatgttttaagatatgatg

SEQ ID NO: 329177 - DNA, 90 bp, Homo sapiens
tggcgaccaccgtcagcactcagcgcgggccgatctgccgacaccccaggccatcgagccccaggccatcgtgcagcaggtcccagcccc

SEQ ID NO: 329178 - DNA, 75 bp, Homo sapiens
cgagatcgccccgatagtttgagagtaaatgggttaccagaggaagagctaagaaataggaaggttgttgattac

SEQ ID NO: 329179 - DNA, 101 bp, Homo sapiens
gcgatgccctcggacttcatctcattgctcagcgcggacctagacctggaatcgcccaagtccctctactcgcgaggcatccgtgtcattctggaccttac

SEQ ID NO: 329180 - DNA, 76 bp, Homo sapiens
aaacagaaaaatctgttctcaattgcatttataaggctaaagtttctatttctaaatctacttataacaagatgag

SEQ ID NO: 329181 - DNA, 99 bp, Homo sapiens
ctacgacccggagcacccgacccctgatactatactggcaattgctggagaagattttgcaattgttgcttctgatactcgattgagtgaagggttttc

SEQ ID NO: 329182 - DNA, 88 bp, Homo sapiens
ttttgtcacgccagtatgaatctctgcccgcaacacatatcaggttttcccatcatatgattcccggtcctcctggtccccacacaac

SEQ ID NO: 329183 - DNA, 100 bp, Homo sapiens
ggcggcggaagatggtgccgggggtcgctggctctgctgctgccgccggcgaaggaggaggcgttgccggatattgatgatgttaagaagttcaaaccgg

SEQ ID NO: 329184 - DNA, 74 bp, Homo sapiens
tgctgtccaaaaagaagctgatccggcaggccggctttccacgtgtggtcgggactgtctctaagccttgtttc

SEQ ID NO: 329185 - DNA, 125 bp, Homo sapiens
ttttgattggcgcctttctcattattataggctccctcctgctgtcaggctacatcagcaaagggctaggtcttgactccactaacggggacttctcatacggctttgaacttggaccttggtgc

SEQ ID NO: 329186 - DNA, 75 bp, Homo sapiens
gaaaaaggctacaaagctgctttcattggaataggtgtgaccatgaagctcatggatgaggtcgccgggatcgtg

SEQ ID NO: 329187 - DNA, 90 bp, Homo sapiens
gcaggttttaaatcaagatttaacattccaacacataaaaattatttatccaacagctcctcccaggaagatgagaatgtgcctactgct

SEQ ID NO: 329188 - DNA, 74 bp, Homo sapiens
attcctggatctcccctgttgctctgggctttcccagctccgaagtcaatactgagatcccagatgtgtccaga

SEQ ID NO: 329189 - DNA, 90 bp, Homo sapiens
ggcggctacacctgcgagtgcttcgaggacttcactgacacgctttcaccagcttcgagcccctcctcggtgacttatcctgtggtcccc

SEQ ID NO: 329190 - DNA, 95 bp, Homo sapiens
accagggggtcctgcagcccgtcgccgtgctggagttgctccagggccatgagaagttgctgaggacactttttgaggatgctggctacttaaag

SEQ ID NO: 329191 - DNA, 83 bp, Homo sapiens
cgacaaatccctggcccgggtgacccacgcggaggccgtcaaggctgacttgacaggaattaagtggaaaaaatatgtatggc

SEQ ID NO: 329192 - DNA, 82 bp, Homo sapiens
gaacaacctgaacgtcaccgaggagaagtaccaggaggcgttggccaagggtgaaatgacaatggatgctctgttggctcga

SEQ ID NO: 329193 - DNA, 82 bp, Homo sapiens
gtttctaatccctgctctgtcactaacaagctgcgtgatcttcggacttggaccctctgtggaacacccgagtacctagccc

SEQ ID NO: 329194 - DNA, 75 bp, Homo sapiens
ttgttctctggcatggaaggggtcctcagagttactggggcagtagacagcagggactccctggccatggctctg

SEQ ID NO: 329195 - DNA, 74 bp, Homo sapiens
gggcatctgaagcagtggccgacatcaagttttcctctgcaggacagtcattttgtttactcattcagccctgt

SEQ ID NO: 329196 - DNA, 100 bp, Homo sapiens
ctgcgcttcttctttcagctgttcgttcaaggctatgccctgcaactgcaccagttacaggtctgcaataatttccctctactcattgattgtttcccag

SEQ ID NO: 329197 - DNA, 100 bp, Homo sapiens
cgacgaggaagaggaggtttctgaggagaatgacatcttcctgggctgggaaaaaggagcttataagaaatggggaaagagtaagaaaaaatgttcagat

SEQ ID NO: 329198 - DNA, 83 bp, Homo sapiens
caaatatggaaacaaatactatgaagacaacaagcaattttttggttgtccgagcggaactgcattgagattgttaataaatt

SEQ ID NO: 329199 - DNA, 98 bp, Homo sapiens
aatcagaaaactatgggaagattttggtagagaagaatgaacattgtattgagaacaatatagatttgcagattgtgccaaggacttgaatggatgat

SEQ ID NO: 329200 - DNA, 100 bp, Homo sapiens
cctcgccaaagcagagaaatagtataatttggcttcctgagattctgccttagcaagaaaggagtgggaaatacccttggaaagaaaactaaaacagtaa

SEQ ID NO: 329201 - DNA, 89 bp, Homo sapiens
cagaagcttaccagtggctaaatagatcccagttttacttcctaacaaaatcacagatgacactgctctcaaccttctgaaagaatcag

SEQ ID NO: 329202 - DNA, 100 bp, Homo sapiens
ggccaggatgccgtccaggcggcgcggcggctcctcactcatcccagttcccagtgggaaaagctacagaaagatgacacagatccggggcaactgaaag

SEQ ID NO: 329203 - DNA, 97 bp, Homo sapiens
tgatactgaagaaatgcagggatttggtgtaatgcagaagacttgttccatgaaagtacattggggcacacgtcttgctgccctccaaaaaagaaga

SEQ ID NO: 329204 - DNA, 83 bp, Homo sapiens
actggagccacccgcgaaaattcggccagggttctcgctcttgtaatctcaggggcgatataatcaatgaggtggtcctaaag

SEQ ID NO: 329205 - DNA, 98 bp, Homo sapiens
aaaaacagagtggaggagcaagtacagcgagcagagccagatgaccaggatgccccagatgagcatgagccctctccatcagaagatgccccattata

SEQ ID NO: 329206 - DNA, 75 bp, Homo sapiens
ccgggcaccgaggaccagctcaatgacaggtacaggtttgcagattccgccagcagcacagcaagctctacagat

SEQ ID NO: 329207 - DNA, 109 bp, Homo sapiens
cgctaatcagatgggagtatctgccaaacgtagaccaaaggctcagcccacaactcttgtcctaccacctcagatcatgtatatgaacttctcaacaccattgatgcct

SEQ ID NO: 329208 - DNA, 76 bp, Homo sapiens
gaataatatgccgaaggatcatcctatttctaccactccaaacgccggctgatcttctccaagaggaagccctaat

SEQ ID NO: 329209 - DNA, 75 bp, Homo sapiens
cggcatctttttgaaccaaattatgctgcaaataacactggaactattttggggctgatgagaatcttggtccag

SEQ ID NO: 329210 - DNA, 75 bp, Homo sapiens
gcgcaaggagatgggatggagagcctgagttggcattcgtataaatgacctgggtcctgagaacattatctgtag

SEQ ID NO: 329211 - DNA, 90 bp, Homo sapiens
agatgacaaaacttcaagccaaacatcaagcagaatgtgatttgcttgaagatatgagggcgagccctgctgagacttactgacaaaaag

SEQ ID NO: 329212 - DNA, 82 bp, Homo sapiens
ccagcagggcgttggctatgtgcccatcacagatggagaggagaaaacctatggtggctgtgaaggacctgatgccatgtat

SEQ ID NO: 329213 - DNA, 80 bp, Homo sapiens
agcgggagccggcgtgcgagcggcagattttgcaagaacgaggctcaaggatgtgagggacacagtattgacagctgaag

SEQ ID NO: 329214 - DNA, 100 bp, Homo sapiens
ctggaggagcagttgtctgatgaagagaaggtaccgattattcctactatcatgcaatattggaggctgcatttcagtttctgtcacccctccagcagaa

SEQ ID NO: 329215 - DNA, 75 bp, Homo sapiens
cccagaagttgttctaacgctgcctttgctttaaaacagtattacttgcgggaggtggggaagacagggctccag

SEQ ID NO: 329216 - DNA, 99 bp, Homo sapiens
aaacggccatctggaggctgtatggccgcaggggacaactgtgggaaggctgggaaggttaagaaacaacagaggtggacctccaaaaacatagaggca

SEQ ID NO: 329217 - DNA, 100 bp, Homo sapiens
tggccctggctgatgataagaagctgaaatccattgcatttccatccatcggcagcggcaggtctcttgtggctcagagcataatttggcaataattggt

SEQ ID NO: 329218 - DNA, 95 bp, Homo sapiens
tgcgcgccgcgcagcctcaggcccccccaccttgggacaccttgactccaagcccagcagtaagtccaacatgattcggggccgcaactcagcca

SEQ ID NO: 329219 - DNA, 75 bp, Homo sapiens
agactttgaacgcactcctcagagtccgactctcccacctgctaagataggggagtgtatacatcaccacaccag

SEQ ID NO: 329220 - DNA, 82 bp, Homo sapiens
gcgggcccggccacggcggagccaagaattggctgtgaaaggactgaggcagccatctgggggtagcgggcactcttatcag

SEQ ID NO: 329221 - DNA, 100 bp, Homo sapiens
agttcaatatgaacatcagtggtgttttccatccaaatggactggaggtgatcattaatactgagattatcttcatcataaaagaggagaaacagataaa

SEQ ID NO: 329222 - DNA, 90 bp, Homo sapiens
cagggggcggctccttcctcgtcatccccctggagcaggttaagagcaggcttatgtgatcgctgtgcagtaactgaagaacatatgcgg

SEQ ID NO: 329223 - DNA, 100 bp, Homo sapiens
tggatgggcacactgtgggggtgtcctggtgcacccccagtgggtgctcacagctgcccattgcctaaagaagtgaaaggtgtagcagtcactcggccta

SEQ ID NO: 329224 - DNA, 50 bp, Homo sapiens
ccagacaagatggacaccgcggaggaagagtccggcagcgtcttctcttg

SEQ ID NO: 329225 - DNA, 83 bp, Homo sapiens
aaggagaaagagagctcaaaatcggagacagagtattgacaatgcagatcttcgtgaagactctgactggtaagaccatcacc

SEQ ID NO: 329226 - DNA, 75 bp, Homo sapiens
ttggcagcccacatgtggttacctcacaccagtcaaaagtgacagtggagaggtcacctggcggtagacccattc

SEQ ID NO: 329227 - DNA, 75 bp, Homo sapiens
ggctgaggagaaggaggagcgggccgtggaggcttcgccgcctagcatcaacaacagcaacttgtgattggcggt

SEQ ID NO: 329228 - DNA, 73 bp, Homo sapiens
tttaaagagcagactagacttctcaaggtgggtttggaggatttgggacaacatctacaactgcaggttctgc

SEQ ID NO: 329229 - DNA, 98 bp, Homo sapiens
gtccatccgagcgctgcctcaggtactgtgcatgcctgctgaggagttcagagagcttaaagaccaggatggagggggagatgataaaagggaagagg

SEQ ID NO: 329230 - DNA, 100 bp, Homo sapiens
ctggacttagctttgtcatgcaaagctgtcatttgctgtcgatgaatcggacaaagggtgatgaggaggagtattggaacagctccaagttcaaggcttt

SEQ ID NO: 329231 - DNA, 82 bp, Homo sapiens
tagagagccagcaatgcctccatgaacaatctcacccaattactctgctcagcttcctgcctgacacagctcacttcaagaa

SEQ ID NO: 329232 - DNA, 88 bp, Homo sapiens
acaagttcctgcagttcgcttacttcaaggtgtgtgggaatgccctcatgaagcaataccaggttcagttctggaagatgctaattct

SEQ ID NO: 329233 - DNA, 73 bp, Homo sapiens
accacagtacttcacatcgtcgttcacatgggggtttttaatgaccacaacaagcaagcatgcagcttactgc

SEQ ID NO: 329234 - DNA, 97 bp, Homo sapiens
aagggaaggaaatcatgtcaagcgaagccttgaaaaagctgccctgagacggtgtcccgccgaaaggcccgatgagagaaagggaaagttaaggatg

SEQ ID NO: 329235 - DNA, 90 bp, Homo sapiens
ggagaggaggatttcagatctagccagggtgaacgcccgactgcaagctggttggtgtcattggatacctggaggatcagattatgtctt

SEQ ID NO: 329236 - DNA, 83 bp, Homo sapiens
gaccccgcgagcaccagagtcggcgtaactatcgcctgacagggtatctgaagtaaaaggggataacggctctcaaaatcaag

SEQ ID NO: 329237 - DNA, 82 bp, Homo sapiens
gcttctccagaaaaaactacactgtctactgccaagaatgtggtggtaaaatgcacttgagggaaggtgaatttgaaaaggc

SEQ ID NO: 329238 - DNA, 75 bp, Homo sapiens
tttggaactgtctatctggtttcagacaagaaagccaaacgaggagaggaattggtaaaggagctggaagtgcga

SEQ ID NO: 329239 - DNA, 80 bp, Homo sapiens
gtccgcggccaggtgctggcgccgctgcccctccacggaggtgggcaccatgtccttgaagcttcaggcaagcaatgtaa

SEQ ID NO: 329240 - DNA, 97 bp, Homo sapiens
actgagcaccgccaccatggggaagggggtcaaaatgcagatcttcgtgaaaacccttaccggcaagaccatcacccttgaggtggagcccagtgac

SEQ ID NO: 329241 - DNA, 100 bp, Homo sapiens
tactttccatttgccttcctgggtcctgggaactccaacaagggagcaaatcagagaaatgaacccaaactacacagaatttaaattccctcaaattaag

SEQ ID NO: 329242 - DNA, 109 bp, Homo sapiens
atctgtcttcggtggactccttcggcagtccacccaccgccgccgcctcccaggaacggagctttgactgtaagatctgtgggaagagcttcaagaggtcatccacact

SEQ ID NO: 329243 - DNA, 82 bp, Homo sapiens
tgggagctgcctctgaggaacacgccgcaggccaagtcctgtatctgccatgtctgtggcgtccacctcaacaggctgcatt

SEQ ID NO: 329244 - DNA, 100 bp, Homo sapiens
gggcccagaccctggcccaggaagatccactaaaggaggccatccttccgccttcttctgcaggagtcagcctctcaacattgcctacagccacatctac

SEQ ID NO: 329245 - DNA, 89 bp, Homo sapiens
ggggactacgacgtccctcaaaccttgcttctaggagataaaaagacaggtgatttggcttctgcacagttaggaggagcaccaaaccg

SEQ ID NO: 329246 - DNA, 90 bp, Homo sapiens
cttgctgcccagacaagctgaaggaccacaggtcctacaacgtgactttaaaaagacagcagaaagcaaaaatgtcccattggaacgaga

SEQ ID NO: 329247 - DNA, 50 bp, Homo sapiens
acgcctgtaatcccaacactttaggaggccaaggcgggcggatcacgagg

SEQ ID NO: 329248 - DNA, 51 bp, Homo sapiens
ctgtgatggggccatccgggaaagcacgaacttccaggagccggtgcagcc

SEQ ID NO: 329249 - DNA, 97 bp, Homo sapiens
ttgtagcctattggaggaaaacacaccaagaactcctgtagcctgtaataccagctgtgggtactactctcagtgttggagatcatcaaaatacaat

SEQ ID NO: 329250 - DNA, 100 bp, Homo sapiens
ctatgagtgccgtgctccaggtggccactggcgtcatctctacgctgcaggacagagcgggatgccaccagcttgtccaaagggaagttccaggagctcc

SEQ ID NO: 329251 - DNA, 90 bp, Homo sapiens
actgggattcagtcagagccaggaagtgaccgatcctgagaaaggatttatagatgatgacaaagttacctttgaagtctttgtacaggc

SEQ ID NO: 329252 - DNA, 73 bp, Homo sapiens
gtcaccctcatggtcgctccgatttttgtggtcaacaaccaggaggagcttgagaggctgaacacccaaaacg

SEQ ID NO: 329253 - DNA, 100 bp, Homo sapiens
gtacaccaggccggccgctcctgccgtgcaaatgttcctcagcagcacatagcacctatcggattgcccccgaggaattagcacttgttcacaacttgag

SEQ ID NO: 329254 - DNA, 74 bp, Homo sapiens
acagatggacttcaaatgctgtttgtattccagagactagagtctgaagaagaagtagaggaacctgaagaaag

SEQ ID NO: 329255 - DNA, 83 bp, Homo sapiens
gtgaaggagaaattcgactatggcaacaagtacaagcggcgggtgccccgggttttaaaatcaaagatgggaaaatcggagaa

SEQ ID NO: 329256 - DNA, 51 bp, Homo sapiens
ctccaccaagggcacctctaaggctggacctgtcgggacgactgtaagtat

SEQ ID NO: 329257 - DNA, 75 bp, Homo sapiens
gcaccactgggggcccttccccaggctgaccccgcactacatctacccaccagccatcgtgcagcccagcgtggt

SEQ ID NO: 329258 - DNA, 71 bp, Homo sapiens
gtggcgtattccacatagcaaacagatgatgataattccgaagaaggcttccacactattcattcaggaag

SEQ ID NO: 329259 - DNA, 100 bp, Homo sapiens
gggccagaagcagctgtccccacaaaaagtgacgctttacctgcgaccaggcctgtttaaagaagaaaacccgtatgctagatttgaaaacaactaaagc

SEQ ID NO: 329260 - DNA, 98 bp, Homo sapiens
cggctcacaagggattcaagggagtcgatgcccagggcacgctttccaaaatttttaagctgcaccacatatatcacatgccctgcagaccccaagaa

SEQ ID NO: 329261 - DNA, 82 bp, Homo sapiens
gaaacccactgaagacgtctgcgtgagaatagagaccaccgagattctgaaggaagatttccattaggtaatttgtttaatc

SEQ ID NO: 329262 - DNA, 75 bp, Homo sapiens
gatagttgtcaggaggattcgacgttcagtgcccagggatgtggaggaggcagcacccagggtcattcctggagc

SEQ ID NO: 329263 - DNA, 82 bp, Homo sapiens
aaaggcctgacatatctgagggagaagcacaagatcatgcacagagtaacctttggaaacatcagaagctactctccattga

SEQ ID NO: 329264 - DNA, 83 bp, Homo sapiens
tctaccttctggaagctactactacgtggtgcttggaaaggcttcaacggaccacaccaaaatgccatctcaaatggaacacg

SEQ ID NO: 329265 - DNA, 101 bp, Homo sapiens
tgtcagtgttaaaggaacctctacaacgaaggtgaagccacggaagataaggttgatgccggcccaggatggatcagacctgtgaactacccagaagaaat

SEQ ID NO: 329266 - DNA, 100 bp, Homo sapiens
ctcgccaaagcagagaaatagaaccatgagtgaggcccgcagggacagcacgagcagcctgcagcgcaagaagccaccctggctaaagctggacattccc

SEQ ID NO: 329267 - DNA, 82 bp, Homo sapiens
ccgcgaagtcgcagcgccagacccaaggcccccgagtgagcgcgggcgccgaggtgaccaggcattgatgcacccccaggaa

SEQ ID NO: 329268 - DNA, 100 bp, Homo sapiens
ctgagctcaacggaggattgtgcctgagaagaacccacagaggccagaagcggactcctagaagaggggagcagcaaggatggaatgacagccgtgggcc

SEQ ID NO: 329269 - DNA, 100 bp, Homo sapiens
ctcctctgagcgctcagactcagaccaaggcctccggtgtggctgtctctgatggtgtcatcaaggtgttcaacgacatgaaggtgcgtaagtcttcaac

SEQ ID NO: 329270 - DNA, 100 bp, Homo sapiens
aggaggaggaagaacgggagttcagaaaacagttccccctgcatgaaaagctctcctttgggtggaacacagtgaagatcgacatgagtgcagcccggag

SEQ ID NO: 329271 - DNA, 90 bp, Homo sapiens
gtattgctgtgggtgctgggacttcccgtccgcggcgtggaggagtgaagacatttccacctggacacctgaccatgtgcctgccctgag

SEQ ID NO: 329272 - DNA, 75 bp, Homo sapiens
gagtgaccatgcagcaaaagaaggagggtcctctcagtgattaagcatcaattcctgaagattgccaagcccctc

SEQ ID NO: 329273 - DNA, 87 bp, Homo sapiens
ctggcgccgggtcccgcggggaaaacaatgcagatcttcgtgaagactctgactggtaagaccatcaccctcgaggttgagcccagt

SEQ ID NO: 329274 - DNA, 82 bp, Homo sapiens
gagatttaggggtggatgaaacgtgtctatttgaatcggaaggtttggagcaaattggtcaggagatgttggaaaaccttag

SEQ ID NO: 329275 - DNA, 82 bp, Homo sapiens
attagagaccaaggatttcgtggtgatggaggctgctctttggcgtaaattgcaatcgattagggatcgtttctcagaatca

SEQ ID NO: 329276 - DNA, 115 bp, Homo sapiens
ttcaaaaaggataaggagatcatagcagagtacgatactcaggtcaaaggtgtatactcttgatgtaccagatgcattctattactgttatagtccagaccctggtaatgcaaag

SEQ ID NO: 329277 - DNA, 75 bp, Homo sapiens
gctgctgggtgcggcgcgcctgccgcgcggggcaggttttctgtctcaactggtctctgacaagcctctgactga

SEQ ID NO: 329278 - DNA, 101 bp, Homo sapiens
gtgtcaggacccgaaatccttcctgtacctcttgagccaggccgaccccgacccggactcggacaaggtaaaagtacacctgtaagccagcttggttccgc

SEQ ID NO: 329279 - DNA, 83 bp, Homo sapiens
cggaactagagatgcccatctggagtgagtgcaggaccagctggtaggtgagtgctgtcctcggctcactttcctcaagctct

SEQ ID NO: 329280 - DNA, 74 bp, Homo sapiens
agctgcaagtgatgacagcatgacagacctgtacccacgagccgtctacatctgcacggaagacgccttcccgc

SEQ ID NO: 329281 - DNA, 96 bp, Homo sapiens
ccgcgccggaccctgaggcagcgagaacatcgcaaaggtggtgagccaggtgcacgcgttccaggagaacccttacaccttcagccccgaccccaa

SEQ ID NO: 329282 - DNA, 50 bp, Homo sapiens
tggtgcccatggaccagaaaaagagaccttttaatcaaagtgaagtttgg

SEQ ID NO: 329283 - DNA, 82 bp, Homo sapiens
gaccccgcagcctggaggagggctgtccggggctttggggctgttgataatcaggtgtatgtggccacagcctctcctgccc

SEQ ID NO: 329284 - DNA, 75 bp, Homo sapiens
gtcaaacagtgtttttgacttccagaaagcttacaagctgactgaagaggagcttcttggacacttaatgattgt

SEQ ID NO: 329285 - DNA, 98 bp, Homo sapiens
catgaaggacctgagcctgacgcgggccgcgcggattgatgaactcccagagggcgctgtgaagcctccagcaaacaagtatcctatcttcttttttg

SEQ ID NO: 329286 - DNA, 95 bp, Homo sapiens
gtcatctacaataataaatccaaagaggagccagttaccatgactcatccagatcacgagctgctcaggcaagagctgaacacgcggtttctggt

SEQ ID NO: 329287 - DNA, 100 bp, Homo sapiens
ggctggcgctggtggacgggctagtgcgaagcagcccctcgctggaccagatgttcgacgccgaggacaacgagacattagaggtgcacccacccccgac

SEQ ID NO: 329288 - DNA, 82 bp, Homo sapiens
aaagcttgggatataaggactggcaagatttgcctgaagacctggataatctccatttttgtcatggactgttaaaacgttt

SEQ ID NO: 329289 - DNA, 95 bp, Homo sapiens
ctgcaatggggacacgccaaacctgagtttctacagaaatgagatccgcttcctgcccaacggttccatcaatggtgagcaccagcctgaatgca

SEQ ID NO: 329290 - DNA, 80 bp, Homo sapiens
acatgcgcagcgactttagccagacgatgctgtttcaagggcaagcactttaaccttttaagcccaaccagatgagttgc

SEQ ID NO: 329291 - DNA, 82 bp, Homo sapiens
cttctttcttcagccgaggccgccgccgcctctccttgctgcagccatggaacagaatgttgctgcgggatgtaaaagctct

SEQ ID NO: 329292 - DNA, 98 bp, Homo sapiens
cagcagtctgggaatgccaacacagaaaccttgccatcaggatgtacagatcagctctcaaaatgtcttctgtgtcttctgagcgtcttctaagacaa

SEQ ID NO: 329293 - DNA, 100 bp, Homo sapiens
gtgatattgaccatgatggaatgcttgacagagatgagtttgcagtttgatccgtatgtgaaactttcattgtacgtagcggatgagaatagagaacttg

SEQ ID NO: 329294 - DNA, 74 bp, Homo sapiens
atatgtgacaagagtatgtggccttgcaacttttgatttgttcccgacaaggagttttctggttcagaccgtag

SEQ ID NO: 329295 - DNA, 88 bp, Homo sapiens
ctcggacgccagcggacacgcgggcgagtgggtaattccagaattgattggccataccattgtcactgtattactgctcatgtcattg

SEQ ID NO: 329296 - DNA, 100 bp, Homo sapiens
gccgcaggcggcaggggccggagggcccacaacccgcagagacttctactggctgcgctcctttctggccggagggttttctgtagtgatgatgtccata

SEQ ID NO: 329297 - DNA, 98 bp, Homo sapiens
tgcaggagcagacgctgcagttggagcaacagtccaagctcaaagaccctgatgctcccataagacagaaaatgccccttgatgatctggatagagaa

SEQ ID NO: 329298 - DNA, 74 bp, Homo sapiens
catctttcaagaggactttagactaattgcagataattaagataatatcgtctactgcattatttttggctgca

SEQ ID NO: 329299 - DNA, 100 bp, Homo sapiens
ccgtgctgcttatggcggcgctggagagggggcgctgagctgttgggatcttcgtgaagactctgactggtaagaccatcaccctcgaggttgagcccag

SEQ ID NO: 329300 - DNA, 90 bp, Homo sapiens
gggggagccccgcgcgcggcgtcgagttctaaagttcctgttgcttcagacaatggatgagcaatcacaaggaatgcaagggccacctgt

SEQ ID NO: 329301 - DNA, 108 bp, Homo sapiens
tcctaatattagttccgtcacaggggctatttgtttggatatcctgaaagatcaatgagagaaatagcccggaaacttgcaaatcctaagcaaccaacaaatcctttt

SEQ ID NO: 329302 - DNA, 90 bp, Homo sapiens
gctggcgctgctgctgcacgggcggctgctggcggtcatcatcagatttgaaatatttaaagtggatacaaaactatttcagcaatgcag

SEQ ID NO: 329303 - DNA, 75 bp, Homo sapiens
aagatttaacattccaacacataaaaattatttatccaacagctcctcccagatcctgtggtattgtggaaattc

SEQ ID NO: 329304 - DNA, 98 bp, Homo sapiens
ggcgcgccgcagctgcccaggccggaccgggccgggcgcccgcagcggagctggagtttgttcagatcatcatcatcgtggtggtgatgatggtgatg

SEQ ID NO: 329305 - DNA, 51 bp, Homo sapiens
gggcggcgtgcggcctagcgtctcaggaatactcccccagttgcaagaggc

SEQ ID NO: 329306 - DNA, 51 bp, Homo sapiens
gtaacttcttggagggtggaaggtggatggaagcatgcctaggggaagatc

SEQ ID NO: 329307 - DNA, 97 bp, Homo sapiens
ttttatgataacccaatccagtttgtgggaagatcggcattccagtacctgcctaaactccacacactgtcctcagtttgcagaagacccctcccag

SEQ ID NO: 329308 - DNA, 100 bp, Homo sapiens
ctctttttgccaccaatcccttcgatcaggatgttgtacatagtggaatgtcatgggatcacccttcttccccagttcttgggcatgtaccggcttaatg

SEQ ID NO: 329309 - DNA, 98 bp, Homo sapiens
tcttccaaaggagaaattcatggcggaagtaatgggatctataaagtgaaagatgtcatgtatatctgcccatttatgggagcagtgagtggaaccct

SEQ ID NO: 329310 - DNA, 87 bp, Homo sapiens
gagagcctgctggaggagcgggccgggcggggggcctcggaagtgagctttctcttaagtgtgccaagctgccatccaactttcttg

SEQ ID NO: 329311 - DNA, 75 bp, Homo sapiens
aagatatgtgagatggtggatgaatccccaggatttgctcgaatatttgggtacccagtaggtatcgttggaaac

SEQ ID NO: 329312 - DNA, 83 bp, Homo sapiens
gttattcctactaacgtcctgtgtcactgaggattatattccatcacaacaagatattctgcttgccagaagacccaccaaag

SEQ ID NO: 329313 - DNA, 115 bp, Homo sapiens
ccgacatgttcacgcacgggatccagagcgccgcgcacttcgtcatgttcttcgcgccctgatgaaggatttgggggcagagcacttggcaggtcatgaaggggtccaacttctc

SEQ ID NO: 329314 - DNA, 90 bp, Homo sapiens
gaaacagctggctaagctcatcattgttactgctggatgaggcagtggctgaagcccacctgggcaagctgaatgtgaagttgaccaagc

SEQ ID NO: 329315 - DNA, 100 bp, Homo sapiens
gtgacatctgcgccatctgtcaggccgagttccgagagcctctgattctcctgtgccagaatgccagctgatgaagaccgagaggccgcgacccaacacc

SEQ ID NO: 329316 - DNA, 75 bp, Homo sapiens
tttggaaggccgggtgggccgaggttacactcctggcacaccttacaaagtgtcctgttcccccaccagcggggc

SEQ ID NO: 329317 - DNA, 94 bp, Homo sapiens
ggcgcctgtgggcacagacaaggagctcagtgacctcctggacttcagcatgcaaattgtggctactaatttgccccctgaagatcaagatggc

SEQ ID NO: 329318 - DNA, 46 bp, Homo sapiens
cctcccaagtagctaggactataggctgttagagaaacgctagcat

SEQ ID NO: 329319 - DNA, 90 bp, Homo sapiens
caacaagtgaaattgaggtcacaccttcagtccttcgagcaagtgtcatggagaaactccagctgggcccagagattctgcagcgggaaa

SEQ ID NO: 329320 - DNA, 100 bp, Homo sapiens
gttaatatgatcctctgttgaagcaagaagacaaactgtatggtggagaaagaagtgggaaggatctgcgcggactggtcgaattgacaaatcttaccct

SEQ ID NO: 329321 - DNA, 100 bp, Homo sapiens
acgccgccgccgccaccgccacctgcgcggcagtcatcaaggtctctgagcggcccctgatgttcctgttggacactcctggcgtgctggctcctcggat

SEQ ID NO: 329322 - DNA, 48 bp, Homo sapiens
cagtctggctgcagcaaaaagcagtgaacagcgttctgagtgtggacg

SEQ ID NO: 329323 - DNA, 95 bp, Homo sapiens
aagagcctttattcatcgactcagtcagtctcttggtttggtctctaaaagtaaagggtgcactttacaggtccccgatgaaccaagagaaccct

SEQ ID NO: 329324 - DNA, 98 bp, Homo sapiens
tccctggacggctgcaccgcccagcgcacaggcatgaagtatcggttgtttttgagcacgttcactctcgcagtgtcagctggggctgttttgctttt

SEQ ID NO: 329325 - DNA, 74 bp, Homo sapiens
gctgaggcttggcatgacaaatccgccctatattttagagcatctggaggcggctgagccagaggccaactgca

SEQ ID NO: 329326 - DNA, 90 bp, Homo sapiens
cgagaccgtgaccgagagcgtgaccgagagcgcgaatatcgtcatcgttagaagtggctttcctggagatggcatgcagcagccagcata

SEQ ID NO: 329327 - DNA, 90 bp, Homo sapiens
gctcagaggagatgcaccggctcacggaaaatgtctataagttttccaagagataacttcaccaagatgtccagtgataggcaaaggtcc

SEQ ID NO: 329328 - DNA, 100 bp, Homo sapiens
gcagctgattgtaatgaatttgcccaatgttttgatgattggcagagacccactgtctgacctagaggatcaagacataatgggagcatttttagacaag

SEQ ID NO: 329329 - DNA, 75 bp, Homo sapiens
acaaggacggaggcgttgcgattattgaccagtggatctgcgcacacgccaggacctcagcagccatgtcgaagc

SEQ ID NO: 329330 - DNA, 100 bp, Homo sapiens
gattatactggaaagtatgcaccagctgtcatcgtttgtcagaagaaagcagctggctcagaaaacaggtccccaaggagcagtatcccctccttctcgt

SEQ ID NO: 329331 - DNA, 75 bp, Homo sapiens
tgccgcttcagttctcccggtgtggccacgagtcggctctattaccaggttttaaacttcgccatgatcgtgtct

SEQ ID NO: 329332 - DNA, 100 bp, Homo sapiens
gggaagcgcagctcgaaaagcgatgccgattctggtttcctggggctgcggcccacttcggtggacccagcgctgaggccttatatgaccacctaatgga

SEQ ID NO: 329333 - DNA, 50 bp, Homo sapiens
tcagtattgagccaggagttgaggtggctcgtaagttggtgatcattgaa

SEQ ID NO: 329334 - DNA, 95 bp, Homo sapiens
gaaaaaggaagtttgtcctgtcctggatcagtttctttgtcatgtagccaagactggagaaacaattttttttgaagaagcaggatgctgatcta

SEQ ID NO: 329335 - DNA, 100 bp, Homo sapiens
ggctgaaggaagatggcggacggcgtggaccacatagacatttacgcggatgtcggcgaagagttcaaccaggcttcagggatgacttcttagggggcag

SEQ ID NO: 329336 - DNA, 100 bp, Homo sapiens
ggatctggaaagcatcatcagacccaagtgccaagttatttactttcccatcaggtttcctgatgtgagcaggtcccgaggaggtagaaatcaagtgccc

SEQ ID NO: 329337 - DNA, 101 bp, Homo sapiens
tttgtttggcgtgccaagcttctctgtgaaagagcacagcacttgctctgaaatttggggactgagtacaccaaatacgatagatcagtgggatacaacag

SEQ ID NO: 329338 - DNA, 82 bp, Homo sapiens
gaggaggtcggctcagccgggcagtttgaggagctgctgcgcctcaaagccaaaatcattgatcagcgattcgagaaggttt

SEQ ID NO: 329339 - DNA, 100 bp, Homo sapiens
ggtcctggtactactgcttgctgtggcatttggacatgctttagagagagagtcactcaagggaaaggattaatgccagatggtaccagcagatttactt

SEQ ID NO: 329340 - DNA, 75 bp, Homo sapiens
gacccgggtgccgaggagcgggaagagttgctggggtctggccgtgggcctgggcttcggggcactggcagaggt

SEQ ID NO: 329341 - DNA, 99 bp, Homo sapiens
ctccgggcgggagcccagggtggcggcgcctgcggccgagcgccgggagcagatcagctggacatcatctccatggcggagacaaccatgatgccagag

SEQ ID NO: 329342 - DNA, 73 bp, Homo sapiens
ggacgccctgtgcggttccggggagctcggctccaagttctgggatgatgacctggaagaaggtgaagtgaag

SEQ ID NO: 329343 - DNA, 97 bp, Homo sapiens
cttctacaaattctttcaggagtttacccaagaaccattggtggagatagaaggcatggattccgtgaaggaacaacacctaaacccaagagggcag

SEQ ID NO: 329344 - DNA, 100 bp, Homo sapiens
acggcggcagcagcggcattcaggttttgcactgattgcaaaaataaagtcctccgagcatacaatatccttattggtgaacttgactgcagcaaagaaa

SEQ ID NO: 329345 - DNA, 82 bp, Homo sapiens
aatgtaggactttgcagccctctttgccggaggaaggacttcacagagaatgcagttgtcttgacttcaggtctgtctgttc

SEQ ID NO: 329346 - DNA, 74 bp, Homo sapiens
acattatttgaggtggtgaaactggggaaaagtgcaatgcaggtaaagctttccagtttgaatttagatgatca

SEQ ID NO: 329347 - DNA, 75 bp, Homo sapiens
aagtcgtcttccacttgcacgaaagctttcctaggccaaaaagaggtttaccgacaagactgtgaaactttcggg

SEQ ID NO: 329348 - DNA, 83 bp, Homo sapiens
gggaggatgacggagctgcagtcggcactgctactgcgaagacagctggcaggatgaccgagtgggagacagcagcaccagcg

SEQ ID NO: 329349 - DNA, 100 bp, Homo sapiens
tcccacaggagtcatgcccagtgtgtgaagaaggacagaataacgggctcccagattcacaagccccaccaagaggatcaccccaggaacgcttggaggc

SEQ ID NO: 329350 - DNA, 100 bp, Homo sapiens
tatatctgcgcgtggagctgagtgacgtacagtttctacagcagtataatcactacaaatccaatgtggagattttcaaattgcaaccaaataaacccag

SEQ ID NO: 329351 - DNA, 100 bp, Homo sapiens
ctcctcagtgcgaagaagctgcagccgcacctggccaagggtgagcgccgcgagggggtcaacgcctccgtcagctctgatgtgcagtcggtgttcaagg

SEQ ID NO: 329352 - DNA, 74 bp, Homo sapiens
catggctcaactggaagcactgtggaagaagatggagggtgtgtatccatatattcctgcacatattacaaagc

SEQ ID NO: 329353 - DNA, 100 bp, Homo sapiens
acgtccaggaatagaagtgacctgctttttcgcaagctggacgtaaagaaagaagtgatgcactcaattctgcaatagataaaatgaccaagaagaccag

SEQ ID NO: 329354 - DNA, 98 bp, Homo sapiens
cagggactggcgcactcacagctttccagcagcaatgcagagtccctggacaggctcctgccacctgtgggcactgggcgctctccccggaagcggac

SEQ ID NO: 329355 - DNA, 83 bp, Homo sapiens
gtgcagctgcctcagttcttagcgcaggtagatcatgccactaatcgtacccagtttggggagaaaattcacaactttgggct

SEQ ID NO: 329356 - DNA, 99 bp, Homo sapiens
cagccatggcggaggcggctttggaagccgtgcggagcgagttacgagaattcccggccgctgcaagggattatttgcatgggtgcaaaagaaaatggt

SEQ ID NO: 329357 - DNA, 100 bp, Homo sapiens
gacaccaacaccctggaaacccccttcgatgacctccagagcctcccaaacgacgtgatcaccacgcttattaatcataaagataataccaaaaagtctg

SEQ ID NO: 329358 - DNA, 98 bp, Homo sapiens
ggaaatccaaaggcagacagtacgggctcccttcgccaaactcttcattttctctttggtacgccttattacatgtctccagagagaatacatgaaaa

SEQ ID NO: 329359 - DNA, 82 bp, Homo sapiens
aacaagggcccttcctatgggctctcggccgaagtcaagaacaagtttggtgccctggttgtcagatgttggaaagcagtag

SEQ ID NO: 329360 - DNA, 103 bp, Homo sapiens
catgggacctggcaaagtacttcagaacttttattccttccagaagcagacgttcctgaatatgtttgttgacagcaatcaggatgctcgaagaaggtctgta

SEQ ID NO: 329361 - DNA, 75 bp, Homo sapiens
tcgccgggtgtcgatccttttccctccagtcagcttattgacatgtgtgtgcagaactgtggtccaagtttccag

SEQ ID NO: 329362 - DNA, 75 bp, Homo sapiens
caaataagctatatactttggttacctatgtacctgttaccactttcaaaacaacgaaggttttgggaacagtaa

SEQ ID NO: 329363 - DNA, 75 bp, Homo sapiens
ccagcgtgagaaccaggagctcaatgcccacaaccagattcccaggactccggctctctctgcttctgtttccgg

SEQ ID NO: 329364 - DNA, 75 bp, Homo sapiens
agttcaacatcctcctggccaccgactcctacaagcctgtcaggattggagctgctttccgagcacctggacccc

SEQ ID NO: 329365 - DNA, 50 bp, Homo sapiens
agaacctccacagtcaagaggacgccaaaactggacaagccaaggcatct

SEQ ID NO: 329366 - DNA, 75 bp, Homo sapiens
gcctaccaggaggccaggggtgtcgccatggacagacatggtggttctgattgcctgggagatagcccaaatgcc

SEQ ID NO: 329367 - DNA, 82 bp, Homo sapiens
gtgggacaggtggcggcgaccggcggcgtccgaggaggctcttgtcaggatggtgaagctgttcatcggaaacctgccccgg

SEQ ID NO: 329368 - DNA, 75 bp, Homo sapiens
caactttgcctgactgcttcaaaatttgtggcgcatcttattaaccaaaatgtgatggagtctcgctctgtcgcc

SEQ ID NO: 329369 - DNA, 100 bp, Homo sapiens
caaagagcttttcctaggcaaaatcaagaagaagcaggagctacctccagaggaacaagggcccagcattcggaacctggatttctggcccaagctcatc

SEQ ID NO: 329370 - DNA, 50 bp, Homo sapiens
ccaagaggcagacctaggaaatgggtgctggagaatctggtaaaagcacc

SEQ ID NO: 329371 - DNA, 100 bp, Homo sapiens
cgctgcccgagaatgggaattctcttcactagaatatggagactgttcaatcaccagggtttcccaacagtgatgtcacaagattgaccacattgatcac

SEQ ID NO: 329372 - DNA, 98 bp, Homo sapiens
agcaagaaggccctggacacagcaatatctctgggctttcacaggtctcctctgagcctccggcctccataagacccaaaacagatgacacctcttcc

SEQ ID NO: 329373 - DNA, 89 bp, Homo sapiens
tctgtcagctctttccccgtcagcatcccagccgtgctcacgcccgagcgggaagaagttccgcagcaagccgcagctggcgcgctacc

SEQ ID NO: 329374 - DNA, 100 bp, Homo sapiens
catcttcaacttgtagacacagccgggcaaatgatgactttgaccagtttgataagcctggcgcggaacggtcgtggagaagaagagctgctgatgagga

SEQ ID NO: 329375 - DNA, 74 bp, Homo sapiens
ggtcgatggtcggcggcgcccggatgggcagctgagcacccaccaaggctccggatgtgttccccatcatatca

SEQ ID NO: 329376 - DNA, 98 bp, Homo sapiens
caggagcagccgcagtagatctcgaagtatctcaaaaagtcgctcccggatggatagaatgacagaagatgctcttcgcttgaatctgttgaagcgga

SEQ ID NO: 329377 - DNA, 78 bp, Homo sapiens
gatcctccctcttgaagttgccttctgtggtctaaggagggcctgaaggttcaggtccaagcatctcattttgaaggc

SEQ ID NO: 329378 - DNA, 88 bp, Homo sapiens
gcgaccagacaggcggcgccatcttcgaacttagacttccggaaggactttggcgaggccgattcgaagacagtctcttacacctcct

SEQ ID NO: 329379 - DNA, 74 bp, Homo sapiens
ccggaagccggaggaacgggcccgtcaagctgcacctgacagatgccctccaaatccttggttatggaatattt

SEQ ID NO: 329380 - DNA, 74 bp, Homo sapiens
atgcttattttctgcttccaaaggtccagagcattcagctgtctcaaatgcagatgtttgagacggaggcagat

SEQ ID NO: 329381 - DNA, 100 bp, Homo sapiens
tgaagatttaagaactgaatgtgcaacttgcaagggaactggagacaatgaaaatcttgtcaggctgaccggttccctgatgtgttacctgcttctgcta

SEQ ID NO: 329382 - DNA, 93 bp, Homo sapiens
gatagcagatcctatctgttcaattcttatagccattcttatagttgtaagaaaaatggagtgctggcatacattgggaattttcgcctgctt

SEQ ID NO: 329383 - DNA, 100 bp, Homo sapiens
gcggcttgccctgcacctggtcaatgagttcctttatgttctcatcgtgctcatgaagcacctgagagatcctgaaggagctagacgagtgctacgagcg

SEQ ID NO: 329384 - DNA, 82 bp, Homo sapiens
ctgcgggcccgctccgacgcggaagacgccgactgggcccccacgtctgcctctctgggtttgggagtggctgctgccctgg

SEQ ID NO: 329385 - DNA, 104 bp, Homo sapiens
ggatccgggccaagtacgagcgacaggagttcatctacccggagaagcaggagccctactcggcaggaaggaagcagccaccctcgccatggcctccccgcccg

SEQ ID NO: 329386 - DNA, 90 bp, Homo sapiens
tgtctccgagctcgcctgcatctactcggccctcattctgcacgacgatgaggtgacagtcacggtgccacatctgccccattcctcatc

SEQ ID NO: 329387 - DNA, 97 bp, Homo sapiens
agattcgcagtggtcgcttcttctccttgcaaattcctgagcacttgatggctcatgctagttcagcaaatattgggcccttcctggagaagagagg

SEQ ID NO: 329388 - DNA, 75 bp, Homo sapiens
cccccccaggaaacctgagcccctggttaaggtcaaaaggctgagtttcaaattctggataatgtagactcaacg

SEQ ID NO: 329389 - DNA, 96 bp, Homo sapiens
cggttctacagcacccggtgctgcggctgttgccatgtccgcaccgggacgatcatcctggggacctggtacatgaatgaaactagtgatcgagaa

SEQ ID NO: 329390 - DNA, 75 bp, Homo sapiens
cagccgacttccgcacgcagtcggagcaggtctacagctttgtgatatcaaagctcagctctttgaaacatccag

SEQ ID NO: 329391 - DNA, 75 bp, Homo sapiens
cagaagcctcccttccagtcagggcaagacactaagggcgactaccagaaagcgctgctgtacctgtgtggtgga

SEQ ID NO: 329392 - DNA, 85 bp, Homo sapiens
tgcgtgggggaccggctgttggcggctccaccgggggacggctacgtgcaggcggacgcccggggccccccggaccacgaggagc

SEQ ID NO: 329393 - DNA, 99 bp, Homo sapiens
attcagaatttggtggtttggggacacttggtacacccacagccttagccgcacatccccaactagcatcttttccagagccagtcttggtgctctgtg

SEQ ID NO: 329394 - DNA, 75 bp, Homo sapiens
tctcaaaaacaaaattctgaactcaggacttggcaagttggctatacagtgcgctttgatgatgtcacctcagaa

SEQ ID NO: 329395 - DNA, 100 bp, Homo sapiens
actgcttcgacaagagtgatgagaaggagtgccgaaacccagcgtttgctggcagaaccagttcctggcatcaaagccgaaccagatgagagcaacgccc

SEQ ID NO: 329396 - DNA, 87 bp, Homo sapiens
ggaatccacatatctcctctaccagtgcaccgtccaggtgaggttagagctggggcatcgcgcccaactgcgcaagaagcccaccac

SEQ ID NO: 329397 - DNA, 74 bp, Homo sapiens
gaattacctggaacttcatcatcatctacttcacaggaattgccatttgcgctaatgtgcatgctacaacagca

SEQ ID NO: 329398 - DNA, 125 bp, Homo sapiens
gtccccccaactgggtacagacctccaccgccacccccgacacaagagacttatggagaatatgtggtattaaagataatcaaacattatcaagaagaaggacaaggaactgaagttgttcaagg

SEQ ID NO: 329399 - DNA, 50 bp, Homo sapiens
tcacccgctacatcgccagtctgaagcagtgcctccggagccagcgtggt

SEQ ID NO: 329400 - DNA, 88 bp, Homo sapiens
ccgcatgatggtacccaaagtcaggtgtggccgacgacgatgccctcgctgaggagcgcatgcggagaggccagaacgccctgccagc

SEQ ID NO: 329401 - DNA, 82 bp, Homo sapiens
tggaccgtgctagtgacctgactgatgccttcgtggaggaaaatgtttataggaggccttagctgggacactacaaagaaag

SEQ ID NO: 329402 - DNA, 76 bp, Homo sapiens
ctgagcttcaaaaggggggacatcctcaagttggcttggacgccttttctggctgcattcagtgtgggtctacaag

SEQ ID NO: 329403 - DNA, 82 bp, Homo sapiens
cccagccccacagaccagcccagcattcaggcgagaaccactgtctctgatcaacgtgcggaagaggaacgtggaatctggg

SEQ ID NO: 329404 - DNA, 74 bp, Homo sapiens
cttatcagcaggttgcaggtgaacatggccttgaggttgtatcagagtaagatggacggtagctttgattgtga

SEQ ID NO: 329405 - DNA, 50 bp, Homo sapiens
ctgacgtgggaagccatggagcagatacgagctccctctttgcccactag

SEQ ID NO: 329406 - DNA, 75 bp, Homo sapiens
ggggaccagagatggacggtcactcagcctatggaggtatctctcctctttgtcacaacctctttgccctgtatg

SEQ ID NO: 329407 - DNA, 96 bp, Homo sapiens
tatcctcggaagagcgctcccaggagaaacaagtcccgcagcccccggaagccaatagactccctcagggactctcggtccctcagctactcgcct

SEQ ID NO: 329408 - DNA, 51 bp, Homo sapiens
gtcaaacccacccggcccaactcactatgagaatgaagatttaaggaaact

SEQ ID NO: 329409 - DNA, 100 bp, Homo sapiens
tgaatgcaccaagcctgatcaagctactccagcagccttggtattacagggtcttcatgcactctgtcaagctgagagtattgggaaagggtcgttgtgg

SEQ ID NO: 329410 - DNA, 75 bp, Homo sapiens
gcccggatgctgaagcaaaattcagagagattgcagaagaggaagaatacaagcgattgagtgaagcactagcag

SEQ ID NO: 329411 - DNA, 101 bp, Homo sapiens
gccggtgccagcacctttcggcttctgagacggcggcagcagcggcattcagagtgctgtgcccccctcccaggaggaaaggccgggccccgctcccacca

SEQ ID NO: 329412 - DNA, 82 bp, Homo sapiens
ggtcttttcaaccatctttggcgaggccttgcttccttccactcgaggcaggtgtttgtttgccagtggcagtccatttggg

SEQ ID NO: 329413 - DNA, 100 bp, Homo sapiens
tggggagacggactggaagctgcggcttcccgtggcctgcacgcagaggctccccacggccgccaaaccagcctggacaccaagtctgtgtcagaaggcc

SEQ ID NO: 329414 - DNA, 90 bp, Homo sapiens
acattagcagatatactattgtactatggacttcatcgctttataattgagaggatccagaatccagatctctggaatagctaccaggca

SEQ ID NO: 329415 - DNA, 100 bp, Homo sapiens
cccagaggcgcctcctccacaccccccgccgcagcagcaccggcgacagctcaccatggatgatgatatcgccgcgctcgtcgtcgacaacggctccggc

SEQ ID NO: 329416 - DNA, 98 bp, Homo sapiens
ttctctgtgctccacacttaccaggaccacttgtggaaactggaggcgaccagtgcccagaatatcgagttcctacaggtgattgccaagagggagga

SEQ ID NO: 329417 - DNA, 109 bp, Homo sapiens
ttttatgctgatcacaaacaaatccttgaaagaagaagatggagaagaaatagttacctatgatcgttttgagagattacctgaagttgcactcaaaagcaagatatac

SEQ ID NO: 329418 - DNA, 117 bp, Homo sapiens
aaaggcaagagtaacagcagcgccgtcccgtccgacagccaggcccgggagaagaggctttcgagctacccttggatgattgtgaagtgattgaaactgcagcagcgtccgaagtga

SEQ ID NO: 329419 - DNA, 100 bp, Homo sapiens
ccagaaagatggcatcatttttgccctcaaaagaaatggcagcagactgagaactatgagcagagaatacgtgaacaacaggaacagctgtcacttcaac

SEQ ID NO: 329420 - DNA, 100 bp, Homo sapiens
gggataggagaaggatgtggactgcagtgctgcagtgccagattcctctctttggtgctgacactattggccagagaagtcctgatggaccggtactgag

SEQ ID NO: 329421 - DNA, 83 bp, Homo sapiens
ggggcggaggcggaggcagaggtggaggcgctttgaaaggtgacttaagagattaaaattaatttggttgctgttggttctga

SEQ ID NO: 329422 - DNA, 76 bp, Homo sapiens
atccgagttactcatgagaccagtgcccatgaaggtcagactgagggaaatgatcttcattggttagcatgtgcct

SEQ ID NO: 329423 - DNA, 102 bp, Homo sapiens
tgactgagagaaacccactgaagacgtctgcgtgagaatagagaccaccgaggattttttatcaagcagaaatgcatcgaacaacgagaatcaagatcactg

SEQ ID NO: 329424 - DNA, 75 bp, Homo sapiens
caccatccagttcagtgcatgaagatgaaggcgatgatacctctaagtttgtcactcaagccctatcagaaggtt

SEQ ID NO: 329425 - DNA, 100 bp, Homo sapiens
gattccgcgagccgacaccatgcgatccaaggcgagggcgaggaagctagccaaaagtattatcgggggacccacggggtcattgtggtttacgacgtca

SEQ ID NO: 329426 - DNA, 101 bp, Homo sapiens
catggagtctcccttatgcaatgaagccctggtagatcaactttggaaacttatgaattctgacctgaagattatcggctataagagaataagaattgcag

SEQ ID NO: 329427 - DNA, 90 bp, Homo sapiens
gtgaatgctgctaaaaacaagactggggctgctcccatcattgatgtggtgcgatcggcactgaacccctactatgggttccaggccttc

SEQ ID NO: 329428 - DNA, 95 bp, Homo sapiens
tccaaggtcttggattatgttacaagaaccagataggacaaggccaactggaaaatatatgcagatgatgaacattcttaagccaattgcctttg

SEQ ID NO: 329429 - DNA, 89 bp, Homo sapiens
ggaggctttcagccggagaagcgagtttcagctgcacacgtcacatggagatgggcgtcaagaagttacctctcgtaccagccgctcag

SEQ ID NO: 329430 - DNA, 75 bp, Homo sapiens
agcttccagttagtggatatagcacaccatccccagccagttttttgccctgacatctcttcgtcttgtgttttt

SEQ ID NO: 329431 - DNA, 100 bp, Homo sapiens
catctgccatgccctcctggaccctgacaagtcctcactgggctttgtggccctcgtgctgagcacactgcacacgctcacctacggctggacccgcgcc

SEQ ID NO: 329432 - DNA, 96 bp, Homo sapiens
gggagaaagacacagtctccatcatcccaggaaggaaaggaggtgagctggcctcagctgtccacgcctacacaaaaacaggagacccgtacatgc

SEQ ID NO: 329433 - DNA, 100 bp, Homo sapiens
gaagagaaaattgtgaactaaggccccctgcccccttttcctggtgcatgtgaagttatcaaaaacaggctggcagtgatggtgaaagcataggaaactg

SEQ ID NO: 329434 - DNA, 100 bp, Homo sapiens
gctggagatggtggagtccgtcagaactctaactccttgccactcaagaaatgtcctccctttcagaatatgccttccgcatgtctcgtctcagtgcccg

SEQ ID NO: 329435 - DNA, 96 bp, Homo sapiens
ccatgtttctgtccctggtgttcctggctgagctcgtagctggcatttcagggtttgtgtttcgtcatgagaagaactgcaggagctgcgggaacg

SEQ ID NO: 329436 - DNA, 100 bp, Homo sapiens
tttcactggcaaagtggttgtggtcactggagctaattcaggaatagatggactgcctctgggggtcaacttggggaagaacaagacctcagtggacgcc

SEQ ID NO: 329437 - DNA, 95 bp, Homo sapiens
ccccacctgcccggtgcccgaggaggcagccaagctcgtagcctgccactccgtgcgagccttcacgtaaatgggtccagtcatgcctcccagta

SEQ ID NO: 329438 - DNA, 83 bp, Homo sapiens
ttggagggccttccccctagcacctcctcaggccagccacccctgcaggacatgctccctgaaaagcaaaggcctcatctcca

SEQ ID NO: 329439 - DNA, 50 bp, Homo sapiens
ctaagcgctcgcggaaggaggagacctgcgaccgcatcaagcagtccgcc

SEQ ID NO: 329440 - DNA, 96 bp, Homo sapiens
gttcgtcctcggcggccccggcgccggcaaggggacccagtgcgcccgcatcgtcgagaatgttgctgaggcacagtgcatcgccaaccaagttca

SEQ ID NO: 329441 - DNA, 100 bp, Homo sapiens
taatgaattcagtggaaccatcacacaaaagcacacaaagacctcctcctccacaggggagacagaggtcagaagagatcaattctacagaaatttccag

SEQ ID NO: 329442 - DNA, 75 bp, Homo sapiens
tgcaccttaaaaacaaaagattgagctgcactgtattcctgtattacaggaataacggaagccgttaaagagatc

SEQ ID NO: 329443 - DNA, 98 bp, Homo sapiens
accgagagcgtgaccgagagcgcgaatatcgtcatcgttagaagtcggatacttctggagactatgaaatcacactcttaaaaatctgtggtggagat

SEQ ID NO: 329444 - DNA, 101 bp, Homo sapiens
tggggacctgtttgacatcatccctccccagaaccgggggcggctggcagacaagaggacagtcgccctgcctgccgcccggaacctgaagaaggagcgaa

SEQ ID NO: 329445 - DNA, 100 bp, Homo sapiens
ggtcaggaaagattccgaacaatcacgacagcgtactacagaggagccatggaagacaactgttagttttgtggcttactgctgctccacccagtgtctg

SEQ ID NO: 329446 - DNA, 101 bp, Homo sapiens
cagccgtcccctctgcagcctctctgacaagtgagaacggagaccaacctgggctgaagaaagaagattaaatgctgaaacatttggaatcccacttcgtc

SEQ ID NO: 329447 - DNA, 50 bp, Homo sapiens
aagtgattacagacattgccgggacgctagagcggtcttatttgttgaag

SEQ ID NO: 329448 - DNA, 90 bp, Homo sapiens
gcccgcaactacctggaacctgagtgtttaatggggacagtgggcactctcctgcttgaaaacccacttgggcagaatggactcacccac

SEQ ID NO: 329449 - DNA, 75 bp, Homo sapiens
cgcgaatggcacgagctggagggagaatttcaagaactgcagctgcaagctttcttcctggtggcagatgacatc

SEQ ID NO: 329450 - DNA, 126 bp, Homo sapiens
gcgggggattgtgggagtctccgcgtcccgctcgctgggagagaggtacctctccttttccctctccctttccctaagggcaagaatatcacggcatgggcatgagtagcttgaaactgctgaagt

SEQ ID NO: 329451 - DNA, 75 bp, Homo sapiens
ggcgcagaaaccccgttgacaaggcactgctttttcatgacgcagcccctgtcaaagggaacaggaagcagtcca

SEQ ID NO: 329452 - DNA, 75 bp, Homo sapiens
atgaccacagtggaccagctcgagtctcaagtggacaatggaaaagaagatttttcagatcccctggatgcatgc

SEQ ID NO: 329453 - DNA, 100 bp, Homo sapiens
gtggaactagtcggacaaagccctcgcgtcggacccttgccagaactatgatctcaatgccacccaccaacactgtgttttggccggttcacaacctcgg

SEQ ID NO: 329454 - DNA, 100 bp, Homo sapiens
ccaagccctccttcgtgtcgtacgtacgccctgaggagccttcacgtaaatgggtccagtcatgcctcccagtaagaagccagaaagctcaggaattagt

SEQ ID NO: 329455 - DNA, 100 bp, Homo sapiens
caagtaaaaggtgcttggaatggttctatgaatatgcaggctacggaaacaggccgagaagaacgtggagaagaaaattgacaaatacacagaggtcctc

SEQ ID NO: 329456 - DNA, 100 bp, Homo sapiens
gcagactctgaagatgatcagacaaggcaaagcgaaattggtcattctcgctaacaactgcccagctttgaggggtgggaaccgccaaacctctcccttc

SEQ ID NO: 329457 - DNA, 100 bp, Homo sapiens
gtccccaaaaagcctcccccatcaccccaacctacagtggagacctttggcgacttggcctttggcgacatcttcctccacctgctcacgggcaaccttg

SEQ ID NO: 329458 - DNA, 83 bp, Homo sapiens
tctacaacgtgctggccaaggtgaagcgcgagcgcgacgagtataagcggaggtttggtgcacctcgatttggaggaagtagg

SEQ ID NO: 329459 - DNA, 76 bp, Homo sapiens
gaacaacagaaaactcaaaaaccatctggtgctgtggattgcaaccttgaatgttgaatataagctgggattccaa

SEQ ID NO: 329460 - DNA, 75 bp, Homo sapiens
tcaaggagcacaagtagctgctcttccaagcaaggaagtcgacaggtgagcatatgacggaggaggagatgttgg

SEQ ID NO: 329461 - DNA, 83 bp, Homo sapiens
aaggtctctggagacatcttcagcaggcagtcatggatcaggtaatgcagtttgttgagccaagtcggcagtttgtaaaggac

SEQ ID NO: 329462 - DNA, 50 bp, Homo sapiens
cgagtaggaactgcaggggaaatggaaaagaccttcagagaagacatggc

SEQ ID NO: 329463 - DNA, 100 bp, Homo sapiens
ggactggtgatctacgtgtgctttttcaagggagctgataaagaacttcttcccaaaatgggtaaactaacattatggatttttccaagctacccaaaat

SEQ ID NO: 329464 - DNA, 100 bp, Homo sapiens
ttttgcagcctgcaccggccaacggttgtgaactaaaggccgacaaagattatcactttaaggtggataatgatgaaaatgagcaccagttatctttaag

SEQ ID NO: 329465 - DNA, 83 bp, Homo sapiens
ttaatggaacaatgattctgaaaagaacggagcttgaagcaaagctgcaggttttaaagtactgccaaatctgtcgaaaggga

SEQ ID NO: 329466 - DNA, 82 bp, Homo sapiens
tggattccaatctctgttgcttcatcccaggaaaggcacgtgtggttctcaaatataggcattctgatgggaacttgtgtgt

SEQ ID NO: 329467 - DNA, 74 bp, Homo sapiens
gaacgtattcctattcccctcatggattacatccttaatgtggctgaagaaatgtcaacaattgggagttttga

SEQ ID NO: 329468 - DNA, 75 bp, Homo sapiens
acctggcaaagtacttcagaacttttattccttccagaagcaggggtatgatatcagctttctgatcaccaactt

SEQ ID NO: 329469 - DNA, 101 bp, Homo sapiens
acactcacctctctctgctcatgcaggtgaatgccctggatgggtataaccgaacagccctccactatgcagcagagaaagatgaggcttgtgtggaggtc

SEQ ID NO: 329470 - DNA, 83 bp, Homo sapiens
ctgctcccttcgccttcgccctttccacctcgcggcagttcgcaattctgtggtgttcttggtcacacatttatggagtttct

SEQ ID NO: 329471 - DNA, 89 bp, Homo sapiens
cctaaatgcactctttcgaaagaaagctaaagtctccagtgaatattgaattgctgaggattttgggaaaagacaaatcaaagttccca

SEQ ID NO: 329472 - DNA, 88 bp, Homo sapiens
ctggactggagcagaaccccaggactgcgcccccgggagcgggcgcccagaggtgtggatgaggtcaccattgtcaacattttgacca

SEQ ID NO: 329473 - DNA, 75 bp, Homo sapiens
acagacagcagcgcagtaccaccttccagagattgcaattccaaaagccaaggtgagaaagaaatgtatacgctg

SEQ ID NO: 329474 - DNA, 101 bp, Homo sapiens
tgttctggttatcttcatcatcatcatcatcgtgcatcagagacctttgccccagccagcactacttcctatgagctccaacactttcccttcaagatcta

SEQ ID NO: 329475 - DNA, 100 bp, Homo sapiens
ctgggctgtctggaaatctgagagctgacatcgcgctgatcggattggccgtcatgggccagaacttaattctgaacatgaatgaccacggctttgtggt

SEQ ID NO: 329476 - DNA, 98 bp, Homo sapiens
gtggaggcaggctgcggcagacggcgacagtggcggcggcgccatggcagggcttgcaggtgtggaagatttccttacaagggccgtgttacatgaca

SEQ ID NO: 329477 - DNA, 75 bp, Homo sapiens
gcacagagcctcgcctttgccgatccgccgcccgtccacacccgccgccagttaccggtattgtaagaacaagcc

SEQ ID NO: 329478 - DNA, 75 bp, Homo sapiens
aagctaaattgttggcgggtttcatgggcgtcatgaataacatgcggaaacagtggcttttcatggcctgccact

SEQ ID NO: 329479 - DNA, 75 bp, Homo sapiens
gctgaatcgctggaaacggttcacaaggaagccgagtcccaagggccgttgctccagggagaactgcaaatatct

SEQ ID NO: 329480 - DNA, 75 bp, Homo sapiens
cgctgctgcccgcgctcgccgcacgagacaatgcagatcttcgtgaagactctgactggtaagaccatcaccctc

SEQ ID NO: 329481 - DNA, 101 bp, Homo sapiens
aaatgttatctgggaaattaaagttctacgtaaagagagtatggagctcgtaaaattaactttggctgagcaaaacactaagaatcctaaaagcactactg

SEQ ID NO: 329482 - DNA, 102 bp, Homo sapiens
cggcaggaagcggccgtgcggcccggtcccagagggtggaaggagccaggacgcacccccactgctgctgcaggagccgctgctgagctgcgtgccacatcg

SEQ ID NO: 329483 - DNA, 75 bp, Homo sapiens
agaatagtggttcttaactctgtggctgaatccacagaggagcctgctggttctaatcggggacagtatcctgag

SEQ ID NO: 329484 - DNA, 96 bp, Homo sapiens
ctcagacgcctcacttaggacaaatcaagaagctactctagaagtcggagcagaggatggtacagcagaggccgaaccagaagccggagcagttcc

SEQ ID NO: 329485 - DNA, 100 bp, Homo sapiens
ggtttttaaagcaagagataaatgcggctgtagaacatgctgaaaatccatgtcataaaggagagcacacagctgctacaaatgccgtcagtgcagtttt

SEQ ID NO: 329486 - DNA, 109 bp, Homo sapiens
cttggagtccggagtaacttggccaggctggccccgagcggaactggagaaagctgaggctgcaagctttcttcctggtggcagatgacatcatggattcatcccttac

SEQ ID NO: 329487 - DNA, 100 bp, Homo sapiens
tatgctggaagaatttaagaaagcggatgtcaatttggatatatcaaagcctttgaaagcaaacctgagtttcaccaaactggatcagataaaccttttt

SEQ ID NO: 329488 - DNA, 88 bp, Homo sapiens
actcgaaagggaccgaaatggagagcaaagctgtctgaaaacgtggtgaaccgcatgaaggagcccagctctccaccccctgctccca

SEQ ID NO: 329489 - DNA, 100 bp, Homo sapiens
agtaaagatgcagaggaaagaaaagaatacattcctgattacctgccacccattgtgtcttctcaagaaggattttataaaggcccaagacttaagtaac

SEQ ID NO: 329490 - DNA, 98 bp, Homo sapiens
tcttcagtaaatatctagcggatcctagtaatctctttgtggtttcttctgatttctgccattggggttcagagaagattcttcatgggaaatcaagt

SEQ ID NO: 329491 - DNA, 76 bp, Homo sapiens
agttgctgtgctccaaggacacacaggatcaattacatctttacaggtgacctccttgttgcagttggttcattcc

SEQ ID NO: 329492 - DNA, 50 bp, Homo sapiens
gtttgctatcgggactcggcgaggacgtttaaaattggtggtgaatggtg

SEQ ID NO: 329493 - DNA, 50 bp, Homo sapiens
cagaaccaactcggatattgttgagactctttttgatcagaacaatgctg

SEQ ID NO: 329494 - DNA, 51 bp, Homo sapiens
cgacaccggcgaggaacttggcaggccatgctggagtatctgccaacatga

SEQ ID NO: 329495 - DNA, 98 bp, Homo sapiens
ggaatgccacagcatcctccagcacctcaggtatgagaaagtgccagtcatcttggttgggaacaaagtggacctggaaagtgagagagaagtatcgt

SEQ ID NO: 329496 - DNA, 74 bp, Homo sapiens
gctgccaagaggaacgacttctgtaagctccaggattgggaggaccaggtccgctgcgacatccgccagttcct

SEQ ID NO: 329497 - DNA, 100 bp, Homo sapiens
attctgcttcatccgtgagagagaataagcaacctgaaggtttggaattaaaacaaggtctgcaacatgaaagtcacaggcatcacaatcctcttttggc

SEQ ID NO: 329498 - DNA, 75 bp, Homo sapiens
atggcggacagtgcggaactaaaggagtcatactccatgggtttatgtgataaatgatcttggcatagaagagaa

SEQ ID NO: 329499 - DNA, 76 bp, Homo sapiens
cggaagtgcagctgcctcagttcttagcgcagacccaacatgagtgaagtttcctgcaagaaacgggacgactatt

SEQ ID NO: 329500 - DNA, 98 bp, Homo sapiens
cgggccctcggcagggaggatgacggagctgcagtcggcactgctactgcgaagacagctggcaggtggaagcagggaaaggcctggagatgaggaag

SEQ ID NO: 329501 - DNA, 83 bp, Homo sapiens
gcccggccaagaggcaaaggggaggttacgcagcaaaccatccagaagggcgaccattgacgaggtggagacggacgtggtgg

SEQ ID NO: 329502 - DNA, 100 bp, Homo sapiens
gggaaactaggtcgatggtcggcggcgcccggatgggcagctgagatgaagttggagcccttgtttttgacattggatcctatactgtgagagctggtta

SEQ ID NO: 329503 - DNA, 99 bp, Homo sapiens
agagactgctgaaaagctggcccgtgacctgaaggctgtcaagtatgtggagtgttctgcacttacacagtgggacctgatgcagaacatcatgaatga

SEQ ID NO: 329504 - DNA, 75 bp, Homo sapiens
aaagaagttgaaaaggaagcaaagtgtgaatatttctggaattgcaacccagtgaagaagttacctggaagtaaa

SEQ ID NO: 329505 - DNA, 75 bp, Homo sapiens
cctgtacagcctgcagaactgtaccccttgttacgtggattcagaaggaattgttcgaatgcttaacagaggact

SEQ ID NO: 329506 - DNA, 82 bp, Homo sapiens
ggcggacaaggacgcgctggatggcctcctccagcagccgcggcgagtcctttgcacatgttggcaacacacgcatccgcat

SEQ ID NO: 329507 - DNA, 100 bp, Homo sapiens
cgaagtattacatgattttcactccttgcaaactttgccatctttgttgcagagaatcgggttctgtcatatgttgaagaatccatacaccattaagaaa

SEQ ID NO: 329508 - DNA, 100 bp, Homo sapiens
agaagaaccagcaggctctgtggttcaggactcccgacttgacacgatattttttgctaagcaggaatgtatcctgtcaggtataatgtcagtgaatggc

SEQ ID NO: 329509 - DNA, 100 bp, Homo sapiens
ggaacatggactgaagtatccagcgctcattgggaatttagttaagggtgtgggccgaagatatgctcatgtggtgttgaggaaagcagacattgacctc

SEQ ID NO: 329510 - DNA, 75 bp, Homo sapiens
gttcgagaggaagattcttacctctttgatctcgacaataagtaagactttgaccccgacgcaggcttcagtgat

SEQ ID NO: 329511 - DNA, 75 bp, Homo sapiens
tggagcagctgcctgggagaatgttgactctactgcaggaattaaggataacctagacgacataaagaggataat

SEQ ID NO: 329512 - DNA, 75 bp, Homo sapiens
gagaggagcatgaatggagcaaaatggcggatcatgtgcaggtggatatcatccagtgaaaattggagacctctt

SEQ ID NO: 329513 - DNA, 100 bp, Homo sapiens
tcgtgatcgactcggacacagaggacagcggcagcgacgagaacctggatcaggctatggtgaactaaacggtaatgctggagaaagagaaatatcttta

SEQ ID NO: 329514 - DNA, 75 bp, Homo sapiens
tgtatggagacctggtcatggacacagtccctgaaaagcggccttgctggcggcccgggggcccgaagagcttct

SEQ ID NO: 329515 - DNA, 110 bp, Homo sapiens
ttccggtcacgccatcgttgctgccttcttcgtcaagagtttattaaccacttaacctctcagaactgaacaaagacaacattgttcctggaacgccctctttttaaaaa

SEQ ID NO: 329516 - DNA, 51 bp, Homo sapiens
gattgactatggtctctccggctaccaggctatgactttgcagccgtcctg

SEQ ID NO: 329517 - DNA, 51 bp, Homo sapiens
tagaaatcctacaaaggaccttatgagaacacagacattgctgaaaacctc

SEQ ID NO: 329518 - DNA, 100 bp, Homo sapiens
gattagcttcgcagtctggaaagctttaggagttcacagtgattcagtgcgcctccttgctgtggaagcttgtgtcagtattgcccagttattgtctcag

SEQ ID NO: 329519 - DNA, 96 bp, Homo sapiens
ctactccgtagtgttcgtcgtgggcttggtgggcaactcgctggtcatgttcgtgatcatccgtgtggtggaaaaggaagagagagctgaggcaga

SEQ ID NO: 329520 - DNA, 74 bp, Homo sapiens
cgcggccctgctcctgtcttccattgaggcagaagatctcacattcttgaaggtggcattgaagagcactaaga

SEQ ID NO: 329521 - DNA, 83 bp, Homo sapiens
agcaaaaccaacgcctggctcggagcagcagcctctgagttggaatcgaagcctcttaaaatggcagatgacttggacttcga

SEQ ID NO: 329522 - DNA, 100 bp, Homo sapiens
ggccgcgggagccgcacgcggcgatatggaagaggagggcaagaagggcaagaaggtgtcgtgaaaactacccctaaaagccaaaatgggaaaggaaaag

SEQ ID NO: 329523 - DNA, 100 bp, Homo sapiens
cccagcttgtgccctacatcatcgacctgcagtccatgcaccagtttcgccaggacacagggagaagaaatgggtgaccgttggtgacacatccctacga

SEQ ID NO: 329524 - DNA, 100 bp, Homo sapiens
cttgtctcttatttagttctggggagcgcctcgtcgacatgagtgatgtggaggaaaacaacttcgagggcagactccaccgggggacggctacgtgcag

SEQ ID NO: 329525 - DNA, 80 bp, Homo sapiens
gccagcacccctggagaagcgcgttaaggagctggctcagatatgaggccccaggattcctggcgaggtcctcctcccct

SEQ ID NO: 329526 - DNA, 100 bp, Homo sapiens
tatgttttgacatcagccgtccagagacagtggacagcgcactcaagaagcttatctcctggtcgaggaaaagactttaaatctcggaaggacagagact

SEQ ID NO: 329527 - DNA, 82 bp, Homo sapiens
ggggccgaactggccctggactacctctgcaggtgagaagccctaccactgcaactgggacggctgcggctggaagtttgcg

SEQ ID NO: 329528 - DNA, 97 bp, Homo sapiens
agcgattaatgataaaatttcatggagaagaaggccttgactacggaggggttgccaggagcgaatccagccacagacctgagaggcgcaggcttcc

SEQ ID NO: 329529 - DNA, 74 bp, Homo sapiens
ttagaaacaaatttggaaagaaaaagaatggcgtccgtttcaggttctccagcatttggctcaaggccccaagg

SEQ ID NO: 329530 - DNA, 75 bp, Homo sapiens
atctctccacctcagggtctggctcagattttactatgagcagcgattactacggaaggtcttcgaagaatggaa

SEQ ID NO: 329531 - DNA, 75 bp, Homo sapiens
tcacgcacgggatccagagcgccgcgcacttcgtcatgttcttcgcgccctggttgggttaacggcatggagaac

SEQ ID NO: 329532 - DNA, 75 bp, Homo sapiens
ccccacaaccatcacatccaccatgaaagctaagctgctgaagctcatcttccccgacctggtggaggggctggt

SEQ ID NO: 329533 - DNA, 75 bp, Homo sapiens
tgttgcccggtccctgtactcagaaaaagaggttctgcggcatgaggaatttgaagaaggctgcaaagctgcctg

SEQ ID NO: 329534 - DNA, 74 bp, Homo sapiens
tggacattttggaccagggagccctacagcgtctcttcaaaaaggaaccactcgttttgactattattttatca

SEQ ID NO: 329535 - DNA, 89 bp, Homo sapiens
cctttcattttattaaggatccaaagaatttaacattagaaagacatcaactcactgaagtagcttcagtatcagacacagcacagcag

SEQ ID NO: 329536 - DNA, 100 bp, Homo sapiens
cttagctgtgctcgcgctactctctctttctggcctggaggctatccagcgctagcttgtcactttctgcaaaggtttccctcagggagcctcctgctgc

SEQ ID NO: 329537 - DNA, 88 bp, Homo sapiens
tgctcttgaggttcacagatgatacctttgatccagaacttgcagcaacaataggcaaacaagcatgcatttaggatccttatgcacg

SEQ ID NO: 329538 - DNA, 75 bp, Homo sapiens
cgctgagcgatttcttcgaggtggagtcggagctgggacgattcctcagttccttttagatgattgctttaaaaa

SEQ ID NO: 329539 - DNA, 50 bp, Homo sapiens
ccgccactgccgcaggaggcgtgaggaaaggacttagaagccttacaaat

SEQ ID NO: 329540 - DNA, 100 bp, Homo sapiens
cctccgcgctcttcttcgccagcaccgtgctctccaccacagagccctatgagtttgtctctctggaatggctgcaaaagtggttggatgaatcaacacc

SEQ ID NO: 329541 - DNA, 98 bp, Homo sapiens
ctcaagctgctgcaccgcggcgccgacatcaattacgccaatgtggacggactcactgccctgcaccagttgtggaagaaggactctgggaaaatggc

SEQ ID NO: 329542 - DNA, 115 bp, Homo sapiens
ttataaccaccccttgcactttgttttcaatgacaccaagttggacgctatgctggaagaatttaagaaagattgagatgctaccagatgggctgtttcagtgcaaaaagctgca

SEQ ID NO: 329543 - DNA, 101 bp, Homo sapiens
tccattcgaagtgttggcagtcacaggtcgttcccagatttcctaaactttccagagaaaatggtcttctccctggctcagcaagaagatgaactttaaac

SEQ ID NO: 329544 - DNA, 100 bp, Homo sapiens
ccgcctcctcctctcccgcgggcaccgaggactccgctcctgcccaggtctgaatttcctgctgctgttcacaaagatgctttttatctttaactttttg

SEQ ID NO: 329545 - DNA, 98 bp, Homo sapiens
cccagccaagccccgccgatcgcgggcaccggagccagccccgcagcgggaattgaatgatctggcacgggaccctccagcacagtgttcagcaggtc

SEQ ID NO: 329546 - DNA, 98 bp, Homo sapiens
tgtggcttcgaagccttcatcaatgggaagcacatagttggagaggcagttgtgaaaaacttcaggacaaaaatgtttcatttaaggacttgtgctgc

SEQ ID NO: 329547 - DNA, 100 bp, Homo sapiens
ggggagagcgcgccaagaccgctgcagccgctggctgagacccattccaacaatctcgtaaaacatggtggattactatgaagttctaggcgtgcagaga

SEQ ID NO: 329548 - DNA, 75 bp, Homo sapiens
agaggacctgtgcagggcagagcaggaggccccccgagagtatcctgagctccagctggaccctaaattggatcc

SEQ ID NO: 329549 - DNA, 73 bp, Homo sapiens
ctccagattacctcccagccatgcggaggaggagaagttctgatccccttggaaagaccacagcaagattctt

SEQ ID NO: 329550 - DNA, 100 bp, Homo sapiens
cacgagtgcgggcagcagcagccccggggcccggagagataacggcaaaagcttctatcatttttgttactcttcagtacaatgtcaccctcccagcaac

SEQ ID NO: 329551 - DNA, 98 bp, Homo sapiens
gccccggactccgtcggcgcacatccccgtcccagcgcagagatggattaccgggccttggtgcatgagcgagatgaggcagcctatggggagctcag

SEQ ID NO: 329552 - DNA, 50 bp, Homo sapiens
ggagcagacgcccgagaagcccaggtcaaaatgcagatcttcgtgaaaac

SEQ ID NO: 329553 - DNA, 75 bp, Homo sapiens
cttcccagtagctgggaccacagttgtggtcagaaatgagaagacatgaaatgttgagggaggagctgcgacaga

SEQ ID NO: 329554 - DNA, 101 bp, Homo sapiens
ttatttatccaacagctcctcccagctccgacagttagttaatatgtgcatcaacccagatccagagaagcgaccagacgtcacctatgtttatgacgtag

SEQ ID NO: 329555 - DNA, 100 bp, Homo sapiens
aggcccacagcggtatccaattggcatccagggtcggactcccggggccatggccggaatgcagtaccctcagcagcagcttggtgatccagctattttt

SEQ ID NO: 329556 - DNA, 83 bp, Homo sapiens
cgcgtgtctaggtgagtcgcggtgggtcctcgcttgcagttcagcgaccacgacatatgtagagtgtgtcggtcagaaggaac

SEQ ID NO: 329557 - DNA, 74 bp, Homo sapiens
ccttagaacaccaaagattgtctctggcaaagaagtctcaggggatccagaactgcagccagtccttgctgggc

SEQ ID NO: 329558 - DNA, 115 bp, Homo sapiens
cgacagcgacgggcagcccgggcccggcgaggcagaccactgccgccgcatactggtgcgaggaactggcatttgatccatatgaatcgtatgctcgagatattttgcgacctgg

SEQ ID NO: 329559 - DNA, 100 bp, Homo sapiens
tcattgatgtctacggcatcaccgacgaggtgcagcttctgggtgctggagaatctggtaaaagcaccattgtgaagcagatgaggatcctgcatgttaa

SEQ ID NO: 329560 - DNA, 75 bp, Homo sapiens
gctgtcgtttggtttgatcttgttgactatgaggaagttctagtggaaatcctgactgctcgtcagaagaaagca

SEQ ID NO: 329561 - DNA, 108 bp, Homo sapiens
ttagaggacttccctttggatgtagcaaggaagaaattgttcagttcttctcaggaaagaccacagcaagattctttcattcgtctcctcctagcctgggggaccagg

SEQ ID NO: 329562 - DNA, 100 bp, Homo sapiens
gcccggggttacccctcaaccgtatttggggctgctcctggaggagctacgcagggtgggcaccatgtccttgaagcttcaggcaagcaatgtaaccaac

SEQ ID NO: 329563 - DNA, 83 bp, Homo sapiens
tgcagagcctgcggggcaagatctgtgtcgtgaaaactacccctaaaagccaaaatgggaaaggaaaagactcatatcaacat

SEQ ID NO: 329564 - DNA, 83 bp, Homo sapiens
cgcctgtgggcacagacaaggagctcagtgacctcctggacttcagcatggtcccagagggtggaaggagccaggacgcaccc

SEQ ID NO: 329565 - DNA, 75 bp, Homo sapiens
caagaagctcacccaggaacaagtatctgacaggtggaaccgtcccaaaatgtcccttgctcagaagaaggatcg

SEQ ID NO: 329566 - DNA, 74 bp, Homo sapiens
cgtaaggctgtcctggcatccatggacaatgagaatgaatactcccccagttgcaagaggcgcaggaccgtgga

SEQ ID NO: 329567 - DNA, 83 bp, Homo sapiens
cagctggacaggcagagtgctgatgtgaaaaataccacgacaaaaccaccctatgagaaagatcagtctaaagaaaaggagaa

SEQ ID NO: 329568 - DNA, 75 bp, Homo sapiens
attcatctggccaagttttatggttatgacaatgttaaggaatatctggagaggaaaggggactaccacaggtat

SEQ ID NO: 329569 - DNA, 100 bp, Homo sapiens
agtccaagagcggccccgagtatgcttcgtttttcgccgtcatgggcgcctcggccgccatggtcttcagcgcgaggaagaaaggacccggtttcaggag

SEQ ID NO: 329570 - DNA, 128 bp, Homo sapiens
aagaaataataaaatgggagagaatgaagcaagtttacctaacacgtctttgcaaggttgaaatcacaaagattagacacctttttagataggtgttcttcagcaccactgacaacacggttctgaca

SEQ ID NO: 329571 - DNA, 98 bp, Homo sapiens
tcttggagttgtgttggtaatgaagaaaagttccaatttgagccgctgtgaaaaaggcctccaccagcctctcaccagaagagattgctcattggaac

SEQ ID NO: 329572 - DNA, 100 bp, Homo sapiens
aaaactaggaatctatgatgctgatggtgatggagattttgatgtggatgatgccaaagttttattaggtctcgatctagaagacggtcacgaagtagga

SEQ ID NO: 329573 - DNA, 100 bp, Homo sapiens
cctggaggagagcatggaagagcaggatgagaagcccccagagcccccgaaggcctgtgcacagggcatcttcccttccaaccagatatggtatcccaat

SEQ ID NO: 329574 - DNA, 82 bp, Homo sapiens
aggcaacgacgttccatctgtggaaggacctaccaaccagagcagcccgacggccatggaggctgaagagacgatggaatgc

SEQ ID NO: 329575 - DNA, 96 bp, Homo sapiens
aggccaagtatccgccagtcaataggaagtacgagtgtcagcccaaggccaaccccactgtcactctgttcccgccctcctctgaggagctccaag

SEQ ID NO: 329576 - DNA, 78 bp, Homo sapiens
ccacggcatcctgtgctgtgggggctacgaggaaagatcttaccaatatatttgagtccttcctgcctcagttattgg

SEQ ID NO: 329577 - DNA, 100 bp, Homo sapiens
gatactttaggtgaaggagcttttggaaaagttgtggagtgcatcgatcataaagcgattttaaactgtctacggttcttaacctcatctgttaagttcc

SEQ ID NO: 329578 - DNA, 49 bp, Homo sapiens
gaacttcggagagctcagattagggaccagttactctccacaagaaaat

SEQ ID NO: 329579 - DNA, 82 bp, Homo sapiens
attcgcagtggtcgcttcttctccttggggatcatggaagctgataaagatgacacacaacaaattcttaaggagcattcgc

SEQ ID NO: 329580 - DNA, 100 bp, Homo sapiens
cagggacctgaggactccccttcccgacagtcccgccgctatgactggtgagggccccgggccctcagcctctcttaggtcatgacgccagtcagatcac

SEQ ID NO: 329581 - DNA, 100 bp, Homo sapiens
gtgagcagtccagaaagcggcttatcgaacagagccgggagttcaagaagaacactccagaggtttgaagtttgaggaaattcaaaaaagatttggtgaa

SEQ ID NO: 329582 - DNA, 51 bp, Homo sapiens
gtggttttctaggagtgcggccaaagagatctgcagcgaataaccctgccc

SEQ ID NO: 329583 - DNA, 80 bp, Homo sapiens
ggatttgcacacctatgggcaaactgggagacagctgccatccactgactcgtaaagtgattttacaacgagatgctgct

SEQ ID NO: 329584 - DNA, 75 bp, Homo sapiens
ggcagctggaacaggaactgcataagtggcaggtgctagtggacagcatcacagaactcaactttggggccatca

SEQ ID NO: 329585 - DNA, 88 bp, Homo sapiens
taggaccagaagcctttcgcggagaaaaggctgacatgcccgtcctatatgacaggtctcctctgagcctccggcctccataagaccc

SEQ ID NO: 329586 - DNA, 100 bp, Homo sapiens
tgggtgtgggacaccgtgggctgcgtgtgggacgggtttagcggcagcctcttcgagctttcctgtaaaggccgctgctttgagtccttcgagagaggga

SEQ ID NO: 329587 - DNA, 91 bp, Homo sapiens
cccactctgaactcaagtcaccgtggagctccgccgccccgaaactttcaccgcgagcggcgggactacttgttgatatttgaggagggaa

SEQ ID NO: 329588 - DNA, 88 bp, Homo sapiens
gtcgagctggcgggtcccgcgggccaggccgtggagatgttctcagtgcagctgagtcttggtgagcagacatgggaatccgaaggca

SEQ ID NO: 329589 - DNA, 74 bp, Homo sapiens
tcagagacactgccaagcagccttagccctagtgtagaggtggtgatgatgtccagcaactctgtgaagcagga

SEQ ID NO: 329590 - DNA, 51 bp, Homo sapiens
cgggaccatcacgcagatccgcatcctcggaaatgaaacacgatttccaaa

SEQ ID NO: 329591 - DNA, 50 bp, Homo sapiens
cccgctggcgcgcagcctcagctagggtgttcagacttacatctcttgga

SEQ ID NO: 329592 - DNA, 100 bp, Homo sapiens
gactcaggcattacttgaagctggtgccaaagtggttgcgctcgaaagtgacaaaacttttattccacatttggagatggtccccacagagcttgttgag

SEQ ID NO: 329593 - DNA, 100 bp, Homo sapiens
acgtctgcggaagtgcagctgcctcagttcttagcgcaggccgtcgctttcgggttctctcatcgcttcgtcgttcgccaatgtttgaggagaaggccag

SEQ ID NO: 329594 - DNA, 74 bp, Homo sapiens
gtggaaagaagacttggctacatttattgaagaattggaggctgctgagaaactaggtgaaactgagaaactta

SEQ ID NO: 329595 - DNA, 83 bp, Homo sapiens
ctgctgcttctgggccctacgcgcggcttgcgcgtttacccaaggtccagcctagcccctaggcaccatgtcggacagtgatc

SEQ ID NO: 329596 - DNA, 82 bp, Homo sapiens
gcggccactcttgccaggaggcgagcttactccacgggaacagcctctagataatctgagttgttgaaaatacgaagcctgt

SEQ ID NO: 329597 - DNA, 97 bp, Homo sapiens
ggaagccatggatcctatagctgcttgatgacctcacacaagatctgactgtatcccagctcagtgatgttgcggattatctggaagatgttgcata

SEQ ID NO: 329598 - DNA, 90 bp, Homo sapiens
ggcgaccggagcgaacgccacgccgttggaactgaagcgctgcggcatggcgcgcgcctgcctccaggccgtcaagtacctcatgttcgc

SEQ ID NO: 329599 - DNA, 98 bp, Homo sapiens
ctccgtggatgaggctctgcggctggtccaggccttccagtacacagacgagcatggggaaggaggaattctgctacccagtggaatgcctcgctctt

SEQ ID NO: 329600 - DNA, 97 bp, Homo sapiens
ctataacgttgaacagtcctgtatcaaaactgaagatggtttgaaacagcttcacaaggtggattctccacagttttcctcgtgcgtactcacggtg

SEQ ID NO: 329601 - DNA, 100 bp, Homo sapiens
ccaccaccatctccatcacccaccaacaacaccacaataatccacagccaagatcccacagccaacaaagattctggccaagagtcagagtctattccag

SEQ ID NO: 329602 - DNA, 75 bp, Homo sapiens
acgatcgctcggtggtgcagtggaaaatcaccttaagatttctctatgaatcatcatcaagaactctgggagaac

SEQ ID NO: 329603 - DNA, 100 bp, Homo sapiens
agaaggacgagtcgttcctgggcaagctgggcggcaccctggccaggaagcggagggcgcgcgagggtgctggagaatctggtaaaagcaccattgtgaa

SEQ ID NO: 329604 - DNA, 142 bp, Homo sapiens
tgttgctgttcctgctggccgtgtccacactggactttgtggtgggttctttcacccacctggacccagacacaaagaccatcaccaccatggctgaagacatgtccccaggaccaccaattttcaacagtgtgatggccag

SEQ ID NO: 329605 - DNA, 101 bp, Homo sapiens
cagcctagcactagaaggtgagtgctcttaaagttccgtacagataaaggaagagatcccagttctgatacatatgaggaagattctgagttgttgctcca

SEQ ID NO: 329606 - DNA, 100 bp, Homo sapiens
ctccccaaacaggctggctcccgtctccaggccccaaggagccacacctggaccagaccccaggaaaggtctccgtgaggccgggtgacgctccagaatg

SEQ ID NO: 329607 - DNA, 100 bp, Homo sapiens
tattacactaattaaaggaaagattgaagaagttcatcttcctgtagaaaaagtagatgttatcatatctgagtggatgtgtatttgaatgaagcagggt

SEQ ID NO: 329608 - DNA, 80 bp, Homo sapiens
ggaagcagtgacatccaacctgtatcaagtcttctaatctgtgaacatgggggtgagtggtgcactgacagtgcttatga

SEQ ID NO: 329609 - DNA, 101 bp, Homo sapiens
cttgccatctttcttacaacgggcattgtcgtgtcagcttttggactccctattgtatttgccagagcacatctgttacccagataatatcactcctgaca

SEQ ID NO: 329610 - DNA, 95 bp, Homo sapiens
agtacactgcagttgtctccgaggtgaacctccggagccttggcacagctcgcttctaaaggtgaaatgacaatggatgctctgttggctcgatt

SEQ ID NO: 329611 - DNA, 89 bp, Homo sapiens
gcggaatctgggtgcagttcctgcagtaccccactctacgatcagacacaacatttgcctgcaacaaggacagcggccagtggcactac

SEQ ID NO: 329612 - DNA, 100 bp, Homo sapiens
cagtggcagcatggagaaacgcaagtccatgtacacgcgagattataagaagcttgggttcatttttggaaattttagcattcaggtgccaggaatgcag

SEQ ID NO: 329613 - DNA, 100 bp, Homo sapiens
cgcctggcaggccctgcgcaccagtgtttgaaagatgtatggtgatcttgaaacctccagacacaagaaaacttctagcaaattcaggggaagtttgtct

SEQ ID NO: 329614 - DNA, 111 bp, Homo sapiens
cgcggccgcggttcggacccgccggcgacatggccagctccggagaggcgaggccttcttgggcagctttgtggccagcgggatggggccctcggcctcgtcccatgggag

SEQ ID NO: 329615 - DNA, 90 bp, Homo sapiens
gccgtcaacagcctggtcaatttgtacctgcaggcctcctacacctacctctctctggaaccctaaggactctgcaatatgaataattcc

SEQ ID NO: 329616 - DNA, 50 bp, Homo sapiens
gttccggcgcgccgggagccggtaaggggcctggataccaagaagtgact

SEQ ID NO: 329617 - DNA, 50 bp, Homo sapiens
gctctaagtacactcgtcttgaataggcatgttggagacttgggcaatgt

SEQ ID NO: 329618 - DNA, 50 bp, Homo sapiens
ttctgatggagggatcaggaaagagcagcccgacggccatggaggctgaa

SEQ ID NO: 329619 - DNA, 83 bp, Homo sapiens
gtcgccccctacccgcttctcgtagtcctgggagcacagcagaagttaatctcaggggcgatataatcaatgaggtggtccta

SEQ ID NO: 329620 - DNA, 75 bp, Homo sapiens
gggccggccagaagcgggcggcgcgggggagatggacttccttcgctgggcatctggctgggattcttgttggac

SEQ ID NO: 329621 - DNA, 90 bp, Homo sapiens
tgccactggccttgagaggacactcgccatcttggcagacaagacttcacagagaatgcagttgtcttgacttcaggtctgtctgttctg

SEQ ID NO: 329622 - DNA, 75 bp, Homo sapiens
aggctgaggcgggcggatcacgagatgtctttggtggacttgggaaagaggttgctagaagcagcaagaaaaggc

SEQ ID NO: 329623 - DNA, 100 bp, Homo sapiens
tcaccactcaaaactgtaatactaaatgtgttaccataccaagttgtattccctgaatgactataaaccacccatttcgaaagcgaaaatgacccaaatt

SEQ ID NO: 329624 - DNA, 73 bp, Homo sapiens
gcccaccctggagtaaccctcactggagaatccagaggtcttatcgaatgttacttagcctccaacagtattc

SEQ ID NO: 329625 - DNA, 100 bp, Homo sapiens
accaggttcacggacgagtatcagcttttcgaggagcttggaaagtacgacaacaattccacgatgccaaattcatggcagacattgatctggatccagg

SEQ ID NO: 329626 - DNA, 90 bp, Homo sapiens
tctctggggtatgattctaatatggaggttttggacatcttgccattttcaattcttgtctgcaaaccaaaagtatagatgatggagagc

SEQ ID NO: 329627 - DNA, 83 bp, Homo sapiens
tggaacaactcctaattctattcgtaatggacctgaaagtggcagcaagattatggttcagtttcctcgtaaccaatgtaaag

SEQ ID NO: 329628 - DNA, 100 bp, Homo sapiens
ataagattaaatcgttacccattgctacgaaagagcagcttgagaaacacaatgatatttgtgccatctgttatcagatcagagaaacctgggcatgtct

SEQ ID NO: 329629 - DNA, 75 bp, Homo sapiens
ggatttagataaactcaacatcgacagcattatccaacggctgctggaagaatgctgcctttttatatggtcttg

SEQ ID NO: 329630 - DNA, 100 bp, Homo sapiens
ctacactgaagatgaagcaaggcccaatgacccaggcgtctgttcggcacttgaagtactccttgtttaagaaatcactactgggcagtgtttcggataa

SEQ ID NO: 329631 - DNA, 89 bp, Homo sapiens
gcgggagacgagaagcctgaaaagtcgcagcgagctggagccgccggagttgaatctggtatcaagtgtcactctctccaagtccgcat

SEQ ID NO: 329632 - DNA, 82 bp, Homo sapiens
caggattttgataataattctggatattggaacagccctgaccagtgtagagattccattacctcatatctcaaaggagaag

SEQ ID NO: 329633 - DNA, 83 bp, Homo sapiens
gaactgataaaacccaccagtctaggtgactctcctattccatctgtttcttcgggatcatcttcacctctttcagccacttc

SEQ ID NO: 329634 - DNA, 75 bp, Homo sapiens
ggaaaacatgggtcgatttggatctgggatgaacatgggcaggataaatgcggaaagaacacccggaaatgaaag

SEQ ID NO: 329635 - DNA, 90 bp, Homo sapiens
gttcagaatattgctcacctactaacctcactgtcctacaaagatcctgagcagagacctactgcagatgaacttctagatcgccctctt

SEQ ID NO: 329636 - DNA, 83 bp, Homo sapiens
aactcaacaaattgaaggttaacaccttaagagttgtagttactgaccagaccactttacctgcattgtgaaggtacttttta

SEQ ID NO: 329637 - DNA, 98 bp, Homo sapiens
tacggacactgaacggttgatcggtgatgccgcaaagaatcaagttgcaatgaaccccaccaacacagtttttgattcctttaagcctccccagcgat

SEQ ID NO: 329638 - DNA, 75 bp, Homo sapiens
cagtggcctggacaacagacctctgtttggggagacgtccgccaagagcctggagaaagttcttgtggaattcag

SEQ ID NO: 329639 - DNA, 50 bp, Homo sapiens
agacgcccagccccacagccgtaaagaagctaagtggaagagtgtttcct

SEQ ID NO: 329640 - DNA, 100 bp, Homo sapiens
tcggtggcggagtcttccaggccatcaagggtttccgcaatgcccctgttgatactgaggaagatgaggaggaagatgagaaggacaaaggaaaactgaa

SEQ ID NO: 329641 - DNA, 74 bp, Homo sapiens
cagacaccgagcttcagcaagctctctccaacgtggaactgtcaccgctgttcccagacacacttattctgggt

SEQ ID NO: 329642 - DNA, 95 bp, Homo sapiens
ccgtcgatccagctgccagcgcagccgccagcgccgggggctaagtgatggatcttgtactccgtgttgcagattactatttttttacaccatac

SEQ ID NO: 329643 - DNA, 83 bp, Homo sapiens
cgtgatatccagtttgatagtgaaaaaggagtggactttgttctgaattactccaaagccaaaatgatgcttcaacacccagg

SEQ ID NO: 329644 - DNA, 75 bp, Homo sapiens
cgggactctgacggtgaccaacttattagaaaagggaatggtggaaagcagcagacataattggagtgggttgga

SEQ ID NO: 329645 - DNA, 125 bp, Homo sapiens
gtgagatgcagtagccctcctccacctccaccagaaggcaggggtggaataagagctgaaaggttccagcaacagatagaaatgctttaagttcactctggggaaagctggcctctgaaatctta

SEQ ID NO: 329646 - DNA, 75 bp, Homo sapiens
ttgcttctggcggccatggtgttgctgctgtactccttctccggttggcttatttggacgtctaggcagttttcc

SEQ ID NO: 329647 - DNA, 98 bp, Homo sapiens
gccccggcgccacctggagagaggccgcgtcctgggcagaggaagtggttacctggaaggaaaggagctgcagaacttgatccaggagctccagcagg

SEQ ID NO: 329648 - DNA, 98 bp, Homo sapiens
gtgtctgcttggtgtggagccatgaaggcctcctgatcacttgccacgtggcacgcatccctctgccagccggatacagagaagagattgtgcggtac

SEQ ID NO: 329649 - DNA, 75 bp, Homo sapiens
ccgccaccgtctgaactaggatgtcccgacatgaagtgctaacaactttgcaatgaaaggaaagcggaagacgct

SEQ ID NO: 329650 - DNA, 75 bp, Homo sapiens
tcagtcaactttggttttagtaacaagtgcagccgcggagccctgtacacaggcttttccatcctggtgactctg

SEQ ID NO: 329651 - DNA, 50 bp, Homo sapiens
tgagcgtctggaggattccgtcctcaaagatatatagtcaacatgtggca

SEQ ID NO: 329652 - DNA, 50 bp, Homo sapiens
gttggaagtgtgcatagttatacaccggtctgaaggggcgtctcgattac

SEQ ID NO: 329653 - DNA, 83 bp, Homo sapiens
taagattcttcaaggtggggttggcatcccccacatacgcaattctgtggtgttcttggtcacacatttatggagtttctgaa

SEQ ID NO: 329654 - DNA, 75 bp, Homo sapiens
ggaccctcttcgcgggcgattcgcgtagcctcaggtgctggagaatctggtaaaagcaccattgtgaagcagatg

SEQ ID NO: 329655 - DNA, 90 bp, Homo sapiens
ccatgatgcagtccctcccttggaacagcagctggatgaaacaagtgaagatgctaactgtcttgctttgagtggacatgataaaacaga

SEQ ID NO: 329656 - DNA, 100 bp, Homo sapiens
tcgggacatgtacttgagtggcagcctctacgatgacctgcagggagtccctcagcaccagctgcctcctcagtatcagaagatccttgagagactcaag

SEQ ID NO: 329657 - DNA, 149 bp, Homo sapiens
gaaatgggataccaaaggagtgaacttcaggtcattggaagtggccaagctggagggcgacctatggagacatgcttgaccacatattatcccctccacccatgccgtttcggaaatgcagcaacccagatgtggcttctggccctgga

SEQ ID NO: 329658 - DNA, 82 bp, Homo sapiens
gagacaagctgagcttgccgcacaaaaagctagagaggtggtgatcgtggcagaggtggccctggtggcatgcggggaggaa

SEQ ID NO: 329659 - DNA, 100 bp, Homo sapiens
tcctgcgcgcccgggatttcgatctggacctggcctggcggcttcttccagaccagctggtcttgcttctggagcatctcttggagcagaagactctgag

SEQ ID NO: 329660 - DNA, 75 bp, Homo sapiens
aaggagctggggctgcggctgctctatgctgtccctgcactaggtcagacaatcccctttggggtacaggaaaca

SEQ ID NO: 329661 - DNA, 96 bp, Homo sapiens
gaaagagctgttaacacttcctagataacggaccttagctggatctccaaaatacaagtgaatcacccggcagttctgaggcgtgcggaacaaatc

SEQ ID NO: 329662 - DNA, 100 bp, Homo sapiens
aattcatgaagatttagccgaggcccatggaaaagagcactggttgccattggtacccatgatttggacactttgtcgggcccatttacttatactgcaa

SEQ ID NO: 329663 - DNA, 83 bp, Homo sapiens
actaactggttcaccttcctcttgtataagttcctcaaggtgtccctggccagtgtccttccacctgtccacaagcatgggga

SEQ ID NO: 329664 - DNA, 75 bp, Homo sapiens
tcaaatctactactgttcatggcagccatgaagatggacctacagctaaaaaattaaagactgagcaagggggag

SEQ ID NO: 329665 - DNA, 75 bp, Homo sapiens
agctcgaggtggactatgaggctatccgcagcgagatggagcagctcaaggaggatgctcacaactgtattcctg

SEQ ID NO: 329666 - DNA, 82 bp, Homo sapiens
gtcggggatagtgtcatcggttcggtaaagtttctgttctctgtaatctatgccagcaattatgacaatgttagcagaccat

SEQ ID NO: 329667 - DNA, 75 bp, Homo sapiens
tcttcaccttttccttactcatgagccagaggtgtgctctgaacaagccgagacggggccgtgccgagcaatgat

SEQ ID NO: 329668 - DNA, 75 bp, Homo sapiens
tgaaaataagatggaacccatccacataagcatgggtggtaaagtaccacctgctactcagaaagctaaatcaga

SEQ ID NO: 329669 - DNA, 82 bp, Homo sapiens
aaactgccaagaaatccaaaaagccgagtagagaagttatcagggcgtctctggccgagcctctttttgtggaaaacgacag

SEQ ID NO: 329670 - DNA, 98 bp, Homo sapiens
ctttttgtcagattatcaggatgagggaagaagaccagctacaaggaaatacttctgaaaaatcactctgaaccccaagctggagtgaatcttctcct

SEQ ID NO: 329671 - DNA, 90 bp, Homo sapiens
ggatgagcagcaaagggtcctggaaggaaagaatgaagaggccctgcaaggtgagatcggactggaactgttcggctgcgaccagaaatt

SEQ ID NO: 329672 - DNA, 80 bp, Homo sapiens
agaaggacaagcaggtctaccgggccacgcaccgcctgctgctgctgggagacagaagaaattctggcagatgtgctcaa

SEQ ID NO: 329673 - DNA, 97 bp, Homo sapiens
tacccgaaaaacaaccacactgcttcgatcctggacaggatgcaggcagatgagcacctctctctgccgctggtggacgaaggggtccctgaggagg

SEQ ID NO: 329674 - DNA, 90 bp, Homo sapiens
ggaccctgtgccccaactctacttccctctgctccttcccaggaaagtatgtgatggtgatgggagtggttcaggcctgcagccctgagc

SEQ ID NO: 329675 - DNA, 51 bp, Homo sapiens
ctcgtgaagaacctgaaggacacactaggctctatctaatgttcctcctct

SEQ ID NO: 329676 - DNA, 74 bp, Homo sapiens
cattatttgagatgagttacatcttggagtcaggtagcattggtgctgcagatagtcctgagaactgggagaaa

SEQ ID NO: 329677 - DNA, 100 bp, Homo sapiens
tgtcatcgtgggcatgggccagatctccaactatgtggtagccttcatactaggttcgttaccgtgaacgcatcaccattcttcgagggaatcatgagag

SEQ ID NO: 329678 - DNA, 100 bp, Homo sapiens
caaggctgaaattatcctacaaagagatgcccgagtggtaaaagacatggcaacaggaaagtctaagggatatggctttgtctcctttttcaacaaatgg

SEQ ID NO: 329679 - DNA, 100 bp, Homo sapiens
cacttttggaccaaaggcctgtgtgctgcagaacccccagaccatcatggccaattcctgtccccccagcagcatggcatcgtgtgctgaaccctctgag

SEQ ID NO: 329680 - DNA, 76 bp, Homo sapiens
caatttgctggatttaagcactgctgcactttatgaggatccagtttatggaaaaggaaaacttggagaaatccag

SEQ ID NO: 329681 - DNA, 82 bp, Homo sapiens
agacaactaggtttttcaaccgtgacacggactcaccatatcctttgtggagactgaaggttttaaaatcaaagatgggaaa

SEQ ID NO: 329682 - DNA, 83 bp, Homo sapiens
gtggagtctggcatcttattgggaagaactgctaaagctttgaggtcattacaatttacgaatccaggaaggcaaactgaatt

SEQ ID NO: 329683 - DNA, 82 bp, Homo sapiens
tgcccccccttccccacgcaaccccagatccatttacactttacactcaccatggatgatgatatcgccgcgctcgtcgtcg

SEQ ID NO: 329684 - DNA, 98 bp, Homo sapiens
ccaggactgtgcaggggactctgtcacattaagtgggcagaccaacatccacctcagcaaaaacttcttcctgacgaatcgcgccagggagcgctcag

SEQ ID NO: 329685 - DNA, 74 bp, Homo sapiens
gtgacattgcttcgctatggagaaggagtttcagagcagagtacgtttcctgatgggtggacgtcatggagagt

SEQ ID NO: 329686 - DNA, 100 bp, Homo sapiens
tcgtgaccgagaccgtgaccgagagcgtgaccgagagcgcgaatatcgtcatcgttagaagggttcgtgggcccccaagaaggagccgtacgcccgggag

SEQ ID NO: 329687 - DNA, 83 bp, Homo sapiens
gacccagaccctggagcctcagttggaagcagccgatccagcctgcggagcctgtggggcagagcccacccacctttgggttc

SEQ ID NO: 329688 - DNA, 98 bp, Homo sapiens
acagtgttctgctttcatggagttcacagaagagtcgaggagtcctgacacagctctccctgaggagcagccacattccagctcccagtgcgcccctc

SEQ ID NO: 329689 - DNA, 90 bp, Homo sapiens
ggacggtaaccgggacccggtgtctgctcctgtcgccttcgcctcctaatccctagccactatgaggaacccatttactgttacaccccg

SEQ ID NO: 329690 - DNA, 74 bp, Homo sapiens
gatggtggtctttgcctttgccactatcacgcctctcatgttcacaggtggtgctgtggccatcccctcctggg

SEQ ID NO: 329691 - DNA, 100 bp, Homo sapiens
aagcagagagtctacctgcccgacgcgttcgtggagaggagcagcggttgctgttggaggaggctacagatgcacatgttgaatggagctcttctggcat

SEQ ID NO: 329692 - DNA, 97 bp, Homo sapiens
gagctccagccgaaggagaagggggaggagaaggcagagcccccccaggctatgaatgccctgatgcggttgaaccagctgaagccagggctgcagt

SEQ ID NO: 329693 - DNA, 51 bp, Homo sapiens
ggacaatggtcaccgtctcttcaggttagagcagccagcgggtacagaatg

SEQ ID NO: 329694 - DNA, 75 bp, Homo sapiens
ccacgctcatgatcgacttcctcacccgcgcctgcgacctcgagaccctcatggacacaaaatgggtaacatctg

SEQ ID NO: 329695 - DNA, 50 bp, Homo sapiens
ttttaaaggtggatatgtgcctgtaggcttgcattgatgacaatgttgat

SEQ ID NO: 329696 - DNA, 75 bp, Homo sapiens
gcgctgcagcgtggatgagcctcggggacactgtgccgaatgaaaatgattacggacctgaagccaaagaacaag

SEQ ID NO: 329697 - DNA, 97 bp, Homo sapiens
aagttcagcacacagtatgtatggattgcagtagctacagtacatactggtgcagtggtcatcgcctttgtggtctgctggctgccctaccacgtgc

SEQ ID NO: 329698 - DNA, 74 bp, Homo sapiens
ctatactcatgatgttttcatgaatcttcttggacacttaatgattgttggcaagaaatgtgctgctgatctgg

SEQ ID NO: 329699 - DNA, 83 bp, Homo sapiens
agacctgaagacaaaaatccagaagtacaagcagtctgggactggtgattgcagctggaagtgcccatgaccgagctggcgtc

SEQ ID NO: 329700 - DNA, 100 bp, Homo sapiens
ggaacagctccggtctacagctcccagcgtgagcgacgcagaagacgggtgatttctgcatttccatctgaggtttcaagtgccccatttgctccaagtc

SEQ ID NO: 329701 - DNA, 97 bp, Homo sapiens
tattcttaaattgatttcaagtttgaacaagagctgaagaagcaggtggagagtgccgagctgaagaaccagcggctcaaggaggttttccagacca

SEQ ID NO: 329702 - DNA, 83 bp, Homo sapiens
caaatttattgtaccttatgatgtgtgggccagcaactacgtagatgtcttgggtggtgcctatgatgagttcatctttgctc

SEQ ID NO: 329703 - DNA, 83 bp, Homo sapiens
agaaggaagccagcagccaagccggggcagtttcagtctccaccccaaatgcagacctgcctagagctggaacgttacctcca

SEQ ID NO: 329704 - DNA, 90 bp, Homo sapiens
gagagccgagcgggcggcgcgggcaggtccacgggaagcctacacgcccaaggtttccaatacttatctacaggaatcgccatgacccca

SEQ ID NO: 329705 - DNA, 100 bp, Homo sapiens
ggcatgtgcccagaatggattggaagtttcactaagtagtttgaacctggctgttcctccaccaagatttagacgagttgtactgctgtcacaggaaatg

SEQ ID NO: 329706 - DNA, 100 bp, Homo sapiens
gaccaagaatcatccgctgcctcatgactcacaacaaaggggtcagctttagcctggcaggtgctcgcatttggcttttcgttggtttcatgttggcctt

SEQ ID NO: 329707 - DNA, 83 bp, Homo sapiens
atcgggcctggatcggctgccggtgcctgccagtgggaactcccccactggaaaggattctgaaagaaatgaagtcagccctc

SEQ ID NO: 329708 - DNA, 100 bp, Homo sapiens
cggcaacgcgcttatcagcgctatgagaagcctcaggggagcaatggcatttgcgttggccatccgtgacacggcatcctatgctcgccagatgatgttc

SEQ ID NO: 329709 - DNA, 75 bp, Homo sapiens
ccgccgccaagagtgagcgagcggacccgcgatggcttctcggacaaactatttagtggaaaaggcttacatttt

SEQ ID NO: 329710 - DNA, 83 bp, Homo sapiens
atggtctcattcctctagcgttggggtgatgacctactgcccgcctgctgcctgttactgtcatgcaagacaagataatctgc

SEQ ID NO: 329711 - DNA, 90 bp, Homo sapiens
cgtctgcaaagtgtccccggcaagaaggtctggggtcctgaggctgctggcagactatgggtacaacggccagcacagcccagcagacgg

SEQ ID NO: 329712 - DNA, 100 bp, Homo sapiens
taacataaatgcagctacagctgtggctctacagccagagactgctgctactttgaaacgtacgatagaggccctgatggacagaggagcaatagtgagg

SEQ ID NO: 329713 - DNA, 100 bp, Homo sapiens
gccggtccctggggaatatgcggcgcgcgtggatcctgctcaccttgggcttggtggcctgcgtgtcggcggagtcggaatgttttaaaggaagttgggc

SEQ ID NO: 329714 - DNA, 100 bp, Homo sapiens
ccgtaaccgaaccctgagccgcctgcgcggatcggcgtccgcagcgggcggctgctgaggctgctttccaccagcgatggagcgtggggacagtactgct

SEQ ID NO: 329715 - DNA, 75 bp, Homo sapiens
ggaacttgccctgtctcctcgcagatgaggtaacttgggtttttactcctgtaacaactgaaataacaagtcttg

SEQ ID NO: 329716 - DNA, 100 bp, Homo sapiens
cctgcacagccgtcaccctcaactttcccttcagctatttagctggtacctactgctatatcacctagtgtgacatttcggaattaatggaacaatgaag

SEQ ID NO: 329717 - DNA, 122 bp, Homo sapiens
gcagcatggacgacctgatacgccactgtaacgggaagctgggcagctacaaaatcaatggccggacgaaatgccctgaaactctaatctcattgcctggccagaaaaggaagtaatcccta

SEQ ID NO: 329718 - DNA, 85 bp, Homo sapiens
gcggagcagtggtcggagatgtggcgaccgatgctgagcacctgaagaccctgtccctgtcctacaacgccctgggagcccctgc

SEQ ID NO: 329719 - DNA, 104 bp, Homo sapiens
cagcttgaagaactatgatccccagaaggacaagcgcttctcgggcaccgtcagatccttcttagaaattcctaaggctcaatgctgtgtggaagattctgaga

SEQ ID NO: 329720 - DNA, 100 bp, Homo sapiens
cactggaaatggagcagcagcaggcctatcgtccagttcaaatctgaacatcaatgatgtactagggaactactcattgactcttgttgatgcattggat

SEQ ID NO: 329721 - DNA, 100 bp, Homo sapiens
tctgacagcagtggaggcagaagttcggcaccttatttctctgctgagtgtccagatcctccaaagacagatctgcttcgcaaacctgggtatacttcat

SEQ ID NO: 329722 - DNA, 100 bp, Homo sapiens
ctacggccgcctcagcagccggctgcaggccagagagggcctcgggaagagatgcgaggatgacaagtgcatttgcccagtataacatggatcagttcac

SEQ ID NO: 329723 - DNA, 115 bp, Homo sapiens
ctgcttggatagaggcctccgaacaggagtaaagaatggctgttgaacatccacaaggcacctgcaagaagtttgggaagttgatgaacagatcaagaagcaacaggaaacactt

SEQ ID NO: 329724 - DNA, 75 bp, Homo sapiens
atttaaacaagagatttccacagaaggacttaaccaccaccatgtcgagcaaaagaacaaagaccaagaccaaga

SEQ ID NO: 329725 - DNA, 90 bp, Homo sapiens
caagagcaagatcaccgtgacatccgaggtgcctttctccaaaagggtgcttcaaggatgaccgcatcgtcttctggacttggatgttct

SEQ ID NO: 329726 - DNA, 93 bp, Homo sapiens
catgacaaccctctctgcagaactttccagtcgactctcaaacagatgcttccagaatcaatcaccgaatggtggatctacagccaaccaccc

SEQ ID NO: 329727 - DNA, 100 bp, Homo sapiens
ggaatttctgcccagatagtgtctgcagctgtgcccgggagctgggggagttccatgccttcattgtctcggacctgcgggagctccagggtcaggcggg

SEQ ID NO: 329728 - DNA, 99 bp, Homo sapiens
gccatgtgcaggaccctaacgacaggcgcctccggcccatttacgagccacccagagttccctcactgaagatctgagcatgacccgggacgaggcact

SEQ ID NO: 329729 - DNA, 100 bp, Homo sapiens
cgcgttccccccccgcccagagtcatggcggcagcagccgctctgagggcgcctgctcagggtgcctctgccaactggtggaatcatcgccacttccagc

SEQ ID NO: 329730 - DNA, 112 bp, Homo sapiens
atactgcaatttcagtttgctgaagtcaaggaggccctgaagcaaagagaggaaatgctcgaggtggagattctggacgcaaagacaagggagaagctgtgtttcttggaca

SEQ ID NO: 329731 - DNA, 101 bp, Homo sapiens
ctttgcaaaatgacccacctcctggaatgaccttaaatgagaagagtgttcaaaattcaattacacagccataggaaaaggatacagagtagagtttcatg

SEQ ID NO: 329732 - DNA, 76 bp, Homo sapiens
cagctgtccaatatttggaagaaaactttccaagaaactatgatcctgctttacatccttttgaggtcccacgaga

SEQ ID NO: 329733 - DNA, 100 bp, Homo sapiens
aggccagtcgcctccaggccaagagggatccttcacccgtgtctgatgtgaagttcatttccaatccgccctccatggtggcagcggggagcgtggtggc

SEQ ID NO: 329734 - DNA, 100 bp, Homo sapiens
gaatcctgttgtaactccatgcaataaacagttcctgagtcaatttgaaatgcagtccaggaaaatgcagtgtgccctgaaccgccctgccttctttgct

SEQ ID NO: 329735 - DNA, 99 bp, Homo sapiens
ccaccaactagtcccgttgcaggtgaaatgcaaagactgtgaggagaggagagattaaacagattctagaaaatgaacttcagatacctgtgtccaaaa

SEQ ID NO: 329736 - DNA, 100 bp, Homo sapiens
ggggaatttaagatgccaaagcagctcattcacatacagcggaggaataagtttttttcatctgtaatttggaagccaagtcagtaacaaaatgaaacca

SEQ ID NO: 329737 - DNA, 75 bp, Homo sapiens
ggtgaaactcatgaagcccaggacgattcaggtccagtccaggtgcagcagcaaggagaacattctcagagccag

SEQ ID NO: 329738 - DNA, 100 bp, Homo sapiens
agctgcaattcctcgaacgcccctgagcccaagtcctatgaaaacccctcctgcagcagctgtgtcccctatgcagaagtatggagcagtgggatcactt

SEQ ID NO: 329739 - DNA, 82 bp, Homo sapiens
ggggcaggagcctggaagagctaactcgtctggcctttgagctgtagtgatcctgtgcagcgaattgagcagtgtacacgag

SEQ ID NO: 329740 - DNA, 82 bp, Homo sapiens
acagcccccctctatgaccctgaggccaagcagggtctcatgttccggtgcagcgccagctgttgtgaggacagccaggcct

SEQ ID NO: 329741 - DNA, 82 bp, Homo sapiens
cgccgccaagagtgagcgagcggacccgcgatgggaggttctgggggaagagaagctgaaggagatactgaaggagcgggaa

SEQ ID NO: 329742 - DNA, 90 bp, Homo sapiens
aacagagcttcctgctgctattgcagaatttttgactggagactatagtaggggtcaggcccagccccaggcccagtggtattactgaat

SEQ ID NO: 329743 - DNA, 100 bp, Homo sapiens
aagctgactatggccttgaacacttggcagaggaagcggctgctgagattactaggaagctggagaaacaggagaagaaacgcttaaagaaggaaaagaa

SEQ ID NO: 329744 - DNA, 82 bp, Homo sapiens
gtctctctgctgcggcgcggggaccgctgtgctctcgggacctgatttcccatcgccttctgtccccctaaaggcttcagat

SEQ ID NO: 329745 - DNA, 83 bp, Homo sapiens
cgcagggcctgcagcgggagctggacggcgagcgcgagcggcgcgagaaagtgcatatggaactggtgtggccagctggcaag

SEQ ID NO: 329746 - DNA, 75 bp, Homo sapiens
gacgtgtcatttctaagtactttctcctactccataaagacttcaaggacttgaagttggacggaggaagacaat

SEQ ID NO: 329747 - DNA, 75 bp, Homo sapiens
caaggacagcttttttcctgcaaggattccagtggaatgacactggtgatgcttgccgccgccggagggcaggac

SEQ ID NO: 329748 - DNA, 80 bp, Homo sapiens
caaagttttagcagccttgatgaagaagatccaaacgatcaaagatgttgctggagataaataggcagaaggaagaagag

SEQ ID NO: 329749 - DNA, 100 bp, Homo sapiens
catgcatctgatgctctctctccagtccttgctgaagagactttccgttacatgatgttgaacttgaccctcatcgacctcccgggtatcaccaaggtgc

SEQ ID NO: 329750 - DNA, 75 bp, Homo sapiens
ttccatcatggcgtcaatgcaggttccgctgtgtggcagctgattgcttccttcctgaggcttccaatctcagga

SEQ ID NO: 329751 - DNA, 95 bp, Homo sapiens
tgccacctgcctttgacctttttgaagcctttgcaaaagatgataatgaagataattcaaatgatgggacccagccatccaaaaggaggcgaatg

SEQ ID NO: 329752 - DNA, 96 bp, Homo sapiens
cacagtcaaatcactcgcctctacagccggttcaccagcctggacaaaggagagaatgggactctcagtatgaagtattcagaacagaagaggaag

SEQ ID NO: 329753 - DNA, 75 bp, Homo sapiens
ctcatcgtcaacactatgggatgggtttcagtgggagctggtgaggtggccaacttcgctgcgtatgcgtttgca

SEQ ID NO: 329754 - DNA, 100 bp, Homo sapiens
agctggaggccactcgacgccagaggatggattacccagtgtacaagaaaattccccaggacacagagctggtttggagcctttctttgattttattgtt

SEQ ID NO: 329755 - DNA, 100 bp, Homo sapiens
gaaagagttcctggatgacctcttcgtctttatgcagaagagggcggaagccatcacctggatgcctacgtgggaagggacctcgaatgtgggaccccag

SEQ ID NO: 329756 - DNA, 98 bp, Homo sapiens
tctgggcgaaaattggatgtgaaaatgaagccagaccgagatggaacagattaaaagggccaataaactgtttaccaatgattgtatatttctgaaga

SEQ ID NO: 329757 - DNA, 83 bp, Homo sapiens
cttgcttggaattctgcccactctgcggagttagcagtcacgacctccagcacaggtctcttgtggctcagagcataatttgg

SEQ ID NO: 329758 - DNA, 101 bp, Homo sapiens
aggttttgtttccttcttggtcatcacaaaatgccttgatgttcctgacccttttgtgcctgaccctactggaggtggtagcccagtggtgcacacagggg

SEQ ID NO: 329759 - DNA, 101 bp, Homo sapiens
gtggccgattactgcgagaacaactacatacaggtgctccatacttgcttgcagtgcctacgtggctctggctttgggtgataacctcatggctttgaatc

SEQ ID NO: 329760 - DNA, 100 bp, Homo sapiens
cccctgcatattatgcccggcttgtagcatttagggcaaggtatcatctggtggataaagatcatgacagggctgatggagttatgagaacaatgaacac

SEQ ID NO: 329761 - DNA, 100 bp, Homo sapiens
cacttatctgcgccccctgctggttgtgcgaaccccgggcagcccgggaaatctccaagtcagaaaggagaagaacgcccagctcctgggtgcggctcag

SEQ ID NO: 329762 - DNA, 76 bp, Homo sapiens
tggacaacatgctgtactttgccaagcaccaccaagatgcctacatccgggtgtatgcaacagcgttattgcaaca

SEQ ID NO: 329763 - DNA, 100 bp, Homo sapiens
agaaactggagccaccatcaagctgtctaagtccaaagatttttacccagctcctctgtagaaacagcagcctaggcagcccgtctaacctctgcggctc

SEQ ID NO: 329764 - DNA, 116 bp, Homo sapiens
tttggagatgtctggctctgtagtgggcagagtaacatgcagatgactgtgttacaggtttgcatcgccagcttctatatattacggcctttttttttgctggatattatcttgta

SEQ ID NO: 329765 - DNA, 101 bp, Homo sapiens
gaggacacgggctgcaacctgcagcacatcagcgaccgggagaacatagacgtgaccatgcagcaggtggccaggacagtggctaaagtggagctctcaga

SEQ ID NO: 329766 - DNA, 83 bp, Homo sapiens
cacagcggcagctccagcccggcccggcagcgacatggaagtgtaaacaggaacatcgataagtagtgtaaaaacttgcacaa

SEQ ID NO: 329767 - DNA, 51 bp, Homo sapiens
cctgttacttccaagtcatcaccagaaaggccatttacaagatggtttcgt

SEQ ID NO: 329768 - DNA, 82 bp, Homo sapiens
tctgggaccggaggagacatcggcctctgcaggcttgccgaagaagggagtggagcgagaccgtgccctgggccaccaggag

SEQ ID NO: 329769 - DNA, 71 bp, Homo sapiens
tttaccctgaaaatcacaaggacatccatgtgcacggcagacctgttatcctaaactaggtgagtcagctt

SEQ ID NO: 329770 - DNA, 100 bp, Homo sapiens
tggggaacaagtaccgcctgggacggaagatcgggagcgggtccttcggagatatctacctggagggggaagacggtggggcctccccacctgccccgca

SEQ ID NO: 329771 - DNA, 95 bp, Homo sapiens
ccgcgcgcctttgtgcgcgcgccgagtctcagtggccaggaatttgggagcaacttagctggatggttctggctcagggaatcccaagaagttgc

SEQ ID NO: 329772 - DNA, 96 bp, Homo sapiens
ccaacattccttctgtgtccctgtccaagcgagagattttgaacacagcacgaaaacattttggagctggtggaaatcagcggattcgcttcacac

SEQ ID NO: 329773 - DNA, 100 bp, Homo sapiens
gcaccggaacctggtatacctggccacgatcgcagactccaaccagaacatgcagtccctgcttcctgccttgggcatcgatgggctgattgttacgaac

SEQ ID NO: 329774 - DNA, 90 bp, Homo sapiens
ggggattctcgacctgctaacagaactggaccttttcgcttcctggacaagatcgacgtgatcaagcaggctgactatgtgccgagcgat

SEQ ID NO: 329775 - DNA, 82 bp, Homo sapiens
cgcggcagcgctccagctcgctctccaccttcaggtcgcaatggaagaagagatcgccgcgctggtcattgacaatggctcc

SEQ ID NO: 329776 - DNA, 98 bp, Homo sapiens
caaaaaacagccaccgattttgctatgtctctgagctgcgagaatgtgacagtgatgataacatgggtgccaaaaatacttcaataggagaagaattt

SEQ ID NO: 329777 - DNA, 90 bp, Homo sapiens
aatgaggaaattctgtatgttcttcgccattatattcagatcctcacagccaccgtggacaatgccaacatcctgctacagattgacaat

SEQ ID NO: 329778 - DNA, 98 bp, Homo sapiens
attttctagagtcattcacgccattgctaattcgggcaagtgtccagagaatggctgggatgaaagtacacttgaactctttttacatgaacttgcaa

SEQ ID NO: 329779 - DNA, 98 bp, Homo sapiens
ccagcctgagctcctgctttgcacagctttgccacaaagcccagtctgtgtctcaaatcaaccacaagctggagagacaatatggtttagataattct

SEQ ID NO: 329780 - DNA, 83 bp, Homo sapiens
aaggaaaagaggactggagtggtttgtctgtgatggctggaagttcctctgtaccaggacaatgaaggccaaacagctctaca

SEQ ID NO: 329781 - DNA, 101 bp, Homo sapiens
tacgaaaatttgtgcaacacatcaagaccctttggagtgaatcaacctggaccttatatcatgtatacaactgtagatgcaaatgggtatctgaaaaatgg

SEQ ID NO: 329782 - DNA, 97 bp, Homo sapiens
agtgatgacacaaaatcccagatctacctgacgggcctgcgagggttgaagattgtgaagcaatagcctaagagtgtgaacatggctacgcctcttc

SEQ ID NO: 329783 - DNA, 76 bp, Homo sapiens
gaagaagaagtgttatatgtcctaaagtaaggtttcaggttctggcctataggaacaagacattttcagtaatgga

SEQ ID NO: 329784 - DNA, 100 bp, Homo sapiens
aactgttccttcagccaaagaaacaagccgtggaataggtgtatcaagtaatggtgcaaagcctgaacttaacagagcgttccaaaaagaggactctcca

SEQ ID NO: 329785 - DNA, 81 bp, Homo sapiens
gtggtccagaagcagatatcggtgagcaaaatgatgcttcaacacccaggccaggtctctgcctcggaagtgagtgcttct

SEQ ID NO: 329786 - DNA, 82 bp, Homo sapiens
tgtcgctgccgtggcaccccttctagaaggtcagcccaaggccaaccccactgtcactctgttcccgccctcctctgaggag

SEQ ID NO: 329787 - DNA, 131 bp, Homo sapiens
ctccagcaaacctgtgcggttcagtgtgtctccagtggtccagacgcccagccccacagccgtttttcaggcagaaaatccttttgattttatggaaaacatttctttagaaggaaaaacaaatttctttg

SEQ ID NO: 329788 - DNA, 100 bp, Homo sapiens
aggcactcctctttatgctgctcactttcgtccaggacagtatgtggatgtcacagccaaaacatcctgaggaggatgaaggggctggccctggaggccg

SEQ ID NO: 329789 - DNA, 100 bp, Homo sapiens
tatgcccgagggcactacaccattggcaaggagatcattgacctcgtgttggaccgaattcgcaagctgctgggacatttttctgatgatcattgctggc

SEQ ID NO: 329790 - DNA, 80 bp, Homo sapiens
aggacgtgaagccagagatggcgatgctctacccggagctgtacaaggacctcaccaagatggcgattttgctgacagct

SEQ ID NO: 329791 - DNA, 50 bp, Homo sapiens
cagaacggatagctccctcctggaaaagattctacttcaaagaaatcctg

SEQ ID NO: 329792 - DNA, 75 bp, Homo sapiens
gtgggcatggcagacaaatctgtaggtgctggagaatctggtaaaagcaccattgtgaagcagatgaggatcctg

SEQ ID NO: 329793 - DNA, 100 bp, Homo sapiens
ggagtctatgtctgtgtagcaaggaattaccttggagaggctgtgagccacaatgcatcgctggaagtagccattatcgccagtgtgacccttcagaacg

SEQ ID NO: 329794 - DNA, 101 bp, Homo sapiens
gtacgtgggagtggggggggcctggatgcttctctctgctctgccctggctgggccactacaggaaacttggatttaactggccagaagcaggtattcaaa

SEQ ID NO: 329795 - DNA, 82 bp, Homo sapiens
cagattccgatttgacgggcaaccaatcaatgaaacagacacacctgcacaggctggagtgcgatggcatgatcttggctca

SEQ ID NO: 329796 - DNA, 100 bp, Homo sapiens
ctcctactgatgagacaagatgtggtgatgacagaatcagcttttaacatacggtccctaatgagcacagagaagaccaagggcttctgccagctggtgg

SEQ ID NO: 329797 - DNA, 90 bp, Homo sapiens
gctgacagcagccatcgaggcgagccagagcctgcagtcccacacgggaatagcatttcaaggttcagtggaggagaaccccaagagcac

SEQ ID NO: 329798 - DNA, 50 bp, Homo sapiens
atgggacattgctccgctcttatcaaggaaagccgggttagtaaagcagt

SEQ ID NO: 329799 - DNA, 82 bp, Homo sapiens
actcctggcagtgcgtcaatcagagcgtcctgtgcgataaaataccatgaggagtttgagaagagccgcatgggccctagcg

SEQ ID NO: 329800 - DNA, 75 bp, Homo sapiens
cctgaagcagtactcccgcctcctggagcggattcttggtgccaccattgagaactccaggattgtcctgcagat

SEQ ID NO: 329801 - DNA, 100 bp, Homo sapiens
tttgtggccacattgcactttccacatgcttcaaacatcaccttgtacaaggaaggcccgaacaagacaggaacgtcctgtgccctggactgtggagctg

SEQ ID NO: 329802 - DNA, 83 bp, Homo sapiens
ctcggcgctgccgtctctggaggagtactggcaacaggttaatttggagtggcccctggagtcagtttcctacaccatccgag

SEQ ID NO: 329803 - DNA, 129 bp, Homo sapiens
gagcgctggccctgtgccaacgccgcccgacaacatccaagtgcaggaaaacttcaatatctctcgggtggtgacagcaggagcaatcatccctttccccttggctccaggccagtcccttcctgattc

SEQ ID NO: 329804 - DNA, 100 bp, Homo sapiens
ggcggatgcggggacagcggcctggctaactcctgccaggcagtgcccttcccggagcgtgccctcgccgctggctgtgggtgagcgtggaggatgctca

SEQ ID NO: 329805 - DNA, 75 bp, Homo sapiens
caaaacaggactggctgatactacatattccagatgatcctaatgtggctcttacttttctggaaaagactcgtg

SEQ ID NO: 329806 - DNA, 100 bp, Homo sapiens
aacattaatcagatactgcatttaagattatgtttgagaccttcaacaccccggccatgtacgtggccatccaggccgtgctgtccctctacgcctctgg

SEQ ID NO: 329807 - DNA, 75 bp, Homo sapiens
gcaaggggacccagtgcgcccgcatcgtcgaggatgaacgtgaagccagagaaaatgtgaagagagagcaagatg

SEQ ID NO: 329808 - DNA, 100 bp, Homo sapiens
ctcgctctgctgctttagcttcggagtgtttggcgatggggcagcgcgagatgtggaggctcatgtcgagaacaccttccaccatgaccacctcagcaag

SEQ ID NO: 329809 - DNA, 119 bp, Homo sapiens
tcaagttgccggtggaattggcccaggatgacagctggagaatggagtcagatctttaaatggatgagatggctaccactcagatttccaaagatgagcttgatgaactcaaagaggcc

SEQ ID NO: 329810 - DNA, 75 bp, Homo sapiens
ccacagtccttctgcagtccctcgtccagccacccccaggattcctgagctgaaatgcagatgaccacattcaag

SEQ ID NO: 329811 - DNA, 100 bp, Homo sapiens
gcggacgaggcggaagaccgcgcgcagggcctgcagcgggagctggacggcgagcgcgagcggcgcgagaaagaatcagagatcattgatttcttcctgg

SEQ ID NO: 329812 - DNA, 99 bp, Homo sapiens
gaaaaccttggccgaaagggttgtagacatggcggccatcagggagcagtctcacaggtgctggacagcctggaagagattcatgcgcttacagactgc

SEQ ID NO: 329813 - DNA, 75 bp, Homo sapiens
caaccttcatgtcatgaaggccatgcagacatgcgtcgggatgtccaggaaatttttcgcatgaccccccacgag

SEQ ID NO: 329814 - DNA, 75 bp, Homo sapiens
gccttagaggagccatttttccagaatctacctgttactcgtattttggacaatcttatggagatgaagtcaaac

SEQ ID NO: 329815 - DNA, 82 bp, Homo sapiens
gtgggcaacgtggccgacagcacagagaagtcgaggttagagggaactgggaggcactttgctgtctgcaatcgaagttgag

SEQ ID NO: 329816 - DNA, 82 bp, Homo sapiens
cttgggagagctcctgggccacccctcctttcaggtcaaggtgaaatgacaatggatgctctgttggctcgattgaaacttc

SEQ ID NO: 329817 - DNA, 80 bp, Homo sapiens
agatctgggacaccgcattcgccatccaggctctgcttgaggtctgctgtgcacgtgctgcagaactccatagacagcct

SEQ ID NO: 329818 - DNA, 90 bp, Homo sapiens
gagaactggagaagttaaatcagtccacggatgatatcaacagacgggagactgaacttgaggtgtagtacagcgaatagccgattggca

SEQ ID NO: 329819 - DNA, 90 bp, Homo sapiens
tgaggtgtttgacaaaacataccaattcttgaatgacatccgagcgaaagagaaagaggatcaggtctcctgggcatggctaacattgac

SEQ ID NO: 329820 - DNA, 82 bp, Homo sapiens
ttcgggtgtctcgtgtgtgaacatcacagtcctcctgcatatgcccaagaggattgggagtggaatggacaccagcagaagc

SEQ ID NO: 329821 - DNA, 97 bp, Homo sapiens
ctcatctcacctatgggaagctgctagctctaacagagcccatgaaatcaagagcaccacagctacatttggaatacagattctataagcagttagg

SEQ ID NO: 329822 - DNA, 90 bp, Homo sapiens
aagggatcagatgcatcatggaagaatgatcaggaaccaccaccagagaagcctggaatggtcccccctccgccgggagaagaaagccag

SEQ ID NO: 329823 - DNA, 51 bp, Homo sapiens
atttgagaaggaggctgctgagatggtgaaggaggaatagaagatgaaaac

SEQ ID NO: 329824 - DNA, 101 bp, Homo sapiens
acgcgggccttcgagcagctcatgaccgacctcaccctgtcgcgggtccattacatcgtcgcgtctgctcaggtctggatgataacacgctatgatctgta

SEQ ID NO: 329825 - DNA, 112 bp, Homo sapiens
cttactgtggatctggattctaaggcaacacttccttgaagaaacaagcttacaggtggaagttgatgggtcgaaactaaatgtgaccagcacgtggaacctggcttcgccc

SEQ ID NO: 329826 - DNA, 99 bp, Homo sapiens
ccatttttggtaacattacattatgctttccagacagaaaccaaacttcatctcattttagagaagctgatcgtcgaagggcatctaaccaaagcggta

SEQ ID NO: 329827 - DNA, 82 bp, Homo sapiens
cgggagcgagctgggagggagccgcgcgcctttgtgcgcgcgccgagtgaaaaatgtactctgacctgaatcctgaattttc

SEQ ID NO: 329828 - DNA, 75 bp, Homo sapiens
cctggagtacaacgaggtcaacgtcaccctggacctgggccaggatgagttccacccgttcatcgaggccctgct

SEQ ID NO: 329829 - DNA, 97 bp, Homo sapiens
cggcgaaggtgaagagttgtcccagctcggcccgcgggggagccccgggagccgcacgtacaaaattggacagctgtacatgatcagcaaacacagc

SEQ ID NO: 329830 - DNA, 98 bp, Homo sapiens
ccccttctgcccggcgcttcggcccgggccgctcaggtgcaggtggtatcacggaaaacttgacagaacgatagcagaagaacgcctcaggcaggcag

SEQ ID NO: 329831 - DNA, 85 bp, Homo sapiens
taatgaacttcctgtacctgctgggagaagttctgaacaactatatctgggatacacagaaaaatggagtcccactctgtcgccc

SEQ ID NO: 329832 - DNA, 100 bp, Homo sapiens
gggccaccaaagtatagtgatgaagttgaattgaaggttcttccaggctcaacgagaacctttgacaagagcacgaagtgaagaaatggggaggatcgta

SEQ ID NO: 329833 - DNA, 95 bp, Homo sapiens
tctccgtgtccgtggagagtgcctgctccaactacgccaccactgtgcaagtgaaagaatgacagcaagcctcccatccagatgcctggctcttc

SEQ ID NO: 329834 - DNA, 75 bp, Homo sapiens
ggtaaactatacctactgtccctcaagagaacacaagaagtgctttaagaggaatgtatcctgtcaggtataatg

SEQ ID NO: 329835 - DNA, 89 bp, Homo sapiens
gctcagccatgcaggccccaacaggttccatcataatgaatggatccaatatggcaaatacatcaccgagtgtaaaatccaaagaggac

SEQ ID NO: 329836 - DNA, 75 bp, Homo sapiens
gcggctttgaccgagaggctgctggagctcgtgtttggacgcgttttctgtctcaactggtctctgacaagcctc

SEQ ID NO: 329837 - DNA, 100 bp, Homo sapiens
gcactgctactgcgaagacagctggcaggttgagactgagctaaagttaatctgttgtgacattctggatgtactggacaaacacctcattccagcagct

SEQ ID NO: 329838 - DNA, 75 bp, Homo sapiens
cggtctctgttccgcaggatggtttgtttctgcgtcacatgatcttggcctacagtaagctttctttcagccaag

SEQ ID NO: 329839 - DNA, 100 bp, Homo sapiens
gcactgcttacgagctggtcctggctgatggcagctttgtgcgatgcactccgtcttggacagtaaagcaccaaaaccagaagacattgatgaggaagat

SEQ ID NO: 329840 - DNA, 75 bp, Homo sapiens
atcaccgacagcacagacagaatccctgctaccacttccttcaaaatgtctactgttcacgaaatcctgtgcaag

SEQ ID NO: 329841 - DNA, 82 bp, Homo sapiens
ccctattgtaagtgcagatggaacacaacagggtgaaaatcctatttataagagtgccgtaacaactgtggtcaatccgaag

SEQ ID NO: 329842 - DNA, 97 bp, Homo sapiens
ccaccacgataatgcagttcttattactagcatggcggacaccgacctgttcatggaatgtgaggaggaggagttggagccatggcagaaaatcagt

SEQ ID NO: 329843 - DNA, 100 bp, Homo sapiens
ttcaccctgtgtgtctgcccgacagggagacggcagccaggttgaaggggcccggccaggactcggggaagggtggcctgagagcagcgatgacctctgg

SEQ ID NO: 329844 - DNA, 100 bp, Homo sapiens
ccaccacattaatgaaatcaaaaggcagaaccagtcccttgtgtatggcaaagtggatagcttctggaagcttagcagtgtctgcaaaaacgaatctttt

SEQ ID NO: 329845 - DNA, 100 bp, Homo sapiens
cggagtttcatctacgtcgctgtcatgaactacctgcccactctggagttctcccaccctcacagctgcccagagcccagaccaagcatggacgccgtgg

SEQ ID NO: 329846 - DNA, 75 bp, Homo sapiens
ggagaagggcagtggctgtagctgccctttccgtttccagggttccgaccagggaaccctactctggaaactgtc

SEQ ID NO: 329847 - DNA, 100 bp, Homo sapiens
gtgtggctctggatagcaccttatggacaggtatcctgtggtctgaggccatcttcctcgaggcaaggccccagaggaggaccaagagcgtggatgccct

SEQ ID NO: 329848 - DNA, 50 bp, Homo sapiens
cctgccccgagccgcgggcttcccagcttctcggacttctattcagagtg

SEQ ID NO: 329849 - DNA, 75 bp, Homo sapiens
ggattccaagtaactcttatttgggtaagatgatcatgcaggataaactggagaaggagcggaatgatgctaaga

SEQ ID NO: 329850 - DNA, 99 bp, Homo sapiens
attgccttattttttctcatggatgttcttcttcgagtatttgtagaaggactcctcagacccctgcacaattgagagaaaagcccgaagaattagcgt

SEQ ID NO: 329851 - DNA, 100 bp, Homo sapiens
cccgcctcccaccatggctctgaagagaatccacaagcagaagatggctgtgccacccacgtatgccgatcttggcaaatctgccagggatgtcttcacc

SEQ ID NO: 329852 - DNA, 115 bp, Homo sapiens
tggcagcatacacagatgaaggtgggaaggatggtccagaattcacttttactaccccaaagtttggataagctaaacctgaaggagtctgatgactctgtgaacacagaagaca

SEQ ID NO: 329853 - DNA, 90 bp, Homo sapiens
cgagcgtggcaagaggcccccgccggagggcgagcctgcagccccggcgtccggagttctgggaaagaccacagcaagattctttcattc

SEQ ID NO: 329854 - DNA, 100 bp, Homo sapiens
aatctaggtatacctcttggagatcctttgcagccaacgagggtaaaggacccagaaacaagagagattattctcatggaataactgaagtgaagtgatg

SEQ ID NO: 329855 - DNA, 98 bp, Homo sapiens
accctgactaaagcttgaaatgctacatttccaaggtgttcttcaacggtgccaacgtccggcaggtggacgtgcccacgctgaccggagccttcggc

SEQ ID NO: 329856 - DNA, 100 bp, Homo sapiens
ccgggtataataatgaagttaaaagagcagcactccaagaaccgtgcccggaaaaaaaggctgaatattattattgtggctgaaggagcaattgataccc

SEQ ID NO: 329857 - DNA, 83 bp, Homo sapiens
gaggcaaggagctaaagcagcgtgcgttcagccctggggaggtgtgattgcctatatcagttcttccagctcagcctcaagcc

SEQ ID NO: 329858 - DNA, 83 bp, Homo sapiens
gtgctgcgcgacccccgcgcatgactcggtgaaatacctggagtgctcagctctcacccagagaggcctgaaaaccgtgttcg

SEQ ID NO: 329859 - DNA, 100 bp, Homo sapiens
gaggctaagaaagtggtgaatcccctgtttgagaaaaggcctaagaattttggcattggttgcttttaactttgacagaggaagaattttccaagacgcc

SEQ ID NO: 329860 - DNA, 100 bp, Homo sapiens
tgccacccgaggagttccgcccctttctggcaaagatgagggggattcttaagcggttgctgatgctattagaacaagccttggaccaaaaggaatggat

SEQ ID NO: 329861 - DNA, 101 bp, Homo sapiens
gtggcctcagagcgtctgggccacactgtctgggaagagccaggtgcccaggacagaagccccagccccagcctcatctacaccccaggagccctggcctg

SEQ ID NO: 329862 - DNA, 100 bp, Homo sapiens
tggcgccccgctggaggagctccccagctggtggctggagcgaccccttgttctttggtggcgctggaagcaatgaggctccccaagaacacacctgagg

SEQ ID NO: 329863 - DNA, 75 bp, Homo sapiens
cgaggaggcggtggagggcttcaaggtttccaatacttatctacaggaatcgccatgaccccagctctgagggag

SEQ ID NO: 329864 - DNA, 90 bp, Homo sapiens
tcgacctcctggactcaagtgatcctcccacctcagtctcccgagtagtcaggactacaggttcccagaccagaggactgttgttaggtg

SEQ ID NO: 329865 - DNA, 98 bp, Homo sapiens
ctggatcagaaacaggccatggagggacaggatccggaggcgccagctcaacctgggtgcctgatagacatcctaggactatacagaaggaaaaggcc

SEQ ID NO: 329866 - DNA, 49 bp, Homo sapiens
agaagatcatcgagcatttcaaacggtcctggctataagtcaccatggc

SEQ ID NO: 329867 - DNA, 98 bp, Homo sapiens
gcgggagctgggccgcctgaagcagctgctgtcccgggcctaccccctggactccctggagaagcagatggaaaagatggagtttccctcttgttgcc

SEQ ID NO: 329868 - DNA, 83 bp, Homo sapiens
gtctgtgtcaaacatccatatcataagtggaattttggagatattcaaaggagaagactttgcagttgtgcagcaagaaatta

SEQ ID NO: 329869 - DNA, 82 bp, Homo sapiens
tgctgctgctgctgacgctgctgctgcccggcctcgggaaatgcactcggtgatggaaagagagccactattctgaagaaca

SEQ ID NO: 329870 - DNA, 75 bp, Homo sapiens
gctgcgtgtgcagctggagggcaggccaagtataaggagcgagggacggtcttggctgaggaccagctagcccag

SEQ ID NO: 329871 - DNA, 75 bp, Homo sapiens
gtggaggttcttgtctcccctggtttgtgaagtgcggaaaaccagagtccctgcactaggtcagacaatcccctt

SEQ ID NO: 329872 - DNA, 100 bp, Homo sapiens
tgttggagccgcagtgcagcctaattttgacttcagagcagcccgacggccatggaggctgaagagacgatggaatgccttcaggagttccctgaacatc

SEQ ID NO: 329873 - DNA, 73 bp, Homo sapiens
taagtcctgactgcttgggacatgcaggacttgtatatgagtatacattggcctctgaagaacacctgaagca

SEQ ID NO: 329874 - DNA, 50 bp, Homo sapiens
ctccaacaagcttccaaaatggcctggtaagaattgtgacaaaggccagt

SEQ ID NO: 329875 - DNA, 100 bp, Homo sapiens
ttctcttcagtcactgtgtcaaatttgttcaagattatgagcctcaaacaatttgtgagcatctccagtacttgtttgccttgttgcaaaacagtaatag

SEQ ID NO: 329876 - DNA, 101 bp, Homo sapiens
cctggagagggagtgcgtggaggagctgtgcagccgcgaggaggcgcgggaggtgttcgagaacgaccccgagacggccacccagaggagaaggccacccc

SEQ ID NO: 329877 - DNA, 98 bp, Homo sapiens
gcggcgactcaacaagcggcgcttcccggggctgcggctcttcgggcacagatttccatgaggacaacttacaaggacctgtatggcctcattttagc

SEQ ID NO: 329878 - DNA, 90 bp, Homo sapiens
gactactacatgcctgctatcgcaaggacaggtggagggaagcgccccagacaaggaagctggcaaccagccccagagcagcgatgggac

SEQ ID NO: 329879 - DNA, 89 bp, Homo sapiens
gcatctctggtgcatgctgatgacgaaaaacgaagttggtgaaccatctaaagaagagaaggctgtggccaagtatcttcgattcaact

SEQ ID NO: 329880 - DNA, 75 bp, Homo sapiens
gcacatccccacatcaatgcactgccaatggaagccagttgagggaagttctccatgaatgtacgtcacaatgat

SEQ ID NO: 329881 - DNA, 90 bp, Homo sapiens
ggaggacccggagcgcacaaagcacacccgcggcgccatggctcacgtcggctcccgcaagcgctcgaggagtcgcagccggtcccgggg

SEQ ID NO: 329882 - DNA, 100 bp, Homo sapiens
ctgtttgtctgttcgacacaggcttggggccgacgggggagacggagccccagtttttgaaatcatgaatcctgtttatagtcctggatcttctggggtt

SEQ ID NO: 329883 - DNA, 103 bp, Homo sapiens
acgactgggaccgggacctgctgctggacccggcctgggagaagcagcagcgcaaggtatcatgatattagctggtttgacatcaagtcatttgtgagtcatc

SEQ ID NO: 329884 - DNA, 50 bp, Homo sapiens
aacgtggatcgttgttttgaaactgtatttgcatgcccgagtctttgagc

SEQ ID NO: 329885 - DNA, 133 bp, Homo sapiens
tccacccaggcctttagagtcagatgtcttcattgaagatagagccgaaatgactgtgtttgtacggtatttgtgctttcaactcatccttatggctgcagagtaattcagcgcatcctagagcattgcactg

SEQ ID NO: 329886 - DNA, 100 bp, Homo sapiens
gccatctttacggctctggggatcgtgatgggacaggtggtcggactcagtaatccagtccctcatagcactggtgaatgacccccagcctgagcacccg

SEQ ID NO: 329887 - DNA, 75 bp, Homo sapiens
ggaagtgccaaggtcatccggtccctccacgggcggctgcagggtggaggctggagatataataacagagctgga

SEQ ID NO: 329888 - DNA, 75 bp, Homo sapiens
cgcccctccacatggctgccctcctcctgcttccctggctcatgttgctcacagtgttgcaatctggttcctaag

SEQ ID NO: 329889 - DNA, 100 bp, Homo sapiens
aggggtgaaagagactcggtgacagatacagatgaactcacaaattcgtcagaaaccagattgtctttggaagacctctttaggaaagactttgtgcttc

SEQ ID NO: 329890 - DNA, 101 bp, Homo sapiens
atgacaggtgtggccctgaagcagggttctttaaggaaacccagcgtttgctggcagaaccagttcctggcatcaaagccgaaccagatgagagcaacgcc

SEQ ID NO: 329891 - DNA, 83 bp, Homo sapiens
cgaatctccggccgaagagcggcggcggcagcggcgaggctgggaggcggcagaatgcagccagaggagggcacaggctggct

SEQ ID NO: 329892 - DNA, 75 bp, Homo sapiens
tctacttttgggttacaaaaatccagaccaggacactctgattgtgtggtctgaagcagaaaattatgacttggc

SEQ ID NO: 329893 - DNA, 80 bp, Homo sapiens
ctttagaccctccacctaattgcagggttaatcatctcattttagtggagccttggggtttccctgaacgaccagacctt

SEQ ID NO: 329894 - DNA, 101 bp, Homo sapiens
atccccaaccgcactgaggataaggaggagaacaggaagagcacgatggttactggggcttccggatgcagatgacgatgcgtttgaagagtacagtgctg

SEQ ID NO: 329895 - DNA, 49 bp, Homo sapiens
caaagcctcctggaccgtccaagaaggtgaccatcgggatgaggaggaa

SEQ ID NO: 329896 - DNA, 82 bp, Homo sapiens
ggacgaagatggggagaaggaagcgagactcatacgcaacctcaatgtctctgctttctatccgtcaagatgataaagtcgt

SEQ ID NO: 329897 - DNA, 83 bp, Homo sapiens
caaccattgacgccatgtcgggttattcgagtgaccgagaccgcggccgggaccgaggctagacttcgggctccttgaggata

SEQ ID NO: 329898 - DNA, 100 bp, Homo sapiens
ctggccgacaacagcctggcgtccgccacgaaatttaaaagcctgttgattcaagaactttctaaagtatttccggaagacatggctaagtatcgaagca

SEQ ID NO: 329899 - DNA, 100 bp, Homo sapiens
tttgggactgccccggcaactccagggtgtctggtccacgacctatcctaggcgccatgcaaaagctggcaggctgacagaggcggcctcaggacggacc

SEQ ID NO: 329900 - DNA, 100 bp, Homo sapiens
tgtcatccagccttagcaaaccagagcggtcttgcgagtggctggttccctgcagaagagcacagaagtgatgaaggccatgcaaagtcttgtgaagatt

SEQ ID NO: 329901 - DNA, 103 bp, Homo sapiens
cagaagttctcgaatcattctttgtacagaaattgaaaggcttcaaagctagcaggtttatcttcgagaagcaccatggccatctgcacaatcagaaatcagg

SEQ ID NO: 329902 - DNA, 80 bp, Homo sapiens
ctgatcctgggcttccccatctggtgcttttcccatggagaacacacaaccaagactaaggtgtcagtatgttcttcaag

SEQ ID NO: 329903 - DNA, 100 bp, Homo sapiens
tggaagcatcagaatttcttcagaatgcagtttacattaaccttcgacagctcagtgtggaggctgctggccctgccatctgtaagaagatgtcatacgg

SEQ ID NO: 329904 - DNA, 90 bp, Homo sapiens
cccaacctacacgtcgtggagctgactctgagcccaggtctcaagattctgccctccaagaaagtcttgccatgattggataggaccccc

SEQ ID NO: 329905 - DNA, 90 bp, Homo sapiens
acggcttgcaagtaacaggcaaagctgatgcagacaccatgaaggccaatgatggctgcctgtatgtctttgaccgagaacagaaccggc

SEQ ID NO: 329906 - DNA, 75 bp, Homo sapiens
tggacgagtcttggattcgtgaacagaccacagtggaccacttctgggctaatgcacaagctgagtgtggaagcc

SEQ ID NO: 329907 - DNA, 101 bp, Homo sapiens
gcagaaggagaacaagccaggaaaaccccgaaaacgcaagaagcgttgggctcgggatgagtttgaaggcctcttcaagcagccagcagaaaatgtcaacc

SEQ ID NO: 329908 - DNA, 75 bp, Homo sapiens
aatagatctccggcataagctcaatcttcggtcggatttctgtggcctcacacacctggtgaagctagacctgag

SEQ ID NO: 329909 - DNA, 90 bp, Homo sapiens
atactatctgagactaaagatcccactagttaagatcccagatgcagcttttattcaggcagcccgcagaaaacgtgaattggccagggc

SEQ ID NO: 329910 - DNA, 101 bp, Homo sapiens
acatgccatgttaggacattatgtaaattgtgaggattcttatgtggctagtttgcagatgatgaaacatgcttggaataattataaaggttatgcctggg

SEQ ID NO: 329911 - DNA, 71 bp, Homo sapiens
ggaattcgcgaagctgccaaagccttagacaagggccatggcacctgcaaggtgtttctcagcaagattga

SEQ ID NO: 329912 - DNA, 75 bp, Homo sapiens
tacaaggaccagaagaaactgcaccggaaatgtgcctaccaggagaacaacatgaagtactgggagaagaaccag

SEQ ID NO: 329913 - DNA, 122 bp, Homo sapiens
caggtgcgaagtgacccgcaggccctttacttcaacgaccccatttggtccaacatgtggtacctgtggatcaatcttcctgtcctacaactgacaaaggatcccctaaagacccctggaag

SEQ ID NO: 329914 - DNA, 114 bp, Homo sapiens
ccagcgggagtggcggggcgcagcaaagggagctggagcgcatggctgaggtcttggtcaccggggaacagctacgggaataccttggcaagcagctccagtccgagcagcccc

SEQ ID NO: 329915 - DNA, 98 bp, Homo sapiens
ctcccgagtagctgggactgcagctggccctgaaggaccctgttcatacagtgtcactgcagcagttcatctacgagaagctcaaggcacagcaggag

SEQ ID NO: 329916 - DNA, 90 bp, Homo sapiens
ctgagtgtgcccctgacatgacaaggagccgtcgtcgttagggatcatagacggtatttctatgtaaacgaacagtcgggcgagtctcag

SEQ ID NO: 329917 - DNA, 100 bp, Homo sapiens
gccacctggtttcaagaccctacccgcttcactggcaccatggacctaaactgccccttcctcgagggtctgtatatcacagagccaaagacaattcagg

SEQ ID NO: 329918 - DNA, 82 bp, Homo sapiens
cgccttccgccgtctcttcgagttcttcgtgctgctcaaggtgctgggcgtcctcttctttgccatagcctgcttcttatac

SEQ ID NO: 329919 - DNA, 88 bp, Homo sapiens
gaagatgcaagcggtttgggaccttgaacaaggcaaatatggttttgaggcaaatttctggagatgtgcaatgatctcttagctagag

SEQ ID NO: 329920 - DNA, 90 bp, Homo sapiens
gctggatgctggagcacacggaggccgtgatgaaggctgaagaactgaaactggccacccagctgaccggaccggtcatgcccgtccgga

SEQ ID NO: 329921 - DNA, 75 bp, Homo sapiens
ggggacccggctgcggtggctgcgggactgacgaaaatggtggagtcaatgaagaaagtagcagggatggatgtg

SEQ ID NO: 329922 - DNA, 101 bp, Homo sapiens
ggagaaagaagacagccatcatttgaaaggcagagactccccctaatgggccagattgtggctatggctcctttcaccagcagtactggcttgacggaaag

SEQ ID NO: 329923 - DNA, 90 bp, Homo sapiens
gcgagtgtttgtggtggcagctgggactgttgaggtgtgaacgtggaccctgagagatgcctcggcagtggaatccaatttctttccagc

SEQ ID NO: 329924 - DNA, 87 bp, Homo sapiens
ttgtcatgcagaactgctcaggactataagcactactatgaggaagatgaagattttgaagaagaaagtgatgatgatgatactgca

SEQ ID NO: 329925 - DNA, 82 bp, Homo sapiens
acaagagcgaggagaagcgagaaaagatgaaacggaccctcccccaaatacatcaagatgtttgtactggatgaagctgacg

SEQ ID NO: 329926 - DNA, 50 bp, Homo sapiens
gcgtcgacgctggtcgtgggggcggaggagctatgaagacatgattggtg

SEQ ID NO: 329927 - DNA, 97 bp, Homo sapiens
gaacaaaggaaggggagcccgggacccccgggggcgcagaagttggtgagatggcaaagcagtatatagagaaaagtcttttggttccagaccatgt

SEQ ID NO: 329928 - DNA, 90 bp, Homo sapiens
aacggggttcgggtgtctcgtgtgtgaacatcacagtgtcgatatatagtatctggttttatgacaagaatgactgtcaccgcatagcaa

SEQ ID NO: 329929 - DNA, 75 bp, Homo sapiens
cgacgctctctctgaccgtgaattcaggagaccctccgctaggtgctcttgatgatttcgataaagccaaaccct

SEQ ID NO: 329930 - DNA, 75 bp, Homo sapiens
ccccggcgccacctggagagaggccgcgtcctgggcagagctcccacgtgggacaagatggtgtcttcggcgcag

SEQ ID NO: 329931 - DNA, 100 bp, Homo sapiens
tacaagcaggatgtgtacttgcttcctaagaaaatgggtggtggaggagtcatccttcctgaccctggacatgctggagtcctgtttcccttatgtcctg

SEQ ID NO: 329932 - DNA, 83 bp, Homo sapiens
cgacgacctgtctcgccgagcgcacgccttgccgccgccccgcagacaatgcagatcttcgtgaagactctgactggtaagac

SEQ ID NO: 329933 - DNA, 95 bp, Homo sapiens
atctgttgtcgcaggtatattgcttcccaagctcttccttcagtcccacgactacagtctgtattccttggatgtggaattcatcaatgagatcc

SEQ ID NO: 329934 - DNA, 75 bp, Homo sapiens
ccagacctttttggccctctgtgctacaggttcctaggagaatgttaacagtccagacctttttcactacatcaa

SEQ ID NO: 329935 - DNA, 75 bp, Homo sapiens
ccgcatgctctttgtcactccccggcggcagcacgaaagtaccatgatgaattgatccatgagttaaagcagaca

SEQ ID NO: 329936 - DNA, 75 bp, Homo sapiens
tttgcttcatctacagtcaggatgctggatgttcatggagtgaggattactacagcatcccatttcccacaccca

SEQ ID NO: 329937 - DNA, 100 bp, Homo sapiens
gcggacatctccctggacgaactcatcaggaagcgcggggcggcggcgaaaggacggtgtcagcacagcgggctactcctagggataagcccccggtccc

SEQ ID NO: 329938 - DNA, 100 bp, Homo sapiens
cgacttctgcagtacgagaacgtggatgaagactcttcgggagtcccgacctctacatgttgtgctgggaaatgaagcctgtgatttggactccacagtg

SEQ ID NO: 329939 - DNA, 82 bp, Homo sapiens
tgtggcccgcgccggcggcatcgagactatcgctaatgagtatagcgaccgctgcacgcctattggaccaggtacagacatt

SEQ ID NO: 329940 - DNA, 80 bp, Homo sapiens
cccggagctccaagacaggggtgggttccagctgcccgcacgccccgaccttccatcggctttgttcgcgggggtcacag

SEQ ID NO: 329941 - DNA, 75 bp, Homo sapiens
caaaggcaagaaggcaacgacgttccatctgtggaaggacctaccaaccaggttgccgaggagcccaagtagaag

SEQ ID NO: 329942 - DNA, 50 bp, Homo sapiens
atccagtaatggagcctctaagctcttcacagatggaatcacaaataaac

SEQ ID NO: 329943 - DNA, 75 bp, Homo sapiens
gaagaataagcagtgcctgtgtggtttctactttccaggtccactggtgtttggtgtacccatgtgactaatttg

SEQ ID NO: 329944 - DNA, 100 bp, Homo sapiens
aggggacatcgcactcctgtatctccaagagatagaaaggaaaaagcttgtggtgaaggggggcaaaaaaaagaagcaagttctgaagttcactcttgat

SEQ ID NO: 329945 - DNA, 75 bp, Homo sapiens
tcacaagctgtttggtcactctcatcttgcaaaccagttggtggctaaaggagttaagagttctgatgtttctcc

SEQ ID NO: 329946 - DNA, 76 bp, Homo sapiens
catcaagaaagtattgcaggacaagagatttaaggtattggctgggatccaccaaaacttcaatcaattttccttt

SEQ ID NO: 329947 - DNA, 75 bp, Homo sapiens
aatgggaattctcttcactagaatatggagactgttcaatcaccaggggcccagtctatggcatgaataggcttc

SEQ ID NO: 329948 - DNA, 75 bp, Homo sapiens
gaaccaaggcggccctggctgggggaaccactatgatcagtaagcagctgctccctttgtccagcagtgtacata

SEQ ID NO: 329949 - DNA, 100 bp, Homo sapiens
caaaactgtcattttgggactgctgtgcctcctcctcctgtggtggaggagaaggaaagatcgtgagaccaggactgaaaatgatcaagaaatttctgaa

SEQ ID NO: 329950 - DNA, 100 bp, Homo sapiens
gaatcccagaggaaactgacggagacgcagatgtggacttgaaagaagctgcagcggaggaaggcgaggtgtggtttcagaaccgaagagccaagttccg

SEQ ID NO: 329951 - DNA, 90 bp, Homo sapiens
ctagcctctctgaagccctggacttgatcgagtcgtcactgctgggctgaggtggccaatcatcacccaccacgtgttcctgactgcgct

SEQ ID NO: 329952 - DNA, 100 bp, Homo sapiens
aagccggctcgacccctctgacaagggagaacagcaccttcagtataaacgatgctgcttcccacacaagtccagttacaacacagggatcacaacaaac

SEQ ID NO: 329953 - DNA, 75 bp, Homo sapiens
gtcgaggaggaggaggagctggccgagaatgaactctggaagcccagccagggacaatgcaccttcacagagatt

SEQ ID NO: 329954 - DNA, 95 bp, Homo sapiens
ggaacctgactttcacagctcagtacctaagctcttggggtgaagccttattcctgatgctccagacgatcaccatctgcttcctggtcatgcac

SEQ ID NO: 329955 - DNA, 101 bp, Homo sapiens
tcaagctcatctacaacgagtactgtgggcctggagccaagcccctcttcaggagtaagactgcctcttcaaggtgtgccccatgaaccgctactcggccc

SEQ ID NO: 329956 - DNA, 75 bp, Homo sapiens
acgaaagtcatgttacccaacaccggattataccgaaaagaagttctagagaaattaatagaaaaatgtgtttct

SEQ ID NO: 329957 - DNA, 75 bp, Homo sapiens
ttacactgcttgtagctcttaaggttggtcttcctgcaaaatctggagttgctgggggcattcttttagttgtcc

SEQ ID NO: 329958 - DNA, 90 bp, Homo sapiens
gatggacaagagacgatcattctgcaagcaggcaacctgaatacaggtccaatagaaaaagttggtgtgctggagctacctcacctcagc

SEQ ID NO: 329959 - DNA, 100 bp, Homo sapiens
atgattccttcagataccagggactggagaaatatggggagttgatgagcatcagaaaaaccaggacagacttttgagacaagttgaagttaaattccag

SEQ ID NO: 329960 - DNA, 80 bp, Homo sapiens
cggggtgccagaaggaaagcatagttcttcctgtccaagatccggtcccacgtggctacttgttccaaataccagaatta

SEQ ID NO: 329961 - DNA, 74 bp, Homo sapiens
gtttactcctctctgagactgtctggggagctctccgagatgccgacaaaaggatcaaggtggcgaagcccgtg

SEQ ID NO: 329962 - DNA, 100 bp, Homo sapiens
agtacaggcagtcaaccctaaacagtggactcaacttcaaagacgttctcaaggagaaggcagacctgggaaacccttttccaaagagaaatgaagaaga

SEQ ID NO: 329963 - DNA, 88 bp, Homo sapiens
agaaaactcagcagtgagacctacagtcaagcaaaggacctggtgacgggctgagcgacagtgaggagcaggctgctgactcccttgc

SEQ ID NO: 329964 - DNA, 101 bp, Homo sapiens
gaggattggaggtgtcagtgttaaaggaacctctacaacgaaggtgaagccacggaagataaggctgcatcccatatctatcaaaatcaatttgttcaaat

SEQ ID NO: 329965 - DNA, 100 bp, Homo sapiens
ggaagacctgcgtcctttttcgtttttcggatgatgccttcaatactacctttatttccaccatagtgaaattaaatggtggcagacatgtccaaggaat

SEQ ID NO: 329966 - DNA, 100 bp, Homo sapiens
agatgcagacagcgacctggtgggggatgtctgtgatactaatgaagacaggccaccagcattttataccagtgcctcaccaccaggaccacaatttcag

SEQ ID NO: 329967 - DNA, 83 bp, Homo sapiens
ctgggatcccggccaccagcaattgtccgagctccacgcaggagatcggtgaggagctgatcaacggagtcatctactccatc

SEQ ID NO: 329968 - DNA, 82 bp, Homo sapiens
tgcaaagcgaggctgaagaaggccaaggctgcagaagccaaagccacgctggtactcctggttaatcaacagcttcgtcaac

SEQ ID NO: 329969 - DNA, 100 bp, Homo sapiens
agaaatgtcccagaaacctccatactgacagccaggaagtagtctcagaggctttggattccaggaaagaagctgatggcagaaacggtggacacaagcg

SEQ ID NO: 329970 - DNA, 101 bp, Homo sapiens
tgtaccaggcgaagctggccgagcaggctgagcgatacgacggttttaaaatcaaagatgggaaaatcggagaaaattgcccttccccatggccagcttgt

SEQ ID NO: 329971 - DNA, 76 bp, Homo sapiens
agaaacccaaacctgtaaaaccagtgacgttttccacaggcatcaaaatgtataaccccgttttcacacgaatggc

SEQ ID NO: 329972 - DNA, 83 bp, Homo sapiens
atcccagctttctaatctacagaaagaggttggatggcaagcatgtggtgtttggcaaagtgaaagaaggcatgaatattgtg

SEQ ID NO: 329973 - DNA, 100 bp, Homo sapiens
gtgctggaaacaaaatattcatgctggatattgagctcaaatctaatccaagtgaaaatgaagaaaaggaagcacagtctcaacttataaaatctgatga

SEQ ID NO: 329974 - DNA, 75 bp, Homo sapiens
cccagctcggcccgcgggggagccccgggagccgcacgaaaaatggctacaaacttcctagcacatgagaagatc

SEQ ID NO: 329975 - DNA, 96 bp, Homo sapiens
caagcgcaagtggcaagggatcgaggccgtttttgaagcttaccaggaacacatagaagtctgcgggccaggcatcgacatccgcaacgactatca

SEQ ID NO: 329976 - DNA, 75 bp, Homo sapiens
tctgccagtgagcctcaggctttaggaactgaagagataggaaccaaggctttagccttctcaactcattgactg

SEQ ID NO: 329977 - DNA, 75 bp, Homo sapiens
cagccggccgggatggctaccacggccgagctcttcgagagtgcctggtgaagaatgtgatgggatcactagcat

SEQ ID NO: 329978 - DNA, 82 bp, Homo sapiens
aaccatctcacacctttccaaaggacgcgaccataactctaaaagttgtgacttctcaccaggagatttggtttgggccaag

SEQ ID NO: 329979 - DNA, 100 bp, Homo sapiens
caacaacctcaagtttgcacgccacgtggagcccggcaatgccgccatccgggagaagctggcctgggccaaggtgtttgatgtacagaggaaagtcacc

SEQ ID NO: 329980 - DNA, 115 bp, Homo sapiens
cacattaaagaagccaaactgtcggcttcaaagagaaaaggcaacatcctgtcacaggccatgctctggcaaaaaccaaccatgtccaagggacctgcagttggtattgatcttg

SEQ ID NO: 329981 - DNA, 100 bp, Homo sapiens
ctggccccgagcggaactggagaaagctgaggaaagtttcctacactactgaggtttaggggcactgtgaagcaaaagccacgcctcagaatcccaggcg

SEQ ID NO: 329982 - DNA, 96 bp, Homo sapiens
ttgaaaccagcaggaaggaagatgtctctcagaaacaaagagatctgaaactggacaatgtcctgttggaccacgagggtcactgtaaactggcag

SEQ ID NO: 329983 - DNA, 73 bp, Homo sapiens
ggtgtggtggcggcggcggagactgcgggcccgtagctgggctctgcgagggttcagtttggcaaagacttgg

SEQ ID NO: 329984 - DNA, 90 bp, Homo sapiens
gcggcgaggaaggcgtctcccggagaggtacagaaagcagtcaacactgcccagggattgtttcagagatggacagagctcctccaggac

SEQ ID NO: 329985 - DNA, 100 bp, Homo sapiens
gagagggtttggaggcagcccctaagggcccttcgcgggagagcgtcgtgcacgcgggccagaggcggaaaatcaagaagatctgggcctgtgggaagag

SEQ ID NO: 329986 - DNA, 83 bp, Homo sapiens
agcagatgtggttggaatccttgctgtgctgaatcctggctgtgtgaccccaagtagtctgggttggaggaggcagagccatg

SEQ ID NO: 329987 - DNA, 100 bp, Homo sapiens
tggagatgaactcggacctcaaggctcagctcagggagctgaatattacggcagctaaggaattcgaagatttggatgagattgttgctcgctatgtcca

SEQ ID NO: 329988 - DNA, 89 bp, Homo sapiens
ggttggccctgtgatccctcaagactggtccacggagtgtatgaccacaaacagccatcaaggtgccaatgaactggctgtgcagaaag

SEQ ID NO: 329989 - DNA, 83 bp, Homo sapiens
ctggtgaaggcagacagcgagtggcgacgatttcaaaagaatgctgaaccgggagctgacacacctctcagagatgagccgat

SEQ ID NO: 329990 - DNA, 82 bp, Homo sapiens
ctgcagccgcttgtcagtgtgatgaagattggcacccaggttgacatcatggacatatgtgagtccatcctggagaggaagc

SEQ ID NO: 329991 - DNA, 89 bp, Homo sapiens
cgctcgggtacctgtaccccacgtagtcgccggttaccgatcggactaagttccaggttatgatgtgattgctcaagcccaatctggga

SEQ ID NO: 329992 - DNA, 101 bp, Homo sapiens
agctaaactcaatgctgctgtgtgggaagaagatttgtaaagaaaactcttagctgcacgctatgaagagggagagtcagaagcagaaagcatcacttcct

SEQ ID NO: 329993 - DNA, 95 bp, Homo sapiens
atggtgccacaggaggctgtgcgggccccgctccgcttcgaatggattctgcacttaagaaggctcaactagaaattgacaaattgaaggaaaat

SEQ ID NO: 329994 - DNA, 100 bp, Homo sapiens
caaacagaggaaaaaatctcagattcaaggccggaaaaaactcaaatctgaatttaatgagcctggattgacatctttaagtatgtgatctacggcatcg

SEQ ID NO: 329995 - DNA, 83 bp, Homo sapiens
cgggatattctcttctgtgctgtcaaggcttgatgaagaaatctctggaattgtggaagtggttggaagagtaaccgccaagg

SEQ ID NO: 329996 - DNA, 50 bp, Homo sapiens
actggacaccaggacaaaccagcaattgaaagcatgtagtgaagaacaag

SEQ ID NO: 329997 - DNA, 95 bp, Homo sapiens
aagggaaggcgcgagtgaggaaaggaggtactgtaggtaatcgtgctgtccacacgactcctgaagccacttaacattcctgagctgttatttgc

SEQ ID NO: 329998 - DNA, 75 bp, Homo sapiens
gtgaccgagagcgtgaccgagagcgcgaatatcgtcatcgttagaagggtttggtgcaattctccattaatgaag

SEQ ID NO: 329999 - DNA, 90 bp, Homo sapiens
ggaaacctttccaacacagatgtccaagctgccaactctttcgacgtgtagcagcagctttgccgggaatggaaagcacacaggacagaa

SEQ ID NO: 330000 - DNA, 75 bp, Homo sapiens
tcggcatctagtctttccgcttcttgaatttctctctgtaaaggaggtgacagagttagtccttgataattgcct

SEQ ID NO: 330001 - DNA, 100 bp, Homo sapiens
cgcccaccggtttttctgccacttttgcaagggcgaggtcagccccaaactaccgtctgagggaaaaggccataccaatgctggagatgcaatatatgag

SEQ ID NO: 330002 - DNA, 90 bp, Homo sapiens
ggaagatggcgggacggctgccggcctgtgtggtggactgtggcacgggccctacctcacaagcacccgaagcttgtctccaatgtctgg

SEQ ID NO: 330003 - DNA, 75 bp, Homo sapiens
tgtttgccacacagatcaccctgggaatcctcatctccactcagcgggcccagaagagcccacagaacgggagaa

SEQ ID NO: 330004 - DNA, 100 bp, Homo sapiens
gcggaacgcaggagacacaagaagcggatccagatggcgttcaggaagtggcttatattcactcaaaccagaatgtaattggatcgagcaaagctgaaaa

SEQ ID NO: 330005 - DNA, 76 bp, Homo sapiens
aggatcaaaatcttcgaaggaggaaaggcctaaagaatgtatttgacgaagcaatattggctgccctggagcctcc

SEQ ID NO: 330006 - DNA, 106 bp, Homo sapiens
gccttgctctggatgagccccagctctgcaacgggcacatggggatcatccaggccaccatcgagaagcacaaacagaacagcgaaaccttcaaggcttttggtgg

SEQ ID NO: 330007 - DNA, 100 bp, Homo sapiens
aatgtgcactatacacagctggcaaccagtcacatgcttgaactcagcatacaggatgtacagctcagtcccagttccagaatgaggaagctgcctcagg

SEQ ID NO: 330008 - DNA, 75 bp, Homo sapiens
ctagtctttccgcttcttgaatttctctctgtaaaggaggagttcaaagaaggacgcagagccagccacacagcc

SEQ ID NO: 330009 - DNA, 76 bp, Homo sapiens
gggacggctgccggcctgtgtggtggactgtggcacgggtgtttgctttcacaaccaaagttctgggccattcaga

SEQ ID NO: 330010 - DNA, 75 bp, Homo sapiens
atctggacaaaggaacaggtatctcagggggctgttgtggttccgactataaacagtacgtgtttggcggctggg

SEQ ID NO: 330011 - DNA, 97 bp, Homo sapiens
gtgctgtattgtgtggccactgggactttgcagacatgatggtgataaggagcctgaggcttttctggctttgcctgcccagttgctccgcgcgaag

SEQ ID NO: 330012 - DNA, 75 bp, Homo sapiens
tggcgggaagatggccggatttgaagtgtgtcaggaagctgtctgggaagccttcaggactttttgggatcgact

SEQ ID NO: 330013 - DNA, 100 bp, Homo sapiens
gggggaggaagccctttctcctcggcactgtattctttacctgcttcccaatcccactgatgaggatcagcccatgtggtgggggaaaagtagctccagc

SEQ ID NO: 330014 - DNA, 75 bp, Homo sapiens
gatttgttaaggattccaagtaactcttatttgggattctcctgatgaatttcctgtatatgttggtataaatga

SEQ ID NO: 330015 - DNA, 82 bp, Homo sapiens
gcttggttaacttgggagaaagtttcatctgtggatggagtattggagtggagtcggttcttatacaactatgggctgaaac

SEQ ID NO: 330016 - DNA, 49 bp, Homo sapiens
cggggtgaagaagcaaagactcggtacgtgaacacactcctgaaactca

SEQ ID NO: 330017 - DNA, 83 bp, Homo sapiens
tgaaggacgcgcaggagaagctggagctcacggagaagaaggcctccgacagctccacgcaggagatcggtgaggagctgatc

SEQ ID NO: 330018 - DNA, 89 bp, Homo sapiens
atggatatgtgatttctcagaaggaaaggcaactcaaagttatgttgacgaatgtcctatggacggatttaggacgaaaattcagaaag

SEQ ID NO: 330019 - DNA, 75 bp, Homo sapiens
cccgagcccgagcccgaacgcaagcctgggagcgcggagcccggctagggcttcaacggaccacaccaaaatgcc

SEQ ID NO: 330020 - DNA, 51 bp, Homo sapiens
cacggacatggagcacaacagggtgagaagccatacaaatgtgaattgtgt

SEQ ID NO: 330021 - DNA, 100 bp, Homo sapiens
tggtcactgtcaacaccgacctcaccaccatcgacctggtggccttcttgggctacaaatatgtcgggatgaccattctgccccccttggagaaactgcg

SEQ ID NO: 330022 - DNA, 100 bp, Homo sapiens
acctatgtgttcaccttgactgtcaaagatgagaggaacctgcaaagccagagctctgtgaatgtcattgtcaaagaagtgacttcttgggaagtgttcc

SEQ ID NO: 330023 - DNA, 90 bp, Homo sapiens
tggaaacctcccactgtggctgcataagtgtgtggaccagttgacaaagatccaaactgaattacaagagacagtgaaagatttagctaa

SEQ ID NO: 330024 - DNA, 90 bp, Homo sapiens
cttgttgtggatgaagctcacaggttgaaaaaccaaagctccctgctgcataagaccttgtcagaggttgcagatatcaagaaagtcaac

SEQ ID NO: 330025 - DNA, 99 bp, Homo sapiens
aacgatcacatcgacacctgggagtggaatgatgtgacgctctacggcatgctcaacacactcaagaacaggacccgtcgccatgggccgtgtgatccg

SEQ ID NO: 330026 - DNA, 80 bp, Homo sapiens
agataatgtggcaatagaaatggcaattgaaactagatggggctggcaactccttcgacctctcgtccctgtcaaggtac

SEQ ID NO: 330027 - DNA, 98 bp, Homo sapiens
tgtgagccgcctgggatgcttcagcctcttttcaagggttcacagctgtaaagaacttgcctggagtctcagatgagactttggactttggacttttg

SEQ ID NO: 330028 - DNA, 100 bp, Homo sapiens
gctggacccggaccggttttggacccagccgatgcccaatcctgtggcgtactacctgcaccactcaccctggtggttccatcgcttcgagacgctcagc

SEQ ID NO: 330029 - DNA, 74 bp, Homo sapiens
ggtgaaggaggcgaattttcagttgatagaggaagaaaagtatgcctttgtcaactggataaacaaagccctgg

SEQ ID NO: 330030 - DNA, 100 bp, Homo sapiens
aacataattgaaggcagtaaaagtgaaattaaataggaagatcatcagtcaaggaagacccactggagatggagttcacagggcccccacagaagccccc

SEQ ID NO: 330031 - DNA, 75 bp, Homo sapiens
caactgctaacaaccagctggaggctccctgtgctgtcaggaatctacaggacttggctcgtatttacattcgac

SEQ ID NO: 330032 - DNA, 90 bp, Homo sapiens
aacaacctgcgggtgcactacaaagagctgaaggccacaggcaccgcccacttcttcaacttcctgctcaacacaaccgactaccgaatc

SEQ ID NO: 330033 - DNA, 100 bp, Homo sapiens
cctgactctctgaggctcattttgcagttgttgaaattgtccccgcagttttcaatcatgtatgaagtgaaggctcctgttccttctgcctgtttcagga

SEQ ID NO: 330034 - DNA, 90 bp, Homo sapiens
cggcgccgagccgcggtccgaatatgatgcttcctggtgtgtttagtggttggtgccattccaattttctgtgctgaaatcattctgaaa

SEQ ID NO: 330035 - DNA, 75 bp, Homo sapiens
ctcagcctcctgagtagctcggattacagagcagcaagagggatcttataaaaatatgaccagatcacatccttc

SEQ ID NO: 330036 - DNA, 100 bp, Homo sapiens
agcctggggatgaaacaacccctcagggagacagcgctgatgagggcaacgggcatgaggaggtagttgcatgcgcctgggatggacagacatatatcat

SEQ ID NO: 330037 - DNA, 83 bp, Homo sapiens
gcgtgccctacttcaaggataagggcgacagcaacagctctgccggctggaaggcccgatgagagaaagggaaagttaaggat

SEQ ID NO: 330038 - DNA, 100 bp, Homo sapiens
ttctgcttcaagttcccggctcccaggtttattctcccatagcatgtgaccagaatccgtagaagctagccctgtggtagttgagaaatccaacagttat

SEQ ID NO: 330039 - DNA, 90 bp, Homo sapiens
caggacctctttctagctctcagaaaagtctgagaagaaaggagccctgcgttcccctaaggccttgttgctggtggcggccttggcggg

SEQ ID NO: 330040 - DNA, 101 bp, Homo sapiens
ggcagagggacccggctaccctggacagcgcatcgccgcccgcccgggtcgccgcgccacagccgctgcggatcatggaaattgacaatggcccttcagct

SEQ ID NO: 330041 - DNA, 98 bp, Homo sapiens
ggtgaacttggccatgaccatctggattctcaaagtcatgaacttcacaattaatgtcgtactctcaggaggctccaccatgttcagggatttcggac

SEQ ID NO: 330042 - DNA, 85 bp, Homo sapiens
gaagacgagggcctggaggaaacaggtgtgtcaaggatgccacaatgccatcgacccagaagtgcagcgggtgacctataacaat

SEQ ID NO: 330043 - DNA, 51 bp, Homo sapiens
atgggagcgcatttccccaggttacatgaacatgcagcctacttggtggac

SEQ ID NO: 330044 - DNA, 98 bp, Homo sapiens
gtgtctgggaattagcctggaggaactccgaacccaaatcctgagtccaaacactcaagatgaataactgaagtgaagtgatggactccgatttggag

SEQ ID NO: 330045 - DNA, 74 bp, Homo sapiens
ccaccttctatgggttaaggcaacagtatgtccgtggttcagaccctgtattaaagcttttggacgacaatggg

SEQ ID NO: 330046 - DNA, 100 bp, Homo sapiens
gtccagctgctgcggacagtgaaccggacagtcatcaccatgggccgggatcacattctgattgttgtacgcctgaggagtgatgtacccagagttccag

SEQ ID NO: 330047 - DNA, 76 bp, Homo sapiens
gcatcatgatgtcaacaaccgtggctcacaagatgaaagagcacggacaagaatccttcaagaaacaggaaaaaac

SEQ ID NO: 330048 - DNA, 95 bp, Homo sapiens
cacggacgcaacacttttggaacttagacgctagtgagcacggaaaggaataagcctatctgccgacaccccaggccatcgagccccaggccatc

SEQ ID NO: 330049 - DNA, 100 bp, Homo sapiens
agagaattctgggcttccacacaactccagtgctaactcaacagcactattcctgatcagagaactccagttgcttcaacacacagtatcagtagtgcag

SEQ ID NO: 330050 - DNA, 100 bp, Homo sapiens
ctgcgttcgctcaccgctgtcacctgcacggtgtggctggcggcctacggactcttcaccctctgcgagggggaaccgtgaaggactgagccgcacctca

SEQ ID NO: 330051 - DNA, 75 bp, Homo sapiens
gctggaaccatgacaggcatgttgtataaatgtacagagggaagtggaatcccgattgcttgatgattgatggac

SEQ ID NO: 330052 - DNA, 75 bp, Homo sapiens
cccctttcatccctatgtggaaaacgagagatcgatgtcttattgtgatgagtctcgactgtcatatcttcttcg

SEQ ID NO: 330053 - DNA, 100 bp, Homo sapiens
ccttaaagaaggaacttttggaacttctgggctttaaaaagacttgcttgaaagcctgtgctgaattacatcatgctgatgacagcttcctggtcctcac

SEQ ID NO: 330054 - DNA, 75 bp, Homo sapiens
gtgaaaaataccacgacaaaaccaccctagttggtgatgacaaaactgtgaagcagtggaaaatggatgggccag

SEQ ID NO: 330055 - DNA, 76 bp, Homo sapiens
gtcgcccccgcagcaccgctactcggagggcgagcggacctccctggagaaggcctgcactgcccaaagtcttgga

SEQ ID NO: 330056 - DNA, 75 bp, Homo sapiens
gccctggggtgttccccgtcactgtgtgatgctactaggaggtggagcctttgggaggtgattagttcatgaaag

SEQ ID NO: 330057 - DNA, 101 bp, Homo sapiens
atgacctgatcaagcgggcacggctggccaaggaagacaactgttagttttgtggcttactgctgctccacccagtgtctgcagacttttgacctgctgag

SEQ ID NO: 330058 - DNA, 98 bp, Homo sapiens
aagaatcccggccagacgtgcgaacagctccagctgggtgggccatgcacagacacagctcatgtctcattaatcacaccaacaaaaagatcctgtgg

SEQ ID NO: 330059 - DNA, 101 bp, Homo sapiens
cggaggaaagcgggaagactcatcggagcgtgtggatttgagccgccgcattttttaaccctagatctcgttactctatagcaagaaaggacattaaggaa

SEQ ID NO: 330060 - DNA, 75 bp, Homo sapiens
gaagcagactcactaacttatgatatccccgtcgaggtcaagatcaagatccaggtctatttcacgaccaagaag

SEQ ID NO: 330061 - DNA, 75 bp, Homo sapiens
aatccgaaatttcttgggtgaaaaatatatccgcagggttcggatgagaccagctattcctgcaccaactgacct

SEQ ID NO: 330062 - DNA, 120 bp, Homo sapiens
cacaggtgcatttcacagcactctgggcgaaaattggatgtgaaaatgaagccagaccgagactctccagaaagagcaacagtaatggagtacatgagcactggaagtgacaataaagaa

SEQ ID NO: 330063 - DNA, 105 bp, Homo sapiens
cgcggctcctagcggatgggtgctattgtgaggcggttgtagaaggtgaagatttggttccagaaccggcggatgaaatggaaacgcagcaaaaaggccaaagag

SEQ ID NO: 330064 - DNA, 83 bp, Homo sapiens
tgaggctccagtcaaaaaccattaagttcaaatctgaacatcaatgatgtactagggaactactcattgactcttgttgatgc

SEQ ID NO: 330065 - DNA, 100 bp, Homo sapiens
ggctgctgctctccggcctcgtcctcggcgccgccctgcgtggagccgccgccggccacccggccaacaacatctgcttctacggcgagtgttcctacta

SEQ ID NO: 330066 - DNA, 100 bp, Homo sapiens
ctaaagccccacatttgcagctcattgaaggaaagatagaagcagatttgggatatcctggaggtaaagcaagaattattcataaggaatctgatatcat

SEQ ID NO: 330067 - DNA, 100 bp, Homo sapiens
cggaactaaacggggtgaggtcacattcggttatctctaacgttggaaaacgagctgcggtgcaaccctgggcagtttgcgtgtcgcagcggcaccatcc

SEQ ID NO: 330068 - DNA, 107 bp, Homo sapiens
aagaactccgtgcccagatgctcataaggattgtcctctttctacaaaaggtataccaagcttggctacgcaggcaacactgagccccagttcattattccttcatg

SEQ ID NO: 330069 - DNA, 75 bp, Homo sapiens
ggtcagagggctgtgaagacgcacggtgccaggaccaagtatctgggattgtggtccatcaggagtctgtgtgtg

SEQ ID NO: 330070 - DNA, 78 bp, Homo sapiens
agtcctttagaaaattactttcactgtgtcttcagaaagatccttccaaaaggaacatcatttacagcgagcaatttc

SEQ ID NO: 330071 - DNA, 100 bp, Homo sapiens
cattgccgactatgtgggcagattttctgcagtcgttgctgtaatcaagaaatccctggaaaatttatgggctatacagcttgtcaaaattcccaaaaat

SEQ ID NO: 330072 - DNA, 74 bp, Homo sapiens
gttccaccagcaaccatgagtggttccatgatgggaagtgacatgggggcagctggcattttatgctatgtggg

SEQ ID NO: 330073 - DNA, 76 bp, Homo sapiens
tgtcagcagggcctatggtggttccatgtgtgctaaatgtgttcgtgacaggtggaaaacgaagctcattcccaac

SEQ ID NO: 330074 - DNA, 83 bp, Homo sapiens
ggccatggcggggcccgagcgctggggccccctgctcctgtgcctgctgcaggccgctccagaactcccccactggaaaggat

SEQ ID NO: 330075 - DNA, 75 bp, Homo sapiens
aagtcctctcgggagaagcagcgcctgttcccggggcagatccaggttcagatgatgtgctgactaaagacgcgg

SEQ ID NO: 330076 - DNA, 50 bp, Homo sapiens
gtaattggagccaagaaatgagtatagatctcaggaaacaggctcgacag

SEQ ID NO: 330077 - DNA, 90 bp, Homo sapiens
gagagtttgaggagctaagatcatgtagagaggatgctcgtcagaagttccgctctgttctggttgaagcaacggtgaaactggatgaac

SEQ ID NO: 330078 - DNA, 75 bp, Homo sapiens
ccaccttcctggagctgcagctcctcaatgggcagctgcaatgactctccgcacggtattattgtcattgcaagc

SEQ ID NO: 330079 - DNA, 96 bp, Homo sapiens
gaatggaaatgagaaagaagttaaggagtatgcccaagttttccgtgaacatgccaacaaattgattgaggtgaacatgggtgatcggtttgggca

SEQ ID NO: 330080 - DNA, 144 bp, Homo sapiens
ggctgagccgccggcctgggcggggggcgcgcggccgggccccggtgtctgggaccccaactgggacaggcagcaattccatttccgtgagggcgtttctagatgaagatgacatgagcttggaagaaataaaaaatcggcaaa

SEQ ID NO: 330081 - DNA, 75 bp, Homo sapiens
gaagtcacaaaacagcagatttcccaagagcagcggaaaatgatccagtcacagagcatgtaacttctaatgcca

SEQ ID NO: 330082 - DNA, 75 bp, Homo sapiens
ctggctcagctgacaacagctgtcgtctctgggactgtgaaacagatccctacaatgttatatcatggaacccag

SEQ ID NO: 330083 - DNA, 90 bp, Homo sapiens
gatctccgccaccgtcttcaggccagatgctgcagttggagaagaaacttgaacgtgaacttgaggatgatgcacgagttattgcttgcc

SEQ ID NO: 330084 - DNA, 50 bp, Homo sapiens
tgaactttggatgctttattgtacaaagctggtgaattctatagccaaga

SEQ ID NO: 330085 - DNA, 101 bp, Homo sapiens
gaaaaggattatgggaactatacttgtgtggccacgaacaagcttgggaacaccaatgccagcatcacattgtatgaactgataaatttcaaacggaagag

SEQ ID NO: 330086 - DNA, 50 bp, Homo sapiens
tggaaatggaaattaaatgggttccaggtgctggagaatctggtaaaagc

SEQ ID NO: 330087 - DNA, 82 bp, Homo sapiens
cccaggtgtaagcgcagaaagcaggcgaacccgcggcgcaataacggaacggagctttgactgtaagatctgtgggaagagc

SEQ ID NO: 330088 - DNA, 98 bp, Homo sapiens
tccaccggcggctccgcaagaagtaccgagaagcaaggagcaaggaccaaccccagtggagaaaaagaagaaaggaaaaaggaaaagtgaaactacag

SEQ ID NO: 330089 - DNA, 100 bp, Homo sapiens
gctccaccccttccacgtcatccgcatcaacaagatgttgtcctgtgctggggctgacagggctctggaggccacgggcatgatgcttcgggtcctggtg

SEQ ID NO: 330090 - DNA, 75 bp, Homo sapiens
ccaatcgtgaaaactatattcacaggaagatgttaccgagtacttcagtgaattccttagtgcaggggaacggag

SEQ ID NO: 330091 - DNA, 100 bp, Homo sapiens
gctcgattggttctactgtgggtctggactgatctccatgtcctgttgtggggcttttacagcctttggggcccatgcagaatctccaccatgtgtagac

SEQ ID NO: 330092 - DNA, 96 bp, Homo sapiens
caacaatgaagaggtaattcacttgaacaactttcactgccatcggggacaagcaaattgtggctactaatttgccccctgaagatcaagatggct

SEQ ID NO: 330093 - DNA, 97 bp, Homo sapiens
cttatggatggagaccaaacatccagatctggagtgccggcacagatgtggaagatgtcaagtttgtgatcaactatgactatccaaacagctcaga

SEQ ID NO: 330094 - DNA, 82 bp, Homo sapiens
ggcggcgctgagccagcggggccgtttgtctttgtcagcgccacgtgagacacctacaacgagatgccttaagccagctcat

SEQ ID NO: 330095 - DNA, 100 bp, Homo sapiens
ctccaggccaagagggatccttcacccgtgtctggtggagttctacttcctttcccagtacgtgtcgccagccgactccccgttccgccacatcttcatg

SEQ ID NO: 330096 - DNA, 59 bp, Homo sapiens
ccctccaggtattaagggagatatcccaaagccctggtacctgacagtgtaaagaagga

SEQ ID NO: 330097 - DNA, 99 bp, Homo sapiens
gcctcctcctcctgtggtggaggagaaggaaaggcgtcgaccagaagattatgatattcataacagcagaaagaaaccaaggattgactatccccctga

SEQ ID NO: 330098 - DNA, 90 bp, Homo sapiens
ttagtaatcatataccactaagtcggccgtatactaacaaggtaattactttatggtaccgtccacctgaactgctactgggagaagaac

SEQ ID NO: 330099 - DNA, 82 bp, Homo sapiens
gcgccccggcccggccccgcgaggaggccactgtctgcagctcccgtgaagatgtccactccagacccacccctgggcggaa

SEQ ID NO: 330100 - DNA, 98 bp, Homo sapiens
actccttcggcagtccacccaccgccgccgcctcccaggtgagcatgggtttatgcgtcttaggcattattgtgatggcgagcaccaattctctgatg

SEQ ID NO: 330101 - DNA, 75 bp, Homo sapiens
ctcgtcatggcctacccgggatacggaggagggatggggcaccctggcatgcattatgccccaatgggaatgcac

SEQ ID NO: 330102 - DNA, 143 bp, Homo sapiens
tacctacctaagcgatgaaatccaaaggtgaatcttttggttggtgattttgatgatagccacaaagcaagcaggcagcctcccgcgacgatgcccctcaacgttagcttcaccaacaggaactatgacctcgactacgactc

SEQ ID NO: 330103 - DNA, 75 bp, Homo sapiens
gcacttggagtccggacatctgaaacttgtgtcaacctaagaaaaagtctacgccactgaagtatgaagttggag

SEQ ID NO: 330104 - DNA, 74 bp, Homo sapiens
cgcgcgccagcaagaagatcctgctgcccgagcccagctgctctgttaaaagcgaaaatgaaacaattgcctgc

SEQ ID NO: 330105 - DNA, 90 bp, Homo sapiens
cctgtggcattgcttaatgatataccacagtcaacagaacaggtgtgatgttagctgttgatgctgtaattgctgaacttaaaaagcagt

SEQ ID NO: 330106 - DNA, 100 bp, Homo sapiens
gaatctccttagtgaggctcagagatgcctgtaccgtgatgtgacgctggagaacctggcacttatgtcctccctgggctttccttaaagtttcccatgt

SEQ ID NO: 330107 - DNA, 100 bp, Homo sapiens
ctggctcagtcaagattggagacctcggtctggcaaccctgaagcgggcttcttttgccaagagtgtgataggaagccaccattcttcagagggcaatga

SEQ ID NO: 330108 - DNA, 74 bp, Homo sapiens
tcctcgtcagcactgactttcagctatggaatcggtattagaaaactactcggatgctccaatgacaccaaaac

SEQ ID NO: 330109 - DNA, 98 bp, Homo sapiens
tgcatgcacttacggatttactggaccccagtgtgaaagaggaaacctgtccagtttaagtcgtcttggtctgagatataacagactgtcagcaatac

SEQ ID NO: 330110 - DNA, 100 bp, Homo sapiens
tgtcatggtgaaaaatatcgagcgaacgctttacttccttccccgtgaaatgatccacttcctcatgatactgtcttctaactgggcttacttaaaggat

SEQ ID NO: 330111 - DNA, 128 bp, Homo sapiens
gttggtgtggctggttcaggggctggcattggaaccgtgtttggcagcttgatcattggctatgccagtcatgtaacacagactacatcctggatccatcccgtgatgagtgtcctgaatctatctcg

SEQ ID NO: 330112 - DNA, 74 bp, Homo sapiens
acgatcctctagagcactgtgtgtctccccggacgcgagcccgctcccctgaggaccttaaaccggaaaacatt

SEQ ID NO: 330113 - DNA, 100 bp, Homo sapiens
ccgaagttttcacaagtctcagaccttgcgattctacgattgcagcgcagtggaagtcaagagcaaggtggacgacatccttggagaaggcagcgacgac

SEQ ID NO: 330114 - DNA, 90 bp, Homo sapiens
ctcgatgccgccaagagcgaagcccagaaacagagcgatgagcttgccctgatggggtaaggtgaagagacgttccttgggagcccagag

SEQ ID NO: 330115 - DNA, 82 bp, Homo sapiens
gaatggatcctgatgatatttggcagctgtcctccagtcttaaaagatttaggcctattaaaggaaggcaggaagaactaaa

SEQ ID NO: 330116 - DNA, 88 bp, Homo sapiens
gggcctctggcatccatataacaggattgacagccggatcattgaggtcgaatgagtgatttgagtgtaattggtcatccaatagatt

SEQ ID NO: 330117 - DNA, 101 bp, Homo sapiens
atgcacgcctgtgtcctcattgctccaaactgtgttgtttcagctgtattagggatggacgtggtagaggtcgcgggtagttggtgggcacaagagcgaga

SEQ ID NO: 330118 - DNA, 100 bp, Homo sapiens
cttgtaaaattggacaatggctctttagagagttatctgagtttcatagccctgatgaagcaagttactctgctctcctaataaatgcaagaaaatgacc

SEQ ID NO: 330119 - DNA, 100 bp, Homo sapiens
cgtgccctacttcaaggataagggtgacagcaacagctcggcgggctggaaggaaggatgataaagactatgctttaaaacaaatagaaggaactgggat

SEQ ID NO: 330120 - DNA, 98 bp, Homo sapiens
acaaagcagcgcccgtctgcttcgggcctctggaatttagcgctcgcccagctagccgcaggttatgaagacagtatggagtttccagaccatagtag

SEQ ID NO: 330121 - DNA, 100 bp, Homo sapiens
tctgcgcagaatgcttctcagcagcaacatccccaaacagcggcgtttcacggtggcacatacatgattcctcagttccttttagatgattgctttaaaa

SEQ ID NO: 330122 - DNA, 98 bp, Homo sapiens
ttctcccggaagtcaccattggagctcatcagactgaccgtgtcttacatcagttcagagagagtaaccagagagcacagagaaatgctggtgaaact

SEQ ID NO: 330123 - DNA, 97 bp, Homo sapiens
gagaatacaccatcaacattcacaagcgcatccatggagtgaacaggaaatatagtggtcattatgattagctatccaaaaggaagagaaattttgg

SEQ ID NO: 330124 - DNA, 50 bp, Homo sapiens
ctttatgaagatattcttgaggaccaggatgaaagagcagctgagctcag

SEQ ID NO: 330125 - DNA, 100 bp, Homo sapiens
tcggctatctgcactcccacaggcacctctaccccgagggcattggtgcccgtcagcagcagatccatcatgttacacaaaatggaggactatataaaag

SEQ ID NO: 330126 - DNA, 75 bp, Homo sapiens
gcgaggagcgcgcggagccggccatgggcaagtcagagtgatgatgcgggtgtgctggttggtgagacaggacag

SEQ ID NO: 330127 - DNA, 80 bp, Homo sapiens
atttgaagtctgtgtcaaacatccatatcataagtggaattttggagatattcaaagaattagtaagctgtgtgggctgg

SEQ ID NO: 330128 - DNA, 75 bp, Homo sapiens
ccacccaaggctaaaggcagagccagtctcacaccattttgctggtacagcctaccaagaggccagaaggcagaa

SEQ ID NO: 330129 - DNA, 97 bp, Homo sapiens
gcagtgggagtcgtggagcacagaggacaagaacaccttcttcgaggggctgtacgagcgcacgtaccgggtgccgaaggaggtccgcgtggagcct

SEQ ID NO: 330130 - DNA, 75 bp, Homo sapiens
gaaactgttgaattagacccgtttcctatagatgagaaaccatacaagctgtgttcatagccctgatgaagcaag

SEQ ID NO: 330131 - DNA, 50 bp, Homo sapiens
gcaacttcggggagctccgcctaggtactccaaagattcaggtttactca

SEQ ID NO: 330132 - DNA, 88 bp, Homo sapiens
cacaccctcgtattctcctgcccttccccagcagcccctgtcaaagggaacaggaagcagtccacggagggtgacgccctagacccac

SEQ ID NO: 330133 - DNA, 98 bp, Homo sapiens
cacacccatcagcgcggctacctgctgacacggaaccctcacctcaacaaggtggatccaaagcagttgctggaagatggaataaggaaagagcttgt

SEQ ID NO: 330134 - DNA, 83 bp, Homo sapiens
agggtgttcaggacagaagcgatttctgtggtccaaggcccatctttggaaaaaagatctgggaatgattgtctagcctccag

SEQ ID NO: 330135 - DNA, 98 bp, Homo sapiens
tggacagcagattttggtttaatatctgattgggacaacattcagacccatttccagtcatgattaccttatcccatatcacacaactggtcctcagc

SEQ ID NO: 330136 - DNA, 109 bp, Homo sapiens
ctggacagagaacatccaaggttccattaaatacatcatgcttaaccctagttcacgaatcaagtgtgcagtcaaagccctctttgactacaaggcccagagggaggac

SEQ ID NO: 330137 - DNA, 83 bp, Homo sapiens
cctggaagaactcgtcatgctctttgtagcgtggtgcttctgttgctcacagctgctgctggtggtgacaatgtcaaataacg

SEQ ID NO: 330138 - DNA, 100 bp, Homo sapiens
tccgtctgttggggggcgaacacgccgcggtcctcgtcgtggaacagatggagtcggataactgttcaggaggagatgatgactggacccatctgtcttc

SEQ ID NO: 330139 - DNA, 100 bp, Homo sapiens
ctgctgctctgcctgctccacaagcggcgccgcgccctcggcctgcacggactattgcccagaagaaaagatgtttggttttcacaagccaaagatgtac

SEQ ID NO: 330140 - DNA, 100 bp, Homo sapiens
caagcttgaatgtgtcaaaaccaaacaccctcagctccacattgagagcaaaatctacaagatgatgcagggaggaggtgtcatggagaaactccagctg

SEQ ID NO: 330141 - DNA, 75 bp, Homo sapiens
acaaatttaagacttcaaaacatgaaaagtgatacttttcaagaggttgaatgatcctaaaatgtctgaaacgga

SEQ ID NO: 330142 - DNA, 80 bp, Homo sapiens
gaagaagcagaagaaacagttaatcgtgatatcccaccccttacagcccaagaagatgaaaggattgttcttgttgacaa

SEQ ID NO: 330143 - DNA, 75 bp, Homo sapiens
tgaagagctatggtgaaacaccactgaagcattgccaagtctacgcctgcaagctctcagaccgggaacatccac

SEQ ID NO: 330144 - DNA, 101 bp, Homo sapiens
gcacaatcggggcaccgagctcgatatggctattttggcaaagagaagcttaaggaaataaaacttttggtttgcaatattgatggatgtctcaccaatgg

SEQ ID NO: 330145 - DNA, 87 bp, Homo sapiens
gcgggcgccggcgaggagagcccgcggctgcagggggggccctcagcctcttggccttgaacgggctgttcatcttgattcacaaac

SEQ ID NO: 330146 - DNA, 100 bp, Homo sapiens
ttgtttaatgactttggtgccctcaacatctctcagagacgaaagttaaagccttccatctgaagtatgatgaagttcgtctggatccaaatgttcagaa

SEQ ID NO: 330147 - DNA, 73 bp, Homo sapiens
ctgtacttctatatctacaagggggtccgcaaggtatctgtgcctaggtttgctgtggggattgtaataggaa

SEQ ID NO: 330148 - DNA, 83 bp, Homo sapiens
ctctgggatcccggccaccagcaattgtccgggtggcccagttgaaatccttcccttcctctaccttggaagtgcctaccatg

SEQ ID NO: 330149 - DNA, 95 bp, Homo sapiens
catgagtctgacttccagttccagcgtacgagatttatacctaaaactggaagatgtgacccataaatttaataagccctgtataatggatgtaa

SEQ ID NO: 330150 - DNA, 51 bp, Homo sapiens
gttacgctaggaatatggcaaacttttttgctccactcaagcctgttagaa

SEQ ID NO: 330151 - DNA, 97 bp, Homo sapiens
aagatagcaggataggagacttctaagattggagctgcagaagacttgccagcccaccagcacaatgtcagatgggcctctcagctcccacaatctc

SEQ ID NO: 330152 - DNA, 100 bp, Homo sapiens
tcacaatctgtcttttgatgaaatcaacaaagcctttgaactgatgcattctggaaagagacttaattcagtgcacaaatgagatgaatgtgaacatccc

SEQ ID NO: 330153 - DNA, 82 bp, Homo sapiens
ttcatacgactgaccctggagctgaaggccaggttttgcagtggtctgaggccgagtgtactacttcaaccacatcactaac

SEQ ID NO: 330154 - DNA, 75 bp, Homo sapiens
tttacgcgcacgttggaaccgaagagagctctgttgttgcagccaacaccaagttcaactcccgctggaccacag

SEQ ID NO: 330155 - DNA, 100 bp, Homo sapiens
gtcaacatagtttgtcattcaaagacccgcagcaaccctgagaacaacgtgggccttatcacactggctaactcttttgtgacagggacggcttgttgcg

SEQ ID NO: 330156 - DNA, 101 bp, Homo sapiens
cgccgccacactttcctgggagcggcggccacggaggcaccatgaagaagtcttactcaggaattggcagcaatgaaacagattctcgttaagatgcatag

SEQ ID NO: 330157 - DNA, 100 bp, Homo sapiens
ccaggtgaacaattaggtcctccacaatgaagacaggtaatgtggaggaaagagagcttgtcatgctcaatgtcaattgctgcaagcttagtgagtgaag

SEQ ID NO: 330158 - DNA, 75 bp, Homo sapiens
ccgacatcgtgtgccgctgccaggtacccattcctggcccagtgggtaacaagagaatggttcatttttccccgg

SEQ ID NO: 330159 - DNA, 89 bp, Homo sapiens
ctgggaggccggccggtgccagcacctttcggcttctgagacggcggcagcagcggcattcagggctttgttcgcgggggtcacagctc

SEQ ID NO: 330160 - DNA, 126 bp, Homo sapiens
cgcaaagcggggacccagaccctggagcctcagttggaagcagccgatccagcctgcggagcctgtggggcaggtcttgaggaccggcccagctcaggctcctggggcagcggcgaccagagcagc

SEQ ID NO: 330161 - DNA, 100 bp, Homo sapiens
ctgatagcggacagtggacttaaaatacttgcttgtgatgacttggatgaagctgctagaatgaaagaatcttcaagagggagacatagggaaaaggaag

SEQ ID NO: 330162 - DNA, 100 bp, Homo sapiens
gagcagccatggatgccgtttgtgccaaagtggacgctgccaacagggtcaatgagctgaaggagaaaggcaacaaggccctgagcgtgggtaacatcga

SEQ ID NO: 330163 - DNA, 50 bp, Homo sapiens
cgcctgttcaactttgtcctctctcaggagatgttacagcccagatagct

SEQ ID NO: 330164 - DNA, 74 bp, Homo sapiens
agtgcaagagcagaggccttctctagaccttgccaagatggcacagaccatttaatttggcagagcggaaagct

SEQ ID NO: 330165 - DNA, 100 bp, Homo sapiens
gcaagagaaaagcctacctattctttccaaggtactgtctgatgagcgtgaaaggttgtttcaccgacttccacatcgactttggaggcacttccgtttg

SEQ ID NO: 330166 - DNA, 100 bp, Homo sapiens
gagatgaggcagaaacacgcacaggcggtggaggagctcacagagcagcttgagcagttcaagaggaattatatccagatcgagagacagaagattctga

SEQ ID NO: 330167 - DNA, 82 bp, Homo sapiens
tccaaattcgcctccatctgtaccatgaacctaaatcacagccacagcagcttcatcagggacaatacagatcatcaaatac

SEQ ID NO: 330168 - DNA, 50 bp, Homo sapiens
gttaaggattccaagtaactcttatttggaaatctatgctcctaaactcc

SEQ ID NO: 330169 - DNA, 51 bp, Homo sapiens
gaggcgtcttcctttgcatgtcagctgtgagccgtgagctttgaggcggtg

SEQ ID NO: 330170 - DNA, 99 bp, Homo sapiens
aacaggaaacgcaccggcattcgagaacagcttgatgcggagctccttcgctattctgagagaatgtttcatcattactaacaggatattcctcatgac

SEQ ID NO: 330171 - DNA, 98 bp, Homo sapiens
cggcagatgctgatggagaaggagggagtgctcaccagggaggaccggcctgggggccacatctgcaggatggactttctggtcctcttcttgttcta

SEQ ID NO: 330172 - DNA, 82 bp, Homo sapiens
tgcactccgcacctcggggacattattgcgcgtggaacggctgcttttggaaggacatggatttgattgacatactttggag

SEQ ID NO: 330173 - DNA, 100 bp, Homo sapiens
attgacagggacagcacccttcggagacttcaccacattcaaattgcatccactgccataaaggttccagagagattcctggaagttgctcagatcacat

SEQ ID NO: 330174 - DNA, 75 bp, Homo sapiens
cgcaccaggtcttgtagcagcgcctcctcggatatttcatgtctgaatcgggacccagctcgagtagtagttgtg

SEQ ID NO: 330175 - DNA, 75 bp, Homo sapiens
acaccatgggggaggccagtgtggggtgtcctgatgtcagaagaagaagtgtttgaacttgttcctgatgatgag

SEQ ID NO: 330176 - DNA, 75 bp, Homo sapiens
ctcggaaccttgtttactaattatgacaagattctgcagatcattacggaattgataaaaacagagaataactga

SEQ ID NO: 330177 - DNA, 82 bp, Homo sapiens
tccccacctgcccggtgcccgaggaggcagccaagctcgtggcctgcctctgcgtgcatctctgttgaggagctggcgcgga

SEQ ID NO: 330178 - DNA, 75 bp, Homo sapiens
gtgcagctctgggaaacagaagaggatgacatgacagaaggtgctggagaatctggtaaaagcaccattgtgaag

SEQ ID NO: 330179 - DNA, 82 bp, Homo sapiens
caaggacaagcccgtttctttccacaagtgaaatgacaatggatgctctgttggctcgattgaaacttctgaatccagatga

SEQ ID NO: 330180 - DNA, 121 bp, Homo sapiens
aatggcctttcttatactctagaatatacaaagacaaaaggagattctgatgaagaagttattcaagatggaatccagatcttacataagatggaagtctctcacactagatactgaacat

SEQ ID NO: 330181 - DNA, 73 bp, Homo sapiens
gcgatcctgccggagccccgccgccgccggcttgtaattcgccaaaatgacgaacacaaagggaaagaggaga

SEQ ID NO: 330182 - DNA, 82 bp, Homo sapiens
tggaacagagcgagagtatcacctcctgccccccgaggtctgcagtctcctgaacccagcagccatctacgccaacaacgag

SEQ ID NO: 330183 - DNA, 111 bp, Homo sapiens
ccgggatcgtgaccgagaccgtgaccgagagcgtgaccgagagcgcgaatatcgtcatcgttagaaggaagcagtcaattatagatttcttcaaaccagcttcaaaacaag

SEQ ID NO: 330184 - DNA, 82 bp, Homo sapiens
gggcagagccaacagcctcttcacgggtggagccagccatcctgagacgtccgtacagcccgtactggtggagtgtcaggag

SEQ ID NO: 330185 - DNA, 75 bp, Homo sapiens
gccagcggctcggcggtgagatcgtcagcgctgactccatgcaggtggttctaactttgatggtttgagaccaaa

SEQ ID NO: 330186 - DNA, 100 bp, Homo sapiens
aagaatggcctgtatgagattgaaaatggaagaccgagatgatgaggagtctgatgaggaagctgtgaagaaaaccaacaaatgtgtactagtctgggag

SEQ ID NO: 330187 - DNA, 90 bp, Homo sapiens
gagccatgagcgtggacaaagctgagctatgcgggtctctgctcacctggtgtaaactggagttgctggtgggcagccctgcttcctgca

SEQ ID NO: 330188 - DNA, 76 bp, Homo sapiens
tctctcaggctttcctacaactcatgcccagcagcagcaagcagaggaaaagcacctccacgttttgatcaacaat

SEQ ID NO: 330189 - DNA, 82 bp, Homo sapiens
ggcttgagagctgggttctattttccctcctcaaactgactttgcagccacggagagcttaaagcttttcaagccaggccaa

SEQ ID NO: 330190 - DNA, 83 bp, Homo sapiens
gtactgctccccaagaagactgagagtcaccacaaggccaaggggtactactacgacctcgatgactcttacgacgagagcga

SEQ ID NO: 330191 - DNA, 100 bp, Homo sapiens
accatgcagaaggccttcctggaggaaagaccacagcaagattctttcattcgtctcctcctagcctgggggaccaggctcgaactgaccctggacatca

SEQ ID NO: 330192 - DNA, 89 bp, Homo sapiens
caaggataatcactaaattctgccgaaaggactgaggaacggtgcctggaaaagagaaagcttcttgctatctacctccaccatgatga

SEQ ID NO: 330193 - DNA, 87 bp, Homo sapiens
acaagatgaccacactccaggaatgccagtgcatcttttgcacagctgtactgtgagaatagagatgtttcgaaatatgcagaatgc

SEQ ID NO: 330194 - DNA, 74 bp, Homo sapiens
tcaccgcgcccgtggccgccgtgcaggcggccgtcagcaacctcgtccggtgtcagagatggctttggattccc

SEQ ID NO: 330195 - DNA, 147 bp, Homo sapiens
ctggactggatgtgacgagcccagaaccactgcctacaaaccaccctctcctgaccctgaagaactgtggtacaggtttgcagattccgccagcagcacagcaagctctacagatgagtggctctttggcatttggtgctgtggcag

SEQ ID NO: 330196 - DNA, 90 bp, Homo sapiens
cacatactatccgtttgttcaggaaccaccagtgacagagttctcaacccattttacattttccagctgttcagtgttatactgtggagc

SEQ ID NO: 330197 - DNA, 96 bp, Homo sapiens
cgatgaccaccatacaacacacagaaatggtggagtcaatgaagaaagtagcagggatggatgtggagctgacagttgaagaaagaaacctcctat

SEQ ID NO: 330198 - DNA, 97 bp, Homo sapiens
tgcacagcgccttgttccagcagggcctgatccagaatgtgaaaacctttgcatcttctgatagtctagccaaggtccaagaagtagcaagctggct

SEQ ID NO: 330199 - DNA, 100 bp, Homo sapiens
tctgcacttcgtattcaaagtgggaaaccgcttccagacggcgcgtttctatcgggacgtcctggggatgaaggtctgggaggggctgaacgtggtgaag

SEQ ID NO: 330200 - DNA, 97 bp, Homo sapiens
aattgaaggctccaaatccttagctcagagctggaggatgaaggatcggggggaagtttgttgccctggagaacatcagctgcaagattaagtcagg

SEQ ID NO: 330201 - DNA, 75 bp, Homo sapiens
tcatgatgatgcgagcagagaacttctttatccttcgaaggaagcctgtggagagcatgtaacttctaatgccag

SEQ ID NO: 330202 - DNA, 98 bp, Homo sapiens
gggagtgctcagggtacgctaatggtctgaatttcctgctgctgttcacaaagatgctttttatctttaactttttgttttccccacttccgaccccg

SEQ ID NO: 330203 - DNA, 75 bp, Homo sapiens
gacaaagcaaataaagacaaagccaaccgatacttttctccaaattttaagaactctgtcatcacacctgtgaga

SEQ ID NO: 330204 - DNA, 107 bp, Homo sapiens
ctggggctgggcatcaacggcaaagttttgcagatcttcaacaagaggacccaggagaaattcgccctcaaaatgcctgtgaggagccaccaacatttgaagctatg

SEQ ID NO: 330205 - DNA, 100 bp, Homo sapiens
tttgagtagatccatagtgaaacggtgggcaaattttgcaaaatatggcacagaagttgggcctcattgggcctccaccacctccactgtcatcagatga

SEQ ID NO: 330206 - DNA, 100 bp, Homo sapiens
gtcaaccataatgacggtgaagagtcaaaaaccagtgctcaagtatttgaggtcccaggtgtgacaccttcagcaggtctcagggaagatggcagcccta

SEQ ID NO: 330207 - DNA, 100 bp, Homo sapiens
gcgagatctgccgccagtacccgctgttctgcttcctgctgctctgtctcagcgccgcctccctgcttcttaacaggattccagtggaatgacactggtg

SEQ ID NO: 330208 - DNA, 75 bp, Homo sapiens
acagtgacctcatgggcaagaccatgacggaggatgatgacatcactaccggatatcagttttagagaatgtggc

SEQ ID NO: 330209 - DNA, 90 bp, Homo sapiens
gcgaagccttgaaaaagctgccctgagacggtgtcccgccgaaagacactttttcaaaaatggcaatggtatcagaattcctcaagcagg

SEQ ID NO: 330210 - DNA, 82 bp, Homo sapiens
caatatctgtcttcggtggactccttcggcagtccacccaccgccgccgcctcccaggtctggccgtgggcctgggcttcgg

SEQ ID NO: 330211 - DNA, 100 bp, Homo sapiens
gaggcgggagaggcgagctcgcgatgagtggtctcggcaggctcttcgggaaggcctcttagcaatgcataccacgagttagcacaagtgtattcaacca

SEQ ID NO: 330212 - DNA, 83 bp, Homo sapiens
gtccacgacaccggctacttctcagctttaccatccctggaggagacctggcagcaggtggacccccaaaagtacaagggcat

SEQ ID NO: 330213 - DNA, 74 bp, Homo sapiens
gccacttactttaatgagaagatctccattcctgaggaggagtgaccatctttccaccgtagaaaaggacacaa

SEQ ID NO: 330214 - DNA, 100 bp, Homo sapiens
atgactacgaggcagccgacagcagtgagctggccctgctggctgatgagcttttgaaatgacattaacagaaggaagtaagttggagaagaaactcttt

SEQ ID NO: 330215 - DNA, 82 bp, Homo sapiens
ccagcagctaaagttttagttgaattggcagagggggtcgatttgggaggaaaggtgtggctataaactttgttactgaaga

SEQ ID NO: 330216 - DNA, 100 bp, Homo sapiens
ggatgctggagcacacggaggccgtgatgaagggtgtgggccgaagatatgctcatgtggtgttgaggaaagcagacattgacctcaccaagagggcggg

SEQ ID NO: 330217 - DNA, 82 bp, Homo sapiens
tggcctggagtccgcggctggccgcgtgagtaggtgagacatggaatccattaaaattgcattatcagttaagaaatgtacg

SEQ ID NO: 330218 - DNA, 96 bp, Homo sapiens
ctctccttctacctgctggggttgcttgtcagtagcgggcaagtgaataaccctataccttccaatttgaaatcagaagcaaaaaaggctgccaaa

SEQ ID NO: 330219 - DNA, 100 bp, Homo sapiens
acaccaaggggcagccgtccgaaggcgagagcaggactcgggcagccgcaagtagctcctccagcgccagcagccagcccagcagcaagcagcaggcccc

SEQ ID NO: 330220 - DNA, 95 bp, Homo sapiens
gtcattgagcctttttccagagtacagtctcggaagggtgctgacctggaccgggagaagaaggctgccgagtgcaaggtggacagcatcgggag

SEQ ID NO: 330221 - DNA, 98 bp, Homo sapiens
cttttactaacctcgtgagaaaagctttacgtctcattcaagaaaccgaagtgatttccagaggatttacactggctacttctacaagtccgaacagc

SEQ ID NO: 330222 - DNA, 50 bp, Homo sapiens
tacggagcacgagaaatacggcgtggacatccacgacagcgatggcagtt

SEQ ID NO: 330223 - DNA, 75 bp, Homo sapiens
cttggggagagttgctaggaaaatgatggggcattctcttctcccaccctcgggactttaccccagtgtgcacca

SEQ ID NO: 330224 - DNA, 83 bp, Homo sapiens
cggaactagatctttctgacaacaaactcgaagactggcatgaggctgggagtcctccgtcagcatcagctccggctccggtg

SEQ ID NO: 330225 - DNA, 100 bp, Homo sapiens
ctcagaagccatgcccctcaggctggaacttgccctgtctcctcgcagatgagtttccagccagagacgacactcttccatggcccggatacattccatg

SEQ ID NO: 330226 - DNA, 75 bp, Homo sapiens
ggccacgcttctcatcctggacatctgggctgcgctggcctcggcacaccagtgccacccgctgccccggacgct

SEQ ID NO: 330227 - DNA, 80 bp, Homo sapiens
gtttctgcacaggaatatcgagagcgtcatgaacccgagctatagagaaaggagatgagatgccatggacaatattacca

SEQ ID NO: 330228 - DNA, 50 bp, Homo sapiens
cgccatgctccaaacaacttggcctcaggcccagaagtctggctcaggag

SEQ ID NO: 330229 - DNA, 75 bp, Homo sapiens
tgccagggtccctgaagagggaagacacgcggaaacagctgctacaggagctgagagaccctaccctcactttcc

SEQ ID NO: 330230 - DNA, 90 bp, Homo sapiens
gaactccgagaggaggtggaccagaacttttggaactagtgccggcggctctccaccccccaggtcaccctgctgattgccttcatctgt

SEQ ID NO: 330231 - DNA, 100 bp, Homo sapiens
gagcatatcctgtccttcgagaccatcgacaagatgcgccgcgccagctcctactcctccctcaactccctcatcgggtgacgagaacaagtcagtgcgc

SEQ ID NO: 330232 - DNA, 83 bp, Homo sapiens
gctatggccgtgccctggggctgagccctcagcaaattgtggctactaatttgccccctgaagatcaagatggctctggggat

SEQ ID NO: 330233 - DNA, 100 bp, Homo sapiens
aggttctgggagacgcacagctaagatgccaggacatcctggaagctgggaaaagttcatggcctcccacgggaacgacgccgcgagagccaggtttgag

SEQ ID NO: 330234 - DNA, 96 bp, Homo sapiens
cctgatgacctctccattgtgtgtttcacaagcggcacgacaggccctgatccttcaccagctaggccgctacagtctggcggagaagatcctccg

SEQ ID NO: 330235 - DNA, 76 bp, Homo sapiens
cagcaaatactactgaaagtgcaatatttgagtatcactgcgagctcctatgacttctagaagtacatctacttgg

SEQ ID NO: 330236 - DNA, 100 bp, Homo sapiens
caagaatccaaagaaaacaaaatggtggtatcatgctccttccaactcctcagaacctccactctatggatctggacctctggattcggctttctccctg

SEQ ID NO: 330237 - DNA, 75 bp, Homo sapiens
gcggtgacagagtggagccatggctagagccatggccatgcagaaaatctttgcccgggaaatcttggactccag

SEQ ID NO: 330238 - DNA, 104 bp, Homo sapiens
cagactgaggaagacccggaaacttaggggccacgtgagccacggccacggccgcataggtacgctacgggccatgacatcacagagcactctgtgctgatcca

SEQ ID NO: 330239 - DNA, 100 bp, Homo sapiens
gtcaagtggcaactccgtcagctcgttagaaagcactaagtcaggagattggaaaagcaaatgcttttacacaacagacacagagtgtgacctcaccgac

SEQ ID NO: 330240 - DNA, 100 bp, Homo sapiens
ggagccgcacgcggcgatatggaagaggagggcaagaagggcaagaagatggcctactgccagcatattggggtggagttcatgttcatcaatgacctgg

SEQ ID NO: 330241 - DNA, 50 bp, Homo sapiens
aggggattttgtcagcttgtcgtcaagtaagactttgaccccgacgcagg

SEQ ID NO: 330242 - DNA, 82 bp, Homo sapiens
tccacccaccgccgccgcctcccagattctacttcaaagaaatcctgccacccgatgattaaacagtgaataaaatgtcatg

SEQ ID NO: 330243 - DNA, 74 bp, Homo sapiens
tggacgctgactcggaagtgcagcaggttcaggagaagtggcacctggtggaggacctgtcgcgactgctgccg

SEQ ID NO: 330244 - DNA, 86 bp, Homo sapiens
ctactcgcttgcctacccgccggcccgcgggtctacttcctcaaaggaaagctccaaccatggccatggggctcttccgcgtgtgt

SEQ ID NO: 330245 - DNA, 90 bp, Homo sapiens
gtggtttttcggatcatgtctggtggctccgcggattataacagtgtggaaccatcagagaatctacaatccctgatggagaagaatcag

SEQ ID NO: 330246 - DNA, 50 bp, Homo sapiens
caccaatcccttcgatcaggatgttgcagcccataacggtacgtgaaggc

SEQ ID NO: 330247 - DNA, 75 bp, Homo sapiens
gacctccggggccgcactgccctccaccgcgggaaagctgacttcatgagaccgaggatctcgttcgttgatcga

SEQ ID NO: 330248 - DNA, 76 bp, Homo sapiens
ctttttctaactatttcaagatgatatttattcaccaaacaagatggctttggaagattcagaacagaagcacaat

SEQ ID NO: 330249 - DNA, 75 bp, Homo sapiens
cctgcgtcgacttcaagacgtggatgcggacgcagcagaagggtttcgtggctgtcccaacaaaaaatcccgatg

SEQ ID NO: 330250 - DNA, 101 bp, Homo sapiens
tccctgcccccttcccccacccccgactcgggcttggcgcggcggccagaggaaccccgagctgcttttctaacccaaactgtatgtcttgatgacactac

SEQ ID NO: 330251 - DNA, 98 bp, Homo sapiens
gtaccggctctggaaaatccgcaagaccatcatgcagctgggagtgtccactcgccttccaccagcatggcaacgtcttcacagtaccgccagctgct

SEQ ID NO: 330252 - DNA, 80 bp, Homo sapiens
ctactttgtatttggtgatttcaacttccggctggattccaagtccgtcgtggaggctgatcagctgaccgaagaacaga

SEQ ID NO: 330253 - DNA, 101 bp, Homo sapiens
gacacctcatcatggacacgctactttagctaaggcatgaccagcaatgaacagtagtaaggtattgctattgattgacattcaagtctcttacatcaaca

SEQ ID NO: 330254 - DNA, 75 bp, Homo sapiens
caaaattgccagaaaatctttcctctaaagtcaaactgcgaagtttcttgggctatgccagttttaaagtgggag

SEQ ID NO: 330255 - DNA, 50 bp, Homo sapiens
aagcgcagaaatgttggatttgaagtggtataagttgaaatccaaaccag

SEQ ID NO: 330256 - DNA, 90 bp, Homo sapiens
cttcagcttttggatccattacaggcccagcccactgggagacgtttgtgaatgacatgcgcatcccggaccagaagtacgtcacgctga

SEQ ID NO: 330257 - DNA, 90 bp, Homo sapiens
ctgacactgctgcctccagctagttatttcgtcctcttccgttcttcacccctacaccttggagtgcggaagtgctgactgcacagtttg

SEQ ID NO: 330258 - DNA, 90 bp, Homo sapiens
ctcaggagcttttggatacggttttagtaaatctggtacctgctcataagcttagcagtgtctgcaaaaacgaatcttttcctacaacct

SEQ ID NO: 330259 - DNA, 50 bp, Homo sapiens
aaagaagttgcaaaacactggaaatgactgctgtccatgcaggcaacata

SEQ ID NO: 330260 - DNA, 90 bp, Homo sapiens
ccctcgtcgaaaggattggattggcatctttagaagatcctgaaggagctagacgagtgctacgagcgcttcagtcgcgagacagacggg

SEQ ID NO: 330261 - DNA, 82 bp, Homo sapiens
agggaaccctggtcaccgtctcctcagagcagccatggaggaggtggtgattgccggcatgtccgggaagctgccagagtcg

SEQ ID NO: 330262 - DNA, 90 bp, Homo sapiens
gtttttctaagccctttttgtgccaggtgtcccgttaacgtctctgttagttcagagtgttttagagcactttgctgcaagggaccacca

SEQ ID NO: 330263 - DNA, 82 bp, Homo sapiens
cgcacctctgtttgggggtcctcagggcttccgagtggacctgccaatcaagtcggcccgctaccgtggccagtacaacacc

SEQ ID NO: 330264 - DNA, 83 bp, Homo sapiens
tcggttccgggtcttggccccgtccttacctcacagggaagaaggagaaagggccaacccctgaagaagcaatacagaaactg

SEQ ID NO: 330265 - DNA, 76 bp, Homo sapiens
gcggatggcccccggtgcaagaggcgcaaacaagccaatcccaggaggaaaaacgcgggctgacgcacgaggcaca

SEQ ID NO: 330266 - DNA, 82 bp, Homo sapiens
tgatgaaggagcagtagacagcgacccaagcacaccacttcagctagggaaagaaccaaaaacttttgctagaaaatcagct

SEQ ID NO: 330267 - DNA, 50 bp, Homo sapiens
tcagaagacagagggttttcttttgagggaaaatggagctgatagtatcc

SEQ ID NO: 330268 - DNA, 83 bp, Homo sapiens
tgaaagctggctcacgaacaggcaaaccacagaatgttggctaccagggtatttagcctagttggcaagcgagcaatttccac

SEQ ID NO: 330269 - DNA, 95 bp, Homo sapiens
ccgttgccggtgccggcctagcgtcctggaattacttcaatcaagattttgggctcgtgaagtaggtaaaatgattggactagaacatcctctca

SEQ ID NO: 330270 - DNA, 74 bp, Homo sapiens
ttccagataccatttggctttcggctgtgcagatttgtcccatcagatgaaaagaagaaacaaggttgtcaacg

SEQ ID NO: 330271 - DNA, 100 bp, Homo sapiens
ggaccgcgccgttgaggccgctgagcgggccgccaccatcgccaagcagaaggctgagatcgcggcttccagttctggtcctccccgctttgcagtttgt

SEQ ID NO: 330272 - DNA, 101 bp, Homo sapiens
cgcaggtcgcagggcggcctgcagctgggccgcggccgaggaggcagcgcgacctccgcacggagatacaactcgtcaacgaatcaaattcagtgatgaca

SEQ ID NO: 330273 - DNA, 99 bp, Homo sapiens
gtctgagatcttgctccacttgtccttgagggttattaagggatcgtgggactttaccagatcggtttgtaataacacctcgaagacgctatccgatcc

SEQ ID NO: 330274 - DNA, 80 bp, Homo sapiens
ggtaactgtgattcccaggagaataaaagaagcctaaagaaactgttccaactcttgctccaaaaactctttcagtagca

SEQ ID NO: 330275 - DNA, 98 bp, Homo sapiens
cagtatgaagtggtgaaggagtgtgtgcagcggtatcgaaggatgatcgcagtgatgtggagagcagctcagaggaagaagatgtgaccacctgcaca

SEQ ID NO: 330276 - DNA, 49 bp, Homo sapiens
gggggaagccgcccccggcagcagtcaagagaatccatcccattaaatg

SEQ ID NO: 330277 - DNA, 100 bp, Homo sapiens
tctgatgtgggatgctacagaaggcactgctaaagaattacctccaaagccattgtcaagaccacagcagtcatctgcaccagtccagctgaactctggc

SEQ ID NO: 330278 - DNA, 75 bp, Homo sapiens
cctgggttgcttctggcggccatggtgttgctgctgtactccttctccgggagttcccattagacttgaagttgg

SEQ ID NO: 330279 - DNA, 83 bp, Homo sapiens
ctttccactcggctcctgtcgtccgttctctcaggctcccgttcaggctgaaggtgatgtggccgccctcaaccgacgcatcc

SEQ ID NO: 330280 - DNA, 90 bp, Homo sapiens
tttcgtctaaaaataacaagaatgggaggagaagggtatggcatgaattgccttattcagtttgaagattttgccaatgtgaatgcattt

SEQ ID NO: 330281 - DNA, 74 bp, Homo sapiens
tgtcataagatggttcttgcaacatgtagctcttatttcaggctgatcaggctgccaaggtagagaagatgcgc

SEQ ID NO: 330282 - DNA, 82 bp, Homo sapiens
ctgacctctctgatgagatggatcgcccgagcgggaagaagttccgcagcaagccgcagctggcgcgctacctgggcggctc

SEQ ID NO: 330283 - DNA, 74 bp, Homo sapiens
gagatttcttctataaaccaaaccagcttatgtccctgatgccaaaaatgcacctactctttcctctaactctg

SEQ ID NO: 330284 - DNA, 80 bp, Homo sapiens
tatcagatgcggctgctgtcggaggcttttgtcatcaaaggtgacgcggcgcacggcgcggatggtggccgagtggcagt

SEQ ID NO: 330285 - DNA, 75 bp, Homo sapiens
ccaagacctgcggccggacgcttgcggaccgctgtgtcagcgtgttatgatgccgtcccgtaccaacctggctac

SEQ ID NO: 330286 - DNA, 100 bp, Homo sapiens
acaagagcctcatccacaccgtgttgctgcaaaaggactatcagttctgggaaatgccagtgcaaagtgggtgtcattggctctatatgtgaccgatgcc

SEQ ID NO: 330287 - DNA, 75 bp, Homo sapiens
tctgaagcggctcccagtccctgaaagcattaccgggttcgctaggctcacaggctggagtgcgatggcatgatc

SEQ ID NO: 330288 - DNA, 100 bp, Homo sapiens
tgaagttcagtgatgatgaagaggaggaagaagttgtgaaggacggcaggccaaagtggggaaccccctcggaaggggaagggttgggtgctgacgggca

SEQ ID NO: 330289 - DNA, 50 bp, Homo sapiens
gtgaatttgacattattgtcctaagtgccatcagagggttctcgcttcag

SEQ ID NO: 330290 - DNA, 90 bp, Homo sapiens
gtaaggccaaaaatgtgcatactcacagagttagagagagggatggtggcccaaggatgtgaccttctcttggattttcctgattattat

SEQ ID NO: 330291 - DNA, 73 bp, Homo sapiens
tttgacctggggcccttcattgtagccgcctaaggacgacaagaagaagaaggacgctggaaagtcggccaag

SEQ ID NO: 330292 - DNA, 80 bp, Homo sapiens
aggaggagaacttatgtagcctcattatcccgctccgtgagcaatcagaaaacttgtaggaaagagaaagaatatagaag

SEQ ID NO: 330293 - DNA, 101 bp, Homo sapiens
gattcctgcaggcgttggttcccctctttgacctgtttcaccagtgatcattaaagaatgggcagcttacaaaggaaagtctcctcaaaccccggaactgg

SEQ ID NO: 330294 - DNA, 82 bp, Homo sapiens
acagctctctagaaactcgctctaaagacggaaccgccacagcactcaacttcctgcctgacacagctcacttcaagaagtg

SEQ ID NO: 330295 - DNA, 50 bp, Homo sapiens
tcccaagctgcggttcggctgctgccgagcggagcgtgctttggacacca

SEQ ID NO: 330296 - DNA, 100 bp, Homo sapiens
gttaaaacctgacacttttaacagacctggagtggaagatcatttatgttggctcggctgagagtgaggaatttgatcagatcctagactcggtgctggt

SEQ ID NO: 330297 - DNA, 100 bp, Homo sapiens
cactacagaattagcccaagcagattcctcccagggtgtaccagtgatggcaataagaaacaaaatgatatcagaaggactagacccagatcttcttgag

SEQ ID NO: 330298 - DNA, 90 bp, Homo sapiens
gcttattcctctattgctgcaaaaaatgcagaactagaacaggagcttatggcaattaagttggaatatgcaaggttggttaagttggcc

SEQ ID NO: 330299 - DNA, 98 bp, Homo sapiens
tgttctctttgaagaatgcagtcagcctgctctgatgaagattaagcacgtgagcaactttgtccggaagtgtttaagtttttgaaactgaagtaggc

SEQ ID NO: 330300 - DNA, 100 bp, Homo sapiens
caacaacaacccgaggaggagcggcagcaagcgggtgctgctcatctgcctcgacctcttctgcctcttcatggcctactcgacacccagcacctccccc

SEQ ID NO: 330301 - DNA, 115 bp, Homo sapiens
cggcgtctaggggagcgaaggctgaggtggcagcggcaggagagtccggccgcgacaggacgacaatgcagatcttcgtgaagactctgactggtaagaccatcaccctcgaggt

SEQ ID NO: 330302 - DNA, 102 bp, Homo sapiens
gaatcaatgtgctgagctgctggagaaattggaaaagctatttctcaacggtggtggaggtggatacagcagtcggagaacatctggcagagacaaatacgg

SEQ ID NO: 330303 - DNA, 100 bp, Homo sapiens
ccccaggcacaccaggcttccccggaaatgcaggcgtgccagggaccccaggagaacgaggctacccacctttctgttctgagacccctcaagagacata

SEQ ID NO: 330304 - DNA, 80 bp, Homo sapiens
cgcagccatgtccgaggagaagcccaagacaatgcagatcttcgtgaagactctgactggtaagaccatcaccctcgagg

SEQ ID NO: 330305 - DNA, 83 bp, Homo sapiens
tatccgagagtttgcagcaaagatcattgaagggactggtgattgcagctggaagtgcccatgaccgagctggcgtcctccgg

SEQ ID NO: 330306 - DNA, 100 bp, Homo sapiens
gccaggccatctgaaggacagctgtaacaccgccctggtgctctgcccattcaaagactccggctgcaagcacaggtttctggcccccaaagacaaacca

SEQ ID NO: 330307 - DNA, 82 bp, Homo sapiens
ggggttcgggtgtctcgtgtgtgaacatcacaggtacacggtcctcttctcgcacggcaatgccgtggacctgggccagatg

SEQ ID NO: 330308 - DNA, 119 bp, Homo sapiens
agaaccatggagggatgtccccaacaaccctgagcgatttgacacatggccctgcatcctggaagatgcagatgcctccagctattacgagtcccatggcaacaaggatcagaggcaga

SEQ ID NO: 330309 - DNA, 83 bp, Homo sapiens
ctgaaggaatgcatccaggagcccagttctgtttcacagacaaggattgctgagtggttggtgatggtggaagtatttccaag

SEQ ID NO: 330310 - DNA, 100 bp, Homo sapiens
atcaccacgcagaacgtcaacaccaagtgcatcaccatccccagcttggattccttagcaccaccacagctcagccagaacagaaggcctcgaatctcat

SEQ ID NO: 330311 - DNA, 100 bp, Homo sapiens
gcagaagaagaaggtgtactcctttctattttaaagagccaagcctcagagatttagattttgaagaatgtgctcacaaattgctgaaaatggagtttcc

SEQ ID NO: 330312 - DNA, 90 bp, Homo sapiens
cgccgcgcagcctgcgttttctccggtacaggttgaggctactaaggtcctggatgcctcatcccttagtttcaacaccagattgaaatg

SEQ ID NO: 330313 - DNA, 50 bp, Homo sapiens
aatctgatattcttaagccaacaggtgttacacataatattgcattactt

SEQ ID NO: 330314 - DNA, 75 bp, Homo sapiens
cccgcgaaatgatgggatagcgttgcaaatccttaaaagagtcttaacgttgggagctgaaagtgccgacagcat

SEQ ID NO: 330315 - DNA, 75 bp, Homo sapiens
gcttgactgagtattgccagggcccttgccatgaaaatcaggaactgcaagcacatgttgaccagataactgaaa

SEQ ID NO: 330316 - DNA, 80 bp, Homo sapiens
aatgtacccccagtacacttactactatcctcattatctccaaaccaagatctttgaccatcagtctgtgacctgcccct

SEQ ID NO: 330317 - DNA, 73 bp, Homo sapiens
ggagcccggttaggaagaatggagttggcgactcgctaccagataccatgtttgtgtggaagtgccccgtgtt

SEQ ID NO: 330318 - DNA, 76 bp, Homo sapiens
gtttgaacctcattcaggggaagagtacactcgagatgaaggtttgtgttgctagttaagctagcttgtattgttg

SEQ ID NO: 330319 - DNA, 75 bp, Homo sapiens
ttagagtacatgagcattacttggatttaagcgagtggtattgcaggaagtccattctggctctggtggatggac

SEQ ID NO: 330320 - DNA, 90 bp, Homo sapiens
cttgggttaccgaattcaaggtgtcattgcccagcgtccagccctgctgggagttttctgccacacagatttgcggaagaacctgaccgt

SEQ ID NO: 330321 - DNA, 51 bp, Homo sapiens
gaccctgctgtcactgactttccagcctgccctcctatacctggtccccgc

SEQ ID NO: 330322 - DNA, 94 bp, Homo sapiens
gaccagaagcctgcatttctgcattctgcttaattccctttccttaggtaagaatgattgatgttggctgatattggagtgctcattcacatga

SEQ ID NO: 330323 - DNA, 94 bp, Homo sapiens
ggccatctttgctcctccctgcaactaactccattcttaattggaaaaccaattctgtgtcctcggaggaccacagcccagttgggccccaggc

SEQ ID NO: 330324 - DNA, 100 bp, Homo sapiens
ggcattccccacccatggtcagaagtgtggctgccatccaccccagcctggagatccccatatgtccgtggttcagaccctgtattaaagcttttggacg

SEQ ID NO: 330325 - DNA, 87 bp, Homo sapiens
agtaaactcttagataaaatgacgacgtccttctggaagaggcgaaactgtttagattttgaagaatgtgctcacaaattgctgaaa

SEQ ID NO: 330326 - DNA, 50 bp, Homo sapiens
ttacagcgagctgcttactatcaggtaagccccctcccggtttacatctg

SEQ ID NO: 330327 - DNA, 100 bp, Homo sapiens
ctgcaagcgcccaaagccaatgggaatcacctggttcaagctcggtcaaggagtgtgatgactggcgagcagatggctgccttccatccatcgtccaccc

SEQ ID NO: 330328 - DNA, 76 bp, Homo sapiens
gaaccccgatcagaatgccaaatgtgtttgcatgctggttacagatgaatccattccctcttattctggaagtgat

SEQ ID NO: 330329 - DNA, 100 bp, Homo sapiens
ggaaccactctttgtgccgcagcttcgcagtgaatttggttccaaaatcatcttgcttaagccaattatcaaagtgttgccaaaactctttgagtctcga

SEQ ID NO: 330330 - DNA, 101 bp, Homo sapiens
agaaggggaacaccaccactctcattagtgagaatggtcatgctgccgacaccctgacggccacgaacttccgagtggggagatgcagttaaagacttgat

SEQ ID NO: 330331 - DNA, 90 bp, Homo sapiens
ctccaggagttcgtctcttacgtctgcggaagtgcagctgcctcagttcttagcgcagacgctatgtccagcaaaggctccgtggttctg

SEQ ID NO: 330332 - DNA, 75 bp, Homo sapiens
gcaagtttaatcagacctgctcacacttcagaatagagaagtacaaggcgagtggataattccaacacaagactg

SEQ ID NO: 330333 - DNA, 98 bp, Homo sapiens
tcttggctggaggccaggtggacaacctgtcatcactgacttctgaaaactgctgggcatgctgtgtgcttgcatcgtgttgtgcagaaggagtagag

SEQ ID NO: 330334 - DNA, 100 bp, Homo sapiens
aggaggtctggaggcttagccagccccgcggagagtgccgcctgatgaccccgtcatcctggggggccctgtgatcagcctgcgtgcgggggaccctctc

SEQ ID NO: 330335 - DNA, 82 bp, Homo sapiens
gaaaattgtttcgtagcagagaacagctctttgcatccggagagtggacaagaaaacaatgcagatcttcgtgaagactctg

SEQ ID NO: 330336 - DNA, 100 bp, Homo sapiens
caccatggagcccatcgtgctgcagtacgtgcctcatgatcgcttcaacaagataccccagaatcttccatgctccgtcacactgcagccaggcccagag

SEQ ID NO: 330337 - DNA, 74 bp, Homo sapiens
tcaatatcaaaaatgactttactgaagaggaggaagcccagttgtatcacggactgattcaccgagcccaaccg

SEQ ID NO: 330338 - DNA, 100 bp, Homo sapiens
tggtgggcccagtcctcggtgcggcgcggccaggggtagaaatatttctgtcatggctcattcaaagactaggaccaatgatggaaaaattacatatccg

SEQ ID NO: 330339 - DNA, 74 bp, Homo sapiens
cctagcgtcctggaattacttcaatcaagccataaaattttgagtagaaaaatccagaaatttgaaaatcagta

SEQ ID NO: 330340 - DNA, 100 bp, Homo sapiens
gagaagaagttgaggcgctattattaaaggtggaagaaggtccatatctttttctgtgggtgcttcaagtgttgttggaagtggaggcagcagtgacaag

SEQ ID NO: 330341 - DNA, 82 bp, Homo sapiens
ggacactcctgaagtcgggaaatgacctcctgccccccgaggtctgcagtctcctgaacccagcagccatctacgccaacaa

SEQ ID NO: 330342 - DNA, 83 bp, Homo sapiens
acgccatctgctgccacaccagcaccagcaagcggcattggctgcggctccccaaaaaggccacaaagacagccccacctgcc

SEQ ID NO: 330343 - DNA, 74 bp, Homo sapiens
gacattcaggatcaacttgaacgaatatttctgggtctgaaaagccctcaagaaagcctcagtgatcttggtgc

SEQ ID NO: 330344 - DNA, 100 bp, Homo sapiens
gcagaacattgcttatgaatatctgtgccacttagaggaagccaaaaggtccacctaatcatcctgtgaaagtggtttctctatggaaagctttgtttgc

SEQ ID NO: 330345 - DNA, 75 bp, Homo sapiens
gccaatacgatatcatccaatgcaaagaagcccatctgcacaggggaactgaggagaaacaggaatgaagagtgg

SEQ ID NO: 330346 - DNA, 97 bp, Homo sapiens
ccggcccaaggccatctacctggacatcgatggacgcattcagaaggcaattaagttggaatatgcaaggttggttaagttggcccaagaagacacc

SEQ ID NO: 330347 - DNA, 101 bp, Homo sapiens
caagtttcacatccttgtctgtgaagctaaactcaatgctgctgtgtgggaagaagatttgtaaagaaaactcttaggacctcagcagccatgtcgaagcc

SEQ ID NO: 330348 - DNA, 100 bp, Homo sapiens
ggacacgtcccagctctctctgggcatctggaaaggctttaaaaaattggattgaaggaaatcctaaactcagttttctaaaacctggcatattgactgg

SEQ ID NO: 330349 - DNA, 96 bp, Homo sapiens
cgagaccgtgaccgagagcgtgaccgagagcgcgaatatcgtcatcgttagaaggtaaatattgggaagatggattcacccattgaaaagtggaac

SEQ ID NO: 330350 - DNA, 83 bp, Homo sapiens
tgacactactacaaaccaggactataaacataaacatgtgtcactgtaacagggcaggtccaggtgcaggtacagcagtctcc

SEQ ID NO: 330351 - DNA, 100 bp, Homo sapiens
tgtgcctcttcaccatgttcggaatgctgctgttcgctggtgggaagcagcctagggcctaggcccgggccaccatggcgctgcctccaggcccagccgc

SEQ ID NO: 330352 - DNA, 82 bp, Homo sapiens
ggatggcaagaatcagctggggcagaagcgcgtggtcaaggaggagcagcccccacaacatcgatccaagagggggggctca

SEQ ID NO: 330353 - DNA, 82 bp, Homo sapiens
gctgcgaaggcggcggctcctgccctctcgctttccctctcgcgtctctggctgcaggtagcagtagctgatgtgcagtttg

SEQ ID NO: 330354 - DNA, 80 bp, Homo sapiens
ggggtgtcagtgtggaggagactgaggaaaagcaggtgatattctcagtggagaccaggacaaggaacagaaagaccctt

SEQ ID NO: 330355 - DNA, 100 bp, Homo sapiens
ggagccgtctgcaaagtgtccccggcaagaagactgctgtggatgtttttcgaaggataattttggaggcagaaaaaatggacggggcagcttcacaagg

SEQ ID NO: 330356 - DNA, 75 bp, Homo sapiens
tcagacctgggcacagcaaatgctgaggactcagaccagtctctgcaagatgattacagtggcgagatcttgaac

SEQ ID NO: 330357 - DNA, 121 bp, Homo sapiens
gaaccacagaattctggacaatcaaaacttaactcctggatacagcttcttccagaccagctggtcttgcttctggagcatctcttggagcagaagactctgagcccccgaactctgcaaa

SEQ ID NO: 330358 - DNA, 100 bp, Homo sapiens
tgctttcattctcctcctgagcactgtcgtatcctatatcatgcagagaaaagagatggaaacttacttgaagaagatacatactgccatgaaagaaagc

SEQ ID NO: 330359 - DNA, 51 bp, Homo sapiens
catgctttcaaggacctcatggtttctattgcctgggctggagtgtagtgg

SEQ ID NO: 330360 - DNA, 90 bp, Homo sapiens
gaacaggccctatggggcatacctatggctttattgacctcgactcccatgcgttccgccatggagtcatagttgcagctgactccaggg

SEQ ID NO: 330361 - DNA, 98 bp, Homo sapiens
agtgatgctacagtttgaatcacaaagaatttcacattatgaggatctagtgaaaagccatttgatgtatgcggtcagagaagaagtggaggtcctca

SEQ ID NO: 330362 - DNA, 100 bp, Homo sapiens
gctctgcggctcgggccctgaggtgggtcctacgtgtatgaactcagcgcagtcctcatacacagaggagtgagtgcttattctggccactacatcgccc

SEQ ID NO: 330363 - DNA, 100 bp, Homo sapiens
atctaccacccgagatgccccaaggtgttatgatgctacaacttctggaaaaagtaattgaattggaaaattggacagaggggaaaggcctcattgtccg

SEQ ID NO: 330364 - DNA, 100 bp, Homo sapiens
ttcggcctcatcgacaccaaggagctggagccactgtctagggacaggaagatggttggcgacgtgaccggggcccaggcctatgcctccaccgccaagt

SEQ ID NO: 330365 - DNA, 95 bp, Homo sapiens
ggctgctgatgaggagtggggaactggctctctggaacgtgtgacagcaggcagaaggggttccatcttagcccacatccagaagcaaaagcact

SEQ ID NO: 330366 - DNA, 75 bp, Homo sapiens
tagagctgaaggctgtgataatgaggaagatcttcaaatgggcattcacaagctcacaggaagtaaaagagcaca

SEQ ID NO: 330367 - DNA, 75 bp, Homo sapiens
cttgaaccttgggaatattgagaatgaacaggcatttgaagaagttttccagaatgccaacttccgatctttcat

SEQ ID NO: 330368 - DNA, 82 bp, Homo sapiens
ttccctcctggttttctgtgagatgcggccagtcctgtggtggctggacctcgtggaagcccctctggctgtgtggctatgg

SEQ ID NO: 330369 - DNA, 101 bp, Homo sapiens
cgtgggcccgcggtgcgagcagcgtgatgcctcccatgaaacccaggaacctgagtccttctcagcctggtcagatcgcctggcccgggaacatgcccaga

SEQ ID NO: 330370 - DNA, 98 bp, Homo sapiens
tgagccaccgtgcctggctgaaggttggaatgttgcatcagcaggtagaagaacatgaaaaaatcaagcaagagatgaccatggaatataagcaggag

SEQ ID NO: 330371 - DNA, 98 bp, Homo sapiens
tgctaatccagtggaaatcaggagaggtaaaaatgcatttgcaaagggagaaaatgaaggccaaacagaagcaggctccagcttctgcaaaaacttgg

SEQ ID NO: 330372 - DNA, 75 bp, Homo sapiens
aagagcgacaagccgctggcagccgcggatctcaccgccgctcaggttcattcagcagacaacacaagaatggaa

SEQ ID NO: 330373 - DNA, 149 bp, Homo sapiens
cagcatgggcaactgcgtggggagacagcgccgggagaggccggcagccccgggacacccccgcaagcgagcagagcatccacaatgggtaccccagcctcggtggtcagtgagccacccccttggcaggccccgattgaggcccgggg

SEQ ID NO: 330374 - DNA, 90 bp, Homo sapiens
ctagatattacagcaatgctttttcagcggcaggtgctgctcggcgccgtcggggcctttgactggtccggaggggcgttgctctacgac

SEQ ID NO: 330375 - DNA, 75 bp, Homo sapiens
attttcagtctccttcccaccacaactatctgtaagagagagaagatgcaaccagttttgccattttccaagtca

SEQ ID NO: 330376 - DNA, 97 bp, Homo sapiens
gctgagctcaccagggcaggggctacccatgtggagagatgcatggcaggctgttaatgccactgggcacctttcagacacactttggctgatcccc

SEQ ID NO: 330377 - DNA, 82 bp, Homo sapiens
tgaaggccaggttttgcagtggtctgaggtcaatgagctgaaggagaaaggcaacaaggccctgagcgtgggtaacatcgat

SEQ ID NO: 330378 - DNA, 96 bp, Homo sapiens
gttcgtctcttacgtctgcggaagtgcagctgcctcagttcttagcgcagacaaagatcattccactcagcctgggacgatggggaggaaaaaaat

SEQ ID NO: 330379 - DNA, 100 bp, Homo sapiens
ggactgcgaagaactcctaaacaggtggatccagctagccacagtgcagcctggccagaatttccacatgttcacaaaggaagaacttgaagaggttatc

SEQ ID NO: 330380 - DNA, 75 bp, Homo sapiens
ccgggactccctggaaacctagaaatggtgtgatgaatgcagactctgctaccattttggctgtttggatcctcc

SEQ ID NO: 330381 - DNA, 101 bp, Homo sapiens
cctgctctcccggcaaggaaacttcgcaggctgggctctcacctttgtgtatccttttggtgccacattgagtgtcatgaaaccagcagtggcggttctgt

SEQ ID NO: 330382 - DNA, 82 bp, Homo sapiens
gcggggaggaggatgggggctaaccagttagtggtgctcaacgtgtacgacatgagccaaatctcctcagccacctgttgaa

SEQ ID NO: 330383 - DNA, 82 bp, Homo sapiens
cgcacctggccaaacatgtgcagctggtggctccccacaggtgcaggaagccgccgcccagccatggacggggaggagcagc

SEQ ID NO: 330384 - DNA, 82 bp, Homo sapiens
cgtgcccgcgggacctgacagccgggtcagaggtgaatgtaaaagctttaaagagaaattcatgaagtgtcttcataacaat

SEQ ID NO: 330385 - DNA, 97 bp, Homo sapiens
tgagaatggcgtcccgcggccggcgtccggagcatggcggacccccagagctgtggctagaaagtttgaaatggtggggagaggggatgctgatctc

SEQ ID NO: 330386 - DNA, 100 bp, Homo sapiens
ccgagatttgcgacagcaagggggttgtccacgaggaacaaattgtacatttgcccattctcaggaagagcttgaaaaatcatcattttctgggtggaag

SEQ ID NO: 330387 - DNA, 83 bp, Homo sapiens
gtccagaaaagaagcgaaggaagtcaaatactcagggctcccactgcagcagctcgggggaccccgctgagtacaacctgcgc

SEQ ID NO: 330388 - DNA, 100 bp, Homo sapiens
gaaaagcatgtggaggtgcggaccctggccaacagattgaaaaatggaggcacgcagtggttatgacttgctgagtaaagaatacgaaccagaatgatgt

SEQ ID NO: 330389 - DNA, 82 bp, Homo sapiens
gaaaacgtacgctctccaactggccaatacaaatcccttgtatccatcccagatgcagtgactggttactacctgaaccgtg

SEQ ID NO: 330390 - DNA, 75 bp, Homo sapiens
ggactctgcctcgtgccgctgagcctggcgcagatcggacagagcgggatgccaccagcttgtccaaagggaagt

SEQ ID NO: 330391 - DNA, 83 bp, Homo sapiens
ctgaaggcggcggcggggccagaggctcagcggctcccaggtgcgggagagagcctggcgctctccagcctcaacaagcacgt

SEQ ID NO: 330392 - DNA, 75 bp, Homo sapiens
atcgtctgcaagaccgcgaggcgagacctcttagtgcctggtgaagaatgtgatgggatcactagcatgtctgcg

SEQ ID NO: 330393 - DNA, 83 bp, Homo sapiens
gtgtggatgtcggcgaagccgcgggcgagcggctccctgtctggtgccctctcctgctgcgaggactcggcccggggctcggg

SEQ ID NO: 330394 - DNA, 82 bp, Homo sapiens
tttgatgcgacctcaggaaggagatgagttatctccagaagaagaagagaaaaggagaatccgaagggaaaggaataagatg

SEQ ID NO: 330395 - DNA, 100 bp, Homo sapiens
tccttgacagtttaaaagccttggcagtcaagtgggacttggtgtgcaactccaacaaactgaaggagatggcccagtctatcttcatggcaggtatact

SEQ ID NO: 330396 - DNA, 95 bp, Homo sapiens
ttgaaatacagactgttggggaacaagagcttttgtctggccctctgagccccaatgagagtttcctgaggtacctcacccttccacaagacaac

SEQ ID NO: 330397 - DNA, 95 bp, Homo sapiens
ctgaatctttgtgtttggctgcccaggctcgcctcgactccaaatggttgaaaacagatatacaggggacaggcaaatggtatgaattacaagac

SEQ ID NO: 330398 - DNA, 50 bp, Homo sapiens
ttcgctatggtgccttatgcaatgtaatatattgtgatcaaacctgccag

SEQ ID NO: 330399 - DNA, 50 bp, Homo sapiens
cagactaccccttcaaaccacctaaggtccagtggcattgcagagcacgg

SEQ ID NO: 330400 - DNA, 75 bp, Homo sapiens
tcagacggaggctccctttggatgccagtgtcagttgtcaggctgaccccgcactacatctacccaccagccatc

SEQ ID NO: 330401 - DNA, 90 bp, Homo sapiens
ccaccacctgctccatttgcaagcatccgtgtacaagatttgcagagaaatgtatgacgatggagtgggtttaccctttcaaagtcagcc

SEQ ID NO: 330402 - DNA, 96 bp, Homo sapiens
atgcagtggcttctggactgcgcgatgactggacggtcaaagctcagattcacagttgcataagccgtcacctggaatgtcttagaagccgtgagg

SEQ ID NO: 330403 - DNA, 78 bp, Homo sapiens
cagtaaaagcatctactgggggacatcctgttgtgaaggagccttcacgtaaatgggtccagtcatgcctcccagtaa

SEQ ID NO: 330404 - DNA, 80 bp, Homo sapiens
cttcgcgacacccttgaagctgagaaatgatgccccttggtgtggccactgcaaggctctggcccctgagtatgccaaag

SEQ ID NO: 330405 - DNA, 90 bp, Homo sapiens
ttccagtctctgtggacaaaatgacccagaaaaagcttgtggtgaaggggggcaaaaaaaagaagcaagttctgaagttcactcttgatt

SEQ ID NO: 330406 - DNA, 100 bp, Homo sapiens
atttgttagtgctgtgtgctggagggcactaccagatggggtgctgctggtgagtagcagccggtacccagaccagtggattgtcccaggaggaggaatg

SEQ ID NO: 330407 - DNA, 75 bp, Homo sapiens
aggcagccaagctcgtagcctgccactccgtgccacctgtggaatcctctcaagaggaacagtcattgtgtgaag

SEQ ID NO: 330408 - DNA, 100 bp, Homo sapiens
ctgatttgaatgctgtcctttataccaaccgggcagcagcacagtactatctgggttatgatgtgattgctcaagcccaatctgggactgggaaaacggc

SEQ ID NO: 330409 - DNA, 75 bp, Homo sapiens
cgcggagaagaacggggagccaggcttcttccccgggagctcgcagggctgcgacgccttcctgcggcataagat

SEQ ID NO: 330410 - DNA, 50 bp, Homo sapiens
ccagcgtctccgatgacactggtacccaagatattgtatttggagaagta

SEQ ID NO: 330411 - DNA, 82 bp, Homo sapiens
gccgaggtcccagtgcctgtccacgctggtccggcccgtcttcggagaggaactgtggctgcaccatctgtcttcatcttcc

SEQ ID NO: 330412 - DNA, 100 bp, Homo sapiens
accagcttcaccctcatgcctggttctacgcggccgagatctgcatcgccctcaacttcctgcacgagagggggatcatctacagggacctgaagctgga

SEQ ID NO: 330413 - DNA, 101 bp, Homo sapiens
cccagttacgcctggaatatgaaggcttccccgtcccgacaattcctcctcgcttcaagaagatgaagaagtagagatggaggccatcagctggcaggcca

SEQ ID NO: 330414 - DNA, 50 bp, Homo sapiens
tcacctgccagctcatcacaaaatggatgatgcttggaagtataatggag

SEQ ID NO: 330415 - DNA, 83 bp, Homo sapiens
cgagcagctcatgaccgacctcaccctgtcgcgggccaaccccttcaaggagcgaatctgcagggtcttctccacatccccag

SEQ ID NO: 330416 - DNA, 100 bp, Homo sapiens
ccaagctctgctccacactgccaaccggccagaggacgagtgtgaattcccaagatacgccccctctgagtcccactgccgtctcaggtgctgtgtggtt

SEQ ID NO: 330417 - DNA, 97 bp, Homo sapiens
cagagactaatggacatcctgtatgcttcagaagaacacgtctccggcaagaatatgcagccaccacgtctcggcgcagttctggttcatcttgcaa

SEQ ID NO: 330418 - DNA, 74 bp, Homo sapiens
agaaaatcaaaacaagctctttatgagaatggcatctaaggataaaagaatcagagtgtctcaacccttgacaa

SEQ ID NO: 330419 - DNA, 82 bp, Homo sapiens
atctagaatcaactgagagagatgcttaaaaatcaccagttactttaatgagtggtgatgatgtccagcaactctgtgaagc

SEQ ID NO: 330420 - DNA, 100 bp, Homo sapiens
gagaaaggagtgcctggctgttatggaaagatgagctcacagtgcctgcactttaccccagtagccctgaagtgtgggccccgtaccctctgtacccagc

SEQ ID NO: 330421 - DNA, 101 bp, Homo sapiens
tatagatagcacctggaaccaaacaaacaaaatattcactgatgagcgacttcaaggattcctaagggatttgtgtgaggtcttactatatttattgctac

SEQ ID NO: 330422 - DNA, 82 bp, Homo sapiens
caagcccgccacgccgcccagcccggccccgcccgcgccggaagagccacgccgccaaaacagagtggagtacgagaaaagg

SEQ ID NO: 330423 - DNA, 98 bp, Homo sapiens
cgctgggcctgtccgctggcgtcatgagcctctgagcagcgtctcctctctggaggtccacttcgacctcctggacctcactgagctcaccgacatgt

SEQ ID NO: 330424 - DNA, 82 bp, Homo sapiens
ctggtttaaaacggtcactgaaggagcttttgtgtggtcctctgagccccagtgagagtttcctgaggtacctcacccttcc

SEQ ID NO: 330425 - DNA, 80 bp, Homo sapiens
ccgactggaaagtcattgccattaatgtggatgatcctgatgcagccaattataatggttggtgttcgaggaagagacat

SEQ ID NO: 330426 - DNA, 101 bp, Homo sapiens
tggagcgttgcgagcgcgaatggcacgagctggagggagaatttcaagaactgcagcaaaaaggcattgggatgaacgagccgctggtggactgtgagggc

SEQ ID NO: 330427 - DNA, 107 bp, Homo sapiens
tgagcttcccaccgaagatgaacagggttcctggggcatcgacgatctccatatttcattgcaaggataagttctgaacgtcgaaaagaaaagtctcgagatgcagc

SEQ ID NO: 330428 - DNA, 95 bp, Homo sapiens
ggcagctacacatcttgaaagagaagctcttcctgtgaggctgcttctgatgcttggaagatatcctctcagccacaaagatggtaataaatctt

SEQ ID NO: 330429 - DNA, 80 bp, Homo sapiens
ggtctgcatcaatccctaccactataagagagtagaaagccctggcccaagtctgttttggtggtctgagaggaaaaaag

SEQ ID NO: 330430 - DNA, 100 bp, Homo sapiens
ggagacttatggggacaccgaagccatctgccggcgcctcaaaacctcacctgttgaagggtcttgctctgttgcccacgctggagtgcagcggcgtgat

SEQ ID NO: 330431 - DNA, 82 bp, Homo sapiens
cgataatgtccaatactgtggctactgtaaataccattttagtaagctggcagtgaaatcaactgtgcagaccatcactgtt

SEQ ID NO: 330432 - DNA, 75 bp, Homo sapiens
gctaaagacatagttcctggtgatattgtagaaattgctggatcctgtagcatggagtgacgttaccagttttga

SEQ ID NO: 330433 - DNA, 100 bp, Homo sapiens
gtttcatcaacttccataccgggagatggagcatttgagacaggccagcggaagcctgccacctcctatgtgcggaccaccatcaacaagaatgctcgcg

SEQ ID NO: 330434 - DNA, 74 bp, Homo sapiens
gctgtttctcatctttatactcttccagatgcctgtgaggagccaccaacatttgaagctatggagctcattgg

SEQ ID NO: 330435 - DNA, 75 bp, Homo sapiens
cgaagagacgagggagctcttggataaggggttatggttttgtgaaattcacagatgaactggaacagaagcgag

SEQ ID NO: 330436 - DNA, 104 bp, Homo sapiens
accatgtcagccttcccagtagctggaactacagggagctgagcacataacgacttacacgttcaatactcacaaagcccagcataccttctgtaagagatgtg

SEQ ID NO: 330437 - DNA, 83 bp, Homo sapiens
aagttcggggccaggacgtcgggaggacctgaacatgggcctggaattgatatattcacacctggtaaacctggagaatatga

SEQ ID NO: 330438 - DNA, 100 bp, Homo sapiens
gtttcttacaaagtggaggtttgtggcagccctgcatggagcaagtctgtcagcaccatctttctaacagcaatctgaatatggcggtgtagtgtttggt

SEQ ID NO: 330439 - DNA, 100 bp, Homo sapiens
ccagcgttaccatgcatcctgccgtcttcctatccttacccgacctcagatgctcccttctgctcctgagaagagcaagttagtaccttgtaccaaaaca

SEQ ID NO: 330440 - DNA, 82 bp, Homo sapiens
gagaactctcctgcccttttaggagtgcaaaaaggaggatcagctgatttattcggaggatttgctgactttggctcagctg

SEQ ID NO: 330441 - DNA, 123 bp, Homo sapiens
cacgcagctgaagctcatcatgaccttccagaattacgggcaagcgctgttcaaacccatgaacgcccgggggctggagaaggccaggcagcagctgcaggaggagctccggcaggtcagcgg

SEQ ID NO: 330442 - DNA, 90 bp, Homo sapiens
tgtgaactaaggccccctgcccccttttcctggtgcatgtgaagttatcaaaaacagggcaaacttgaagataaatcttttgactccagc

SEQ ID NO: 330443 - DNA, 89 bp, Homo sapiens
cttcgtgaggctgctcttcgagcgtttgaagaaaacaggtctgaaacaaggtcttacccccagctgcttctgaacacagtgactgccag

SEQ ID NO: 330444 - DNA, 114 bp, Homo sapiens
acaaggagttgtctgtctttaaggacagactgtatgaactggacatctcgttccctcccagacaatgcagatcttcgtgaagactctgactggtaagaccatcaccctcgaggt

SEQ ID NO: 330445 - DNA, 82 bp, Homo sapiens
cctcgcttcccggcgcggtcgcagccctcagcccacttaggataatggcgacagctgaggatcatgacaagatgtttaagat

SEQ ID NO: 330446 - DNA, 90 bp, Homo sapiens
cagattcgcagtggtcgcttcttctccttggatatgaatgaaccatcaagcttcgtgaatggggcagtttctccaggctgcagggacgcc

SEQ ID NO: 330447 - DNA, 51 bp, Homo sapiens
agcaaatcaatctctgaggttgggttggcagcctcgatggttccttctctg

SEQ ID NO: 330448 - DNA, 100 bp, Homo sapiens
acatactctgaaaagtgtggacacgtgaagtgtggcaagtgtgacccacaaaattctcgcccatattcagcaattgtgggcacacttgaagctgaaaaag

SEQ ID NO: 330449 - DNA, 100 bp, Homo sapiens
tttttcttagtcatgcccattggggcctttatcatctgctggactcctggattggttttgttacttctagacgtgtgctgtccacagtgcgacgtgctgg

SEQ ID NO: 330450 - DNA, 50 bp, Homo sapiens
caatatttcgagcagtttggcaaggttaatgttcgtgaagaaattgaaga

SEQ ID NO: 330451 - DNA, 76 bp, Homo sapiens
tccccagaagaagattgtggttgaattcagcctgagaaatgccagtggcctgacagcagcagacattgcacaaacc

SEQ ID NO: 330452 - DNA, 83 bp, Homo sapiens
gacgtgcaggtctctagcgcatgggagaagaagttgtccatgttcacactgggtgaaggaagctgaaaccacagacatgactg

SEQ ID NO: 330453 - DNA, 75 bp, Homo sapiens
atcacaccatgggagactacaaaggcagcacacttctgcttttgttccttcatcaggacgaatttactcttttgg

SEQ ID NO: 330454 - DNA, 75 bp, Homo sapiens
gtgtagctgaagcaagcacgaaaaatgctaacaacagcttcacgattgttctctggggccggactgagaaatgcc

SEQ ID NO: 330455 - DNA, 102 bp, Homo sapiens
taaaagccacccaggccttggtcctagcacccactcgagaattggctcagcaggacacagcattgttggttttgccatgtactattttacctatgacccgtg

SEQ ID NO: 330456 - DNA, 81 bp, Homo sapiens
gggaggagaaaacctggaccaggcacgggaagatgcccaggtggccgacatgaaaaagaagatggaggacagtgtggggtg

SEQ ID NO: 330457 - DNA, 82 bp, Homo sapiens
ttccgcgaggacatcacgtggaggcggccccaggaacttgctactaccagcaccatgccctaccaatatccagcactgaccc

SEQ ID NO: 330458 - DNA, 100 bp, Homo sapiens
gcacctacaactacagcctccccatcaccgtcaagaagacatgtgtttatctcagtggatgatctggaacccccggagccccaggaccctgaagattcca

SEQ ID NO: 330459 - DNA, 51 bp, Homo sapiens
ctcggagggagcccggcggcttcgggtatgacctggacgcgtgtgacattc

SEQ ID NO: 330460 - DNA, 100 bp, Homo sapiens
ataacattaccatgagagtttggcttggattatctcaacattctgttgggaaacactactatgaagtatcctgtcatgaccaagggttatgcagggtcgg

SEQ ID NO: 330461 - DNA, 83 bp, Homo sapiens
cacgaggcctctgagcctagagagtgaagctttgtctcctcagcactctgctgtcactcaaggaagtatcatcaagaacaagg

SEQ ID NO: 330462 - DNA, 95 bp, Homo sapiens
cagtgttgacctatgcctctccgccactcatcaccaatgtcacgtgggaatgtaagacggacttagatattgcatacaaatttggaaaaactgtg

SEQ ID NO: 330463 - DNA, 78 bp, Homo sapiens
gagcaggaagctgcggctgagtcgggtcgtgctgcggcagcctggcgcccgacatgtgaaggggaacctgccagggga

SEQ ID NO: 330464 - DNA, 90 bp, Homo sapiens
gctgtttcagagcgtttgggtcctctgaggccccttgaccagtatggactttctgtcagattttgagatgatgttgcagcgaaaaaagag

SEQ ID NO: 330465 - DNA, 101 bp, Homo sapiens
tgaaggagtgtggactttttgaatttcaagaacagtaaagttggaacacagcagagggtgtgtaataaaatacagaattctgcttggtcagaatcgtgatg

SEQ ID NO: 330466 - DNA, 75 bp, Homo sapiens
gaagaaattcccacctgtcaaagagggtttcgaaaaaacgatgaaatgaaagctatggatgttttaccaattttg

SEQ ID NO: 330467 - DNA, 100 bp, Homo sapiens
gaatggggaaagccagggggaggaaccagacttgggatgaacatgaggcctcgtcggacttcatcagtcagaattctatccggcacaacctctctttgaa

SEQ ID NO: 330468 - DNA, 98 bp, Homo sapiens
tttgaagctgccgatgccagagccaggtgaactggaggagcgatttgccatcgtgctgctgctgtgacttactcgaagcctcgattggccacattttg

SEQ ID NO: 330469 - DNA, 100 bp, Homo sapiens
ctttgtaggagcatggcttggagcacttcctattccactggattgggaaagaccatggcagcacctggcggctcacctgtggaagcacagcgaggccttg

SEQ ID NO: 330470 - DNA, 75 bp, Homo sapiens
agagggactcatgatctttgggatagcagattgtttgcctactccaggcagcttcatcagccttgagcagtctgg

SEQ ID NO: 330471 - DNA, 82 bp, Homo sapiens
gtgctgcggctgttgccatgtccgcaccgggacgatcatcctggggacctggtacatggaaataatgcaaaaggtgtcccaa

SEQ ID NO: 330472 - DNA, 75 bp, Homo sapiens
caaagaactcccacctgcgacacatcgagcacatggaggccttcaataatctggagaatcttgtctttggcaaag

SEQ ID NO: 330473 - DNA, 97 bp, Homo sapiens
gccgggatgcggctctgagccagcggcggcttccagcccgactgggcctgccggggctgccccgcgcacgagactaagaaagcactgtgcatcacct

SEQ ID NO: 330474 - DNA, 98 bp, Homo sapiens
agctaccggcccaaggccatctacctggacatcgatggacgcattcagaagatgagaagaacatcctgcacatcatggtgaaggtggtgaagggccac

SEQ ID NO: 330475 - DNA, 100 bp, Homo sapiens
agcaatggctcagcgggctctgaacacagcatcaatggcaggaggtttcctgttgagcggggatctgatgagcttctttcttctggcatcattaacggac

SEQ ID NO: 330476 - DNA, 100 bp, Homo sapiens
ccaggtgtctcctcccacaatggccccaggtttctttgccacttcagattggaatcgttgatctgctgaaataacagcaccactccttctgggtgggcga

SEQ ID NO: 330477 - DNA, 76 bp, Homo sapiens
gagcgctgcggagcgaacctcacctttccagggcgcaagcacccagtcagcttgaagagtttcaaatggaccctac

SEQ ID NO: 330478 - DNA, 102 bp, Homo sapiens
gcgagggctggtgaaagtgtggcacattgccatggcccagttggtaaaggatagtaatgatgacactgaagatgtttcactgtttgatgcggaagaggagac

SEQ ID NO: 330479 - DNA, 125 bp, Homo sapiens
gaaagccccagccacccatcaaatcagagagaaggaatccaccttcttacgctatggcagggggagaagcgagcggacatccagctgaacagcttcggtttctacaccaatggctctctggaggt

SEQ ID NO: 330480 - DNA, 82 bp, Homo sapiens
cttagctgtgctcgcgctactctctctttctggcctggaggctatccagcgtgagacacagtaacctggttgaactctgcat

SEQ ID NO: 330481 - DNA, 82 bp, Homo sapiens
tgtggtcagctaatagctgctgctgaagaaatcaggggagaaacccctgcttggtggaagcctgatggaatatgcaatcttg

SEQ ID NO: 330482 - DNA, 60 bp, Homo sapiens
ttctggcaaagatgagggggattcttaagggcctgctttcttccccgggcgatgtgcaga

SEQ ID NO: 330483 - DNA, 82 bp, Homo sapiens
cggacgcgtcatcgagtgtgacgtggtgaaagtgccctctggtggtcagaagatgctgtgctgtctcgttaggatgaatgga

SEQ ID NO: 330484 - DNA, 75 bp, Homo sapiens
cgcgggcagagcgcggcggcgcggggatcgcttacacctgagacgaactacagaacagcacgtaccagaggtgga

SEQ ID NO: 330485 - DNA, 111 bp, Homo sapiens
cagctgctgcagctgctgcacagaaattaatgcgaacagacagacttgagctggagaatgctggaggagaccttaaggatggccaccaccactatgaaggagctgttgtca

SEQ ID NO: 330486 - DNA, 100 bp, Homo sapiens
atcctcagacgcctcacttaggacaagtcgtgatgtctcgggagtcggatgttgaggctcagcagtctcatggcagcagtgcctgttcacagccccatgg

SEQ ID NO: 330487 - DNA, 74 bp, Homo sapiens
ggagctgaaggccttcagagtccttggggtgattgacaaggtcaaagttgctcagcggagcccagtagattcag

SEQ ID NO: 330488 - DNA, 83 bp, Homo sapiens
ctgacacgcggcgggacatgcagacaatgcagatcttcgtgaagactctgactggtaagaccatcaccctcgaggttgagccc

SEQ ID NO: 330489 - DNA, 100 bp, Homo sapiens
tgtctcgctccgtggccttagctgtgctcgcgctactctctctttctggcctggaggctatccagcggaactgctcgcagaaagaagaaggtggttcata

SEQ ID NO: 330490 - DNA, 145 bp, Homo sapiens
gtctgtgggcttccacgaagacggccgctggatgtacacgggcggcgaggactgcacagccaggatctgggacctcaggaacaagatcactcaaggtgaaggataatctactaataccagcactttgaatgaaaatttgtttctc

SEQ ID NO: 330491 - DNA, 50 bp, Homo sapiens
gagaagaagttgaggcgctatgattctaacattttcagagaaccttttgg

SEQ ID NO: 330492 - DNA, 82 bp, Homo sapiens
cccctgagccagagctccagcagccttgttagggcgtggcctgaggcttggataagtgggcgctcctggttgcagccagaat

SEQ ID NO: 330493 - DNA, 100 bp, Homo sapiens
agccctgctactgctggattagcgccaggttttgatgatgatggttcagaatttcatgaacatatatttctggagaaacacctggagagctttccaaaac

SEQ ID NO: 330494 - DNA, 74 bp, Homo sapiens
agagtcaacagcagtggcaacagccccttcatgaataagttttttccagccagctttccaaatcgacagtacca

SEQ ID NO: 330495 - DNA, 58 bp, Homo sapiens
gacttcagggtcttgaccgcgtggctcctgacactatcaacaatcatgtgaagacttg

SEQ ID NO: 330496 - DNA, 100 bp, Homo sapiens
cttagaaaggatcaggactggcgggttgaaccatgattccggtgacagagctccgctactttgcggacacgcagccagcataccggatcctgaagccgtg

SEQ ID NO: 330497 - DNA, 75 bp, Homo sapiens
ggcctccgggcctggcagtcatgaagggtgagcagggcagcatttccttctcccactgctgctgagatggcagaa

SEQ ID NO: 330498 - DNA, 102 bp, Homo sapiens
ctcaactggaagcactgtggaagaagatggagggtgtggggactcattctcacagttccggtttgctgaggagaaagaatgggatagtgaagcttcttgtcc

SEQ ID NO: 330499 - DNA, 50 bp, Homo sapiens
gcaagtgcagatagatggccttgtattggctgggatccaccaaaacttca

SEQ ID NO: 330500 - DNA, 82 bp, Homo sapiens
cctgcgcacccggcagcaccatgacaggaatactcccccagttgcaagaggcgcaggaccgtggaagacttcaacaaattct

SEQ ID NO: 330501 - DNA, 83 bp, Homo sapiens
aaggaacagtggaaagaggttcacaagcaggtggttgagagcctgccctcaagtatgtgttgtatacattggttggctttgtg

SEQ ID NO: 330502 - DNA, 75 bp, Homo sapiens
gggagcccgggacccccgggggcgcaggtggtattaaagataatcaaacattatcaagaagaaggacaaggaact

SEQ ID NO: 330503 - DNA, 83 bp, Homo sapiens
ctgacaatggctttggtccccagcgcagtgaagtggtgagcctttttgtcactggccagcagagccagccgcagagcagccag

SEQ ID NO: 330504 - DNA, 100 bp, Homo sapiens
agtaatttcaacagaagagtgagagatggaacccgaagaagaaaggattcgttacagccagagattgagtttgatgattgccagatatggggaatttgtg

SEQ ID NO: 330505 - DNA, 51 bp, Homo sapiens
ctcccgtgtagctgggattacagtcgagtaatcctgcctgtgtctgtagat

SEQ ID NO: 330506 - DNA, 100 bp, Homo sapiens
agaagaaacttgctgctcgggaagaagctaaattgttggcgggtttcatgggcgtcatgaataacatgcggaaacaggctggagtgtagtggcacgatct

SEQ ID NO: 330507 - DNA, 50 bp, Homo sapiens
gccaggaccccctagaagtctagaaatgtgaacaaggggagaagaattgc

SEQ ID NO: 330508 - DNA, 100 bp, Homo sapiens
agaagtttgagtgcaacctcctggtggtgtgtgccaatcacatcatcctgtgccagattggatttgtcctgtatccccccagtggaggtcctgcatggga

SEQ ID NO: 330509 - DNA, 100 bp, Homo sapiens
cccaggttgccttggaaaatgccaacgccgtgtctgaaggagagaagatgactgaggaggaggtggagaccgttctggcaggacacgaggacagcaacgg

SEQ ID NO: 330510 - DNA, 90 bp, Homo sapiens
gggtactcggaaggcgcgggcaggagcctggcgaggatgcaccttcccctgccttggaaagacacgatgaggcgagtggtacgacagagc

SEQ ID NO: 330511 - DNA, 75 bp, Homo sapiens
cgccgaggcaccgaggcactcagaggagatctgaagaagacacttgaatcatgggtgacgttaaaaattttctgt

SEQ ID NO: 330512 - DNA, 83 bp, Homo sapiens
cctcgagaagctccagatggcgtcttccgtgggcaacgtggccgacagcacagaaaagttggagaagatgagggatcatgaac

SEQ ID NO: 330513 - DNA, 99 bp, Homo sapiens
ggtggagatcggagaaacgtacctgtgccggcgaccggatagcacctggccttcatccaattctgtgacaacatatgaaacctgccagacctacgaacg

SEQ ID NO: 330514 - DNA, 90 bp, Homo sapiens
taagagcattatgggcagacagcggcatacagaatgcctatgaccggcgtcgagaatttcaactgttcacaagattcctttgcagttcac

SEQ ID NO: 330515 - DNA, 75 bp, Homo sapiens
ggggacaggaggctgcggggcctcagtgagaaagatcagtctaaagaaaaggagaagaaagtgaaaaaaacaatt

SEQ ID NO: 330516 - DNA, 73 bp, Homo sapiens
gtggcgcctgccggagcttcctacaatccatcctttgaagaccaccaggtgtcatggctgggtgaagagcctg

SEQ ID NO: 330517 - DNA, 74 bp, Homo sapiens
cctgagacaacaaggacctcccagatgcaagagctgcacaagtctctccggactgcttttcaggaagccttgga

SEQ ID NO: 330518 - DNA, 75 bp, Homo sapiens
cccggcccggaggaggctcatgcgggatttcaagcgagtaaccagagagcacagagaaatgctggtgaaactggc

SEQ ID NO: 330519 - DNA, 88 bp, Homo sapiens
agcttgagagaaaagcccccaaaagcagctattcaggtcagttgaacataccgatggtcagagtgtcctaacagactcactatggcgg

SEQ ID NO: 330520 - DNA, 100 bp, Homo sapiens
gtgcaggacgcgctgacagctcgagtgagcggactgcccaggacttcggaactagacgaggttggtcaaagaaaaagtgatgtatgaaaaagaggcaaaa

SEQ ID NO: 330521 - DNA, 75 bp, Homo sapiens
atccagtgttcaccatcctggccccggaaggaatcagagatcattgatttcttcctgggggcctctctcaaggat

SEQ ID NO: 330522 - DNA, 100 bp, Homo sapiens
gctgttcgacttcgatgatttactgaaatttgatgacctagatggaacacatgctctgatggaattgaatgatctggcacgggaccctccagcacagtgt

SEQ ID NO: 330523 - DNA, 74 bp, Homo sapiens
agaaaaggcctaagaattttggcattgtccgctgcctggcccggaagcggaggaactcacgggatggggacccg

SEQ ID NO: 330524 - DNA, 75 bp, Homo sapiens
attggtatctacggcctggacttctatgtggagtattgtcataggcaacagtccagaactcaggagaatgaactg

SEQ ID NO: 330525 - DNA, 100 bp, Homo sapiens
tctatgtcgttgatcaaggggaagtggatatgcctgaggaaacccagacccaagaccaaccgatggaggaggaggaggttgagacgttcgcctttcaggc

SEQ ID NO: 330526 - DNA, 75 bp, Homo sapiens
ggggcctccgcagcgacaacatggaggccgtgaagaccttcaatagcgagtttttttgaagaagcaggatgctga

SEQ ID NO: 330527 - DNA, 101 bp, Homo sapiens
tggataccaaggaagagaagaaggaacggaaacaaagttattttgctcggagactaagctgaaactgctgctcagctcccaagatggtgccacccaaattg

SEQ ID NO: 330528 - DNA, 90 bp, Homo sapiens
tgcccgttcagtttacagttcattttttgcttggtttggaaaaatttcattagagaacagctttgctgagccatcaaggtctaatggaag

SEQ ID NO: 330529 - DNA, 46 bp, Homo sapiens
cgtgagcccaagccgcggtcccggactccgtgggaaggaggcttgt

SEQ ID NO: 330530 - DNA, 83 bp, Homo sapiens
gctcttgccctcatcctggttctggaatcctcagttcaagcgttctgccctaggtccaaatgttaccaaaatcactctagaat

SEQ ID NO: 330531 - DNA, 82 bp, Homo sapiens
ccgccggcgggcagcctcctgtacagcccgccgcccctgcagtaagactttgaccccgacgcaggcttcagtgattgccgcg

SEQ ID NO: 330532 - DNA, 51 bp, Homo sapiens
gaggcgattgcgggggcctgggctagggcgaactttctgaccaagtataca

SEQ ID NO: 330533 - DNA, 75 bp, Homo sapiens
ggagacgccggctgctcctcccctccccgccgtctgaaccggacggcttttctcatttccacttgtacgtgtgcg

SEQ ID NO: 330534 - DNA, 90 bp, Homo sapiens
cgaaatgtccatgagaaaaagcttggagataaagttgctttttactgcttgatgaagaaatctctggaattgtggaagtggttggaagag

SEQ ID NO: 330535 - DNA, 100 bp, Homo sapiens
gtcaatgtgtggaatattggggggctcggctgcagacttggccaaatggacgggactattaagaggcaaggacctagcaacacttatgaagatcctcgaa

SEQ ID NO: 330536 - DNA, 106 bp, Homo sapiens
gccatggccgaggcgtcgccgcatcccggacggtacttctgccactgctgctccgtggagatcgtcccgcgcctgccgcattgtcccagatatagccgttggtaca

SEQ ID NO: 330537 - DNA, 98 bp, Homo sapiens
ggctgaacagctgcaggaatgaaaaggtacatcaggaacgtctctatcaagaatacaatttcagcaaggctgagggccatctgaaacagatggagaag

SEQ ID NO: 330538 - DNA, 75 bp, Homo sapiens
atgatgctgtgtgaatatcaaagaagtggggatttcaaaaagcaaccccaaggtccaggtggaggccatcgaagg

SEQ ID NO: 330539 - DNA, 99 bp, Homo sapiens
gctctgggatcccggccaccagcaattgtccggttattgttgtgggtaatccagccaataccaactgcctgactgcttccaagtcagctccatccatcc

SEQ ID NO: 330540 - DNA, 105 bp, Homo sapiens
ccgctgtgtggttgcaacggagataaattcccggaaccgcgattcggcgtgtcaggaagcatgagtgggaaaagcatgggacctgcgccgcccaggtggatgcgc

SEQ ID NO: 330541 - DNA, 75 bp, Homo sapiens
cggccgatgaagtgcagaggtttttttctggaatgggtaccacagaccatgtcatcgtcctggcgtccacgaacc

SEQ ID NO: 330542 - DNA, 80 bp, Homo sapiens
cagccgctcgcaggcgccgcacggagttgcgtcccggggacttggggccgcagggaggcgccttggtgctgaattgggga

SEQ ID NO: 330543 - DNA, 90 bp, Homo sapiens
cctccaactttgcgacggaaatgtgtcatcgaaagccaggtttactcctggcttgggggcattaggaagcactggaggctcttcgggaac

SEQ ID NO: 330544 - DNA, 51 bp, Homo sapiens
gcacaatatcgggcagaaagataatcacgatgccaggatagaagaatttgt

SEQ ID NO: 330545 - DNA, 100 bp, Homo sapiens
ccttccggagccatgtcagaaggagtggacttgattgatatatatgctgacgaggagttcaaccagaaaacctgttagaaatgtggtggtttcagcaagg

SEQ ID NO: 330546 - DNA, 96 bp, Homo sapiens
gcttccaggaacaagccatggagggtcaaagaaactcctggttgagctcaaagttattttacattgtgtcatggagaaactccagctgggcccaga

SEQ ID NO: 330547 - DNA, 80 bp, Homo sapiens
gaggacccgggacaccgcacagccgggaaatgatggaattgtcagccacttgaagaagcaggcaggaccagcttcagtgc

SEQ ID NO: 330548 - DNA, 100 bp, Homo sapiens
agacgtccacgtgcactccctgcactgctactttgttcgggcagaaactggcgatggaatatgagaggagccctctggaaagaaaaggacagaccctgtg

SEQ ID NO: 330549 - DNA, 100 bp, Homo sapiens
ccaaagtcatcgtccggtttctcactgtgatgatgaagcatggtaacctgtgtatggtgactggaggtgctaacctaggaagaattggtgtgatcaccaa

SEQ ID NO: 330550 - DNA, 100 bp, Homo sapiens
cggcccctctgccgacctcttgcaatccaagtgacatgagccatgggtacgtgacagtaaaggtcggtgagctggtaaaggttacgaagattaatgtgag

SEQ ID NO: 330551 - DNA, 90 bp, Homo sapiens
gtgatgaatcagatgtcaaagacttagcttttaaattaaaaaggaagctattcaccattgagtttcctcttaataagctcactgaacttc

SEQ ID NO: 330552 - DNA, 119 bp, Homo sapiens
ggtcgatatttgggcctttggacttgttttgtgggaagtggccaggcggatggtgagcaatgatgatgtgatgccagccacttactgtgaaattgatttagataaagaaaagagagatg

SEQ ID NO: 330553 - DNA, 75 bp, Homo sapiens
gcttggtgatgagtatgatgcacctgcagtagaaagaagacatagctcatccagcaagccgcctttggccgttcc

SEQ ID NO: 330554 - DNA, 101 bp, Homo sapiens
cggtcaccctgctggctacccacagcccatgccccccacccacccgatgcccatgaactacgtctgaccagtgcacaggacttcagggcttcctggtgttc

SEQ ID NO: 330555 - DNA, 100 bp, Homo sapiens
gaaaaagtatgcagaccttgaaaagcggcacgacaacattaaaccatcagatgagcagcagcccgtggagtctgaagcaatgcactgcagcaaccccaag

SEQ ID NO: 330556 - DNA, 101 bp, Homo sapiens
agctgaactgagcgtatgtgccacgccgcccaggagacccctctgctgcaccacttcatggtactaggttttgacaagcttgcatcatgcgtgagtataag

SEQ ID NO: 330557 - DNA, 98 bp, Homo sapiens
gatcagccttctgcctttaaccctttccatgtgtataaggcgtttagtgaaaacatgctagatcaggagtcatgcttttctccccatcattccaaaca

SEQ ID NO: 330558 - DNA, 101 bp, Homo sapiens
agatcttcatgtgtctcttctaagctgaataaagctgttttggaactgtcaggtacctcaaagcggtaagcttgatgattaccaggaacgaatgaacaaag

SEQ ID NO: 330559 - DNA, 82 bp, Homo sapiens
gtcggaatcagatttgaaaatgaaagttgatgaggaatttaaatccaccttcatcaaactgggaggtggaaaagttgagctg

SEQ ID NO: 330560 - DNA, 100 bp, Homo sapiens
tgacagtctgcatgtgcagttttcagcctgtggccgtgggttctacaagtcttcctctcaagatcttcagtgctctcgttgtccaactcacagtttttct

SEQ ID NO: 330561 - DNA, 75 bp, Homo sapiens
caacaaggagggaaaaaagagcaggtggaaaaggaaagaaacatgatcaggggcaagtcttgttggatgtcgtct

SEQ ID NO: 330562 - DNA, 98 bp, Homo sapiens
gattgaaagcattccaaaacctgaaccagtaactgaagtatctgcccctgtcaaatcattccaggtgtaattacttcaagcctccaggatggcaatcc

SEQ ID NO: 330563 - DNA, 80 bp, Homo sapiens
tctagtaacccgcgaaatgatgggatagcgttgcaaatccttaaaagagtcttaacgatgttcaggcggttgcttatgag

SEQ ID NO: 330564 - DNA, 98 bp, Homo sapiens
aacagaatcgaagatcactaatccagtttatgaaacaggagatgacccattcctggcctactcctctcacttccatgcatactgctggacactctgag

SEQ ID NO: 330565 - DNA, 98 bp, Homo sapiens
cgcggcatgagccggtgaccaagctcggggccgagcgggaggcagccgtggccgagtggcaccctgtgctgcgcacactaaagaaccgcattgaagag

SEQ ID NO: 330566 - DNA, 98 bp, Homo sapiens
acaatgggaaccagtctttcaaaatatttgaagttcctgaataaccacatcctggtgaaagacgctcaggagaaggccaacgccgccctgcttgacta

SEQ ID NO: 330567 - DNA, 98 bp, Homo sapiens
acagagtgatgggaaacgcgtgagccaggccgagaggaaccctgattgctgtccttcaacgtgttcattatgaagttattagtaatacttttgttttc

SEQ ID NO: 330568 - DNA, 100 bp, Homo sapiens
tgggccgagtggccgcgggcgccatggagggggtgctgtacaagtggaccaactatctgagcgctactctcggaaccgcacgtttgacacgtacattggg

SEQ ID NO: 330569 - DNA, 98 bp, Homo sapiens
tcagtatgtgctctgggacaaaacagcatatttggcaacatctcggtgtccttatctgcagcttgaagaggatccagaagcagcaaggtctagcaatt

SEQ ID NO: 330570 - DNA, 98 bp, Homo sapiens
ccggggacaagaaactagagcaaataaccgttttgaaattggctgcagaccacaagactgggaaaccacttggaagaccgagtgaacaaatttttgcg

SEQ ID NO: 330571 - DNA, 75 bp, Homo sapiens
tggaccagtacagctactgcaccccgtcccacatccctttctccaacaggaatggtctggaacacggacctggtg

SEQ ID NO: 330572 - DNA, 82 bp, Homo sapiens
atggaattctcctgcctgcgggtctttaaagactgaggttctgcggggagtgtctccagccctgcctgcaggtgccatcccc

SEQ ID NO: 330573 - DNA, 100 bp, Homo sapiens
cgcgagtttgtggattatctgaagtcatgttggaagcctctgcagagaacattttacagcaggacttttgccatgctatcaaagtgggagtgaaatatac

SEQ ID NO: 330574 - DNA, 83 bp, Homo sapiens
gacagccgcgcgctgagggtctcggggcgggcgccgcgggacctctccgggccatggcccgagcgggaagaagttccgcagca

SEQ ID NO: 330575 - DNA, 75 bp, Homo sapiens
tcatcagatacaaaggtgccaagatccaggtagttgatgtcacttggcgatattcctgcaaacatgaagaggtga

SEQ ID NO: 330576 - DNA, 100 bp, Homo sapiens
ctgagcctctgcactctcctgactcagaacgatcttctaaactccagccagtaacagaaggaaaagaattccatggcaacatcattaaagtgtcctttgc

SEQ ID NO: 330577 - DNA, 100 bp, Homo sapiens
tacaaggtgagatcagccgcccggccaagctatcttctcgctagcagaatatctcgatgcataatgcagttggtggggccatgacggggcccggaactca

SEQ ID NO: 330578 - DNA, 100 bp, Homo sapiens
agcagggacagcagtgtgtgtccagtttgtcagccacaccctgtgtacagattcatgatgttgctatcaaaagttgagaaattgtcagaagaaatcatgg

SEQ ID NO: 330579 - DNA, 51 bp, Homo sapiens
gctaacagaactggaccttttcgggcaattgaaggaacagactaaaaatcg

SEQ ID NO: 330580 - DNA, 50 bp, Homo sapiens
tcgagaaggagctgcagggccagcctgaactctttgcttccggaatccgg

SEQ ID NO: 330581 - DNA, 100 bp, Homo sapiens
cccgggagtttgaggaggttgtggtgttaaaatcatcacacaacaggttcaaccaagtaaaatcttacccaaaccagtgacagcaactctacccaccagt

SEQ ID NO: 330582 - DNA, 87 bp, Homo sapiens
ccggaagtgatcccctgcgtggctgggctgctcgggttagatcgtcaggtcttgaatataatcatggccaaaccttatgaatttaac

SEQ ID NO: 330583 - DNA, 98 bp, Homo sapiens
cagggtaatcttggggagtcttgccagtctacaggtgtatccagcagctccaaagagacagcaaccagcaagaatgggccatagtgacgatggtggtt

SEQ ID NO: 330584 - DNA, 100 bp, Homo sapiens
cggcgagcggttccttgtgggctagccaagaaggatcaagaaggtggagaagaaaagaaatctgtgcaaaagaaaaaagtaaaagagttaaaggtgttgg

SEQ ID NO: 330585 - DNA, 82 bp, Homo sapiens
gacgtgcacgcagcccggcgggaggataaagaccaccacggttgacatcatggacatatgtgagtccatcctggagaggaag

SEQ ID NO: 330586 - DNA, 99 bp, Homo sapiens
aatatcggagaataatttctttctcgctgatcgcctaacttctactgacgaagcttggaagttgcagaaggaggaagttggccgaatatggaagatgga

SEQ ID NO: 330587 - DNA, 82 bp, Homo sapiens
ctggtcgtgcgacccaagcccctgcattcctgtacggaccacatggttgagaaaggagaaagagaaaatgattacttgtaga

SEQ ID NO: 330588 - DNA, 74 bp, Homo sapiens
aagatcgatgctgagcggcaggctgcagctgcagcctgccagctgttcaaggaacaggagtacagctgtgtagt

SEQ ID NO: 330589 - DNA, 100 bp, Homo sapiens
ggcgcctaaagtctgcgaggaggaagtcgcctctgtgctcgtgagtccagggatctaaggctgttttggagtcagcggaagatcaccaaggccagggagt

SEQ ID NO: 330590 - DNA, 74 bp, Homo sapiens
cttctcccaggaggggaggcaccctacaggtggcagatgagaactctcaacacagttgtgttagaagaaggatt

SEQ ID NO: 330591 - DNA, 90 bp, Homo sapiens
gcacaaataaaaatttgcccattatgtcaacagcatctgtggaaatcgatgatgcattgtataggtttctgacgtagaagagcttacccc

SEQ ID NO: 330592 - DNA, 83 bp, Homo sapiens
ccacaatgccacaagctcctccgcaacagtttccatatcaaccaaattatgtctatccagaagttaaaggagagattgctcgt

SEQ ID NO: 330593 - DNA, 100 bp, Homo sapiens
aaagcagtcgtaagaagaggtcccaatcccccactctttccgccctaatggaggtctccagtttcgacccaacatgagtgaagtttcctgcaagaaacgg

SEQ ID NO: 330594 - DNA, 75 bp, Homo sapiens
gaggaataaccggaccgacccccgacggtgcgtgttcatggcctcccacgggaacgacgccgcgagagccaggtt

SEQ ID NO: 330595 - DNA, 80 bp, Homo sapiens
aagcgggcgagggcagcgccctaagcagtctgcgctcctcagaccaccggcaggtgaacagcctgatgcagaccgaggag

SEQ ID NO: 330596 - DNA, 96 bp, Homo sapiens
gcgcttcgagaggaagggcttcaagttggtggcgctgaagctggtgcagactggggcagcacctactccgtgtcagtggtggagaccgactacgac

SEQ ID NO: 330597 - DNA, 75 bp, Homo sapiens
ccatcgccggagcctgaggacacttctctgtcgtcacagttaggaaaatgtttataggaggccttagctgggaca

SEQ ID NO: 330598 - DNA, 75 bp, Homo sapiens
gggttctggactttgggcgtcccattgccatggatgaaattgattctgcagtaaagatgttggtgtcattaaaaa

SEQ ID NO: 330599 - DNA, 100 bp, Homo sapiens
ctggccctggtccggacccgcatgcaggcacaagaactcagcctcctcccaagctccctgtgggtcctagccacaagctctccaacaattactattgcac

SEQ ID NO: 330600 - DNA, 82 bp, Homo sapiens
gaggtcctgccgtccatgcggaagatcgtcgccacctggatgctggagctggtactcctggttaatcaacagcttcgtcaac

SEQ ID NO: 330601 - DNA, 76 bp, Homo sapiens
ctatggcaaggatctctgtcactgagttgagacatttgggaaatgatgaagtgcacattgtttggtcagagcatac

SEQ ID NO: 330602 - DNA, 90 bp, Homo sapiens
ccagcgcgcagaggcgggcgcggaggcggctagaaggtgaccgcggatcccagcttcctgcagccaggttgctgtagtaaaactaaaaaa

SEQ ID NO: 330603 - DNA, 75 bp, Homo sapiens
gttaagaattaggacaaacagaacaacatttaggaatcgacgctctctggagggcctcggcccgtacagcttcat

SEQ ID NO: 330604 - DNA, 83 bp, Homo sapiens
cagaaactagcaccagccccaaatttcgaggacgaatccatgaaccaaccaggaccaatcaaaaccagactggctattagtca

SEQ ID NO: 330605 - DNA, 100 bp, Homo sapiens
cgctggcccagctggaggacttcgtgaggtcagaggtcttcagaaaatccattggcattctcaacatttttaaggagcaaattgacatttttgaaggaat

SEQ ID NO: 330606 - DNA, 75 bp, Homo sapiens
agcgattcctgcaggcgttggttcccctctttgacctgatcaaatttttggctctcatctgcacaaagtgtgtga

SEQ ID NO: 330607 - DNA, 83 bp, Homo sapiens
tccccatggggctggcctgcggcgcctgggcgctctgaggagtgcgccggtctcggggaaatgcccggttccttcgtgcccac

SEQ ID NO: 330608 - DNA, 80 bp, Homo sapiens
gagggcaaggactacccctttgccaggttcaataagctgttcgggggtcttgtctggattttggttgcctcctccaatgt

SEQ ID NO: 330609 - DNA, 90 bp, Homo sapiens
ctcagcccccgcaaggatggcctttcctaccagacctccacaatctaaattgcttcgtgaagataagaaccataacatgtatgttgcagg

SEQ ID NO: 330610 - DNA, 101 bp, Homo sapiens
aaagtatggggaattcctctatgacaatctcatcattttctccccttcggtagaagcaacagggagctgccaccaccgtgtactgtgctgctgtcccagaa

SEQ ID NO: 330611 - DNA, 98 bp, Homo sapiens
gagacataagaccgttggttctgacgaggcacagcgtttcttgcaagaatgggagacatgggaaagtctctttctcatttgcctttgcattcaagcaa

SEQ ID NO: 330612 - DNA, 89 bp, Homo sapiens
tatgaatctcaggaacaccaccttctgtcaggtcccagctagtccacagggaccagcagtgccatggaaggatttaacatgtctcagag

SEQ ID NO: 330613 - DNA, 74 bp, Homo sapiens
aacatccccaactggtggcagagttatgagtgctgccttaacaatttcaggaaaagactaaaatgcttccgatg

SEQ ID NO: 330614 - DNA, 100 bp, Homo sapiens
ctgaagttcacgactactagaaggggaggggagtggaaaggctctcagtgaaaaagctgttccatttcctccaagtcaccggcttacagcaaaagaagtg

SEQ ID NO: 330615 - DNA, 50 bp, Homo sapiens
caacctggcagaacttcagagacagactagacgcttgaagcaaagctgcc

SEQ ID NO: 330616 - DNA, 74 bp, Homo sapiens
agacgcacagctaagatgtcaggacatcctggaagctgggaaagggcatattttggtggtgaagctcgctgcga

SEQ ID NO: 330617 - DNA, 98 bp, Homo sapiens
tggagtgggcgcggaggcgaccgccatggcgttcctcaaactccgtgaccagtgtcccagaagcttttgttgacaattccagtttccgaacaaaacat

SEQ ID NO: 330618 - DNA, 83 bp, Homo sapiens
attcccctggcgcggactctggcaccaacaaaactatctctttgagttaatatgatcctctgttgaagcaagaagacaaactg

SEQ ID NO: 330619 - DNA, 83 bp, Homo sapiens
ggaaaatatcccaaggactaatctgatcgggtcttccttcataattactggaagaatttagtccagttgttgagagacttgga

SEQ ID NO: 330620 - DNA, 82 bp, Homo sapiens
ctgtggtgtggcttatgtggtccaggagccaggtcacgcatgaagggagcaccgtggagaagacagtggcccctacagaatg

SEQ ID NO: 330621 - DNA, 75 bp, Homo sapiens
tgtcaagcgaagccttgaaaaagctgccctgagacggtgtcccgccgaaaggtgcagctgaatgccggccagctg

SEQ ID NO: 330622 - DNA, 87 bp, Homo sapiens
cggcaggaagtgggaccggtgtctggcggatgcggtcgtgaagatagacctcctgccccccgaggtctgcagtctcctgaacccagc

SEQ ID NO: 330623 - DNA, 74 bp, Homo sapiens
gaggacaacgtgcgcgccgctcagaagaatgttggctcaattaagaaacatcagggagataaattcaacccagt

SEQ ID NO: 330624 - DNA, 82 bp, Homo sapiens
ttgagccatcggatctaagatccaaaagcatgctacaagtgaaaactgatgagaaactgaatgtgtctgatgagaatacagc

SEQ ID NO: 330625 - DNA, 74 bp, Homo sapiens
agcactccagagcctgctcaagatgtgtcttgctgaatcagggctctcttatccctgccatcgacttacagtgg

SEQ ID NO: 330626 - DNA, 98 bp, Homo sapiens
gcggagcccggctcccgcaccatggaggaggacgacagctacgggctcaaaatttgggcggggaactggactcactcagccttctcaacgcacgtctg

SEQ ID NO: 330627 - DNA, 100 bp, Homo sapiens
tgacttcctgtgcttagaaggcaaagaattcaaccggctcatccgcaacgagaaaggcgagagatcgcggattcaggtgtggctctatgagcaagtgaat

SEQ ID NO: 330628 - DNA, 75 bp, Homo sapiens
cacgaggccgtgggtacgaccggaagccgcaggtatgctggggccctcctggatgaggatgtcttccagggaaag

SEQ ID NO: 330629 - DNA, 97 bp, Homo sapiens
gttcgactgcgagggcctgagacggctgcttggcaagttggtaagtcacatagaagagatgctccagacagcctacaacaagctccacacatggcag

SEQ ID NO: 330630 - DNA, 90 bp, Homo sapiens
cgaggagagcatcgactggaccaagatcgagcccagcgtcaacttcctcaagtcgcccaaagaccatcggggccgccttcgtggccaagg

SEQ ID NO: 330631 - DNA, 112 bp, Homo sapiens
aggacagcgccttcctcaacgacgcggacatggtcatgagctttgtgaacctggcttcctgcctgacacagctcacttcaagaagtgcacaatgtcagaacgtggaattaag

SEQ ID NO: 330632 - DNA, 98 bp, Homo sapiens
tgggctgagtacgcactcaagaggcaagaggccattgctcagaacaggcactcaggggcccagtgcattacctgttcctacaaggcaagctcaggact

SEQ ID NO: 330633 - DNA, 100 bp, Homo sapiens
agcctcctgaggagctgggattacaggcccctctgctgccagtctgctggtgtttgctggaggtcccctcctgaccctgttttcctgggtatcaccagtg

SEQ ID NO: 330634 - DNA, 100 bp, Homo sapiens
ctgaaggggacagtgtgggagaatccgtccatgggaaaccttcggtggtgtacagatttttcacaagacttggacagtgactacctgtttaagctgcttt

SEQ ID NO: 330635 - DNA, 100 bp, Homo sapiens
ccatgatccctaagaagacagcttgaacctaggacttctcctacgatgagtccaaagtggagtttgacgtggacgcgcccagtggggtggtgatggaggg

SEQ ID NO: 330636 - DNA, 82 bp, Homo sapiens
agttcgagcagatcgacaagtccgggagctgggcggccatttaccagttgaaaatgaactacctccaccagaaaatatagaa

SEQ ID NO: 330637 - DNA, 100 bp, Homo sapiens
ggccaagaagctggtgtgcggagatgaaggtatcgagaaccttccctgcgaacttcagaggaacttccagctgatgcgagagctggaccagaggacggaa

SEQ ID NO: 330638 - DNA, 100 bp, Homo sapiens
ggcgaagagccgccgcccggcccgcgatgtcaccattgttcagctgggtggccaagtccaacatgtttaccgtggctgatgtgttgagtcaagatgaact

SEQ ID NO: 330639 - DNA, 101 bp, Homo sapiens
ccggagctgcctggaggcggccgcactcggtaagactttgaccccgacgcaggcttcagtgattgccgcggatcagaagcctgagcactttggctcgagac

SEQ ID NO: 330640 - DNA, 96 bp, Homo sapiens
ggtgcatctgcagtacaggatatgaagaaattgagggttcttgccatggtgtgatgaatgcagactctgctaccattttggctgtttggatcctcc

SEQ ID NO: 330641 - DNA, 75 bp, Homo sapiens
agggcatgtccctgcttgtcagggctgagagcgacgccaggaagaaagctcaggcccattagtgatgactctgaa

SEQ ID NO: 330642 - DNA, 75 bp, Homo sapiens
cgctgttggaaagcggctgcgtagacaacgtcctgcaagtcgatgggagacctttaactctgaaggacatatggg

SEQ ID NO: 330643 - DNA, 98 bp, Homo sapiens
acaacacaaacccagacgccgcgagccgcgccagcgctgataaagcagtttgtgtccgacgtggcctggggggagctggactacctggtggtggacac

SEQ ID NO: 330644 - DNA, 100 bp, Homo sapiens
agactgttttctcactgtacttctgggtaaactggagaagagcttcaactctgttcacctgcttgcagataactgtgtccagaggacccccaggccatcc

SEQ ID NO: 330645 - DNA, 95 bp, Homo sapiens
gctttccactcggctcctgtcgtccgttctctcaggctcccgttcagatagcctgggctggaagctcttctacgtcacaggctgcctgtttgtgg

SEQ ID NO: 330646 - DNA, 83 bp, Homo sapiens
gtaggtctggacctggactcacggctgcttggagcgtccgccatgaggagaaggtgtggacactgccagcggctgcagccgac

SEQ ID NO: 330647 - DNA, 96 bp, Homo sapiens
cgacttccacctgctgcccagcggcatcatcaacaccaaggccgtgtccttcattggggagtacatcaagacctggcggccacgctacttcctcct

SEQ ID NO: 330648 - DNA, 100 bp, Homo sapiens
gtgaggggtttgtactatcctcggtgctgtggtgcagagctagttcctctccagctcagccgcgtaggtccgagtggacagtggcatccaaccaggaagt

SEQ ID NO: 330649 - DNA, 90 bp, Homo sapiens
ctgatgggaaatcagccctggacctggcagatccttcagcaaaagctgtccttacaggaatcccagtcagaagttccagcctgccactgt

SEQ ID NO: 330650 - DNA, 100 bp, Homo sapiens
ttgctacagacaacgtttggatgcaggcctctccttccgatgaaaagagaaaggaagaatggactacagccaccaaacgtccctagtcccatgtggacaa

SEQ ID NO: 330651 - DNA, 149 bp, Homo sapiens
agtggaacagtctctcgacatgccacatacggatggtcatctctgccgtttcttgcgcagctgtcatccccaaaactcatcactgctatatatgcagattatgcccggagtttgaagaacctcggttttaagcagggagcagttctctt

SEQ ID NO: 330652 - DNA, 74 bp, Homo sapiens
ctggatttaagcactgctgcactttatgagactgaggctgatgtgaatccaaaggcctatccccttgccgatgc

SEQ ID NO: 330653 - DNA, 97 bp, Homo sapiens
gtgcaccccggagcgtctggtggcgttgttggggccgcagccgtatcggacactcagggagtcagacagcgcggaaggcgacgaggcagagagtcca

SEQ ID NO: 330654 - DNA, 83 bp, Homo sapiens
gtttcttatatgtgatgccattccagcactggactcatggaggctgagcatttattcagggtatatgagtgtaacaaacgctg

SEQ ID NO: 330655 - DNA, 100 bp, Homo sapiens
agacaagttcagagaatatcatgcttccagtctactgtaaaggatgaacgtgaagccagagaaaatgtgaagagagagcaagatgaggcctatcgccttt

SEQ ID NO: 330656 - DNA, 101 bp, Homo sapiens
gtgcttccctggatggcaaatgctccatcagctgtgatgatgaggttgctgctaacactccaagtatgtactctcaggaactattccagctttctcagtat

SEQ ID NO: 330657 - DNA, 83 bp, Homo sapiens
attttcataaagaaccacatccgtttccccaaattcaacttctccaatacctggagtagaacagaaaaattattatgtctgtg

SEQ ID NO: 330658 - DNA, 75 bp, Homo sapiens
gcttgttatgttttcatcacttctctccagaaggggatcatggaagctgataaagatgacacacaacaaattctt

SEQ ID NO: 330659 - DNA, 100 bp, Homo sapiens
ggactatggcatcaaacagcctcttcagcacagtgacaccatgtcagcaaaacttcttttgggttaatgttggagaagattgtccagtgtttgatggact

SEQ ID NO: 330660 - DNA, 75 bp, Homo sapiens
tgctgtacttcgtctatgtggcgcccggcatagcattgcagtgtcgagatggctatgaaccctgtgtaaatgaag

SEQ ID NO: 330661 - DNA, 100 bp, Homo sapiens
caggagttcgtctcttacgtctgcggaagtgcagctgcctcagttcttagcgcagtgaaagctggtggaatgcgaattgtgcagaaacacccacatacag

SEQ ID NO: 330662 - DNA, 100 bp, Homo sapiens
cctctcgagaggcgcgcgccccgccgagatgtacgagttcctgagttggaggtagaagaagaaacccaagttcaagagatgactttagatgagtggaaaa

SEQ ID NO: 330663 - DNA, 75 bp, Homo sapiens
taggcccatagtcagcagcagctctgagccaggtccagatggctgtggaggccaagtttgtccaggacaccctga

SEQ ID NO: 330664 - DNA, 100 bp, Homo sapiens
ccggaaggctcgcatccaagctgcaaccctctggaccccgaggttggaccctactgtgacacacctaccatgcggacactcttcaacctcctctggcttg

SEQ ID NO: 330665 - DNA, 75 bp, Homo sapiens
tcacacacggtcctaagagctgggcaccaggaagcgaaggctggttgcttatggaaccacagagaacagtcccgt

SEQ ID NO: 330666 - DNA, 100 bp, Homo sapiens
tggagatgaagaagaagattaacctggagttaaggaacagatccccggaggagcatggcggacaccgacctgttcatggaatgtgaggaggaggagttgg

SEQ ID NO: 330667 - DNA, 108 bp, Homo sapiens
gccagaacgacctgatgggcacggccgaggacttcgccgaccagaaacccgggatggacgtggccgacgcctacgtgactttcgtccgccattctcaggatgtcctgc

SEQ ID NO: 330668 - DNA, 97 bp, Homo sapiens
ccgccctcccgggaatcgggagccgccgctgcaggaaatctggcattttttaaagtttgcgccccacaaagaggaaatattccaaaggtactcagga

SEQ ID NO: 330669 - DNA, 83 bp, Homo sapiens
aagacagggcgacctggaagtccaactacttccttaagatcatcccgtttccctggggagatggtaaccatactctattccat

SEQ ID NO: 330670 - DNA, 97 bp, Homo sapiens
ggaaactatgccgcacagacaagctagactttcagcctgacactgtggccaacattcagcagcgtcagaaggtttgggccccatggtatccctgtga

SEQ ID NO: 330671 - DNA, 99 bp, Homo sapiens
ctcctggtggccacgaaggccaaagactccaattaaggaacagctatatcctgcttccttctgtaagcagcatcgacttgtgcaagggttcagtcatgc

SEQ ID NO: 330672 - DNA, 90 bp, Homo sapiens
atggttccttgcaaagggcacgtatagcattggtaaagaacgatcgtccagtggagggccgttgctccagggagaactgcaaatatcttc

SEQ ID NO: 330673 - DNA, 100 bp, Homo sapiens
ctggcggcagcggcggtggcggtggctgagcagaggacccggcgggcggcctcgcgggtcagttttcggctttgtgagaaaccttaccatcaaacacgat

SEQ ID NO: 330674 - DNA, 82 bp, Homo sapiens
gtggagccaccagcagcgggtgggcgacctcttccagaagctgggtggcccagttgaaatccttcccttcctctaccttgga

SEQ ID NO: 330675 - DNA, 50 bp, Homo sapiens
aaagtgatcataggagaaaaccatttcagtactcccctgccctcaacaag

SEQ ID NO: 330676 - DNA, 75 bp, Homo sapiens
tcgccgcgtccttggctggcgtgtggctgaattatatgaagaattgaagactagaatctcacagttcaacatgca

SEQ ID NO: 330677 - DNA, 100 bp, Homo sapiens
cgcccccgtccccgccccgggggccgccgccacccgcctcccaccatggctctgaagagaatccacaagacttttgaatcagctgtgcaagagaatatca

SEQ ID NO: 330678 - DNA, 88 bp, Homo sapiens
gggggtccgggcggcggcggcgggcccggcggcgggccgaggagccgggcgcaatggagcggaagagaatgattacggacctgaagcc

SEQ ID NO: 330679 - DNA, 98 bp, Homo sapiens
tgagggtttcaatgaggtgctgaaacagtgccgacttgcaaacggaaatggacaggctactagcatggtccaactgcagggtgggagattcctgatgg

SEQ ID NO: 330680 - DNA, 100 bp, Homo sapiens
ttgctgtcaatgctggacatggggaccctcttcacattcaggatgacgcaaaacacggtgattgtgaatggagttgctatggcctctaggccatcccagc

SEQ ID NO: 330681 - DNA, 48 bp, Homo sapiens
gtcgctgctgctcgttcgagtcgcagagagaagaagaaggaggttcct

SEQ ID NO: 330682 - DNA, 75 bp, Homo sapiens
ggtgctcgtcgggagtgatcacctaccctacagggaccattgcaatttagagatgtggccatagaattctctctg

SEQ ID NO: 330683 - DNA, 82 bp, Homo sapiens
ctccgcggtccggcccggggccccgggatctcggctgtccttcctcccggatctcattttgcccaacggtggtactccagca

SEQ ID NO: 330684 - DNA, 90 bp, Homo sapiens
cgccctttccacctcgcggcagttcggtcctagcagaagatgtgactcagactgcctctgggtggggctggctggcccacagatcctgcc

SEQ ID NO: 330685 - DNA, 83 bp, Homo sapiens
cgtcggacctgcacgagctgtctggtgtcccgacccaggctaagcttgagcatggctgagcaggagcccacagccgagcagct

SEQ ID NO: 330686 - DNA, 100 bp, Homo sapiens
tctacaccatctgtggtcatgtcaacagtagcacaagcaacttgagttggtggaaccaagtggctggattcatgttcccttaactgacaatcataagaag

SEQ ID NO: 330687 - DNA, 100 bp, Homo sapiens
gaagcacctggatgagacatttgctacagcatcccacattaagtcaacggtgattgaattactcagatatgaagatcatcatctaggttttgtgtaaaag

SEQ ID NO: 330688 - DNA, 88 bp, Homo sapiens
cagctctgcagccacatactatccgtttgttcaggaaccaccagtgacagagaagcagtcaattatagatttcttcaaaccagcttca

SEQ ID NO: 330689 - DNA, 100 bp, Homo sapiens
caccgaccagccgcacgccgaccggcgccgggagatcctgggaggcaagtgaggcctatctggttggcctttttgaagacaccaacctgtgtgctatcca

SEQ ID NO: 330690 - DNA, 100 bp, Homo sapiens
ggagccctgggcgcgggggcggcgtgtcaggtggttgcggagctggtaagaagcatcagatggtgaaggagaaggagacacagaagtgatgcagcaggag

SEQ ID NO: 330691 - DNA, 51 bp, Homo sapiens
cccagcactgatgatattataaagaccgtataatagacgctggccccaaag

SEQ ID NO: 330692 - DNA, 74 bp, Homo sapiens
tgttgatacctataccaaccgtttaaggtggtctcatggattataaccatttggatatttggttcactaacaat

SEQ ID NO: 330693 - DNA, 90 bp, Homo sapiens
attaccatggcgaggagtctctgtccgggggcctggctaaggaaaccctattacctccagatcgtcagtatttaaacagatcacatcatg

SEQ ID NO: 330694 - DNA, 83 bp, Homo sapiens
caggtcttgggaggattaagtgaggggacatgagattgttgccagcaaaggaggttttgaaatggtcaccaaagagaagaaat

SEQ ID NO: 330695 - DNA, 100 bp, Homo sapiens
ggcagcaggcgctgctgcagcactggagcgagtacatcaagaggcggggtttcaccatgttgcccagactggtcttgaactcctgagcttaagcaatcca

SEQ ID NO: 330696 - DNA, 97 bp, Homo sapiens
cataataattcagatggagaatatatggctggacagctagctgcttatggctataaaattacagcactatgggactgagtaacattctctttgtgat

SEQ ID NO: 330697 - DNA, 75 bp, Homo sapiens
acctccgtgaaggcgtccgtcctgcgcatcgcagatcttagtaagagccctaagaccatgaaaaagctgctgccc

SEQ ID NO: 330698 - DNA, 97 bp, Homo sapiens
tggtggccaccaatgacgtgggtgtcaccagtgcgtcgcttccagccccaggatgtagatgatcccctcttggatatgaagactccagtcctctttg

SEQ ID NO: 330699 - DNA, 97 bp, Homo sapiens
aaggtctctcgcgggcgggagaacggaaaactcccaacttcctgaccaaccctggaatggtccccagccatggattcagtcccagatcttatttctt

SEQ ID NO: 330700 - DNA, 75 bp, Homo sapiens
tttcatcattactaacaggatattcctcatgacattgctgtctgttacagcagatgaatggaacagcaaccatac

SEQ ID NO: 330701 - DNA, 80 bp, Homo sapiens
aagggcgggccagaggtggtagcatgccagcatttagtatgagaacctatgtttgccatatttgtagtattgcttttaca

SEQ ID NO: 330702 - DNA, 98 bp, Homo sapiens
tcatcatcaccatcagacactgatggcccagtgggaggcctgggaccctgaagagagcccagctgttacaacttctaaatgggaattatttgaccagc

SEQ ID NO: 330703 - DNA, 75 bp, Homo sapiens
cccgccgaggatgcgacgcaccgcagaatgattacggacctgaagccaaagaacaagatgcgctagtggacagat

SEQ ID NO: 330704 - DNA, 100 bp, Homo sapiens
tgttcgccaacacctgcgaggagtgtgggaagcccatcggctgtgactgcaagacggcaaatggatacatcttgttttttcatattacatctacaagagg

SEQ ID NO: 330705 - DNA, 100 bp, Homo sapiens
ggactcttcttcgccttcgagcaagtgaaccggagcaaacgacttccgatccagtctgcgctgttgcggctcccgtttgggatttgatttgcagcatctt

SEQ ID NO: 330706 - DNA, 50 bp, Homo sapiens
ggagcatcccaggacctaccagaatctggcattatccaattggtttgcta

SEQ ID NO: 330707 - DNA, 75 bp, Homo sapiens
gaatctctcaggctgcatcaggatgaatgatgacccaagtatggaagtatgatctcgtgaaatcttgagagaaac

SEQ ID NO: 330708 - DNA, 83 bp, Homo sapiens
acagctgctcccttcgccttcgccctttccacctcgcggcagttcgattcttcgctgctgctgccttaccgccgagaaccacc

SEQ ID NO: 330709 - DNA, 96 bp, Homo sapiens
ggactttcaagatgggaccaagagtttttggccacttcagcctccgctccgaatggcaattggtgaaagtggactacaaatctatcttcagccggc

SEQ ID NO: 330710 - DNA, 89 bp, Homo sapiens
gtgaagggattcaggatatacggtgcaccttgatacaaggacagagcggggccgagtggcccgccctcctgccctgatgctgcgggccc

SEQ ID NO: 330711 - DNA, 90 bp, Homo sapiens
ctcttcccggttccgggctcagggctcgttctggtctgcctagtcctgggattgaaccagctgccctttgaccctgctaacaacaacgag

SEQ ID NO: 330712 - DNA, 100 bp, Homo sapiens
cccctagctttctccttctggtgtggggcccgagggtgaatcatttgatgtaaaagacttgactccataatctgcatctgtcctaatgctgtcatctgga

SEQ ID NO: 330713 - DNA, 74 bp, Homo sapiens
gccagtggtcacagctggatgtttgcgacatcccagagagcttccagacagtccggagtaacactggccagaag

SEQ ID NO: 330714 - DNA, 75 bp, Homo sapiens
aaaccaaggggcagacccaaaaaactgggtcctcactgagcagcgagtcgtcccccgtgtcctctccggccacca

SEQ ID NO: 330715 - DNA, 75 bp, Homo sapiens
atgactattttttggagaggcctgatgcccgaatttcaggattatatctgtccaagatgcgagtctggttttatc

SEQ ID NO: 330716 - DNA, 98 bp, Homo sapiens
ggcatgtcatctttgccaggactgatgcagatgcccctcctccaccagaggactgggaggagcatgtcaacagatcatgaagactatgatccacaaac

SEQ ID NO: 330717 - DNA, 105 bp, Homo sapiens
ttgtgccaatggttggaaacaatccatatgcgaccacagaaggaaattcaacagaacttagcataaatgctgaaggcatttcagaagatggacacaaagaagaag

SEQ ID NO: 330718 - DNA, 50 bp, Homo sapiens
gctgtgcttaaagcctgggcagagagagttggaaactcaactattggaac

SEQ ID NO: 330719 - DNA, 75 bp, Homo sapiens
gtatcgactcctttgttactcactgtgttcgggttcgagaacttgtcttggacaattgcaaatcaaatgatggaa

SEQ ID NO: 330720 - DNA, 83 bp, Homo sapiens
ggagacatgacaacacagtatatgccacagtatcagtcttcacaagtctatggagatgtagacaaggtcctgaaggagaagag

SEQ ID NO: 330721 - DNA, 83 bp, Homo sapiens
attacaggcacccgccaccatgcccgactaaataggctcatcatatgcccgaagctcagtggttacggctgtgaaatttacaa

SEQ ID NO: 330722 - DNA, 99 bp, Homo sapiens
ttaagttcaaacgaataggtgttccttctgcaacagaaataataaaagcttccagcaaagatgccatcagctttcaagatgttagaaagttcaagccag

SEQ ID NO: 330723 - DNA, 73 bp, Homo sapiens
ggccggggcctggggctgcctgccgggcggccgggcgcggcgagcccagatgatgaggagtctgatgaggaag

SEQ ID NO: 330724 - DNA, 98 bp, Homo sapiens
gcggcggcgccatggcagggcttgcaggacatggacatcttccagcaacagatctcgagaagacagctggctaaaatccttatttgtccggaaagttg

SEQ ID NO: 330725 - DNA, 76 bp, Homo sapiens
cgcatttccattatgagaatgttgagttcggcagcatacaggtaaactcgggggccaggactcttttgaaagcata

SEQ ID NO: 330726 - DNA, 50 bp, Homo sapiens
agagaacttcttatgaatcaaaaaaggatatggaatattatcttgtaaaa

SEQ ID NO: 330727 - DNA, 107 bp, Homo sapiens
tttcttggcccttgttcccccaaatgtctgactctgactctcggactgagaaacgcaagccctgggcgctgcctatggcacagccaagagcggtaccggcattgcgg

SEQ ID NO: 330728 - DNA, 75 bp, Homo sapiens
ggcaggtgacagtctgcatgtgcagttttcaggaagatgttaccgagtacttcagtgaattccttagtgcagggg

SEQ ID NO: 330729 - DNA, 72 bp, Homo sapiens
agaagagattgcctttttgaagaaactccacgaagagtccccgcccagagaagggagccagggggagctgac

SEQ ID NO: 330730 - DNA, 75 bp, Homo sapiens
gattatatcgcatcctatggctcaaagaaagatgattatgaagccctcctatgacactgaaacagatcctagtga

SEQ ID NO: 330731 - DNA, 50 bp, Homo sapiens
ggcatttgttacttttatccttcccagaagccagctgaagatgagtgggg

SEQ ID NO: 330732 - DNA, 100 bp, Homo sapiens
gaggaagggccacgccggcgatggaggcggcggcggcggactggcggacaaaactgtgtggagttttatcctatattcataattacattgtggatggctg

SEQ ID NO: 330733 - DNA, 76 bp, Homo sapiens
agagatggaacccgaagaagaaaggattcgttacagccagagattggtgatttgaagatattaaagctagaaattg

SEQ ID NO: 330734 - DNA, 83 bp, Homo sapiens
gccggcgacttgagtgacgaatagcctgggctggaagctcttctacgtcacaggctgcctgtttgtggctgtgcagaacttgg

SEQ ID NO: 330735 - DNA, 50 bp, Homo sapiens
attacatccagcagccagaatgatggcctgtgagtatctgtctgtggaag

SEQ ID NO: 330736 - DNA, 75 bp, Homo sapiens
gtcagagggcttttactcctacctgtgtaccgagccagggcagagcggcttgggtaaatccaccttaatcaacac

SEQ ID NO: 330737 - DNA, 74 bp, Homo sapiens
agccgatccagcctgcggagcctgtggggcaggctggtgtacagggagcaacaccggagctggtgcacgctggg

SEQ ID NO: 330738 - DNA, 96 bp, Homo sapiens
aattcaccagcccccgaggctcccaaacttggacgttcatggtccaggtgcaggtacagcagtctccgcaacaggtctcggctcagctctccccac

SEQ ID NO: 330739 - DNA, 50 bp, Homo sapiens
atgggccacatgcagtttctctcagggttacacatcattttggaatgact

SEQ ID NO: 330740 - DNA, 90 bp, Homo sapiens
gttttccagagatgcaaaaatgcaccctactccagcatcgcaccccaagaaaccaggttaatttggagtggcccctggagtcagtttcct

SEQ ID NO: 330741 - DNA, 74 bp, Homo sapiens
gggactgccacgtccaagcaaaccgggaaaggagaggatcccggagccgggaatagaacgtgtccgggctgtgg

SEQ ID NO: 330742 - DNA, 85 bp, Homo sapiens
agtctgccagacaatagagcatatggactaagaaaaatggctttgtcagcccaacagatacccagatggtttaactcagttaagt

SEQ ID NO: 330743 - DNA, 83 bp, Homo sapiens
aaggaggcaaatgaaattctgcagcgcagcaagaagggagccggacctacgacatgatccagtactatcagaatgacatcccc

SEQ ID NO: 330744 - DNA, 50 bp, Homo sapiens
aagggtgttcccgaactagagtgggaatctttgtctgaagtggaagaaaa

SEQ ID NO: 330745 - DNA, 100 bp, Homo sapiens
ctgctgctgccgctgccgccctgagtcactgcctgcgcagctccggccgcctggctccccatactagtcgccgaatgatatggaacctagcaaagctgtt

SEQ ID NO: 330746 - DNA, 51 bp, Homo sapiens
ttctttgagactgaaatggcagggaaatcctcattgacgattcaatttgtt

SEQ ID NO: 330747 - DNA, 98 bp, Homo sapiens
aattacaagaattaggagcttatgttggctttaaaggagatagatgaagttggggacctattgcagctgaagtattcccgtcatcggttggtacctct

SEQ ID NO: 330748 - DNA, 75 bp, Homo sapiens
cctcacttaaggagcgagggaggcctcgggggtccccagccggcccgagcgggaagaagttccgcagcaagccgc

SEQ ID NO: 330749 - DNA, 100 bp, Homo sapiens
ggaccatggccactgactcatgggccctggcggtggacgagcaggaagctgcggctgagtcggcaggagtagggctgattggagccattgtacagtgtcg

SEQ ID NO: 330750 - DNA, 50 bp, Homo sapiens
tactcccagatgcatccgtgtcatcattcgggctaaagttaaagagataa

SEQ ID NO: 330751 - DNA, 71 bp, Homo sapiens
ttgtggaagatggcgcctgttgtgacagggttgcttatggaaccacagagaacagtcccgtgacattcgcg

SEQ ID NO: 330752 - DNA, 75 bp, Homo sapiens
gttctgacggataatttccaagccagcgctgataaagcagtttgtgtccgacgtggcctggggggagctggacta

SEQ ID NO: 330753 - DNA, 100 bp, Homo sapiens
catcgttaaagtctctcttcaccctgccgtcatgtctaagtcagaggaacctacaagcagcaattggcgcctattatgactttgagagcccaaacatcag

SEQ ID NO: 330754 - DNA, 75 bp, Homo sapiens
gctgaccgaggcccccctgaaccccaaggccaaccgcgagaagatgacccagatgaccccctagtgccagagatt

SEQ ID NO: 330755 - DNA, 100 bp, Homo sapiens
tggcaaagcaaaaacagttgttagaacttcagcagaaaaagctggagcttgagctagagcaagctaaggcacagttgatctcactgatgaaaaggcctcc

SEQ ID NO: 330756 - DNA, 75 bp, Homo sapiens
tctgcagttgaatctgacaaagatcgaacagttgtgctcaggagaccaagacacattccaccccagtggggggtc

SEQ ID NO: 330757 - DNA, 75 bp, Homo sapiens
ccggcaactccagggtgtctggtccacgacctatcctaggcgccatgttgttagagttggaagcttggcagttgg

SEQ ID NO: 330758 - DNA, 100 bp, Homo sapiens
tccaatgggcctttccagcccgtggtccttctccatattcgagtctgaaccggacggcttttctcatttccacttgtacgtgtgcgctgcttttctcgtg

SEQ ID NO: 330759 - DNA, 100 bp, Homo sapiens
tgccattattgcttcagaaacagcaagaaatagcatctattacggagcagcttatgactactggtaattgggatacttctggcagcgaactgagtgaagg

SEQ ID NO: 330760 - DNA, 101 bp, Homo sapiens
agtgtaatgctgtccgccaggccctgcaggacctgctttcggagtacatgggcaatggtgctggtcaagataaactaggaatctatgtgaagtcggttgtg

SEQ ID NO: 330761 - DNA, 100 bp, Homo sapiens
ctgcggattgctgatgcccacttggacagagtgggctgttgataatcaggtgtatgtggccacagcctctcctgcccgggatgacaaagcctcctatgtt

SEQ ID NO: 330762 - DNA, 51 bp, Homo sapiens
aaagaaatgaaaattgcactttacaagttttggtatcaggatgacgctggc

SEQ ID NO: 330763 - DNA, 87 bp, Homo sapiens
acccggagaggccgggacgtcccagggacctcctctcggtgaggggctgtccccagcacagtccagaagcgtgagctggtgaatccc

SEQ ID NO: 330764 - DNA, 75 bp, Homo sapiens
tccgccggctactgccgcttcagttctcccggtgtggccacgagtcggccacataaagaagatccctaatagtca

SEQ ID NO: 330765 - DNA, 91 bp, Homo sapiens
cacctacagcccaggtggttggcgtgcttaagattcagacatttctcttgggaagttgtgcatctgacaggaatatagtactgtacgatat

SEQ ID NO: 330766 - DNA, 100 bp, Homo sapiens
tgactgcaacctgttgccaaagttacacatagtacagatttcaggtatgctgctgaaagtgggaatcctctacattggtgggcagctggtgaccagtggg

SEQ ID NO: 330767 - DNA, 85 bp, Homo sapiens
aagcactgctgcactttatgagactcacagatgaatgcttctcacccggaaacaaacttgccagttgggtatcctcctcagtatc

SEQ ID NO: 330768 - DNA, 75 bp, Homo sapiens
ccaacagccgagtggatatgggtctcatggatacaacactggcagagacccgtgctgagtttgctgagagatcgg

SEQ ID NO: 330769 - DNA, 90 bp, Homo sapiens
ggaccacccttacagtgctgcctgaaggcttctctattgactcggggaaaggtctggtgcgtgcagaagagctgagctttgtggctggag

SEQ ID NO: 330770 - DNA, 90 bp, Homo sapiens
ggccagaaagttgttttcaaacctaagcgtaatctcaggggcgatataatcaatgaggtggtcctaaagttgctcaaggctggatggtcc

SEQ ID NO: 330771 - DNA, 98 bp, Homo sapiens
ggctggaggagccgccgagcggagacccgggagcaggagctgggcctaggtctgcgccctgtacggcaagaagaagctgaaatacctgccctacaatc

SEQ ID NO: 330772 - DNA, 88 bp, Homo sapiens
tctcaagctcatattttgaagtgtttacggcatggtaagacacaaggatggtggctattccgaggaagaggacgtgaagacctgtgcc

SEQ ID NO: 330773 - DNA, 75 bp, Homo sapiens
gcaaggctgagggacgagaacgagcaatgtctcaggctgtgcagacaaacggaactcaaccattaagcaaaacat

SEQ ID NO: 330774 - DNA, 75 bp, Homo sapiens
gacttccttgtgaaacctcctagtagaaaaagttcttgggacaaacttcatttgagtgaattactggaactgaaa

SEQ ID NO: 330775 - DNA, 90 bp, Homo sapiens
tggacacactgaaacagaagaagcttgaggaaatgactcggactgaacaagagggttggccttggggaggcactattagaggctgaaact

SEQ ID NO: 330776 - DNA, 50 bp, Homo sapiens
ccgggatgagcgcacggacggatatgtcttgtcgttcaagacttgcaaca

SEQ ID NO: 330777 - DNA, 82 bp, Homo sapiens
cctcagtacgccacctactattacccccagtatctgcaagccaaggttacaggaggttccagtggcatcgggaagtgcattg

SEQ ID NO: 330778 - DNA, 100 bp, Homo sapiens
ggccagcagcctggtgcctcccagggacagtcattttgtttactcattcagccctgttgcaggtcccaataaactcttcataaggttgacagaagcaccc

SEQ ID NO: 330779 - DNA, 88 bp, Homo sapiens
gcctgttcgtcacgttcccgcagggcagcaggagcgtggatatctggctccgagtgcttggagcccaggatgtgcgagttcaagtgct

SEQ ID NO: 330780 - DNA, 89 bp, Homo sapiens
tcattgacgattgcattggtaactggtggagaccaaattttgaacctcctcagcttgaaattttgacaaacttggcaaatgaagccaac

SEQ ID NO: 330781 - DNA, 75 bp, Homo sapiens
ttaacttccgacgcttcacgacagccagtgacgtctggatgttcggaattaaggataacctagacgacataaaga

SEQ ID NO: 330782 - DNA, 75 bp, Homo sapiens
atcaacatgggcaatgagaacagcacctcggacaaccaggactttttttatgaagacatggagtccttgacgcag

SEQ ID NO: 330783 - DNA, 73 bp, Homo sapiens
cggtgtggggcggtcccggccccgcaggttcatctgcagaagccagcggacgcctctgttcaacttgtgggtt

SEQ ID NO: 330784 - DNA, 82 bp, Homo sapiens
cgcggcgctggagagagacaagatgtccgccagagctgcggccgccaagagatccgagaggccttcaaggtgtttgaccgtg

SEQ ID NO: 330785 - DNA, 98 bp, Homo sapiens
ggcccgcctggcctgcagcgctcccacccccggcggcggcacgatgccctttgacttcaggagctgacaacagctgtttgagacctattgatagaaat

SEQ ID NO: 330786 - DNA, 82 bp, Homo sapiens
ccctcctcctgaggcaccacgtctctaccgagcacaaactccacgaagccaacgcccaggtgacttaagagattaaaattaa

SEQ ID NO: 330787 - DNA, 76 bp, Homo sapiens
ctgaaagactttctccttggagaacacttattattggttggcaaccagttactctttcaacctgatcagaacgcac

SEQ ID NO: 330788 - DNA, 100 bp, Homo sapiens
caggggcgtgttggccccgcacagattgagccgagttgtcgccccgctgggagaagtgaccctcctgcgcctggtaagaatgattgatgttggctgatat

SEQ ID NO: 330789 - DNA, 100 bp, Homo sapiens
gaatgccaaaatcagcagtctcctggaggagcagttccagcagggcaagcttcttggtttgggtacccagaccccacctacctgacccgggtgcaagagg

SEQ ID NO: 330790 - DNA, 75 bp, Homo sapiens
tggaatcaaagataaatccaaatactgcatatcagaaacaacaggttggattatctcaagatgcccaggatcaaa

SEQ ID NO: 330791 - DNA, 88 bp, Homo sapiens
caaaatgtacagcgtgtcaagagagcatcgttaaagataagatcaacaagttggagaaagctgttgctgcagcacacaccttcttcgt

SEQ ID NO: 330792 - DNA, 98 bp, Homo sapiens
atgacaatgtctttgttccaccagagtcattgcaggaagtggatgagttccacctcattttagagtatcaagcaggctactgctttacaaaaccagaa

SEQ ID NO: 330793 - DNA, 80 bp, Homo sapiens
acgatgaaccatccctagccaatggagcattcatgcccaaattctgctcctaagtgtaggagagaacttggtgcctcttc

SEQ ID NO: 330794 - DNA, 100 bp, Homo sapiens
gcgatatggaagaggagggcaagaagggcaagaaggcgaccatggccttgctgggtaagcgctgtgacgtccccaccaacggctgcggacccgaccgctg

SEQ ID NO: 330795 - DNA, 83 bp, Homo sapiens
ctcgtggcggcggggaccgtccagcccagcgattctcagtcaggttatgaagacagtatggagtttccagaccatagtagaca

SEQ ID NO: 330796 - DNA, 75 bp, Homo sapiens
caagcagttcagaagagccaaggaataaacatgcaatgaacccaaaaggggtctccttttgtgaatgcaattatc

SEQ ID NO: 330797 - DNA, 83 bp, Homo sapiens
cctcagcgactcttctgacctccgcgcgacgtacccgccgccgccgttggctggaggtttttagaacttcagccataaaaatg

SEQ ID NO: 330798 - DNA, 82 bp, Homo sapiens
cacgagcgccttcctcttcctcggcggaagttctactacatcaccctgctacgagaccccgtgtcccgctacctgagcgagt

SEQ ID NO: 330799 - DNA, 100 bp, Homo sapiens
ctcggatagtgggctctgtagaattcgacagtatggatacttttgtggaactctatgggaacaatgcagcagccgagagccgaaagggccaggaacgctt

SEQ ID NO: 330800 - DNA, 83 bp, Homo sapiens
attctagcgccttccagaccctggagaagtatgacctggagagggatctactggtccgcgggagagctgtggggcttggtgag

SEQ ID NO: 330801 - DNA, 100 bp, Homo sapiens
ccgccgagctggacccggaccggttttgggaaacccggggatggcgtggagttctttgcccacatgcgcctcatgctgaagaagggggaaggcagacagg

SEQ ID NO: 330802 - DNA, 50 bp, Homo sapiens
aaccattacaagatatacaatctctttatagcaggccaaatcgactcttg

SEQ ID NO: 330803 - DNA, 82 bp, Homo sapiens
ggaagtcagctctttggaactacgcactgttgcaagaattcaattccgtcttcctgatggttcttcctttacaaatcagttc

SEQ ID NO: 330804 - DNA, 82 bp, Homo sapiens
ctcagttggaagcagccgatccagcctgcggagcctgtggggcagtgattacagtggcgagatcttgaacaactgctgcgtc

SEQ ID NO: 330805 - DNA, 101 bp, Homo sapiens
ggaggattcagggaataggagctggggagcccttctgcgccacaggaactcgtgtccctgaagccttgtaaagctgcggagctggttgccacccacttttc

SEQ ID NO: 330806 - DNA, 75 bp, Homo sapiens
gatcgcaggctccctgcctactcccccaccggggatttcaggagcaggccgggctctcgccatgggtcactgtcg

SEQ ID NO: 330807 - DNA, 100 bp, Homo sapiens
gcggttgtctgtggccggaggctgatcaggttcgttccaccagtcataaaccagatgaaatctatggcatgattgaaagactatctcctggcactcgcaa

SEQ ID NO: 330808 - DNA, 50 bp, Homo sapiens
tgtatgagaaggacaacacctacttaggatgaaaatttacaggaattcgg

SEQ ID NO: 330809 - DNA, 50 bp, Homo sapiens
ccaacatcacgcccttcggcgccgaccagagcctgccttctggtacaaga

SEQ ID NO: 330810 - DNA, 83 bp, Homo sapiens
cgcagccttgggcctcgcgccggctatggccgtgccctggggctgagccctcagatctgactgcagccatgagcagcaatgag

SEQ ID NO: 330811 - DNA, 74 bp, Homo sapiens
gccctgagtctttgggggcagcctgcagaggctgcgggtcgctatggcaactgcatcttctcaagttctgattc

SEQ ID NO: 330812 - DNA, 83 bp, Homo sapiens
gtggcctctgggcaccttttgaagacaatgcagatcttcgtgaagactctgactggtaagaccatcaccctcgaggttgagcc

SEQ ID NO: 330813 - DNA, 75 bp, Homo sapiens
tcccccgagggtcaacgagaaagagatcgtgtgtaacggaataggtattggtgaatttaaagactcactctccat

SEQ ID NO: 330814 - DNA, 75 bp, Homo sapiens
ccgtcctgcagcacccgccgctgtcgccgaccgcccgcacatccgtcggataacggcaaaagcttctatcatttt

SEQ ID NO: 330815 - DNA, 96 bp, Homo sapiens
ccaaggcccccaagccctccttcgtgtcgtacgtacgccctgagcggcgtcttcgacatcttcggaacattgctgcccggaacattgttaatagaa

SEQ ID NO: 330816 - DNA, 75 bp, Homo sapiens
gagccagaggccaactgcagaggaactggaacagaggaacattttgaaacgttactcactataaacaatatccac

SEQ ID NO: 330817 - DNA, 96 bp, Homo sapiens
aaaacagtattccaaagaactcggagatgcctggaatacagtaagataatgtatccagtgctgagggttggcatgtaaatgtgaccttgaatattc

SEQ ID NO: 330818 - DNA, 100 bp, Homo sapiens
ggaaaaggaagtcaccaccgtggcctgcgacggacatccaggcagaaattgatgcccacaatgacatatttaaaagcattgacggaaacaggcagaagat

SEQ ID NO: 330819 - DNA, 89 bp, Homo sapiens
gccgcaagtacccgtccatcatagtcaactgcgtggaagagaaggtgcactacatcctccaggaggtggtgatgggtgggatggtgttg

SEQ ID NO: 330820 - DNA, 90 bp, Homo sapiens
atcgaaaggggttgattttgaatcaagtgagattgaggaaactcggcttaacattgacaagatctcagaacatgtagaggaggctaagaa

SEQ ID NO: 330821 - DNA, 100 bp, Homo sapiens
agacggaaagagctacttgctgagttggtgttcgaggaagagacattgttgttcttggtgtggagaagaagtcagtggccaaactgcaggatgaaagaac

SEQ ID NO: 330822 - DNA, 50 bp, Homo sapiens
gacaaagaagatggctgcttctatttcagaaggccaatgatgaggccaat

SEQ ID NO: 330823 - DNA, 51 bp, Homo sapiens
gatcttccagctcccctcacccaacgtcgttttaagctatgaagaaggaca

SEQ ID NO: 330824 - DNA, 101 bp, Homo sapiens
ccgctttatcatccttgtgtatgtactggcagtattaagtttatccatcaagaatggatccggatcacctgtttgaaaccatctcccaagccatgctgaat

SEQ ID NO: 330825 - DNA, 134 bp, Homo sapiens
aaccgagctacttcaacggaaactagctcatctgtagagactgatttgcaacccttccgggaagccatagctctgcatgcgggagatacagatgacccaccaagaattactcagaaccctgtgatcaatgggaa

SEQ ID NO: 330826 - DNA, 100 bp, Homo sapiens
ctttaccgcaattatggcatcctggccgatgccacggagcaagtgggccagtggcaccctgtgctgcgcacactaaagaaccgcattgaagagaacactg

SEQ ID NO: 330827 - DNA, 100 bp, Homo sapiens
aagagttctgcgttttgccagtcacctctcaactgtgtgccaaaggatggtgatgggaatctttgcaaattgtatcttctgtttgaaagtgaagtactta

SEQ ID NO: 330828 - DNA, 48 bp, Homo sapiens
tcgaccattccaaaaaaatcggataaaagaatcagagtgtctcaaccc

SEQ ID NO: 330829 - DNA, 82 bp, Homo sapiens
cgacgagtacgactacctattcaaagattggtttatcttggaagctaaagggcattgctcatcctgaagatcagctgaccat

SEQ ID NO: 330830 - DNA, 82 bp, Homo sapiens
gataaatcagtgctgctttctttaggacgaaaggcatggccctttcggtgttggtgctcctgcttctggctgtactgtatga

SEQ ID NO: 330831 - DNA, 74 bp, Homo sapiens
gcaaaccggggtctccctcccaggacacaggagtcaaggacagtcattttgtttactcattcagccctgttgca

SEQ ID NO: 330832 - DNA, 90 bp, Homo sapiens
ccttgcattgcttctatatttccaattgagagaaaaggcagaagtcaattcatctggaaagactatctctgagtcagacttaaaccactc

SEQ ID NO: 330833 - DNA, 82 bp, Homo sapiens
caatgcctctgttcaaactcccagaacatacatatgatagttgagaaagacacatattctgatcatgaagaaataaacacaa

SEQ ID NO: 330834 - DNA, 99 bp, Homo sapiens
cctcactgagaagtattttgctctgcgaaacatcatccagaagcctgctctctctttccgaaggccccaccggcttcccggatggagcccgcgccccgg

SEQ ID NO: 330835 - DNA, 100 bp, Homo sapiens
gaagagcttctcctcatcaactggggatgattacagttcttcctaaaaaaggaaggaattttacagaagctacagagaagtgttgagcaagaagaaaata

SEQ ID NO: 330836 - DNA, 100 bp, Homo sapiens
cgaagactgcatcgccaagatcatgagagctgcttttgcacattttcctgaactctatgattttgccctctcaaatgtggcagaagtagatactcgggag

SEQ ID NO: 330837 - DNA, 75 bp, Homo sapiens
ggagctgcgcgaagccggggcggagcacgcgagctatgtactatgcaggatgacatttttattctccatgagcaa

SEQ ID NO: 330838 - DNA, 100 bp, Homo sapiens
agcgccggttccttgcggtcaagatgctgcaaaacgtgactccccacaataactgagctgactgctgcccactttggaggaggcggtgggctccttcaca

SEQ ID NO: 330839 - DNA, 82 bp, Homo sapiens
ctaaacatagttttggaactagcagatgctggcgacctatccagaatgatcaagcctgcaccagcatggactacttttagag

SEQ ID NO: 330840 - DNA, 74 bp, Homo sapiens
cctggacaaggatctgcaaattgaagtgcaggtctatgtgctctctctatcaaccattccaattcttacctggc

SEQ ID NO: 330841 - DNA, 83 bp, Homo sapiens
ccattatttatgtcatcaagaagaatgacgatgcacttttccagccattaactccaggctctcgagaatttgaagatgttgta

SEQ ID NO: 330842 - DNA, 100 bp, Homo sapiens
aacagaaagatggaaattaagcctttgcaatttgaaattatgattgacagacttgaaaaagccagttctaatcagccagaactgtgtagatgcgtacccc

SEQ ID NO: 330843 - DNA, 75 bp, Homo sapiens
cgagcataagaagcggaaagctaaggaggcagccccagccccacccaccgaggtgaggacgcttgagcggaagtt

SEQ ID NO: 330844 - DNA, 90 bp, Homo sapiens
ggaggacgcgccgcggccaggcagggaggagaccggcacccagacaggtggcgaaggcagaggactgtcttgtcgacggtctcactgatg

SEQ ID NO: 330845 - DNA, 100 bp, Homo sapiens
aaaggctttgtctagacaagaaatgcaggaagttcagagttctaggagtggaagaggaggctgggctgggcgagtatctcttcgaaaggctcactctcaa

SEQ ID NO: 330846 - DNA, 83 bp, Homo sapiens
agagaagctaactgtagaacacatcaagcatttatgcgggaactgtggctgcaccatctgtcttcatcttcccgccatctgat

SEQ ID NO: 330847 - DNA, 100 bp, Homo sapiens
cctgatggtaggaggcagtagttccccgcttcccttccgcgggagggagagttaggatgagctcaggtttctacaaaaatgtggtgaagattcaaaagca

SEQ ID NO: 330848 - DNA, 74 bp, Homo sapiens
attcagtgcagctttactcaatcaggatcatgcctagaggatggccaaaagcaagttatggttagtgaacggac

SEQ ID NO: 330849 - DNA, 75 bp, Homo sapiens
tgggccgccgaatctccggccgaagagcggcggcggcagcggcgtccacaggtcctggctaccctgggaagagac

SEQ ID NO: 330850 - DNA, 83 bp, Homo sapiens
cctcaggaatttatggtcgcctttttgaatgagcaattctgtggtgttcttggtcacacatttatggagtttctgaagggcag

SEQ ID NO: 330851 - DNA, 75 bp, Homo sapiens
tggaccacaaaccgctgccagaaaagttacagtcccaccatttgttgatcctctgtttcaaagacagcaagaggt

SEQ ID NO: 330852 - DNA, 100 bp, Homo sapiens
cagaaataccagtccccagtgagggtgtacaaatacccctttgaattaattatggcttttggtggtaatccatttgcttccttggtgagcaatacatcct

SEQ ID NO: 330853 - DNA, 100 bp, Homo sapiens
gtccgctccatgcccatccgcaaggacgacgaggtccagggtcctatcggtggtgctaatagagatatttctattctccagtgccacggggattgtgacc

SEQ ID NO: 330854 - DNA, 100 bp, Homo sapiens
caaggctgagatctcttttgaggaccgcaaggacggctcctgtggtgtggcttatgtggtccaggagccagcctccgtccgctaagtatggcgggcggca

SEQ ID NO: 330855 - DNA, 75 bp, Homo sapiens
tcgacaccaaccccttcgcggacccagtggatgtaaaccccttccagatggacaagaggaaagacccttcttccg

SEQ ID NO: 330856 - DNA, 95 bp, Homo sapiens
taaaaacaatagctcaaggaaacctttccaacacagatgtccaagctgccaacctgatctagttgaatctgaagatgtggacctgctgatgaaga

SEQ ID NO: 330857 - DNA, 75 bp, Homo sapiens
gagcgcccatatgggggttctggagagcggggtgtgggctgataggaagatgtcttcaggaaatgctaaaattgg

SEQ ID NO: 330858 - DNA, 102 bp, Homo sapiens
catcttgtgggagcaaaaccaacgcctggctcggagcagcagcctctgagggggatatgagactttctactcggaatatcctgagtgttgcgtggatgtaaa

SEQ ID NO: 330859 - DNA, 82 bp, Homo sapiens
actaaacatagttttggaactagcagatgctggcgacctatccagaatgatcaaggaaactctgctcttaaagacaaagaag

SEQ ID NO: 330860 - DNA, 90 bp, Homo sapiens
ggttgccggggcaggggcggaggcggaggcagaggtggaggcgctttgaaaggtgtgagcctcagcagcgatttcattgctggcttttgt

SEQ ID NO: 330861 - DNA, 73 bp, Homo sapiens
gagtccgccccgtgaggagaatgaaagcataacccctactgtagaactaaatgcactgtgcatgaaacttgga

SEQ ID NO: 330862 - DNA, 120 bp, Homo sapiens
ccgaaaacggaagcgcagggagaaggaagaggtgtttgaaaagcccttgccagcatccagccatgggggatatgaaaaccccagattttgatgaccttctggctgcctttgacatcccag

SEQ ID NO: 330863 - DNA, 80 bp, Homo sapiens
gcagcaaacagcacacagtctttcctgcgaaaggatcaagggataaaccatgtaatctcaggggcgatataatcaatgag

SEQ ID NO: 330864 - DNA, 82 bp, Homo sapiens
ttggagtgtagaggtattgccaagtgactcagtttccaacatggctagatccatcagaaactgaagccgtggagaacgctct

SEQ ID NO: 330865 - DNA, 99 bp, Homo sapiens
ggcaagatggtgttggaaagcactatggtgtgggtatcaaaaagccattcacagaggtcatccgagccaacatcggggacgcccaggctatggggcagc

SEQ ID NO: 330866 - DNA, 83 bp, Homo sapiens
gagccagcccgccagcatgccccagtccaaagcacatgattaagtaccggtacatcccgttcacacatgggaagagaaggtac

SEQ ID NO: 330867 - DNA, 98 bp, Homo sapiens
aagactcgaaggcagcacaggacctggaaaaattacatggattgtgtgcacactctgcattccagggacacgtggctgaagaaagcaagagtggtgag

SEQ ID NO: 330868 - DNA, 90 bp, Homo sapiens
acaacaggtgctccagctgaaggtgcgagaagaagtcagaaatctacagttactcacacaagatcccttctgcttactatgacattaccc

SEQ ID NO: 330869 - DNA, 74 bp, Homo sapiens
aagaacgacatgatgcaatcttcaggaaagtaagagggatctagtttgaagcactaagaagaataagacatcag

SEQ ID NO: 330870 - DNA, 87 bp, Homo sapiens
agcctcccgagtggctgggactacaggggttggccggagacctacgacatgaatacctcggagcccaagacggagcaggaaagcatc

SEQ ID NO: 330871 - DNA, 80 bp, Homo sapiens
cagggcagccgccccgccgagtcgcaggttttaaaatcaaagatgggaaaatcggagaaaattgcccttccccatggcca

SEQ ID NO: 330872 - DNA, 100 bp, Homo sapiens
tattgttcagttacaagagaaactttatgtgcctgtaaaagaatacccagatgctgaagactttaagtgacaagtcaagagaagcaaaagtgaaaagcaa

SEQ ID NO: 330873 - DNA, 82 bp, Homo sapiens
gggacgcggaactggtgtaccctggtggacgtgcacccagaggaccaggcggcggatgatcaggatggtgctttcacaaaat

SEQ ID NO: 330874 - DNA, 103 bp, Homo sapiens
ccttttttcatttccatttctaccttgtatgcctcaatttgctggatttaagcactgctgcactttatgaggtgagtataggtgcttggagaggataaggaaa

SEQ ID NO: 330875 - DNA, 101 bp, Homo sapiens
ctcgtggcattatccttcagtggggctattggactgacttttcttatgctgggatgtgccttagaggattatggaatatgacagatacctagcatctagca

SEQ ID NO: 330876 - DNA, 98 bp, Homo sapiens
ccatcttggatccgcgggacaagaaaattcatgcggagatggaataaactgagactgcaggacaaagagaaacgtctgaagctggaggacgattctga

SEQ ID NO: 330877 - DNA, 100 bp, Homo sapiens
gcacgatgctggagttgctcaaccagctcgacggctttgaggccaccaagaacatcaaggtaatcatggccacaaacagagcagacaccctggatccggc

SEQ ID NO: 330878 - DNA, 73 bp, Homo sapiens
ctaccggaatgtcatccagcgagtgattagtgatgctgcttcaaaagtcatggtggaattgctcggaagttac

SEQ ID NO: 330879 - DNA, 100 bp, Homo sapiens
catccatcggtggttccagggagcattgcattcagtttacctcagatggaggtgacacgagcagtgatgaggataaagaagaacatgaaactcctgtgga

SEQ ID NO: 330880 - DNA, 75 bp, Homo sapiens
ccaagcaaaacagtttccaccacggtttgtgtttagtgaatcagagggatctgcattagaacagtttgaaggtgg

SEQ ID NO: 330881 - DNA, 100 bp, Homo sapiens
atcaagcaaatcagaaactttttgacccgactttccatgcgtagaaagccaccctacagatcccattcgctctctccatctccagttaacaaacacaaac

SEQ ID NO: 330882 - DNA, 74 bp, Homo sapiens
tcgcagggagtcgccgctggagaggggctcggcgcccggcggggactgcagtgtaagaagaagcttgggaagct

SEQ ID NO: 330883 - DNA, 83 bp, Homo sapiens
agatttcgggacagctctctagaaactcgctctaaagacggaaccgccacagcactcaaaaacgcttcgttaagggactcagg

SEQ ID NO: 330884 - DNA, 90 bp, Homo sapiens
gactccaaggcggagcaggccaaagtgaagaaggtgacctctgagaaggatgtgcaaacagctctggctctagcaaaaggaaagtttggc

SEQ ID NO: 330885 - DNA, 83 bp, Homo sapiens
gggggcggccacggtgatgagccgggcctggcggacgcggcgccatcgcagtcaggttttgagcaaaattttggactgtgaag

SEQ ID NO: 330886 - DNA, 111 bp, Homo sapiens
tgctcgcgctactctctctttctggcctggaggctatccagcatctgccgacaccccaggccatcgagccccaggccatcgtgcagcaggtcccagcccccagtcgaatgc

SEQ ID NO: 330887 - DNA, 100 bp, Homo sapiens
gaggagcgtcctgcttcccggctgccctgttgctgtcggagtcacaggatggcggctgtcgtcctgcccccaactgccgagatgtggtactggatcttcc

SEQ ID NO: 330888 - DNA, 83 bp, Homo sapiens
tgtaaattgagctctgcacgctggggagtttgttggggatcccatgacagattctgttgtcacgtctccttacagagtttgag

SEQ ID NO: 330889 - DNA, 131 bp, Homo sapiens
ctattgtttatcccttcatcataagcagcgaaagctattccttcaaggatacttctactggtcataagaataaggagtttgtggcaagattttctctgtgggcagttctttttgttttgggaagacttctg

SEQ ID NO: 330890 - DNA, 101 bp, Homo sapiens
aattggattaaagcctgaaggagtgccaaggatagattgtgtttcaaagtggtctggggagaatgtaatcattccttccacaactgctgcatgtccctgtg

SEQ ID NO: 330891 - DNA, 83 bp, Homo sapiens
gtcggaagtggccgtgagcccaagccgcggtcccggaagctggcagggcggagatgctggaccacgccgtcctgcttcaggtg

SEQ ID NO: 330892 - DNA, 75 bp, Homo sapiens
acttggccccctctgatctgcgccgggtcgccacatactggactccagaagacctttccagattcgtggttgagc

SEQ ID NO: 330893 - DNA, 101 bp, Homo sapiens
caaaacctcgctccggaaaggggacacctgaaaccgaaccctcaccaaacagatctgcttgcacatccacttgcacgtagacctcagataagtgagatctg

SEQ ID NO: 330894 - DNA, 100 bp, Homo sapiens
gacagaagctcctaggcatgtttctgggacaaatgagcttgaggagttcctgaaccagagctcgcccttctacttctggatgaatggtgaccgcatcgac

SEQ ID NO: 330895 - DNA, 100 bp, Homo sapiens
aattaatgacaataatggatagtatgaatgatcaagtgacagctggagtatcagccttggaagtatatacgccaaaagaaatcttcgtggcaaatggtac

SEQ ID NO: 330896 - DNA, 115 bp, Homo sapiens
atccctgcagccttctggtataccatcgtcaccatgacaacactaggcagtggtctcggaaagagggtcgtggtcccgcacggatgcgcttgttgggagaaaccttggagattca

SEQ ID NO: 330897 - DNA, 100 bp, Homo sapiens
tggcatcatgatgaaaatctggtggacaggtcagcggtggcagtgtacagttatagctgtgaagttggtgagtttgtaagtgatgcccttctcgttcctg

SEQ ID NO: 330898 - DNA, 100 bp, Homo sapiens
ttcagctacagggtgaccaacgcaagaacatatgccagttcctcgtagagcggggctcattccaccggatgccaccctctacttcgatgtggttctgctg

SEQ ID NO: 330899 - DNA, 100 bp, Homo sapiens
gttaacagtgtagggaaaatagagtgtgtatcagcagagaccaccgaagactgcatcgccaagatcatggaggttgtggctcactggattgctgaaagcc

SEQ ID NO: 330900 - DNA, 75 bp, Homo sapiens
aatccctggaaagagagtttccagcagttgcccctcttggagtctgtgccttatgaagaagcactggcaaaccgc

SEQ ID NO: 330901 - DNA, 139 bp, Homo sapiens
accgagcctgggaggccggccggtgccagcacctttcggcttctgagacggcggcagcagcggcattcaggtgtcatggagaaactccagctgggcccagagattctgcagcgggaaaatccaaggcttatttatgcca

SEQ ID NO: 330902 - DNA, 102 bp, Homo sapiens
cgagtccccagcagggcccctgggctcccggaagaaaaatccagttacactcttaaaggaattgtcagtgataaagtctcgatatcaaactttgtatgcccg

SEQ ID NO: 330903 - DNA, 75 bp, Homo sapiens
ggacttgattgatatatatgctgacgaggagttcaaccaggaggcaagtgaggcctatctggttggcctttttga

SEQ ID NO: 330904 - DNA, 50 bp, Homo sapiens
agcagctgtcctcatgtctctccagcagaatatcctccgaatcctaaatc

SEQ ID NO: 330905 - DNA, 98 bp, Homo sapiens
cttggtccaacacaaattgcctccttatgtctccaacatggaccgcctgggggactcggaactgtatgcctggactgttgcccagtgtaagatctgtg

SEQ ID NO: 330906 - DNA, 82 bp, Homo sapiens
gcagccagagccaccagcgcagcgctgccatggagcccagcagcaagatgggtttcagcccagcagaagcattatctttgcc

SEQ ID NO: 330907 - DNA, 50 bp, Homo sapiens
gcgcctaccaggctcgaccccagacttcccaagtaagaagcggaagagga

SEQ ID NO: 330908 - DNA, 83 bp, Homo sapiens
tccaccgagtcgtgctctcgccccaacccgcgcgccaggcctccggtgtggctgtctctgatggtgtcatcaaggtgttcaac

SEQ ID NO: 330909 - DNA, 50 bp, Homo sapiens
ctcttcctcctcctcccgcgacggcacacaagactgtatctctgcttaca

SEQ ID NO: 330910 - DNA, 83 bp, Homo sapiens
atcaccgacaagatcaccacggacgagatgatcaaacgcctgaaggattttttatcaagcagaaatgcatcgaacaacgagaa

SEQ ID NO: 330911 - DNA, 76 bp, Homo sapiens
cagccagcagaacaacgacagagaacatggctccaataccaggggtacacatctttctggaatgactgcatatcat

SEQ ID NO: 330912 - DNA, 75 bp, Homo sapiens
cttttccacagggaattgagttgagcctcagcagcttggcagtctcatgtccccttacctcacttgtctctagcc

SEQ ID NO: 330913 - DNA, 50 bp, Homo sapiens
tataaatctcgcccaaacaggaaagggctgttgataatcaggtgtatgtg

SEQ ID NO: 330914 - DNA, 90 bp, Homo sapiens
cagaaacaaaatgtcaacaaattgatggccttcgtttgcaaggagagttccagttgacgtggtgtttggttccatggcggggtaccctag

SEQ ID NO: 330915 - DNA, 100 bp, Homo sapiens
ccgtggctgctcgataaatcagacagaacagttaatcctcaatttaagcctgatctaacccctagaaacaggttgcagtgagagcagatgctggcaagaa

SEQ ID NO: 330916 - DNA, 75 bp, Homo sapiens
cgagaagctctacccactgccctcggcccgcgctgttccatttcctccaagtcaccggcttacagcaaaagaagt

SEQ ID NO: 330917 - DNA, 100 bp, Homo sapiens
cgcggagcgcgcgtgtggtccttgcgccgctgacttctccactggttcctgggcaccgaaagaaaaatggagtgctggcatacattgggaattttcgcct

SEQ ID NO: 330918 - DNA, 49 bp, Homo sapiens
catgtgctgagccgacctgaggaggcctgcttcggccttctgctcttct

SEQ ID NO: 330919 - DNA, 85 bp, Homo sapiens
aggcctcgctggagatcgagtaccaagtggaaccgtcccaaaatgtcccttgctcagaagaaggatcgggtagctcaaaagaagg

SEQ ID NO: 330920 - DNA, 98 bp, Homo sapiens
tgtgatctgcaggtccggagagacgcacagctaagatgtcaggacatcctggaagctgggaaagggtttcattgtttgcggaacttttcaacgaaatg

SEQ ID NO: 330921 - DNA, 80 bp, Homo sapiens
taaaaagaagtgttaagaattgcctttgggactctgaaggctgaagtgagcatgtttttgaacacattaacaccgaagtt

SEQ ID NO: 330922 - DNA, 101 bp, Homo sapiens
ccacatcaccagtttaaagaatctgattgcaaaccagtccagctacgggggcccagccagccagcagctgagtgggggttacggaggcggctacggtggcc

SEQ ID NO: 330923 - DNA, 82 bp, Homo sapiens
ctggagagcctgcaggacggcgcggcagagtccccgtacgcctacagtaacggttaatttggagtggcccctggagtcagtt

SEQ ID NO: 330924 - DNA, 50 bp, Homo sapiens
ctggtggaagacttcaagaacaagtatgaggatgagatcaataagcgtac

SEQ ID NO: 330925 - DNA, 124 bp, Homo sapiens
gaagcatgtgtcttccccagctctgcagccacatactatccgtttgttcaggaaccaccagtgacagactctttcgacgtgtagcagcagctttgccgggaatggaaagcacacaggacagaag

SEQ ID NO: 330926 - DNA, 90 bp, Homo sapiens
agaaaatctctaaatgcagattccagaaaaattacagcacatctcagtgaatttgcaagtgaatgttggctcaattaagaaacatcaggg

SEQ ID NO: 330927 - DNA, 98 bp, Homo sapiens
tgaagcggaaccatctgggagccttcctgatccgggagagtgagagctccccaggggagttctctgtgtctgtgaagctggagtgcagcggcgtgatc

SEQ ID NO: 330928 - DNA, 82 bp, Homo sapiens
ggagggcctacgcggggctggagaactccaccgggctatgcgaacagaatcctgcgaagctcaccatggatgatgatatcgc

SEQ ID NO: 330929 - DNA, 88 bp, Homo sapiens
catcagctcggtccagaagctggttctgtatgagactagagctgttgcaagtggctatcttgtggtggggtttgtctatgtgatggaa

SEQ ID NO: 330930 - DNA, 102 bp, Homo sapiens
ctacagacagctttgatgactacccacctagaagaggtgatgatagctttggagacagtgaggcttgtaccattgttttgcgtggtgccactcaacaaattt

SEQ ID NO: 330931 - DNA, 51 bp, Homo sapiens
atgcgtccacagccaggagacacgggtaagaaggtggatggctctgtaaat

SEQ ID NO: 330932 - DNA, 96 bp, Homo sapiens
cccggccggcccggagcaccgagctcgcggcacggtaggaggtcgcaatggaagaagagatcgccgcgctggtcattgacaatggctccggcatgt

SEQ ID NO: 330933 - DNA, 75 bp, Homo sapiens
tcgccgccactgccgcaggaggcgtgaggaggctctgtcggtggtgagcgacgaccagtccctctttgactcagc

SEQ ID NO: 330934 - DNA, 100 bp, Homo sapiens
gtactctatatgaacaatccgtctggatcacggatgtaggaagtgacgtggacgaatgtcagctcttccgagaccaggtgtgcaagagtggcgtgtgtgt

SEQ ID NO: 330935 - DNA, 119 bp, Homo sapiens
aaattaccaactgctttcctttccctcagcacacagaggatgatgctgactttgatgaaggctcccagccaacctctgataaaccctcccagcggccatcagagagcacaaattgtagc

SEQ ID NO: 330936 - DNA, 75 bp, Homo sapiens
gggtggagacttcggagactgcagttgcaggtttgcccatttggcagcagtgaagctgttagaggagctacagaa

SEQ ID NO: 330937 - DNA, 100 bp, Homo sapiens
ggaccccaacgaggtgtgggagatcgtgggcgagctgggcgacggcgccttcggcaaggtttacaagcgtctgcttctgcgctttgcctgggagaggccc

SEQ ID NO: 330938 - DNA, 83 bp, Homo sapiens
aacaggcgccgcgggctccgcgcccggccggacccgggcccgagggcgccatgttttggaagtttgacctgcacacaagctcg

SEQ ID NO: 330939 - DNA, 100 bp, Homo sapiens
ggatttcgaggagtgtctgaaggactcgccccgcttcagatgatcatgacgcagtcctgaggtttaatggggcacccacagccaacttccaacaagatgt

SEQ ID NO: 330940 - DNA, 98 bp, Homo sapiens
ctggactttagggctgtggtgatggatgaggtggtgctgacaatcgagcaaggaaacctggcatgctacaagtgaaaactgatgagaaactgaatgtg

SEQ ID NO: 330941 - DNA, 100 bp, Homo sapiens
catttttcctgttttaacaacggctgtgctagacgaagtggtgaagcccaaaaagctgtatgtgatggcttctgtgtttgtctgtctactcctttctgga

SEQ ID NO: 330942 - DNA, 51 bp, Homo sapiens
catggggatgaagaaccagctcgagcctccattatggcatgctgaatttac

SEQ ID NO: 330943 - DNA, 51 bp, Homo sapiens
aataccgcattcttatcacaaagggtcatgtaggtacaacagcaaccaaga

SEQ ID NO: 330944 - DNA, 82 bp, Homo sapiens
atggatatccaggtgctgagccaggagcagcagcctttcttaatcaagatgattaccaactggttcgaaaacttggtcgggg

SEQ ID NO: 330945 - DNA, 82 bp, Homo sapiens
ctcagttggaagcagccgatccagcctgcggagcctgtggggcagaattcaattcgtcataatctgtccctacacagcaagt

SEQ ID NO: 330946 - DNA, 74 bp, Homo sapiens
tcctaaaacaggatcagtaaagaaggaaaaagcagtaaagccagaggaagcacttttccagccattaactccag

SEQ ID NO: 330947 - DNA, 74 bp, Homo sapiens
cgcccagtggccccgaggagcctggggagaagcgccccaagtttgaaggaatcgtgtctcctagtgacctggac

SEQ ID NO: 330948 - DNA, 100 bp, Homo sapiens
gtcagatgtgtttcctgatccatgtcctggaacatacaaataccttgaagtccaatatgaatgtgtcccttacaatcagtgtactgttacccggacatac

SEQ ID NO: 330949 - DNA, 75 bp, Homo sapiens
gtccctcctccggcttcccgcaatgaggagggcccttcacagaaccgggctgagtcagtgctgattctctcaaat

SEQ ID NO: 330950 - DNA, 76 bp, Homo sapiens
atgagaagaccaagctgacgcctggcaaaggaggggagatttgtcgcctgccgctcgctctggggctcgatgtgaa

SEQ ID NO: 330951 - DNA, 116 bp, Homo sapiens
ggggaatttcccaccaggatgagtatgattggctgtgattttagagatgaggtctcactatgttgcccagactgggattctctggcttttaatgaacaattgcttcttaaatcttt

SEQ ID NO: 330952 - DNA, 76 bp, Homo sapiens
ggcgaacgcttcgctggccatttaggagctctgctcaaagccagacgtggtttgctaagaaggccattttcaactc

SEQ ID NO: 330953 - DNA, 100 bp, Homo sapiens
attacaagaagagaaaaggatcgaggctcagaagcggaaggagcggcaggaagcccatctctatatgcaagtgcagatgttcatgagagcgcagtttgac

SEQ ID NO: 330954 - DNA, 83 bp, Homo sapiens
cggcgctccaggtgctgacagcgcgagagagcgcggccctcaggagcaaggcggaaggaggaagaggagcgaaggcggcgtga

SEQ ID NO: 330955 - DNA, 96 bp, Homo sapiens
gatatcgggtggcggctcgggacggaggacgcgctagtaccttcacggcatggtgcaactcccacctgcggaaggcaggcacacagatcgagaaca

SEQ ID NO: 330956 - DNA, 74 bp, Homo sapiens
caaggaggcaacccaggaggcttttatgaagcgggccatggaattgagttcttctcagactttatcacatgatg

SEQ ID NO: 330957 - DNA, 114 bp, Homo sapiens
gaagccaacagcgaggctttcagttctttggaattccattcttttccttattcttctgatgtggatccagtttgggcttcctgtagacacccttttcctgcgcaacagagctgg

SEQ ID NO: 330958 - DNA, 90 bp, Homo sapiens
cgcgaatatcgtcatcgttagaaggtggtcattgggactcccacacttaaacaaagaaaggaaattctgcaagtgattacctcgaagatg

SEQ ID NO: 330959 - DNA, 51 bp, Homo sapiens
gaaccctgtggtacagactgtgacctgagccatgaagactttgaatttatt

SEQ ID NO: 330960 - DNA, 122 bp, Homo sapiens
ctatgatacaattcatgatatcagatgttcagtcatgatgattcgggttttttgcatgtctgacacccatgactccacctggaccttatggctccacccagaagcaattcagcccaacagga

SEQ ID NO: 330961 - DNA, 101 bp, Homo sapiens
cttcgatctgcttctgatgaagtatggcatttcaaatatagatacaaccattgaaggaacgtcagatgacctgactgttgtagatgcagcttcactaagac

SEQ ID NO: 330962 - DNA, 75 bp, Homo sapiens
agaatcttgggattgttgcagacatattttcgagaagatcggatgtattcttggcctgggtagcctctagaaatt

SEQ ID NO: 330963 - DNA, 75 bp, Homo sapiens
gcggaggcttcgagtgacccgggtgccgaggagcgggaagagttgctgggctgccgcagcgggaaccgcaagagc

SEQ ID NO: 330964 - DNA, 50 bp, Homo sapiens
tctcggtcaccatgtggtcctcagatgccatggacaatattaccaggcag

SEQ ID NO: 330965 - DNA, 82 bp, Homo sapiens
tcctcctggccaccgactcctacaaggttacgtcgctggatttgtagacttggaggtgagcaacagaccagacctctatgat

SEQ ID NO: 330966 - DNA, 75 bp, Homo sapiens
cagctatggcattagcccacaggccaaggaactgtggctgcaccatctgtcttcatcttcccgccatctgatgag

SEQ ID NO: 330967 - DNA, 83 bp, Homo sapiens
gccagggaaccctggtcaccgtctcctcagccttttccccacgactctgaaagaggacagcgttcccaatgtcccagtttaag

SEQ ID NO: 330968 - DNA, 83 bp, Homo sapiens
gtttacttggtccagaacatccactagcctcactaaagacctgcctagagctggaacgttacctccagagcgagccctgctat

SEQ ID NO: 330969 - DNA, 89 bp, Homo sapiens
gcgggaaggccgaccgactgccgcgtgttctctgtcttcatcagaagaagaaagatttatttccatcaggagacctaaaacaccagcct

SEQ ID NO: 330970 - DNA, 124 bp, Homo sapiens
cttctctgtcagctctttccccgtcagcatcccagccgtgctcacggaatactcccccagttgcaagaggcgcaggaccgtggaagacttcaacaaattctgcacctttgtcttggcctatgct

SEQ ID NO: 330971 - DNA, 82 bp, Homo sapiens
acatcacatgctgacagcacaagaaggagatacaactcgtcaacgaatcaaattcagtgatgacagagtatgcaagagtcac

SEQ ID NO: 330972 - DNA, 75 bp, Homo sapiens
atccacagtgatgttgatgctagttctggttcaactccaccagtaactgttttcaaaggttcaaaaaaaccttac

SEQ ID NO: 330973 - DNA, 86 bp, Homo sapiens
gactattccctggctgcagccctcactcttcatggtcactggaccacgttatgtggtacaaataggtgacaaaattattgactaca

SEQ ID NO: 330974 - DNA, 82 bp, Homo sapiens
cttgggcagaaatcgacagacagagtactgggagcacatattcttggaccagttcgagaacatcatcgaaaattaagaaagg

SEQ ID NO: 330975 - DNA, 100 bp, Homo sapiens
cccatttttattgaaagatgtattgagtacattgaagccacagcatgttgacatagcggctttattgataaaatacaacacgtgtgtaaatgcaacagat

SEQ ID NO: 330976 - DNA, 82 bp, Homo sapiens
gcggcggcggcggcggcggcggcgctgctcccgggggcgacggcctgcaagtattcctgccacaagaaatgtgaagccaagg

SEQ ID NO: 330977 - DNA, 75 bp, Homo sapiens
ggtacatcgcctcggtgcagggctccaccccgtcgcctcgacaggtgatgatgaacagtctacacagatggctgc

SEQ ID NO: 330978 - DNA, 50 bp, Homo sapiens
gctgtgcaacgcggagcgtgagaggaagccctgggcgctgcctatggcac

SEQ ID NO: 330979 - DNA, 76 bp, Homo sapiens
tctgggcttccacacaactccagtgctaactcaacaggtatggcctcacaagtcttggtctacccaccatatgttt

SEQ ID NO: 330980 - DNA, 82 bp, Homo sapiens
ttggtgggagccgtgctctacctctatccggaatgaatctgaagtctgctgcagtaaaacacagaaggctttaaaatgtttt

SEQ ID NO: 330981 - DNA, 50 bp, Homo sapiens
ccccgagcagcggtggaagctgcgtgaagcctctgcgggccttcttttcg

SEQ ID NO: 330982 - DNA, 75 bp, Homo sapiens
gtgccatctgcaggaaccacattatggatctttatgggaatgatgaacaaccccaatccttatggttcaccatat

SEQ ID NO: 330983 - DNA, 73 bp, Homo sapiens
gcgcatcgcggcacagctgcagggcattgagagctatgccaagaccaagacgagagccgaggtgcggggcggt

SEQ ID NO: 330984 - DNA, 75 bp, Homo sapiens
actttgggcttcatcatggaggactacctgcagggttgtcgagctgctctgcagttccagggtcacccccgagag

SEQ ID NO: 330985 - DNA, 100 bp, Homo sapiens
caccatgaaagttggtggaaacctggattccaaaggctatggcatcgcaacacctaaaggatcctcattaaggttgactatagtcaatggggccaatgga

SEQ ID NO: 330986 - DNA, 100 bp, Homo sapiens
tcagcctcctgagtagctgggattacaggtgcccagctctcggaatgactgtggctccactgtccctgacaaccccttcgtccggaccctcccccacaca

SEQ ID NO: 330987 - DNA, 100 bp, Homo sapiens
ttccccattctgtgccagacatgtcttggagaaaacccatatatccgaatgtaatccttcccctctaccaccggatatggctcctgggcagagttatcaa

SEQ ID NO: 330988 - DNA, 75 bp, Homo sapiens
gggtgatgaggaagatgaagaggagagccccaggtacccagtttgttaagccgacagttggagttccacaagtgt

SEQ ID NO: 330989 - DNA, 96 bp, Homo sapiens
ctcctttgcccctcccacccttattacctggagatgatgacatggatagaccaagccagtggcatttgctgtgcggacaaatgttggctacaatcc

SEQ ID NO: 330990 - DNA, 102 bp, Homo sapiens
tttttatccatggatgacttgcttgggtaaggacatgaagacagttcctgtcataccttttaaaggttggatggcaagcatgtggtgtttggcaaagtgaaa

SEQ ID NO: 330991 - DNA, 114 bp, Homo sapiens
ggagagaagacgatctgcacttcgcattttggcattgacatttaattttagggtcctttatatagaagggagagtagacttacagccagctggcccaccccatccagcaggcca

SEQ ID NO: 330992 - DNA, 101 bp, Homo sapiens
ggccgcctccagcgccgcgggatgtagcgcgggggaccgcggcccccagcagagcccgcctgcccggctgtcgacatttataactcagaccccctgatctg

SEQ ID NO: 330993 - DNA, 75 bp, Homo sapiens
cgcagcgcgaacatggacgccgtcaacgccttcaaccaggaggcttttgtggccacaggaaccaatctgtctctc

SEQ ID NO: 330994 - DNA, 75 bp, Homo sapiens
gtttggagagaacagcgatctgaactttctggggaacagaccagttgtgatccacagaccagcatggctgccact

SEQ ID NO: 330995 - DNA, 74 bp, Homo sapiens
tgcatgagagtcaccatgctcaaagtgaatatattaagggggaagtcataaaatggtatgtctttttaatatcc

SEQ ID NO: 330996 - DNA, 97 bp, Homo sapiens
ttcaaaggaacatcacagttcgaaaatcagaatgcactaagcactccttctacatgttggggatgatgctcagttcgagatggacatctgactctcc

SEQ ID NO: 330997 - DNA, 50 bp, Homo sapiens
cgccgatggctccgacccgctctggatgacgtccggttgtttgccttcgt

SEQ ID NO: 330998 - DNA, 50 bp, Homo sapiens
ctaggctccaagacgccgtcgcttgagggaccctccattttccatatcca

SEQ ID NO: 330999 - DNA, 100 bp, Homo sapiens
actccatcccactgaggacctttgcgcgataacaatatctcagaccgaggcatctgcaagctcattgaatgtgctcttcactgcgagcaattgcagaagt

SEQ ID NO: 331000 - DNA, 75 bp, Homo sapiens
gccctgaagagaagcaagagatgcttcaaactgaaggcagccaggggtttggtgcagaaagaaagatccgtcaag

SEQ ID NO: 331001 - DNA, 80 bp, Homo sapiens
tgggtgtggttgctgggatcttagtacaaaacgtgttaaaataaacttattggtgtccactgtacccatggtttaaacag

SEQ ID NO: 331002 - DNA, 74 bp, Homo sapiens
tgatggtggttggacagtcagcatttgcagactttgtcttggctacttatgattcagcagacagaacaacttag

SEQ ID NO: 331003 - DNA, 100 bp, Homo sapiens
agctgatcagactcctggtgccactcccaaaaaactatcaagttgggatcaggcagaggggatgtacgtatttttgcatgcagtgaaaggaacacctttc

SEQ ID NO: 331004 - DNA, 100 bp, Homo sapiens
ctcaggcgtgcgcggacggtgtgcggagacggtctcgccacattgcccagactggtctgaaagtcttgggctcaagagatcctcccgcttccgccttcca

SEQ ID NO: 331005 - DNA, 90 bp, Homo sapiens
tccagtggagagctcatgttcctgatgaaatggcttctccagggaaagtgaccgaggcagtgaaagaggccattgacgcagggtaccggc

SEQ ID NO: 331006 - DNA, 83 bp, Homo sapiens
agacttggatgaagagctggtcattaagggatccatcctacagaagcatacttttttgatgcaccagagatggaccatctccc

SEQ ID NO: 331007 - DNA, 73 bp, Homo sapiens
cctgctgtttgggggctccctggcccgaatcttcacttccattcagacttcccagactcccggccagccatcg

SEQ ID NO: 331008 - DNA, 89 bp, Homo sapiens
taaaggtgctaagaaagagaatgtaagacaggaaaataattaaatattcttaccgagaacacacgcaggacttgaaagatgttactaat

SEQ ID NO: 331009 - DNA, 80 bp, Homo sapiens
gctgccgccgccgctgctgccgccgccgcccgcgaagccggagctcgagccgcagcgggaacaagatcactcaaggtgaa

SEQ ID NO: 331010 - DNA, 82 bp, Homo sapiens
gtcggatgaggagaggaagtgcaagtaaagcagctgcagcgagacctcgtccgcacaggggcttgttcttctgtgtctttgc

SEQ ID NO: 331011 - DNA, 82 bp, Homo sapiens
cttcggtgcctctctccagcagactgcggcttttctggctttgcccgcccagctgctccatgccaggaggaggaggagacac

SEQ ID NO: 331012 - DNA, 50 bp, Homo sapiens
tcggcgtccgccagcgatggcacaggtactccaaagattcaggtttactc

SEQ ID NO: 331013 - DNA, 83 bp, Homo sapiens
caggagttcgtctcttacgtctgcggaagtgcagctgcctcagttcttagcgcagtctgcatgaagaaatcagtgatttttat

SEQ ID NO: 331014 - DNA, 112 bp, Homo sapiens
tctcaaccagaggttcagctctgggcactatgggctatgtatcatgtctgcagtaaaaatctttgtgaagcctggagctgagaattcaagagactaccctgacttggcagaa

SEQ ID NO: 331015 - DNA, 50 bp, Homo sapiens
gccactcagagtcgcccgagaaggacacagcgggtcaggaaagattccga

SEQ ID NO: 331016 - DNA, 98 bp, Homo sapiens
acttcaagaatgtttttgaccagaaaaccgacaaccttcccagaaagtccaagctcgtgtgttatagttttgccgctggactcttccctcccttcccc

SEQ ID NO: 331017 - DNA, 82 bp, Homo sapiens
ctccaatgatatctacagcacctatcacttgttccctccaagacaactgaatggttatcaatactctggctgaccatcatca

SEQ ID NO: 331018 - DNA, 100 bp, Homo sapiens
aaggacgagtgttcgtgaaagtgaaccccaaggcggagttctgtggctcctgatggatctgagaagatggacgtggaggatgaaaatctgtctgattatt

SEQ ID NO: 331019 - DNA, 96 bp, Homo sapiens
gaataatgcccagcggcccgccaggtcccgatttctgcgccaggagatgaggggcggtagagccctggaatggagatgtccttgacgcctgggcag

SEQ ID NO: 331020 - DNA, 75 bp, Homo sapiens
ccctacccagggttctagaaatccaggcaggcatctatcttgaagatggttatgtccttcggagttacctagcgg

SEQ ID NO: 331021 - DNA, 100 bp, Homo sapiens
gccggagcagagggatagcaagtgcaaggtcaaatggacccatgaggaggtgcactacatcctccaggaggtggtgatgggtgggatggtgttggaaaca

SEQ ID NO: 331022 - DNA, 80 bp, Homo sapiens
gccgacggctgctcaaacatcagggctggcgcccatgcggctctacacgctctccaagcgccactttgtcctcgtgtttg

SEQ ID NO: 331023 - DNA, 98 bp, Homo sapiens
aaattcttaaattggagtcatatgaaatcactatgaatggggaagcaaaggcgaatgctccttgtgttatatttattgatgaattagattctgttggt

SEQ ID NO: 331024 - DNA, 90 bp, Homo sapiens
cgccgccagcctctcagcgctcccatgatcgcccggtgccttttggctgtgcgaagcctccgcaggcatgaagtcatcaatatcaacctg

SEQ ID NO: 331025 - DNA, 75 bp, Homo sapiens
acattcacaatgtccatatatagaatttgaatcatttgacaagaatcctggaagcctactgatactgaaggtaag

SEQ ID NO: 331026 - DNA, 101 bp, Homo sapiens
ctcaactgcccagcgtgaccagtggccacctctgcagtgtcttccacaacctggggatgacatgccaagctcgaagctcctacatcaccagtgagatcctg

SEQ ID NO: 331027 - DNA, 100 bp, Homo sapiens
gggaccctccccttggaccgagccgatcgccgcggggcagttcgggccggctgtcctggcgcgacaagcttaccattgttcagaagcaaacagtttgcag

SEQ ID NO: 331028 - DNA, 75 bp, Homo sapiens
ctgcgcttggggatcctctgtacgcccgttcactggaacttgtaatagctggcatcgttgagaatgaatggaaaa

SEQ ID NO: 331029 - DNA, 83 bp, Homo sapiens
gcaagagcaacatctttcctcaccccaaggtgacatgtacagccatgatgggaatactgatgagccagaatgggtaaagacag

SEQ ID NO: 331030 - DNA, 51 bp, Homo sapiens
ctacagaaacctcgtctccctgggtcagaatggcggcagtggagcatcgtc

SEQ ID NO: 331031 - DNA, 75 bp, Homo sapiens
gataattttatcccagggtggctgaatcacggaatggattactacagcatcccatttcccacacccactactccg

SEQ ID NO: 331032 - DNA, 89 bp, Homo sapiens
ggtctctggagacatcttcagcagacggtcctaaaatctctacacttgccaaaaaacaacagtctttatgtccttacaccagatttgcc

SEQ ID NO: 331033 - DNA, 88 bp, Homo sapiens
ggcggagctgacggtggaggttcgcggctctaacggggctttctacaaggtttttggattcaaagcataaaaaccattacaagatata

SEQ ID NO: 331034 - DNA, 100 bp, Homo sapiens
atgacagcagcattaaacatatatgtgaagagtccccgatgtttgtagaccttataatgatgccaaggtcttggagcagcccgtggtggtgcagagcgtg

SEQ ID NO: 331035 - DNA, 98 bp, Homo sapiens
ggaagctttggagcagtgtatttttctgtggattctagccttgggggtctttcacgatccagcactgtggccagcctcgacacagattccaccaaaag

SEQ ID NO: 331036 - DNA, 90 bp, Homo sapiens
gctctttggactaatgggagttgcttttggaatgaatttggaatcttcccttgaagagggaagctattctttgtctcatgtttatacacc

SEQ ID NO: 331037 - DNA, 100 bp, Homo sapiens
cggcgctatggaggagctcgatggcgagccaacagtcactgagctcgaggccatgagcagatataccagcccagtgaacccagctgtcttcccccatctg

SEQ ID NO: 331038 - DNA, 75 bp, Homo sapiens
ggccagatgggtttgtatggacaggcttgtccatctgtaacttcattaaggagaccaagacacattccaccccag

SEQ ID NO: 331039 - DNA, 87 bp, Homo sapiens
catagaaagggcagtagacgatggtgttaatactttcaaagttcttacaaggtggctttcctggagatggcatgcagcagccagcat

SEQ ID NO: 331040 - DNA, 100 bp, Homo sapiens
caaccattgacgccatgtcgggttattcgagtgaccgagaccgcggccgggaccgaggcaaatggttatgagccttagagtttctgaactccaagtactg

SEQ ID NO: 331041 - DNA, 75 bp, Homo sapiens
gtgtcctacaccaggcagcccccaaatcccggcccagctcgatcaagtcatccgccaaagaagcctgtccagttt

SEQ ID NO: 331042 - DNA, 75 bp, Homo sapiens
tagacctgtgggcacggacgcacgccactttttctctgctgatccagcagctcttcagtgggtcatctgtgtgtc

SEQ ID NO: 331043 - DNA, 90 bp, Homo sapiens
ggatacacacatattcatcatcatgggtgcatcggagatgcgctctgtgctgcggaaggcgggctccccgcgcaaggcccgccgcgcgcg

SEQ ID NO: 331044 - DNA, 90 bp, Homo sapiens
gatggatacatgatctgttgtgacaaatgcagtcgtgatgagaggagatggattgaaaagcagaacagagcaacaagagcacaaagaaaa

SEQ ID NO: 331045 - DNA, 82 bp, Homo sapiens
ttttccccaattcagcagagaatattttcaagggggattttgcaagaacgaggctcaaggatgtgagggacacagtattgac

SEQ ID NO: 331046 - DNA, 75 bp, Homo sapiens
ctcttcgatgtgcgagactttggaaaggttccagcaacagatagaaatgctttaagttcactctggggaaagctg

SEQ ID NO: 331047 - DNA, 116 bp, Homo sapiens
ggttttggagagcaccccttttaccactgcctggttgcagaagtgccgaaagagcactggactccggaaggacacattcagctaacgtattttagcaggtggagtgaggttgaaga

SEQ ID NO: 331048 - DNA, 95 bp, Homo sapiens
ggaaagccaaagagctgaatgttatgtttattgaaactagtgcaaaagctggatacaatgtaaagcagtgacagacatcacacctccagtgcaat

SEQ ID NO: 331049 - DNA, 100 bp, Homo sapiens
ctgcagcctgccatgggacgtggggtccaccggtacagcccaggatccggttgtggccgtggctgaggatggccgggagaagccgaagctgccgaaggag

SEQ ID NO: 331050 - DNA, 100 bp, Homo sapiens
ttcctttttgcgagctttccgagtgccaggcgccggccggctgcgaagacgcggtgggccgcccctccggatgtctccccgttcaatgttgtggcctggc

SEQ ID NO: 331051 - DNA, 124 bp, Homo sapiens
ggcacctgcgcgaagctggccaaagcctgcccagacggctcacctgtgcgggatggaacaaaagggcagagcggcttgggtaaatccaccttaatcaacaccctcttcaaatccaaaatcagcc

SEQ ID NO: 331052 - DNA, 98 bp, Homo sapiens
cgcagacatggacaccaaacatttcctgccgctcgccttgaaaagatcttttgaggtcgaggaggtcgagacacccaactccaccccaccccggaggg

SEQ ID NO: 331053 - DNA, 136 bp, Homo sapiens
gatccacacagctcagaacagctggatcttgctcacactctttcaagagaagcttccttggagattgctgcgatgattgacactgagtttgccaagcagacctccctggacgcagtggcccaggccgtcgtggacc

SEQ ID NO: 331054 - DNA, 90 bp, Homo sapiens
aataaagaatcagttatgtgacttggaaaccaaattacgtaaagaagaattatccgagctttcgaagtcttatgaaaaggttgaaaaggc

SEQ ID NO: 331055 - DNA, 115 bp, Homo sapiens
ggcaggcggccgagctccggcacagcgccgcgtccgccgccgcggtggcagtcagcagccggcagcagcagcgggttcagccgtctgtatatctccccagatacctgaaactgac

SEQ ID NO: 331056 - DNA, 99 bp, Homo sapiens
actagtctgaaagggaaaacccccattcattctggattggtggatctgaagtacaaaatattttccaggtgaggaattttaaattggaacaagagcaag

SEQ ID NO: 331057 - DNA, 97 bp, Homo sapiens
cacgagtgtggaacagcaccttcatcgaggtggacgccctgcttcatctggcccgccagaatcgggctgtggcccgcacagcccagaatgaacggtc

SEQ ID NO: 331058 - DNA, 100 bp, Homo sapiens
gtgtcgtggtggtcattaagcggagatccgctatatcgagaagtttactgactttcttcggctctttgtgagtgttcacctaagaagaatcgagtcttac

SEQ ID NO: 331059 - DNA, 100 bp, Homo sapiens
ggcccccgccccattccgttcgcgactggatacacgtctgtttaactacgcaaaaggtaatgctggcatggcttactgggaccctaagtgtggcgaaggg

SEQ ID NO: 331060 - DNA, 82 bp, Homo sapiens
cgccctggggccggcgatgtgccaccgaggctgaggatgatggtagattgccaggtgagaagccctaccactgcaactggga

SEQ ID NO: 331061 - DNA, 82 bp, Homo sapiens
catggtcccagaaacgtcactatcaagaagggttatgagagaatttacaatgaaattccggacattaatctggatgtcccac

SEQ ID NO: 331062 - DNA, 100 bp, Homo sapiens
aggagccctgtcccccgtgtccttcagccccgtcctggcccagagcctggagcatgatgagcactctgcagatccagttcctaatggtttgcgagctttg

SEQ ID NO: 331063 - DNA, 83 bp, Homo sapiens
cgcagtggtcgcttcttctccttgatcctttcccggagttcagttatgggtgtgagaggtttgcaaggatttgtgggaagtac

SEQ ID NO: 331064 - DNA, 100 bp, Homo sapiens
cggactgctggagatggtggagtccgtcagttcaatgtatctatgcctgcctacctcaatctgcaagggagtgtcagaaaggccccgcattcgccaagcc

SEQ ID NO: 331065 - DNA, 100 bp, Homo sapiens
cccgcgccccgcggcatgagccggtgaccaagctcggggccgagcgggaggcagccgtggccgagacacgaagatcgattgagaagttattagaatggga

SEQ ID NO: 331066 - DNA, 78 bp, Homo sapiens
aaacagaaacacttcttttattttcctgtaatatatctgtatcatcggaggtggcagagatgcatggcgagctgattg

SEQ ID NO: 331067 - DNA, 100 bp, Homo sapiens
gtgcaccctcattttcctacgtgaaacacttggtaaaactggttctgggaaatctttctgggcgtggggtagagcagcggctgccatgctcttctgtggc

SEQ ID NO: 331068 - DNA, 100 bp, Homo sapiens
acttcgaaccatggaccaggccctcaagtccctgatggcctcagaggaggagaatgagctgaaagccagtggtggcgaaatcaaaattcataaaatggag

SEQ ID NO: 331069 - DNA, 100 bp, Homo sapiens
ttgtgcagtgggcaggaagaacccatcgggcagctacacatcttgaaagagaagctcttcctgtgaggacggacctgcaggctcctgggagcagctgata

SEQ ID NO: 331070 - DNA, 100 bp, Homo sapiens
ctggggatgattacagttcttcctaaaaaagcatgaagagctaatgctaggggatccctgccttaaggatttgaaaaaaggagatattatacaactccag

SEQ ID NO: 331071 - DNA, 51 bp, Homo sapiens
tgagaaactgcggaaagaattgcatgaagacaatgccatccccatcaaatc

SEQ ID NO: 331072 - DNA, 101 bp, Homo sapiens
aaccagcaaagccgtcttcctgcactacaggaataacttagcttgcacatgaatgcagtcatgcaaaccgttaggaaaaccagagcctatatggagttccc

SEQ ID NO: 331073 - DNA, 75 bp, Homo sapiens
gcggacggctgcgtcgcccgaggcgaggaggagcgctggcggccaagtcctgtatctgccatgtctgtggcgtcc

SEQ ID NO: 331074 - DNA, 101 bp, Homo sapiens
gactctgctaacaccagatagtggaaagaaaccatgtgctgaaatgtttgacgacactgatggtttggacatggatttgattgacatactttggaggcaag

SEQ ID NO: 331075 - DNA, 98 bp, Homo sapiens
gggccgccgtcggcagcaagaacagagagagaggtggacagatctgagagatactgaggtggattgtctcattgttagtgctgaatcttcttgcctac

SEQ ID NO: 331076 - DNA, 98 bp, Homo sapiens
gggccgtggaggcttcgccgcctaggacttgaaagaggagattgatattcgactctccagggttcaggatatcaagtatgagccccagctccttgcag

SEQ ID NO: 331077 - DNA, 82 bp, Homo sapiens
caggaaatgaccccaacgccaccgagagggcgcctggaatgcaagagcggtgagcggggcgcctatgcctccttcgggagag

SEQ ID NO: 331078 - DNA, 100 bp, Homo sapiens
tggcggatgctctacctctgcacatcgcacccaggtggttcagctcgcatagtggtgctggggctgctggtgtgggcgctgattgcggacaccccgtacc

SEQ ID NO: 331079 - DNA, 100 bp, Homo sapiens
ttaagaacttggatcccattcacctgaggcacccgaagaagagaccatccatatttccagcagggagaaggttttaaggtgaaaacgaagaaagaaatcc

SEQ ID NO: 331080 - DNA, 90 bp, Homo sapiens
aggatcgaatcttcactcccgctgtctcagcagtctacagcacggtgtagcccatcagtgttatcatggtttcatgaaggctgtccagga

SEQ ID NO: 331081 - DNA, 74 bp, Homo sapiens
ctatgttgccctgagttacataaataggactctgacttgaagaaaacagtggatgaaagtgcacggattcagag

SEQ ID NO: 331082 - DNA, 74 bp, Homo sapiens
gattaatggctggatccatggcagtatttcactggccttgaatgtggacataagttttgtatgcagtgctggag

SEQ ID NO: 331083 - DNA, 100 bp, Homo sapiens
ggtttctcactctttttactgccaagttcccactctgcatggtgttccacatcattgacttactgctttgtgagactttatattcagagcaccaatcaaa

SEQ ID NO: 331084 - DNA, 80 bp, Homo sapiens
tcgtggccggaggagtctcagagctgtcagaaaggagaaggaagccaacatccttttggagccatgaatattgtccgaac

SEQ ID NO: 331085 - DNA, 75 bp, Homo sapiens
cgccctggccccacggcagaatcagttggtcgaattgtcttagaattgtttgcagatatcgtacccaaaactgcg

SEQ ID NO: 331086 - DNA, 100 bp, Homo sapiens
agcggcgcgtagccgagggcagcgcccgtcaggggggcaccgcggagcaagggaaagcaggcaggatgggagagtcgccgatagaaccacctcttccctg

SEQ ID NO: 331087 - DNA, 100 bp, Homo sapiens
tttgggcacctgcagcgacctacccactacaatacctcttgggactgggctcgatttgaggctacgactggcaaagatgagggaggctgaagcggcccag

SEQ ID NO: 331088 - DNA, 105 bp, Homo sapiens
gagaagcccatgaagagatggtggattctcactgagttttgactagcggaagaaaaggattgaaagaaggtggcaagaggaagaagcagaagcagagagaggagt

SEQ ID NO: 331089 - DNA, 75 bp, Homo sapiens
atcagcttttgcttagtgatcagatcatccagacttgaaacatatcgacccagtggttttaaaacattgtcatgc

SEQ ID NO: 331090 - DNA, 98 bp, Homo sapiens
cccctcttcaacacctggacaccttgttagatggaacctacaagcaggtggagctgatcagaataatgttcagcatcaaccccctggagaacctgaag

SEQ ID NO: 331091 - DNA, 75 bp, Homo sapiens
tttaattttagggtcctttatatagaagggagataatttcatagaatatcctgatgttggtcctgcagtgccctg

SEQ ID NO: 331092 - DNA, 75 bp, Homo sapiens
aagggggactcaggcgaacagggccccccaggcaaggagctgccccccaagagggacgagacggccctgcaggag

SEQ ID NO: 331093 - DNA, 74 bp, Homo sapiens
acaagcagcactgtcaaaactgaaggagcagaggcaactcctggagctcagggaatactggagcgatctgaaac

SEQ ID NO: 331094 - DNA, 96 bp, Homo sapiens
ggatcattgaccctattgatggaacaactaactttgtacatagattcagaatggacagtttagaagaacctcagaaaaaagtctttaaggctcgaa

SEQ ID NO: 331095 - DNA, 75 bp, Homo sapiens
gtacgataccgaagcgggctgtgtgccccttctccacccagagtggtcccaggctgcacccatggcagaaggagg

SEQ ID NO: 331096 - DNA, 101 bp, Homo sapiens
cgggcgtggacggtgtggggcggtcccggccccgcaggctctcctccttcagatgagatccgcaccctccgagaccagttgcttttactgcacaaccagtt

SEQ ID NO: 331097 - DNA, 82 bp, Homo sapiens
cactttcgccagcccgtgccgcgagcgcggcctgcaggaggatattagaaatggctactccccagtcaattttcatctttgc

SEQ ID NO: 331098 - DNA, 98 bp, Homo sapiens
gtttccatctcttcagagatgaaccaggtcatcatcagatttgaaatatttaaagtggatacaaaactatttcagcaatgcagacaattaagtgtgtt

SEQ ID NO: 331099 - DNA, 100 bp, Homo sapiens
gggttctaaccccttcttaacaaggaatcagattccccgtactccagaaaacttgaattgtttgctacatgaggagaacttctcggtgaggtgccctaag

SEQ ID NO: 331100 - DNA, 100 bp, Homo sapiens
cccgcctcccagcactcccatcaagctggaggaagcttcatggcggctgaagagatgcattggcctgtccctatgaaggccattggtgcccagaacctgc

SEQ ID NO: 331101 - DNA, 100 bp, Homo sapiens
cagttcatccctgagccttgagctcccagtcgcagaggatgcggctgtgaaggggcggctggtggaatgtctggagactgtgctcaacaaggcccaggag

SEQ ID NO: 331102 - DNA, 83 bp, Homo sapiens
ctgtggcctccaggcctgtggctctgaagtttgcctgcaatggtactgtaattgagcatccggaatatggagaagtaattcag

SEQ ID NO: 331103 - DNA, 100 bp, Homo sapiens
ctccataatgaatgctgtaggctgctgtggtttacaggtgaaatctgtgactgttgctgaaggactcatagaagaccattttgatgtcactgtgaagatg

SEQ ID NO: 331104 - DNA, 50 bp, Homo sapiens
gtccacactgctgaaaaatctgatgcccagcctacagagtctgagaagga

SEQ ID NO: 331105 - DNA, 75 bp, Homo sapiens
catcacatgagcatgaagataaaagtcctgaaacagttttgcagtcgaattaactcctgaggagagagcccaaaa

SEQ ID NO: 331106 - DNA, 100 bp, Homo sapiens
ccgccgccccctcctgaggaggacccagagcaggacagcggcccggaggacctgcctctcgtcagattggcagtatggagttactcaggccttccctcac

SEQ ID NO: 331107 - DNA, 88 bp, Homo sapiens
gggaatttccttgtgcctccattcccgggaggggggagcggcgttggaggccaccgtttccaggactggcattgcggactgacctcca

SEQ ID NO: 331108 - DNA, 83 bp, Homo sapiens
aaccactcattcacttctagacgacaaaatgcaaaaaaggaggccaaagactttggtaacaagatgctcaactatagtgctcc

SEQ ID NO: 331109 - DNA, 100 bp, Homo sapiens
tgcgcgcgaaggagcggaagaatggcagtgctcaaactcaccgaccaggaaccaaatggcgagacaccatcatctttatacagagttgcagcagtacttc

SEQ ID NO: 331110 - DNA, 95 bp, Homo sapiens
agcgatgaaatccaaaggtgaatcttttggttggtgattttgatgatagccacaaagcaagcagggttggtcaaagaaaaagtgatgtatgaaaa

SEQ ID NO: 331111 - DNA, 80 bp, Homo sapiens
caggtgtaagcgcagaaagcaggcgaacccgcggcgcaataacggctatttgctttctagaagagaaggccaagcagggt

SEQ ID NO: 331112 - DNA, 51 bp, Homo sapiens
aaggattccaagtaactcttatttggaaagaagattctatatgatatactt

SEQ ID NO: 331113 - DNA, 95 bp, Homo sapiens
gcgagggtctgaagttcacgactactagaaggggaggggagtggaaaggctctcagtgaaaaagatatgagatcctgactccaaactccattccc

SEQ ID NO: 331114 - DNA, 90 bp, Homo sapiens
aagcagcagacagccaataaggtggaaattgagaaaattcggagagatggagtccctccaacttcaaagaaaaaacgccaggcaggggag

SEQ ID NO: 331115 - DNA, 100 bp, Homo sapiens
ggccggagccacgcagccgcggcttccggagccctcggggcggcggactggctcgcggtgcagggcatttttggtcgaagagagctgaagtaatgagaag

SEQ ID NO: 331116 - DNA, 101 bp, Homo sapiens
ctggagccacacctgcgaacaccctttgcttctattgagctgtgcccagccgcccagtgacagaattccaggtgctggagaatctggtaaaagcaccattg

SEQ ID NO: 331117 - DNA, 82 bp, Homo sapiens
ctgacgataagatcaattcggaaccgaagattaaaaaactggagccagtccttttgccagaggacaagaattttgggcagat

SEQ ID NO: 331118 - DNA, 88 bp, Homo sapiens
cttaaaggactgatttttagaactccacatttgaggacctgaaggagaagaaggagaaggtggaggagaaggcaagccggaaagagcg

SEQ ID NO: 331119 - DNA, 90 bp, Homo sapiens
gattcctgcaggcgttggttcccctctttgacctgaaatgggcaagttcatgaaacctgggaaggtggtgcttgtcctggctggacgcta

SEQ ID NO: 331120 - DNA, 50 bp, Homo sapiens
tggcgctcatcaccggtatcacaggccagagatctcggctcaccaaattc

SEQ ID NO: 331121 - DNA, 75 bp, Homo sapiens
ttcaaactacgttaagatgacgacagactcagatccaagtcaacagtaccagaatccgtagaagctagccctgtg

SEQ ID NO: 331122 - DNA, 74 bp, Homo sapiens
ggcctataaaatgcttcaagtagtcctgtgctcaacattgcttatcggtactggcggaggacattgggcatgca

SEQ ID NO: 331123 - DNA, 97 bp, Homo sapiens
tccctgtgtcccgcaatgccaacctcagcaccatcaagcagtcctgctattgctgcaaactgagtatgaaagaaggtgacccagccatctatgccga

SEQ ID NO: 331124 - DNA, 96 bp, Homo sapiens
ggccggcctgcggaacgaaagtgaacaggagccgctcttaggcgacacacctggaagcagctcatggggcattcagaatgggaccacaaacgaggg

SEQ ID NO: 331125 - DNA, 82 bp, Homo sapiens
gctttttgatggccatggcataaggaactctatcccaggaatacagctttgcattagctcattgctatggacagtgctatca

SEQ ID NO: 331126 - DNA, 82 bp, Homo sapiens
gatggtcttcctgctggggctcatgtttgaggttaccattccatcaaatacaatatctgtgaatggaaggtcaagactcagc

SEQ ID NO: 331127 - DNA, 82 bp, Homo sapiens
ggagctgctgtgcgtcctggaggtgtggtcattgtaagactctggctcctacttgggaggaactctctaaaaaggaattccc

SEQ ID NO: 331128 - DNA, 82 bp, Homo sapiens
tgccgcgagcgcggcctgcaggagaccgagtgtgtcagcagccaggactttctctctgggtccccttccaaaacgcagccac

SEQ ID NO: 331129 - DNA, 83 bp, Homo sapiens
gccaagggaccaaggtggaaatcaaacacctagaggatcaagacataatgggagcatttttagacaagccaaagatggaaaag

SEQ ID NO: 331130 - DNA, 100 bp, Homo sapiens
cgcgcctggctcaggtgtgggaccccatccttcctgtcttcgcagaggagtcctcgcgtgattgccaacactcctgatagctgaatgtgtgctggtttac

SEQ ID NO: 331131 - DNA, 75 bp, Homo sapiens
atggcctggagctggcttccatgatccccgccctgcgggagctgggcaggccatttcataattctgaatcatgtc

SEQ ID NO: 331132 - DNA, 86 bp, Homo sapiens
gttgcttgcttgcctgtgcgcgcgtgcgcggacatggcctcaaacggatttggggtggaaggcaggcatggtcaaacccatttcac

SEQ ID NO: 331133 - DNA, 87 bp, Homo sapiens
aaaagccccgcctctgccttcggatagttcccagtgacctgacagcagaggagcgtcaagaactggagaacatccgacggagaaaac

SEQ ID NO: 331134 - DNA, 100 bp, Homo sapiens
cagaattagcccaagcagattcctcccagatcgttaactgaagacaatatgcaaaattctcacatggatgaatacagaaattctagtaatggcagcacag

SEQ ID NO: 331135 - DNA, 75 bp, Homo sapiens
tccatcatatgacaaggacaagagtgttctggctttcagaggaatccctggaagaaatgatttcccttggggatg

SEQ ID NO: 331136 - DNA, 73 bp, Homo sapiens
tcaaaggccttcagagactggagtacagaggatatgattctgctggttttaaagaagtcagtgatcattcaaa

SEQ ID NO: 331137 - DNA, 82 bp, Homo sapiens
ttgaccatgtgacatctgatgctgtggaacttgcaaatcgaagtttgctaatccagactttacacaacctatctcagaagtt

SEQ ID NO: 331138 - DNA, 75 bp, Homo sapiens
agaccctctcctttccctttgagaccgtgaagagaaagatgcagggccttcatcctagaataatcactgaaggat

SEQ ID NO: 331139 - DNA, 75 bp, Homo sapiens
ggccttcgaggctctggagtcctccacggctacgggtgtgaacaaagactcctatctgatcctggagacgctgcc

SEQ ID NO: 331140 - DNA, 75 bp, Homo sapiens
gtgctacagtctgcggaacggagcagtatttcaatgtggaggagtccaacctataccttctcagggaggcaaact

SEQ ID NO: 331141 - DNA, 75 bp, Homo sapiens
gctacaagacaacaccctgatctggcatggacatgattaaagcaaggagagccaatcatgactggcaaaacacag

SEQ ID NO: 331142 - DNA, 97 bp, Homo sapiens
ttccttctccaccagacgagcaccaagaagctgagaatgctgtttcctcaggtcagccccagttgatgctgacagcaggacccagtgttgccgtccc

SEQ ID NO: 331143 - DNA, 75 bp, Homo sapiens
tgaccccaaagttgcatttcctcgtcgagcgcaacccaagacacattcctgaaggcgctaaaagacgaaaagtta

SEQ ID NO: 331144 - DNA, 98 bp, Homo sapiens
gtctcctgatacccggatgtgaggcgatccgctggcgctagtctgaccctccgccaggcaaaaggaagagttctaaagttcctgttgcttcagacaat

SEQ ID NO: 331145 - DNA, 75 bp, Homo sapiens
cgcagctcctggcctattacttcacggagctgaaggatgaccaggtcaaaaaggatgctcagtccttgcatggag

SEQ ID NO: 331146 - DNA, 80 bp, Homo sapiens
atcgcctggagctggaccaaaaggagttcatgatcaagtgttgcccacaccaaatgcttcatccagagtcatagtacatg

SEQ ID NO: 331147 - DNA, 83 bp, Homo sapiens
cgtagtcctgggagcacagcagaagtgatgaatttcatcctttcatcgaagcacttctgccccacgtccgagcctttgcctac

SEQ ID NO: 331148 - DNA, 75 bp, Homo sapiens
ccacgacctatcctaggcgccatgctgtcaaagctcgaaaaacagcagcagaggaaagaaaagaccagagctaag

SEQ ID NO: 331149 - DNA, 73 bp, Homo sapiens
gggcaacatctgcttctcctcctcagaggtcttgggcgtctttggtactggcttttttaggggtctgcctggg

SEQ ID NO: 331150 - DNA, 90 bp, Homo sapiens
gccgcatcgacaagttcggcttcatcgtgggctcgcagggcgccgagggcgcgagccagaggaagagatagccatggaggacagccccac

SEQ ID NO: 331151 - DNA, 50 bp, Homo sapiens
catagcaatcgcacagctgaggagagctggtggagttgagatctataatg

SEQ ID NO: 331152 - DNA, 83 bp, Homo sapiens
cttcagcgggccaggaagcgcatccaggaggttatggaaacaaaggacatgctttacatcgtcactgaatttgctaaaaatgg

SEQ ID NO: 331153 - DNA, 83 bp, Homo sapiens
ctcaatctctggaaaaacttcttgccaaccaaagctttccttaaagtttcccatgtctcaatggactcctgaatataacgagc

SEQ ID NO: 331154 - DNA, 100 bp, Homo sapiens
acaagaggaaagacacacctaccaagaagccagtcaagcggccagtacatcgacgccatcagcaacaagcagggcgagctggagaattacgtgtccgacg

SEQ ID NO: 331155 - DNA, 100 bp, Homo sapiens
tcggcgtgtacgtgggcagcggcggctggcgcttcctgcgcatcgtctgcaagaccgcgaggcgagacctcttattcatgatgttgctatcaaaagttga

SEQ ID NO: 331156 - DNA, 83 bp, Homo sapiens
ctgaagcaaaagatcagcgaggagcagcagcagctccagcaggcgctggctcctgctcaggatgtacagttacccagcacgtg

SEQ ID NO: 331157 - DNA, 75 bp, Homo sapiens
tttgttgagtcgaaagtgaaattttcctttggccaacgtgacagtgacaccacagccaaagccctatgggaagct

SEQ ID NO: 331158 - DNA, 75 bp, Homo sapiens
gcgcaaacaagccaatcccaggaggaaaaacggttgatgccggcccaggatggatcagacctgtgaactacccag

SEQ ID NO: 331159 - DNA, 100 bp, Homo sapiens
gtcaaaactaacagaacatcacaggactatgatcagcttccttcatgttcagatttggatttgtccttaaacccaagtggagaagtgactagacagattg

SEQ ID NO: 331160 - DNA, 96 bp, Homo sapiens
catgtctgagtcggagctcggcaggaagtgggaccggtgtctggcggatgcggtcgtgaagatagaacacactgttgcagcagctaggagtggctc

SEQ ID NO: 331161 - DNA, 99 bp, Homo sapiens
cgcagctgctttccgaggaagccggtgttgccgagggccatcactgtgcatgtccccatgccctcagcaggagtcgtggacatccccattgtggagaag

SEQ ID NO: 331162 - DNA, 98 bp, Homo sapiens
ctgccttcagcccttccaggaggaccagcaagggctctgtgtgcccaggatgcgccggcctccaggtctcagtgctgtgccccccccagagcctagag

SEQ ID NO: 331163 - DNA, 99 bp, Homo sapiens
aaacacatgaaagacttcctcaaggactacagtatgcacttaatgtcccttactatactggcaattgctggagaagattttgcaattgttgcttctgat

SEQ ID NO: 331164 - DNA, 101 bp, Homo sapiens
aacagccatgcaaaggcaggggaggaagccacctcgagactctactccaccccctcacctcagggaagatgaccaccactattccgtaagaaatagtgact

SEQ ID NO: 331165 - DNA, 97 bp, Homo sapiens
gcttatttttgaaaatctgatcgacctgaagcgccgctataattttcctgtagaagttgaggattctgtaacaaagatgggagatgcacataaggag

SEQ ID NO: 331166 - DNA, 100 bp, Homo sapiens
gctgtggaagagattctagaccgggagaacaagcgaatggctgacagcctggcctccaaagtcaccaggctcaaatcggccaaacgtaccaagaaagtcg

SEQ ID NO: 331167 - DNA, 82 bp, Homo sapiens
ggaagcagccgatccagcctgcggagcctgtggggcagagattcagaatatacccccctggacaacacggttatcctcaaat

SEQ ID NO: 331168 - DNA, 100 bp, Homo sapiens
ctcaaagccctgggtcgcttggaagaagccaagcaacacagtcactcctggcggcaaaccaaacaaaaccagagtcatctggggaaaagtaactcgggcc

SEQ ID NO: 331169 - DNA, 98 bp, Homo sapiens
cttcgccgtgctggccgcggcccgcctcagcatctggtacagccgagcaaatgttctgaaaaagactctgcatgggaatggcctgccttacgatgaca

SEQ ID NO: 331170 - DNA, 100 bp, Homo sapiens
cagtgggtgctcacagctgcccattgcctaaagaagttcctggatgcctatgctgagcacaagttacagttctgggcagtgacagctgaaaatgagcctt

SEQ ID NO: 331171 - DNA, 89 bp, Homo sapiens
ggcgggagctgtgcagctccttatcatggctaactatatgtcagaaagcatcagcttttctcgatggacccattcatctaatgaaatat

SEQ ID NO: 331172 - DNA, 100 bp, Homo sapiens
ttccctatccccgacgaccggatcctgaggaggcagctgcggtggcagctgctgagttctcggtgaaggtccacagagttggattccaactggaactggt

SEQ ID NO: 331173 - DNA, 51 bp, Homo sapiens
gctgaaaagagaaggtcaaacagctgaaggagttgataccaagttgaaatt

SEQ ID NO: 331174 - DNA, 50 bp, Homo sapiens
accactttgaaggaggatgctccagcaggcaacagcattattgagaaaag

SEQ ID NO: 331175 - DNA, 112 bp, Homo sapiens
caccactgtttgtgctggatcgcagcgctgcctttccttatgaagaagacacaaatgatattggtgcccatatgaatgtaggaagaacttataaaaatttaaatagaaccaa

SEQ ID NO: 331176 - DNA, 147 bp, Homo sapiens
ggattcgtggtgaaggtccggggcttgccctggtcttgctcggccgatgaagtgcagaggtttttttctgtacgcctgcctcacaccttgcgatgcgccaacatcaccatcattgagcaccagaagtgtgagaacgcctaccccggc

SEQ ID NO: 331177 - DNA, 100 bp, Homo sapiens
ttatttcttcagcatggctcatattctacttcattcagaagatcaggtacacaaatgcacgcgacaggaaccagaatgctgagatgtataaactgtcttc

SEQ ID NO: 331178 - DNA, 75 bp, Homo sapiens
cgcggggacacaggagtcttcctacagtacacacacgcccgcctccacagaccaatcaacttcataggatgtaca

SEQ ID NO: 331179 - DNA, 100 bp, Homo sapiens
tgtttcacagggctaaagcctgaacaggtggagcccagtgacaccatcgaaaatgtgaaggccaagatccaagataaagaaggcatcccccccgaccagc

SEQ ID NO: 331180 - DNA, 75 bp, Homo sapiens
atcaagctttagagcctggctactcacagttgaagcctgattgcagctatccagtcagttcgctgctattcccat

SEQ ID NO: 331181 - DNA, 100 bp, Homo sapiens
ccgaggcaccgaggcactcagaggaggactcctcctattttgaggacttctccaacatctccatcttctcctcgtccgtggactccctgtcggacatcgt

SEQ ID NO: 331182 - DNA, 90 bp, Homo sapiens
gaggatcagagtttaaactcctgccataatgcagctgtatttcctgaagaactaggtaccagtgttcctttaactgatggtgagtgcaga

SEQ ID NO: 331183 - DNA, 98 bp, Homo sapiens
ccaccttactctgagggtcaagaattgccgcttccttttagttacttatttcactcagctgtccgaggacaagctctgggacatcataaatgtgaaca

SEQ ID NO: 331184 - DNA, 75 bp, Homo sapiens
cagcttttcagaactgcagggaaacagccatcatgaggttttactgcaatcacagcaaccaaccccatttggctt

SEQ ID NO: 331185 - DNA, 95 bp, Homo sapiens
ggcaaactgaaggaaatctatgagaacatggcccctggggagaataagactggtgacatggcttccagatatgcccgacgatgtcctgtggttgc

SEQ ID NO: 331186 - DNA, 96 bp, Homo sapiens
atgttcaagtactgtccctatgagaaggcagacttctgcgttatgacccggctgctgggctacgtggaccccctggatcccagctttgtggctgcc

SEQ ID NO: 331187 - DNA, 75 bp, Homo sapiens
gccctcccgccgccgccctaaggagcatcagatccatgctgctgctgactcggagccccacagcttggcacaggc

SEQ ID NO: 331188 - DNA, 75 bp, Homo sapiens
gcaggcctttcctcacgccagaacaatggaggctgggaagctggaggaggtgatgcaggagctgcgggccctgag

SEQ ID NO: 331189 - DNA, 100 bp, Homo sapiens
tccagtgtgagcactggccagagtgaccaggctgaccagcaccagccctgatccagaaaccactcagattgaggatcctcgagtacaatggcggcgggag

SEQ ID NO: 331190 - DNA, 87 bp, Homo sapiens
acgtgaacggagtgaccaagagcaggtttgagaaaattcatttgcaaattgcccgacaaaggtaaaaagatctttgactcttttgcc

SEQ ID NO: 331191 - DNA, 90 bp, Homo sapiens
cgacgctatggcgcactggagtaccctgttcctggcagctgtaacagaagacaagtacgaaatactgcaatctgtcgacgatgctgcgat

SEQ ID NO: 331192 - DNA, 88 bp, Homo sapiens
cggcgcggggcaaccacagcgctcagttccacagaggacgtcccccacaggcccaaaaaacatgcagacctctggccggctgagcaat

SEQ ID NO: 331193 - DNA, 75 bp, Homo sapiens
ccggagaattcctggggcgcaccgccaagagctggggttaccttccgaacaagaatctatcactgtaatattaac

SEQ ID NO: 331194 - DNA, 98 bp, Homo sapiens
tgatgtcttccagactcggtgctgtacccgccactgtattggtgatcacgtaccgagaacccccaaatcctgagtatcaggaattccagaatcgtctg

SEQ ID NO: 331195 - DNA, 100 bp, Homo sapiens
agaagtaaatatactaccccttctggagaggtgcgctatgctgctgtaacacagtttgagtatatttaaagttggagttcgttgctaaagatggcagacc

SEQ ID NO: 331196 - DNA, 82 bp, Homo sapiens
tgcagaactgggttctggactttgggcgtcccattgccatggttgattgtacacagcactatgaactctgctccggaaacca

SEQ ID NO: 331197 - DNA, 90 bp, Homo sapiens
cattaatggatgttccagtatttaaagctattcaaccagattattctaccttgtaaatactgttatttgtatatactgtaaatgatgaca

SEQ ID NO: 331198 - DNA, 87 bp, Homo sapiens
tccccatctgtaacgaggtgttgagacgagatcattatgtagaagttctggaatgcaaaatacagtgtgaagagaacctcaccccag

SEQ ID NO: 331199 - DNA, 87 bp, Homo sapiens
gcttccctccgtgtcctgaaaagtgcgaccgttctcccaaggaatttccacgatctgccgacaccccaggccatcgagccccaggcc

SEQ ID NO: 331200 - DNA, 98 bp, Homo sapiens
gactctggagatccgagaaggaaggccgttaattaaggaaaagttgagccagggcgtgaccctcgtcgtggacagatacgcattttctggtgtggcct

SEQ ID NO: 331201 - DNA, 50 bp, Homo sapiens
cggagactttggggcctaactagcaaattgtggctactaatttgccccct

SEQ ID NO: 331202 - DNA, 75 bp, Homo sapiens
aagaattctgtggaagagtggacaacagaagactggactgaagatgccgtgacttggcgagcacgaccctccccg

SEQ ID NO: 331203 - DNA, 100 bp, Homo sapiens
aaaaagcagaaagtagatgaagatgagattcagaagatgcagcagcaagctcattatgatgctatggataatgatatcgttcagggagcagaggaccagg

SEQ ID NO: 331204 - DNA, 96 bp, Homo sapiens
cgaattggtggaaaggttgaagttcaagagctcagaccctaaaatgtctttggtggacttgggaaagaggttgctagaagcagcaagaaaaggcca

SEQ ID NO: 331205 - DNA, 100 bp, Homo sapiens
tctcagcaccgctctctgctccgcggggacccagacgaggctcgggactttgcagccggccttagtgctcgcgcaggtagagcagctgacagaagagcag

SEQ ID NO: 331206 - DNA, 90 bp, Homo sapiens
ctccgtgcccagatgctcataaggattgtcctctttctacaaaaggttcaagctgaagttcctggatctcccatatttgtgatgagacta

SEQ ID NO: 331207 - DNA, 89 bp, Homo sapiens
gctcttcctaagccttaaagagacaggacggtcgattggtctgaaattcttgaagagacagattgaccgactcatcagtcacggggccg

SEQ ID NO: 331208 - DNA, 75 bp, Homo sapiens
tacgttcattcagggcctgctgtggaagaccagccccaaagatggaggagatgtataagaaagctcatgctgcta

SEQ ID NO: 331209 - DNA, 82 bp, Homo sapiens
tttggacttcatagcctctagaactgctatggagttactagtagagaaagcaatcagcagtgcttctagccctcagagccct

SEQ ID NO: 331210 - DNA, 90 bp, Homo sapiens
tgaggcgccagcctgcgaaggtggcggcgctgctgctcgggctgctcttggagaaagctctgggtgtgcggcagtaccatgtggcctcag

SEQ ID NO: 331211 - DNA, 100 bp, Homo sapiens
ggggcggcagcgctggacacccagcctccaggtgccagaaccctgtggagcatcatgaactgggaagagtagctgagccccagagcctctctggaagaga

SEQ ID NO: 331212 - DNA, 100 bp, Homo sapiens
ggttggtggtaccctaaaattagggcatgattaagagctcttcagtatccccatcagccagtttccgaggtgctgagaagcacagaaactccgcagacta

SEQ ID NO: 331213 - DNA, 87 bp, Homo sapiens
ctaggagcgctctgtggtgcctggggctgaacgcggctttctgggaagcagagactttcaaggaacaaggaaatgcatactatgcca

SEQ ID NO: 331214 - DNA, 75 bp, Homo sapiens
tcacggcgtacgccctcatggggaaaatctccccggtgactttcagtgtactaatggtcacttgatgtgcgctgg

SEQ ID NO: 331215 - DNA, 100 bp, Homo sapiens
agtgcttctaatgtgccatcagggaagagcactgatgaagaagaggaggtgtctgcattattgggccgaatcccttctgctgtgggctatcagcctaccc

SEQ ID NO: 331216 - DNA, 90 bp, Homo sapiens
cgattccgctctgcggcgggtgtccctaaactagcagtttagggtgtcaggacagcctttcctgcctcagggaagaagagagagacagac

SEQ ID NO: 331217 - DNA, 100 bp, Homo sapiens
tgagagcacctcactggcagaaaaactgctttcccatggtgcacacattgaagcactggacaagggaggcaaatacatgcaggcggtgattcagtatggg

SEQ ID NO: 331218 - DNA, 75 bp, Homo sapiens
tcagcctcccaagtatctgggattacagacaacacctgccactttgaggatgagaagatctgtggctatacccag

SEQ ID NO: 331219 - DNA, 75 bp, Homo sapiens
caagatgctgtggaagctgccgctggaagacgcagacatcatcaaagtgagtgagatcattggccgagacctgag

SEQ ID NO: 331220 - DNA, 73 bp, Homo sapiens
caaaaatgtcaacagagtgctgagtgctgaggccctgaagcctggcatgcatttggccaagagacgaatgtcc

SEQ ID NO: 331221 - DNA, 99 bp, Homo sapiens
cgcagcacgagctcaaattccgagggcatcttttatgaccaagactgtccagtaccaaaatgagctacataaattcctaatctgggatacagctggaca

SEQ ID NO: 331222 - DNA, 101 bp, Homo sapiens
cgggagtcctggcgctctgcagagattcagaggagcttattggaaggaggtggacaagatggtcgactatatgcagccaggcggaacacctgccaccgagg

SEQ ID NO: 331223 - DNA, 50 bp, Homo sapiens
cctgttctcatcaccatggcaacaggatggcacatttcctagaggcagaa

SEQ ID NO: 331224 - DNA, 154 bp, Homo sapiens
ctgacgcagccatggcggaggcggctttggaagccgtgcggagcgagttacgagaattcccggccgctgcaaggggtactccaaagattcaggtttactcacgtcatccagcagagaatggaaagtcaaatttcctgaattgctatgtgtctgg

SEQ ID NO: 331225 - DNA, 83 bp, Homo sapiens
gctgttcctcgcgggccgccgggtgctggtcaccggggcaggcaaagatgtggacgagtgctcactagcagaaaaaacctgtg

SEQ ID NO: 331226 - DNA, 75 bp, Homo sapiens
cgtgactcacaggcacattgcagagagaagctgccgctcccagatctaagcctttcccacgttatggttataaac

SEQ ID NO: 331227 - DNA, 82 bp, Homo sapiens
ctgcctaatttacagcaaccatgagcggatgtcaatttggatatatcaaagcctttgaaagcaaacctgagtttcaccaaac

SEQ ID NO: 331228 - DNA, 142 bp, Homo sapiens
tgggacctttactgtgcagctcctgaaaggagagacacttgtgaacattcaagtgaagcaaaagcctttcatgattatatgccttcaattaagttgcagagttctgatggagagatatttgaagttgatgtggaaattgcca

SEQ ID NO: 331229 - DNA, 100 bp, Homo sapiens
agaagcgccacccggaggctctagcctgacaaatgcttgctgacctgggccagagctcttcccttacgcaagcaaaatcctgacagatgactttgcagac

SEQ ID NO: 331230 - DNA, 82 bp, Homo sapiens
gcgcgtgtgtgagcgcgccggaccaagcgggcccagaagcggggagcatcgagtacagctgtccggcctccaacgagtgtga

SEQ ID NO: 331231 - DNA, 83 bp, Homo sapiens
cccgcggccccggcgagcagccgccgcccgccgcacccatgagatgccagcctggcggtctcattcagccagccaatcatgta

SEQ ID NO: 331232 - DNA, 75 bp, Homo sapiens
cgcagtggtcgcttcttctccttggcagctggtgatgctatttctgacatgctggtgattgaagcaatcttggct

SEQ ID NO: 331233 - DNA, 78 bp, Homo sapiens
ggagatgcagactgctttcagccagcagtcaaaaggatgaggtggaggaccatcctgctacagtattgctttctcttg

SEQ ID NO: 331234 - DNA, 100 bp, Homo sapiens
gccacttggcaaaggaggggttataccagtataagaacatttgtcaacaggtgaacctatgggtcgtggaacaaaagttatcctacacctgaaagaagac

SEQ ID NO: 331235 - DNA, 114 bp, Homo sapiens
atttgcagaaaactctacaattcctgatattcagaagaatgcagcaaaagccattactaaagcagcttatgatcattcgccatgaagtcagcgtaaataatgtaacacataaac

SEQ ID NO: 331236 - DNA, 75 bp, Homo sapiens
gtgtggtcgcgtctcggaaaccggtagcgcttgcagcatggaactctaatgaatcattgattgaccagcactatt

SEQ ID NO: 331237 - DNA, 97 bp, Homo sapiens
ctttgccaggactgatgcagatgcccctcctccaccagaggactgggaggagcatgtcaacaggagctgaaggtggtggatcatcgtctggaaatgt

SEQ ID NO: 331238 - DNA, 83 bp, Homo sapiens
ctcgggtctcgggggccgctctgggatcccggccaccagcaattgtccggactcctcctattttgaggacttctccaacatct

SEQ ID NO: 331239 - DNA, 98 bp, Homo sapiens
tctactggaccgacctggacaccaacatgatcgagtcgtccaacatgctgggacagagcgggatgccaccagcttgtccaaagggaagttccaggagc

SEQ ID NO: 331240 - DNA, 75 bp, Homo sapiens
gtttgatgcgatcctgaccagtgcaaccacgggatgttttttgtagcatcagatccaacagttaaaacagatcga

SEQ ID NO: 331241 - DNA, 82 bp, Homo sapiens
cctaatacccacagtcctccagctggagaagaagcaggcgctccctccattccagccacagatcacagacgactacggtctg

SEQ ID NO: 331242 - DNA, 100 bp, Homo sapiens
ccacgttcaggcaggaggacgtggaggaccattatgagatgggggaggagctgggcaggtctgctcaccaggtggccagataccgcccacgtgcccccat

SEQ ID NO: 331243 - DNA, 90 bp, Homo sapiens
cctccttccgcatgtggtcccagatgagagtccctacactaaatccgccagccagacaaagccgcctgatggagcgttggctgtgaggag

SEQ ID NO: 331244 - DNA, 101 bp, Homo sapiens
acttattgtggagaatttgtcaagtcggtgcagctggcaagacctaaaggtggtcgagatatccagtctgacggagcacttgctgacggaatgtgacaaaa

SEQ ID NO: 331245 - DNA, 100 bp, Homo sapiens
cgcgaacgagcgacggcggaacccgtgggcctgtggactgcagcctcggcggtcagcagggtttgaaagtattcttgaagggctgtttggacctgcatta

SEQ ID NO: 331246 - DNA, 100 bp, Homo sapiens
cctggagaaatggcagataaacttttactcacaactccctccaaaaaatttacctgtcaagagcaactaagaggtctttcttggctctatgagaacctgg

SEQ ID NO: 331247 - DNA, 83 bp, Homo sapiens
ctgtattggtctcctgctcctagagggcagctggtggaatttttgaagaaaatggaatctcgaggccccctttcgtgcgacac

SEQ ID NO: 331248 - DNA, 82 bp, Homo sapiens
tcccggcagctgtccgcgcccacggtcctatggcggagctaacggactccgcgcgggtgcaggtgatggtcctaccagtgtg

SEQ ID NO: 331249 - DNA, 100 bp, Homo sapiens
atgaggcacctaaaaattgtataccgcagattcaggctgggctgggcgagtatctcttcgaaaggctcactctcaagcacgactaagagccttctgagcc

SEQ ID NO: 331250 - DNA, 100 bp, Homo sapiens
cagatggtgattaaggtctcgaagcaattattggctgctctggaaatcagcgatgctgtagcaaaccattcctcaagcaactgcagcaaaatatccccgg

SEQ ID NO: 331251 - DNA, 108 bp, Homo sapiens
gggcctgcagcgggagctggacggcgagcgcgagcggcgcgagaaagtcaccgacgatgagggcgcacctgctgtcctggagcttccgatctctgttcggggaccctg

SEQ ID NO: 331252 - DNA, 100 bp, Homo sapiens
cagaagaatacgcagcctctacagcgaacccttcaaggaacccccaaaggaggtcctttcagcggtctgggagaagtcatccaccgagagagtgttccca

SEQ ID NO: 331253 - DNA, 87 bp, Homo sapiens
tcaccaccgtggtggccgacacgggcgacttccacgggagtgcatccgccccaacccttttccccctcgtctcctgtgagaattccc

SEQ ID NO: 331254 - DNA, 98 bp, Homo sapiens
agcctagccccgttcggccggccgaggaatactcccccagttgcaagaggcgcaggaccgtggaagacttcaacaaattctgcacctttgtcttggcc

SEQ ID NO: 331255 - DNA, 137 bp, Homo sapiens
cttgctaatctggacctgaactctgaaaaacagagtggaggagcaagtacagcgagcacttttaaaagcagtgcatcttcaaggccatgaaggacctgtttatgcggtgcatgctgtttaccagaggaggacatcag

SEQ ID NO: 331256 - DNA, 101 bp, Homo sapiens
ctattgtccaaagcagtcgtaagaagaggtcccaatcccccactctttccgccctaatggaggtctccagtttcggtgttgttagagatacaaaaggaatt

SEQ ID NO: 331257 - DNA, 109 bp, Homo sapiens
ttcagaaggagctagctgaaataacccttgatcctcctcctaattgcaggtatggcatttcaaatatagatacaaccattgaaggaacgtcagatgacctgactgttgt

SEQ ID NO: 331258 - DNA, 83 bp, Homo sapiens
cagagatcgtgttggacattagctcccgagcgctggccttctggacatatcagagtaatcaagtcagaggattatatgacttt

SEQ ID NO: 331259 - DNA, 98 bp, Homo sapiens
ggacatcactttagaccctccacctaattgcagggcttgctttcagaaatcctccgaaaggaagaggaccccaagactgcatcccagtctttgctggt

SEQ ID NO: 331260 - DNA, 75 bp, Homo sapiens
aagatgttcctatttgtattcattgcagcggatctgaaaagaacaattgctgtccttctggatgacattttgcaa

SEQ ID NO: 331261 - DNA, 82 bp, Homo sapiens
tacgtctgtgcggctgcgtggggctcggccgcgcggactgaaggagactgaaggcccagctgagagccagcctggaggttac

SEQ ID NO: 331262 - DNA, 101 bp, Homo sapiens
ggcgcggggaccgctgtgctctcggatgcttaaatggcagaggccaagcccagactccagacggacatgcggataaggccctgctgcggcagatggaaggc

SEQ ID NO: 331263 - DNA, 75 bp, Homo sapiens
aggagtcttcaggggacccctgtgcaagaacggatctccctctccggtggaagttgatgggtcgaaactaaatgt

SEQ ID NO: 331264 - DNA, 80 bp, Homo sapiens
ccggcagccagtggtcccagccaggcctgcctcctgtggacagtacctggagtagaacagaaaaattattatgtctgtgt

SEQ ID NO: 331265 - DNA, 100 bp, Homo sapiens
attttgttcagcccagggatgttcaggagctgaaagacgcaatggccaatgtacatggtggactatgccggcctgaacgtgcagctcccgggacctctta

SEQ ID NO: 331266 - DNA, 100 bp, Homo sapiens
cctggtcctgcgctcgcggcctcgatgctgtctctggcgcggcctccgctcccgccgactggcctgagaacgaggggaacgcccttttgcttgtgactgg

SEQ ID NO: 331267 - DNA, 82 bp, Homo sapiens
ctggtggtgcacacgaggcgctatcttaatgagctcaagcaattctgtggtgttcttggtcacacatttatggagtttctga

SEQ ID NO: 331268 - DNA, 75 bp, Homo sapiens
agaacgtgcgggaagagaagatcatcgagcatttcaaacggaggaggaagccaagaatctggtgagcgaagccat

SEQ ID NO: 331269 - DNA, 74 bp, Homo sapiens
tttctgaagcgagcgtcttcgatgaactgaagatgtgtggctacaatggctctgtcccttctgtggaatcgtta

SEQ ID NO: 331270 - DNA, 100 bp, Homo sapiens
tgtcacttatgaactacattctcggcctgagcaggacaagttctctcaagctgccaaaccacctggtttccatcgggcctatagttccccactctacagc

SEQ ID NO: 331271 - DNA, 138 bp, Homo sapiens
agaagctcttcagcaagaggaccgggctgggcgcgcccggccgcgacgcccgggacccagattgcgggttcagatagggccagatttgagtgtgtgaatttttgagtgaaacctggaacccaaatgagaagaaatctg

SEQ ID NO: 331272 - DNA, 110 bp, Homo sapiens
ggaaaaggaggaattcgccgtgcccgagaatagctccgtccagcaggtcaaaatgcagatcttcgtgaaaacccttaccggcaagaccatcacccttgaggtggagccca

SEQ ID NO: 331273 - DNA, 100 bp, Homo sapiens
ggagattggcacaggaccagactcaagacacacaactcataacagttgatgaaaaattggttgccaggatacatccaggcaacaaagactgcggttcctg

SEQ ID NO: 331274 - DNA, 97 bp, Homo sapiens
ctggatggttgtaaggaaagaaacaagcagacggtatccagccaggtctctagacaaactttataactttgctgattgctctggactccacctgata

SEQ ID NO: 331275 - DNA, 95 bp, Homo sapiens
tctacctccatcaggaccccagatgtctgacagccctgtgtgacaccaagataagtaacgtacgttgaagatggagaacaactgatgtcaagaca

SEQ ID NO: 331276 - DNA, 50 bp, Homo sapiens
agtatttccggcagcctgtggtgggcggcaccttcctacttctgcccagc

SEQ ID NO: 331277 - DNA, 76 bp, Homo sapiens
gaagggcaagggccaaaatgatgaaataatagtgtaatccttgctgatgaaatgggcctaggaaagaccatccaga

SEQ ID NO: 331278 - DNA, 74 bp, Homo sapiens
gttcctgtacaaccagaagcgacacaggaacaggagtacagctgtgtagtaaagatgccttctggtgaatttgc

SEQ ID NO: 331279 - DNA, 90 bp, Homo sapiens
cctaggtatccgcactgctcagggggcgtctctggccgagcctctttttgtggaaaacgacagcagcagcagtggcctggaagacgccac

SEQ ID NO: 331280 - DNA, 80 bp, Homo sapiens
cattgatctagaagagtatattgcattagtgccagcagtagttcccaagggctgtctcagccatccacccagacgactca

SEQ ID NO: 331281 - DNA, 75 bp, Homo sapiens
ggatgatcgaggttgtttgcaacgaccgtctggggaagaaggtccgcgttaaatctcctggagcaggcgctggtg

SEQ ID NO: 331282 - DNA, 75 bp, Homo sapiens
gggtcctcgcttgcagttcagcgaccacggatttttagactctgaggagcagttggagctaatccacattatgga

SEQ ID NO: 331283 - DNA, 100 bp, Homo sapiens
gagatcaccttcgagtgcatcgaggacctgtctgaagtaagactttgaccccgacgcaggcttcagtgattgccgcggatcagaagcctgagcactttgg

SEQ ID NO: 331284 - DNA, 75 bp, Homo sapiens
tccacttgcagccagggactgggcatccacccggccaggttcccaggaagatgtcgtgatctcaacagcttgtca

SEQ ID NO: 331285 - DNA, 97 bp, Homo sapiens
cagaccggccgctctcccctcctctcacggcacctcccaccatgaagggcaacatgcaggttctggtgacttacggtggcgatcccatccctaaaag

SEQ ID NO: 331286 - DNA, 49 bp, Homo sapiens
caaaggcacaggaagaagcttgcaggtgagcgacctgtgagagtttatg

SEQ ID NO: 331287 - DNA, 96 bp, Homo sapiens
tcttacagatggacctgtacgcgctgctaggcattgaggagaaggcagcggacaaagaggaccaggactaaaacctccagaggaacggacaataga

SEQ ID NO: 331288 - DNA, 82 bp, Homo sapiens
ttctgcgccatcctgcaccgccaccggcccgacctcataggctgaggggatctggcggtggagcgctaggatcagacgcccc

SEQ ID NO: 331289 - DNA, 90 bp, Homo sapiens
cgaggcaccgaggcactcagaggagaggagcaggagcggcttcgcttggagcaggagcgagagcaggaacagaagaaggccaatagcctg

SEQ ID NO: 331290 - DNA, 100 bp, Homo sapiens
gatgaagcagctaaatgccctgaacaaaaattggagatatattgtgcctatgcttacggtggatgtggacctggccaagcagtgtgcagacctgcctgag

SEQ ID NO: 331291 - DNA, 100 bp, Homo sapiens
tagaggtccgggcttggagttcgcctcagacgcggtggagccgccggagtctgagaagtgcaaggatgatgctgaaaggaataacaaggcttatctctag

SEQ ID NO: 331292 - DNA, 82 bp, Homo sapiens
cctgctgcccgtgctgggcgtggccaagcaggacacggtgcgcgtggccttctgctccgaataccctctaccatctgctttg

SEQ ID NO: 331293 - DNA, 100 bp, Homo sapiens
taacatctctaagcaagttcttgatcagtatctcactctgctggcagatgatccagcattctgaaggcaaatcctgtttagacccaggcaaaggttcctg

SEQ ID NO: 331294 - DNA, 105 bp, Homo sapiens
gcagcccccaatgggaggtagtggacaaagatagtggcaccttcatcctctcagtggaacatgacaaggaattcttccacccacgctaccaccatcgagagttcc

SEQ ID NO: 331295 - DNA, 100 bp, Homo sapiens
cgaaatccttcctgtacctcttgagccaggccgaccccgacccggactcggacaagtatgacgccgtgcccatccagtccagcgtggtgttatgttcctg

SEQ ID NO: 331296 - DNA, 76 bp, Homo sapiens
gtggaaaggaagctgcacaggaagccgtgaaactgaaggagtctcgctctgtcgccaggctggagtgcagcgacac

SEQ ID NO: 331297 - DNA, 75 bp, Homo sapiens
gatgcctttcctgtattggaatatgatgctaagagagaagaagaaggaggttcctgctgtgccagaaacccttaa

SEQ ID NO: 331298 - DNA, 75 bp, Homo sapiens
gatgtggggggattctcgacctgctaacagaactggaccttttcgatcaagcactgcgcctagcagaaattttac

SEQ ID NO: 331299 - DNA, 100 bp, Homo sapiens
gagccggccgagcggcgacggaccgcgagattccaacaatgtctcacccatcttggctgccacccaaaagcactggtgagcccctcggccatgtgcctgc

SEQ ID NO: 331300 - DNA, 85 bp, Homo sapiens
acagtgaaaatgattggagtattaacattgattggtccagaaaagggcgtggtgcacctggcgacagcggccgtcctaaacgcgg

SEQ ID NO: 331301 - DNA, 100 bp, Homo sapiens
ctgggcccgacgggcatgccaagaagatgagaccgggggaggcgacgctaagttgctgatcgtggcgcaagagtgagccatggagctacgtgtggggaac

SEQ ID NO: 331302 - DNA, 100 bp, Homo sapiens
aaatccagcagtatgacaaggcactggatgatgcaatcaaagctcgacttctcaatcccaagtggccaaaggtggctttgtacaagtcagtgccaacgcg

SEQ ID NO: 331303 - DNA, 75 bp, Homo sapiens
gcctccccttctggagatgctggcccgaagatggcaagatcgatgcttggaggtgtgggccatgtttgaggattg

SEQ ID NO: 331304 - DNA, 100 bp, Homo sapiens
gataaatcagacagaacagttaatcctcaatttaagcctgatctaacccctagaaacagagaaagtggcatggaagcgagctgtgcgtggtgtacgggag

SEQ ID NO: 331305 - DNA, 97 bp, Homo sapiens
agttgctccaaaacctaagtacaacccatacaaacaacctggaggtgaggagttggattcgatcagaattctcaccactggttctaagtcagaatca

SEQ ID NO: 331306 - DNA, 98 bp, Homo sapiens
aaaaacacacctatgacacctttaaggaggttcttggatcagggatgcagtaccacttgcaggcagaactcacagtttggagatgaaaaaacatttag

SEQ ID NO: 331307 - DNA, 82 bp, Homo sapiens
ggaaggaacgaggcaaggagctaaagcagcgtgcgttcagccctgggatatgcaaaagttataagggagagggtcggcagca

SEQ ID NO: 331308 - DNA, 83 bp, Homo sapiens
cagtgatctacgggctggagttccagctctggtttgtcaggctggcactactagtgaagttgggccttttccagaatgctgag

SEQ ID NO: 331309 - DNA, 98 bp, Homo sapiens
cggcggcggcggcggccggggaggaagacagagatgtcaatgaccccatgcccaaccgaggcggcaatggactagctcctggggaggacagattcaaa

SEQ ID NO: 331310 - DNA, 124 bp, Homo sapiens
tgtggcccacatcgtggtggaggcggcctctctggcagcagacatcagccacgcatctgaccttgttggcagctgaactctccatcaagtttctgcctccccaacgtaatatggaagtcgttct

SEQ ID NO: 331311 - DNA, 96 bp, Homo sapiens
caagctcaagcagcaggaagatcttttgaggatgggagacctttaactctgaaggacatatgggaaggagttcatgagtgctataagatgcgactg

SEQ ID NO: 331312 - DNA, 74 bp, Homo sapiens
tgaccgggagaacacgtttgtggttaagtaagcaagctgtgtgggaagtgcagccccactgacgtggacatcct

SEQ ID NO: 331313 - DNA, 87 bp, Homo sapiens
caagatggcgtgcttgttggagaccccaatccgcatgagcgtcctttcggttactataacaacagtaccaaggtggctgtgaaaacc

SEQ ID NO: 331314 - DNA, 101 bp, Homo sapiens
agaaaatgaaaccagcagacagaatttgtcagcattggacacatttccaccatgctaatggcattttaaatatatttggcaattttcccaattttttactg

SEQ ID NO: 331315 - DNA, 74 bp, Homo sapiens
cttcctggccctctaccaaaccgtgggaaaaagtgacccattttgtgtggtagaactgaacaacgatagactgc

SEQ ID NO: 331316 - DNA, 109 bp, Homo sapiens
ggggtgaaggcgctcatggacggaagacccctggctctataagctgaattatggcagcccagtcaaggaacttagtgatttggcccgtgaccctccagcacaatgttct

SEQ ID NO: 331317 - DNA, 74 bp, Homo sapiens
agatccgggagcacgtcatctccatcgagggtcttcatggaagttcggggaaattaactggatctacttctagt

SEQ ID NO: 331318 - DNA, 101 bp, Homo sapiens
gtctgaatgtcattgatgccaatttctgtatgaaaggagaagacttggactctcaggactctgtctactagtgacgatgtcgaagacagggaaaatgaaaa

SEQ ID NO: 331319 - DNA, 74 bp, Homo sapiens
catgggttcctgaccaatgtcatccttgcagacctcaacctctcagatatggctcgtggacagcagaaaattca

SEQ ID NO: 331320 - DNA, 74 bp, Homo sapiens
gaaagaggaggaaaacaaaagctgctacttatggaagatacaaaggggactgacgaagacacaatcatcgatat

SEQ ID NO: 331321 - DNA, 100 bp, Homo sapiens
gatgggggctaaccagttagtggtgctcaacgtgtacgacatggtcaatgtgacggtggactacattagaccagccagcccagccacagagacagtgcct

SEQ ID NO: 331322 - DNA, 83 bp, Homo sapiens
ttactaccactcacccgcagactccttctccagcatgggctcgcctgtcaacgcgcagggtgagtcagatgattccattctcc

SEQ ID NO: 331323 - DNA, 82 bp, Homo sapiens
tccgccgcccgtccacacccgccgccaggctccctggggaagggaatgcagggttgctggggctgggcccagaagcagcagc

SEQ ID NO: 331324 - DNA, 100 bp, Homo sapiens
cttttgatggtggaagtggtgaaacccaaacaacatctcctgctattccttgggctgcctttcctgcagcactgccagtgaaagatgtagaagataaacc

SEQ ID NO: 331325 - DNA, 96 bp, Homo sapiens
cagtattctatgctgctaccatagcaatcaatgtcttttccatcatgtacacaggagcaccaggctatcgagatggaaataattcagaagcttcag

SEQ ID NO: 331326 - DNA, 88 bp, Homo sapiens
tgtgttgtggaagaatggttatcagaattcaaggctgagtcatcactagagagtgggaagggcagcagcagcagagaatccaaaccct

SEQ ID NO: 331327 - DNA, 98 bp, Homo sapiens
agctttgaagcttgatgtctactgttttgaagcgttcgatcttttaacatcacatcacatgctgacagcacaagaagccatggcaatgacaggctcaa

SEQ ID NO: 331328 - DNA, 100 bp, Homo sapiens
ttttgatcaccattggctgggaaggaaaaacagaatcagctgttccctgcgaaaggaggagagacttcagcatgcaaaccttcatctgttcggcttgcac

SEQ ID NO: 331329 - DNA, 50 bp, Homo sapiens
cagagcccggagaaaagccacatgttctaatacccgatttacaattacat

SEQ ID NO: 331330 - DNA, 51 bp, Homo sapiens
aaagatctcgtacaagatccttctttgtgtggcagtagctctgtggaccca

SEQ ID NO: 331331 - DNA, 82 bp, Homo sapiens
tcatcattactaacaggatattcctcatgacattgctgtctgggcttcaagcagcaagctcttacagtatccacagatcctg

SEQ ID NO: 331332 - DNA, 101 bp, Homo sapiens
gttgctcctcccggggcccttcccgggcaagcttaatgcagataccgaaagagaagaaggcgaagagtttgaagataacatggatgttttcgatgacagca

SEQ ID NO: 331333 - DNA, 100 bp, Homo sapiens
tcactgcagaggtgctggagctggcaggaatgtctgatcacagatacggggatggtggctctactttccagagcacaacaggacactgtgtacacatgcg

SEQ ID NO: 331334 - DNA, 80 bp, Homo sapiens
agcgcagaaatgttggatttgaagaaacatcctactggtagatggaacagcatgtggtgaaatcaaaatcactgattttg

SEQ ID NO: 331335 - DNA, 90 bp, Homo sapiens
cacggatggaaagatggagatgaacctctaacacagtggaaaggaaccgttctggatcagatttctgcgccaggagatgaggggcggtag

SEQ ID NO: 331336 - DNA, 100 bp, Homo sapiens
aggaaagggggagagtgctggctacatggagccctatgaggcacagaggatcatgacagcatctacaaatctgaaggacaaaacatggttcaagcatctg

SEQ ID NO: 331337 - DNA, 82 bp, Homo sapiens
taagctatatactttggttacctatgtacctgttaccactttcaaaagctatcagacccctaatattattctagatattcag

SEQ ID NO: 331338 - DNA, 89 bp, Homo sapiens
cgctcctcggccgcgcaatgggcacccgcgacgacgagtacgactacctctttaaaggccagaagcggactcctagaagaggggagcag

SEQ ID NO: 331339 - DNA, 75 bp, Homo sapiens
catgcgcttttgacacattggaggttgtggcagcactgcctgaaggtatgagaccagattctaatctttatggtt

SEQ ID NO: 331340 - DNA, 132 bp, Homo sapiens
ggggaatttccttgtgcctccattcccgggaggggggagcggcgttggaggccaccgtttccaggacgcacagacattcgggtgcttcagccagaacaaccccagcaaccggcgagcaaagccccggtgctc

SEQ ID NO: 331341 - DNA, 100 bp, Homo sapiens
tcagctcaagccagacacatgaacatttacagttcagttttatgatggagtaattcgttgtttaaaaagaatgcacattaaagccatgcccgaggatgct

SEQ ID NO: 331342 - DNA, 82 bp, Homo sapiens
aatgtttagccaacccaaattaccttaattgaaacctgtccagtttaagtcgtcttggtctgagatataacagactgtcagc

SEQ ID NO: 331343 - DNA, 100 bp, Homo sapiens
cgctggttcaaggttgggcattgggtggaggagcagaatttactacagcatgtgatttcagggcccatttggaggccagcgctgagaagtggaacaggtt

SEQ ID NO: 331344 - DNA, 75 bp, Homo sapiens
atgacctatgcagttcgaaaactggataacactaagtttagatctcatgagtcgctgtcagggttgaatcaagtg

SEQ ID NO: 331345 - DNA, 100 bp, Homo sapiens
ctggattcaagtcccaggagtcctgaccagagagcaggttgcccccaagtttcctggcagtgtgtgatactgaggaggtgagcttgtttctggagctgtg

SEQ ID NO: 331346 - DNA, 83 bp, Homo sapiens
gccttttaaatgctcccactgtgacagtttccaacatggctagatccatcagaaactgaagccgtggagaacgctctcggggc

SEQ ID NO: 331347 - DNA, 100 bp, Homo sapiens
ccctctggaactggagcagctggaccagcaccatgagatgaaggagtacaagcgcaagctagccagagtttccctggtgcgcaaagaactcaggtcccgg

SEQ ID NO: 331348 - DNA, 75 bp, Homo sapiens
tgaggcagagggtggcccatgagccggttgcgccacccgaggacaagaagatggcagtgaacgtatactcaacgt

SEQ ID NO: 331349 - DNA, 75 bp, Homo sapiens
tacacctcggagcatgtgcccagatccgggtgctgtggacttggagaaagtggccaatgtgattgtggaccattc

SEQ ID NO: 331350 - DNA, 99 bp, Homo sapiens
aggatggcatcaccttcattgacagcaaggaggagcaggtgcggacccacgaggccaagctgaaggccatggcaagtgagctgcgggagcaccgggccg

SEQ ID NO: 331351 - DNA, 83 bp, Homo sapiens
cggttgtggatcttgaagctttggaaaggtgacccaggcctctctccggtctcacattggagttgtgccccaagacactgtcc

SEQ ID NO: 331352 - DNA, 75 bp, Homo sapiens
ccgatttcagcatcggggcagacaccgccctgaacactatcaccgacgtctctaattaacagaagatggcaaagc

SEQ ID NO: 331353 - DNA, 74 bp, Homo sapiens
tatgcaccacctgatatcaccaactgtcccttcaataatcaggagatggcagaatggtttcaggcgggctattt

SEQ ID NO: 331354 - DNA, 104 bp, Homo sapiens
gggtaaagtcgagtatctggtgaagtggaaaggatggcccccaaagtcaaaatgcagatcttcgtgaaaacccttaccggcaagaccatcacccttgaggtgga

SEQ ID NO: 331355 - DNA, 80 bp, Homo sapiens
tggtgtaccaggcgaagctggccgagcaggctgagcgatacgacggagcccagcagccggggccgccctattacaccgac

SEQ ID NO: 331356 - DNA, 75 bp, Homo sapiens
cgcataagagcaaagaatactattgttgccacagggataacgtggaaagggcagatgctttacagctgtctgtgg

SEQ ID NO: 331357 - DNA, 117 bp, Homo sapiens
ggcacacaggaggcaccttggataagctggagtctattcctggattcaatgtcatccagagcccagagcagatggtggatgcttccaaaagcatcgaagctgtccatgaggacatcc

SEQ ID NO: 331358 - DNA, 101 bp, Homo sapiens
tgatgatgttcactggaaggaaaatgggacattagttcaagtagcaactatatcaggtgactctcctattccatctgtttcttcgggatcatcttcacctc

SEQ ID NO: 331359 - DNA, 98 bp, Homo sapiens
gatatcgacgtcgtgatccagaagtccagagctgaggactgcctgtttgcagtacaaggtgaatatcttaaccagacttgccgcagaattgaacaaat

SEQ ID NO: 331360 - DNA, 83 bp, Homo sapiens
ggaggagctgtgcagccgcgaggaggcgcgggaggtgttcgagaacgaccccgagacggctaccggctctctgaccagttcca

SEQ ID NO: 331361 - DNA, 96 bp, Homo sapiens
agctacttcaacggaaactagctcatctgtagagactgatttgcaacccttccgggaagccatagctctgcatggaatatattaaaggaatctgtg

SEQ ID NO: 331362 - DNA, 98 bp, Homo sapiens
gttcaaaggggaaaattactgatacagagacgatggtcggaatcagatttgaaaatgaaagttatgttccagtaaaaggagaccatgtgattggcata

SEQ ID NO: 331363 - DNA, 74 bp, Homo sapiens
ggaagccatagcactcgcagagaaatatggtttcagaagaggagccccgccgaggcatgagggccgtgctcccc

SEQ ID NO: 331364 - DNA, 74 bp, Homo sapiens
agacatttattctttcttggacctcagatttaccagacatctcatgagcccagcattacatcaacatgcccgtg

SEQ ID NO: 331365 - DNA, 100 bp, Homo sapiens
gacgagctggagaaggccatcaccacgcagaacgtcaacaccaagtgcatcaccatccccagttcaaatctgaacatcaatgatgtactagggaactact

SEQ ID NO: 331366 - DNA, 100 bp, Homo sapiens
ttaattcaaggtcacacaatgtcggggatggacctccagatttccttactggcagctggctaagagtcttgggcaggctggtgaaattgagcctgaaaca

SEQ ID NO: 331367 - DNA, 100 bp, Homo sapiens
agaccccaccatgtacctggctttgagaaacctcatcctcgcactgtggtatactaactgcaaaccttgcagtctcatcctactcaagtgtggctctgta

SEQ ID NO: 331368 - DNA, 75 bp, Homo sapiens
tgggagcctagaatgcatcagtgcccttgtggcgaatggggctcacgtcgacaagctatagtcagcagactggac

SEQ ID NO: 331369 - DNA, 82 bp, Homo sapiens
agccatgctgaactcgtatggagaggcttgggcactgtttaaaggaaagttccgagaaggcatcgacaagccggaccctccc

SEQ ID NO: 331370 - DNA, 96 bp, Homo sapiens
gatggatttttgcatgagacgcttctggacaggtgaccaaggaagaaaggcacattgttaaacctctctatgatagatacaggcttgtaaaacaaa

SEQ ID NO: 331371 - DNA, 51 bp, Homo sapiens
tgggaaatccaggaagacagtaggaccaaggatgccctcttcacaattctc

SEQ ID NO: 331372 - DNA, 96 bp, Homo sapiens
gaccaccctcatgaacacactcatggacgtccttcgccacaggccaggatgggtggaagtgaaggaatgtccagctcgccgctgtccaagaaacgt

SEQ ID NO: 331373 - DNA, 100 bp, Homo sapiens
ggctgctgagacgaacgcttcactggggcagtctctgcatatcatggggagatagacgctgctgcctgggatcagacaacaccatcttctttacaaccta

SEQ ID NO: 331374 - DNA, 74 bp, Homo sapiens
cggaagtgcagctgcctcagttcttagcgcagttctattgtttccaccctgctagctcttatggatggattgga

SEQ ID NO: 331375 - DNA, 80 bp, Homo sapiens
gcgcgatgctggaccagttgatgggcacctcccgggacggccgactcgcgggccgctgcacccaccgccaaggacaaaag

SEQ ID NO: 331376 - DNA, 100 bp, Homo sapiens
ccgggagttcaacaaataccttgcatacatggagtctaaaggagcccatcgtgcgggtcttgcaaagggcagctttggaagaagtagaaggtgatgtggc

SEQ ID NO: 331377 - DNA, 50 bp, Homo sapiens
ggaaagctttaggagttcacagtggaagtgaatcgtattaaacacagcaa

SEQ ID NO: 331378 - DNA, 100 bp, Homo sapiens
cgacgccagcgtttccagtcaccgcttctttggacccaatgctgaaataagtgagaaagatcagtctaaagaaaaggagaagaaagtgaaaaaaacaatt

SEQ ID NO: 331379 - DNA, 75 bp, Homo sapiens
agaaacttgaggcgggaagcagagaaaggcaagcctgtcaccttgaaagacgctggagagcgaggtggcttcaat

SEQ ID NO: 331380 - DNA, 85 bp, Homo sapiens
tgctggagccattggtggcattgttattggagatgttgcagtaaagatcctaaaggttgtcgacccaaccccagagcaattccag

SEQ ID NO: 331381 - DNA, 95 bp, Homo sapiens
tctttcgcttttttacctgccaatcaaactgctacaagacaacaccctgatctggcatggacatgtacaaattctgagctgtctaacccctctga

SEQ ID NO: 331382 - DNA, 88 bp, Homo sapiens
aagccaggttgcagggtgtccgcttcctcaggttctgaagccagacacaagatgaaaaagctaactccaaaacagaaattttctgaag

SEQ ID NO: 331383 - DNA, 50 bp, Homo sapiens
cccgtgctggcgggtggcccaggacggttgataaggattttattcctgga

SEQ ID NO: 331384 - DNA, 90 bp, Homo sapiens
atgataaattgcaagaaaaagtggagctcttatcccggaagctaaacagtggaggtgagtgtggtccaagattcagtaaacatatcagga

SEQ ID NO: 331385 - DNA, 80 bp, Homo sapiens
aacacaagcgagaggaggaggaggatgatgagcacagttggcgggcagctcccaggtctccatgagtacggcgccgtcgg

SEQ ID NO: 331386 - DNA, 75 bp, Homo sapiens
tgggctggctgctgctggccgaagcgaagggcgacgccaagccggaggtgtctttggtgcaacactaacaaggct

SEQ ID NO: 331387 - DNA, 96 bp, Homo sapiens
atgactctccaggtgcaggaccctgccatctatgactccaggtcttcagcacccacccaccgtggtacagctgagtcagtgctgattctctcaaat

SEQ ID NO: 331388 - DNA, 71 bp, Homo sapiens
ggaagtactgtgagatacctgcttgccagactggttggtggagaatttgaactggagatgaactctattat

SEQ ID NO: 331389 - DNA, 50 bp, Homo sapiens
ggaaaaacttcttgccaaccaaagtaattgtcatgagaaaaccctggaca

SEQ ID NO: 331390 - DNA, 88 bp, Homo sapiens
gctcgggagccgccgacgggcccgacgcggccgcgggcaacgccagccaagcccagctgcaggactatggcagccagggacgccactt

SEQ ID NO: 331391 - DNA, 101 bp, Homo sapiens
ccaccaagcatcccattacagatagaagaggtgctgatccttttagaggcagccgtggaagaggaaaagagatcagaagagaaaaggatattggtttgcgg

SEQ ID NO: 331392 - DNA, 97 bp, Homo sapiens
ggaccctggagtacaccccgcagcacagccgcgacttcaaggattgactcagtcagcattgacacccttatcttcactttggagtttactaattgga

SEQ ID NO: 331393 - DNA, 88 bp, Homo sapiens
tctttgacaagtgatgagaagctgtcggagcttcccaagtcaccttcaggccattcagaggaggaaagagaggggaatatgaagtcag

SEQ ID NO: 331394 - DNA, 75 bp, Homo sapiens
caccagcagcttcgacaaagggaccatgcggaggatggcgctgtccatgatcgatacggcaagaagaagctgaaa

SEQ ID NO: 331395 - DNA, 74 bp, Homo sapiens
aacatgtatgaaggtgtaggaagaatgagtggagtcaacatatcaatggagcaagtcacagtcgtcgatgccag

SEQ ID NO: 331396 - DNA, 82 bp, Homo sapiens
gccgggcgcgtgctgccgctcgtggcgggccgagcccagctcaacattggcaatgtgctccctgtgggcaccatgcctgagg

SEQ ID NO: 331397 - DNA, 75 bp, Homo sapiens
tcgggtttggaagaggatcagtatggcatgcccctggccatcttcacaaaggtgtgatgaatgcagactctgcta

SEQ ID NO: 331398 - DNA, 83 bp, Homo sapiens
gtttgtggatcgctgtgatcgtcacttgcatgattatgatatgagggtggatgatttccttcgtcgcacacaagctgttgtca

SEQ ID NO: 331399 - DNA, 90 bp, Homo sapiens
gtcttgctaagcttcgtcgagaactcattactccaaagggtggtggtggtggaggtccaggagaagatgatagaagatgttttgggagaa

SEQ ID NO: 331400 - DNA, 82 bp, Homo sapiens
acggcagtccatgacggtgaagaagggagagattttgcaagaacgaggctcaaggatgtgagggacacagtattgacagctg

SEQ ID NO: 331401 - DNA, 100 bp, Homo sapiens
gtagttataaaagcaaacacaggattcaccacagtacttcacatcgtcgttcacatgggggagtacagaagtaggtttacgagtgaagagaccctgatgt

SEQ ID NO: 331402 - DNA, 83 bp, Homo sapiens
ggcgagaggtgccaagggagcttctgtcccgaggaccaggggatgcgaagggcatggaagaggagatggttcgtgttacgcag

SEQ ID NO: 331403 - DNA, 111 bp, Homo sapiens
agtgtctggatggaacctgagctgggtctctgactcacttctgactttaggtcaccggattgaaactgtctcaggaccttgatgatcttgccattctctacctggccacag

SEQ ID NO: 331404 - DNA, 75 bp, Homo sapiens
tgtggtgtatggattcatctcactgactgaaacctgagttttgattcaccagtctgcaggtgtacccaacagctc

SEQ ID NO: 331405 - DNA, 75 bp, Homo sapiens
tgcacaggcagcatgctgaccacctgctattgacctgaaaagtggttctggaaaagtgtaccaaggccctgcaaa

SEQ ID NO: 331406 - DNA, 96 bp, Homo sapiens
ggcatttcagtcactggtttgcagagtccaggcttcttctcatatcggtaattccactcaggccactgtgagggatgcagttgttggaagaccatc

SEQ ID NO: 331407 - DNA, 98 bp, Homo sapiens
cggcggcagcgggtcttgggtcctccgagagcagcagcggtcctggctataagtcaccatggcacagcaagctgccgataagtatctctatgtggata

SEQ ID NO: 331408 - DNA, 75 bp, Homo sapiens
gggtaacatggcggatgcggaagcgctcctggttgcagccagaatgcatgacttcaggaggactgtgaaggaggt

SEQ ID NO: 331409 - DNA, 100 bp, Homo sapiens
tctgagaagggagacgacgctgctgggtccgctgagcggggcgacccgagaactgtcaagtaatccacctctggctaccatccttattcctcctcatgct

SEQ ID NO: 331410 - DNA, 80 bp, Homo sapiens
cttgaaaagactgggcttgtccttgctggtgcatgcgtcgtcggcctctgggcagcagacacgttggtcgtcattgcctc

SEQ ID NO: 331411 - DNA, 100 bp, Homo sapiens
cctaaactggacctgggcttcaaggagggccagaccatcaagctcaacatcgcagaacgtcaaggtcgtgggaaataaaaggcagttctacacagactgc

SEQ ID NO: 331412 - DNA, 101 bp, Homo sapiens
cgactatttggcaagaagcagatgcgcattttgatgggcactcacctgccttgggatgagcagtggctgattgaatcactttctgactccactatttacat

SEQ ID NO: 331413 - DNA, 74 bp, Homo sapiens
cggaagctggcgtactccggcagcgaaagcggtgcagacgggaggaagattgaagatctcaaacagacaaatca

SEQ ID NO: 331414 - DNA, 95 bp, Homo sapiens
gtctgctcctggcatgccctgccacagccactggtttactcctggcttgggggcattaggaagcactggaggctcttcgggaactaatggatcta

SEQ ID NO: 331415 - DNA, 75 bp, Homo sapiens
tgaactcttcagataatcagagtggaggaagtacagccagcaaacattaaccaggtggtatttgttggaaatttc

SEQ ID NO: 331416 - DNA, 100 bp, Homo sapiens
gaaaacgtaatgaggatgaagattcaccaaataagctatatactttggttacctatgtacctgttaccactttcaaaagaaaagtcttgcacgaggagca

SEQ ID NO: 331417 - DNA, 98 bp, Homo sapiens
caaagcaagtgaaggcacagacgcacgggacaggagagcctgggcaagactggagagtccggttccagttgttggcaaaggagaggaagaggaagagg

SEQ ID NO: 331418 - DNA, 82 bp, Homo sapiens
tccttacatgtgggaaccccaggagcttggtctcgtcagcctatctcggcccctctcttttcatgtcctgacaaaaacaagg

SEQ ID NO: 331419 - DNA, 100 bp, Homo sapiens
ctgttatccaccccaagaatcctcatgctcctactatccatttcaactacagatactttgaagtagaagaagctgatgatgtagccatagctgtaacgta

SEQ ID NO: 331420 - DNA, 101 bp, Homo sapiens
gaaaaaatggttgacctcacccaggtctagtgacggagcccgcgcgcggcgccaccatgcggcagaaggcggtatcgcttttcttgtgctacctgctgctc

SEQ ID NO: 331421 - DNA, 76 bp, Homo sapiens
ccctcgaagtgcgcaaacttgacactcaccctgaccggcttcccagctggcgtgtatgttgtaaagagagttcttc

SEQ ID NO: 331422 - DNA, 74 bp, Homo sapiens
gctacgagctggctttaatcctgaaagccatgcagcggggagttctgggaaatcgttcattcatttacagatga

SEQ ID NO: 331423 - DNA, 83 bp, Homo sapiens
agaagagcagagcggagggagccccagacacggagcgatctctctttgagtcggcatggaagaaggagaaggacatcgtttcc

SEQ ID NO: 331424 - DNA, 95 bp, Homo sapiens
gctctgaccagcgtggaagatgagagcagcctgaacttacactgtgaaaatgccagatcagaaaagggagctcaggtaccttccagagagtgaga

SEQ ID NO: 331425 - DNA, 100 bp, Homo sapiens
ccagtttcaatctcagggaacatggaagtagaagcactatttaaaggagataatttaccaaaatttataaactgtgaatttgcatataatgataattggt

SEQ ID NO: 331426 - DNA, 98 bp, Homo sapiens
caaaattaaagaattaaagggggaaaaagtaattcgaccagaatggattgtggaaagggtgcctctgccaactggtggaatcatcgccacttccagca

SEQ ID NO: 331427 - DNA, 100 bp, Homo sapiens
ttgggggccacggcgcggacgccatgatgaagaactgccagcatgcgaatgctgaacgtcctactgttgctcggatctcatctgtgcagttccatcccgg

SEQ ID NO: 331428 - DNA, 97 bp, Homo sapiens
tgagacatgcacttgctacgaaacagaaatttcatgttgcaccctgtgtcatggagaaactccagctgggcccagagattctgcagcgggaaaatcc

SEQ ID NO: 331429 - DNA, 90 bp, Homo sapiens
ctcctacctcccggcagcctctccaggcccagagcaagagaggcatcctcaccctgaagtaccccatcgagcacggcatcgtcaccaact

SEQ ID NO: 331430 - DNA, 100 bp, Homo sapiens
aaagtgcaacattcatttcaatcttttggatcctttgaaaaatcacatgaaggttgacctgacagttcaagaaaaggagaaatatcttaatgtgtctcgc

SEQ ID NO: 331431 - DNA, 75 bp, Homo sapiens
aaattattgaagcctgtgatgtgtgtctgaaggaggatgataaagatccatttggtggtgatcctttcaaaggtt

SEQ ID NO: 331432 - DNA, 76 bp, Homo sapiens
ttttaccattgcacatgagattggtcacaaggttttacagattcctgtggcaaattctaccaagcaacgataaaac

SEQ ID NO: 331433 - DNA, 101 bp, Homo sapiens
agtggattcaaatggaaacatcattgtggccgactggggaaacagcaggatccagctgctatgtcagtaaaagaagtccttcaaagcttagttgatgatgg

SEQ ID NO: 331434 - DNA, 100 bp, Homo sapiens
cctatgatataagaggaaattttctcaagtggcaaactttagaaggaggtgttttacagctggtggagctgtctaaggctcaagatatagaagcaggaga

SEQ ID NO: 331435 - DNA, 74 bp, Homo sapiens
tcgcttggtgtcctcctggcctcagcaacctgacaattctgtcgtgtcccggcaagaaggggttaaaagtggaa

SEQ ID NO: 331436 - DNA, 50 bp, Homo sapiens
gccgacacgggcgacttccacgcagtcctgcgttaactgcggccgggagg

SEQ ID NO: 331437 - DNA, 75 bp, Homo sapiens
cggcggcaccgggaggccgggccgagcggcctctccttccgatgaaaagagaaaggaagaatggactacagccac

SEQ ID NO: 331438 - DNA, 100 bp, Homo sapiens
tgtcagctcagtgctgtgcgggccagagttatcagttcagtggatggaatatcattacaaggatttccaagtgaaaaaataaaactggaagcagattttg

SEQ ID NO: 331439 - DNA, 100 bp, Homo sapiens
aaacatgacttccaagctggccgtggctctcttggcagccttcctgatttctgcagctctgtgtgaaggtgaaaaatgttctaaaactgattgtggtcat

SEQ ID NO: 331440 - DNA, 51 bp, Homo sapiens
gccaaaacagttcattcatattcagcgattggagacacaaaatcagaaatt

SEQ ID NO: 331441 - DNA, 100 bp, Homo sapiens
agcagtgcttgctgctttttctaactatttcaagatgatatttattcaccaaacaagggtcatcatcaaatccacagcaaatttccagttttgacttcac

SEQ ID NO: 331442 - DNA, 100 bp, Homo sapiens
cagtgggacccgcactggcagcgggaggcagagggaggaccctggaacatcccggaagccgggaaatgatgcgtctgaagaaacatcgctggtataagaa

SEQ ID NO: 331443 - DNA, 99 bp, Homo sapiens
aactcagacatctgcaaatcatgataccagatgacaattttagcatcccagaaggtgaagaagatctggcaaaagcaattcagatggcccaagaacagg

SEQ ID NO: 331444 - DNA, 96 bp, Homo sapiens
tgaggacacctgaggttcagattaagaaatctgccccaaagtcttagaactgtgtttcctgaggttataggcgggtgtttgaggagtacatgcggg

SEQ ID NO: 331445 - DNA, 71 bp, Homo sapiens
cgcttccgagcctcacctttattctctcagcacactgcagatccgggtgctgtggacttggagaaagtggc

SEQ ID NO: 331446 - DNA, 80 bp, Homo sapiens
gtattatggtgtaaacaacgattctttggaggtttattccctgctgtcctgaatcttgcttctaatgctcttatcacgac

SEQ ID NO: 331447 - DNA, 76 bp, Homo sapiens
aaaaaagatggagccctgcatatgattggctctttagctgaaatacttctgaagagcagcagaggtgagaactcag

SEQ ID NO: 331448 - DNA, 99 bp, Homo sapiens
agtgtcttgtaaagagccctgagcagagggccacagccactcagctcctgcagtccacaggtcctggctaccctgggaagagacaagaagtaaatgaag

SEQ ID NO: 331449 - DNA, 75 bp, Homo sapiens
tgcctttctggacacagaagtatttgtgacaggaaatatattcttccctctctcctgcctttatgaggaaactga

SEQ ID NO: 331450 - DNA, 98 bp, Homo sapiens
ttgaacttaatacagcaagaaagaccatcaagtttaccataatctatgccagcaattatgacaatgttagcagaccatgcagctcgtcagctgcttga

SEQ ID NO: 331451 - DNA, 83 bp, Homo sapiens
gtgttcgactgctagagccgagcgaagcgtgcacattcaggttcccgagcacaaacatcaagataacgttcactgccctgtcc

SEQ ID NO: 331452 - DNA, 100 bp, Homo sapiens
cttcaagatggcggtgcaggagtcggcggctcagttgtccatgaccctgaaggtccaggagtacccgaccctcaaggaaaatgtttataggaggccttag

SEQ ID NO: 331453 - DNA, 75 bp, Homo sapiens
acaacattttgtttctgacagatgttactcgagatacatcgagatatttccaagcagaaggaatgaagttcgaac

SEQ ID NO: 331454 - DNA, 100 bp, Homo sapiens
gtaatgcggagtagtgattgcccatacattgttcagttttatggtgcactcttcagagagagaaagcaaccagcgagatgaatactgctgaggactgggg

SEQ ID NO: 331455 - DNA, 100 bp, Homo sapiens
attgtggttggcttctgttacgctaggaatatggcaaacgttccgagcctcactctatccctgtcctgagacaccacaggagaggaaggaaatggcttct

SEQ ID NO: 331456 - DNA, 75 bp, Homo sapiens
agttcacagaagagtcgaggaggtgatgtgctctatgaactccttcagcatattctgaagcagaggaaacctcgg

SEQ ID NO: 331457 - DNA, 75 bp, Homo sapiens
tgaatatgatcaagttctcgtggagtcagacaatgagtggatgattcaacagccacacaaagcagcaacattttt

SEQ ID NO: 331458 - DNA, 98 bp, Homo sapiens
gggagatcccaggcggtgacagagtggagccatggctagaggagagaagatgactgaggaggaggtggagaccgttctggcaggacacgaggacagca

SEQ ID NO: 331459 - DNA, 100 bp, Homo sapiens
tgccatgttggaactcaatgcttcaaatgacaggcgcagttgtgtagcagttgagtaatgctggttagctgttaaggtggcgtgttgcagtgcagagtgc

SEQ ID NO: 331460 - DNA, 87 bp, Homo sapiens
cctttctattttaaagagccaagcctcagagacctgtgcctactacactggcacaagtggatagagaaaagatctatcagtggatca

SEQ ID NO: 331461 - DNA, 78 bp, Homo sapiens
tttgggaggccgaggcgggcggatcacgaggtgccacacctccctggatgatccaagatgaagaatacattgctggga

SEQ ID NO: 331462 - DNA, 82 bp, Homo sapiens
cttgggatggtgtcagcctattacacatacatcttcactaatctggtatcatgaactgatcactaaatatgggaagttggag

SEQ ID NO: 331463 - DNA, 96 bp, Homo sapiens
aagaacaaagaagactttgcttcattaaagtgtctgagaaggaagtgtctcctttcctcttgggccgggcactttgggctgccagtcggttcactg

SEQ ID NO: 331464 - DNA, 97 bp, Homo sapiens
gtaggcacagctctcctattgaaacttgcccagatgttctcagatatggtcttaaaagctgactttggtttctgtgcccagatcacccctgagcaga

SEQ ID NO: 331465 - DNA, 75 bp, Homo sapiens
cgacatggagaacgaattctactatcgctacccaagaaagatgaatgggagggctgattttcgagagccgaatgc

SEQ ID NO: 331466 - DNA, 74 bp, Homo sapiens
aatggccatgtcctacgtgaaggatgacatcttccgaatctacattaaaggtccctttctagagataggagaag

SEQ ID NO: 331467 - DNA, 90 bp, Homo sapiens
tgaaaaatgaagatgatgtagacactggactattaggttcaaaatcaaaggaagcccagaagggaggtcatttttacagtgcaaagcctg

SEQ ID NO: 331468 - DNA, 50 bp, Homo sapiens
aggactgttatgattgggggcaagagtggctgagctcccttcgggcccat

SEQ ID NO: 331469 - DNA, 100 bp, Homo sapiens
caatatccaagaagcagtagagggtgccatgcacattcaggtcacccaacctgcctgcagtttaccctgaacatgaccgaggctgtcaagacctacaagt

SEQ ID NO: 331470 - DNA, 101 bp, Homo sapiens
caagaacatccgagggtgcctgggaatcggtcgcctggaggaccagtatttcccatggagggaaatgtgactggaaacagtaactccacgttcatctccag

SEQ ID NO: 331471 - DNA, 83 bp, Homo sapiens
attccaagtaactcttatttggtgatggaagtcaaaggacaaatgatccatgttccagaatcaaattccattttatttttggg

SEQ ID NO: 331472 - DNA, 96 bp, Homo sapiens
gctggactaaacaggtcacctgcagactgtgccctgtccacggtgcctcctgcatgtcctgctgccctgagctgtcccgagctaggtgacagcgta

SEQ ID NO: 331473 - DNA, 80 bp, Homo sapiens
caaaactgtcctctaaggatctaaaactgtactatactggcaattgctggagaagattttgcaattgttgcttctgatac

SEQ ID NO: 331474 - DNA, 74 bp, Homo sapiens
cttcggcatcctggcggcccacgtgcccacgctgcaggtcctggtgaacgccatcatcaacagtggtccccggg

SEQ ID NO: 331475 - DNA, 108 bp, Homo sapiens
agggattacagaaaggagaacaccttatttcagcattagtgaccagaaggatcccaaggatcgaatggttcaggttgtgaaatggtacctctcagcctttcatgcggg

SEQ ID NO: 331476 - DNA, 82 bp, Homo sapiens
aacgacgcgggcgagcggggctttggacgccggtggagacgcaggcgagcattttgaaagcgaagcagaagccgtagaatca

SEQ ID NO: 331477 - DNA, 76 bp, Homo sapiens
ttcatttttctacatattaggatataaccctgagacaagcagtgaccatcttgttgcaggaaaacaagttcagggc

SEQ ID NO: 331478 - DNA, 83 bp, Homo sapiens
cttcgctctcttcctggctgcgtccctagggggatatgagactttctactcggaatatcctgagtgttgcgtggatgtaaaac

SEQ ID NO: 331479 - DNA, 89 bp, Homo sapiens
aacaggactgactccagtgatgacgcaggccttaaggagaaagtttcagggtgtcggttggtggaaatatgaattctgctatggcaaac

SEQ ID NO: 331480 - DNA, 82 bp, Homo sapiens
ccgtctggatttccaaggaagaatttcctctgaagcaccgggtctcccttgatctgagaatggctacctctcgatatgagcc

SEQ ID NO: 331481 - DNA, 100 bp, Homo sapiens
agcagccggccttcgggtcgggcgtctccgccggctactgccgcttcagttctcccggtgtggccacgagtcgggcgatcagtgggtgaccgcggctgcg

SEQ ID NO: 331482 - DNA, 87 bp, Homo sapiens
gagcaactgcccatgctgggccggcgccctggggccccggagagcaataccaagaaggagggtgacctgatagctgctcaggctcgg

SEQ ID NO: 331483 - DNA, 100 bp, Homo sapiens
tcttgaggttcacagatgatacctttgatccagaacttgcagcaacaataggtggtccattatggctgacatgcaaaatctggtagaaagattggagagg

SEQ ID NO: 331484 - DNA, 75 bp, Homo sapiens
ttccagcttcggaacaagagaccctgtgaagcagccgacacgagtcgttgttcataaaacagcttttgaaagttg

SEQ ID NO: 331485 - DNA, 75 bp, Homo sapiens
acatgatcctcatcttttatacactcttagtgctgtccaggttactgaccttcaaggcctttgcccagctcttca

SEQ ID NO: 331486 - DNA, 76 bp, Homo sapiens
gccgacatggggcttaagatgtcctgcctgaaaggctactgcagcactggggtgtcagttgttggtccgacccaga

SEQ ID NO: 331487 - DNA, 82 bp, Homo sapiens
ctataagaaaggtgatattgtagacatcaaggatgtggctttgtttgagatgaatcagtcggattcaaaagaagtggacagt

SEQ ID NO: 331488 - DNA, 50 bp, Homo sapiens
tcaggacagttcttagatgctgcaaaggatgttgacaatgcgtctctggc

SEQ ID NO: 331489 - DNA, 98 bp, Homo sapiens
agttagatgccgattacccacttcgagtcctttattgtggaggtattggcaagcttgccagtgtacctgctggtggggctgtagccgtctctgctgcc

SEQ ID NO: 331490 - DNA, 76 bp, Homo sapiens
gggggagcggcgttggaggccaccgtttccagatttgcttgtaaatgcatcacgaagaggcagcccagaatgaaga

SEQ ID NO: 331491 - DNA, 139 bp, Homo sapiens
actttgggtcggccagtcatgtatcaaagactgtttgttcaacatatctacaatctcggtactacaggagaactatgccatttttgggtcaggactggagatctcctggatggagttggattaagacagaagatggctg

SEQ ID NO: 331492 - DNA, 50 bp, Homo sapiens
gaactacagaaacctggtctccctaggttatcaatactctggctgaccat

SEQ ID NO: 331493 - DNA, 100 bp, Homo sapiens
gggaggaggacaacaagtactgcgccgactgcgaggccaaaggttttcaaatggaacattttgatgcatcacttagtacctatttcaaggcattgctagg

SEQ ID NO: 331494 - DNA, 73 bp, Homo sapiens
tgatccagaagtccagagctgagaaggactgcctgtttgcagtgtaaacaggaacatcgataagtagtgtaaa

SEQ ID NO: 331495 - DNA, 100 bp, Homo sapiens
gctgccgtcgctgcagagaccccgctatggcttatctggagtccatctttcaccatcttctcctgagattgtactggaccgtgaccactcttcttccatt

SEQ ID NO: 331496 - DNA, 100 bp, Homo sapiens
ccgccggccgctagcgtcagcgccagccaggggctatcaacagcaggacgcccatgaattcatgcgctaccttttggaccacctacacttggaacttcag

SEQ ID NO: 331497 - DNA, 80 bp, Homo sapiens
gtccggggccggctggtgcgcgagacgccgccgagagggagtgcatccgccccaacccttttccccctcgtctcctgtga

SEQ ID NO: 331498 - DNA, 100 bp, Homo sapiens
acatcatcatcaagagggagatggtgtcccaatacttgtacacctccaaggctgtggtggttaataaggctgcagttatggtccatcagctttctaaaaa

SEQ ID NO: 331499 - DNA, 90 bp, Homo sapiens
agagatccaagtgcgcgccctggcgggtccggaccaagttgtatcacggactgattcaccgagcccaaccgtactcaactcacatatttc

SEQ ID NO: 331500 - DNA, 82 bp, Homo sapiens
agcccagcgcctcggccgaacccctccgcagcagggacccagacatggagctgcgggaagaagcctggtctccggggccgct

SEQ ID NO: 331501 - DNA, 108 bp, Homo sapiens
ccgttgctgcgggggattgtgggagtctccgcgtcccgctcgctgggagagagacaatgcagatcttcgtgaagactctgactggtaagaccatcaccctcgaggttg

SEQ ID NO: 331502 - DNA, 100 bp, Homo sapiens
ggcagagcagggcggcggcgactcgcacatggattaattgatgtatgttgagtttatggagctgccttttggtggcttgctttatctgcagtttttaaga

SEQ ID NO: 331503 - DNA, 83 bp, Homo sapiens
cgggaaccggctccggagcgagaacgcgcagctgcctgagaactggacagacacgcgggagacgctgctggaggggatgctgt

SEQ ID NO: 331504 - DNA, 75 bp, Homo sapiens
aacacttctccgagccagcgagccagcgagccgccgacccgccgagcaaaatggattctcaaagttggattggtg

SEQ ID NO: 331505 - DNA, 101 bp, Homo sapiens
ggagacgagaccagaggccgaactcgggttctgacaagatggccgggctgccccgcaggatcatcaaggtaacttgggtttttactcctgtaacaactgaa

SEQ ID NO: 331506 - DNA, 50 bp, Homo sapiens
ctcacactggatgagcaagtgatggagtctcgctttgtcacccaggctgg

SEQ ID NO: 331507 - DNA, 100 bp, Homo sapiens
gctgggtctggagacgccgtggcagcctgaacggagtgtgcgacggattgggaggttattgacccagtggctccacgatatgttgcattactgaagaaag

SEQ ID NO: 331508 - DNA, 76 bp, Homo sapiens
ctgtccctggcctactctgtcacccagggcaaattcatccgcatcaactttgatgttgccgggtacatcgtgggcg

SEQ ID NO: 331509 - DNA, 75 bp, Homo sapiens
actcaagtcaccgtggagctccgccgccccgaaactttcaccgcgagcgggtgcaccctgagcgtgacgctggag

SEQ ID NO: 331510 - DNA, 83 bp, Homo sapiens
ctgccaccatcttcgacttgagcgaagttttatgcaagtggaatgcagtagccctctgggcctgggatattgtggttgataac

SEQ ID NO: 331511 - DNA, 98 bp, Homo sapiens
tggagctgggtctggcgggctccgagaggcccgggagcggcgcgcagagcagcctccggccgccgccgcgcagacagaaacagtctccgccagtcaag

SEQ ID NO: 331512 - DNA, 82 bp, Homo sapiens
ggatcattggctatgtaaaagcaggtctcacagggatactgggtttgggcattgcggctcccaatctagccttttctcagat

SEQ ID NO: 331513 - DNA, 101 bp, Homo sapiens
aggcttccagtacgagctggttaggaggcacagggcgtcggacctgcacgagctgtctggatgatcggctgaatgtaacagaggaactaacgtccaacgac

SEQ ID NO: 331514 - DNA, 97 bp, Homo sapiens
ggctaatacaatggaagactttcagaagatactagattctggaaaggtgattccttcaacacccagaatgagccagaagacatgatgaaaaaagaga

SEQ ID NO: 331515 - DNA, 154 bp, Homo sapiens
acttgacctcggtcccagtgccccacaccaccgcactgtcgctgcccgcctgccctgaggagtccccgctgcttggttgcctgcggacacgctgggcctctgtcctgatgctgctgagctccctggtgtctctcgctggttctgtctacctggc

SEQ ID NO: 331516 - DNA, 74 bp, Homo sapiens
aagatgttgatggagaagctctaagtacactcgtcttgaatagggtctgtttcacccagcccggaaagtcagag

SEQ ID NO: 331517 - DNA, 73 bp, Homo sapiens
tgtaccggcatttcggcaaggccccaggaaccccgcacagccacaccaaacccaggcctgcccacctctctcc

SEQ ID NO: 331518 - DNA, 75 bp, Homo sapiens
tttctcagctgcctgctaacatagctgtttgcagttctaaggttcctaaagagaaagatgaaatggtagagcaag

SEQ ID NO: 331519 - DNA, 60 bp, Homo sapiens
ctcccaagtagctgggattgcagcttgccagcaaagcacggacagagaaggaggagaagc

SEQ ID NO: 331520 - DNA, 110 bp, Homo sapiens
ctcaagcagtcctaccatgtcagccttcccagtagctgggaccacagaatgcagtaatagtggccttgtcttcaaaatcatgggatgtagagactgcaacagaattgctt

SEQ ID NO: 331521 - DNA, 100 bp, Homo sapiens
cgccaccacgcactgggtcgtcacggaggacgggaaaatccagcagcaggaatatgtttatccagaagccagagacagacaatacttactatttttccat

SEQ ID NO: 331522 - DNA, 78 bp, Homo sapiens
aacagtgtaccagcagggcgttggctatgtgcccatcacagctcagagcccgggcgctgtggaagagattctagaccg

SEQ ID NO: 331523 - DNA, 101 bp, Homo sapiens
cagaagccttacagaagttctatcgtggtgagttcagatgtgaagccaaactacttgaagggtctttctcatgtacttaacaggctgcccaagcctgtact

SEQ ID NO: 331524 - DNA, 101 bp, Homo sapiens
gaaagatggatttttgcatgagacgcttctggacaggaggagggccagagatggatgactacatggagacgctgaaggatgaagaggacgccttgtgggag

SEQ ID NO: 331525 - DNA, 100 bp, Homo sapiens
cgaacatttctgggtgacactcaacaggattcccgggcacaaccataatggcattactgacttccgtgctacatgatgacaaagaatttcctaatccaaa

SEQ ID NO: 331526 - DNA, 101 bp, Homo sapiens
aactttgggtcctgaatcttctgggagctgaggaaccagatatcttgaaaagctgccagaaaggtgctggagaatctggtaaaagcaccattgtgaagcag

SEQ ID NO: 331527 - DNA, 100 bp, Homo sapiens
caggtctaccgggccacgcaccgcctgctgctgctggccaggcgggcaccacggcaggggctgagctaccctcatggaagggagaggaccgtaccggatc

SEQ ID NO: 331528 - DNA, 75 bp, Homo sapiens
tgagaggatgtggtggtctactctgatgtcaatcttgagggctaggcttcagggatgacttcttagggggcaggg

SEQ ID NO: 331529 - DNA, 51 bp, Homo sapiens
cagatactacagcaagccttgaaggtgtacgaagccatcgacagcagagat

SEQ ID NO: 331530 - DNA, 73 bp, Homo sapiens
cgcgacccgggaagctccgccgagttcctctgtgacgagggtgcaggtatctctggggactacatcgatcgcg

SEQ ID NO: 331531 - DNA, 50 bp, Homo sapiens
tgcatcctacaccaaactgcaggtgaaatgacaatggatgctctgttggc

SEQ ID NO: 331532 - DNA, 100 bp, Homo sapiens
ctacctcctggctgccgtgaataggcagcctaaaggaaaatggcagacaatttttcggtaagtgttttatgcctgtttcttccccttgatcagctccaca

SEQ ID NO: 331533 - DNA, 74 bp, Homo sapiens
aagaacttcacatctctcaggctacatgttgcaaaggttaaattccagctgtccctgggacaccccagtatgtg

SEQ ID NO: 331534 - DNA, 100 bp, Homo sapiens
gccaattctgacgccctcaaggtcgccaaggaggtggacccccaggtggaatcccccaaagaaggtaaagggagcaagccttccccactgtctgtgaaga

SEQ ID NO: 331535 - DNA, 48 bp, Homo sapiens
cagtggccttcgcgctaacgaagtttaaggaagaaatctctaaacgtt

SEQ ID NO: 331536 - DNA, 125 bp, Homo sapiens
cacggcactccaactggcttcgcttcgttcatgaggcaccatctcaggagcagaagaacttggctgccattcaaggattcgataaacaagtggatgtgtcatatattgccaaacattacaacatg

SEQ ID NO: 331537 - DNA, 100 bp, Homo sapiens
actacggccagtggtcaggcggccggcatgaggacttcctcgttctgcccatcttcctaacaaggctatggctgataacagcagtgatgagtgtgaagag

SEQ ID NO: 331538 - DNA, 107 bp, Homo sapiens
ctgaaaagtggagagcatcttaatccagaccagttgattctgatgctcacagtaccacctcaagtgcctccccagctcaatctccttgttacagtaaccagtcagat

SEQ ID NO: 331539 - DNA, 82 bp, Homo sapiens
taatttttctaaagagtcttgttatttcttctttgagaaaaacctgaaagatgtctcagctgaccaactgactgaagagcag

SEQ ID NO: 331540 - DNA, 101 bp, Homo sapiens
gcagacgccagctacagttttttttgggttatgtcgtcatgaagccggcgctttcagttgtgcaaccttgaacaaatggttaaatatgaatgtgaacagct

SEQ ID NO: 331541 - DNA, 75 bp, Homo sapiens
agaaatgaaacttctcaaatgagccaacctgagtcacaaggttttgcggctagttggctattcaagaaacctcgc

SEQ ID NO: 331542 - DNA, 100 bp, Homo sapiens
gtggtggtcggatttcaccacaagaagggctgccaggtgaatctggattgggaaagtcgacattaatcaactcattattcctcacagatttgtattctcc

SEQ ID NO: 331543 - DNA, 90 bp, Homo sapiens
ctcaggaagctcagcaagactggagtccctgatggaattatgcagtttattaaggtcagaatggcggcagtggagcatcgtcattcttca

SEQ ID NO: 331544 - DNA, 100 bp, Homo sapiens
cggcgagtaagatggaagatgaggaggtcgctgagagctgggaagaggcggcagacagcgggcaccaaatcagatgaaagccaaggaagggaggaatgtg

SEQ ID NO: 331545 - DNA, 88 bp, Homo sapiens
gtgcgccggcagaggatccagtgttcaccatcctggccccggaagtcagagcaccataacatggtgtgggaagtgaagacaaatcaga

SEQ ID NO: 331546 - DNA, 50 bp, Homo sapiens
cccagacccttcaggacagtggaggaatgccagctcctgagcaggcctca

SEQ ID NO: 331547 - DNA, 71 bp, Homo sapiens
gatcccggcgacatactacctctggccccgagatcagaatgccgggcagtcagggcgacagcaagaatgcc

SEQ ID NO: 331548 - DNA, 75 bp, Homo sapiens
caaccatgtcttccagctgcgagactcagtctacaagaccctgataatgagtgtgtgaatgagcttaaccagtgg

SEQ ID NO: 331549 - DNA, 152 bp, Homo sapiens
cgagggcgccgggagccgcggcccggaatcggggcgcttcgccccgggccccccagcatgaagaccccggcggacacagactgtgccctgtccacggtgcctcctgcatgtcctgctgccctgagctgtcccgagctaggtgacagcgtacc

SEQ ID NO: 331550 - DNA, 76 bp, Homo sapiens
aacaagatggcgaccgagacggtggagctccataagctaaagagcagcccgacggccatggaggctgaagagacga

SEQ ID NO: 331551 - DNA, 98 bp, Homo sapiens
cagcttcgaaggcgaccttccttgctttcagaatttcacccaggttctgacaggttttgagaacagagtgctgttttagagctggcagcagcatctca

SEQ ID NO: 331552 - DNA, 100 bp, Homo sapiens
gcaaggaagggggaccatcctctgcaggtaattccactgcttcaaggagctgaaccgtttgcgaaaggccgctctagcctttggtttcctggacctgctg

SEQ ID NO: 331553 - DNA, 90 bp, Homo sapiens
tgaccctcagcgccggtgcatgtcgatagataaagaagccaccagtggcccccaagcccaagtttgttgtggcaaataataagccagccc

SEQ ID NO: 331554 - DNA, 125 bp, Homo sapiens
aaagctgtagaaaccaaagatgaacgatttgaacaaagcgctagcaacttctaccaacaacaggtatcgtgatttccgatacccacctggacacccccaggagtataaacacaacatctactatt

SEQ ID NO: 331555 - DNA, 75 bp, Homo sapiens
ctttctggacagaccaacctgtcagtgctgcaaggggattcccgaagtcttccgttttctgagaatgtgagtgct

SEQ ID NO: 331556 - DNA, 106 bp, Homo sapiens
agaaggaggtcctgccgtccatgcggaagatcgtcgccacctggatgctggaggattttttatcaagcagaaatgcatcgaacaacgagaatcaagatcactgagc

SEQ ID NO: 331557 - DNA, 80 bp, Homo sapiens
aggctcctcagtgtgggcgagtaaaatgccctgcgtgtgagaagcaggatagctagcggccaggagaaatacagtggaaa

SEQ ID NO: 331558 - DNA, 100 bp, Homo sapiens
tctgcctgctggcaagaatctccagtttttgacgggggccattcagcaactgggtggggtgtgggcccatcgctggatggatctgtcagaacacggcttt

SEQ ID NO: 331559 - DNA, 74 bp, Homo sapiens
gatgtcatccccatggctgatgcagcaggcatcatccgctatgcaattggggcttcgcaaggcatggtgggtca

SEQ ID NO: 331560 - DNA, 83 bp, Homo sapiens
gtcggcgggagccagcgagccacgggagcgagccaggaacttgctactaccagcaccatgccctaccaatatccagcactgac

SEQ ID NO: 331561 - DNA, 100 bp, Homo sapiens
gtcggggaggagtttcatgaagagcccaaaacctattacgaactcaaaagtcaaccgctgaagagcagtacttcgggatgacttcagacaaaacccttcg

SEQ ID NO: 331562 - DNA, 100 bp, Homo sapiens
taagaattaaaagatgatgagaaataaggacaaaagccaagaggaggacagttcgctacacagcaatgcatcgaggtgtccaactatccattaccaagaa

SEQ ID NO: 331563 - DNA, 98 bp, Homo sapiens
aacgagcggcggcggcggcagcgggtcttgggtcctccgagagcagcagcgacaaagaagtatgctgatgtgatcatccctagaggtgcagataatct

SEQ ID NO: 331564 - DNA, 83 bp, Homo sapiens
ccaacacccaagtggtccgggaagtgcagcagaagtacaacatgggttcagggtcggagggagaagatggctttcaggtagag

SEQ ID NO: 331565 - DNA, 75 bp, Homo sapiens
atgaggagcagaagtcagtccggctgtttaagctatgaagaaggacatccctcacactctgaaacagatctcctt

SEQ ID NO: 331566 - DNA, 51 bp, Homo sapiens
acttcccggatccctactccaaagcctccggtgtggctgtctctgatggtg

SEQ ID NO: 331567 - DNA, 73 bp, Homo sapiens
gtgaatcccctgtttgagaaaaggcctaagaattttggcattgttccagggtctccctccactgctgtagtaa

SEQ ID NO: 331568 - DNA, 90 bp, Homo sapiens
ctggagtactcttattttgaaaagctacaaaagaccccacagctgtagagagagcaaacttgttaaacatggctaaactgagtatcaaag

SEQ ID NO: 331569 - DNA, 75 bp, Homo sapiens
gagcaacctggaaactgacaggaaaggatgacaagttgggagtcacaggcaagtgaaccggagcaaacgacttcc

SEQ ID NO: 331570 - DNA, 100 bp, Homo sapiens
agaggaactgctgttgttacctgggaaccctggaggggccttcctcatccgggagagccagaccaggagagggaccatgggctgtggctgcagctcacac

SEQ ID NO: 331571 - DNA, 100 bp, Homo sapiens
ataagtttaggggcaaatgtgaatgtgaaagattttgcaggccccttcacagatgtagtcactacaaatcttaaattgcgaaatccatcggatagaaaag

SEQ ID NO: 331572 - DNA, 114 bp, Homo sapiens
agatgctcatcaatggaggagagacttatgcctggaggaacttggaaatcaaactcagcagtttgaagagaacacatgaagaagaggatgattttggaaccatgcaagtggcga

SEQ ID NO: 331573 - DNA, 100 bp, Homo sapiens
agatggtaccgtgcatcgcacctatttaagaggctgttttatgctgtggatgttgacgacgatatttgggaagatgaggtagaagactagttaactactg

SEQ ID NO: 331574 - DNA, 100 bp, Homo sapiens
gacgcaggtgcaggtgtctcttctcgccctggcggggaaggctgatgaattcatccgagcaaatgccaccaacaagctgacagtcatagctgagcaaatc

SEQ ID NO: 331575 - DNA, 75 bp, Homo sapiens
gttcgggagtccttggaactgtggtccatggtaaagttttacaggaagaggcagaaatccaggcagaacttgaac

SEQ ID NO: 331576 - DNA, 51 bp, Homo sapiens
cctccaacaagctcccattggatcttaagatgtcaagccctccaacatcct

SEQ ID NO: 331577 - DNA, 106 bp, Homo sapiens
agaaggcagcagccctggtggatcgatacagcacccctgccaggtgacggccctgctcgggaggccctccagtctctgagccagcggcttcgggtgcaggagcagg

SEQ ID NO: 331578 - DNA, 80 bp, Homo sapiens
agttcgggggccccgggcgcatgaagcagagctgcatcatgcggcagtgcatcgcgcaattctgtggtgttcttggtcac

SEQ ID NO: 331579 - DNA, 75 bp, Homo sapiens
cgctggtgaagcccgcggcgcgcgcctctcccggaccctgcaggctccagaaacatgacaaggaggactttcctg

SEQ ID NO: 331580 - DNA, 98 bp, Homo sapiens
caccggctcacggaaaatgtctataagcaactgaagcagcagcgggacaagctgaggcagtaccagaagaggatcgcccagcagctggagcgcgagcg

SEQ ID NO: 331581 - DNA, 101 bp, Homo sapiens
tgcgccggctccgcggaagatgccggaccaagccctacagcagatgctggacaggtttgaagacagtgaaaaacaaatagattataagtcatttttctctg

SEQ ID NO: 331582 - DNA, 98 bp, Homo sapiens
tcatcgggtgttctctactccagagctccgacttatttctgtgggcagacattaacattcaggtcttctctgttggttgaaatgtctatgattttatc

SEQ ID NO: 331583 - DNA, 90 bp, Homo sapiens
gaaagctagaagaaaaggtgtacttgcaagaaacctcaggacttgagtaacagcaacatgtcctgtgcctcctgattgctgagtgttcac

SEQ ID NO: 331584 - DNA, 100 bp, Homo sapiens
ccttgtgaaacctcctagtagaaaaagttcttgggacaaacttcatttggagattacctggggcaattgatgttatcggtcagactataactatcagccg

SEQ ID NO: 331585 - DNA, 100 bp, Homo sapiens
cctctgaggcgctatggggcggtggaggagacggcttggaaaacggagagactggggagaaacaaatgtagtaggacattctttaggatgtacttggcat

SEQ ID NO: 331586 - DNA, 83 bp, Homo sapiens
tacagagagaaaattgagacggagctaagagatatctgcaatgatgtactgcaggaacgaatgcaggaatttgggaactgagc

SEQ ID NO: 331587 - DNA, 89 bp, Homo sapiens
tgtcttccccgtggttccaagactgctgaaccggatgtttgaccgagtcattcccaaaagcaagttcgtcttggtgaagttcgacaccc

SEQ ID NO: 331588 - DNA, 94 bp, Homo sapiens
gtttacttccagaagattggtggagcttgatctgaaggtgtggacactgccagcggctgcagccgacttggaatgacctgggagacaaatacaa

SEQ ID NO: 331589 - DNA, 75 bp, Homo sapiens
tcgagtgaccgagaccgcggccgggaccgaggatggagttttaacattgaatgcggagaacactaattatgccta

SEQ ID NO: 331590 - DNA, 83 bp, Homo sapiens
gaggcgtttgaacccgcagagagggcctgggagcacaatgctgagcgggccaaaccagtgctcctgccacctctctggctgcc

SEQ ID NO: 331591 - DNA, 90 bp, Homo sapiens
acaggcagtacggcatggtgctcggtggtattaaagataatcaaacattatcaagaagaaggacaaggaactgaagttgttcaaggagtg

SEQ ID NO: 331592 - DNA, 82 bp, Homo sapiens
caccagcttccagttagtggatatagcacaccatccccagccacaaccatgtccaagggacctgcagttggtattgatcttg

SEQ ID NO: 331593 - DNA, 100 bp, Homo sapiens
cccgggaccgccaggccaccaccggccgcctcagccatggacgcgtccctggagaaggcccatggacagaccttcacgttcccagatctgtttcccgaga

SEQ ID NO: 331594 - DNA, 100 bp, Homo sapiens
agaaaccatgtgctgaaatgtttgacgacactgatggtttgaattaaatgtgagggagtctgacgtaagagtttgtgatgagtcatcatgtaaatatgga

SEQ ID NO: 331595 - DNA, 98 bp, Homo sapiens
ttggctgcagatttgtggtgcgttctgagccgtctgtcctgcgccaagattggtttatcttggaagctaaagggcattgctcatcctgaagatcagct

SEQ ID NO: 331596 - DNA, 75 bp, Homo sapiens
gagcggccccacaacaaaagaggtccagcccctcagagggattgtgtccacctgtcactgcttcaaccacctgtg

SEQ ID NO: 331597 - DNA, 100 bp, Homo sapiens
tgagaggcagcactactcagacatcttcaccaccacagagcccatcaagcccgagcaggccgaagaacagttgagaattgttgaagaacaaagaaagatt

SEQ ID NO: 331598 - DNA, 100 bp, Homo sapiens
gcaagatggcggtgaatcagagccacaccgagaaccgccgcggagccctcatccctaacggtgaaaggttatcaccaatctagtgaaaatgttgaagtcc

SEQ ID NO: 331599 - DNA, 100 bp, Homo sapiens
acacttctgcaaccccgcagagcgcatccatcaaagctttgcgcaacgccaacctcaggcgagatgctgccagagaaactacgcataggctggaataaca

SEQ ID NO: 331600 - DNA, 90 bp, Homo sapiens
tgattgaaattatctctggtgctgcagctctgttacagtgtacagcatgtatgtttctataatggctttcaatgcaaaggttagtgatcc

SEQ ID NO: 331601 - DNA, 50 bp, Homo sapiens
ggccaaccatctcttcctaggctgcagatttagcatgtagactgctgggg

SEQ ID NO: 331602 - DNA, 100 bp, Homo sapiens
tccagatatatttcaagagtgtgggtgatggcgttcacacaaactggtcagcgtttccctggagaggaagaggcaagacttaattcagtgcacaaatgag

SEQ ID NO: 331603 - DNA, 51 bp, Homo sapiens
cgggagaggcgccggggccgcacagagcatacctgaagagagatacaagat

SEQ ID NO: 331604 - DNA, 98 bp, Homo sapiens
cccgtcttccttccagagcccgaccaggcctccactggcatcaccgacacactatgctccctccaaagccatctgcatggaacaatgctgcttctctg

SEQ ID NO: 331605 - DNA, 101 bp, Homo sapiens
ctttctgcttgactgaactgcacctgtggtctttgaagaataccttacacattgcgggcagctggctaagagtcttgggcaggctggtgaaattgagcctg

SEQ ID NO: 331606 - DNA, 50 bp, Homo sapiens
gcggcgatcgagaaagtgcgcaaatgaaaccaaggtgtatgttggtaacc

SEQ ID NO: 331607 - DNA, 98 bp, Homo sapiens
gacaaacagaagattctggacaagtgtaatgaaattatcaactggcttgataagaatcagacagcacccaagaaaacctcatttggctcgctgaagga

SEQ ID NO: 331608 - DNA, 101 bp, Homo sapiens
cacgtcgggtcagatccgacagaaggtgtgagttcttgatacgaatgaaaggccaagagtttgttgatgagattcaaggtagatatcctcatcttcttgaa

SEQ ID NO: 331609 - DNA, 100 bp, Homo sapiens
cgtgtaagaagtgccttttgcctcccaccgtgattctgaggcctccccaaccatgtgcaattcagaaaggacccaggagcgataacagtaaatcaaataa

SEQ ID NO: 331610 - DNA, 100 bp, Homo sapiens
cgttggccagtgcaacgaagaacggaggaagcgacattgatgtacagctatatattttgtcctttctttcacctcatgatctgtgtcagttgggaagtac

SEQ ID NO: 331611 - DNA, 100 bp, Homo sapiens
ttgggccggaggaaagcgggaagactcatcggagcgtgtggatttgagccgccgcattttttaaccctagatctcggccctcgggaccaaggatcacgtc

SEQ ID NO: 331612 - DNA, 100 bp, Homo sapiens
gggagcgctatcgcagggagatgctggcccacggtggaggcagggagcccatgctcatggttgaaggtgccagcaaggtcaacctcgtgaagatcgcgtc

SEQ ID NO: 331613 - DNA, 101 bp, Homo sapiens
cacggacacgcggaaaattaaccacagcttcctgcgggaccacagctatgtgactgaaggaggagagaggctccactgacaaagcgaggcacttcctggag

SEQ ID NO: 331614 - DNA, 100 bp, Homo sapiens
tcacaatccaagttccacaatatattgactactgccacaattccggtgactgtggggatcatgttgttataatgaacacaagacacattgcattttctgg

SEQ ID NO: 331615 - DNA, 100 bp, Homo sapiens
ccgcctccgaagatgggggatttctacgacccggagcacccgacccctgagcaatctgaaagcaaatcctgtttagatgcaggcgaaggttcctggtgac

SEQ ID NO: 331616 - DNA, 90 bp, Homo sapiens
tcagtctatgacaacgtctctctgccgtgaatcattcctgcagatgaaaaagtgtgacttggcagctgaattcctccacgtactgggaag

SEQ ID NO: 331617 - DNA, 100 bp, Homo sapiens
gccgggcccggcttcccagcctgacgaaatcgagctatagcagattatcttcgttcaaatggctatgaagaggcatattcagtttttaaaaaggaagctg

SEQ ID NO: 331618 - DNA, 75 bp, Homo sapiens
cacctgacccacaggccggtcgtggagctgcgaccccggccctagatccccataccgagtgtgcctacgttccag

SEQ ID NO: 331619 - DNA, 100 bp, Homo sapiens
acgccaacagtacctcattgctctttggcgactcttattgcccccaaatacatcaagatgtttgtactggatgaagctgacgaaatgttaagccgtggat

SEQ ID NO: 331620 - DNA, 74 bp, Homo sapiens
aagccctgaagcagaagggcatcaccgtgaagcagaagagggctccttcacctaccaaacgcaaagaccgctca

SEQ ID NO: 331621 - DNA, 74 bp, Homo sapiens
gacagaagcgactttggtgagactctggttggatggcaagcatgtggtgtttggcaaagtgaaagaaggcatga

SEQ ID NO: 331622 - DNA, 100 bp, Homo sapiens
acggcgagcgcgagcggcgcgagaaagttaatgttcgtgaagaaattgaagagttttttccaagaatgtggaagataaatcaagataaaagaaggctaat

SEQ ID NO: 331623 - DNA, 82 bp, Homo sapiens
gcgcccagagccccgcgtttcagccctagggaaggacactcatgaggaccatgatacttccactgagaatacagacgagtcc

SEQ ID NO: 331624 - DNA, 97 bp, Homo sapiens
acggggcagctggacgagctggagaaggccatcaccacgcagaacgtcaacaccaagtgcatcaccatccccagagcatgtctgttcgatcctggct

SEQ ID NO: 331625 - DNA, 98 bp, Homo sapiens
ccgaggtaaatacagtgaagtatttgaagccatcaacatcacaaataatgaaaaagttgttgttaaaattctcaagatctagaaatggccattgccta

SEQ ID NO: 331626 - DNA, 100 bp, Homo sapiens
ccatcatggactgtgggctgctcagtggatgtcagaattttaccaaatgttgcaagaactctggagttcttatggtagtaaaatgccggaaagaaaattc

SEQ ID NO: 331627 - DNA, 100 bp, Homo sapiens
catgaagcaaagcaagttaccaatgtctcttctccatgatcgaatccggcctcatgaacagcgacatctcactcatgaaaatgtacagcgcaagcaagcc

SEQ ID NO: 331628 - DNA, 75 bp, Homo sapiens
ccaaccgccaacctgcccatttctacccatggaccaggcagaggagatatggaacagaatgactctgacaaccgt

SEQ ID NO: 331629 - DNA, 88 bp, Homo sapiens
gggcttctctgaggcggcgagagatggtcaggtctggagctcgaccgggccaggtggctcccggctgcctctgctgcagttcagagca

SEQ ID NO: 331630 - DNA, 100 bp, Homo sapiens
gtggactacagtgacgccctcacggagaagcagtggctaaggatttcagaagaaagtggtagcttcctttccaagaacagttctgagcacaggaatggat

SEQ ID NO: 331631 - DNA, 82 bp, Homo sapiens
tcgggcgccccgcagccccccaacatcctgctcctgctcatggacgacgctttatcctgtggataaacgcagagtgaacgag

SEQ ID NO: 331632 - DNA, 100 bp, Homo sapiens
ccttggtgcgcggctgtccatctccggaccgcccacccgggcactggcccatgcgtctcctcccccggaagcggttgcagtccatgagctgggaaaggag

SEQ ID NO: 331633 - DNA, 100 bp, Homo sapiens
gtggttctcaaatataggcattctgatgggaacttgtgtgttaaagtaacagatgatttagttggaaattgctgaagctgtgaaaaattgtaagcctaga

SEQ ID NO: 331634 - DNA, 82 bp, Homo sapiens
ctttcccaatgccgaactgggaggcccctttgaccagatgaacggagtggccggaggtcgcaatggaagaagagatcgccgc

SEQ ID NO: 331635 - DNA, 90 bp, Homo sapiens
ctgcgtctcccggctggtggggaagcctctgcgccgccggcaccatgagtcaaaccggcacgatgtccaggcaccagaaccagaacacca

SEQ ID NO: 331636 - DNA, 83 bp, Homo sapiens
tcctgggcccccactgtccccaggcctcagacaatgcagatcttcgtgaagactctgactggtaagaccatcaccctcgaggt

SEQ ID NO: 331637 - DNA, 50 bp, Homo sapiens
cttcatgagagccaaaaatcagattcttagatatggcagaggtattgccc

SEQ ID NO: 331638 - DNA, 83 bp, Homo sapiens
cgccgcgctgcgcatctccaacagcgacctgagcgagtgtgaacatggctacgcctcttcattcccgtccatgccgagccccc

SEQ ID NO: 331639 - DNA, 121 bp, Homo sapiens
ctggaagaactcgtcatgctctttgtagcgtggtgcttctgttgctcacaggctggaggcaaagctggaaaggacagtgggaaggccaaggctaaggcagtatctcgctcacagagagctg

SEQ ID NO: 331640 - DNA, 98 bp, Homo sapiens
aaagcagttagtgacttctgcaagtgggttactacttttatctggaaagcatgaagactgggctttttttcctatgtctcttgggaactgcagctgca

SEQ ID NO: 331641 - DNA, 83 bp, Homo sapiens
gccagctcccttcactgtccaagacagcgattccgcggctcctctgagaactggcgcttaggcctgaatatttggacaagatg

SEQ ID NO: 331642 - DNA, 100 bp, Homo sapiens
ctgatgttagtgtggacttgccaatgaagctactaaacttatacataaagagggcccagaccaccaacagcaacagcagctcctcctccgatgtctccac

SEQ ID NO: 331643 - DNA, 83 bp, Homo sapiens
gctgacggagatggtgcagaagatggaggagatgtgcactcccagcaacacccctgccacgccgcccaacttccccgatgcgc

SEQ ID NO: 331644 - DNA, 100 bp, Homo sapiens
agaatctggtctgtttcctgtttggctcttctaccactacggcttgggatctcggagctcgaggccatgagcagatataccagcccagtgaacccagctg

SEQ ID NO: 331645 - DNA, 71 bp, Homo sapiens
acgggcggacctttgtcgagtacctcaacgctgtgaccgagaggctcagcagctccacggagcagagcacc

SEQ ID NO: 331646 - DNA, 100 bp, Homo sapiens
acaggatggcttggccttgcacataaggtgtgatgaatgcagactctgctaccattttggctgtttggatcctcctttgaaaaagtctcctaaacagaca

SEQ ID NO: 331647 - DNA, 83 bp, Homo sapiens
aacaaggttctggacaagatgaagtctttctgccagggatattttgcaccatttccctctgtacttatgccgccagtatctcg

SEQ ID NO: 331648 - DNA, 90 bp, Homo sapiens
cccacagctatcccctgaggcccgacccagcataagcagtactataatggatgtagacagcacaatttccagtgggcgttcaactccagc

SEQ ID NO: 331649 - DNA, 75 bp, Homo sapiens
ggatcgctgtgatcgtcacttgagagattggaacaattatcaggtcattaggatgctgtcctacggaaggagagc

SEQ ID NO: 331650 - DNA, 75 bp, Homo sapiens
cttctcagttcctggctcccaaggtacaacagaatagctcgggaatggactcagaagtatgcgatgtaattaaag

SEQ ID NO: 331651 - DNA, 96 bp, Homo sapiens
agacctccaccgccacccccgacacaagagacttatggagaatatcctcccctggtgaagacacaaactgtcaccatctcagataatgccaatgct

SEQ ID NO: 331652 - DNA, 100 bp, Homo sapiens
cgccgcccaggagacccctctgctgcaccacttcatggtgtccccaggtgtcattgccaacccctttgcggcaggcatcggccaccggaacagcctggag

SEQ ID NO: 331653 - DNA, 82 bp, Homo sapiens
ggaatctgggtgcagttcctgcagtaccccactctacgatcagaacatgctgtttgagagcatccaggagggcaagtacgag

SEQ ID NO: 331654 - DNA, 98 bp, Homo sapiens
aggaccctgcggccgtgtctctgcccacgtcgagcgtgcccgagacccgagatattgatgagtgccagacccgcaatggaggttgtgatcatttctgc

SEQ ID NO: 331655 - DNA, 73 bp, Homo sapiens
gaagttggaagtgtctcttagcagcgcgcggagaagaacggggagccagcaccctcatcacatgtgtggattc

SEQ ID NO: 331656 - DNA, 90 bp, Homo sapiens
cgggaaggcgggagacgagaagcctgaaaagtcgcagcgagctggagccgccggagtggtattggaaggaactggccctgggcctctgga

SEQ ID NO: 331657 - DNA, 83 bp, Homo sapiens
aagtcattcaactcaagcagatcaaagttgttttgaggacatccaggcagaaattgatgcccacaatgacatatttaaaagca

SEQ ID NO: 331658 - DNA, 74 bp, Homo sapiens
tgagctctatgagaaattcacgggctcctcgcacctaccccagcaactcaaattcaccacctcggactcctgcg

SEQ ID NO: 331659 - DNA, 100 bp, Homo sapiens
gagccctcacaggtcccatctaaaatgaggagggggcacccgacaggaggatcctttattcgtccgaacaaggtaaattttggaacagactttcttactg

SEQ ID NO: 331660 - DNA, 75 bp, Homo sapiens
gacttgccagaacagaacactattcacaaagattgcctgcagtttattgatcctgataacttaagtgactctctc

SEQ ID NO: 331661 - DNA, 74 bp, Homo sapiens
gaccctggccgccccgagcggagcctggagactagacgcttgaagcaaagctgccatcccagaagacgacatgc

SEQ ID NO: 331662 - DNA, 100 bp, Homo sapiens
aggttttgataggtgggccttagaggagacgccgccggatgacatctgaactggagagcagcctaacgtctatggactggttaccacagctcaccatgag

SEQ ID NO: 331663 - DNA, 131 bp, Homo sapiens
gtgggccggctagaggaagaggcgttgcggcgaaaggaacggctgaaggccctacgggagaaaaccgggcgcaaggcctcgaaaaagcccaagacagcagaagcagacacctccagtgaactagcaaagaa

SEQ ID NO: 331664 - DNA, 89 bp, Homo sapiens
aaggaacgagcagtgatggctgaaaaggatgctttagaaaaacacgatcagctcttagacagaatgtgacagtgatgataacatgggtg

SEQ ID NO: 331665 - DNA, 88 bp, Homo sapiens
acagggaatgctggagcaatacttaaataggttgaaaaacattttagagacgtggaaagccaaaagatactgcaacgttcacaagccc

SEQ ID NO: 331666 - DNA, 117 bp, Homo sapiens
ggggactccgaaaaaacaaaacaaatatgaactatgataagctgagcagagccctgcgatactattatgacaagacaatgcagatcttcgtgaagactctgactggtaagaccatca

SEQ ID NO: 331667 - DNA, 75 bp, Homo sapiens
agctacatccaggagagaatgctgacagtcctgcagatggaatcagtgtgagtggctttcccctgtccagtcctt

SEQ ID NO: 331668 - DNA, 100 bp, Homo sapiens
gggaaagagccggtgaaggggcagaacaggcaggctcagggaaggcctccatattatacacctaaccagttagcacagatgaggcctaatccacgctggc

SEQ ID NO: 331669 - DNA, 97 bp, Homo sapiens
cggcactacagcctcagcctgacggcagagcagctctcccacagcgtggcggatcccatgacagattctgttgtcacgtctccttacagagtttgag

SEQ ID NO: 331670 - DNA, 100 bp, Homo sapiens
gggtgaggggccctgttagtctgactttgaagaagaccagccttccagactcgcttggtgccctgacaggtgctggagaatctggtaaaagcaccattgt

SEQ ID NO: 331671 - DNA, 51 bp, Homo sapiens
agattttgaagctaaagttaagcagtggttgcaaatgatggattttatgta

SEQ ID NO: 331672 - DNA, 100 bp, Homo sapiens
gttcctagaacatctgaagcagaagtacccccaccacgcctctgcaatcatgggtcaccaagagaggctgagagaccagcccccttacccaggaatggaa

SEQ ID NO: 331673 - DNA, 96 bp, Homo sapiens
gatgaacctgcccaaggggccggacacgctctgcttcgacaaggacgagttcatgaaggttgccgaggagcccaagtagaagaaatatggagttta

SEQ ID NO: 331674 - DNA, 88 bp, Homo sapiens
tccaatacttacagtaatctcatattaacagactgcagagagatcctgcttcccatgatgaccgatcagctcaagtaccatctggaga

SEQ ID NO: 331675 - DNA, 75 bp, Homo sapiens
gtttagttgagcaccggaaagaacgttcagccgtctgtatatctccccagatacctgaaactgaccacctgagta

SEQ ID NO: 331676 - DNA, 74 bp, Homo sapiens
gcttatcgaagtggtggctacaaaaaggccagagctgtgtttaaaaggatgtaagttgtccaataaggcaagtt

SEQ ID NO: 331677 - DNA, 100 bp, Homo sapiens
gtcctgtgaagataaatcagattagcttggatgaaagtggagagcacatgggtgtgtgttcagaggatggcaagttactccacaggatccgctgaacata

SEQ ID NO: 331678 - DNA, 75 bp, Homo sapiens
tacatctgagacatgggaaatatatggcttagaccatgctcagcctccaagcagccttgtcatcgacaaagaatc

SEQ ID NO: 331679 - DNA, 100 bp, Homo sapiens
cgaagagggcctgacctctccatgaacctggatcggtcccaccaaggcaactgtgcccgctgtgccaggtttaaagtctttgcagactacgaagcctatg

SEQ ID NO: 331680 - DNA, 100 bp, Homo sapiens
gaaagcgttggagaggtgttaccggaacggcggcgacaagggtgttcccgaactagagtggctgcagaagcagaaccacagactatgacttggtcggagg

SEQ ID NO: 331681 - DNA, 100 bp, Homo sapiens
aggtgtagagaggaccccgggacatctgaaagccaggaaatggctgagtcatcactagagagtgggaagggcagcagcagcagagaatccaaaccctaaa

SEQ ID NO: 331682 - DNA, 50 bp, Homo sapiens
cagcctgcggagcctgtggggcaggtacgccatcccaccagagcacggca

SEQ ID NO: 331683 - DNA, 82 bp, Homo sapiens
gtgaaatcagaggagatgtaactatcggtcccctcttgctgttggctgcacatcaggaaggctgtgatgggaatgaaggtga

SEQ ID NO: 331684 - DNA, 100 bp, Homo sapiens
ggatttgccagtggagtagaacagattattcttggagctggaccagtacttgagcatcagacaacagtcagcgctttcgagaaacctgttttgcatttgc

SEQ ID NO: 331685 - DNA, 98 bp, Homo sapiens
tcgtctcccaggacgccacctactccaagcccccctcgcctatgccttcagacatcaccagccaggtgctgaagggcctgaccatcactcattaagaa

SEQ ID NO: 331686 - DNA, 75 bp, Homo sapiens
gccaaaaaggacatctttggagccaggccccttcacagatgtagtcactacaaatcttaaattgcgaaatccatc

SEQ ID NO: 331687 - DNA, 100 bp, Homo sapiens
taagaaactctcagtttgtgtttctgagaaaggtctgaatttcctgctgctgttcacaaagatgctttttatctttaactttttgttttccccacttccg

SEQ ID NO: 331688 - DNA, 75 bp, Homo sapiens
cctcagcctcccaagtagctgggattacaggctcacctgttactcggcctcccagaaagatggataggagaaatg

SEQ ID NO: 331689 - DNA, 100 bp, Homo sapiens
ttgattaactggacaaattcaggaaacagagcaaatgcagcgttacaatcaaagacttattgaggaattgaaaaacagacagactcaagaaagagcaaga

SEQ ID NO: 331690 - DNA, 100 bp, Homo sapiens
gatggcggccggcaagagcggcggtagcgcaggggagattacttttctggaaggctggtgtttggaatgctttatcctgcatattattcatacaaagctg

SEQ ID NO: 331691 - DNA, 97 bp, Homo sapiens
agtggtgttttatgtgccttcagtttctcagctgcagcaggagattaccaggtgatttgaagatattaaagctagaaattggaactagaaaatcaaa

SEQ ID NO: 331692 - DNA, 100 bp, Homo sapiens
tcgggaagtcccgcagaacgccggcagctgctgcctcgcgcccgggagcaggaggagctgctggcgcccgcagatgccctgggcgctgcctatggcacag

SEQ ID NO: 331693 - DNA, 90 bp, Homo sapiens
ctctgtccttcatccgagacagcctggagaagagcgaccagctcactaagaacatggctttgatcactcagactcgagccaaacaggcag

SEQ ID NO: 331694 - DNA, 100 bp, Homo sapiens
gagaaaaccagttaaaaatgttgcctaagaccttttttctatcagtgcttatgtttatgctcagaaaccacaaatggacattcacagtttcgaaggcaca

SEQ ID NO: 331695 - DNA, 100 bp, Homo sapiens
gctcaccgacagtgccctgagggccttcgagagctaccgcgccagacagctggcccccaagaggaccctttccaagtccccagctgggggccctgtgtag

SEQ ID NO: 331696 - DNA, 74 bp, Homo sapiens
tcttcatgagtactccaagaagatggttcagttgactattgcaaagattgtgttcaattagaccttcaggacct

SEQ ID NO: 331697 - DNA, 100 bp, Homo sapiens
atggacgaggcgcggcggtggtatgaagaggccttagccatcagccccacccacgtgaagagcatgcagcgactggctgatcagctgaccgaagaacaga

SEQ ID NO: 331698 - DNA, 98 bp, Homo sapiens
gggaaagagagttgtgagtctctttcctgtttacctccagtgtcccttcttccacatgaaaaggataaggacatgttcccgatttgaggtgaaaccat

SEQ ID NO: 331699 - DNA, 110 bp, Homo sapiens
ggctcgggacccaactctgcgagccagtgtgtcccggcatggatatccggaacaacctcactaggttgcatgagctggagaattgctctgtcatcgaaggacacttgcag

SEQ ID NO: 331700 - DNA, 51 bp, Homo sapiens
ctaccacccccatgatggggatgagatattatgcctggtgatcctgatctg

SEQ ID NO: 331701 - DNA, 90 bp, Homo sapiens
gtttggcgacttcgtctggagaagtgaggatgagctggggcccaggtaagaccattgcaattggaaaagttctgaaactggttccagaga

SEQ ID NO: 331702 - DNA, 101 bp, Homo sapiens
tggagccttgccttgctgctctacctccaccatgccaagaacactgagctgaaggttgaagtggagagcttgaaacgagaactccaggacaagaaacagca

SEQ ID NO: 331703 - DNA, 100 bp, Homo sapiens
ggctctcatgttcctccatgataaaggaatcatctatagctgacagtgaagatagtactgtgtccatccagataaaattagaaaatgaaggcagtgatga

SEQ ID NO: 331704 - DNA, 96 bp, Homo sapiens
tgagcctcggtgcggcggcgagcgcggtcgagatcgccatgcctacccgtaaagtcagtgataaatcttttgtttgctgcatatactggagatgtg

SEQ ID NO: 331705 - DNA, 75 bp, Homo sapiens
gcggcttggacgactcggagagccggtgatgtgtccaatctagatcccaacttctcatttgaaggcaccaaactg

SEQ ID NO: 331706 - DNA, 83 bp, Homo sapiens
cgcccccgccggttcgcgtctctctgctgcggcgcggggaccgctgtgctctcgaaaatatttacaccagcagctccagttca

SEQ ID NO: 331707 - DNA, 83 bp, Homo sapiens
ctgagaagcctgacataccaggactgcctgagacaagccacaagctgcaaaccagtccagctacgggggcccagccagccagc

SEQ ID NO: 331708 - DNA, 83 bp, Homo sapiens
cccaggcctatgccaatcagcatttcacattcctcatggttggttcaaaggaactgtggctgcaccatctgtcttcatcttcc

SEQ ID NO: 331709 - DNA, 75 bp, Homo sapiens
gcggaggaccgggagcggctggtggccatggtgaatctgggcctcctgctattctcactcctgggattcctgttg

SEQ ID NO: 331710 - DNA, 99 bp, Homo sapiens
cagaaaccaaacttcatctcattttagagttagactggctgagcaacccaagcttttgtgttggatccataacgtccctgagccaacaaactgaagcag

SEQ ID NO: 331711 - DNA, 97 bp, Homo sapiens
ggcctctgggccaccctcccggctggagagctcaggaaagatgaatgggagggctgattttcgagagccgaatgcagaggttccaagaccaattccc

SEQ ID NO: 331712 - DNA, 100 bp, Homo sapiens
ggcccaggccctacgccctgcgccgccatccccgcggcccgcggaaaggtgctgatcatcgggggcggagatggaggtgtcctgcgggaggtggtgaagc

SEQ ID NO: 331713 - DNA, 74 bp, Homo sapiens
gtgggcctctgagatatgccgtttacggcaaagccacaacacttgagaaaacctatggacctgcatggatagcc

SEQ ID NO: 331714 - DNA, 74 bp, Homo sapiens
agaaaagaagattgtctatcatgaaggagaactgaaggcagaagctagtctaatggaccagatgagtagttgtg

SEQ ID NO: 331715 - DNA, 49 bp, Homo sapiens
tcgacctaaagcctgactggggcaaggttgaaatcaaggaagcaggtgg

SEQ ID NO: 331716 - DNA, 83 bp, Homo sapiens
catggctcagccgggaactctgaacctcaataacgagattacaccaccaccttcactgtcagatccacttaaagagctttttc

SEQ ID NO: 331717 - DNA, 89 bp, Homo sapiens
tcgctgtctgcccattgatagaggccagattgtcttggaagttccaaagttgcaacgatttctgatacattaattgtttggtcagaagc

SEQ ID NO: 331718 - DNA, 100 bp, Homo sapiens
gtgagacactgtttctgagagcagcttttgtggcatcttacagggcagatttctggtattttgaaggtggcgtctcatctgtctacctctgggatctgga

SEQ ID NO: 331719 - DNA, 75 bp, Homo sapiens
ctgctacttatggaagatacaaagggtaacgagtctgaccttgaactagaaaagaagtgtaaggaagatgatcgg

SEQ ID NO: 331720 - DNA, 90 bp, Homo sapiens
aggagatcatagcagagtacgatactcaggtcaaagggattgtttccattgccaccctaaccgtgctggcctatgaacgttacattcgcg

SEQ ID NO: 331721 - DNA, 100 bp, Homo sapiens
catcaacttctctgtctgctcaacagtcagcaaattgtggctactaatttgccccctgaagatcaagatggctctggggatgactctgacaacttctccg

SEQ ID NO: 331722 - DNA, 82 bp, Homo sapiens
accgtgacaagaagtacgaggaagtgaggttttaaaatcaaagatgggaaaatcggagaaaattgcccttccccatggccag

SEQ ID NO: 331723 - DNA, 98 bp, Homo sapiens
tctaacgctgcctttgctttaaaacagtattacttgcgtatcgatcaggatgggatcctcatagaggggcagataatgtttctactaaatcttcggac

SEQ ID NO: 331724 - DNA, 75 bp, Homo sapiens
ccagtatgctgtacgaacgccggatactcatcatttgcagcaaactcagcactgcccagtttaccctcaatttac

SEQ ID NO: 331725 - DNA, 74 bp, Homo sapiens
cacatgctcaataaccctgaactcatgaggcagtgctgcattagacgtggaactatctgatgattccttccctc

SEQ ID NO: 331726 - DNA, 50 bp, Homo sapiens
cggcgaatggagcaggggcgcgcaggtacggaatggccacatcaaaagaa

SEQ ID NO: 331727 - DNA, 75 bp, Homo sapiens
cagaagacaccacctggacttcaacatgaatatgcagctcctgctgaggtgataaaagaaaatgtggctgaagtt

SEQ ID NO: 331728 - DNA, 51 bp, Homo sapiens
gagagcgcgaatatcgtcatcgttagaagactcaatgatgaggcacggcgg

SEQ ID NO: 331729 - DNA, 88 bp, Homo sapiens
gctgaagctgtgcaccgaggtccgtgtggccaacgagctcaacgccaggcgccgctcctttacaggagctgtgactaatgagaattaa

SEQ ID NO: 331730 - DNA, 101 bp, Homo sapiens
ggcgatcaaggccaagtatccgccagtcaataggaagtacgagtgtgattgttggaattggaagcggaacaaaaatgttgaccagtatgttgtcagggtcc

SEQ ID NO: 331731 - DNA, 100 bp, Homo sapiens
ccaggatgagttacgaagcctgttcagcagcattggtgaagttgaatctgcaaaacttattcgggataaagtagcaggaagcccgtgcctctactactgg

SEQ ID NO: 331732 - DNA, 100 bp, Homo sapiens
tataatccagcaggcaaccaaagttaatccagcacgtatggggccaagtgtaggctcccagcaggaactgagagcgccatgtcttccagtaacctatcag

SEQ ID NO: 331733 - DNA, 84 bp, Homo sapiens
agaccgcgcgcagggcctgcagcgggagctggacggcgagcgcgagcggcgcgagaaagagtacgagagggcctccaaagtgga

SEQ ID NO: 331734 - DNA, 74 bp, Homo sapiens
ctgctgggcacccacggagcctccggggctggtctcctctgagcctccggcctccataagacccaaaacagatg

SEQ ID NO: 331735 - DNA, 100 bp, Homo sapiens
gctagacaatgctttggtgctagatgccctgatgcgagtggccaatgaggagtcagagcacaatcaaggcctgtttaaagaagaaaacccgtatgctaga

SEQ ID NO: 331736 - DNA, 100 bp, Homo sapiens
tgcctctaccaatgtctctgcatctgatcgctttgcagcctccaactttgggggtcccctcctaaccgcaagcgtcctgctaacgagaaggcaactgatg

SEQ ID NO: 331737 - DNA, 80 bp, Homo sapiens
agaacagctctttgcatccggagagtggacaagaaaacttcagtgccctgaacggttagagaaattaatgaaggagctcc

SEQ ID NO: 331738 - DNA, 83 bp, Homo sapiens
atgaaagtgtgatgttcgcgtatttcttgacagtttatgatgtctctggagcagcaagtgacagaaattgtgtggttctcagt

SEQ ID NO: 331739 - DNA, 100 bp, Homo sapiens
agatcctggagagcctgcaggacggcgcggcagagtccccgtacgcctacagtaacggcgtcctgcctctgcggctctgccccctgcatcctgtgcagct

SEQ ID NO: 331740 - DNA, 100 bp, Homo sapiens
ttctcagggatgtcctattgctaagtgggttgctgcagcaactggtcacacagtagtgttggtagaccagacagaggacatcctggcaaaatccaaaaag

SEQ ID NO: 331741 - DNA, 101 bp, Homo sapiens
gaggcgccgcgttggcgcttggacggcgggaaccggctccggagcgagaacgcgcgtgtttgagaagtcccccctgcgggtgaagaacttcgggatctggc

SEQ ID NO: 331742 - DNA, 101 bp, Homo sapiens
gcattacctgtacccattcaccggcggctaccggcggcggcgcgcagcgtgtcaggcggagagacccgccgccagtgcatacatagagacgtgaagccaga

SEQ ID NO: 331743 - DNA, 100 bp, Homo sapiens
atcgccggagtcatattatcgacgtagttaaagcccactagcctaaagccgggcggactgcgggtgacgagaacaagtcagtgcgcgaccgtttcaacgc

SEQ ID NO: 331744 - DNA, 83 bp, Homo sapiens
gacagaagatggtgcagaagaaaccagccgaacttcagggtttccaccgttcgttcaagcgggactacttgttgatatttgag

SEQ ID NO: 331745 - DNA, 100 bp, Homo sapiens
cggcggcccaggcacggagaggcggcgagaccgcaggtaaactaacattatggatttttccaagctacccaaaatactcgatgaagataaagaaagcaca

SEQ ID NO: 331746 - DNA, 100 bp, Homo sapiens
cgctgctgtcctgcgaccccaagcagaacatccagtcatggataaaaatgagctggttcagaaggccaaactggccgagcaggctgagcgatatgatgac

SEQ ID NO: 331747 - DNA, 96 bp, Homo sapiens
gtggttgtgtggtcgcgtctcggaaaccggtagcgcttgcagcatgggctgaccttgctggcctcagccagtcgggaccggctgatccatgtgctg

SEQ ID NO: 331748 - DNA, 97 bp, Homo sapiens
ttccaaagatatttgggctgcctcgggagttgcagcgtcttgggccgccggaaggtgtcatggagaaactccagctgggcccagagattctgcagcg

SEQ ID NO: 331749 - DNA, 74 bp, Homo sapiens
ccagcttcagcttttggacactaagtgctgaagggaaacagatgaagaacatgacctcaaggagcttcctgtca

SEQ ID NO: 331750 - DNA, 75 bp, Homo sapiens
ttcggcagtccacccaccgccgccgcctcccagtggtgaagttcatggatgtctatcagcgcagctactgccatc

SEQ ID NO: 331751 - DNA, 100 bp, Homo sapiens
ccgcgtccgccgattcctcctccttggtcgccgcgtccttggctggcgtgtaccgtctggagcagctggagggaagatggctgaatctccctgctcccct

SEQ ID NO: 331752 - DNA, 51 bp, Homo sapiens
gagggccgggcccagtcaccgaccacatctgaatgggactccgagtgcctt

SEQ ID NO: 331753 - DNA, 100 bp, Homo sapiens
aaagatctcagtacagtagaagctctgctgagatctgtatctgtggacctgaatgttgatccctcgcttcagattgacatacctgatgcgctcagtgaga

SEQ ID NO: 331754 - DNA, 100 bp, Homo sapiens
gacgctcttccacaccgttcagtcaacagagaaacatgaggacggggacttggttgccttttccagtgacgaggaattgacaatggccatgtcctacgtg

SEQ ID NO: 331755 - DNA, 100 bp, Homo sapiens
ctgcaaaggagacccaaggaacagtgccaagttagatgccgattacccacttcgagtcctttattgtggaggtgttacacataatattgcattacttcga

SEQ ID NO: 331756 - DNA, 101 bp, Homo sapiens
actactttgaaaaacattcaggactactttaatccagctactctacctctaacacagtacctgttaacaacgatacagttgatatattagttggatggcat

SEQ ID NO: 331757 - DNA, 109 bp, Homo sapiens
atgatctgaaggatcaaggtggagagctgttgtccctccgctatgaccttactcacactgggcatccaggagaagtacctggcaccctcgaaccagtcagtggagcagg

SEQ ID NO: 331758 - DNA, 83 bp, Homo sapiens
catctcacacctttccaaaggacgcgaccataactctaaaagaacatgagagatatctgcaagccaacaacaaagaattcaac

SEQ ID NO: 331759 - DNA, 75 bp, Homo sapiens
acatggacatgagccccctgaggccccagaactatcttttcggtgcagaggccaagaccgttttgcccaagaagg

SEQ ID NO: 331760 - DNA, 75 bp, Homo sapiens
ctccagaaagcaccctcaccgtgaccttcagccaggagatcatgaatcagacagataaaaatcaacaagaaatcc

SEQ ID NO: 331761 - DNA, 82 bp, Homo sapiens
ctggattccctgctcagtgccctgagtctcaatgaagagcaacttgtagagacagtttcatgtggaggaaatcttttgatga

SEQ ID NO: 331762 - DNA, 101 bp, Homo sapiens
aaacctcgctttgattacagtcagcagtacattcctcatgggtacatggagttgactattccacctaagaacggagataaatgtgattgataacagtaaag

SEQ ID NO: 331763 - DNA, 100 bp, Homo sapiens
caaatttaagaacagatgaacaaggccttattgttgaagacctagtagaagaggtgggtgaagagtctttgcaggttggtggtcaacagggtcagagatg

SEQ ID NO: 331764 - DNA, 50 bp, Homo sapiens
ggccgacggtggcggcgggatgcaggctggagtgcaatggcgcgatctcg

SEQ ID NO: 331765 - DNA, 100 bp, Homo sapiens
aagaaggttcaaacaaatttgcaaatgatatacaacttctaagtgattctaccagaaaggaatgaagaacagaaccttcaggaattgagtcacaatgcag

SEQ ID NO: 331766 - DNA, 100 bp, Homo sapiens
cggttagcccgtcagtccctgctctgtgcgcgcctccatctgggccatggatgggtatcaaggttacattggtgcagccctagttttagggggagtagat

SEQ ID NO: 331767 - DNA, 100 bp, Homo sapiens
tcccagcagcggattcaccatctcaaaacctgtaagaagagttcctgggtcaagtggtcaccttcataaaaccgaagacggggactgggagtggagtgac

SEQ ID NO: 331768 - DNA, 90 bp, Homo sapiens
gcattgacatttaattttagggtcctttatatagaagggagagtaggtggaattctactaagtatcagtcggccctacaagacaaagccc

SEQ ID NO: 331769 - DNA, 100 bp, Homo sapiens
ggactttctgtttcagatttcagatactctgactccacctttacttttacctacgttggcggccccagaagatggagatggacacatggatcatttactg

SEQ ID NO: 331770 - DNA, 97 bp, Homo sapiens
cgcctgccctgaggagtccccgctgcttggcactgaagtggcagcagcatcagggattgcttcctcctggtatgaccatagatttgtttcgaggcaa

SEQ ID NO: 331771 - DNA, 78 bp, Homo sapiens
gggtctggagtgcgtgggggaccggctgttggcggaccctctttcccagctgcccgctcctcagcacccgaagattcg

SEQ ID NO: 331772 - DNA, 112 bp, Homo sapiens
attttgtttgccgaagtgacccccacaacgatgcgtctcctggatggttggcaaacatgaattgactgggcataaagtagctgtgaagatactcaatcgacagaagattcgg

SEQ ID NO: 331773 - DNA, 100 bp, Homo sapiens
cggcgcagccaccccgcgggatacgcctcagcgcggtttgctggttggctcccgagcagacagcaggaaagaagaagcccttcgtgtacacccagggcca

SEQ ID NO: 331774 - DNA, 90 bp, Homo sapiens
gatgcacttaatgaccctaaaaatggcgattctgcaaccaagcacctgaaacagcagggattaatgaaaatcaagttccatcctcagaca

SEQ ID NO: 331775 - DNA, 82 bp, Homo sapiens
ctttttctcccgaaggaagattatttcaagtggaatatgccattgaggctatcaaggaacatgcttaccctgctgatgaact

SEQ ID NO: 331776 - DNA, 82 bp, Homo sapiens
aaataaagtgttgagtaaacagaccaagttgggttcatccacataaaacttatttcacagtagctgaaaaagggagttttcc

SEQ ID NO: 331777 - DNA, 82 bp, Homo sapiens
cttgggagtgatttgcgccatcatcctcatcatcatcataggacccttgaacatctgtgaagaaatgactattctgcatgga

SEQ ID NO: 331778 - DNA, 101 bp, Homo sapiens
gcagggaccagcagttactgggaagaacttgccagcactggtgctgaagatcatgagtggcacctttgcacctatctctgaccggtacagccctgagcttc

SEQ ID NO: 331779 - DNA, 83 bp, Homo sapiens
tctgcaggcttgccgaagaagggagatttcgctgcctcatcacccacatctcccaatgcattgcctcctgctcgcaaagccag

SEQ ID NO: 331780 - DNA, 75 bp, Homo sapiens
tcaagcgcaagcacaccctaccgaattacaagatcagtccaagccttatgcatttgatcgggtgttccagtcaag

SEQ ID NO: 331781 - DNA, 100 bp, Homo sapiens
tcctgggtgatccccatctctccatatcacatgtcaactacttcctagaccaggtacaggtttgcagattccgccagcagcacagcaagctctacagatg

SEQ ID NO: 331782 - DNA, 90 bp, Homo sapiens
cctggagatgattgagccgcgcacgctacagtacaaggaccccagccaggccacggggacaacaggcagcagcgtcagctgcacagagga

SEQ ID NO: 331783 - DNA, 50 bp, Homo sapiens
gaaatttcaaaacttgatcaagtatacactgcgctgtgacatgaagcggt

SEQ ID NO: 331784 - DNA, 83 bp, Homo sapiens
ggacatggacctgtacagcatcaactacctgcactttggggagcctaagtcctggtgaaatgacaatggatgctctgttggct

SEQ ID NO: 331785 - DNA, 87 bp, Homo sapiens
gtggattttgcacaactgcatcatttataatgggggtagttgatgtcacttggcgatattcctgcaaacatgaagaggtgattgcca

SEQ ID NO: 331786 - DNA, 101 bp, Homo sapiens
atgccacgactattcttggacttgggaccccctcaggggaacagcgagcagatcaaaggacagagcgggatgccaccagcttgtccaaagggaagttccag

SEQ ID NO: 331787 - DNA, 50 bp, Homo sapiens
aggagccttctcaagaacagagagatgtggtcttgctatgttgcccaagc

SEQ ID NO: 331788 - DNA, 74 bp, Homo sapiens
acgaggaagaggaggtttctgaggaaggaaaatcacctcggcagtgtttgaaggaaggatactgcaactctttg

SEQ ID NO: 331789 - DNA, 100 bp, Homo sapiens
aggcatgtgccaccacgcctgctgagcttccaacgcaaggtgggcatcctgtactgccgggcgggccagggctcggaggaggagatgtacaacaaccagg

SEQ ID NO: 331790 - DNA, 75 bp, Homo sapiens
ctccagcactggccacacattattcgaataggagaccttaaacctacagatgtggcaaaatctggcaaaggcaga

SEQ ID NO: 331791 - DNA, 74 bp, Homo sapiens
gtgtcccgcattgcccgcatctgcaagattatgtttgagaccttcaacaccccggccatgtacgtggccatcca

SEQ ID NO: 331792 - DNA, 87 bp, Homo sapiens
gaagcagccgccaaagtccttgaggagtatggagctggagtgtgcagtactcggcaggaaattgcctcagtccaaggagttcctcta

SEQ ID NO: 331793 - DNA, 87 bp, Homo sapiens
cagaagttcggcaccttatttctctgctgagtgtccagatcctccaaagacagatctggtgctatacttggtagatcagaaactcag

SEQ ID NO: 331794 - DNA, 98 bp, Homo sapiens
ctacatggattttgaacttgaattcccagcctcgcttgcatctagacacaggtgtggaccaattagtggtgactgcaggtccagcagcagcttccgac

SEQ ID NO: 331795 - DNA, 90 bp, Homo sapiens
ctggaaactggatgcagcaaggaaataggatttaaccgctctctgcctcccagtgtggcaaaggagcagagaactttgacaagttcttca

SEQ ID NO: 331796 - DNA, 100 bp, Homo sapiens
ccaccccacctgccaccgaggccccctcttcgcctcctccagggtcatcaagactcctgagatagcaaacttggccttgcttggctttggagatatcttt

SEQ ID NO: 331797 - DNA, 98 bp, Homo sapiens
cttctgggcctgtggagtttcttggacaggggccgcggggctccaggacggcgcccttagcgacaccatgaatggatcttctaaccaaagacggagat

SEQ ID NO: 331798 - DNA, 100 bp, Homo sapiens
gttactgaaaaggaggtagaaatactcttcattcaagtcaatcagtttgcattgaaaccactcaagaaggttattattgaagaaactggtaatttgatac

SEQ ID NO: 331799 - DNA, 50 bp, Homo sapiens
gtttccgttaagctggacaacagggcaactccaacaacattgccaccgtg

SEQ ID NO: 331800 - DNA, 74 bp, Homo sapiens
gcgcctcttgatgcccagtagggattgaaggcctgatggatgatgtggacttcaaggcaaaagtgactcgtgtg

SEQ ID NO: 331801 - DNA, 83 bp, Homo sapiens
gcacctcatcccctggatgggggaccacaagatcctcatcgacagcagaaaggacccaggagcgataacagtaaatcaaataa

SEQ ID NO: 331802 - DNA, 97 bp, Homo sapiens
caaaaaggaagcatgttggacgatatctaatattacagctggaaatagggcacagatccaggcatgttatttgaaagcaattgagacgcaaccgaac

SEQ ID NO: 331803 - DNA, 90 bp, Homo sapiens
tgctgacccagaggagagttctccaaacatgatcgtttactgcaaacaagtaactggcagaagttttggtgataaagattttcggacagg

SEQ ID NO: 331804 - DNA, 50 bp, Homo sapiens
agttccacatgaagacacttggtttggaaattttagcattcaggtgccag

SEQ ID NO: 331805 - DNA, 75 bp, Homo sapiens
agcgtgaccgagagcgcgaatatcgtcatcgttagaaggtatctgatggtataattgccccaggatatgaagaag

SEQ ID NO: 331806 - DNA, 114 bp, Homo sapiens
aggaacctctacaacgaaggtgaagccacggaagataagcctctgaagagccaatccattcaggatgggaaaccacgcaggcaaacgagaattaaatgccgagaaggccagtac

SEQ ID NO: 331807 - DNA, 88 bp, Homo sapiens
gaatggcggcggctgccgcaggacctgcagcatcccagagcctgatcctgcctgaagatggtgccactggtggctgtggtatcagggc

SEQ ID NO: 331808 - DNA, 83 bp, Homo sapiens
atccttaccaaggaatctgcttttcaagtatgccaccaacagtgaagagcctcaaggaataggttctcctagtgtctatcatg

SEQ ID NO: 331809 - DNA, 100 bp, Homo sapiens
ttcttagtcaaaaagctcatcttgccttatcaaatggttggaatccattttcgtacccatacaaaaaactggattatggaaaatgggagctgtatatccc

SEQ ID NO: 331810 - DNA, 100 bp, Homo sapiens
ggcggcggcggcggcggcctcggctcttccagccaccccctctccagtctgctcagcagcaaagtctctcgcgacaccctgtacgaggcggtgcgggaag

SEQ ID NO: 331811 - DNA, 75 bp, Homo sapiens
ctgagaggagtcttctggtgcagtcttattttgaaaaggaggaagagggtaatctggaagagtttcctgacctac

SEQ ID NO: 331812 - DNA, 82 bp, Homo sapiens
gccgtgccccagatgcccaccgggatggagaaggaggaggaatcgggcgaactttctgaccaagtatacaactacccagagg

SEQ ID NO: 331813 - DNA, 100 bp, Homo sapiens
ggtggcactggctctcctggtccagctctcaggacaagaacaaagtgtgctggctgtggatttaatgtgactaacagtaaccctaccatctgcatcaacg

SEQ ID NO: 331814 - DNA, 74 bp, Homo sapiens
aggagaccggaccgaagacggaccgtgccgggaagagaatcctattccattgcgggcagtgaggggagtatatc

SEQ ID NO: 331815 - DNA, 83 bp, Homo sapiens
gcgcccgggaggaaggaacgaggcaaggagctaaagcagcgtgcgttcagccctggggcgtcacaatgtagcagggaccccag

SEQ ID NO: 331816 - DNA, 75 bp, Homo sapiens
gtctacaggcgctgacggccacccctccagttttagagaacaacttgtaatggagccttcatctcttgagctgcc

SEQ ID NO: 331817 - DNA, 74 bp, Homo sapiens
ggagagcggccgccgccgctgccgcttccaccacagagtaacagttacccctcaatgagcgacccctacctgtc

SEQ ID NO: 331818 - DNA, 82 bp, Homo sapiens
cttgagttggtcgggggcagcggcaggtatcatgatattagctggtttgacatcaagtcatttgtgagtcatcagatcttct

SEQ ID NO: 331819 - DNA, 75 bp, Homo sapiens
gaaaaatctggagcagtataatgcggcttcaatgatccatcctaaagaggtgccccctgaggccatcttgctggc

SEQ ID NO: 331820 - DNA, 98 bp, Homo sapiens
ggcgagggtagccatgacggcctccgtgctgcgaagtatctcgctagccctgcgcccgactagcggagctgcggtgcaaccctgggcagtttgcgtgt

SEQ ID NO: 331821 - DNA, 82 bp, Homo sapiens
gaaggaaacaggcctttcggaggctcctcatccctcggaggtcatcccttactccagacttcccaagtaagaagcggaagag

SEQ ID NO: 331822 - DNA, 98 bp, Homo sapiens
gcggatctggacacccagcggtctgacatcgcgacgctgctcaaaacctcgctccggaaaggggacacctggatctcatagatcagaacatactggag

SEQ ID NO: 331823 - DNA, 74 bp, Homo sapiens
cttgggcaatggtgaatttgaaaaggttaccttttcgacaaaatgattcatctagtcattgccagaagagtggg

SEQ ID NO: 331824 - DNA, 98 bp, Homo sapiens
gaggatgcaccttcccctgccttggaaagatctgtgccatcattggcgggaccttcaccgtcgccggcatcctggactcatgcatcttcacagcctct

SEQ ID NO: 331825 - DNA, 96 bp, Homo sapiens
tggaagggacttgccttgtctcagatgagacttcggattggacttttgggttaatgctgtaatgaggtagattttcgttccgtcacccaggctgga

SEQ ID NO: 331826 - DNA, 98 bp, Homo sapiens
tgtggttggaagtccagagatagttgtgcttttacacggttttccaacatccagctacgactggtacaagaccgatttgggatgttgcccctggatga

SEQ ID NO: 331827 - DNA, 82 bp, Homo sapiens
cagccagcgccagctccgtgaagcagatggccgagctgctgcgcagctcctgcccgacaatgcagatcttcgtgaagactct

SEQ ID NO: 331828 - DNA, 90 bp, Homo sapiens
tgcacagtgttaccagtatatgttggacctccagaaacaactgggaagcgtttagtcacatcaagaaatagaacagaattcagccatggc

SEQ ID NO: 331829 - DNA, 100 bp, Homo sapiens
tttgacttggaagagaaactgcacaccaacaaatataatgccaattttgttacttttatggaaggaaaaggtattgcaggcaatgggatatccaacaggc

SEQ ID NO: 331830 - DNA, 140 bp, Homo sapiens
gctggaggagcgcgagcggcggtttccttgcccggggccgcgggaaggccgaccgactgccgcggaagggaaaaggccgaggcatcagcgtgtgaagaccgcaaagacgatcccgagtacagttgtgaacagcattgctg

SEQ ID NO: 331831 - DNA, 98 bp, Homo sapiens
gccacatgaaaaacaccacaatcaaccttattgtggcattgcgccgtacattcgagagtttgagtgtaaacaggaacatcgataagtagtgtaaaaac

SEQ ID NO: 331832 - DNA, 90 bp, Homo sapiens
ggaaagatgacggatgaaaagaatgaacactgtccttcaaaacgaatatgtgcagcgggggctacagcgagtggggctagatccccagct

SEQ ID NO: 331833 - DNA, 95 bp, Homo sapiens
gtggagccaaggaaacaggatgctgatagtctccagcgggcctggactgtgggctggtgtgtggaactgaccacagcaccgggaagtccagtcag

SEQ ID NO: 331834 - DNA, 80 bp, Homo sapiens
gtatctacggtggtgctcctaagggaccacaaatacgtgatttggagagagagccacaacccgatctccgtcctggacag

SEQ ID NO: 331835 - DNA, 82 bp, Homo sapiens
atttccactctggaaaacttcaagcatttggtggcagcatcttgagtactcgctgttctgaaacttacgaaaccaaaacggc

SEQ ID NO: 331836 - DNA, 74 bp, Homo sapiens
ctctattatttcaaagatgaagatgaaaccaagcccttggtcatcagaagattgagagaaagaggagaaccaat

SEQ ID NO: 331837 - DNA, 83 bp, Homo sapiens
gccacgtcatccgcggctacgtgggcaaccgggcggccacgttcccgctgcaggatgaatttcatcctttcatcgaagcactt

SEQ ID NO: 331838 - DNA, 96 bp, Homo sapiens
ctgtatccagctcctgaacaagacatggaaggaaatgagggcaacttctgaagacttcaacaaggtcaagctgggaactgcctgacttgagggaag

SEQ ID NO: 331839 - DNA, 90 bp, Homo sapiens
agctgggcgagaggtgccaagggagcttctgtcccgaggaccaggggatgcgaaggattatttctcaagatgaagctgacagaagaggga

SEQ ID NO: 331840 - DNA, 90 bp, Homo sapiens
gtacttctgccactgctgctccgtggagatcgtcccgcgcctgccggccccagcgccttcacagaagccgtggcttacatccaggcccag

SEQ ID NO: 331841 - DNA, 100 bp, Homo sapiens
gtggcatccagtaagaaaggagagcccgtcagtgccgaagatctggagattaagggtgcctcccaccatgtctatgctgaccagccacacatcttcaatg

SEQ ID NO: 331842 - DNA, 98 bp, Homo sapiens
catgaggaccgccgcggggggacgtctgcggcccgcgtcggcgctggggacaaagactggaaagctacccttgaggagaataggttgaattctgaaaa

SEQ ID NO: 331843 - DNA, 96 bp, Homo sapiens
cagcttagaatcagtatttgtggttgggaaagatggacttacgggagcttgattgggctaatggatactacagacaacagagaaaacttgttgaag

SEQ ID NO: 331844 - DNA, 128 bp, Homo sapiens
ttgttggggagaagaggattggaggtgtcagtgttaaaggaacctctacaacgaaggtgaagccacggaagataaggtcatcatcagatttgaaatatttaaagtggatacaaaactatttcagcaat

SEQ ID NO: 331845 - DNA, 98 bp, Homo sapiens
agaagcagaagaactcgcctctgttgagtgatctcgaggacctggaagaagcagaggagccagacatggaggaagacgatgatcagaaagctgtgaaa

SEQ ID NO: 331846 - DNA, 83 bp, Homo sapiens
aggagcgagctgagcgcctccagcgagaagttgagggagaaaggcgggcccgggaacagtatttgataggtacaagagttaca

SEQ ID NO: 331847 - DNA, 90 bp, Homo sapiens
gagattcaataaatatatcaacaccgatgcaaaggtgaagaggacaataccagcgtcgtctggttttggctgcacaaaggcgaggcccag

SEQ ID NO: 331848 - DNA, 74 bp, Homo sapiens
tccgcccctttctggcaaagatgagggggattcttaaggtggataatattaatgcagctgtgatggatttgaaa

SEQ ID NO: 331849 - DNA, 100 bp, Homo sapiens
caggaaatcaaaatcaccagcaagtttcgaggcaaatacctctccattatgcccctcggttttcgaaaggccttacactctgaccgtcctccttctgcat

SEQ ID NO: 331850 - DNA, 88 bp, Homo sapiens
gtggctgaatttaacacggagaccaccccagctacgaacagattcagagactaaggtgtcagtatgttcttcaagctgctctgctcct

SEQ ID NO: 331851 - DNA, 75 bp, Homo sapiens
ggataagcctcgacttagaagctaccgagttaccctaagaaagcaagaagatccttataggaagaaaaagcttca

SEQ ID NO: 331852 - DNA, 90 bp, Homo sapiens
gcgggccccgaaggctctccatcgaaggcaacattggttctctttgtaaagaatccttttctggtcaagtttcttcttcatcactcatgc

SEQ ID NO: 331853 - DNA, 142 bp, Homo sapiens
gcccgtgaaaaattgctccgtcttggaatttttagacaagtggatgttttgattgacacatgtcaagggccttccacgtgctggatgctcaggtttgggccaccccatccagctagaccctaaccagaagacccctgaaaac

SEQ ID NO: 331854 - DNA, 100 bp, Homo sapiens
gcagggacccggtgacagcgtgagaggttcgcagagccaagctataacatcagaaatggtgaatgaatacaagaaaattcttttgctgaaaggatttgag

SEQ ID NO: 331855 - DNA, 100 bp, Homo sapiens
tgaagatcctggtgtcgccatgggccgccgccccgcccgttgtactatactggcaattgctggagaagattttgcaattgttgcttctgatactcgattg

SEQ ID NO: 331856 - DNA, 91 bp, Homo sapiens
cgtggcttccgggcaggtaccgggcagctggagacgccagagccggcggacaatgcagatcttcgtgaagactctgactggtaagaccatc

SEQ ID NO: 331857 - DNA, 83 bp, Homo sapiens
atttgcaggaaggatgcaccccactccgagggcgacatgcacgttaatttggagtggcccctggagtcagtttcctacaccat

SEQ ID NO: 331858 - DNA, 83 bp, Homo sapiens
cacctaccaagaagccagtcaagcggccagcaaatggagctgctcctggtgaacaagctcaagtggaacctggccgcaatgac

SEQ ID NO: 331859 - DNA, 100 bp, Homo sapiens
gaaaagtcttcagaccgtggacaatgtgctctttgcccctattatggagaaaggtgttccctaggcctcattgctacgatttcagagtaccctggtaata

SEQ ID NO: 331860 - DNA, 100 bp, Homo sapiens
gggcaggtggaaatgcccaagccaaggcagaagtcaattcatctggaaagactatctctgagtcagacttaaaccactctttttcactaactgatttaca

SEQ ID NO: 331861 - DNA, 99 bp, Homo sapiens
tttctatggattaaattttttgctgatggagagctggaatctatgggattttcagctcgatacaatttcacacctgcttcaggatgagttagagaaagg

SEQ ID NO: 331862 - DNA, 83 bp, Homo sapiens
gtgacggccggtgagattggaagtggcggcggcggcaggcggcagaggggaggagccttcacgtaaatgggtccagtcatgcc

SEQ ID NO: 331863 - DNA, 74 bp, Homo sapiens
aagttcttcgtggagcctcatctcatcttacaggagcagactagatgcttgctctgtcaaggcacagcctattg

SEQ ID NO: 331864 - DNA, 80 bp, Homo sapiens
ttttcttcacaattcagccaatgttccatttatcgtgttcgacgagtgtcacaaagccaagaatgccggctccaccaaga

SEQ ID NO: 331865 - DNA, 96 bp, Homo sapiens
ttgtcgacgaccgacagggtggtgaaaggaactgcaagcacatgttgaccagataactgaaatggcagcagtaatgaggaaagccattgaaattga

SEQ ID NO: 331866 - DNA, 75 bp, Homo sapiens
caataatgatacagggaaaatttcaagcaaggtggagttggaaaaggtcatctgctcctatctcctaaggcccat

SEQ ID NO: 331867 - DNA, 82 bp, Homo sapiens
cgccgcccggggcgaggcagggccagcagcaggcgggagaaatgttcttttggggccagagtctgggcatatatgaatgcaa

SEQ ID NO: 331868 - DNA, 76 bp, Homo sapiens
tgcagttacagcctgtgcaacaagggattaatgcagtatcgaatggacaagtccgaggtgatagttacagtgaagg

SEQ ID NO: 331869 - DNA, 82 bp, Homo sapiens
ccaggagcgcgtctcggcgggagcctcagtaagactttgaccccgacgcaggcttcagtgattgccgcggatcagaagcctg

SEQ ID NO: 331870 - DNA, 50 bp, Homo sapiens
gcgctggagattgctgcaaacttggaaactactaaagttcctggggaagc

SEQ ID NO: 331871 - DNA, 82 bp, Homo sapiens
gaggctccagaaacgggtcctgctgctcaccaagggcgtgatggtgggcatgggtcagaaggattcctatgtgggcgacgag

SEQ ID NO: 331872 - DNA, 100 bp, Homo sapiens
taactatttcaagatgatatttattcaccaaacaaggataatcgagttcacattggaccaaaaatggaaattcgggtcgttacgttaggattggatggtg

SEQ ID NO: 331873 - DNA, 100 bp, Homo sapiens
catggcctacaacgtcatcacgccctttctcttgctcaagacacagctagcacagaagacgactttaatcagtgattcgaaattgaaagagcaagagttc

SEQ ID NO: 331874 - DNA, 82 bp, Homo sapiens
atgaacataaacaccgagctaaagattggtgcgaggagttggcttgcaggaactgtggctgcaccatctgtcttcatcttcc

SEQ ID NO: 331875 - DNA, 50 bp, Homo sapiens
tgcctttcagctttaaagagaattgaaggccctcgggaccaaggatcacg

SEQ ID NO: 331876 - DNA, 74 bp, Homo sapiens
ctgttggaggaactggcccggaaacaggaggaccccctggcgaagcggtgctgcctccagcccagagatgccgc

SEQ ID NO: 331877 - DNA, 100 bp, Homo sapiens
acatcgtgctctcaggtggctcaacgcttttcaaagcagggtcctcacctagctctagcagcagtaattctgtcaaccccatagcctcacttggagccct

SEQ ID NO: 331878 - DNA, 75 bp, Homo sapiens
gttacacagaggacaatgcttcccaggctcgagttgatgcccacagtccacagcaggaagtgcagaacatcttca

SEQ ID NO: 331879 - DNA, 75 bp, Homo sapiens
tgatgccctggtgaccttctgtgaagaactgggatggtcctagaacaattggagattcatacgcacacaaagaac

SEQ ID NO: 331880 - DNA, 83 bp, Homo sapiens
atcatgtctgcgagccaggattcccggttgtgaccgagattcccgacgagagagactgaggggaagagaggaaggaggggcgg

SEQ ID NO: 331881 - DNA, 100 bp, Homo sapiens
ctgattacctgtctggagcaaggaaaagagccctggaatatgaagagacatgagatggtagctaaacatttagcaattctcctgcctcagcctcctgcat

SEQ ID NO: 331882 - DNA, 98 bp, Homo sapiens
ggattaacgtccctgtcgtgtgacattttctgatatcagttttagagaatgtggcgtggagaaattctcaaggaaagagtaaaatgctggtgatgtgc

SEQ ID NO: 331883 - DNA, 98 bp, Homo sapiens
atgagtccgaaacaactaccagtttggttcttgaaagatgtttcccatccacataccaagctgatgaggatcccatcgttcttccccagtcctgagga

SEQ ID NO: 331884 - DNA, 82 bp, Homo sapiens
acacctacgacgatcgggcctacagcagcttcggcggcggcagaggatattgaaatggattccaggcgtgtgcctcgagaca

SEQ ID NO: 331885 - DNA, 90 bp, Homo sapiens
caacagttctacctgctcctgggaaacctgctcagccccgacaatgtggtccggaaacaggcagagatgtccggtctgtgctacgacagc

SEQ ID NO: 331886 - DNA, 98 bp, Homo sapiens
tcagaccttgcatcttcctcaggctccaccctataccgatgctccacctgcctactcagaggcaaacatcgttgatgattttcaagaatacaactatg

SEQ ID NO: 331887 - DNA, 99 bp, Homo sapiens
ataaaatcatggagaaatgtacattaccattgactggaaagcaatgtgtcaaccgcattattactgaaaagggaaaagttaaccattggatgccgccag

SEQ ID NO: 331888 - DNA, 50 bp, Homo sapiens
attggcattgtactgctagctggaagcaagaggtggaaacatacagaaga

SEQ ID NO: 331889 - DNA, 100 bp, Homo sapiens
ggaacgtggaaagcgcatacaggaccctaaacagtgtggacaacagtgagtatatgcggaatggagacttcttacccaccaggctgcaggcccagcagga

SEQ ID NO: 331890 - DNA, 100 bp, Homo sapiens
gagagacctgactttcctgagaggagtgggaatagctttgcgaaaaatgggcgcaatggccaagccagattgtatcatcacttgtgatggtaaaaacctc

SEQ ID NO: 331891 - DNA, 101 bp, Homo sapiens
aggccggggtgctcagccaggccgactacctcaacctggtgcagtgcgagacgctagagggtgtgcattgctaagtgcaacagtacctcttccctggatgc

SEQ ID NO: 331892 - DNA, 75 bp, Homo sapiens
aatgaactgctccagctggagtttggagaggtgcgatcacaactgaaactcagatggagtctcactccgttgccc

SEQ ID NO: 331893 - DNA, 100 bp, Homo sapiens
caccaaagccccggccacctcggcctcttcctgttgcaccaggttcttcgaaaactgaagcagatgttgaacaacaagcacatcaggtccacccatctgg

SEQ ID NO: 331894 - DNA, 74 bp, Homo sapiens
gagtggccaatgttgagcacattctgaaaattggatatctaaatgatagagtgaatacttgtaatgaagtttat

SEQ ID NO: 331895 - DNA, 85 bp, Homo sapiens
gccactttccccggagctgggccgcgaacacctcactattgatggtgtagcgctttaggggaagacaaatttacatgtattggag

SEQ ID NO: 331896 - DNA, 111 bp, Homo sapiens
tggacaagtttgcagatcgggagcgcaaggtcgccctcaaggccatgatcaaaacgagcatcagatccatgctgctgctgactcggagccccacagcttggcacaggctct

SEQ ID NO: 331897 - DNA, 74 bp, Homo sapiens
tttgataacactggagatcagcaccaaatcccacagaggcatctgaggtgtgtcggcccagtccttcctccact

SEQ ID NO: 331898 - DNA, 75 bp, Homo sapiens
atgaaagactcctctatggaaaggttattcagcttctcaaggctggaaaagcgaaggaagtttcctacaatgcac

SEQ ID NO: 331899 - DNA, 100 bp, Homo sapiens
ggaatatggaatccaagggggccagttcctgccgtctgctcttctgcctcttgatctccgccaccgtcttcaggccagagggacgtatggtcatccagga

SEQ ID NO: 331900 - DNA, 90 bp, Homo sapiens
ttctggggttccctatgcaaatgccaaaggaattggttatccagtttgcagatgctgaaggttactttgctgcttgcacaacagatacaa

SEQ ID NO: 331901 - DNA, 96 bp, Homo sapiens
cgggtttctttgatgcgacctcaggaaggagatgaggaagaagaggaaaggctatgaagatgatgattacgtctcaaagaaatccaaacatgagga

SEQ ID NO: 331902 - DNA, 122 bp, Homo sapiens
cgggaacccaagatgggccaagtggtgtatgtgccggtcaagacgggctcgatgaagggcgccctaatggagatcatccagctcgccagcctcgactcggacccctgggtgctcatggtcgc

SEQ ID NO: 331903 - DNA, 96 bp, Homo sapiens
cgttcctcaaactccgtgaccaggtgtcatggagaaactccagctgggcccagagattctgcagcgggaaaatccaaggcttatttatgccaggct

SEQ ID NO: 331904 - DNA, 49 bp, Homo sapiens
aatctgtctcctgatcatcattcagtctacatcagcatcagcatctgcg

SEQ ID NO: 331905 - DNA, 90 bp, Homo sapiens
ttgggtgcgagaaaaatgtaaagacagagaaaggcatagacgggtatgaaataatgtactcttgctggagaaccgatcccttagaccgcc

SEQ ID NO: 331906 - DNA, 74 bp, Homo sapiens
aaggtctttgtgtcccgacactctgccaccttctccagcattgtgaaagaacctcaagaaggcatgaagccagc

SEQ ID NO: 331907 - DNA, 100 bp, Homo sapiens
gcccaggagaagctggagctggcagagaaaaaggccaccgatcctgaagcaggacattctaaatgaaaagactgaattggaagcaacacttaaggaagcg

SEQ ID NO: 331908 - DNA, 51 bp, Homo sapiens
cgggcctagcggagccgggactggagggtggctttgtccactatggtgaag

SEQ ID NO: 331909 - DNA, 75 bp, Homo sapiens
aggagacctggatcacatgtgacaagcccccctccatgcgcctgaaggcccgacccagcagccctggcttttccg

SEQ ID NO: 331910 - DNA, 88 bp, Homo sapiens
tgctgccctgcgcgctgctggctggcaaacctgcccttgctgcagcgggagctcctgcactgtgcacgcctggccaagcagacgcccg

SEQ ID NO: 331911 - DNA, 83 bp, Homo sapiens
gagctgtagagaggaccccggtacatctgaaagccgggaaatgcacggggtcactctggtgcccattgaggagttcagcccgg

SEQ ID NO: 331912 - DNA, 100 bp, Homo sapiens
aaggacctctacctgatcccgctgagcgcccaggaccctgttccatccaaactcttgccctttgagggaccaggcctgcttcggccttctgctcttctgt

SEQ ID NO: 331913 - DNA, 90 bp, Homo sapiens
ataaaccagagaaagatgcaagacatgtagtaaaagtgataaacttctgcactggaggggcctctcctcccctcgttctgcacatggagc

SEQ ID NO: 331914 - DNA, 82 bp, Homo sapiens
aaacagacccgagacccatgtcagccccactggatgccgtagacgttacatccaagaggaaataatccaggcaaggaagcac

SEQ ID NO: 331915 - DNA, 121 bp, Homo sapiens
gggcaccagaatgctccctctccaaaggatctaaggaccaaagctgacagtttctttacttggagtgcatcatcgacgaggactgtgggcccagcatgtactgccagtttgccagcttcca

SEQ ID NO: 331916 - DNA, 100 bp, Homo sapiens
aacatggacgccgtcaacgccttcaaccaggaggtgcgagaagatgtactaaattcattgaataacaactttcttcaaacgctaaatcaagcttggaatg

SEQ ID NO: 331917 - DNA, 99 bp, Homo sapiens
tgagactctaggcaggctggcaggcaacaccttagggagaccagccactaactggggcgtacacagtgaccctggatggacgagggccctcaagggtca

SEQ ID NO: 331918 - DNA, 98 bp, Homo sapiens
gttttcaatgaatcagttcaaagaaagaatgcagtctttctatacctggctagcttgtcactttctgcaaaggtttccctcagggagcctcctgctgc

SEQ ID NO: 331919 - DNA, 75 bp, Homo sapiens
acgctgctggtggccaagaccaaggcctctccaggtatctcaaatctgtgaagtattgtagaggagacacaaaag

SEQ ID NO: 331920 - DNA, 75 bp, Homo sapiens
gtacaactgatggttcccccattcacaccagtgtccagttccaaggtggacccaagtggagagattgtggaactg

SEQ ID NO: 331921 - DNA, 149 bp, Homo sapiens
tggctcctgtcccgctggccctctgtctgcctgtgtccctgaccatggctccctgcagtaccctttaacggtgcaatggatgagcttcatagtctggatccaagaaggcaagagttattggaagctagatttactggagttgcaagtgg

SEQ ID NO: 331922 - DNA, 50 bp, Homo sapiens
ggaaccggaccccggcagctgctatgaccagggccagagcactcagatct

SEQ ID NO: 331923 - DNA, 116 bp, Homo sapiens
gaactggagaagttaaatcagtccacggatgatatcaacagacgggagactgaacttgaggtaaactaacattatggatttttccaagctacccaaaatactcgatgaagataaag

SEQ ID NO: 331924 - DNA, 100 bp, Homo sapiens
gttagtgtgctctgagggagggtccgagccagccgctgttttgccggaggagcccctcaggccttctcaaaagtctatggccctgtgttcactgtgtatt

SEQ ID NO: 331925 - DNA, 75 bp, Homo sapiens
ctaattgggccaaatgctcctttaatttttgaacgaggtgacgcatccaaagaagacattgacactgctatgaaa

SEQ ID NO: 331926 - DNA, 74 bp, Homo sapiens
tgcgctaccggaatgtcatccagcgagtgattaggccgttaattaaggaaaagttgagccagggcgtgaccctc

SEQ ID NO: 331927 - DNA, 82 bp, Homo sapiens
cgcagcaccatggcgaccaccgtcagcactcagcgcgggccggaagggccgatgatccactcaggttcagtgattgccgccg

SEQ ID NO: 331928 - DNA, 50 bp, Homo sapiens
tgccaagaagcagctgtacacctgcattacaggcactaaagagaaagaag

SEQ ID NO: 331929 - DNA, 100 bp, Homo sapiens
gtcagagcgagcttcggagaagcagtggtgggttccatgtgatggtggagtaggaggcaggtctccgcgtgaaaggagatgaccttcaggccattaagaa

SEQ ID NO: 331930 - DNA, 98 bp, Homo sapiens
gtggggccggtgaagcagtgcttcgtggtgactgaaaaagactcgctctccgtctccagcaatgacgccagtccacccgcatccgtggcttccctcca

SEQ ID NO: 331931 - DNA, 82 bp, Homo sapiens
ttcagaggggatcgttgtagaagtctaactggaaaacccaaacttttcattattcaggagagaagaccaagaggtcggagaa

SEQ ID NO: 331932 - DNA, 103 bp, Homo sapiens
tgatgaagggaaggaaatcatgtcaagcgaagccttgaaaaagctgccctgagacggtgtcccgccgaaaggatttgaactcagaggatcaaaaagccttcag

SEQ ID NO: 331933 - DNA, 100 bp, Homo sapiens
cggcactccaactggaccgtcaccaacacccgcttctctgtggatgaagggtgtcagatgcctgatacattcaattcatggtttcttataaccctactcc

SEQ ID NO: 331934 - DNA, 100 bp, Homo sapiens
cgggaagccattgtgaacagctgtgtgtttgttcatcagactcttcaccagttaagtgggcagaccaacatccacctcagcaaaaacttcttcctgacga

SEQ ID NO: 331935 - DNA, 100 bp, Homo sapiens
gccggtgtcctgctcgccgtccccgccatgctgtctctagactttttggacgatgtgcggcggatgaacaagcggcaggcagagtctcgctctgttgccc

SEQ ID NO: 331936 - DNA, 75 bp, Homo sapiens
tgttaaacgaatactggaaaacccacaggtaaagtcagtgataaatcttttgtttgctgcatatactggagatgt

SEQ ID NO: 331937 - DNA, 101 bp, Homo sapiens
ttcatctggggccttatttccactttgtaattccagcgagtcgacttcccatcctgagttggaggccagatgctccagtgcctgatggcgaaagtgagaaa

SEQ ID NO: 331938 - DNA, 74 bp, Homo sapiens
ggcacacgcgcagccccggcctctcggcctctgccggagaaacaggactcgctcagcagcagcctgaaaacttg

SEQ ID NO: 331939 - DNA, 88 bp, Homo sapiens
atgtgacgacacccctgatggggcaggaggggcctttgcagctcaggtttgaagatcagcttcagcaatggttgtctgaagactcagg

SEQ ID NO: 331940 - DNA, 75 bp, Homo sapiens
caactgctcatcctggcctacgtcatcggatacgccaagtactacaaggaaaacaatgttgagaaacggactctg

SEQ ID NO: 331941 - DNA, 82 bp, Homo sapiens
aaatatcccaaggactaatctgatcgggtcttccttcatgtgacttaagagattaaaattaatttggttgctgttggttctg

SEQ ID NO: 331942 - DNA, 97 bp, Homo sapiens
ggagattgggagcgcaggggcagcggctccgagagcgcccacaaaacccaacgagccctggacgactgcaagatggccttctcctgaggaagcacag

SEQ ID NO: 331943 - DNA, 101 bp, Homo sapiens
aagcctgcgcgagaggagccgggacacgcctagcgcgggctccaggctgaagccgacgtagcttctctgaacagacgcatccagctggttgaggaagagtt

SEQ ID NO: 331944 - DNA, 50 bp, Homo sapiens
agtggacgcctgcaggacccagatgtacattgaagatgtcagtttctaca

SEQ ID NO: 331945 - DNA, 82 bp, Homo sapiens
cctcgctactcgcttgcctacccgccggcccgcgggtctacttcctcaaagatgatatcatcaagttgaatcgaaaggaagg

SEQ ID NO: 331946 - DNA, 90 bp, Homo sapiens
cgggccgcggcggcgccgccctgctctgcctctcagcgctactcgcccacggtccaggtgcaggtacagcagtctccgcaacaggtctcg

SEQ ID NO: 331947 - DNA, 100 bp, Homo sapiens
cccaggagtacgcacctgctggggacctgtttgacatcatccctccccagaaaatgacagatggcgagacctggacaggaaatgccctcttcagattgac

SEQ ID NO: 331948 - DNA, 75 bp, Homo sapiens
ctcagatgttttatcttagtgattatgataactccttggggaaaaaagttgttccatgtagacatgactggcatc

SEQ ID NO: 331949 - DNA, 111 bp, Homo sapiens
cccggccccgctgagcgatcccaccgaagcagcgtgtcctccgtgggagcccgaggcgcattctacattctaaaggggagctcagtgaagatagacataaacagtatgagg

SEQ ID NO: 331950 - DNA, 83 bp, Homo sapiens
acagctggagcgcccagaggcgagccctggtggaggaagagcttcgaggcagagaatgggccgacaccatctcctggccgcag

SEQ ID NO: 331951 - DNA, 83 bp, Homo sapiens
acgggccatacccaataaccaggtgcttggcaaaatcgagcgggccattgggctgaagaagatgcagagcagcctgaagctgg

SEQ ID NO: 331952 - DNA, 88 bp, Homo sapiens
gctgctgggagatgggcctactcgcccgccaccctgcgctgccgccgctctgaggagttaaaggctgaagccgacgtagcttctctga

SEQ ID NO: 331953 - DNA, 100 bp, Homo sapiens
gtcgaccctgctcagaggagcttatacagggatgtgatgctggagaactatagccacctggtttctcttggccctcgggaccaaggatcacgtcatgact

SEQ ID NO: 331954 - DNA, 75 bp, Homo sapiens
aagctggcagtctttgatttgggcttaaatgataatcccagcccctggatctatcgagagctcaaaagatccttg

SEQ ID NO: 331955 - DNA, 75 bp, Homo sapiens
ccaaagtggatgcctccggggaggccataggaaaaggatacagagtagagtttcatgaacctgaaacttggtgga

SEQ ID NO: 331956 - DNA, 95 bp, Homo sapiens
cctgtcccatcgcaaacccaaagatccccgttcctggagattctgattgagcatcaagatggtgctcatgtggaccagtggtgacgccttcaaga

SEQ ID NO: 331957 - DNA, 101 bp, Homo sapiens
aagtcggtggcggcgccggtacgcctggtccccgcgtggagtctttactcaaaacaggtaaagctccagatggctctggaacttatgaggaaagagttgga

SEQ ID NO: 331958 - DNA, 75 bp, Homo sapiens
cgcaggaggagtatgtcaagcgagccctgatagcagaccccacgttagctgaaatgggaaaaaacttgaaggagg

SEQ ID NO: 331959 - DNA, 100 bp, Homo sapiens
ggaacactgatgggaaatcagccctggacctggcagatccttcagcaaaagctgtccttacagtttctctgcaggtggatattgttcccagccaggggga

SEQ ID NO: 331960 - DNA, 98 bp, Homo sapiens
agggggccctgagcctcctgcaacacctgcggcctcactgggacccccaggaggtgaccctgcaggctttcagtccagtgtaaagctgttggagcgcg

SEQ ID NO: 331961 - DNA, 74 bp, Homo sapiens
ggaggtgccgccggggtcgcagttggcgagctttagcccctctcctccttctccgtaccctaccactgttggac

SEQ ID NO: 331962 - DNA, 50 bp, Homo sapiens
taccgcaactctcagttcgagagtaaaggaacttagtgatttggcccgtg

SEQ ID NO: 331963 - DNA, 100 bp, Homo sapiens
acagagatacccagacaacaggatcgtctcgtccaagccgctttggcagagatcacggagatggtggcacagctccacggtacgatgatcaagatggaga

SEQ ID NO: 331964 - DNA, 100 bp, Homo sapiens
ttttacatccaggtcatgacatttaatcaggcagaaacttttccatttaatccattcgatctcaccaagggtatggctctctcggcatgatgaccagcgt

SEQ ID NO: 331965 - DNA, 101 bp, Homo sapiens
ccgtctccagccttggtctgagtggactgtcctgcagttcttacagcagctgtgacacaagcctcactgcagtctataattcataagtttcttactgctgg

SEQ ID NO: 331966 - DNA, 100 bp, Homo sapiens
agagagatcggagaaggagccgctcgcgatccccgcaccgaagacgctcccggcattgctaccatttatgttcgttataagcaagttcatgctctgagtc

SEQ ID NO: 331967 - DNA, 100 bp, Homo sapiens
tgaatattctgttttgctgcccgaagcttggcccgggaccgtggcgcttcgagagattcgtcgttatcagaagtcgaccgagctgctcatccggaagctg

SEQ ID NO: 331968 - DNA, 100 bp, Homo sapiens
ggtggtgctggtggcggcggcgctttcggcgcgggcccgggccccgagcgcccgaacagggcgccctgcgtccggcagaggaggcgagcatcccgctcag

SEQ ID NO: 331969 - DNA, 76 bp, Homo sapiens
ggattccaagtaactcttatttgttcgtgtctgggatgtccggccatttgcccccaaagagagatgtgtaaagata

SEQ ID NO: 331970 - DNA, 75 bp, Homo sapiens
gagaagtcgtcctcttcagaaagttactccacaggatccgctgaacataggatgttgccacaaaatctacctcgt

SEQ ID NO: 331971 - DNA, 83 bp, Homo sapiens
cggcgagtttccgatttaaagctgagctgcgaggaaaatggcggcgggaggctgctctttggcgtaaattgcaatcgattagg

SEQ ID NO: 331972 - DNA, 90 bp, Homo sapiens
cgcccaattatcgcgaccaacacataccagcagcctcccgagcacaacaaggagaggtgatgaggttggcatgtcgtttggatcccaaaa

SEQ ID NO: 331973 - DNA, 80 bp, Homo sapiens
catgctggcaagtctgaaggtcaagtgcctacctttgcccgtcgttccaatgtcctgaccggcctccaggactcctccac

SEQ ID NO: 331974 - DNA, 71 bp, Homo sapiens
tcagtttatggagagaagagagtctcgatttcggaagaagaatttggacttgatgaagaagatgaagatga

SEQ ID NO: 331975 - DNA, 75 bp, Homo sapiens
aggtggaggcagcgcggctctcaggccaagaagacgctggagggaggctgttaggagggactctgagcttcacac

SEQ ID NO: 331976 - DNA, 88 bp, Homo sapiens
gttccaaatgggtattttttgatgatgcaaatgtgaaagagaatcttcctaaaaggactgtgtcactgtggtcttacataaacagcca

SEQ ID NO: 331977 - DNA, 100 bp, Homo sapiens
tgatttgctgtcagccatgaacggatggatgtgatgcctgctagccaaaagggtgaggtttatacatggggcgacaatgatgagggacaactgggagacg

SEQ ID NO: 331978 - DNA, 96 bp, Homo sapiens
gggatgcagagcctttccttaggacaaacaaggttcagcagactgtacaggatctttttggcagagccccaagtaaagctgtcaatcctgatgagg

SEQ ID NO: 331979 - DNA, 75 bp, Homo sapiens
ccacccccagcagggccagtgcgaacaaaagcttggggcttccttggtcgcacccaccacctgcctgcccactgg

SEQ ID NO: 331980 - DNA, 82 bp, Homo sapiens
ggagttctttgagatgctggagaaaatgcaggctttgccacaaatgtcagtgcagaactctggctggccccaccaagaagac

SEQ ID NO: 331981 - DNA, 100 bp, Homo sapiens
agacctcattccaagttccaggattaattctggtaaagctttccagtttgaatttagatgatcacgcaaagaagaaattaattaaacttgtaggagagcg

SEQ ID NO: 331982 - DNA, 82 bp, Homo sapiens
gtgtggaccaggaggagcgctatattgatgatgttaagaagttcaaaccgggttacctggaagctactcttaattggtttag

SEQ ID NO: 331983 - DNA, 97 bp, Homo sapiens
acctcaccatagctaatcttgggacatcagagggtcgcttcatgcaggcacatagctggcaacctggaataaaaaatccctatcgtggtgttgttgt

SEQ ID NO: 331984 - DNA, 101 bp, Homo sapiens
ttgtctgggagataatagtgaggacgctgatgaaataattcagtgtgacaattgtggcattacagtccatgaagagatggggtctcactatgttgcccagg

SEQ ID NO: 331985 - DNA, 78 bp, Homo sapiens
ctgtgtattgggcgcaagaagttcaacatggaccccgccaaggacatcttgagctctaaactgaatggaaaattcaac

SEQ ID NO: 331986 - DNA, 74 bp, Homo sapiens
gagaggcatcctccttgaagtatttggctgaggagttttcaatcccaatggcccactgcgtgaccttggttcag

SEQ ID NO: 331987 - DNA, 75 bp, Homo sapiens
aaggaaggcatccctcctgaccagcagagggactcggagatcatgcagcagaagcagaaaaaggcaaacgagaag

SEQ ID NO: 331988 - DNA, 78 bp, Homo sapiens
gaacactcaagtgaagcaaaagccttccatgattacgggtatagaacaggctatgcttacaggcatcctctcattcga

SEQ ID NO: 331989 - DNA, 97 bp, Homo sapiens
ttatatggccagcattttcccattgaggtgcggcattatttatcccagtggattgaaagccaagcatgacgtcaagctgagtgtacaaagactgcac

SEQ ID NO: 331990 - DNA, 83 bp, Homo sapiens
aacggcgagagtgggcgagaacgtccactgcgggccggcgaaagctgaaagaagatgctgatatgctacaacacggatgaacc

SEQ ID NO: 331991 - DNA, 75 bp, Homo sapiens
gtcatccgtggagcaggaaaccagcaattttccagattattcaaagtatcaggatgggcatgtgaagtgactgac

SEQ ID NO: 331992 - DNA, 83 bp, Homo sapiens
atcactttagaccctccacctaattgcagacaatgcagatcttcgtgaagactctgactggtaagaccatcaccctcgaggtt

SEQ ID NO: 331993 - DNA, 101 bp, Homo sapiens
gagcaccccttttaccactgcctggttgcagaagtgccgaaagagcactggactccggaaggaggagatgttaaagtaacccatcttgcaggacgacattg

SEQ ID NO: 331994 - DNA, 126 bp, Homo sapiens
aaaatcagcagagaccgtggcaagatatattttgtcatttcagtggaaagtctggcacaggttgctccttgagggcaggacagttcttatggctttatccgttgcgtaagcacagagaggtctgcg

SEQ ID NO: 331995 - DNA, 100 bp, Homo sapiens
cgagcctagggaggcgaggttcccgcaccggataggaagtgcacggctgtctataacgtgctgccgggtctcaggatggaggagtgaagtctcctgtcgc

SEQ ID NO: 331996 - DNA, 82 bp, Homo sapiens
aaacatgcagattatatcgcatcctatggctcaaagaaagatgattataaccccccaggtctgcctagcattgctgtctgct

SEQ ID NO: 331997 - DNA, 80 bp, Homo sapiens
gtgagaagaattatgatgagttcatgaagctccttgcttcgtgctctgtctgatgatggagtatctgatcttgaagaccc

SEQ ID NO: 331998 - DNA, 100 bp, Homo sapiens
gtcaaggtggcctaccaggaggccaggggtgtcgccatggatgttgacaatgcgtctctggcacgtcttgaccttgaacgcaaagtggaatctttgcaag

SEQ ID NO: 331999 - DNA, 101 bp, Homo sapiens
ggagggctctcctgtctgccaccatcctgggttgacaattctacacaaggagacatccacgacagcgatggcagttccagcagcagccaccagagcctcaa

SEQ ID NO: 332000 - DNA, 75 bp, Homo sapiens
gcggccaaggacctggccgacatcgcggccttcttccgatccgatatcctctgagagccaagcaaagaacattaa

SEQ ID NO: 332001 - DNA, 83 bp, Homo sapiens
atgatttaaacaagagatttccacagaaggtgaccctggcagcaaccccaacaaacgccagaggcagccccctctcctgggag

SEQ ID NO: 332002 - DNA, 96 bp, Homo sapiens
gaccttgcccagcctttctggacaactggaagacagttacgcttcgtcctccacctctccctccaacatgaactctttgccagcagagaggatcca

SEQ ID NO: 332003 - DNA, 75 bp, Homo sapiens
atggtccttaaaaccgaagaggaggacggtcaaaatgcagatcttcgtgaaaacccttaccggcaagaccatcac

SEQ ID NO: 332004 - DNA, 100 bp, Homo sapiens
cccatgttttccctcagcagtcggatgggggaggactgctttatggacttgcatcaggagtagcaaattgaggaaacttgaatatttttgtatcctgaag

SEQ ID NO: 332005 - DNA, 80 bp, Homo sapiens
ggtcccagcctggagctgtgccagcctgacatggagtactcctgattgtgacatcacattcatcccctgggcgatggagc

SEQ ID NO: 332006 - DNA, 100 bp, Homo sapiens
tttctctgaacatactgccttatgggacagatcaacctctgtgttctatgcctgagagtactgagataatgaaaagaccaaagtactgcagcagtgacag

SEQ ID NO: 332007 - DNA, 100 bp, Homo sapiens
cccacagtggaaaacagattcctgccaggtgcggcggcagcacatggagcgttgtaccagcttcctggtggatgagctgggcgtggtggatcgatcccag

SEQ ID NO: 332008 - DNA, 100 bp, Homo sapiens
ggagccaggagccggccagggccgcaggcaggaagggagcgaggctgaagggaacgatgacgcggcatggcaagaactgcaccgcaggggccgtctacac

SEQ ID NO: 332009 - DNA, 75 bp, Homo sapiens
agtcggacctttcccgctggcgcgcagcctcagctagccactgaggcggctcccagctgcgttggcgacatggcc

SEQ ID NO: 332010 - DNA, 83 bp, Homo sapiens
gaagacgaatcgttaaacatcttaggtcagactatctgttatagtccctgggtcaagacaacaatttttataccttcgtcgtg

SEQ ID NO: 332011 - DNA, 84 bp, Homo sapiens
aagggaccacggtcaccgtctcctcagatataaaggtaaatgctatctaagccacagtaaccttgagatactgtgggcctgggg

SEQ ID NO: 332012 - DNA, 89 bp, Homo sapiens
gtggccaagaagctggtgtgcggagatgaagacctgcctagagctggaacgttacctccagagcgagccctgctatgtttcagcctcag

SEQ ID NO: 332013 - DNA, 90 bp, Homo sapiens
ctggaaccatgacaggcatgttgtataaatgtacagccttgataaatttgctgaagttccttatgtcaaatgagactgtacttttggcca

SEQ ID NO: 332014 - DNA, 76 bp, Homo sapiens
ctgtgggactgggatcatcagtctcttctgtgcacactatgcgcggcctagagcgacggcaccgaaagcgaaggaa

SEQ ID NO: 332015 - DNA, 83 bp, Homo sapiens
cacgtggccagagtcctccttcagcacatagaagtgaatggcatcaatctggtcaaaatgcagatcttcgtgaaaacccttac

SEQ ID NO: 332016 - DNA, 50 bp, Homo sapiens
tttgtacacggggagagcttacggtcctacggagccccacggggggacaa

SEQ ID NO: 332017 - DNA, 74 bp, Homo sapiens
tggaacagaggaacattttgaaaccccaactatggaaaccagcaatatggaccaaacagccagttccccaccca

SEQ ID NO: 332018 - DNA, 99 bp, Homo sapiens
cactcacccaggacacactatggtgcttcagccaagtgaaaggcactatcgagattggaaccacagaagatgttttctggcaaaggccttcctgcattt

SEQ ID NO: 332019 - DNA, 74 bp, Homo sapiens
ctggatcggattttggaggcattgaagctgctgctgagcccgggagcgacatcaccccgcccggagagcctgtg

SEQ ID NO: 332020 - DNA, 100 bp, Homo sapiens
catcaccggagcgtcccagctgcgaggagatccgagtgaagcctgacaggaccggtgtggtcacggatggtgtgaagcactccatgaaccccttctgtga

SEQ ID NO: 332021 - DNA, 100 bp, Homo sapiens
gaaccatagggattattggagctcctttctcaaagggacaggaattctcagtcctacatacaggccattagtgacctgaacaacctggttttttcccgtg

SEQ ID NO: 332022 - DNA, 50 bp, Homo sapiens
gccacctcagagagagtgttggagaagatgtatggtcttatgcaaaggga

SEQ ID NO: 332023 - DNA, 82 bp, Homo sapiens
tcatctacctcatcaaaaagagagagttttaccgtgacaagaagtacgaggaagtgagctggtaggtgagtgctgtcctcgg

SEQ ID NO: 332024 - DNA, 90 bp, Homo sapiens
ttcccagaacccagcgcgctctggagtgcatccgccccaacccttttccccctcgtctcctgtgagaattccccgtcggatacgagcagc

SEQ ID NO: 332025 - DNA, 88 bp, Homo sapiens
tatttgggtgatacccagtgcagtgaactgcaggtagctacagcaagctgggtagcaggcagatccaaaggatatcatgaagtttcca

SEQ ID NO: 332026 - DNA, 75 bp, Homo sapiens
aggacatggagtatgaaagacggacgagcctgtggagtgggagacacctgacctttctcaagctgagattgagca

SEQ ID NO: 332027 - DNA, 75 bp, Homo sapiens
aagcctttggatcagcatgcaggactatgctgttagtaaaggagttggtggtgaccccgcccagttggcccagag

SEQ ID NO: 332028 - DNA, 50 bp, Homo sapiens
ccgccctggccatctaccatgtgattgaggacgagacgcaggtgtcacgg

SEQ ID NO: 332029 - DNA, 83 bp, Homo sapiens
cttattcccttcaattcaagtaacaggtcagcccaaggccaaccccactgtcactctgttcccgccctcctctgaggagctcc

SEQ ID NO: 332030 - DNA, 90 bp, Homo sapiens
gttttggcattgcagctaaatatcagttggatcccactgcttccatttctgatagccaaggaagtgacatatccattggagcgtgtcttg

SEQ ID NO: 332031 - DNA, 100 bp, Homo sapiens
gggggaaagggagacggcgagacgcgcagcgccggcgcccgggagacccaggaggagcccgcaggttttttattggcacctcagtctcaacattttcttt

SEQ ID NO: 332032 - DNA, 73 bp, Homo sapiens
attgaagatgttcctgctccttctacatctgcagataaagtggagaggtctcttcagagctgctgtgcccagt

SEQ ID NO: 332033 - DNA, 82 bp, Homo sapiens
cggaactagatctttctgacaacaaactcgaagactggcatgaggtagcagcaattgcagagacagatgaatctgcagaatc

SEQ ID NO: 332034 - DNA, 100 bp, Homo sapiens
cgaagtgctatccgtgcgagaacagctattccacgagaggatccgcgagtgtattggctgactctgtggcctggaatccccacaagctcctcgcagcagg

SEQ ID NO: 332035 - DNA, 82 bp, Homo sapiens
gacgcgccacccgccgacgcctcagccgcttggggcccgcacggaccctctacttcatgggtgtataacattctcgacaaga

SEQ ID NO: 332036 - DNA, 100 bp, Homo sapiens
ccagatgatgcggtggtgggggacctgccggcacgcgactccccccgggcccaaactcaagaggtttggatatggaccttcttcaattcctggccttcct

SEQ ID NO: 332037 - DNA, 88 bp, Homo sapiens
gagaaagcagatacctgtatttacaaccctttgtttggatcagatcttcagtatacaaatcgggtgggtttggaggatttgggacaac

SEQ ID NO: 332038 - DNA, 75 bp, Homo sapiens
gagtacgggctgcaggcatacactgaagtgaaaactgtaagaattctctacgcctgtggttttagcgttttgttg

SEQ ID NO: 332039 - DNA, 88 bp, Homo sapiens
tatgcttttatagacgacgtgatatttccaacacacttataatgctcgcagataagcatgctaaactagatgaacggcgcaaaaggag

SEQ ID NO: 332040 - DNA, 98 bp, Homo sapiens
ctggcttcatctggtcctcataatcttacttatcctctaggtcccaggaatgaaggactatggactacgtggcttcttccaaggtggcatcccccgag

SEQ ID NO: 332041 - DNA, 75 bp, Homo sapiens
cctcccgagtagctgggaccacaggtgcaagaaagcctttgaggtgaaggtgtatgaaagtcatcataacagatg

SEQ ID NO: 332042 - DNA, 100 bp, Homo sapiens
acgccgcgctgcgcatctccaacagcgacctgagcggactgatcctttgaaatactccagccatgactaaaagagaagcagaggagctgatagaaattga

SEQ ID NO: 332043 - DNA, 82 bp, Homo sapiens
ccagccgccatggatagcgacgacgagatggtggaggaggcggtggaaggtgagaagccctaccactgcaactgggacggct

SEQ ID NO: 332044 - DNA, 100 bp, Homo sapiens
aatatacttcatagattcatcaaatgccgtggaggtcccagcccccgctgcggttctcggaggtccggagcccctgatgcagtgcacagcctggctgaat

SEQ ID NO: 332045 - DNA, 75 bp, Homo sapiens
gtgtgttgaaagtacaattctattgcacatcaatgatatcatcccaggccagcctttattattgccatataagcc

SEQ ID NO: 332046 - DNA, 100 bp, Homo sapiens
gcagccatcagtgagacggaagatatgccaatgtttgatattggtgctggaaaaggcaaatactatgctgtcaattttccaatgagagatggtatagatg

SEQ ID NO: 332047 - DNA, 74 bp, Homo sapiens
tggatcgctgtgatcgtcacttgtgtacaagtccccagagtatgagtcccttggttttgagcttactgtggaga

SEQ ID NO: 332048 - DNA, 100 bp, Homo sapiens
ctttgtccatgcctgctgatgggaactggatggggattgtggacccttttgccagacctcgaggtcatggcaggaaagagacggggtttcgccatgttgg

SEQ ID NO: 332049 - DNA, 80 bp, Homo sapiens
acatcactggccgccatctggacacccttcgcgttgttgctcaggagatgttgctgctgaggaggaatgtagatattcag

SEQ ID NO: 332050 - DNA, 98 bp, Homo sapiens
gtgccttcccctacagtttcctcatcttcgtctacgacgaaatccgcaaactcatcctgcgcaggaacccagggggtccaagtgtgcctgccatcaac

SEQ ID NO: 332051 - DNA, 100 bp, Homo sapiens
ccatcatttcttcaggataatgagctcagacatttaatccttaagattaataaagaactcttcagaattcctggtgtttcatcatatatacgactaagat

SEQ ID NO: 332052 - DNA, 75 bp, Homo sapiens
cagattctagccgctactttgtaatccggatccaggatggtactgcacaccatatggtccctcggccatcagtgc

SEQ ID NO: 332053 - DNA, 100 bp, Homo sapiens
gacctctacaactgggaggtggccatcttcggaccccccaacaccctctacgaaggcggctacttcaagaatggacatggtggtggtcgaagtcagcaga

SEQ ID NO: 332054 - DNA, 82 bp, Homo sapiens
atgtcagacgcagccgtagacaccagctccgaaatcaccaccaagtccacaggtcctggctaccctgggaagagacaagaag

SEQ ID NO: 332055 - DNA, 100 bp, Homo sapiens
agccccccagccgcagacaaaagacctcggggccggcctcgcaaggcgcttcccctttccagagagccagaaagaaaaccttctgataacttaagagaga

SEQ ID NO: 332056 - DNA, 90 bp, Homo sapiens
caacagcagcagcaagttagtggattaaaatctcccaagaggaatgacaaacaaccagctcttcaggtgacttaagagattaaaattaat

SEQ ID NO: 332057 - DNA, 82 bp, Homo sapiens
ccggctacgtcagcaagattgtcggcaagtgtgtactaatggtcacttgatgtgcgctggctgttttatccacctactagca

SEQ ID NO: 332058 - DNA, 100 bp, Homo sapiens
ctgcaaatatgttcaagatggctaaaaattggagtggatggtgccatgacaatggtgtgaactacaagattggagagaagtgggaccgtcagggagaaaa

SEQ ID NO: 332059 - DNA, 75 bp, Homo sapiens
agtgcagctgcctcagttcttagcgcagatatcttaatgcaattcagacaatgtgtccacacattcttcgctatt

SEQ ID NO: 332060 - DNA, 50 bp, Homo sapiens
gtggcctactgcaagaccaagaaacagcggaaaaagctgcatgaccgtct

SEQ ID NO: 332061 - DNA, 100 bp, Homo sapiens
gggccacactgcaggcctccgcgctcagtgattcactgcgtgctgtcctcacttgttctacaatgagtgccaaatctgctatcagcaaggaaatttttgc

SEQ ID NO: 332062 - DNA, 100 bp, Homo sapiens
caagagacctatcaagacctgtatccaggaaaaggaacccagctatttagtggtcgaagtgactttagaatcactaccttgaaattccatccaaaagacc

SEQ ID NO: 332063 - DNA, 100 bp, Homo sapiens
aaaacaagactggggctgctcccatcattgatgtggtgcgatcgtttggcaatgaggagcagcagctggcgtgggccaagcgggagagcgagaaggcgga

SEQ ID NO: 332064 - DNA, 98 bp, Homo sapiens
cctttctgctggggagcctcttgtgtccagcctaggcccgcgtgcagcgccgacggatgaccgtcttcttgcatgttggcagataaattgaacatgac

SEQ ID NO: 332065 - DNA, 121 bp, Homo sapiens
ttttcttgcaaaccttgctttggattttatgtgctacagtctgcggaacggagcagtatttcaatgtggagaactcaagacatggctgcccagtgtgtcacaaaggtggcgctgaatgttt

SEQ ID NO: 332066 - DNA, 100 bp, Homo sapiens
catgaagacccaccggctggacaaggtgtttgtggccacagatgccgtcagaaagggtagtgggcagcagtcagtgacaggtgtaacctctgtggatgac

SEQ ID NO: 332067 - DNA, 83 bp, Homo sapiens
gattgaggacgttcccttcacggagaaagattttgaacacgatgaggcgagtggtacgacagagcaagtttcggcatgtattt

SEQ ID NO: 332068 - DNA, 75 bp, Homo sapiens
agccgatccagcctgcggagcctgtggggcaggtcattagtaattatcagcactttagatgggagaattgctgcc

SEQ ID NO: 332069 - DNA, 100 bp, Homo sapiens
ggctgctagacagtctgccctccgatacccgccttgtcctcctcaatgctatctacctgagtggctccaggaggccagagctctactgaagcggcggcgg

SEQ ID NO: 332070 - DNA, 98 bp, Homo sapiens
gtgttaaagttagaagacatttgctaagtcaaatcacttcaggctttgaagacaagattcccaaaaggagattctctgagatgcaaaatgaaagacga

SEQ ID NO: 332071 - DNA, 73 bp, Homo sapiens
attggggtgcagcagctgcaccccaccttgatccagcggacttacgggtccctggccaaagatttatttctct

SEQ ID NO: 332072 - DNA, 75 bp, Homo sapiens
cttcgagttcttcgccgccgacctgaggctaaatgtgaacaataatgtcttggaagagaaattatttttcagggg

SEQ ID NO: 332073 - DNA, 89 bp, Homo sapiens
ggtgaatgccaatccccacactgccctgggactagtgcaggaggtggggaagacagggctccagctaccacaggacgggctctgggtat

SEQ ID NO: 332074 - DNA, 80 bp, Homo sapiens
acagaggaaggacagtggagtctggcatcttattggaactgtggctgcaccatctgtcttcatcttcccgccatctgatg

SEQ ID NO: 332075 - DNA, 50 bp, Homo sapiens
cttttggcagagctcccactagcctgaattattggaacaactttggaaag

SEQ ID NO: 332076 - DNA, 82 bp, Homo sapiens
gtatttgactgagagaaacccactgaagacgtctgcgtgagaatagagaccaccgaggaccaagaatcgccttcagccctgt

SEQ ID NO: 332077 - DNA, 87 bp, Homo sapiens
cgctttgttggtggactactctcagcctactatctgtctggagaagaggggatagtggtcctagaagaatgtcagcttccaaaagat

SEQ ID NO: 332078 - DNA, 101 bp, Homo sapiens
atcctcggcggcggtggccgctagctccaaggaagcatgaccgacggagcccagcaagccttgaggagaaccatggaaatctactctaaaaccactcgctt

SEQ ID NO: 332079 - DNA, 100 bp, Homo sapiens
tttgccaccatcgtcaagaccatcatcactttcattgtctcggacgtgcggggcctgggcctcccggtccgcaagcaggaactgtggctgcaccatctgt

SEQ ID NO: 332080 - DNA, 100 bp, Homo sapiens
tgcactagccattgaagtatttgaagcacatttgggaagccacattttgcagaatgtgacagtgatgataacatgggtgccaaaaatacttcaataggag

SEQ ID NO: 332081 - DNA, 95 bp, Homo sapiens
ggcgaggtgcacattggaggcgtgatgcttaagctggtggagaaactcgacaccaacgtgattcggtatatccagctgacggagatgaaactcag

SEQ ID NO: 332082 - DNA, 100 bp, Homo sapiens
cttttgtttgtcagcagccaaggtgtttccaggaagttcagagagaacaggtatttaccttgctgtggattgctgactggatggtccatcacttctggag

SEQ ID NO: 332083 - DNA, 100 bp, Homo sapiens
agatcaatagattgcctacccccattgcaggactgcatttgaagacacttcgtcacccttgcttgctaagatttttatcttgtactgtggaagcggatgg

SEQ ID NO: 332084 - DNA, 80 bp, Homo sapiens
agactgttccttcattttcctgtatattctctgtactatgtcgattcgacaggtcgtcgtcccgcagacacacaatccag

SEQ ID NO: 332085 - DNA, 100 bp, Homo sapiens
gggcctggcggtgttttcgtcgtgctcagcggtgggaggaggcggaagaaaccagagcctgggagattcgggaactggagcctctcctctgtcacagtga

SEQ ID NO: 332086 - DNA, 90 bp, Homo sapiens
cctccgcagagggccctgctggcacgaggcactaagaggccccaccgtcttatgagcagagctgcggcggcgtggaacccagcctgaccc

SEQ ID NO: 332087 - DNA, 74 bp, Homo sapiens
agaggtgatgatagctttggagacagagagaagatgactgaggaggaggtggagaccgttctggcaggacacga

SEQ ID NO: 332088 - DNA, 83 bp, Homo sapiens
gaaaaggtattcattaaagaaaataatgggaaggaagaagtatccaagctctattatcaagtcctaaattttggaatgattgt

SEQ ID NO: 332089 - DNA, 100 bp, Homo sapiens
ggattcgttacagccagagattggtatcactggacaggccatggctccacggtcccggcgacgaaggcacaagaaacctccctcatcagtggctcccatc

SEQ ID NO: 332090 - DNA, 100 bp, Homo sapiens
ggctggtcggaacccttccctcattactttgatgcctgtgggtttgatgaatatgaatctgagactggggaccaggccataacggtgggggctccagtga

SEQ ID NO: 332091 - DNA, 98 bp, Homo sapiens
caggcccactccaccatcgtcagcgagatttcctttgacctcgctgagtacactgcggacgttgacggagttggcactctacgacttctagatgcagt

SEQ ID NO: 332092 - DNA, 118 bp, Homo sapiens
tactgctcactaccatacctcagatagggtccacagaatggtcagaaaccctccataacctgaaggttcttgggtgtctctggggagtccctgggccagaccttcctccagactccag

SEQ ID NO: 332093 - DNA, 74 bp, Homo sapiens
aaacattatcactctaaaggatgcccgagtgactaagggatgtaccattgttaagcctttcaacctgtcccaag

SEQ ID NO: 332094 - DNA, 105 bp, Homo sapiens
atgtgaagctcaccgagacggcgatccgggcgctcgagacttaccagagccacaaggtgagaagccctaccactgcaactgggacggctgcggctggaagtttgc

SEQ ID NO: 332095 - DNA, 102 bp, Homo sapiens
ggactgaccaaggcaatatactgttacgatccagttgaagattactggatgcacgtacagaatacattcagccgtcagaccaagaggatgctggtggaaaag

SEQ ID NO: 332096 - DNA, 96 bp, Homo sapiens
acctcatggctgtgaacaactgcgggactatggtgcagccctgcggggcctgtgcgaagacgccctggaaggcctgctcttcctgctactcttctc

SEQ ID NO: 332097 - DNA, 90 bp, Homo sapiens
gctctggtccttgctgcactttattatgccggagaacacctcaggcaagtaggagtggctggaaagtttgttgagttttttggaagtgga

SEQ ID NO: 332098 - DNA, 100 bp, Homo sapiens
gcagcatctcccctttccctgagctggaacagtttctacaggacactatcaagagcgaggtgcagaaggcggtgaacacggcccgcgggctgtaccagcg

SEQ ID NO: 332099 - DNA, 74 bp, Homo sapiens
gcagcgccctcagcagctccctgcgggacctctcggaagccggtttggtgcacctcgatttggaggaagtaggg

SEQ ID NO: 332100 - DNA, 97 bp, Homo sapiens
gtagacccgtctgcagccctggatctattaaagggagcattccgatcatctgaggaacagcaggatatgctgcaggctgctagtcattatcgccaaa

SEQ ID NO: 332101 - DNA, 100 bp, Homo sapiens
tatctaaacagagagaagagattgacacactaaagatgtccagtaagagtgatcagcagctggactgtgccttggacctaatgaggcgcctgcctcccca

SEQ ID NO: 332102 - DNA, 82 bp, Homo sapiens
tagatctttctgacaacaaactcgaagactggcatgagagctggagtggaccagagaaattgcttgctttagatgaactcat

SEQ ID NO: 332103 - DNA, 75 bp, Homo sapiens
caaggagtggactagggtcgccggggaagcggttaataaaggtatccatggagaacactgaaaactcagtggatt

SEQ ID NO: 332104 - DNA, 101 bp, Homo sapiens
gtgctgctgttcctacaacattggccgggcgtggaacaagccctgtgaacagtgtcccatcccaagtacagcggggatctgatgagcttctttcttctggc

SEQ ID NO: 332105 - DNA, 100 bp, Homo sapiens
ggaatgtaagagcagtaatccagagcaggtgttctcctacatagccactctgctctacgtggtccatgcggtgttctctttaatcagatggaagtcttca

SEQ ID NO: 332106 - DNA, 75 bp, Homo sapiens
tgacgggtctggagtgcgtgggggaccggctgttggcgggctcacctgttactcggcctcccagaaagatggata

SEQ ID NO: 332107 - DNA, 101 bp, Homo sapiens
gggccagaagccacgatccagaccgcaattaacaatggtacaggtgctggagaatctggtaaaagcaccattgtgaagcagatgaggatcctgcatgttaa

SEQ ID NO: 332108 - DNA, 75 bp, Homo sapiens
agcaccttgatcttgaacttctcagcctccagaacgattcacagttaatagaaggatctctatagttggatttgg

SEQ ID NO: 332109 - DNA, 74 bp, Homo sapiens
acgcaggcactgcctgctctgaaaagatttcaaataccgtgtgccaggtgattgggatgtacgactacaccgcg

SEQ ID NO: 332110 - DNA, 112 bp, Homo sapiens
gcaagcctgtccatcatggtgttaaccagctaaagtttgctcgaagccttcagtccgttgcagaggaggtgtgattgcctatatcagttcttccagctcagcctcaagccct

SEQ ID NO: 332111 - DNA, 87 bp, Homo sapiens
aaaaaagtctcaccatgcaaactcccccacagcagccaaaccaaacaggaagcttacttttctctacctagccaatgatgtcataca

SEQ ID NO: 332112 - DNA, 100 bp, Homo sapiens
tactttcccatcaggtttcctgatgtgagcagattttaccaaatgttgcaagaactctggagttcttatggtagtaaaatgccggaaagaaaattctgca

SEQ ID NO: 332113 - DNA, 50 bp, Homo sapiens
ctcccaaagtactgggattacaggtggatattccatctattataaccaag

SEQ ID NO: 332114 - DNA, 49 bp, Homo sapiens
cagcgctgctggcgggcgttaggcccctctgaaatcaaagagatcttgc

SEQ ID NO: 332115 - DNA, 100 bp, Homo sapiens
tggcgcggctcgcggactacttcgtgctggtggcgttcgggccgcacccgcgcgaggtggggctggtgtccgagcacttctcgcaggccccgcagaggct

SEQ ID NO: 332116 - DNA, 82 bp, Homo sapiens
gtttactataaactggcaagaggatggcctgaagtttgggctggaagtggtgtagctgatggtgctggagctgttatcatag

SEQ ID NO: 332117 - DNA, 90 bp, Homo sapiens
agaaaccacaggcgaatccataactctgataagccgtacagcatggaggaatctatgtaaagcgcagtgccaaatttaacgagaaagaga

SEQ ID NO: 332118 - DNA, 83 bp, Homo sapiens
gtttggccaaagaagcccccatactcccggtgaaaaaggaagctgaatatggtgggcatgatcagatagatttgtatgacgat

SEQ ID NO: 332119 - DNA, 75 bp, Homo sapiens
cagaggtgtcacaggcaacagaacttcatgtcctggatgtggcagggaacagatggacagcacagaattacagcc

SEQ ID NO: 332120 - DNA, 96 bp, Homo sapiens
tgaatggttgcgatttcttgataaagtcttggttgctgccaacaaggtgagtgctccagttgtaacatctaccactcaggaaaagccgaaggatag

SEQ ID NO: 332121 - DNA, 100 bp, Homo sapiens
tccaatgggcctttccagcccgtggtccttctccatattcgaggcacagctgctttggaagaagatgctcagattctgaaagtcattgaagcttactgca

SEQ ID NO: 332122 - DNA, 80 bp, Homo sapiens
agagaacccagaagcctacaatgaagaactgaagaagctggagttgctcagacaggtgccttcgacagatgggagatgat

SEQ ID NO: 332123 - DNA, 116 bp, Homo sapiens
cggcggccgccatggcgtccaacatggaccgggagatgatcctggcggattttcaggtgaacatgattaaagatgatgggacagttattcatttcaacaatcccaaagtccaagct

SEQ ID NO: 332124 - DNA, 100 bp, Homo sapiens
cagaccttggggaccaagaaaagcagcaatactgaaacaagaatggcccaaacattggccaacttttatcagtgatattgttggagcaagtaggaccagc

SEQ ID NO: 332125 - DNA, 99 bp, Homo sapiens
actttattatgcaggtggtctgtgaagccacacagtgtccagatacgagggtatggcctcacaagtcttggtctacccaccatatgtttatcaaactca

SEQ ID NO: 332126 - DNA, 97 bp, Homo sapiens
ctgggtgaagtgctccgccgcccttgcctccagctgccgggccgcaagtacagccctgggtacaacaccgaggtgggagacaagtggatctggctga

SEQ ID NO: 332127 - DNA, 92 bp, Homo sapiens
cacggatgccccccggagccgcgggctggcaggaaatctggcattttttaaagtttgcgccccacaaagaggaaatattccaaaggtactca

SEQ ID NO: 332128 - DNA, 96 bp, Homo sapiens
gccgcgccgcgctccaaccgcctcctcctcctcagtaacgcggactgttggcaacacttacggtaatttttcgttagcaaccatgtttcccaggag

SEQ ID NO: 332129 - DNA, 85 bp, Homo sapiens
gtggggacccagcaggtggctgagattggggaccacaaattcagtgcccaccggattgtcttagcagcctcgatcccgtatttcc

SEQ ID NO: 332130 - DNA, 100 bp, Homo sapiens
aaaaaatcccactttggaggaccagattatgaacatttacgaggtttcttctcagactccacatcattcaatattttgatggatatgttatttatcaaag

SEQ ID NO: 332131 - DNA, 100 bp, Homo sapiens
catggagacctcagcactcaagcagcaggagcagcccgcggcgaccaagatcaggaacctgccctggatttttgccgtcctctcggccatcctgtacctg

SEQ ID NO: 332132 - DNA, 75 bp, Homo sapiens
gaagataaacgaggggctggaacacctcgccaaagcagagaaatagtgtcttggctgggcatgacaaccgcgtca

SEQ ID NO: 332133 - DNA, 75 bp, Homo sapiens
gacagaactggttcagcggagaataacatatcttcaggatcataaaaggattcctctgtactagcacactcccct

SEQ ID NO: 332134 - DNA, 100 bp, Homo sapiens
gaaaaacctacccagcaaagaagcatagcttttagctctaatgtgtcagttgtacccgaggcgttctcagcagcagcaagtacctgtggtggatttccag

SEQ ID NO: 332135 - DNA, 100 bp, Homo sapiens
tttgtgtcctgagatcaaatggcacttcattggccacctacagaaacaaaatgtcaacaaattgatgggatcagactctgtgattttactgaaagtgaaa

SEQ ID NO: 332136 - DNA, 89 bp, Homo sapiens
gggtgtggacgccactacagttcatcaacatcaactacgtccctctgaaggcatccgtgggctctgagaagctctttgcgccgggaacc

SEQ ID NO: 332137 - DNA, 85 bp, Homo sapiens
tgattttgatgcttgcgaagagttgattgaaaaggctgtaaatggtcaatgtgacggtggactacattagaccagccagcccagc

SEQ ID NO: 332138 - DNA, 75 bp, Homo sapiens
aattttcgtatacgtggattctagaggggtgacagcgaaacgtggagcggctgatcaaggagttctccatctaca

SEQ ID NO: 332139 - DNA, 101 bp, Homo sapiens
ataaaaaagaagtagactatgaagcaggggatattccaacagaatgggaagcggcaacctttggcactgcatccatgagcatgcccacaggattcggcact

SEQ ID NO: 332140 - DNA, 100 bp, Homo sapiens
gtaaggagaatatttccctcgggaaactccgttagtattttggaattaagttacagcagatgaatggaacagcaaccatacgatagaaatagagataaat

SEQ ID NO: 332141 - DNA, 71 bp, Homo sapiens
aagaagctgcagcggaggaaggcgagaaaaagcttgtggtgaaggggggcaaaaaaaagaagcaagttctg

SEQ ID NO: 332142 - DNA, 100 bp, Homo sapiens
ggctgctgcaggccgagtacaccgagggtttgcctatctggggcgcctggctcacgaggttggctggaagtaccaggcagtgacagccaccctggaggag

SEQ ID NO: 332143 - DNA, 48 bp, Homo sapiens
tgtgctatcagcattctgggaaagatgtgaactatgaagactttactt

SEQ ID NO: 332144 - DNA, 82 bp, Homo sapiens
cgggctgaagcgactgagtccgcgatggagaaggccaatgatgaggccaatcagagtgatacaagtgtctccttgtcagaac

SEQ ID NO: 332145 - DNA, 99 bp, Homo sapiens
gtaagaccagtagcactaattccaagtctgaaggggcgtctcgattacctgagctctctgaaggtgaagggccttgtgctgggtccaattcacaagaac

SEQ ID NO: 332146 - DNA, 95 bp, Homo sapiens
gagaacgagtccctcttcactttcctcggcaagaaatgtgtgtcggccgtatactaacaaggtaattactttatggtaccgtccacctgaactgc

SEQ ID NO: 332147 - DNA, 100 bp, Homo sapiens
cctcactcccgtttccgagccataaaaggtctaggaccgcttcccccgagccagcaggatccctgctgccttggtgatcccgggctgacagccagagagc

SEQ ID NO: 332148 - DNA, 83 bp, Homo sapiens
ttttgcctccggttggggctgctgtttctcttcgccgacgcggctgtacagcatggacctgcggagctcccacaaggccaagg

SEQ ID NO: 332149 - DNA, 75 bp, Homo sapiens
gcatcgtcggcctcaacatgaatggctactttcacgcagcctggcatcctcgctacaacctcattgttgtgggcc

SEQ ID NO: 332150 - DNA, 100 bp, Homo sapiens
tcacattgctgttcatgagtggaatccatgtttctggacgcggatttttggcctcatactctgttatagataaacaaggaggatacttcatcgagactta

SEQ ID NO: 332151 - DNA, 101 bp, Homo sapiens
agcacgtgtacctcatccacagggcctcctgccagccccagcccctggagaggatgcagggcaagtgtccagagaatggctgggatgaaagtacacttgaa

SEQ ID NO: 332152 - DNA, 50 bp, Homo sapiens
caccgcaggctgtaggggcagcagcgcagaacatccagtcatggataaaa

SEQ ID NO: 332153 - DNA, 111 bp, Homo sapiens
gaagaaggcatatgttcgactggctcctgattacgatgctttggatgttgccaacaaaatcaaagaatcccgagttaggatctggatgaaggataagcccctgaattgtcg

SEQ ID NO: 332154 - DNA, 83 bp, Homo sapiens
gtgagtgcttggcaactgatgttccacttgacacactgaacgaatgcaggaatttgggaactgagctgtgcaagtgctgaaga

SEQ ID NO: 332155 - DNA, 137 bp, Homo sapiens
tttgtctgcaactggttcttctgtgggaagaggttcacacggagtgacgagctccaacggcatgctcgcacccacacagagatggaaaaccctctgctcgcatgttgctgctgaagggcttcgggaaagatggcttc

SEQ ID NO: 332156 - DNA, 100 bp, Homo sapiens
gttctttctgaaaaagtacacatcgtgccttctctacttcgctcttggaacataatttctcatggcagttggttgaatctggcgatgtggaacccatgga

SEQ ID NO: 332157 - DNA, 100 bp, Homo sapiens
gctcgtgcaattgttgccattgaaaaccctgctgatgtcagtgttatatcctccaggaatactggccagcttaattggcttagtgtcgacttcaataatt

SEQ ID NO: 332158 - DNA, 101 bp, Homo sapiens
aagcaaaaaagggactgctaagaagataccaccaggaattgtcttagaagaaagaaggcaagccaccattttacccacgtaaatatatgaatatatttctg

SEQ ID NO: 332159 - DNA, 74 bp, Homo sapiens
ggagatctggaagatcaagaagctcattaagagcttggaggcggcccgcggggcttccgctgggactaggatca

SEQ ID NO: 332160 - DNA, 90 bp, Homo sapiens
ctccagtgtaatgattattgacaacaggaaagaccacagcaagattctttcattcgtctcctcctagcctgggggaccaggctcgaactg

SEQ ID NO: 332161 - DNA, 98 bp, Homo sapiens
cgggaaactgtctctatggatctaggtctcggtccagctcgacttccagctcaggctccagcaccagcactggctcaagcagtggctccagctcttcc

SEQ ID NO: 332162 - DNA, 97 bp, Homo sapiens
tgcgcccgggccgcggatccccaagcccgccacgccgcccagcccggccccgcccgcgccggaagagccacgccggaaagaaagaaatctcgttttg

SEQ ID NO: 332163 - DNA, 100 bp, Homo sapiens
cctccgggggtaaaagagatcaccgacaagatcaccacggacgagatgatcaaacgcctgaagatgaagaagatgactttatgtgtaagaaggcggcctc

SEQ ID NO: 332164 - DNA, 90 bp, Homo sapiens
tcgaggggtgggagagccccgaaaaggagttgggcagagcggcttgggtaaatccaccttaatcaacaccctcttcaaatccaaaatcag

SEQ ID NO: 332165 - DNA, 116 bp, Homo sapiens
tcttatatagcaaaagatttgatgaaagtacttcagggagtcaacggtgaggttcaaaccttgtactactcagctgatcacaagctgcttgatgggaacctactagatggacaggc

SEQ ID NO: 332166 - DNA, 90 bp, Homo sapiens
agccaggaggagagcccacaggtgctaaagagagcagtaccctgatggagtcccttgcagagcccccctccatgcgcctgaaggcccgac

SEQ ID NO: 332167 - DNA, 100 bp, Homo sapiens
cagtccagaccctgctgctgtcttcaaagaagcgtgacgacagcatgtacgatccctgaatgggcccgtgggcatatttagtcattcatttttgatcagg

SEQ ID NO: 332168 - DNA, 98 bp, Homo sapiens
ccctcccttaggtgcgccccccgccaggtgtcgtgaaaactacccctaaaagccaaaatgggaaaggaaaagactcatatcaacattgtcgtcattgg

SEQ ID NO: 332169 - DNA, 82 bp, Homo sapiens
agcaaccagcaccagatgaaggagcattcctcttggtccagttacaacacagggatcacaacaaacacaaccgccacagaag

SEQ ID NO: 332170 - DNA, 90 bp, Homo sapiens
gttggaacttcgttgcttgcttgcctgtgcgcgcgtgcgcggacatggcctcaaacgcttcggaaccaaaaagaagcttcccagagccgg

SEQ ID NO: 332171 - DNA, 100 bp, Homo sapiens
atccaacagtgcatgagccagccaggtggaggcggcccgcaaggccatccgcgccgctcaggtggagcgctatgtgcccgaacacgagcgatgctgctgg

SEQ ID NO: 332172 - DNA, 100 bp, Homo sapiens
cgccacttccgcgagcccatccgtctcaagactgtgaaaccagcacccgacagctacaaagtgcaagataagaaaaatgcctccagccgccctgcctctg

SEQ ID NO: 332173 - DNA, 83 bp, Homo sapiens
ctgagggccttcgagagctaccgcgccagacagctctggcaggctgccctgagcacgctcaaccccaaccccacggacagctg

SEQ ID NO: 332174 - DNA, 74 bp, Homo sapiens
aagctcagggcttccactgattctacattatggatcaactcactatcctgaaggtccattctcccaagaagagg

SEQ ID NO: 332175 - DNA, 74 bp, Homo sapiens
gttttccccacatatatgtaaaagaaatttgcaagactactggtatgaatctgatgaacaagaaaagagtgcct

SEQ ID NO: 332176 - DNA, 96 bp, Homo sapiens
ggaagagattcagccagcacactcctcgcgagcaaggtgagaagccctaccactgcaactgggacggctgcggctggaagtttgcgcgctcagacg

SEQ ID NO: 332177 - DNA, 50 bp, Homo sapiens
ggctccccatactagtcgccgtgcctggctctctggctatgaaaatcctg

SEQ ID NO: 332178 - DNA, 90 bp, Homo sapiens
ccacaatttagcatcaggcaaaggaagcaccgcacatttttcaggacagtcattttgtttactcattcagccctgttgcaggtcccaata

SEQ ID NO: 332179 - DNA, 90 bp, Homo sapiens
tcttcagataatcagagtggaggaagtacagccagcactgtcggaaaaggtaacagaagatggaactcgaaatcccaatgaaaaacctac

SEQ ID NO: 332180 - DNA, 82 bp, Homo sapiens
gctcaagttgctactcgggacgctgcacctcccgcgccgcacggtggacgagacgggaggcgtgggcagcttcgacatcgcc

SEQ ID NO: 332181 - DNA, 98 bp, Homo sapiens
ttggccctgtgatccctcaagactggtccacggagtgtatgaccacaaacagccatcaagccaagagtcgaagctaaaccagaagttcaatctcagcc

SEQ ID NO: 332182 - DNA, 98 bp, Homo sapiens
tgtttccattgagattgcttatcagaagtcaacatccgtggagacatttgggcttgttgttcttcggaactttgctaccaggacttgctggcccctct

SEQ ID NO: 332183 - DNA, 75 bp, Homo sapiens
gtaccgaggagggggtcggcgggagaggagatagggagagcctggggatgtacaggagatgcctgctccagaatc

SEQ ID NO: 332184 - DNA, 75 bp, Homo sapiens
cggctctgcgggcgccgccaggcccagaccaagatggttacaaatgaaggacttggtcttacaactacagcttct

SEQ ID NO: 332185 - DNA, 51 bp, Homo sapiens
tcagctttaaagagaattgaagcacttttccagccattaactccaggctct

SEQ ID NO: 332186 - DNA, 75 bp, Homo sapiens
gagtccgcggctggccgcgtgagtagacaatgcagatcttcgtgaagactctgactggtaagaccatcaccctcg

SEQ ID NO: 332187 - DNA, 76 bp, Homo sapiens
agctatacactcattatctgatacttgtaatcagctctacaagtttcacgctgtttaagtcatgaacctacaaaag

SEQ ID NO: 332188 - DNA, 82 bp, Homo sapiens
aaatatctttggcttgcagccaacaatgggatgacattgtccccgagctaccgcatggacgatgggaaaatggtgaaagtgc

SEQ ID NO: 332189 - DNA, 75 bp, Homo sapiens
cgcgcggcttcctccagacctctcggcgcgggccgagaaatccgtctgcccctccgaatcaaaggggaaggcatg

SEQ ID NO: 332190 - DNA, 100 bp, Homo sapiens
cagggacgagcactgggtgaaggacctgggcagcctcaatgggctgcctgctcaactaccgcgtggacttcaccttctacccacgccgtacgccgctgca

SEQ ID NO: 332191 - DNA, 100 bp, Homo sapiens
gcagctccgcggcggcgtctgcccagggcagggctcctaaggaaggacccgcctttagttggttaccacagagaagcgcttcctcaaagacagtttgtac

SEQ ID NO: 332192 - DNA, 100 bp, Homo sapiens
ggcgtcttctacctgacgctcgtcctcatcctggtcactagcggactcttcttcgccttcgagttggcagtggcaatgacccctggtcagcctggagtgc

SEQ ID NO: 332193 - DNA, 88 bp, Homo sapiens
ccaggttctccttcgaggaacagagaaaatgaaaccagcagacagaatttgtcagcttgcgcgatctctggcctcttcaactgcatca

SEQ ID NO: 332194 - DNA, 83 bp, Homo sapiens
cgagcccagcgtcaacttcctcaagtcgcccaaagatgatgtctaccgtagaaaagcctcagaaagacagtatcagagaaggc

SEQ ID NO: 332195 - DNA, 100 bp, Homo sapiens
cagaactcgcctgtgacccaggatggcatccaggagagcccatggcaggaccggcacggcgaaaccttcaccttcagggtgtgggccgaagatatgctca

SEQ ID NO: 332196 - DNA, 96 bp, Homo sapiens
gccagataccattgatgaaggaaatgctaaagcgattccaaggtaaacttatgagtgctttgctgagtggcctgacagatcggaacagtgtgattc

SEQ ID NO: 332197 - DNA, 82 bp, Homo sapiens
tcgtctcctgtgtggcgatggtcttcctgctggggctcatgtttgagaaccgggctgtgggtcggcccaaggggaagctggg

SEQ ID NO: 332198 - DNA, 75 bp, Homo sapiens
gaggcccatggggcccgtacattatgaagacattcgggaaaatggaatctatggatttcctgaaatatgttgttg

SEQ ID NO: 332199 - DNA, 133 bp, Homo sapiens
gagaacatccatttgtcttgcaaagtgttggaggacagacattaacagtatttactgagagctcatcaggttggtgacatcgtgaaagtcacaaggatgaatataaatggccagtgggaaggcgaagtgaacg

SEQ ID NO: 332200 - DNA, 82 bp, Homo sapiens
ccaagagcagcggaaaatgatccagtcacaggcttgggcactgtttaaaggaaagttccgagaaggcatcgacaagccggac

SEQ ID NO: 332201 - DNA, 90 bp, Homo sapiens
ctgaagcaaagaggaaagcagacccatggctcagattcagcagataattgaaggaaagctcttcccaatgaaagctttaggttattttgc

SEQ ID NO: 332202 - DNA, 83 bp, Homo sapiens
agaagcccaccaactgctaacaaccagctggaggggagtgatgatgaatacagtgatgatgatgacatgagttggaaagtgag

SEQ ID NO: 332203 - DNA, 100 bp, Homo sapiens
tcacgggcggcggcggggccgagcgcggccctgcaggcgatgtcgccgaaaccgggctgcaggcggacaatgcagatcttcgtgaagactctgactggta

SEQ ID NO: 332204 - DNA, 75 bp, Homo sapiens
gatcttgaaggaagccattgaaaaccatcagaacatgattaagcagtttaaaggatggccgtataagaaaataaa

SEQ ID NO: 332205 - DNA, 100 bp, Homo sapiens
aggttttaaatcaagatttaacattccaacacataaaaattatttatccaacagctcctcccaggggtgctacatccattgtgtacagatgcaaacagaa

SEQ ID NO: 332206 - DNA, 90 bp, Homo sapiens
ctttatggagaccctgaaagacatcgtggagtattacaacgacagtaacggagtgtgggctgctgctctcctctgagggcgagtgtcagg

SEQ ID NO: 332207 - DNA, 101 bp, Homo sapiens
aaatacgggacagaattgaatcagggagatatgaagcctccaagctatgattctgatttcttcgcaagactatggaaaggaagtggacctctacgctttgg

SEQ ID NO: 332208 - DNA, 75 bp, Homo sapiens
ttctttgtacagaaattgaaaggcttcaaagctagcagaacttcagtgaagatttcatacattggcctcatgacc

SEQ ID NO: 332209 - DNA, 100 bp, Homo sapiens
agaccagaaagagtgtctcatcttcttcaagataacttgccaaaatatcatgatgctgcgattaatagatatagccgtttatcaaaaaaaagagaaaatg

SEQ ID NO: 332210 - DNA, 74 bp, Homo sapiens
tctgtggggctggttctctccaggacatctaccaagatccggacgctgcggctgaagatcttggcagacgcagc

SEQ ID NO: 332211 - DNA, 100 bp, Homo sapiens
ggctcaccgcagtctcgactttcctgggctcagcaacttcgcggtgtggtgaactctctgaggaaaaacgtaagttcgagccctgattcctccgcttccc

SEQ ID NO: 332212 - DNA, 100 bp, Homo sapiens
caagaacagaatgaagaaagtcagggggactgcaaaggccaatgttggtgctggcaaaaaggactttgccattgatattattaaaagcactcatgaccat

SEQ ID NO: 332213 - DNA, 75 bp, Homo sapiens
ttctctggagccccagattcaacccgtgtacgtgcctgtgcctaaagtccataacttagtggcaattgaactggc

SEQ ID NO: 332214 - DNA, 50 bp, Homo sapiens
gtgaaatcaaggcctgaagatcagcggttctctcaagtagtgctgccagt

SEQ ID NO: 332215 - DNA, 96 bp, Homo sapiens
gtcagcgggggtcagcagcagcggctccgagggcgcggcggacgcagggagcctgccccgctggaggctgcctggtggccctgacctgtgactacc

SEQ ID NO: 332216 - DNA, 75 bp, Homo sapiens
ccaaattcgacacgagacgcttctcggcagacgcagctcgattccagcaggcctgatgccgatgcagcaacaagg

SEQ ID NO: 332217 - DNA, 116 bp, Homo sapiens
agaccgcgcgcagggcctgcagcgggagctggacggcgagcgcgagcggcgcgagaaatccagaatgacagggtccagaaactggcgagccacgagggacatgtgtaggtatcggc

SEQ ID NO: 332218 - DNA, 100 bp, Homo sapiens
aaggaggtggacaccatcacggcagctcttttgaaacagatggtcaccatgtttagatattagcagtcccgtatgtgcatgtctgcatttgaaaatggaa

SEQ ID NO: 332219 - DNA, 100 bp, Homo sapiens
gccgcggactgtcctttcgtggctcactccctttcctctgctgccgctcggtcacgcttggttcgaagtcaacaataccattcttcacccagagatcgtt

SEQ ID NO: 332220 - DNA, 75 bp, Homo sapiens
ctgaggcctccccaaccatgtgcaattcatcaagatggtgctcatgtggaccagtggtgacgccttcaagacggc

SEQ ID NO: 332221 - DNA, 126 bp, Homo sapiens
ccactctgggccagtgcggggtggaggccctgactaccctggaagtagcaggccgcatgcttggagcctgaagcaggacattctaaatgaaaagactgaattggaagcaacacttaaggaagcgga

SEQ ID NO: 332222 - DNA, 98 bp, Homo sapiens
cgatgctggcgctgagtacgtcgtggagtccactggcgtcttcaccaccatggagaaggctgcgtcatcaccatctcgggacgcatgaccttcacgag

SEQ ID NO: 332223 - DNA, 51 bp, Homo sapiens
ccgacctacagctccaggaccggtatttggtgttggagttccaaatccata

SEQ ID NO: 332224 - DNA, 97 bp, Homo sapiens
attttcttatggagaactgtccttgttgtagcctttccagtaaatatatgactcagggaaaagcctcagcgaagaggacccagcaggaatcatgagg

SEQ ID NO: 332225 - DNA, 100 bp, Homo sapiens
cgcgaccccggccccggcctcggccgtggcgagcggacttggaatccagttgtgtgaccaaaaagttatctccagaaaaggaaatttatgaaatggaatc

SEQ ID NO: 332226 - DNA, 82 bp, Homo sapiens
aaacggcgaggaagctgtggctctggttgaggatgtacagagagctcctggacaacagctgtttttggaaggaagaaagatg

SEQ ID NO: 332227 - DNA, 75 bp, Homo sapiens
ccttcatggcccctttatagctgggctgaaatctctttaatgatggagggaagcaggcagacgcgagtgtctcgg

SEQ ID NO: 332228 - DNA, 75 bp, Homo sapiens
aagatgcagagcccatttcagaacctgagaaagtagagactggacgactgggtttggattcagaagaggattatt

SEQ ID NO: 332229 - DNA, 100 bp, Homo sapiens
atgtcgggttattcgagtgaccgagaccgcggccgggaccgaggactgtgccctgtccacggtgcctcctgcatgtcctgctgccctgagctgtcccgag

SEQ ID NO: 332230 - DNA, 90 bp, Homo sapiens
aagcggcaggagccgccgccgacacctgaagaacctgctaaggctgcctcagacctgactgcctggttcagcctcttcgctgacctcgac

SEQ ID NO: 332231 - DNA, 75 bp, Homo sapiens
tctccattgacctctacgagctggaggaggagtattactcgtccagggtcaacagttgtcaccgacagatggctg

SEQ ID NO: 332232 - DNA, 100 bp, Homo sapiens
caatcattgggtgattaatccccagaataatttgggcttacagctctgtgcagaaacaggggatgaaggaagaatcctgctcaaaaatgaggtgaattaa

SEQ ID NO: 332233 - DNA, 83 bp, Homo sapiens
gtgatatttctcttttgtctgcccctattgtaagtgcagatggaacacaacagactcagattgatggacaacttttcttaatt

SEQ ID NO: 332234 - DNA, 80 bp, Homo sapiens
gaacatgtggaaggtgcgcgagctggtggacaaagctatcgcgcttactatggagcatttaaggatgtcaaggagaaaaa

SEQ ID NO: 332235 - DNA, 82 bp, Homo sapiens
agctgtgctcgcgctactctctctttctggcctggaggctatccagcgtggtgcgcgtgggcagggcgcggggacatggggc

SEQ ID NO: 332236 - DNA, 50 bp, Homo sapiens
aaatccatagatggaaaagatgaaacctctgtagaggagcaggatgcaac

SEQ ID NO: 332237 - DNA, 75 bp, Homo sapiens
gaattcagaagaaacaaaagtgccaccgaagaggtgagaacaaaatcatggtatcttctcttaatggatctccaa

SEQ ID NO: 332238 - DNA, 80 bp, Homo sapiens
agcagccgcgggcgcccgaggggccgagcgaggtgctggagaatctggtaaaagcaccattgtgaagcagatgaggatcc

SEQ ID NO: 332239 - DNA, 90 bp, Homo sapiens
tggaggagctggagtgcggggcgcccggcgccaggggagccgccacagtactaaggctcgtacgtctgcatcgattatcttacgtggggc

SEQ ID NO: 332240 - DNA, 82 bp, Homo sapiens
gactctgatgaagaagcttctccagaaaaaactacactgtctactgccaaggtccaggttatgggatcagccaatcaagtcg

SEQ ID NO: 332241 - DNA, 74 bp, Homo sapiens
cgcacagtatagtgaagataaagccaggcaaggggagagaagccttataaatgcacctgggatggctgctcctg

SEQ ID NO: 332242 - DNA, 80 bp, Homo sapiens
gaaggcatttccagcccgcccacccagacctgcctagagctggaacgttacctccagagcgagccctgctatgtttcagc

SEQ ID NO: 332243 - DNA, 100 bp, Homo sapiens
agcgagctgagtggttgtgtggtcgcgtctcggaaaccggtagcgcttgcagcatgttccagggtctccctccactgctgtagtaacccgggtccggggc

SEQ ID NO: 332244 - DNA, 75 bp, Homo sapiens
aaatagttcctcttgataaataaacaattaacaaatactttggacagacgcgtgaccaaaaccaaagacggccat

SEQ ID NO: 332245 - DNA, 100 bp, Homo sapiens
tgggctccaacccacaggactcaaggcacagggaagcagtgcccgacatctgcacaggtgtcatggagaaactccagctgggcccagagattctgcagcg

SEQ ID NO: 332246 - DNA, 95 bp, Homo sapiens
gtgggcatcaacctcttcctctacccgtggaagaaggaattcagaagcatcaagaaactggcgatggaatatgagaggagccctctggaaagaaa

SEQ ID NO: 332247 - DNA, 75 bp, Homo sapiens
cccacctgagaaccatgctcaccgaccctacggttgatgatgaagcgccggccgtgtaaatgaagatcgggtgag

SEQ ID NO: 332248 - DNA, 96 bp, Homo sapiens
ggacccgcggccagtgcgggtggctggctttgccattagcgggggcctttcctgaggacggcgtacggagtgtggtgatccgtatgtgaaactttc

SEQ ID NO: 332249 - DNA, 87 bp, Homo sapiens
tggggcgaggtggagtggacgggagcctggagcgacaggctgcaggggacagcgctggaccgtacagacctgcctaacatgccagcg

SEQ ID NO: 332250 - DNA, 100 bp, Homo sapiens
cagacacggaggaggaggaagaggaggagggcgactgtatgatcgtggatgtcccggatgctgcgggcatcctgacatcgaggcccaggagagaggagtc

SEQ ID NO: 332251 - DNA, 100 bp, Homo sapiens
ttccaaggcatctgtgagcccgcggagtatacaccatgagcaaagctcaccctcccgagttgaaaaaatccatccttttacaatccctgctattattcgt

SEQ ID NO: 332252 - DNA, 75 bp, Homo sapiens
cattccttggggcaaaatgtggacaagggatggaaagaagaagtttgacaaagagagtgaaaaatattactctat

SEQ ID NO: 332253 - DNA, 97 bp, Homo sapiens
gacgcaaccggcagcagcgctgccgccgcgtcctcagccaccgctccctcttcccacgctttcccatggtttggcatggacattgggggaactctag

SEQ ID NO: 332254 - DNA, 83 bp, Homo sapiens
gcgtcgtcccgccgcgtccctgaagggaaggaagcgaggttttaaaatcaaagatgggaaaatcggagaaaattgcccttccc

SEQ ID NO: 332255 - DNA, 51 bp, Homo sapiens
ccgaggactccagcacaccgaggaatctgggcccttccgtcctggctggag

SEQ ID NO: 332256 - DNA, 75 bp, Homo sapiens
gtgaacaggaacttaagagtcttaggagtcagttggatgtgacacataaggagatggctgtatgggcgaaaaaga

SEQ ID NO: 332257 - DNA, 75 bp, Homo sapiens
cggccaaggacctggccgacatcgcggccttcttccgatccggtaatactgcattgcatgattgtgcagaatctg

SEQ ID NO: 332258 - DNA, 75 bp, Homo sapiens
ctcgactcggtcctgtttcgacagcgaacatgtcgcggcctgtcagtggtggtgaccgcggtggcttcaaaaatt

SEQ ID NO: 332259 - DNA, 50 bp, Homo sapiens
agctcgcagggaagatgaaagttacgggaattacatgaacgacagccttc

SEQ ID NO: 332260 - DNA, 82 bp, Homo sapiens
aacaaaaatattatggtctttgtgcacatttacatcaagatctgactgcagccatgagcagcaatgagtgcttcaagtgtgg

SEQ ID NO: 332261 - DNA, 82 bp, Homo sapiens
tcaagctttgatcttggctcccacaagagagttggctgtgcagatccagaagacagtactgcaagatgagaggcagagccag

SEQ ID NO: 332262 - DNA, 100 bp, Homo sapiens
ggaaatcaaaccgaaaatgtgtatataggtgcataaggcaaatccaatacgcaagtaccagggtctggagataaagtcaagtgaccagcctctgactgtg

SEQ ID NO: 332263 - DNA, 75 bp, Homo sapiens
aagccaggcagaagcagattcaggaggactgggagctggcggagcggtggagctgatcagaataatgttcagcat

SEQ ID NO: 332264 - DNA, 75 bp, Homo sapiens
acagagcacgtttaaagtactttcaacaaagttttttgtagcatcagatccaacagttaaaacagatcgactgtg

SEQ ID NO: 332265 - DNA, 97 bp, Homo sapiens
aatttgattacaccgtcagtggttgccattgtaggacctcaactctctatgtttgccagtggtttattttacaggtgtcatggagaaactccagctg

SEQ ID NO: 332266 - DNA, 90 bp, Homo sapiens
tacatttcccaacacccgccaccagcagattgtcatatctcagactgatgtgtctatcagaggcacagggacctcaacagcacacgccag

SEQ ID NO: 332267 - DNA, 98 bp, Homo sapiens
cagcaggctccgggctgaagattgcttctcttctctcctccaagtttcgttgattgcaaggagtgtggccggaagatgcatcagatttgcgttctgca

SEQ ID NO: 332268 - DNA, 100 bp, Homo sapiens
atcaaatgtcagccctggagttccatgataccacacgaacacagatttagccaggtggcaatcatgagtgaatggatgaagaaaggccccttagaatggc

SEQ ID NO: 332269 - DNA, 75 bp, Homo sapiens
cggttggggctgctgtttctcttcgccgacgacttaattcagtgcacaaatgagatgaatgtgaacatcccacag

SEQ ID NO: 332270 - DNA, 50 bp, Homo sapiens
gatgtgctctgcgtgttgctgggaaatctggcattttttaaagtttgcgc

SEQ ID NO: 332271 - DNA, 90 bp, Homo sapiens
cacctcgtgaaccactactactgcaagcgccccatctatgagttcaagatcacatggtggaaccaaccggtgagccctctcctaagagac

SEQ ID NO: 332272 - DNA, 75 bp, Homo sapiens
gtccacccaccgccgccgcctcccaggcataatcaccagcaacacccgggacaataatacgggggccacctaccc

SEQ ID NO: 332273 - DNA, 83 bp, Homo sapiens
atgtcctgcacatgcactacacgtgtactaatggtcacttgatgtgcgctggctgttttatccacctactagcagatgcccgg

SEQ ID NO: 332274 - DNA, 100 bp, Homo sapiens
tctaaactcatccttaaaggggtcatactgctgatgctgggctcttgcactgtttggtggaaatggtgagacaggatttgagcaaaattctacttattca

SEQ ID NO: 332275 - DNA, 90 bp, Homo sapiens
gctcgctgggagagaggtacctctccttttccctctccctttccctaagagagttaagaaagacgtggacaagggcacacggcactcaga

SEQ ID NO: 332276 - DNA, 100 bp, Homo sapiens
cttcgattagctaataaccaactgcaattcctacctccaggtcatcaccgagtggtcttctcacatcatccttcaggcagcaccaagagtcactggcagc

SEQ ID NO: 332277 - DNA, 82 bp, Homo sapiens
ctacctgcactttggggagcctaagtcctgaggccacaagaggaagctgaatgaagaggacgccgccagcgagtccagcagg

SEQ ID NO: 332278 - DNA, 75 bp, Homo sapiens
cgagaagcgggctttccaggacaagtactttatgataggcctccggaatgccccccgctgctgggcagtgatcca

SEQ ID NO: 332279 - DNA, 98 bp, Homo sapiens
tcgcgagctgctgatacagaagagatggatattgaaatggacagtggagatgaagcctaagaatatgatcagacggaatcagtccccaatgcctggaa

SEQ ID NO: 332280 - DNA, 90 bp, Homo sapiens
cctgtgaccattctatctgggatgagtgtgggtcagagagccaaactgactatatctccagattatgcctatggtgccactgggcaccca

SEQ ID NO: 332281 - DNA, 100 bp, Homo sapiens
ctagagggaaagcgagagggagacggacgttgagagaacgaggaggaaggagagaaaatggcgtccacgggtaacacaactgaccagaagaaaaacagcc

SEQ ID NO: 332282 - DNA, 87 bp, Homo sapiens
cagatcaagatcaagaccggcgtggtgaagcggagtgctaacaggaatgaatgaaacttctgctgtaatcattgctgcaccacagaa

SEQ ID NO: 332283 - DNA, 90 bp, Homo sapiens
cggcgctccgtgcgcggagccgtctgcctgcatctgctgctgaccctcgtggtatcagcagatgttgcacacaaacttggtataccttgc

SEQ ID NO: 332284 - DNA, 83 bp, Homo sapiens
ctggaggattgtcactccaacctcttttcgctgctccacatccagaggccggagatggtagcatccactgtgtgagccaacgg

SEQ ID NO: 332285 - DNA, 75 bp, Homo sapiens
ggacgacgacgacgaggaagaggaggtttctgaggctgaccggttccctgatgtgttacctgcttctgctactga

SEQ ID NO: 332286 - DNA, 76 bp, Homo sapiens
atttgaagctggcagtctggttccaggccgaagataaccagattggattttaagaagaataaattaaccttggtgg

SEQ ID NO: 332287 - DNA, 83 bp, Homo sapiens
tttggcgttgcacttttccttaacggctctgccatcggaagcgccgcggagccatcaacagcaagcagctcacctacctggag

SEQ ID NO: 332288 - DNA, 101 bp, Homo sapiens
gggacaccccggaagctgggaaatggttctttcaaactgggaaagctcattaaaagaaaaatgagaaaatctattggctggatcctgaacccttggaagct

SEQ ID NO: 332289 - DNA, 74 bp, Homo sapiens
taaaaaggaggtgatgaagcagcaagatgtcatctatgctcgacagaacaattggccccctctaccttcttttt

SEQ ID NO: 332290 - DNA, 100 bp, Homo sapiens
gttcagagttctaggagtggaagaggagggcgctgatggacgagaccatgaaggagttgaaggcctacaaatcggaactggaggaacaactgaccccggt

SEQ ID NO: 332291 - DNA, 82 bp, Homo sapiens
ttcggcagtccacccaccgccgccgcctcccagcgctggccgcgcgccgaacccgagtccggcggcaccgacgacgacctca

SEQ ID NO: 332292 - DNA, 90 bp, Homo sapiens
ctggccgacgccatcaacaccgagttcaagaacacccgcaccaacgagaagatgggtgcatacaagtacatccaggagctatggagaaag

SEQ ID NO: 332293 - DNA, 96 bp, Homo sapiens
agaaaatgaatgccaaatgggacacgattggccaggtgaaacaggagctgtccagaaaggacacagaactactcgccctgcagacaaagctagaaa

SEQ ID NO: 332294 - DNA, 75 bp, Homo sapiens
aagcggcctggcaggggaaggatcgagttacagaatgtctgaaggggacagtgtgggagaatccgtccatgggaa

SEQ ID NO: 332295 - DNA, 100 bp, Homo sapiens
cctgataccagcgtgcaagagacagaccggatcctggtggagaagattaaagagtctattgttggggaaatcagacgggaaattgtaagtggacttttgg

SEQ ID NO: 332296 - DNA, 74 bp, Homo sapiens
gcctgtgcacatcctgacttctgtgagctcattgcgcgggactagggagaatcctcactatggatgggctcatt

SEQ ID NO: 332297 - DNA, 127 bp, Homo sapiens
gccgccatcacggacttcctgtgggacaagcgcacgggcctcgccgccagaacggaagcttgctgtcttcgatacgtggagctccttggcggtccacattgcaatggacaacactgttgtgatggag

SEQ ID NO: 332298 - DNA, 100 bp, Homo sapiens
atcactggctggggagaaacccaaggtttgatatcgacagctgcacttactacttcagctgggactcccgggctgcctgcgccgtgaagcctcaggaggt

SEQ ID NO: 332299 - DNA, 80 bp, Homo sapiens
tgactgagatcagaggccctgtgatgatcgtgtcaggttcctacaaacttgatgacttttgagtagaagcctgagaaaaa

SEQ ID NO: 332300 - DNA, 97 bp, Homo sapiens
cgcaggcgcactgggcgccggtgctgttgccttcaggtgaccacggattcgccatcgtgagttccagagacacctatggctgccgatgaaggctcag

SEQ ID NO: 332301 - DNA, 74 bp, Homo sapiens
ataaaactgaccatagccagagaacagccctccatcttgcagcccagaagccactgccaaaaaatatggtgtct

SEQ ID NO: 332302 - DNA, 89 bp, Homo sapiens
ctgagggtggcggcggtcgacatgttccaggtcccggatagcgagggcggccgcgccggctccaggaaaagatggtaaagcacgcaata

SEQ ID NO: 332303 - DNA, 83 bp, Homo sapiens
gcaacctacggggtgtacttgggaacgaggggtgaagcggcccaggtgaggggacagaagatgagcctgtcggtcctggaggg

SEQ ID NO: 332304 - DNA, 92 bp, Homo sapiens
ctacgtggacatgtcaacagtggacgctgacaccgtcactgagctggcccagggttccccactgaaggacttggtccagctgtctggcaggg

SEQ ID NO: 332305 - DNA, 110 bp, Homo sapiens
ttccgcatccaagatgaagattcacagacattgggaccttcgagacagtgtggcaagtcaagttctacaattaccacaagcgggatcactgccagtggggaagccccttc

SEQ ID NO: 332306 - DNA, 76 bp, Homo sapiens
tgcagcatgctgccctggggggcacagctaagaaagatgctggtttcgagttttggagatccttgttttttatgga

SEQ ID NO: 332307 - DNA, 75 bp, Homo sapiens
ggcgttcagccgctcgctctccgccttccagaaggttgaactcccaccacctgatcttggaccaagttctgcact

SEQ ID NO: 332308 - DNA, 75 bp, Homo sapiens
tcgagtgcctgcaggatgtgagggagatgagtttgatgcctacatcattgtgtctttcgtgaatgccaccctagt

SEQ ID NO: 332309 - DNA, 89 bp, Homo sapiens
ggactctgcacactcttcggcctgacgcccaccctcaatggcggccgcccacgcagaacatgaacctgggccctggagccctgactcag

SEQ ID NO: 332310 - DNA, 100 bp, Homo sapiens
cttacgtctgcggaagtgcagctgcctcagttcttagcgcagaatgccgggacattctgcttcctgtcatcaccaaagagctgaaggagctgctggagca

SEQ ID NO: 332311 - DNA, 101 bp, Homo sapiens
gttcgtatacagatctgcagctcatcaatgctgaggagcagacgagtggccaggcttctggggctgactcaactggccagaaatgtacacacaggagagct

SEQ ID NO: 332312 - DNA, 74 bp, Homo sapiens
ctcgatgaggataacatccctccagaagatggtacatctccgttcatggatgcattaacagccaatgggacaac

SEQ ID NO: 332313 - DNA, 82 bp, Homo sapiens
cgaggcttcacggaggaggtgggaaccaggtgcagatgggtctcttccttcctgcccccatctctctcactcctggctcagt

SEQ ID NO: 332314 - DNA, 100 bp, Homo sapiens
gtataatctgccttccagcctgcttgactttgaaaatgatttaattgaatcaagctgcaaagtaactagacaaggcgcctctgtcgaagagccttctgct

SEQ ID NO: 332315 - DNA, 98 bp, Homo sapiens
ttggaactcctttataagtgtcagctgtgaggtctccaccgggaaccttctggtcatcctgagtcgacactaccaggacgtctcctgccttcagttca

SEQ ID NO: 332316 - DNA, 96 bp, Homo sapiens
gggagatcccaggcggtgacagagtggagccatggctagaggtcaaaatgcagatcttcgtgaaaacccttaccggcaagaccatcacccttgagg

SEQ ID NO: 332317 - DNA, 90 bp, Homo sapiens
caagtgctgtgctgctgccatcattgtgctgaccacaactggccggtgaagatcatgacggagaaggaactcctggccgtggcttgtgag

SEQ ID NO: 332318 - DNA, 90 bp, Homo sapiens
aggattcacgcagaaggcctgggctatcgagtcagaatagcgggttttgcagcaattgttgcatatggattatataaactgaagagcagg

SEQ ID NO: 332319 - DNA, 100 bp, Homo sapiens
ccatcatccaacaccgccatcctttcattgagtgggctcggccaccccaaccttctggaatgtttacccttgcggaagttgcatcacttaatgacattca

SEQ ID NO: 332320 - DNA, 120 bp, Homo sapiens
gctggtggcgttttggtgtcttcgtttgttatggccgctgctgtcgctatggagacagaatcacccaggacattttccagcagttgctgaaacgaggttttgtgctgcaagatactgtgg

SEQ ID NO: 332321 - DNA, 82 bp, Homo sapiens
aggatccccaacggggaggccaacgtgaagaagagcaggccgggctctcgccatgggtcactgtcgcctctgccacgggaag

SEQ ID NO: 332322 - DNA, 99 bp, Homo sapiens
gggagacgagccggccgtcccgggccgggggacccgcccgccatggccaccaagatggctgagagctagcaaggaaaactcaggaccatgatggctcag

SEQ ID NO: 332323 - DNA, 100 bp, Homo sapiens
ccaagatgtagctaatgaccgtggttcccactgagagctggagaccatttaactgctgtatgaataatagataagcgtcttgaataacatctgaatttcc

SEQ ID NO: 332324 - DNA, 75 bp, Homo sapiens
tacacagcatgtgcaacactcaaagtatacatggactggtacgagaagttccaggacaggctcaacaagaaggtg

SEQ ID NO: 332325 - DNA, 100 bp, Homo sapiens
cccctcgttcccttgggaaccgcctgggaactccgccatgtcatccacttcgcccaacctccaggtgatggaggacgaggagaaggcagtggagatcttg

SEQ ID NO: 332326 - DNA, 50 bp, Homo sapiens
aaccataagtgttgctaaggctggaagctccaccatgaggcgaggtggat

SEQ ID NO: 332327 - DNA, 83 bp, Homo sapiens
acctgcagcgacctacccactacaatacctcttgggactgggctcgatttgagggtaacttctttcaaaatattggttccatc

SEQ ID NO: 332328 - DNA, 83 bp, Homo sapiens
cgaagctctagaaatgaatgtttccatctcttcagagatgaaccaggtattagaaaactactcggatgctccaatgacaccaa

SEQ ID NO: 332329 - DNA, 98 bp, Homo sapiens
tcatcctgtttatgtccgacgtgcagctgtttttgaatctgaaaattcaagaaggtgaagctcacaacattttttgccctgcatatgattgcttccaa

SEQ ID NO: 332330 - DNA, 89 bp, Homo sapiens
tgcggaataacatcggaggagaagaaaagagtctcatcgtggaaggcaagagggaaaagaaaaaagtagagaggttgacaatgcaagtc

SEQ ID NO: 332331 - DNA, 100 bp, Homo sapiens
caccaccactaccacctccaccttattcctgtgatccaagcggcagtgatttgcctcaagagccatgggaccacaccaccaccaccacaaccaataggcc

SEQ ID NO: 332332 - DNA, 75 bp, Homo sapiens
ctcgccctaatcccccaacgaggaaggaaggagcagttggttcaatctctggcagacatggccgcttaccaacaa

SEQ ID NO: 332333 - DNA, 112 bp, Homo sapiens
agcgagctgagtggttgtgtggtcgcgtctcggaaaccggtagcgcttgcagcatggtgaatgaaaactttgccattgatttgatagcagagcagcccgtgagcgaggtgga

SEQ ID NO: 332334 - DNA, 100 bp, Homo sapiens
gtatcagtgccatttttccagccagcgtgtgcttacttcatgtctctgggtcacattttgagttcgcagtatgtgcagtgcgtggccgggtgtttgcagc

SEQ ID NO: 332335 - DNA, 82 bp, Homo sapiens
caggacagcgccttcctcaacgacgcggacatggtcatgagctttgtgaacctgggagctctttgttcaatgcctagccacc

SEQ ID NO: 332336 - DNA, 128 bp, Homo sapiens
gtgaccgagaccgtgaccgagagcgtgaccgagagcgcgaatatcgtcatcgttagaaggaaggtggtttgaagttgacatttcagaagcaagggcttgctcagaaaagaccatttgatggtgaagac

SEQ ID NO: 332337 - DNA, 51 bp, Homo sapiens
gaggctggagggggagaacacccagattgtagaaggcatgaaacaaaaaat

SEQ ID NO: 332338 - DNA, 90 bp, Homo sapiens
gtttgtggaagatggcgcctgttgtgacaggaacctagaagtcggaatccggaagaagatcgaacatgacgtggtgatgaaagccagcag

SEQ ID NO: 332339 - DNA, 98 bp, Homo sapiens
gaagtcagtgcctcagttgctggtgtcgtgaaaactacccctaaaagccaaaatgggaaaggaaaagactcatatcaacattgtcgtcattggacacg

SEQ ID NO: 332340 - DNA, 80 bp, Homo sapiens
tcggccaagaaagacaaagacccagtgaacaaatccgggggcaaggccaaaaagaaggaaagctgtgtgaagagacaaag

SEQ ID NO: 332341 - DNA, 59 bp, Homo sapiens
cgtcttttcccttagaggcaccagtcgtgagatggagaataaagaaactctcaaagggt

SEQ ID NO: 332342 - DNA, 82 bp, Homo sapiens
tctttctggcctggaggctatccagccacagacgcagtcttcagcaaggaagtgctgggaacgccctggagtgaacccagga

SEQ ID NO: 332343 - DNA, 51 bp, Homo sapiens
aacccttcaaccggaaatcgatcaaggaggagatgttaaagtaacccatct

SEQ ID NO: 332344 - DNA, 100 bp, Homo sapiens
atgcagtcagtctgttgatgaaactatgaaggtgggagtcaatcattttgacaagtctcctgaaaggaacagctagcaggaactgaaacctttttccatt

SEQ ID NO: 332345 - DNA, 101 bp, Homo sapiens
ccgctgcactcacagggaggaggaggcggcagcggcggaggaaggcggcgcaccccgagaggttggtggagtccacattcaaactggtattgactgcgaac

SEQ ID NO: 332346 - DNA, 50 bp, Homo sapiens
tgctgattcacaattatggagactgtgtccaccttcatccgaagaggctg

SEQ ID NO: 332347 - DNA, 100 bp, Homo sapiens
tgcctgaccagaaaggaactcccaagcgactgcaggcagaagctgagacggctaagtttgcttgcctaaactggacttgaagcaatttaaactactggag

SEQ ID NO: 332348 - DNA, 74 bp, Homo sapiens
atcaggacagctgttccttggccatcccaaagctattctgggggcaacagaggcagcctggcatcctcgctaca

SEQ ID NO: 332349 - DNA, 88 bp, Homo sapiens
gatttgttaaggattccaagtaactcttatttgtttaccaagtactggacagaatcaaatggggtggaatctaaatcattaactccag

SEQ ID NO: 332350 - DNA, 80 bp, Homo sapiens
gaatccgagaagagcagagcggagggagccccagacacggttgaaaactaagcatggggaagagctgcaaggtggtcgtg

SEQ ID NO: 332351 - DNA, 80 bp, Homo sapiens
ctcgcgaggccgacaagagccacccggagcagaaactatgttccaacttcctgtcaacaatcttggcagtttaagaaaag

SEQ ID NO: 332352 - DNA, 82 bp, Homo sapiens
ttgtcatgtagccaagactggagaaacaatgtggtttgggaacattccatgcccttctaaatacagctgtacatgtagtcat

SEQ ID NO: 332353 - DNA, 100 bp, Homo sapiens
cggagctttttacaggcatttccttcagtgcttcctacagagaacaatggagccagaggtgaaaggtgtagcagtcactcggcctacacccacagcatcg

SEQ ID NO: 332354 - DNA, 75 bp, Homo sapiens
gttcacggctccatcgctgttaaagcagcgctatgcaaacaagcactgaagaggaatcggagtagaatgcgtcag

SEQ ID NO: 332355 - DNA, 82 bp, Homo sapiens
cagaagcacaagaaggaccttcacccattgtttgatgagacctttgaattggcccctcagcagaaggcagaacagaaccgag

SEQ ID NO: 332356 - DNA, 82 bp, Homo sapiens
gaaatgcagaaaaaagatcacaagcaactctggatgggattgcaaaatggattttttatcaagcagaaatgcatcgaacaac

SEQ ID NO: 332357 - DNA, 75 bp, Homo sapiens
agctcattaaggacggctctctgctcattggggcgttgaggagtcagcccaaggccaaccccactgtcactctgt

SEQ ID NO: 332358 - DNA, 71 bp, Homo sapiens
catactaaagaacacatctggaagctggttgtctgacagtcagttttgcaaagtggttgaggaaactgcag

SEQ ID NO: 332359 - DNA, 97 bp, Homo sapiens
tggccgtggggagaccgtctgcagtaccaagaagcaagagagacctatcttgatctggatagtaaagtgaggactttaaaaaagtttattaaattac

SEQ ID NO: 332360 - DNA, 90 bp, Homo sapiens
ccacaggaagtctgtgtggctgtatggtgtacattccaagcagagtggccctcatccttcagaatgtggatctgccgaattgaagaggcc

SEQ ID NO: 332361 - DNA, 75 bp, Homo sapiens
ccctattcaagttcatgtcacgctgggtaatgaggatttgactgtgaaggaaataatgcaaaaggtgtcccaagg

SEQ ID NO: 332362 - DNA, 100 bp, Homo sapiens
gccctttcccaaaaggggtatcttaagaaggaaaatatggctgctctttgccggacagcagagtcccaggactcagaattcatgattgaagaaatgcagg

SEQ ID NO: 332363 - DNA, 83 bp, Homo sapiens
ctaaacaaccagctcctgagcctcccaaaccttacagcataatgcaaggcaaggtccagccgttccacccggcatgcaagctt

SEQ ID NO: 332364 - DNA, 100 bp, Homo sapiens
cctcaggccagccctacattatcagagcaagagccggatagaggacaaggttccgaatctattccaaccattctgcactggagtcgctggctgtgagtgg

SEQ ID NO: 332365 - DNA, 95 bp, Homo sapiens
gtggacagctgcagaaaatgacagatggccgtggattcaggtgacagatcagtcagtgaaagcatttgctgaacactgtcctgagcttcaatatg

SEQ ID NO: 332366 - DNA, 100 bp, Homo sapiens
catgcctgaacacactcaccgggcacacggaatgggtcaccaagattggaggtggacacaaaggaagaggcagccagacagctacttcagcgtcctcaac

SEQ ID NO: 332367 - DNA, 101 bp, Homo sapiens
tggcctggcccagcgggggcagtaagctcctacttgcccccagcttggtgcccacacgggcccagcatacacaagctgagggagaatgtctttcaagagca

SEQ ID NO: 332368 - DNA, 74 bp, Homo sapiens
ctggcccagtacctcatcactgcctgtctctagtgatccctgaaaagttccagcatattttgcgagtactcaac

SEQ ID NO: 332369 - DNA, 90 bp, Homo sapiens
tagaaatgtatacccagaagaaatgattgtggcattgagagaagctttgaatgtgttcagagcaacattgttttgttgacacaagcattt

SEQ ID NO: 332370 - DNA, 99 bp, Homo sapiens
ccggtaactattccggttatgatgatgcctgggaccaggaccgcttcgagaaggtgaatcacaagcctttgagaacagcctgagccttcagccctcaca

SEQ ID NO: 332371 - DNA, 75 bp, Homo sapiens
ttttctttctcggcaatttgaatcattaccagccacccacatacgagaaggccagctggttgggggaacagcccc

SEQ ID NO: 332372 - DNA, 83 bp, Homo sapiens
attccaggcacttctgcgtctgccagcccatctgctccatgcccaggtgagaagccctaccactgcaactgggacggctgcgg

SEQ ID NO: 332373 - DNA, 101 bp, Homo sapiens
ctcgaaaatacgctatgttggggaaatactccaaggagtttttcaccagaaaagaaccatctgctgcagaatcccaggggaaaggcagcatctccgaggat

SEQ ID NO: 332374 - DNA, 82 bp, Homo sapiens
ccggggctgcggtcagcgcttcgatcctgagaccaattccgacgttcaaaagaatgctgaaccgggagctgacacacctctc

SEQ ID NO: 332375 - DNA, 98 bp, Homo sapiens
agttgctccaaaacctaagtacaacccatacaaacaacctggaggtgagggcaaatactgtggtctggggttgcaaatgaaccattcaattgaatcaa

SEQ ID NO: 332376 - DNA, 83 bp, Homo sapiens
atcaccgacagcacagacagaatccctgctaccagtcagcccaaggccaaccccactgtcactctgttcccgccctcctctga

SEQ ID NO: 332377 - DNA, 75 bp, Homo sapiens
tcatcattaaggacggaggcacggtagatttcgggcagacaacttgaacaagctgaagaacctatgcagcaagac

SEQ ID NO: 332378 - DNA, 95 bp, Homo sapiens
agggtgtctgagctaaacttcaccaaataatagctgtttgtattttggctgctgcaggagccattttaggctactgcagcactggggtgtcagtt

SEQ ID NO: 332379 - DNA, 90 bp, Homo sapiens
cgaaacgtgataagaagcacctggatgagacatttgctacagcatcccacattaagtcaacggtatcaaagcttgaaagagagaagactc

SEQ ID NO: 332380 - DNA, 51 bp, Homo sapiens
attcattgcctccagtaatcaagaagcagtcaattatagatttcttcaaac

SEQ ID NO: 332381 - DNA, 85 bp, Homo sapiens
ggccgaggcctgggacagctaccgcagcatgagcgaaagctacacgctggaggtccccagtctatgtgaggatctcctgtcttct

SEQ ID NO: 332382 - DNA, 88 bp, Homo sapiens
agaagttagctgtagctattaaaaaaccatctggtgatgatagatacaatcagtttcacataagcaaatgaagaaacacccctgccgc

SEQ ID NO: 332383 - DNA, 97 bp, Homo sapiens
accctgacagagcagtggagtatcttttaatggccatccggctgtccttagagcaagccctgcctcctgagccaaaggaagaaaatgctgagcctgt

SEQ ID NO: 332384 - DNA, 100 bp, Homo sapiens
gaatgctgctaaaaacaagactggggctgctcccatcattgatgtggtgcgatcgctggtggagctgtctaaggctcaagatatagaagcaggagatggc

SEQ ID NO: 332385 - DNA, 100 bp, Homo sapiens
ctggtcggcggagtagcaagtggccatggggagcctcagcggtctgcgcctggcagcagtttgtcagaggaatggctgtgaatggatgcctggaaggacc

SEQ ID NO: 332386 - DNA, 50 bp, Homo sapiens
tgctcaggtgcccccagcgctgggccgcctgggctctgagcagagcttcc

SEQ ID NO: 332387 - DNA, 82 bp, Homo sapiens
caatgtcaggctgaagctcaagaaggtcacagagatgcggcggaccctgacgcctgccagctccccagtgtcctcgcccagc

SEQ ID NO: 332388 - DNA, 100 bp, Homo sapiens
cccagcctcaggcgtgcgcggacggtgtgcggtcgtgccaagcggacctcgtgaaggacaacggccacaagtacttcctgtcggtcctggcggaccccta

SEQ ID NO: 332389 - DNA, 82 bp, Homo sapiens
accactgcagccatgatctccttaacggacacgcagatgggccccatgctgattgagtttaacatgcctgtggacctggagc

SEQ ID NO: 332390 - DNA, 82 bp, Homo sapiens
ttacccagtgctgagacagacctctgcatcccaaattcaggatctggatggctaggctggaagcgcaattcattgaccccga

SEQ ID NO: 332391 - DNA, 90 bp, Homo sapiens
cgggagacagccgggcgctgcaaggagaagatgtatcagggagtctttgcccagttccccctcctcctgagaggaagtcttgtgaaattc

SEQ ID NO: 332392 - DNA, 50 bp, Homo sapiens
ctcccactgattctacattatgattagaagcccaggacccaggaaggaga

SEQ ID NO: 332393 - DNA, 48 bp, Homo sapiens
cgccctaatggaggtctccagtttcgggatttgtcttggctgttacta

SEQ ID NO: 332394 - DNA, 74 bp, Homo sapiens
caaatccaagatggcggccagcaggaggctgatgaagatgtccaacatcacagtcacatacagagatggccgag

SEQ ID NO: 332395 - DNA, 126 bp, Homo sapiens
ggagaaggtgaagctgcagatctgggacacagcggggcaggagcgcttccgcaccatcacctccacggggggccctcagcctcttggccttgaacgggctgttcatcttgattcacaaacacaacc

SEQ ID NO: 332396 - DNA, 100 bp, Homo sapiens
acagaattggacgaaagtttcaaggagtttgggaaaaaccgcgaagtcatggggctctgtcgggaaggattctaacattttcagagaaccttttggaaag

SEQ ID NO: 332397 - DNA, 145 bp, Homo sapiens
atttggtcctcttggttggaatattccatatggatttaatgaatctgacttgcgcatcagtatccgacaactgcagacaggaagcactacttgcagccatcagtgaaaaagatgcaaacattgccttgctggaattgtctgcctc

SEQ ID NO: 332398 - DNA, 75 bp, Homo sapiens
agacttccactttgcaggtggaacagaatggggactatggtaggggcagttgcacgtgcattatttaatcacata

SEQ ID NO: 332399 - DNA, 117 bp, Homo sapiens
tggcgcccgtgtcggagaccccgcgccggaccctgaggcagcgaaagctgggtcttggtggatcatcagtataatatctacctctatagagagggtgtgcttcggactgcttcagaa

SEQ ID NO: 332400 - DNA, 82 bp, Homo sapiens
gtggcttcagctcatctttggcaggaaggcgaggcttccgcccggcacagggggcgaagatgaagagatggctgacccaatg

SEQ ID NO: 332401 - DNA, 90 bp, Homo sapiens
ctttctcctggcctgccctccatgtcggggagctatcgtcgtcttcaatgtttgccagctctgagcctgtgccaggattccagggggata

SEQ ID NO: 332402 - DNA, 100 bp, Homo sapiens
ccggaacccgagaccgagtcagaacccgagtgctgcttggcggcgaggccaccccagcagacatgtttgccaaggcctttcgggtcaagtccaacacggc

SEQ ID NO: 332403 - DNA, 75 bp, Homo sapiens
agttatctgtccagaaaccagagcaagttatcaaagaggtgaccagccaccaagtaaagcactgatggtttcaga

SEQ ID NO: 332404 - DNA, 75 bp, Homo sapiens
acttgcagaaatcacattggaccctcctcccaactgtagctataatgatccagccttttatgaagaatgcaaaat

SEQ ID NO: 332405 - DNA, 82 bp, Homo sapiens
cgggaggcggaggttgcggtgagctgagatagaggccctgcactccagccagggtgagaagccctaccactgcaactgggac

SEQ ID NO: 332406 - DNA, 98 bp, Homo sapiens
ccagcaagccggagcctgccagagccaaggccaagctctccaagttcagcatccccaagcagggggagcatattgagtaccggttgaaagtgtctcta

SEQ ID NO: 332407 - DNA, 90 bp, Homo sapiens
cctttccagcccgtggtccttctccatattcgaggccttggacaagattcgctatgagagcctgacagacccttcgaagttggacagtgg

SEQ ID NO: 332408 - DNA, 75 bp, Homo sapiens
caatagaagaactaccacctatatagatccccgcacaggaaaatctgccctaaagcgtggatacccatcaacgaa

SEQ ID NO: 332409 - DNA, 90 bp, Homo sapiens
gccgcgggggccaccacactggcccaaatatttcctgcaggttgaaatcacaaagattagacacctttttagataggtgttcttcagcac

SEQ ID NO: 332410 - DNA, 75 bp, Homo sapiens
aggccacagagtcggggtcttcacgtcaggatggctaaaggtgaccccaagaaaccaaagggcaagatgtccgct

SEQ ID NO: 332411 - DNA, 83 bp, Homo sapiens
ctgggttttcttagccctctacttttcaagacaccaagtgagaggccaaccagcgcccgggggctggagaaggccaggcagca

SEQ ID NO: 332412 - DNA, 100 bp, Homo sapiens
agatgatattggacatggagtaaaggggtcattgtcattcgaagatgtggctgtgggcttcaccagggaggagtggcagtttttggaccagtctcagaag

SEQ ID NO: 332413 - DNA, 75 bp, Homo sapiens
gccgaacgatgtgcgagaactgcgcagacctggtggaggtgttaaatgaaaaacgctgtaaatgtaagcctatta

SEQ ID NO: 332414 - DNA, 98 bp, Homo sapiens
caggagcgggacccggaacagaccgccgtgagagaggaggggtgccggccgggattcgcggcccggagctcgggaccgctggtgcaactattatctca

SEQ ID NO: 332415 - DNA, 98 bp, Homo sapiens
atgttcgactggctcctgattacgatgctttggatgttgccaacaaaactgagaaaactgttacagcagaatatgaactagaatacttactactggaa

SEQ ID NO: 332416 - DNA, 75 bp, Homo sapiens
aaaatcatttttgaggatgaccgggtgtggcgatcgatgggaataatcacgaagtcaaagaaagacacattcagc

SEQ ID NO: 332417 - DNA, 83 bp, Homo sapiens
caagagcgcccgcggcaaccgcgtctcctgcatgtatgttcgctgcgtgcctggtgccagggaaagcaggcaggatgggagag

SEQ ID NO: 332418 - DNA, 98 bp, Homo sapiens
tctgctgcatcaaaacagaataagctggagcaagtagaaaaggagttgttgagagtagcagtggaagttgatgggtcgaaactaaatgtgaccagcac

SEQ ID NO: 332419 - DNA, 83 bp, Homo sapiens
cctgggccttaccatcttcatcatgcacatcttcaagcatgctcagtttcagagcgtcctcagccaaggaaataaaaagccac

SEQ ID NO: 332420 - DNA, 75 bp, Homo sapiens
gtttgaagttgttaaaatgggcaagagtgctatgcagccatgctgtgacctacaagcaaactaaatagccaacat

SEQ ID NO: 332421 - DNA, 100 bp, Homo sapiens
cagccacatcatatcacagtatcagttaaggagcttgatttgtttttggcatactacgtgcaggagcaaggaaggaactgcaggagctgcagaatcttta

SEQ ID NO: 332422 - DNA, 74 bp, Homo sapiens
tctgccttcgcttcacggcgccgagccgcggtccgagtgaaaggtgtagcagtcactcggcctacacccacagc

SEQ ID NO: 332423 - DNA, 90 bp, Homo sapiens
gtcaatcagagcgtcctgtgcggttcaagtgctggattgtgtcatgtgaccatcccaaaactcagagcaccctatggccgtctttgccct

SEQ ID NO: 332424 - DNA, 99 bp, Homo sapiens
gtttcttactcgggagctggctgaagatggctactctggagttgagacttttcccaggtccctcgtatcaaaacattaagagtataatggaagatagca

SEQ ID NO: 332425 - DNA, 82 bp, Homo sapiens
ccagcctgcggagcctgtggggcaggttttgcaaaaggcatcaaattaaatcaagttcaaatattccctgtgtccctaaaga

SEQ ID NO: 332426 - DNA, 75 bp, Homo sapiens
tgacccctttgacctcttcgatgtgcgagactttggaaaggaagtccaaagccaagcctaatggcaagaagcccg

SEQ ID NO: 332427 - DNA, 100 bp, Homo sapiens
ccaaagtgcccagcagaggggatgcaggggaaatgctgtctgtagctgagcacttcctggagcagcagatgcacccaacagtggtgatcagtgcttaccg

SEQ ID NO: 332428 - DNA, 83 bp, Homo sapiens
aatgtgcaatcttaaaagaaactgtgaagcaaattcgtcagatcaaagaacaagtttttcagaagaagtgaagtcaagatgaa

SEQ ID NO: 332429 - DNA, 100 bp, Homo sapiens
gcaggatggcgccaccacagatgcaaacggacgggccaacgccgtggccagctccactgagagaaccccagccaaacatcatgtcaatggcaacagaaca

SEQ ID NO: 332430 - DNA, 110 bp, Homo sapiens
gataaagatgatgatatccttctcaaccttgtgggatgtgaaaactctgttactgaagctagaaaccagtgcctgaaagaaactccaattaaaataccagtaaattcaac

SEQ ID NO: 332431 - DNA, 75 bp, Homo sapiens
ggaggaggggctccggctggtctgtggtgagagtacaggggctcaggtccaggtggcaggggatatgctacccaa

SEQ ID NO: 332432 - DNA, 102 bp, Homo sapiens
ctccactccccagctgtgaaaggatcaccccatcctgagatctgctgccttacacagtggaggctgttttctgagtgtcggataactctgttattaaataag

SEQ ID NO: 332433 - DNA, 75 bp, Homo sapiens
tcaaaatggagttgccggagagacagcccaggtacaccaggggttggaaaaaccacactaggcaaagaacttgcg

SEQ ID NO: 332434 - DNA, 75 bp, Homo sapiens
tgaagccactgattagcaatttaaagatcctctccaagggcaaatccagacagaacctttgacttggtgttgaaa

SEQ ID NO: 332435 - DNA, 90 bp, Homo sapiens
gaattatttagagatcctggtggtgctcctttcctacactctgaagaccactttccagcagtacctgacacgtccacttaccagtatgat

SEQ ID NO: 332436 - DNA, 116 bp, Homo sapiens
attagataatcctcatgcaaatagcgggaagaacaaaggaaggggagcccgggacccccgggggcgcagctctcgtggcattatccttcagtggggctattggactgacttttctt

SEQ ID NO: 332437 - DNA, 96 bp, Homo sapiens
gcgtccaaccccgaacggggggagattctgctcacggaactgcaggggccgttgacatttagggatgtggtcatagaattctctcaggaggagtgg

SEQ ID NO: 332438 - DNA, 100 bp, Homo sapiens
cttcttccctgtggctgttggcttcacccttggagcggcttttgtctacttggctgacctcctgatgcctcacttgcttcaaggttactgactttttatg

SEQ ID NO: 332439 - DNA, 82 bp, Homo sapiens
ctgatatgcaatgtcacttacaacattaatcagatactgcatttaagagcatggtagaatcaattaaacactgcattgtgtt

SEQ ID NO: 332440 - DNA, 85 bp, Homo sapiens
tgcagtttcctttgcagaaaaaaatggactcaactattgttactccaattattttgaggactgaccctcagggatttttctttta

SEQ ID NO: 332441 - DNA, 97 bp, Homo sapiens
tcaagctgaaaaactggagttgcagctctcctgtcttccccgggaattgggacctgaggcttctccagctttgtcacccgaaagaaccgccaagtgt

SEQ ID NO: 332442 - DNA, 82 bp, Homo sapiens
tggaggaggaagtgtcagcgctactgccgcaggtgatttgaagatattaaagctagaaattggaactagaaaatcaaaagaa

SEQ ID NO: 332443 - DNA, 75 bp, Homo sapiens
catgaaatgattgaatctggtgttatcaacttaaaagatgccacctctaaggattcacaagacagtgatgatgaa

SEQ ID NO: 332444 - DNA, 100 bp, Homo sapiens
agaagatgctggcaccctcacagactataccaaccagctgctccaggcaatgcagcgcgtctatggagcccaggtcgacaaagatgctgaattagtggcc

SEQ ID NO: 332445 - DNA, 75 bp, Homo sapiens
agttaatggagtatgcaatgaggtgctggagaatctggtaaaagcaccattgtgaagcagatgaggatcctgcat

SEQ ID NO: 332446 - DNA, 75 bp, Homo sapiens
caaatatcctcggaagagcgctcccaggagaaacaaggtggctgtcaatagattggcccaaaaggaagaacaagg

SEQ ID NO: 332447 - DNA, 80 bp, Homo sapiens
ggggaaggttacagaccagccaacttcaaagaatgatcttgagccagatgattgtgcatccatttacatctttaatgtag

SEQ ID NO: 332448 - DNA, 100 bp, Homo sapiens
gcatcacctctcagcacgattttcccgagagttcacaggcaagcctgggacctggctgttgacatctgtctgtctcagctgccgacgatcatcgaggaag

SEQ ID NO: 332449 - DNA, 100 bp, Homo sapiens
ctgatttgcaagatctggtcaaatttcagccatcagcaacatcaagatggtgctcatgtggaccagtggtgacgccttcaagacggcctacttcctgctg

SEQ ID NO: 332450 - DNA, 82 bp, Homo sapiens
ctcaggacaacccagatgtgcaacaaagtgcgatgagcctggcccaggccccccactgcctgcagctcccttccggacattc

SEQ ID NO: 332451 - DNA, 139 bp, Homo sapiens
ggcccttacgtcagttgtaaattacagagaacctaagtctgtttgcaaagcacctgaactggaacaagagtttgttcagaaacaacagcaagaattagatggctctctgaaaaagatcatccagcagcagaaggcagag

SEQ ID NO: 332452 - DNA, 50 bp, Homo sapiens
gggaggagactcctgaccctcagaatgtatgaatgacccatattaaatcg

SEQ ID NO: 332453 - DNA, 100 bp, Homo sapiens
gcaaagcggggacccagaccctggagcctcagttggaagcagccgatccagcctgcggagcctgtggggcagggagcaatggaccacagaaattctgcat

SEQ ID NO: 332454 - DNA, 100 bp, Homo sapiens
acacacctgaattttcagtcactggaggaacagaagaaaagtccagtcttctcatgagctgtctgagaaaatgtgatcagtactggcctgccgatgggag

SEQ ID NO: 332455 - DNA, 90 bp, Homo sapiens
acatcgggtttgagattatccacgtgtgtaaggctgatcttaccaatatatttgagtccttcctgcctcagttattggcctatcctaacc

SEQ ID NO: 332456 - DNA, 90 bp, Homo sapiens
ctttacagaggaatagtctacaaaggaagacttgtaacctggagaagagggaacgcctaagctgttaaggaccagcgagtgcgactttgt

SEQ ID NO: 332457 - DNA, 75 bp, Homo sapiens
gggctgcagtactcgggcaagaccaccttcgtcaatgtcatcgcggcatttatgtttgaatcatctttaagtctg

SEQ ID NO: 332458 - DNA, 83 bp, Homo sapiens
gtcacagataaatcacaagaagggtctcagtttgtgaaaggatttggtggaattggagtggaaggaggcaaaaccggaagacc

SEQ ID NO: 332459 - DNA, 80 bp, Homo sapiens
tgaacaagcgtcacttgacaagcctatagaatcggttttttgccctgacatctcttcgtcttgtgtttttacttgcattt

SEQ ID NO: 332460 - DNA, 75 bp, Homo sapiens
gacctatctgacaagagcatcaaccctctgcaagacactaagggcgactaccagaaagcgctgctgtacctgtgt

SEQ ID NO: 332461 - DNA, 72 bp, Homo sapiens
gtgtcccaccgcaaggactggagaagggacatggatttgattgacatactttggaggcaagatatagatctt

SEQ ID NO: 332462 - DNA, 74 bp, Homo sapiens
atagaagacccagaggacactaaccaaggtatttgaaatatctcaccaaaaaatatttgaagaagaataatcta

SEQ ID NO: 332463 - DNA, 100 bp, Homo sapiens
tcctggtgcacccccagtgggtgctcacagctgcccattgcctaaagaaaccccaccaacaactgaacgctttggtcaggctgctacaatggaaggaatt

SEQ ID NO: 332464 - DNA, 90 bp, Homo sapiens
tactccagcagccttggtattacagggtcttcatgcactctgtcaagctgagggaaaagcttcactctgaccatcactgtcttcacaaac

SEQ ID NO: 332465 - DNA, 100 bp, Homo sapiens
cccctctcactctccaattctgttgttgcctccatgcgccaatccaaaccgaaagccagaagctgagcaactgggggcatttgcagctggagtcaagcag

SEQ ID NO: 332466 - DNA, 90 bp, Homo sapiens
gtcagcagccaccggaccctgtcttacagccgctggagctatgacagcacaatcagataagttcacagccaagccattggattccaactc

SEQ ID NO: 332467 - DNA, 75 bp, Homo sapiens
tggcctggaggctatccagcgctcttgcagccaatgccggaacaggatttgctgttgctgagcctcaaatcgcaa

SEQ ID NO: 332468 - DNA, 48 bp, Homo sapiens
aaaaggcctaagaattttggcattgattatggattggatatgtctact

SEQ ID NO: 332469 - DNA, 49 bp, Homo sapiens
atccagcctgcggagcctgtggggcagccccacaggagacaggatccga

SEQ ID NO: 332470 - DNA, 83 bp, Homo sapiens
cgaccccacagtgcagcgctccgtgtttgcatcggtggacaaggtgccaggtgctggagaatctggtaaaagcaccattgtga

SEQ ID NO: 332471 - DNA, 76 bp, Homo sapiens
tttcccgctggcgcgcagcctcagctagattttaccaaatgttgcaagaactctggagttcttatggtagtaaaat

SEQ ID NO: 332472 - DNA, 75 bp, Homo sapiens
ctgctggccgggctgctgtgcggcggcggggtctgggccgcgcgaggtaatctgtaagtcagatgctccaacagg

SEQ ID NO: 332473 - DNA, 100 bp, Homo sapiens
cggggagggtggttaccgctgaggagctgcagtctctgtcaaggcaaagcataattgatttgaaggagaaggaaataccagaattaagaaacaaactgca

SEQ ID NO: 332474 - DNA, 98 bp, Homo sapiens
gaggattttgaggacacttgtggagagctcgaattccagaatgatgaaattgtaatcctggaagcctactgatactgaaggtaagaagcagtatgaca

SEQ ID NO: 332475 - DNA, 106 bp, Homo sapiens
ctaaatctgttgcttccagagccactgtcctccagaagacatccttcacccctgtaggaggaaccagactagcatttctcagtgggttccagtatgcagccgattg

SEQ ID NO: 332476 - DNA, 75 bp, Homo sapiens
ctcagcatctggtacagccgagtagctacagcaagctgggtagcaggcagatccaaaggatatcatgaagtttcc

SEQ ID NO: 332477 - DNA, 75 bp, Homo sapiens
gacacacaaagaatagagttgagcctgtgggacacttcggctctttcagtctcacatggcaacgaaaacaacttg

SEQ ID NO: 332478 - DNA, 75 bp, Homo sapiens
gttacatcagtgttgggaagctgatgccaagtacagtgcccttaatccacgagaatcatgggacatgtggcatcc

SEQ ID NO: 332479 - DNA, 100 bp, Homo sapiens
gggacagggactgctgcaacctacggggtgtacttgggaacgaggggtgaagcggcccaggtgagggtgtttgagaagtcccccctgcgggtgaagaact

SEQ ID NO: 332480 - DNA, 87 bp, Homo sapiens
acaaccgagcaaattgaagagacgttaaaatacttccaacatcgggtcagaagttgagatttccactatcgagaaacaacggaagga

SEQ ID NO: 332481 - DNA, 82 bp, Homo sapiens
ggcaactacagcgtcaatggcaactgcgagtggctcatcgaggggcgtctctggccgagcctctttttgtggaaaacgacag

SEQ ID NO: 332482 - DNA, 100 bp, Homo sapiens
cagccattttcctgagttccctgatccccacacctacatcaaaactccgtacatagattctgcggacttggagcccatcacctcgcaagaagagcccgtg

SEQ ID NO: 332483 - DNA, 96 bp, Homo sapiens
gaatgaactgataacggagaatggaactgtatgccagcagcttgttgtacatgaatcagaaatcctgcaccatgagaagcagtacgagccattcta

SEQ ID NO: 332484 - DNA, 100 bp, Homo sapiens
gacaagcccatcaagcccctgccttgctgcaagaaggccgtgtgcgaggagtgcctcaaagtctacctgagcgcccagttgtatatgaacacagatcaag

SEQ ID NO: 332485 - DNA, 124 bp, Homo sapiens
gttgttgcaacttttttcgaaagctgggtttcccgggagatcccaggcggtgacagagtggagccatggctagagtggcctgattccaccaagagaaggcccaggaggaagaagagaaaaagat

SEQ ID NO: 332486 - DNA, 71 bp, Homo sapiens
catccagcaggcggtgacccgctaccggaaggccatcgccaagatgaagttggagcccttgtttttgacat

SEQ ID NO: 332487 - DNA, 100 bp, Homo sapiens
cgcagccatggcggaggcggctttggaagccgtgcggagcgagttacgagaattcccggccgctgcaagggaaaccatcatagcctttgcctgggaacca

SEQ ID NO: 332488 - DNA, 106 bp, Homo sapiens
gctaccggaatgtcatccagcgagtgattagggagaccctgcagcgtcatggtgctggagctggtggcacccgcaacatctcaggcaccagtaagtttcatgtgga

SEQ ID NO: 332489 - DNA, 75 bp, Homo sapiens
gagggatccttcacccgtgtctgaaagcgtggatacccatcaacgaagttttgatattggaattcagattggcta

SEQ ID NO: 332490 - DNA, 75 bp, Homo sapiens
cagttcctacagctccactcgaggcatctcacaggacttggaaaaggagagtgacacacccctccagcaagtatc

SEQ ID NO: 332491 - DNA, 75 bp, Homo sapiens
ctgatgacaaattacgaaagtgctcccccatccccacagtataaaaaggagtatgccaaaatggtccaggtctta

SEQ ID NO: 332492 - DNA, 82 bp, Homo sapiens
aggaaggatcttctcatgcacagaggcaacaaatggcaactttctgagaactgtggctgcaccatctgtcttcatcttcccg

SEQ ID NO: 332493 - DNA, 100 bp, Homo sapiens
gaccatcacttccagctactaccggggggctcatggcatcatcgtggtgtatgacgtcactgaccagaatggatcttctaaccaaagacggagatttaat

SEQ ID NO: 332494 - DNA, 75 bp, Homo sapiens
cggattcgccgaggcaccgaggcactcagaggagcgctgtgcttcgccgtgagccgctcgctgctgctgacgtgc

SEQ ID NO: 332495 - DNA, 111 bp, Homo sapiens
aacagcccgcccgaccccgtcccgaccctggccgccccgagcggagcctggagggtgctttcttctgcgacctggtactcatctacctcatcaaaaagagagagttttacc

SEQ ID NO: 332496 - DNA, 83 bp, Homo sapiens
acctctccttttccctctccctttccctaagttgcagagtgggcaggatcttaagacccgataggtgcagaacccatctggac

SEQ ID NO: 332497 - DNA, 100 bp, Homo sapiens
caacaggtgatgatggagatgaagtatttgtggaggcagaatctgaagggaagatgagaatgtgcctactgctcctgatcctccaagtcaacatttacgt

SEQ ID NO: 332498 - DNA, 88 bp, Homo sapiens
gggcactgctttccactcggctcctgtcgtccgttctctcaggctcccgttcagggaaagcaggcaggatgggagagtcgccgataga

SEQ ID NO: 332499 - DNA, 48 bp, Homo sapiens
ctcgctcccttgatgatcttgagatttggagtcaaaatatggacctga

SEQ ID NO: 332500 - DNA, 100 bp, Homo sapiens
tcatcggagtgaccctgcccatcatgtggttctacctcctcatgaacatcatcactcattacctgaagcccatcctcacacacagtggtcccccactaac

SEQ ID NO: 332501 - DNA, 75 bp, Homo sapiens
ttgagttctgcagttgatcatggatggagatgggtgtcgtgagctggtggtgggctacacagaccgtgtggtgcg

SEQ ID NO: 332502 - DNA, 75 bp, Homo sapiens
gcgcgtgtgtgagcgcgccggaccaagcgggcccagaagcgggttgtgaccgagattcccgacgagagagactga

SEQ ID NO: 332503 - DNA, 74 bp, Homo sapiens
tccagcgagaagttgagggagaaaggcgggcccgggaacaggtttgtgagccgtatctccgtggtgccaactca

SEQ ID NO: 332504 - DNA, 74 bp, Homo sapiens
agagcagcttaagatggaagccaatatcgacaggataaaggtggccaagactaagcagcagattgaggagcagc

SEQ ID NO: 332505 - DNA, 134 bp, Homo sapiens
ccccacctttcctcaggagtcatttctgttccgcacaggcctgctgaactgggtgctttatatagggaaagaccacagcaagattctttcattcgtctcctcctagcctgggggaccaggctcgaactgaccct

SEQ ID NO: 332506 - DNA, 105 bp, Homo sapiens
gggaatttaagaaacatccacagcagcgactggcccaagttctttgaaaaggttacccaggagatttcagatgaaacaagagttttccgcttattaggatcagac

SEQ ID NO: 332507 - DNA, 50 bp, Homo sapiens
tgaagggtgatgtggaaaaactttctggaaatgaggcaagttatcctttg

SEQ ID NO: 332508 - DNA, 100 bp, Homo sapiens
tggtctttcagaagctttccgcccggctaagagccttgaggcagaggcagctggaccgagctgcggctgctgtgggtacttcaggtcatgccttctgaca

SEQ ID NO: 332509 - DNA, 100 bp, Homo sapiens
cagcgtccctgtgacctggccgatgaggaagtactgagcctgttggaggaactggcccggaaacaggaggacgtatcacctcttctgggctcaagatgga

SEQ ID NO: 332510 - DNA, 100 bp, Homo sapiens
tctggctcgtcctgcgctgagcatttgaacacagggctgtcaagggagagtatcgcgcttactatggagcatttaaggatgtcaaggagaaaaacaggac

SEQ ID NO: 332511 - DNA, 98 bp, Homo sapiens
aaaaagagaagaagatgaagaaacccagcttgatattgttgtggaaaggaccatgctagactttccccagcatgtatcctctgacaaagaagtacgag

SEQ ID NO: 332512 - DNA, 105 bp, Homo sapiens
gtttacacaggcaaactgtcagaaaagagtagcctgggctgtctggaaatctgagcaattctgtggtgttcttggtcacacatttatggagtttctgaagggcag

SEQ ID NO: 332513 - DNA, 96 bp, Homo sapiens
acaaatgtttttctgttttgcctgaatacatgatttaaacaagagatttccacagaagaaatggtggagtcaatgaagaaagtagcagggatggat

SEQ ID NO: 332514 - DNA, 100 bp, Homo sapiens
ttgccacctggttcagcttggccagatcgagcggagaaatggctggcggtaaggctggaaaggactccggaaaggccaagacaaaggcggtttcccgctc

SEQ ID NO: 332515 - DNA, 75 bp, Homo sapiens
ctcaagtcctggctcagcaagactctcgagcccatgtcatttggatccaggattcctagcaagtgacaaaacatc

SEQ ID NO: 332516 - DNA, 75 bp, Homo sapiens
cttttctacagcttctgataatcaaccaactgttacaatcaaggtctatgaaggattgtcaccagacctgcaatc

SEQ ID NO: 332517 - DNA, 100 bp, Homo sapiens
aagtagctgaatgtgttactccattgctgaggagtgggctgatcccttatccaacatggttctaaccttcagtactaaagaagatgcagtttcctttgca

SEQ ID NO: 332518 - DNA, 100 bp, Homo sapiens
gagatgaacagtcttcagggtgtttagaaaaccagcgtgctcttcaggatccaaatgtggctgcgttcatggtagaaccaattcagggtgaagcaggcgt

SEQ ID NO: 332519 - DNA, 90 bp, Homo sapiens
ttccaggtcctatctccaagaatatcaaacagagcttacaagaccctatgaaaaaattagttgagaaagaagagaagaagaaaatcaacc

SEQ ID NO: 332520 - DNA, 103 bp, Homo sapiens
gagaatatttaatggaaaatcgcttggttaaaacctgacacttttaacaggtgaagaacgaggtggagaagctcccccgacagcagcggaaggaaagcatgaa

SEQ ID NO: 332521 - DNA, 90 bp, Homo sapiens
aaagagctagacctggtgcttggagaagagacatctttggaagaatcatctgggatatagctagtgcaataaaagaacttcttgatacag

SEQ ID NO: 332522 - DNA, 100 bp, Homo sapiens
ctggatctattaaagggagcattccgatcatctgaggaacagcaggccccagttgtgacagcgttgaggaagatatgaatgcttctgcccaaggtgcttc

SEQ ID NO: 332523 - DNA, 87 bp, Homo sapiens
gggaaggctctggcttgggacgaaagtgtcaaggcattacggctcccattgaggccgagcaggagctccgcgtggcccagacagagt

SEQ ID NO: 332524 - DNA, 122 bp, Homo sapiens
gggaggaagccctttctcctcggcactgtattctttacctgcttcccaatcccactgatgaggatcagcccatgggagtctgaagatacagtattgctcgtcctcaaagagatctaccaaac

SEQ ID NO: 332525 - DNA, 83 bp, Homo sapiens
accagccaaaatcatttttgaggatgaccggttatttctcaaactctgaggctgcggagttcacacattgaaatctgtcatct

SEQ ID NO: 332526 - DNA, 96 bp, Homo sapiens
ttttgagccatacttaagtagccagacaaatcaggttgattcttcaccacactgaaaccattaggaaaaatccttgtggttaacagcagaggcttc

SEQ ID NO: 332527 - DNA, 98 bp, Homo sapiens
gcccaagcctggaatcacgaagcacagctgtcacccggacatcaagtattcaccagttaatagcaccagaattaactcctgaggagagagcccaaaag

SEQ ID NO: 332528 - DNA, 100 bp, Homo sapiens
tttcccattgttcaaggacaaaggtggcccagaattttccagtgccctgaaaaatagaggtggacatctataccgtcaaggtggaagacctgaccttcac

SEQ ID NO: 332529 - DNA, 90 bp, Homo sapiens
ggatgttttatatttccagaacctagcacagtgccgggcataaaaacgtggaatcttgtagaaggaagatcagcattcataaaaaatata

SEQ ID NO: 332530 - DNA, 100 bp, Homo sapiens
gaagtattgacggaaagcttgaattacctacatgcttagcagtgtctgcaaaaacgaatcttttcctacaacctgttaactgactggactgttggtaaca

SEQ ID NO: 332531 - DNA, 82 bp, Homo sapiens
gccggggcgcaggcgcccgtgcggaatggcagattgtcactgctgttccaagggcacacgcagagggatttggaattcctgg

SEQ ID NO: 332532 - DNA, 83 bp, Homo sapiens
ccatgtcattgaagatcagcacaaattccctcattactttggaaaggaaaccgtatcacccaaaactggaagctttcattagt

SEQ ID NO: 332533 - DNA, 131 bp, Homo sapiens
aaaatcacgggctgtccaggaactgtcggaacagaaccaaaggctattggatcagctcagcagggaaacccagcgtttgctggcagaaccagttcctggcatcaaagccgaaccagatgagagcaacgccc

SEQ ID NO: 332534 - DNA, 98 bp, Homo sapiens
ctcagcgtctgcacatccctacaatggctaaaacagcaatgggtgattgtagagaaggctccaaaagccagggtgcctgatctggacaagaggaagta

SEQ ID NO: 332535 - DNA, 100 bp, Homo sapiens
ggcggcggcggcggttccagcatgaagaggagagctggcctggggggcagcatgaggtgcagcggtgcctctgcagaggagcccaccagccatcggggag

SEQ ID NO: 332536 - DNA, 82 bp, Homo sapiens
gcagaaggtctctggagacatcttcagcagaagatgcagatgcctccagctattacgagtcccatggcaacaaggatcagag

SEQ ID NO: 332537 - DNA, 83 bp, Homo sapiens
gaagaattgatatcacattatagaagagaatgtttgctaatcatgcatgcattttcagttgctccttttgaccagaatttgtc

SEQ ID NO: 332538 - DNA, 75 bp, Homo sapiens
tgattccctgcggtgtgcaagtccgactggaacagcaagagtgagccatggagctacgtgtggggaacaagtacc

SEQ ID NO: 332539 - DNA, 51 bp, Homo sapiens
ctgggaaacatcattaaatcgtatctttaggtggtgttgatcttacagtcc

SEQ ID NO: 332540 - DNA, 100 bp, Homo sapiens
ggatggaaagatggagatgaacctctaacacagtggaaaggaaccgttctggatcagctgcagtgagaagaggagtttgttactttaaacagaggctgaa

SEQ ID NO: 332541 - DNA, 98 bp, Homo sapiens
atcattgctcggaaaggcagccagacagtgcggaagcacagggagcagaaggagcgcaagaaggatatgctgcaggctgctagtcattatcgccaaaa

SEQ ID NO: 332542 - DNA, 100 bp, Homo sapiens
gcgcttccgacggggcggccgggggctcagagatccaagtgcgcgccctggcgggtccggaccaagtggtcccaggctgcacccatggcagaaggaggag

SEQ ID NO: 332543 - DNA, 100 bp, Homo sapiens
atcaaagttggagttgcttacaagttagatggtgaaatcatacctcatatcccaggacagagcgggatgccaccagcttgtccaaagggaagttccagga

SEQ ID NO: 332544 - DNA, 90 bp, Homo sapiens
ctggacccggaccggttttgggtctcggcgcggaagatggccggcggcgtggacggccccatcgggatcccgttccccgaccacagcagc

SEQ ID NO: 332545 - DNA, 75 bp, Homo sapiens
ggcccgaggcgccgccgcctccaccgccgcagccgccggcggagaagatggcgctggaggtcgtgttcctggcac

SEQ ID NO: 332546 - DNA, 74 bp, Homo sapiens
tgaaagatgataagcccactctacagctggagtctgcgctcctcagaccaccggcaggtgaacagcctgatgca

SEQ ID NO: 332547 - DNA, 75 bp, Homo sapiens
cgcatctatagtttccagatggctctaacctcagtgcatgttacaccagacagctatattccatgccttgcagac

SEQ ID NO: 332548 - DNA, 101 bp, Homo sapiens
ttctcagcgtggccgagaggagttactacttggagaaagccaaactagagaaggaaggtttggatccttcaagtccatcatctccagaaccagctagtctt

SEQ ID NO: 332549 - DNA, 100 bp, Homo sapiens
ttgggggccacggcgcggacgccatgcccctcttggagtctgtgccttatgaagaagcactggcaaaccgccgcatccttctcagctctactgaaagtcg

SEQ ID NO: 332550 - DNA, 90 bp, Homo sapiens
ctaactgatctgtacccagaaagagtcatacctggagcagcaggtcggattgtttgtgctgaacgaactgtcctcttgcttcagaagccc

SEQ ID NO: 332551 - DNA, 99 bp, Homo sapiens
cgtccaccggcggctccgcaagaagtaccgagaaggaccacagaatactggccatggtgcaacttctggttttggcagtgcttttacaggacaacaagg

SEQ ID NO: 332552 - DNA, 75 bp, Homo sapiens
ggcatcactgtctattccataccgcgctgagcacgttcttccaagaaaccaacattcccaacagccaccaccacc

SEQ ID NO: 332553 - DNA, 100 bp, Homo sapiens
gactgcgttccagccccagttccccggcagcgggacccggcgaagacgcgaccgcggcgcgagtcaccatggtgctggagaatctggtaaaagcaccatt

SEQ ID NO: 332554 - DNA, 100 bp, Homo sapiens
actggcagcatgtatatcttttactaggactcaatgaaattgctgcccccatgttcctgaggctctgcaagctgaagcttatttctcatgatataggcaa

SEQ ID NO: 332555 - DNA, 100 bp, Homo sapiens
ctcctgggactccaggataccaggtgtggtggacacaggcctattcatcaacatggctgagagagtctactttgggatgcaggatggctcagtgaacatg

SEQ ID NO: 332556 - DNA, 100 bp, Homo sapiens
gtttctccgctagttgtgcgcttggccgcgagacactctggcagttataggaacacaaaggagttggtggtgaccccgcccagttggcccagaggatctc

SEQ ID NO: 332557 - DNA, 75 bp, Homo sapiens
gcatgatcggcatgtccaccaaggcagggccaattcctgtccccccagcagcatggcatcgtgtgctgaaccctc

SEQ ID NO: 332558 - DNA, 74 bp, Homo sapiens
gcgtctctgtccccatctggttttaggcattgaatgccccagaggagcccgaaacctcccaggcttggtgcagg

SEQ ID NO: 332559 - DNA, 107 bp, Homo sapiens
cggacagccgcgcgctgagggtctcggggcgggcgccgcgggacctctccgggccatggaaaccaaggtgtatgttggtaacctgggaactggcgctggcaaaggag

SEQ ID NO: 332560 - DNA, 101 bp, Homo sapiens
ggcggacacgccagaggaggaggccggggaatggccgcggtgtggcagcaagtcttagcagtggacgcgagctatggaagggccgctggcagggcaatgac

SEQ ID NO: 332561 - DNA, 75 bp, Homo sapiens
ccactcaggatagacaggaggcttttgagagattcagtttagttggctataaaaagttggcatatcataggagac

SEQ ID NO: 332562 - DNA, 100 bp, Homo sapiens
gtaaaacaagtggcctttacacagggcaggacttcctcgttctgcccatcttcctaacaaggctatggctgataacagcagtgatgagtgtgaagaggaa

SEQ ID NO: 332563 - DNA, 100 bp, Homo sapiens
ttgagcacagggactacatcataatgttttttgctctcttacatgtctcatcaacgaatggattaggacatggacgtggacatcctggccctggtcaatg

SEQ ID NO: 332564 - DNA, 75 bp, Homo sapiens
gtggtgcttaccaccctggctgctctgctgggggtcataatattggaagaaatgcactcggtgatggaaagagag

SEQ ID NO: 332565 - DNA, 100 bp, Homo sapiens
ggccgagatgtctcgctccgtggccttagctgtgctcgcgctactctctctttctggcctggaggctatccagcaactcttcatcttggcttatacctat

SEQ ID NO: 332566 - DNA, 100 bp, Homo sapiens
cgaaccttggagagaggagaacgaacatcttctggacctttgtccaggtacaatagtgtctcaggaggaggacattgtcacagtgactgatgcagagggg

SEQ ID NO: 332567 - DNA, 90 bp, Homo sapiens
ttgataggtatatcgagaacagcactgccagtgaaagatgtagaagataaacctgaacaacaaaccagaacaagagagactgacaaatca

SEQ ID NO: 332568 - DNA, 82 bp, Homo sapiens
gtttacccccctattcaagttcatgtcacgctgggtaatgaggatttgactgtgaagatggctattcatatgaaaaggaagc

SEQ ID NO: 332569 - DNA, 74 bp, Homo sapiens
cttcattggccacctacagaaacaaaatgtcaacaaattgatgggtcatacttacctggttgcttgcgcatcta

SEQ ID NO: 332570 - DNA, 75 bp, Homo sapiens
tctttgaatatgtttattttgcaagaccagacagtatgttcgaaggtgcctcccactaaattttcggaaagatga

SEQ ID NO: 332571 - DNA, 100 bp, Homo sapiens
cgacctctggttctacttcacactgcagaactgggttctggactttgggcgtcccattgccatggatcacctgctgttaccagctaccacccataacaag

SEQ ID NO: 332572 - DNA, 100 bp, Homo sapiens
ctggaggcttgcactcgcaagagaaggttcccatgatcagtggtgaaatatagtgattttcacctgtgcttccattctgaagttctggaaagaagtactg

SEQ ID NO: 332573 - DNA, 101 bp, Homo sapiens
ccggagggaaggggaagcggcgggctgaactccagtgcacccagttagacttggagcggaaactcaagttgaatgaaaatgccatctccaggctccaggct

SEQ ID NO: 332574 - DNA, 80 bp, Homo sapiens
acccttgacatcaaccagttactatttgtttggaaattttagcattcaggtgccaggaatgcagatgggacagccagtgc

SEQ ID NO: 332575 - DNA, 101 bp, Homo sapiens
tgtgaatgtcgctattgctgccatcaagaccaagaggaccatccagtttgtagactggtgtcccacaggcttcaaggaaagggtcaccaagcttgcaccct

SEQ ID NO: 332576 - DNA, 96 bp, Homo sapiens
gtcctcctctcacccgggccagttttcaaggcgggctgtaactggtggcatttgtcccgggaccagatggagtttcgctcttattgcccaggctgg

SEQ ID NO: 332577 - DNA, 100 bp, Homo sapiens
ctgggagccgcaccacctaacgctggccgacaacagcctggcgtccgccacggctgaagccgacgtagcttctctgaacagacgcatccagctggttgag

SEQ ID NO: 332578 - DNA, 87 bp, Homo sapiens
gacgaccggatcctgaggaggcagctgcggtggcagctgctgagttctcggtgaagaaatgagccgtcagactgctacagcattacc

SEQ ID NO: 332579 - DNA, 83 bp, Homo sapiens
gataagggcgacagcaacagctctgccggctggaagatcatggaagggaagtggttgctgtgtatgttactggtgcttggaac

SEQ ID NO: 332580 - DNA, 89 bp, Homo sapiens
gtgctagtgaaagaatgttattctgtcttcacaaatcgaagggaatttatgctttctcaagatgttgaacatgagcgtctctttgacct

SEQ ID NO: 332581 - DNA, 90 bp, Homo sapiens
atcagtgaacaagctgtctgggctctaggaaacattgcagcagcagtgttgtactgctacttctataaacggacagccgtaagactaggc

SEQ ID NO: 332582 - DNA, 74 bp, Homo sapiens
cccgagaaccgtcagtttgagccagatgggcagcaaggagcgcttccactggcagagccacaacgtgaagcaga

SEQ ID NO: 332583 - DNA, 83 bp, Homo sapiens
gtggaattgaatctgctctaaaggagaccaagcggtggtcataatttttaaaaaggaaatggacccagtgactcagctctata

SEQ ID NO: 332584 - DNA, 98 bp, Homo sapiens
tcagccccacgtcgccggcctggaggggcgaagaggacgagggggccaaggcttcctccggggcctaccccttgctcaggttcaagaagacagtgaag

SEQ ID NO: 332585 - DNA, 100 bp, Homo sapiens
atggaatgcttgacagagatgagtttgcagttaatgccgggacattctgcttcctgtcatcaccaaagagctgaaggagctgctggagcagaaggatgac

SEQ ID NO: 332586 - DNA, 80 bp, Homo sapiens
tgggggctccctggacaactccgagcaggtgtggacactgccagcggctgcagccgacttggaatgacctgggagacaaa

SEQ ID NO: 332587 - DNA, 82 bp, Homo sapiens
cttaacattgtcaaagactgaactaggaaagaaagcttcttgtgaaaatgccattgtgtgctggaaacctggcaagatggaa

SEQ ID NO: 332588 - DNA, 100 bp, Homo sapiens
gtgagaatgttacaattgagtctgtggctgattacttcaagcagattggtattattaagacctctattgctgagtgcttgacataccttgataatggtgt

SEQ ID NO: 332589 - DNA, 83 bp, Homo sapiens
ccaactggaattttcttgagccaggtaagccaagatgggtgcatacaagtacatccaggagctatggagaaagaagcagtctg

SEQ ID NO: 332590 - DNA, 98 bp, Homo sapiens
gagcttttaagctaacccgggatgctattgagttaaatgcagccaattatacagtgtgatccaagttgatgaagtcagaaggctggtatattttgaag

SEQ ID NO: 332591 - DNA, 100 bp, Homo sapiens
aacagacaagacacttttcagaaagacaggtgtatctcccgaacataaacaagatatcaatgcaagcagtattggattatctctataccaagcagttgtc

SEQ ID NO: 332592 - DNA, 101 bp, Homo sapiens
tctaacttcccagggggcaggcacttactgtttggaaattttagcattcaggtgccaggaatgcagatgggacagccagtgccagaaacaggcccagctat

SEQ ID NO: 332593 - DNA, 75 bp, Homo sapiens
gcattttgcagcactccagagcctgctcaaggtgttgctggaagaagccaaggatttgctctctgactggctgga

SEQ ID NO: 332594 - DNA, 83 bp, Homo sapiens
cttccggggacagccagccctcgctggaccagaccatggccgcggccttcggtgtcgtgaaaactacccctaaaagccaaaat

SEQ ID NO: 332595 - DNA, 89 bp, Homo sapiens
aaaatgacgacgtccttctggaagaggcgaaactggtgtctcatgatgccatcaaaatcccaaagtggtcacctttgtcagaaatgcac

SEQ ID NO: 332596 - DNA, 100 bp, Homo sapiens
ggcggcggccgaggctacagagccggcggcaggggatggcaagatagcggcgcgggagcgtaccgatggagctatgacattgaagagaggaaggttccaa

SEQ ID NO: 332597 - DNA, 83 bp, Homo sapiens
ctgagtggttgtgtggtcgcgtctcggaaaccggtagcgcttgcagcatgaagtcccgggcccagagcccggccagcaggagc

SEQ ID NO: 332598 - DNA, 75 bp, Homo sapiens
ccccaagattccagatgttcctgtggaccccagtccaggttcagcagctggacatggagaaccaacgctcatcac

SEQ ID NO: 332599 - DNA, 100 bp, Homo sapiens
attgtactggcctgctgctggcccgcaggtgcccaccagaagtatgtccgacaagcctggcagaaggcagacatcaatacaaaatgggcagccacacgat

SEQ ID NO: 332600 - DNA, 100 bp, Homo sapiens
gagcgcactctggagggattctggcatcagggaggctttcagccggagaagcgagtttcagctggaaccccagacgcacgggccttgtgctgtcgctgcc

SEQ ID NO: 332601 - DNA, 75 bp, Homo sapiens
gggtttgagtccgcatcgccacagctgaaggctgcgagggactaagagcagatcctacaagattatcaattttgc

SEQ ID NO: 332602 - DNA, 100 bp, Homo sapiens
tctgctgccgctcggtcacgcttgatgccttcaattaagttgcagagttctgatggagagatatttgaagttgatgtggaaattgccaaacaatctgtga

SEQ ID NO: 332603 - DNA, 83 bp, Homo sapiens
tgccaacgccccggtggagaagctgaggtgaaatgacaatggatgctctgttggctcgattgaaacttctgaatccagatgac

SEQ ID NO: 332604 - DNA, 74 bp, Homo sapiens
gcaaattgaaggcacaggaatatccatgtcggcttgtagagagattgcaatgaccactcccgggtcctgctgaa

SEQ ID NO: 332605 - DNA, 100 bp, Homo sapiens
cccaagccgcggccatggacctggcggatccggcctgccctggcccagctcaacacctgatttcgaaagatggatactatgatgctgaatgtgcggaatc

SEQ ID NO: 332606 - DNA, 49 bp, Homo sapiens
ccgacgtgcagcctggcagtgcagtggatgtttcgtctgaactcacttt

SEQ ID NO: 332607 - DNA, 73 bp, Homo sapiens
cctgaaccccaaggccaaccgcgagaagatgacccagcggggtgggcgcggagaagacctgccggagccatgg

SEQ ID NO: 332608 - DNA, 100 bp, Homo sapiens
cggctagaggaagaggcgttgcggcgaaaggaacggctgaaggccctacgggagaaaaccgggcgcaaggccaaacgtaccaagaaagtcgggatcgtcg

SEQ ID NO: 332609 - DNA, 100 bp, Homo sapiens
cagcctgctaggggctgaattctgactcagccatttactaactgtgtgaccttagctgaattcttgccgccaggatggggaaacagaacagcaagctgcg

SEQ ID NO: 332610 - DNA, 74 bp, Homo sapiens
cagctcgagaaggagctgcagggccaggttgcctgtgatttgcttcggaggattattcgtatcttgaatctcag

SEQ ID NO: 332611 - DNA, 100 bp, Homo sapiens
acggtagcagcagcatggccgcgatctatgggggtgtagagggattttaccaaatgttgcaagaactctggagttcttatggtagtaaaatgccggaaag

SEQ ID NO: 332612 - DNA, 100 bp, Homo sapiens
gcggcggcggctgctgctgctgctgcccgcgtccgaggctcgcgggcggcgggcccgggtgcaatggatgagcttcatagtctggatccaagaaggcaag

SEQ ID NO: 332613 - DNA, 96 bp, Homo sapiens
catctctctagaccataaaaataaaaaacatatccgagggtgtcctgttacttccaagtcatcaccagaaagatttggcctggcacgtgggcacct

SEQ ID NO: 332614 - DNA, 100 bp, Homo sapiens
cacgtttctatggtgcagaaattgtctctgccttggactatctacattccggaaagattgtgtaccgtgatctcaagctccaagactgccctgcgcactg

SEQ ID NO: 332615 - DNA, 100 bp, Homo sapiens
gcgtcggccggaggacaccccatcgtgcagcaccagaaatgtcagcagcccaggacacccagccccttggtcttggaggggaccatcgaacagagctcgc

SEQ ID NO: 332616 - DNA, 75 bp, Homo sapiens
gaaaaaggaagactctacacccttctcgttattcaggttaaagaattgcccacccttaaggatatggactttctc

SEQ ID NO: 332617 - DNA, 95 bp, Homo sapiens
gggagccgggccctcccctcaggaacgtgtcccggggccgacccggcccgtagtgtggaagcagcttcaggtctgccatcatggatgttctcgca

SEQ ID NO: 332618 - DNA, 100 bp, Homo sapiens
cacgcgcctgcttcccgtctgcgcgagtccacgcagctccccaggttacctgtcctgctgccgattcctggatgacaatcagatcgtcaccagctctgga

SEQ ID NO: 332619 - DNA, 101 bp, Homo sapiens
cttccccagctctgcagccacatactatccgtttgttcaggaaccaccagtgacagaatgccactgccgccaggagccctgtaacatcagccatcgtcaac

SEQ ID NO: 332620 - DNA, 74 bp, Homo sapiens
ggatcatgtctgcgagccaggattcccgaacaaggacggttcttacacaggcttcatcaaggttcagctgaagc

SEQ ID NO: 332621 - DNA, 74 bp, Homo sapiens
ctacgtgcacaacatcacccgcaaggttcgagaacttgtcttggacaattgcaaatcaaatgatggaaaaattg

SEQ ID NO: 332622 - DNA, 75 bp, Homo sapiens
aaatattgaagcactggacaagggcttaaaagacaaccttcttgcttctgggacatccagcctgacagccaccaa

SEQ ID NO: 332623 - DNA, 131 bp, Homo sapiens
ctcaaatataagaccttctccctttgaagatctgaatgccagaagagtctacatgcaaagccaagccaatcagactccaagcaaaggctaccaagaaacctcatgaagtgaaacaggactttgagaagttc

SEQ ID NO: 332624 - DNA, 82 bp, Homo sapiens
cttggcagctggacaggcagagtgctgatgtgaaaaataccacgacaaaaccaccctagagaatggtgttgaacgcgtgtgt

SEQ ID NO: 332625 - DNA, 75 bp, Homo sapiens
actctgtcgctcttgtgccctagcaccccgagaaccgtcagtttgagccagatgatgtgtcttgctgaatcaggg

SEQ ID NO: 332626 - DNA, 100 bp, Homo sapiens
cataggaggaaaattcatcatctggacccctcgtccagtcattgtggaacccatggagcagtttgatgatgaagatggcttgccagagaagctgatgcag

SEQ ID NO: 332627 - DNA, 101 bp, Homo sapiens
gatcttattggggggagtataaagatgctgcagttggagaagaaacttgaacgtgaacttgaggatgatgcacgagttattgcttgccggttccctttccc

SEQ ID NO: 332628 - DNA, 75 bp, Homo sapiens
gtgaaggagttcaggcagctggccaacagtggcaaatgagagtccggagtgttgtcatgtgaagcctgccatcca

SEQ ID NO: 332629 - DNA, 100 bp, Homo sapiens
accccctcctggtatcagtgccccgggaccgcttcacctgggagggcctgtataacgtcctgatgtaccggctctcatggagtcttgctttgttgcccag

SEQ ID NO: 332630 - DNA, 80 bp, Homo sapiens
tgagggaccgcggggttagccactgctggctgcttccagtgttcgccgagagtgtcaacagcatctccaccctggagcct

SEQ ID NO: 332631 - DNA, 79 bp, Homo sapiens
tcgggatttacgtggagatcaagcgcagcgatgttgatattcactgatggactccaaagaatcattaactcctggtaga

SEQ ID NO: 332632 - DNA, 82 bp, Homo sapiens
cgcaaggtcgccctcaaggccatgatcaaaacagtccttagccaggatggaggctgttgtgaacttgtaccaagaggtgatg

SEQ ID NO: 332633 - DNA, 100 bp, Homo sapiens
tagaaactcgctctaaagacggaaccgccacagcactcaagtgagccctattcccagaggcaggtggtgctgaccctgtaacccaaaggaggaaacagct

SEQ ID NO: 332634 - DNA, 100 bp, Homo sapiens
ccttctttgagattgatggacgtaagaacaagaaaccagcctggacaccaagtctgtgtcagaaggccacctcaagaggaacatcgtggtgaagaccgtg

SEQ ID NO: 332635 - DNA, 100 bp, Homo sapiens
gaggcattgctagagctccagggccggcttcaggaggcccaagacaccacagaagccctccgagcccagatccaagagctcctgtctccccaggagcccc

SEQ ID NO: 332636 - DNA, 50 bp, Homo sapiens
cacctgaaggatctgacttccagaagtgatcctgcagcatatcctgacat

SEQ ID NO: 332637 - DNA, 100 bp, Homo sapiens
cactgcagtgggcctctcctcccacccccgagctctcagccactccctagcactcacaggttttgcagccactcttgatgatgacaaaccttggtactcc

SEQ ID NO: 332638 - DNA, 100 bp, Homo sapiens
agttggcattgcctgtggtcagacttcatccatggctgttctggacaatggcgaggcctatcgctggatgattgactccagagatgacttcacagaggag

SEQ ID NO: 332639 - DNA, 75 bp, Homo sapiens
ggacaccagccgtgtgcagcctatcaagctggccagggcacgtgtggttctcaaatataggcattctgatgggaa

SEQ ID NO: 332640 - DNA, 90 bp, Homo sapiens
gtggtgttgctttccctgctgtgttccttcgctcgcgggacacacagtccctgcatcccatgactcggagctgatggccttcatgacgag

SEQ ID NO: 332641 - DNA, 97 bp, Homo sapiens
atttagttctggggagcgcctcgtcgacatgagtgatgtggaggaaaacaacttcgagggcagaatgaagaagatgactttatgtgtaagaaggcgg

SEQ ID NO: 332642 - DNA, 100 bp, Homo sapiens
cctcaccagccggaaagtacgagtcggctcagcctggagaacaactctgctcatggtgattacatgcaaaataacgagagcagcttaatagagcaagctc

SEQ ID NO: 332643 - DNA, 75 bp, Homo sapiens
gagttagagagagggatggtgtacatagtggaatgtcatgggatcacccttcttccccagttcttgggcatgtac

SEQ ID NO: 332644 - DNA, 99 bp, Homo sapiens
gctgcggctcggacgccagcggacacgcgggcgaggcacttaagtattcatcgaagagtcaccccagtagcggtgatcacagacatgaaaagatgcgag

SEQ ID NO: 332645 - DNA, 80 bp, Homo sapiens
atcctatatggcactcagttcgtcctcagcacgctcagcttggcaggtcctaggcctacttacaagcctccagtctcaaa

SEQ ID NO: 332646 - DNA, 100 bp, Homo sapiens
accagccctgggcagcgagctgcaaaattttgctacttgagaagatagaacatgatgacatctgcaataaaactttgaagattacagattttgggttggc

SEQ ID NO: 332647 - DNA, 80 bp, Homo sapiens
cgcccagcgcgcccgtggccgctgccgcctccgccccagagttttgccgaattgacaagcccctgtgtcacagtgaggat

SEQ ID NO: 332648 - DNA, 74 bp, Homo sapiens
ggtcctttatatagaagggagagtagtttctggaactaatgcaactgaagtatcatgagaaagctgcagacaaa

SEQ ID NO: 332649 - DNA, 75 bp, Homo sapiens
ggccgagatggctaagaagtccatgccaggaggtcgtctgcagtcaggaagtcagcctcataccaaaccatccgt

SEQ ID NO: 332650 - DNA, 100 bp, Homo sapiens
agagagtgcgcagaaggattccgggagcacagttccgccgagtgcaagttcttcagtctgactgagacaccagaggattacactatcattgtcgatgagg

SEQ ID NO: 332651 - DNA, 50 bp, Homo sapiens
gttccgggccgtggcggagcagtgtgaaatcaaagttgcacaacccaaag

SEQ ID NO: 332652 - DNA, 96 bp, Homo sapiens
gccggagttgcataagggagatattgaaaaggaagatcaggccaaccccaaagaagaagtgaccaaggaggagtttaaactgaatgaacaacctcg

SEQ ID NO: 332653 - DNA, 100 bp, Homo sapiens
agctcagttatggcacacacagtgggacctagacaaagggagagggtgaccgacatcccaactagtcaagatcccacggcaagaggacttttgataaata

SEQ ID NO: 332654 - DNA, 101 bp, Homo sapiens
tgccccagaaccggtcgaaaaccgtgtatgagggattcatctcggctcagacttaattcagtgcacaaatgagatgaatgtgaacatcccacagttggcag

SEQ ID NO: 332655 - DNA, 75 bp, Homo sapiens
cagatatctgcactatctacttaaatcttgggtaccccaatctgaagtcagtaaatgaactaatctacaagcgtg

SEQ ID NO: 332656 - DNA, 83 bp, Homo sapiens
ggagaagccgcccaaagaactgagttgtctgctggttctcagcttgaagaagattctgcagtccttattgatcctttttcttg

SEQ ID NO: 332657 - DNA, 98 bp, Homo sapiens
ggccaccctccttcctgcgggcacccagctggtttgacactggactctcagagaaggaagaggcccagcagaagggactcgctgagccaccccccgcc

SEQ ID NO: 332658 - DNA, 96 bp, Homo sapiens
tgacaccactctggaggttgagctatgaagaacagctcaaggaaatgcttccagactgcacacttttacttagaggacagtacatcccctagagtt

SEQ ID NO: 332659 - DNA, 100 bp, Homo sapiens
gcgagtttccgatttaaagctgagctgcgaggaaaatggcggcgggaggaactatcgtgagcataggtgaccctaagaaaaaatatacaagatatgaaaa

SEQ ID NO: 332660 - DNA, 75 bp, Homo sapiens
ccacagcaagttcatggtcacggagaaggcagcctacatagtccacaggtcctggctaccctgggaagagacaag

SEQ ID NO: 332661 - DNA, 50 bp, Homo sapiens
gcctagcgtcctggaattacttcaatcaatatctagatcaccatggcgac

SEQ ID NO: 332662 - DNA, 90 bp, Homo sapiens
agagaaactcagcgctggggaagaaggatcaatgtgactctaagaacaaatggatgaatgaatatccatatgaagagaaaaacaataaag

SEQ ID NO: 332663 - DNA, 97 bp, Homo sapiens
ggttgccggagagaagaggattggtcctgcttttaagcctagctgaaattcttttcaaggttactggagttggctataatcaatttggggaagtgat

SEQ ID NO: 332664 - DNA, 50 bp, Homo sapiens
tacttgctgtagatgaaaatggattggaacatcagttaacatctgaccac

SEQ ID NO: 332665 - DNA, 100 bp, Homo sapiens
tgtaccattccgacgttacaatggtggagttggcaggtgtgcgcaggcaccatgttccccgcgggcccccccagccacagcctcctccggctccccctgc

SEQ ID NO: 332666 - DNA, 74 bp, Homo sapiens
tcaccgagagccgggtcctccagaacaccaggcacccgttcctcactgccttcctggatgctctgcagaaccag

SEQ ID NO: 332667 - DNA, 95 bp, Homo sapiens
gcacctggatgtgcagcctgcagccctggaggacggctgggacagcgagcccttcaccctggtggagcgagacgagcggttctggtgaggttgga

SEQ ID NO: 332668 - DNA, 90 bp, Homo sapiens
cgatgcaagtatttcatacacctactgtgggacagagcagaatgggctgatatagatccggtgccgcagaatgatggccccaatcccgtg

SEQ ID NO: 332669 - DNA, 100 bp, Homo sapiens
attgcctggcaggacgtgaaggggaagaggcccaccctggagtaaccctcactggagaatccagagctgaggagtacctgtcatttgcctttgagcattg

SEQ ID NO: 332670 - DNA, 75 bp, Homo sapiens
cacaggatgaacatccgaagacaatgttctccaaagataagcatgactttgttcgacgagaccggccactacgtg

SEQ ID NO: 332671 - DNA, 100 bp, Homo sapiens
cgggtgcacaccatcagcgcagccttcgaggcgctcaggaagcaggaaactactttgcttcgcactttttcatgggaggagagaaattcgacacccccca

SEQ ID NO: 332672 - DNA, 100 bp, Homo sapiens
gggagggggtcccgccagcgccgtgacgtggactacagtgacgccctcacggagaagcagtggctaaggaaataaactatcaatcttgcccagactggag

SEQ ID NO: 332673 - DNA, 82 bp, Homo sapiens
ttttgccttaattgatcaactaattgaaggacatcagtggctggaaaataatatagagatgctgttcagttaaatgtgattg

SEQ ID NO: 332674 - DNA, 75 bp, Homo sapiens
ccggcccgcgggtctacttcctcaaagcagatcaatgacaacagccattggaagcttaggaaaagcgaatgtaac

SEQ ID NO: 332675 - DNA, 75 bp, Homo sapiens
ttggagtcacacaagctaaagacgggccattttccagacctcatccaggatcaacggccaccccgggaagtccac

SEQ ID NO: 332676 - DNA, 75 bp, Homo sapiens
aatgaagctgctgatgaaatagcaactggagctcagaacattctagtatgccagtagaaaaaaatatcactttag

SEQ ID NO: 332677 - DNA, 76 bp, Homo sapiens
cttacatctaaagagctagggaggatagcagtgagattcacttcaaagtgaaaatgacaacacatctcaagaaact

SEQ ID NO: 332678 - DNA, 75 bp, Homo sapiens
gctgttgctcttctccgccgcggcactgatccccacaggccacagacctccaccagcacgaagtggacatcgttg

SEQ ID NO: 332679 - DNA, 75 bp, Homo sapiens
tcgaacccgcctgcgatggggcgagaaaggtcccactgcagccctccaagcaggcctccggtgtggctgtctctg

SEQ ID NO: 332680 - DNA, 87 bp, Homo sapiens
cccaccattatttcggtgagggggcaacgctaagaaggggatactggtatcgagaaccttccctgcgaacttcagaggaacttccag

SEQ ID NO: 332681 - DNA, 75 bp, Homo sapiens
gaaagaacctggaagacagaggctggagctgcagaaccttggcctgaaaatgctacattatatcagcaattgaaa

SEQ ID NO: 332682 - DNA, 88 bp, Homo sapiens
tcgtccgttctctcaggctcccgttcaggtttttagaacttcagccataaaaatgggcagaattttccttgatcatatcggtggtacc

SEQ ID NO: 332683 - DNA, 90 bp, Homo sapiens
cgccagcttcctgcaggcccagagccggcatgaactctcccaacgagtcgggtttttcgttggaatatacgttgcacatttatggcgatt

SEQ ID NO: 332684 - DNA, 95 bp, Homo sapiens
cgggacccggttccccggcccacagtgggggtgtgcaaacccgagagaactggttaacaagcacaagccctggctggagcccacctaccacggca

SEQ ID NO: 332685 - DNA, 100 bp, Homo sapiens
ctcggcttccagctcaatcctgccggttgcgccttcttcctggacatgaccaactggtcagatgtcatgtaatccttcctttggtggcatcggaaaggga

SEQ ID NO: 332686 - DNA, 109 bp, Homo sapiens
ctagcgcccccgtccccgccacccgtgatcgtgcgccgaggcccgcgaggggtcgccgcccagctctagccggcccggtccttggactgaaagaatgcaccaggggctc

SEQ ID NO: 332687 - DNA, 100 bp, Homo sapiens
agcctggtcaatttgtacctgcaggcctcctacacctacctctctctggccaccttcatggtgttccaagccttggctcaataccaaaaggacgcccctg

SEQ ID NO: 332688 - DNA, 99 bp, Homo sapiens
cgatcggaagtaaatcttgcccaaagaaatgtagccttggaccgagacatgatgaagaaaggtgaccctggcagcaaccccaacaaacgccagaggcag

SEQ ID NO: 332689 - DNA, 82 bp, Homo sapiens
gagtgcgtcaaggactccccgcgcttcagctgcctgtggaggaaccgattgtgtccacagatgaggtcatcttcccactcac

SEQ ID NO: 332690 - DNA, 80 bp, Homo sapiens
ccatagctgtctggcatgggcctctccaccgtgcctgacctgctgctgccactgcctgcccactaaggaggaggagtcat

SEQ ID NO: 332691 - DNA, 75 bp, Homo sapiens
tggggcaaaaacattcaagaatgagagcgagaacacctgtcaaggtcaccttccgcaaccctgtcattgagagga

SEQ ID NO: 332692 - DNA, 90 bp, Homo sapiens
tccgccctgggtcctcctgggccatctctgtgggaagggacagactcgcagcagccacatcctagggcggctgtgagtgtggaccccttc

SEQ ID NO: 332693 - DNA, 75 bp, Homo sapiens
ttcattttgaatgaagtgcgtaattacctgagttgtgatgttgaaggttgggggccgtcccgctcctaaggcagg

SEQ ID NO: 332694 - DNA, 83 bp, Homo sapiens
acttcgactctcaaagcaataccaggatagctgttgtttcagagaaaggcaccatgactcctgtgaggatgcagcactccctg

SEQ ID NO: 332695 - DNA, 100 bp, Homo sapiens
gctgttcaaggtgaaggattcatgagtctatataaaggctttttaccatcttggctgagaatgactctgaacaggaagtgcctcctggaaccacagagtc

SEQ ID NO: 332696 - DNA, 75 bp, Homo sapiens
tctgggtgatcatggttcagcgctttagcctcaggaggcagctatccaaggatgcagactcatctgagcgtatca

SEQ ID NO: 332697 - DNA, 83 bp, Homo sapiens
gtccattccgctgtgttgattgaggacgttcccttcacggagaaagattttgaatcatgagcgtcttgttgttcatcgagcac

SEQ ID NO: 332698 - DNA, 75 bp, Homo sapiens
tggtggaagagtggggaccagaaagaacatctgttgggccacttagaacaagccaaaagccttcctccaggcagc

SEQ ID NO: 332699 - DNA, 75 bp, Homo sapiens
agagctccagcagccttgttagggcgtggcctgaggcttggataagtgggggaaagcaggcaggatgggagagtc

SEQ ID NO: 332700 - DNA, 83 bp, Homo sapiens
gatgccatgcagaactgcacactcagtccctctgtgctccaggactccctcaataatgtgacctaccagttgaagattccgtg

SEQ ID NO: 332701 - DNA, 100 bp, Homo sapiens
cagtgttaaaggaacctctacaacgaaggtgaagccacggaagataagggcagctggtggaatttttgaagaaaatggaatctcgaggccccctttcgtg

SEQ ID NO: 332702 - DNA, 100 bp, Homo sapiens
ctctgcccttatggaattggacaaagcagagaccacgcagaggctgcctttggatcaagtccaggaagtgcttcccccaattccagaactataagttact

SEQ ID NO: 332703 - DNA, 75 bp, Homo sapiens
tcactgacgtggacatcgtcttcagcaagatcaatgtggacgaatgtggaacctcgctctgtggctgtgttccct

SEQ ID NO: 332704 - DNA, 100 bp, Homo sapiens
cgacctgcagggccagccctacgatcattgagaagcagccaggccacattcggagcagggttttcagggaggtggagatgctgtaccagtgccagggaca

SEQ ID NO: 332705 - DNA, 75 bp, Homo sapiens
gttagtttctgcgacttgtgttgggactggcattgaatgccccagaggagcccgaaacctcccaggcttggtgca

SEQ ID NO: 332706 - DNA, 75 bp, Homo sapiens
gaccttccggagcttctcagaagacagagggttttcttttgagctacagagggccggagctggagatgtggtctc

SEQ ID NO: 332707 - DNA, 75 bp, Homo sapiens
catcaagatcgagttcatcgggcagatcgcttttatgatggtcaacagcctgtgctggctatcacagatcctgac

SEQ ID NO: 332708 - DNA, 97 bp, Homo sapiens
tgcatcaacccctctaactggtgtgatggcgtgtcacactgccccggcggggaggacgagaatcggtgtgagcgcatcagcgaggaggtggggctgc

SEQ ID NO: 332709 - DNA, 50 bp, Homo sapiens
ttggggaacatgatctgttaaaggttgtctgcattcaaaagagcattcta

SEQ ID NO: 332710 - DNA, 90 bp, Homo sapiens
tccagttttttaagaagggacaaaaggtgaccctggcagcaaccccaacaaacgccagaggcagccccctctcctgggagatcaccccgc

SEQ ID NO: 332711 - DNA, 75 bp, Homo sapiens
cgtgcctggccccacgggactgcattataagccaaggccacctttgatgccatttctaagacctacagctacctg

SEQ ID NO: 332712 - DNA, 75 bp, Homo sapiens
atttaagaggggtgcagatcccggaatgcctgaaccaactgttttgaggagaatcttatttatactgctgatcca

SEQ ID NO: 332713 - DNA, 90 bp, Homo sapiens
catcatgaaggcctgttttgaagagaaggggaataagactgcatctgttcatatgagacaaatgctgtgcttcatgaagttaaaagagag

SEQ ID NO: 332714 - DNA, 100 bp, Homo sapiens
gcaaggtggggactgggcacatcatcaatacgtttgtagaagactatgaacctaccaaagctgacagttatagaaagaaagtggttcttgatggggaaga

SEQ ID NO: 332715 - DNA, 73 bp, Homo sapiens
tggcaaactccaggagtctgttccagaccctgagctgattggtggacattgaagtggacctaattcggttttc

SEQ ID NO: 332716 - DNA, 51 bp, Homo sapiens
gatcgacaccctctacagcaaggcatttcatccttcatgaagccattcagg

SEQ ID NO: 332717 - DNA, 82 bp, Homo sapiens
ctccagcccggcccggcagcgacatggaagcaatggctgccatccggaagaaactggtgattgttggtgatggagcctgtgg

SEQ ID NO: 332718 - DNA, 75 bp, Homo sapiens
gcaaggacatcatggacttgaagcaggagctgcagaacttggtcgccatcccagcaaccttgggaggcaattctg

SEQ ID NO: 332719 - DNA, 100 bp, Homo sapiens
gaagcgggaggcagttgcagctttcagaatctccggcctgtgaaactgtgaggggattcggccaagacgtcctcttccctctgcctcccacccaggccac

SEQ ID NO: 332720 - DNA, 75 bp, Homo sapiens
tcttcagtcacaaagagttacatctcatcacagacaaatggtgtaaattttgataccaccattgccgccttcccc

SEQ ID NO: 332721 - DNA, 51 bp, Homo sapiens
gcgaggaaagggaaggagcaagccgtgttagagatgtttatgattacttcc

SEQ ID NO: 332722 - DNA, 100 bp, Homo sapiens
ggggcgccataaacgcccccaatttcccagctgctaaaggaagaggaagagttgtggaaagtaaaaatgtagccctaccaaaaggaactattgtactggc

SEQ ID NO: 332723 - DNA, 75 bp, Homo sapiens
gagtgcgggagatgccatccgtgccatctacgctgaatgagatgtgcctggccacacaacagctttctaagcaac

SEQ ID NO: 332724 - DNA, 90 bp, Homo sapiens
ctgtgatcccccatacctggcctgccgtctcctggctgctgcttgcatatggggcaatggcggcttcctgtgttctactgcacactgggc

SEQ ID NO: 332725 - DNA, 51 bp, Homo sapiens
gactgcagccgcaagtcctgtgtaccagaagtttttgaagagttaactcac

SEQ ID NO: 332726 - DNA, 100 bp, Homo sapiens
tttccacagggaattgagttggactacatcgacacagagatgctgctgtgtgcggagaacgtgaaccaagacaacctgctatcctatgcccgggaagctg

SEQ ID NO: 332727 - DNA, 82 bp, Homo sapiens
cgagctggggttggacgctgccagtttgcacagcagcagaagtccattggaatattaagcccaggagttgctttggggatgg

SEQ ID NO: 332728 - DNA, 100 bp, Homo sapiens
caagagagaaagagtggatttcagcctgcacggatggtcttgaaacacaaatggtttttgctttatagcaggccaaatcgactcttgtctggtgtgccac

SEQ ID NO: 332729 - DNA, 99 bp, Homo sapiens
gcgctcgatccagcaccatggggaagcgggacaatcgggtgaacactgagctgaaggttgaagtggagagcttgaaacgagaactccaggacaagaaac

SEQ ID NO: 332730 - DNA, 60 bp, Homo sapiens
ctagaaaagaagtctaactatgaagtattagaagcagcccgacggccatggaggctgaag

SEQ ID NO: 332731 - DNA, 75 bp, Homo sapiens
cccagaggcgcctcctccacaccccccgccgcagcagcaccggcgacagggcgtctctggccgagcctctttttg

SEQ ID NO: 332732 - DNA, 76 bp, Homo sapiens
atctacctgctcaacccctgtcacctggtcaccatgatgcatgtgattgatatgcccgagcacaaccctggcaatt

SEQ ID NO: 332733 - DNA, 75 bp, Homo sapiens
gaaataatgggcaatcaggggacaatgtagtaaaggatgcatcatctgcagacatcagaaaagcatatcgtaagc

SEQ ID NO: 332734 - DNA, 75 bp, Homo sapiens
gtggttcccagtgacaccaacattctggacacgtgggcggccattgaaactgctctggactgcctgaaaagcgcc

SEQ ID NO: 332735 - DNA, 84 bp, Homo sapiens
ggcggcttccaggcgcactaccgcgttccagggtctccctccactgctgtagtaacccgggtccggggcctcggtggtgctcct

SEQ ID NO: 332736 - DNA, 75 bp, Homo sapiens
gctcggagaaacaggcgccgcgggctccgcgcccggccggacccgggcccgagcagaaagatgaaggtcttagaa

SEQ ID NO: 332737 - DNA, 74 bp, Homo sapiens
cctgaagggcaaaggtcaaggggccaccacagccgacggcaaaggcccttcctcaccagactctgtcctgagac

SEQ ID NO: 332738 - DNA, 98 bp, Homo sapiens
agcaagagttgcggcagaagcatgcggcccaggttcgccagcagcccaagagcctcaaagaggcatacaccatacatggtacagccagagtaccgaat

SEQ ID NO: 332739 - DNA, 75 bp, Homo sapiens
gagacgacgctgctgggtccgctgagcggggcgacccgaggcttctgcttcagtttacccaacctcagcaaacat

SEQ ID NO: 332740 - DNA, 82 bp, Homo sapiens
aaggattccaagtaactcttatttgctgtcccctttcctccaacccaacggcttactttcaaggaagtatttgagaatggga

SEQ ID NO: 332741 - DNA, 90 bp, Homo sapiens
tatccctttggctccgtccagcggtcaagctccagtgtctcaaaggagatagcagatctcacagaacaaattgctgaaaatggcaaaacc

SEQ ID NO: 332742 - DNA, 132 bp, Homo sapiens
caaccgctccggcaacgccaaccgctccgctgcgcgcaggctgggctgcaggctctcggctgcagcgctgggaggcactggctacaattaggcttctcgacgtcctgtgcgaaatgactgtgaatactgagc

SEQ ID NO: 332743 - DNA, 74 bp, Homo sapiens
cccactctgcggagttagcagtcacgacctccagcacaggtctccaggaaaagttgggctttcaacattcaagg

SEQ ID NO: 332744 - DNA, 75 bp, Homo sapiens
ccttattggtgtggacgttgtctaaatttcggtagccatggcacaagaatataatttgatggtcctcgaagattt

SEQ ID NO: 332745 - DNA, 75 bp, Homo sapiens
gccatgtccatggaggaccccttctttgtggtgaaaggacaaatttacatgtattggagaccagaccagaagccc

SEQ ID NO: 332746 - DNA, 98 bp, Homo sapiens
caaaagatggcatctggctggttcaggacagagcgggatgccaccagcttgtccaaagggaagttccaggagctcctggtgggcatcgttgtggagaa

SEQ ID NO: 332747 - DNA, 74 bp, Homo sapiens
tttgcactccttggcatttctttctttgcacttcctgccctgagatctgtatctgtggacctgaatgttgatcc

SEQ ID NO: 332748 - DNA, 83 bp, Homo sapiens
gtatttgaagtctgtgtcaaacatccatatcataagtggaattttggagatattcaaaggtgtcagagatggctgaagatggg

SEQ ID NO: 332749 - DNA, 100 bp, Homo sapiens
agctgctgcaggcaaagaaagaaattgaaatgcactctattaatgacaaacaggcgtgtgcgtgcagacggagacagtgctgcggcaggccattgccgag

SEQ ID NO: 332750 - DNA, 75 bp, Homo sapiens
gcagcagcaacagcacggaaacggtgcggtggcggcggcagcggcggcccagatcaacagtacaaattctgaagt

SEQ ID NO: 332751 - DNA, 51 bp, Homo sapiens
gtccggagccagccaacgagcgaaaaatggctacaaacttcctagcacatg

SEQ ID NO: 332752 - DNA, 82 bp, Homo sapiens
tgtgcgagtccatagctgaagaggagcgccagatggtggaggaatacacttatttatgaagggatgttcgtctaaccccaga

SEQ ID NO: 332753 - DNA, 75 bp, Homo sapiens
aacacctaggaagggagaactgatcatgcatgccccgcggtccagggacaggttcacagcgccgtccttcatcca

SEQ ID NO: 332754 - DNA, 76 bp, Homo sapiens
ggcatcctcttgggcatattctctgctcaggctcaaatgaccatactagctccgtggatggccgcgtgagacgcta

SEQ ID NO: 332755 - DNA, 75 bp, Homo sapiens
atcttgaatcagaaattgagaagctggcgtcgattagcaaggtaaaagtaacagaaccatggctcagtttccaac

SEQ ID NO: 332756 - DNA, 101 bp, Homo sapiens
ctgaagtcgcccgtgggggctgagcccgccgtctacccgtggccgctgccggtctacgctcttgtcaggatggtgaagctgttcatcggaaacctgccccg

SEQ ID NO: 332757 - DNA, 100 bp, Homo sapiens
attgggagcggccgagccatcccaattaaacaggcgccttcaggaggaagaccagcagtttagaacctcatctctgccggccatccccaatccttttcct

SEQ ID NO: 332758 - DNA, 100 bp, Homo sapiens
agtggtggtggcagtaccagtagcaccagcagtggcagcttcgaagccagcccaggaatgcacggtgcagagtggtgtgcacaggagcctgactgcagag

SEQ ID NO: 332759 - DNA, 50 bp, Homo sapiens
gggatagccctggtcctttctccatgcacagccagagaacaacacatcac

SEQ ID NO: 332760 - DNA, 90 bp, Homo sapiens
cacagccaaggaacagaattagaagaaaaggaaccctggcctgagagcgaaaagctgttgctatatgatacagtccagagtgaactagag

SEQ ID NO: 332761 - DNA, 82 bp, Homo sapiens
ttgccgggagccgggcgcggctctgtgtggactcggagaaacgcgggttaatttggagtggcccctggagtcagtttcctac

SEQ ID NO: 332762 - DNA, 82 bp, Homo sapiens
gccgaagaagcatcgttaaagtctctcttcaccctgccgtcatgtctaagtcagagggaactgctcgcagaaagaagaaggt

SEQ ID NO: 332763 - DNA, 75 bp, Homo sapiens
tcgaacggctcccacagccgggcgttgggggaaaggtgctggggagtcagggaagagcaccatcgtcaagcagat

SEQ ID NO: 332764 - DNA, 100 bp, Homo sapiens
cctgtcaccagtcaacaccacataccagctccgggtcagccgcatggacgattttgtgctcaggacccgtcgccatgggccgtgtgatccgtggacagag

SEQ ID NO: 332765 - DNA, 50 bp, Homo sapiens
cgaaggttcaattatgtggtcaaatggaatgcagtagccctctgggcctg

SEQ ID NO: 332766 - DNA, 83 bp, Homo sapiens
cagtactgaattatcacttctggcagatgagactcaaaagcctcgaaagtttgactgtgaacttccagatatttcattaaaag

SEQ ID NO: 332767 - DNA, 101 bp, Homo sapiens
taatattaataaaatccaaaactaaatcaaaccaatcaaggcaccaagacgcaggggggatatccacagttcgatcaaggaattgagtgatctacagcgcg

SEQ ID NO: 332768 - DNA, 75 bp, Homo sapiens
cagagaccatattctacggggctttcagcaaatcaaagccagcctccagggtcgtatagacctccccctcctatg

SEQ ID NO: 332769 - DNA, 95 bp, Homo sapiens
tctctaggaagaagccgtgtggacagtctgaaatcaaaaatgtgcctgtggctgccttgcctgtaactcagcaaatgacagaaatgagcatttca

SEQ ID NO: 332770 - DNA, 100 bp, Homo sapiens
gatgtgacaggaccatggtgcccagataccccatcagcctgagtctcttaaaggcctttatacacatatgtctacacatagggatttggatgatctcggg

SEQ ID NO: 332771 - DNA, 100 bp, Homo sapiens
gagcaagcggaggacctacgccggcctggaggccatgtggaagtgttacatcaccttttgcttggaaagatttactaagaagtcaaatagtgggttcctt

SEQ ID NO: 332772 - DNA, 75 bp, Homo sapiens
gccggcagggtggacggtgggctcgtatggacctgtctgccaatcaggacgaggagaccgaccaggagaccttcc

SEQ ID NO: 332773 - DNA, 103 bp, Homo sapiens
cgtcgaggaggcgcaggagactgaccgcaacggcagggtcaaaatgcagatcttcgtgaaaacccttaccggcaagaccatcacccttgaggtggagcccagt

SEQ ID NO: 332774 - DNA, 100 bp, Homo sapiens
agaggaagtagccaaagagcaactaactgatgctgacaccaaagggcaagaggattatgacagattacgaccgctgagttatccacaaacagatgtattt

SEQ ID NO: 332775 - DNA, 83 bp, Homo sapiens
gtttgtggcaagacaagctcagaactgagaagctgtcaccacagaatgattacggacctgaagccaaagaacaagatgcgcta

SEQ ID NO: 332776 - DNA, 75 bp, Homo sapiens
accttttccggggaagccctggtcggagcgagccggtgcacaggaagagtctcgctgccagcgctgcatctccga

SEQ ID NO: 332777 - DNA, 101 bp, Homo sapiens
gagatttccttcgtccctgacatcatctctgtgcactgataataaccctgcaggatgatcctagtgctccccacaaaatccaggaggttctcaagtcctgc

SEQ ID NO: 332778 - DNA, 100 bp, Homo sapiens
ggagcgggagccggagcgagagcgcgcgggcgcggccgacagcaagccctcgcagggagcctggtagcaggggccggaagcacagtagagacggacctgt

SEQ ID NO: 332779 - DNA, 75 bp, Homo sapiens
cacaaagtcgccaaggtgcggtctttcgaccactccggaaagcctggtccgacccccagtggcactaacgtggga

SEQ ID NO: 332780 - DNA, 101 bp, Homo sapiens
gaggcggtgaagtgccatcttcggctaggtcgtcacaggctccggctcatggcatcaagtggcatccatcataaggttgaagatgaaatccactgaggagg

SEQ ID NO: 332781 - DNA, 83 bp, Homo sapiens
aggcgtcggcttgtataacctgaaaacgctcctgtttttctcatctgtgcagtggacagggaaaaatgcattttttgtgggag

SEQ ID NO: 332782 - DNA, 100 bp, Homo sapiens
caaaagttccctatgggaaaggaccttcatttaatcaggacccgtcgccatgggccgtgtgatccgtggacagaggaagggcgccgggtctgtgttccgc

SEQ ID NO: 332783 - DNA, 82 bp, Homo sapiens
tggcatctgccggctgctccgcaccccggggtcccaggaagggcggcccaggccgagacgcatccagagctttcgtgaccgg

SEQ ID NO: 332784 - DNA, 110 bp, Homo sapiens
gtagaagcagaacccaaaggaaccatcaccttggagctccttgatttttccagaaaggaggagtcaaggaagcccttagtgaacgagaactcttcaatgctgtttcaggc

SEQ ID NO: 332785 - DNA, 100 bp, Homo sapiens
tgttctgctgctttcagacccccggtctcattctgtcgcacaggttggcgtgcagtggtgtgatctcagctcattgcaacctctgcctcccggactcaag

SEQ ID NO: 332786 - DNA, 100 bp, Homo sapiens
ccgagtcattcagatcgtcatcaaccgggacgacgtgcagggctacgcggccaagactgtgttcgagacagtgacaataccctcccctcccttgggctgg

SEQ ID NO: 332787 - DNA, 100 bp, Homo sapiens
cgctgcctcagggagcccgcgaccgcgccttctcctccgccggtcccatacgcctaatcacacggatgctacagagagatcccaagagaagggcttcttt

SEQ ID NO: 332788 - DNA, 75 bp, Homo sapiens
acttgttgaagagattggctggtcctatacagatgatttcaagctttttagatcagcaagccatcctgtttgtgg

SEQ ID NO: 332789 - DNA, 100 bp, Homo sapiens
ctgaaatcacaatggaaagtcttgacttgactgatacagatccacgggttttagaaaaacaagaattacagcagccaacctatgttgccctgagttacat

SEQ ID NO: 332790 - DNA, 100 bp, Homo sapiens
gcgggagagtgtgcagccgagtcactactgcctgcctgcctgcctgctacgctgactcctgagttctcacaacgcttgaccaataagattcgggagcttc

SEQ ID NO: 332791 - DNA, 83 bp, Homo sapiens
gcactgctttccactcggctcctgtcgtccgttctctcaggctcccgttcagatgaagactggcccatttgcagagcactcca

SEQ ID NO: 332792 - DNA, 88 bp, Homo sapiens
acaacttaaataagtcaaatatacttggagctttaaaaattaaaaggagagagattcgaggacgtttttactgtaagtgttggaaact

SEQ ID NO: 332793 - DNA, 100 bp, Homo sapiens
atccgccactgcgcagggcggctgggcagctatgtcatcaacgggcgcaccaagggccttcatcctagaataatcactgaaggatttgaagctgcaaagg

SEQ ID NO: 332794 - DNA, 75 bp, Homo sapiens
gttaacaaatgtgagattgccagatcaaacagatgatggaggcagcaacacgacaaatcgaggagaggaaaaaac

SEQ ID NO: 332795 - DNA, 101 bp, Homo sapiens
cagcgcgtcgagcttgcgctctttgctgccgccttcctgtgcggggccgtggcggccgcggcgatgactcggacccaggcagtacgccccgaggtgctccg

SEQ ID NO: 332796 - DNA, 100 bp, Homo sapiens
tgtggaccaccaaacagaactttctaatttagccaaggaagatagaatgagtccatttaagtcccaggacggtggaaactagctagtagattgcagccat

SEQ ID NO: 332797 - DNA, 100 bp, Homo sapiens
gtctcagtttacagatgttaagatttggaacttggccacaaatcgcctcacttttctaaactctttcaaaatgaaaatgtccgtgattttaggaatcatt

SEQ ID NO: 332798 - DNA, 96 bp, Homo sapiens
ttatttttcagcgtgaacaagagagattcagttgtggaaattctttttgaacaagataatgaagagcaatcagttgccactttaatattggattcc

SEQ ID NO: 332799 - DNA, 99 bp, Homo sapiens
caggcgaagctggccgagcaggctgagcgatacgacggtgtgatgaatgcagactctgctaccattttggctgtttggatcctcctttgaaaaagtctc

SEQ ID NO: 332800 - DNA, 75 bp, Homo sapiens
caagatggcggcgcagccaccccgcgggatacgcctcagcgcgaacgcctgacagacaatctcagagttggacag

SEQ ID NO: 332801 - DNA, 83 bp, Homo sapiens
ctgcctcctgcgtagcatccggaaacatgtggccctacatcaggaatttcatggcaaggaaaaggaagatggcgccatttcta

SEQ ID NO: 332802 - DNA, 100 bp, Homo sapiens
aggagggcgggcgcagtcgggctctgcaggagcgcgcggagtcactgtgtgcccagtattctgcagacaaacgagaagatgagaagatgtgtgatcattt

SEQ ID NO: 332803 - DNA, 118 bp, Homo sapiens
aagacttagcttttaaattaaaaaggaagctattcaccattgagggagtaactattcccagtcagaggcgctatgtgtattattatagctacctgttaaagaatcatctggattatag

SEQ ID NO: 332804 - DNA, 100 bp, Homo sapiens
gcttagagtacgcagtgacaattgaggacctgcagagcctgtcttccaccgtgacccttgaacactcttcactccctcctggggtccacatttcttacga

SEQ ID NO: 332805 - DNA, 96 bp, Homo sapiens
ctgagagtgttaattctgctcctctcctgggcggcggggatgggagattctgaagcaagtaagccaaaagatgggcaggacgccattgcacagagc

SEQ ID NO: 332806 - DNA, 101 bp, Homo sapiens
gttcgagaagtacacggccagcgtgaccgttggcagcaaggaggtgaccctgaacctctacgacacggccggtaatgagagacccccaaacaaaacgttcc

SEQ ID NO: 332807 - DNA, 90 bp, Homo sapiens
ctacctccccaacggatcgctctcgcccaccgcccgaaccgtgatggtaatgcccgaaggagcagacacggtgtccaggcccagtcccga

SEQ ID NO: 332808 - DNA, 100 bp, Homo sapiens
caagctgacccttggcctcatctggacaatcattctgcacttccagatggacggggagtccgaggaggagcaggagtccgtggacaccggggaggaggag

SEQ ID NO: 332809 - DNA, 50 bp, Homo sapiens
agtcggactgatgaggaagatgaggaaattcacagcacagagtaagcact

SEQ ID NO: 332810 - DNA, 100 bp, Homo sapiens
ctggcgggttgacctcagtctcctggagcttccagccagagggggccgacactactgtgtcggaaccacgtgaatgttgagggggcgacacacaagcagg

SEQ ID NO: 332811 - DNA, 73 bp, Homo sapiens
ctcgatttattcctggattacaggaccagcccggtggcaccctggatctgaccctgatccgtgcccgcctcca

SEQ ID NO: 332812 - DNA, 75 bp, Homo sapiens
cgggagttcaagaagaacactccagaggtattggcatactccacacatctgtaccattcttgagtgatcgcttag

SEQ ID NO: 332813 - DNA, 75 bp, Homo sapiens
tacagtagaaacagcttgcaaagaatacaaacacagttttaagcaggcacagatagatcattatctaggacttgc

SEQ ID NO: 332814 - DNA, 90 bp, Homo sapiens
tttaatttcagtgactgaattaaaaggtgtcaagaagctcagaatgttttcggctttgtgagaaaccttaccatcaaacacgatggccag

SEQ ID NO: 332815 - DNA, 75 bp, Homo sapiens
cttgctggtgcatgcgtcgtcggcctctgggcagcagaagtctgggccaacggtcacaaaagttgtcactgttgt

SEQ ID NO: 332816 - DNA, 75 bp, Homo sapiens
acaccccgagatgagaggagaagagcccagcacaacgaaggtctatcagccacagtctctgcaagtttccaagag

SEQ ID NO: 332817 - DNA, 82 bp, Homo sapiens
ctccaggagttcgtctcttacgtctgcggaagtgcagctgcctcagttcttagcgcagatcaatgtccgagttaccaccatg

SEQ ID NO: 332818 - DNA, 82 bp, Homo sapiens
gtttatgactgcctgcggccaggaggacaggccgtatctgaggaacagcagcctgcactcaagggcaaaaagggaaaggaag

SEQ ID NO: 332819 - DNA, 75 bp, Homo sapiens
cacacgctgatggtgcagcaccgcatgatggtacccaaagtcagatttggagcaagaggtggtggtggccttccc

SEQ ID NO: 332820 - DNA, 100 bp, Homo sapiens
gaaaatgacggttataagaccatttatttctttggagacaaaactatgccagagggatttgttcgtgttgaccgagattatgtgctgaagtctgcagagc

SEQ ID NO: 332821 - DNA, 98 bp, Homo sapiens
gtatgaagtggtgaaggagtgtgtgcagcgagactaattgagcagcgtgatactttgaaagaaacaaatgaagagcttcgatgttcacaagtacaaca

SEQ ID NO: 332822 - DNA, 75 bp, Homo sapiens
cctatgcctgtgctgatccctctcgtctcaaggtgagaagaaatttgtttgtccagaatgttcaaaacgctttat

SEQ ID NO: 332823 - DNA, 110 bp, Homo sapiens
tcgaagaacagctgtggaaagaagttgcaaaacactggatatcctctgagagccaagcaaagaacattaaggaaggaaggaggaatgaggctggatacggtgcagtgaaa

SEQ ID NO: 332824 - DNA, 100 bp, Homo sapiens
aacccctagtctcaagagatcctccagcctcagcctccctggtggacaacgcgtactggctgtggactttccagggacgcctcctgcagaagaacaacaa

SEQ ID NO: 332825 - DNA, 90 bp, Homo sapiens
ccctgttccaggtctatcaagcagcccttctgggtcacccttgcatgaccatcctaaactccatgcacaagtaccagccgcgcttccaca

SEQ ID NO: 332826 - DNA, 75 bp, Homo sapiens
gagggaaaagcgaggcaaggcaggcggtccaagtggtaagaagttcagaagcaagcctcagttggcaaggtacct

SEQ ID NO: 332827 - DNA, 90 bp, Homo sapiens
gttattcgtcagtgaggcggaaattgtggtgtccttgtgtcttggtggatgtcagtgcttactccccatgaaattaaattttacttcatc

SEQ ID NO: 332828 - DNA, 100 bp, Homo sapiens
gacaccccggaagctgggaaatggttaaacccatccagagtaatggctgcggccttacccaggaccctgggggagttgcagctgtatagaatattacaaa

SEQ ID NO: 332829 - DNA, 88 bp, Homo sapiens
aacgcctggctcggagcagcagcctctgagggcgtctctggccgagcctctttttgtggaaaacgacagcagcagcagtggcctggaa

SEQ ID NO: 332830 - DNA, 100 bp, Homo sapiens
ggagctcccacctccgcttacagctcgctgccgccgtcctgccccgcgcccccaggagacctggaccagaccacgtatatttaaagttggagttcgttgc

SEQ ID NO: 332831 - DNA, 98 bp, Homo sapiens
aaaggtgctaagaaagagaatgtaagacaggaaaataattaaatattcttaccgagggcgatgccagtccctccactccagaggagaacgaaaccacg

SEQ ID NO: 332832 - DNA, 90 bp, Homo sapiens
gtggccatctcctcgctgggcatgatcgaggccacagcccaggtcacagtgaaaggcctgtccatcgtcatgggggctgtgctgcgtcgg

SEQ ID NO: 332833 - DNA, 98 bp, Homo sapiens
aaagctcaagatggcggacaaaacgccaggcggatctcagaaggccagttcaaagatcgataaagaattggctagtggtgaatactttttgaaggcaa

SEQ ID NO: 332834 - DNA, 50 bp, Homo sapiens
ccgaagtgcttcagatgtagaggctaactatatgtcagaaagcatcagct

SEQ ID NO: 332835 - DNA, 88 bp, Homo sapiens
agctttgccgccgcgctgcgcaagctcgccaaacaggcggaggagcccagagagctccacgcaggagatcggtgaggagctgatcaac

SEQ ID NO: 332836 - DNA, 97 bp, Homo sapiens
gtcccaccatcaaagagatcagagaccagggctcctgtggctcctgctggtcccatatagaaatcatccgtggccatgcagccttcacgagtgatcc

SEQ ID NO: 332837 - DNA, 75 bp, Homo sapiens
gcagcaggcccctcctgcgcacagctgtcgcctggttgggcccggaaatgggacgtcgcgctttctcagggagcg

SEQ ID NO: 332838 - DNA, 82 bp, Homo sapiens
ttgcctgtgcgcgcgtgcgcggacatggcctcaaacggcaacatgagtgagaatgaggaagaggaaatttctcagcaagaag

SEQ ID NO: 332839 - DNA, 101 bp, Homo sapiens
ttggcctggtgggcccagtcctcggtgcggcgcggccagaaaagaggcacagttagatgaagaaggacagtttcttgtcagaataatatatgatgactcca

SEQ ID NO: 332840 - DNA, 76 bp, Homo sapiens
gtgtggatgtggtgaaggggcttctggacacggggtcactctggtgcccattgaggagttcagcccggagttcgtg

SEQ ID NO: 332841 - DNA, 75 bp, Homo sapiens
gaaacaagtgcgacctctcagatattaggaagaggagcaggacttggatggtgagaaggggccatcatcggaagg

SEQ ID NO: 332842 - DNA, 75 bp, Homo sapiens
gccaaagtaaccagatctaacatgagatggtttcacccaaatatcactggtgtggaggcagaaaacctactgttg

SEQ ID NO: 332843 - DNA, 75 bp, Homo sapiens
ctccatctggaattgaagatgaaactgctgaaaatggtgtaccaaaaccggttggcgtgcagtggtgtgatctca

SEQ ID NO: 332844 - DNA, 100 bp, Homo sapiens
ttcaaaccactgaggatcagattttgaagagagatatgccaccagcatttattaagtttctgctgatgtactccacggttctgtgcagctattacaattc

SEQ ID NO: 332845 - DNA, 82 bp, Homo sapiens
acaagtcagttactgaaaagggccgccatggcatcagatgaaggcaaactttttgttggagggctgagttttgacaccaatg

SEQ ID NO: 332846 - DNA, 74 bp, Homo sapiens
cccgggctgttcaagagaaagagaccaaaatcaaggattttcccagatggagtctcactctgtcgcccaggctg

SEQ ID NO: 332847 - DNA, 100 bp, Homo sapiens
gcagaccagttccagcttggcgtgtcccatgtttttgagtatatccgttctgagacatacaaatagatctagtgaaaagccatttgatgtatgcggtcag

SEQ ID NO: 332848 - DNA, 100 bp, Homo sapiens
tcacaggacagtctggcctctaactgctctgccaaagaaatcgccgtgccgtccctgcagtgacaccgaggtgctcctagccgtctgcaccagcgacttc

SEQ ID NO: 332849 - DNA, 50 bp, Homo sapiens
ggaagttcctttttgaagtagttccaggttgctgcttttgctcagaggac

SEQ ID NO: 332850 - DNA, 82 bp, Homo sapiens
ggcaggtgttgtttcatcgttttttctactccaaatctttcgtcaaacacagtttcgaggaggaagaacgtgcaaaacgtga

SEQ ID NO: 332851 - DNA, 97 bp, Homo sapiens
gaggctgcctcctgcagcccccatagcagaccgagacatgggtgcccggcaccgcgcccgagcccactccattcagatcatgaaggtggaggagatc

SEQ ID NO: 332852 - DNA, 96 bp, Homo sapiens
accagtcttccagagtttcctcaattacattcttctcttcttggtctataccaccacactagccgtcagacaagtattatcagaaaatccacccag

SEQ ID NO: 332853 - DNA, 107 bp, Homo sapiens
acggagccccagcttgcccacgcaccccactcggcgtcgcgcggcgtgccctgcttgtcacagggtatgagtattatagaacaattagaccctgtatcttttagcaa

SEQ ID NO: 332854 - DNA, 83 bp, Homo sapiens
gggcagacggattcatttagagctgcggaacaggacgccctctgattactatgagatgtcctatggcttgaacattgaaatgc

SEQ ID NO: 332855 - DNA, 96 bp, Homo sapiens
tgctatggtgctgagtttcctggtagagccggccgagctgaggcggtcgcggccatgaaggcctggttgcagtatgcttgaaatctgggatgtgga

SEQ ID NO: 332856 - DNA, 83 bp, Homo sapiens
agccgatgcaccgagtccagcccaggaaaatggagagataacgaaggaggcccaacttcattcaataaggagcctgacggatt

SEQ ID NO: 332857 - DNA, 82 bp, Homo sapiens
gaagatcttcgagttcaaagagaccctcggaacgttgattcttcaccacactgaaaccattaggaaaaatccttgtggttaa

SEQ ID NO: 332858 - DNA, 100 bp, Homo sapiens
gccagtccacggacacttcaggctatggccagagcagctattcttcttatggccagagccagaacagagatctattgggaaactgattataaccactcgg

SEQ ID NO: 332859 - DNA, 75 bp, Homo sapiens
tcagagggaagatctttttcctcaattgctcttgtagtgagatttctgaccaaacggttcatctgggaatatgat

SEQ ID NO: 332860 - DNA, 101 bp, Homo sapiens
ccgccgtgagagaggaggggtgccggccgggattcgcggcccggagctcgggaccgactcaagaacgtgaagctaaggctgagatgcgtcgtaaagcaaag

SEQ ID NO: 332861 - DNA, 117 bp, Homo sapiens
acacccacagactgccaagtgggacaactttctggcttttgaaaggctccttcttcaggtattacacaatggcctcgttatggagatggagcatccaactgtggggaagatttccgt

SEQ ID NO: 332862 - DNA, 100 bp, Homo sapiens
cggccgcctggctccccatactagtcgccggtgatgctgtggagtcttcaaaaagcccgaccactctggattacaaatttacaggaggatgaaacagaag

SEQ ID NO: 332863 - DNA, 96 bp, Homo sapiens
gtggaatctgaagaagcccacgcagattttaattcccactctagattctggagacggtggctcagggagtaaaggaaggccagttgagcaaacaga

SEQ ID NO: 332864 - DNA, 51 bp, Homo sapiens
ccatattgcaagcgatggcaaaaaagctggatcttacagagaaagactatg

SEQ ID NO: 332865 - DNA, 102 bp, Homo sapiens
gcactgactgctctgcttaatgctgtggagcatccgagtgtgccagagtctccagaattcgtcagggtcagatcatatgaatcccaaatggttatccgtccc

SEQ ID NO: 332866 - DNA, 74 bp, Homo sapiens
agacccgcgccgccgggacccccaggacgacgtgtacctggacatcaccggtgttccattgcctaaagaggaga

SEQ ID NO: 332867 - DNA, 100 bp, Homo sapiens
ggtggagcggctgctggaaacgcaagacggtgccgagaagcagctgcgaggaccatctgaatctgataatttttctcataacctgagaggagtaatccca

SEQ ID NO: 332868 - DNA, 82 bp, Homo sapiens
gccccggataagctcagcgtggtgaagaaggatttctctcaaaagtcccatctgccgtctattgtggtggaatccagtgagg

SEQ ID NO: 332869 - DNA, 95 bp, Homo sapiens
tcggcggcagctgtgagggggttccgggaagatggtgctgatcaaggaattgtggaggaaggagaggccagtctaccctcccctgccatgaccct

SEQ ID NO: 332870 - DNA, 75 bp, Homo sapiens
acaactatgaatagttctttggaaggattacggccaggagatacaaccagcactttctgtggtactcctaattac

SEQ ID NO: 332871 - DNA, 90 bp, Homo sapiens
agagctgcagccacagtgccggctgcacctatgcagctcttcaatggaggttcaggctcctgggaagatgcagctttgctgacggaggcc

SEQ ID NO: 332872 - DNA, 82 bp, Homo sapiens
gcgagcgcgagcggcgcgagaaagaccagaggagcgagagcagcaagaaccacacccagcagcaatgtcagcggaagtggaa

SEQ ID NO: 332873 - DNA, 90 bp, Homo sapiens
caggtgacagtctgcatgtgcagttttcaggcccctaccattgatatccgcccaagatcagcaaccattcaaatgaataatgctacacac

SEQ ID NO: 332874 - DNA, 80 bp, Homo sapiens
cggagctgggcgcggattcgccgaggcaccgaggcactcagaggagtccctgaagaggaaggagaaggaatatgagcatg

SEQ ID NO: 332875 - DNA, 76 bp, Homo sapiens
cccaagtgcattgcctttggaaacgaggcgtaatagattggaactcagtgaagacacagatgttcctgttcagagc

SEQ ID NO: 332876 - DNA, 95 bp, Homo sapiens
gaaaacaaggacgatgcatttacagattctctacagtcaacgcaaaatcatgctgccgtgttccgtgtgggaagcttgttgcaagaaggttgtgg

SEQ ID NO: 332877 - DNA, 101 bp, Homo sapiens
tggcggtccctgtgacctgtggagacacggccagatctgccctccagagaatgtgagggctttgaccaaaggagtccaggctgtgatgggttacaagcccg

SEQ ID NO: 332878 - DNA, 75 bp, Homo sapiens
cttttaagattccaggacctctgatggctgatttcatcttcaaggccctggccaacgtcaacattgggagcctca

SEQ ID NO: 332879 - DNA, 100 bp, Homo sapiens
agagtgagttgttgctcccgcctgagcccagcccccagaaaggattgtgacatatcgttggacccagaattgagccaccctgaagggtcccttcccaagc

SEQ ID NO: 332880 - DNA, 100 bp, Homo sapiens
tttgaagatgatgatctctacggccagtctgtagaggatgattattgtatttcgccgtcaacaggacattctgagcatgtgagacctgaggactgcaaac

SEQ ID NO: 332881 - DNA, 101 bp, Homo sapiens
aggcttctacagccaggacctgcccccaggagcctctcaggggtctgccatcatggatgttctcgcagaagcaaatggcacctttgccttaaaccttttga

SEQ ID NO: 332882 - DNA, 87 bp, Homo sapiens
tgatctagaagcaagataccaggaaagccaagctggaaattcaagggcaagttaaagtcttcagagccctgtatacgtttgaaccca

SEQ ID NO: 332883 - DNA, 100 bp, Homo sapiens
cggccaagcctgcgtgcccatccagcaatgtggctgctaccacaatggtgcctactatgaggtgtatttcgggcgctggctgatcgagggaggccctctg

SEQ ID NO: 332884 - DNA, 100 bp, Homo sapiens
aatgaattatgtcagcaacgtatccaaggattgtgcagactggtgcttaaaatggaagtcgatattaatggagagtctagaagtaccctgaccaccttgc

SEQ ID NO: 332885 - DNA, 75 bp, Homo sapiens
gaagaattccagtactgtctccaaaaccaggcttcagggatgacttcttagggggcaggggaggtagtcgcccag

SEQ ID NO: 332886 - DNA, 100 bp, Homo sapiens
agaagcccagtcagcattagactctacatcttcatctatgcagcccagccaagaccgaggataggtgtggccattggcgaccagatcctggacctcagca

SEQ ID NO: 332887 - DNA, 83 bp, Homo sapiens
caggtcttctggccagagccccacaaaccagtccagctacgggggcccagccagccagcagctgagtgggggttacggaggcg

SEQ ID NO: 332888 - DNA, 74 bp, Homo sapiens
tttgctatcgggactcggcgaggacgacaagttggatggcttgaggactggtactaaaaggaaacgtgactggg

SEQ ID NO: 332889 - DNA, 50 bp, Homo sapiens
gggacagcgaggagctgagggaccctggatcgcttacacctgagacgaac

SEQ ID NO: 332890 - DNA, 83 bp, Homo sapiens
cgacgtcttgcctgtgtcccacttgttcgcggcctatagcatgcagccagtaaagatcccagagaagttcgagaagctagaga

SEQ ID NO: 332891 - DNA, 100 bp, Homo sapiens
acatctactgggtcagcttcatcctcggcggcggtggccgctagctccaaggaagatatcagacaccccgaagaactttctctcttaaagaaacccagag

SEQ ID NO: 332892 - DNA, 76 bp, Homo sapiens
caagcccccacagctactccaacccaaacaacaaccaagccagtttaatgaattcagaaggagctggcggacatca

SEQ ID NO: 332893 - DNA, 50 bp, Homo sapiens
atcgccctggccgacaagcacgcaaatgagcagcaccagcagtaagaggg

SEQ ID NO: 332894 - DNA, 95 bp, Homo sapiens
cgggccgcgcagctgccgaacgacgtggtcctacaggaagatttggagactggagttcaccttgaccctgccgtcaaagaagttcagtataatcc

SEQ ID NO: 332895 - DNA, 90 bp, Homo sapiens
acaaaataaaagatgaacctgacaatgctcaagtttttcgttggaatatacgttgcacatttatggcgattctgagtgtgagggcagact

SEQ ID NO: 332896 - DNA, 75 bp, Homo sapiens
agcagaatgtgatttgcttgaagatatgagaaatgcactcggtgatggaaagagagccactattctgaagaacac

SEQ ID NO: 332897 - DNA, 50 bp, Homo sapiens
tggaggaccagtatttcccatggaggggaacagattctccgtgtgaaggc

SEQ ID NO: 332898 - DNA, 98 bp, Homo sapiens
ccccggcccacagtgggggtgtgcaaacccgagagaactgggtgtggttacagaggaggctacatggaggtgatcaacctgcaccctgagatcaaggg

SEQ ID NO: 332899 - DNA, 82 bp, Homo sapiens
cgctggccgggctggctgcggccgccctgggccgggccccaccggacgcgagcagctgatgcagctgtacagtgcgcgccag

SEQ ID NO: 332900 - DNA, 83 bp, Homo sapiens
cgcagtgcagatccgcaggcgcaaggcttcaggcgacccgtactgggcctactctggtttggaaagcagagtggagaacaaag

SEQ ID NO: 332901 - DNA, 82 bp, Homo sapiens
ggctcatgcgggatttcaagcggaccaagaatcgccttcagccctgtctggtgcatccttggcagaaagtgaggaggaaaac

SEQ ID NO: 332902 - DNA, 100 bp, Homo sapiens
tttttgattcaagtcctgttctacctactgccaattggaaagattgcaggatacctatatggggtgagcccaccagataacccccaggtgaaggagatcc

SEQ ID NO: 332903 - DNA, 100 bp, Homo sapiens
aacgtcatggaggatgaacgacaggtagattggggtcaactggactacttagttgtagacatgccaccaggaactggagatgtgcagttatcagtctcac

SEQ ID NO: 332904 - DNA, 75 bp, Homo sapiens
cgcggccgcaccttcccgccttctcagctggacattttatgcaacgaggagatcctgggcaaggaccacacactc

SEQ ID NO: 332905 - DNA, 50 bp, Homo sapiens
cggcaaccagatcggggccaagggtgtcaaattgagaaccaggtagatcc

SEQ ID NO: 332906 - DNA, 50 bp, Homo sapiens
tgcatccggagagtggacaagaaagaacgaatgcaggaatttgggaactg

SEQ ID NO: 332907 - DNA, 101 bp, Homo sapiens
cagaaaataaaggagctgctgtctggaattggcaacatctctgagaggaaagcggagggaaaggccacttccaccactgagctgccccccgagtacctgac

SEQ ID NO: 332908 - DNA, 75 bp, Homo sapiens
ggaaagtgcggcggccctggaacctggatatcgcgcgaggttctctacttaaaagacaatgactactgatgaagg

SEQ ID NO: 332909 - DNA, 75 bp, Homo sapiens
ggatagactgcacacctgaccaggaggtgaccgagtgccggtggtggtgtgcacattgagccccggtatagacag

SEQ ID NO: 332910 - DNA, 100 bp, Homo sapiens
agcagatcgacaagtccgggagctgggcggccatttaccaggtactccaaagattcaggtttactcacgtcatccagcagagaatggaaagtcaaatttc

SEQ ID NO: 332911 - DNA, 75 bp, Homo sapiens
acgtcaatgcacaaaatggatttggaaggactgcgctgcagtgaaactggaacgccaagctgaagaagaacgaat

SEQ ID NO: 332912 - DNA, 100 bp, Homo sapiens
tgaacatcgaatcatggaatcccttgcatggctctcagctcttgcagccaatgccggaacaggatttgctgttgctgagcctcaaatcgcaatgttttgt

SEQ ID NO: 332913 - DNA, 119 bp, Homo sapiens
tcctgccgtccttctccactttcgccagcccgtgccgcgagcgcggcctgcaggaggaggcatacacggaatacctgaggagcatccactatatctcccaggtgttactagaagaagtg

SEQ ID NO: 332914 - DNA, 100 bp, Homo sapiens
ccagctgccctctgaggagatggtcatgacagggacttaagtcacaacagattatctttcatcaaggcaagttccatgagccaccttcaaagccttcgag

SEQ ID NO: 332915 - DNA, 82 bp, Homo sapiens
atcccccaggctacagtgaacagaaagaacaggccgcccgcctgaagaaactacaagagcaagagaaacaacagaaagtgga

SEQ ID NO: 332916 - DNA, 100 bp, Homo sapiens
ttcagtctataataaagagatgtggtagtcagcagagtgcacacagcagctgtcatccctccttcgctcctgtcatcactggcctgcaaaacctggttgg

SEQ ID NO: 332917 - DNA, 100 bp, Homo sapiens
actgctttgaatgtgactgtttccgttgccaaacccaggacaaggttacaggaggttccagtggcatcgggaagtgcattgctatcgagtgctataaaca

SEQ ID NO: 332918 - DNA, 100 bp, Homo sapiens
agaatgcgaagtctgtggtttatcattgtaatcagcttcttaccaaatacagaaggccagaagcggactcctagaagaggggagcagcaaggatggaatg

SEQ ID NO: 332919 - DNA, 100 bp, Homo sapiens
cctgcattgataccaaggaaggcatcctgcagtattgccaagaaatcttacagactctttcagcacctacgaaaaatttagaacagcaggtgaatcacag

SEQ ID NO: 332920 - DNA, 100 bp, Homo sapiens
ttttaactttcattgtcttttccgcccgcttcgatcgcctcgcgccggctgctctttccggagaaagcaaccagcgagatgaatactgctgaggactggg

SEQ ID NO: 332921 - DNA, 90 bp, Homo sapiens
gagtgtaggcgacaggccgctgacggccggaaggaaaatgattatagcatttgatgagctgaagactgattacaagaatcctatagacca

SEQ ID NO: 332922 - DNA, 74 bp, Homo sapiens
actcgctcgccttcagaagacagtaattcgccaaaatgacgaacacaaagggaaagaggagaggcacccgatat

SEQ ID NO: 332923 - DNA, 83 bp, Homo sapiens
aaggtacagtacttcttccttccaaggaccagcggtagctcccggggtcaaaatgcagatcttcgtgaaaacccttaccggca

SEQ ID NO: 332924 - DNA, 50 bp, Homo sapiens
cgccgcccgtccacacccgccgccagaacatgaaaggctcccggagcagc

SEQ ID NO: 332925 - DNA, 100 bp, Homo sapiens
ctgcccgcgcgagggaggaagagaactactcctttttacctttggttcacaacatcatcaaatgtactatactggcaattgctggagaagattttgcaat

SEQ ID NO: 332926 - DNA, 60 bp, Homo sapiens
cacagtggacgaggtgttggcggaaggtactttgaactcaagtaaacaaaagggaagatt

SEQ ID NO: 332927 - DNA, 75 bp, Homo sapiens
caaggctgcaaacaaggaggcaacccaggaggcttttatgaagcgggccatgcaaattgccatcgcaagagaggg

SEQ ID NO: 332928 - DNA, 50 bp, Homo sapiens
gaagattccgataagaaacacggtgagacatggaatccattaaaattgca

SEQ ID NO: 332929 - DNA, 90 bp, Homo sapiens
cctgtaccgcttatgccaggccgatcccgacctggactcagacaaggagcggtggtgccccccccgggcacggggccatgtacaacggga

SEQ ID NO: 332930 - DNA, 75 bp, Homo sapiens
cccggcgatgcgggccccgcccgtcgcctcaggctcgattatttgatgaacctcagcttgctagtctttgtctag

SEQ ID NO: 332931 - DNA, 75 bp, Homo sapiens
gtgtcaagacgtggcacgtgtcagagaatttgacgcaactggatgatgctcgcaacaaagctgacaatcaagaaa

SEQ ID NO: 332932 - DNA, 74 bp, Homo sapiens
ctagctctgactgaaccacggaggcctagttccccgagagcgttcagacagtgggggctcaagctcagagccat

SEQ ID NO: 332933 - DNA, 98 bp, Homo sapiens
cgccccgaagcgggaaaaaggctgggtgccgccgtcccccagctgcgcaaccctaggaactctcgggatccagagctggtgcggaacatctgccgctg

SEQ ID NO: 332934 - DNA, 74 bp, Homo sapiens
cgccggccgggagaggcgcgcgccatggcttctggagccgaggactgctgagatgtcctctattcttgaagagc

SEQ ID NO: 332935 - DNA, 100 bp, Homo sapiens
cgaggacttcatccagtttgctacggtctacggggcagagcagaataactgaagtgaagtgatggactccgatttggagagtagtaagacgtgaaaggaa

SEQ ID NO: 332936 - DNA, 75 bp, Homo sapiens
cagatctgggacacagcggggcaggagcgcttccgcaccatcacctccacgtgtggaaacaggaagagaactaga

SEQ ID NO: 332937 - DNA, 75 bp, Homo sapiens
gaaatgaggaagatcattgggcgatacggtctcactgggaaacaacagaaaatttgaagccattacttccagctg

SEQ ID NO: 332938 - DNA, 75 bp, Homo sapiens
gcggagtcggggctcctgacgattgcaacacctgctcggtataccgtgactttgggaggaacatctgtcactgtg

SEQ ID NO: 332939 - DNA, 96 bp, Homo sapiens
ccactagcagccagttccggcccgaggacaccgactaccagcagcttcgagagctgtgcccaggagtgaacaaccagccctacctctgtgagagtg

SEQ ID NO: 332940 - DNA, 101 bp, Homo sapiens
aggcgggagacgagaagcctgaaaagtcgcagcgagctggagccgccggaggatgctaaacaccttgacgatcagaaactaaatggtgctgcctcttggac

SEQ ID NO: 332941 - DNA, 110 bp, Homo sapiens
tccagggcttcctcgattgtgccgcgagggctcaggggcagacactggcctcagatacctgacctggtaccctctatgaggcctgcggtgctgggctccccagaccgagc

SEQ ID NO: 332942 - DNA, 74 bp, Homo sapiens
cctgtatctattacctgaatcagaactgggacgttaaggtcaggcagttcctgctccgactggggctcctccag

SEQ ID NO: 332943 - DNA, 98 bp, Homo sapiens
ttcccctcccgggtgaggagcgtcctgagactaaggaaagagcctggaaaatggagcagacctggacgagttgtcgagatgtccacagaaggaggatt

SEQ ID NO: 332944 - DNA, 73 bp, Homo sapiens
agtaaacaagttgatctgtgtgaaagctttgaaaaccagggggtgagaacatcaaaagcatcaaccagcagtc

SEQ ID NO: 332945 - DNA, 112 bp, Homo sapiens
ctggaagatcaacctgtttatgcagtttcgggaccacctggaggaggtgttgaaagggggtgtgggccgaagatatgctcatgtggtgttgaggaaagcagacattgacctc

SEQ ID NO: 332946 - DNA, 51 bp, Homo sapiens
atcctggaggtggatctgaagaacggcatcctgaggttagcattacacttc

SEQ ID NO: 332947 - DNA, 100 bp, Homo sapiens
aataaacatgcaatgaacccaaaaggtctttagaaaacctcaatagtggcacggtagaaccaactcattctaaatgcttaaaaatggaaagaaatctggg

SEQ ID NO: 332948 - DNA, 50 bp, Homo sapiens
gtctccctgaagaaccgagcggccaggtgctgggtaggccaggtttcagc

SEQ ID NO: 332949 - DNA, 73 bp, Homo sapiens
agtgaatggtgtgcatcacattaaggttaaagccgagccagccaaaatagaagctttccgagcttcactttcc

SEQ ID NO: 332950 - DNA, 98 bp, Homo sapiens
caaaaagccgtttagaaagctcagtcgctttggaaacgctttcctgaatcgtcactcagcctctgaagaagcttcgggttcagactcaggcagtcagt

SEQ ID NO: 332951 - DNA, 80 bp, Homo sapiens
tagcatcaaacaatgggtcagtgttctcgccgttggacataccagatggtcgaagagctccacttcctgctcattaccgg

SEQ ID NO: 332952 - DNA, 100 bp, Homo sapiens
cttccacgcctgaatatacaagttgtgatgatgttgagattgaaagtgagagtgtaagtgaaaaaggggtcagcggctggaagagtccttggaatatcag

SEQ ID NO: 332953 - DNA, 100 bp, Homo sapiens
agaacaccccgagatgagaggagaagagcccagcacaacgaagtgcaggtcagctctgcggacgctcggctcatggtctttgacaagacggaagggacgt

SEQ ID NO: 332954 - DNA, 73 bp, Homo sapiens
agatgcatttcacaactgtcatatgggtattacagctgaggagaagaaagtggaagcaaagaaagaagaatcc

SEQ ID NO: 332955 - DNA, 50 bp, Homo sapiens
ctgtccggggccgggctcaggagcagagtgccaaacccaagtctgaaatc

SEQ ID NO: 332956 - DNA, 100 bp, Homo sapiens
gcctgtaccatgatgtgatgctggagaccttgacacttatatcctccctggcgacatctcgaatcagcgatgcacacttggcagacacaatgattggcaa

SEQ ID NO: 332957 - DNA, 50 bp, Homo sapiens
tttcaagagagtaccattggggactctgctaacaccagatagtggaaaga

SEQ ID NO: 332958 - DNA, 100 bp, Homo sapiens
gctgctgaagagtttccaaggagagccatcagtggcctatgtacataccacgccgggtctgccttcaggctgggaagaaagaaaagatgctaaggggcgc

SEQ ID NO: 332959 - DNA, 98 bp, Homo sapiens
agaaagctaggccatctgaataactttactaaggatcttttgccagaaatgagggcatactggcctgacgtaattcactcgtttcccaatcgcagccg

SEQ ID NO: 332960 - DNA, 83 bp, Homo sapiens
agaccgcgcgcagggcctgcagcgggagctggacggcgagcgcgagcggcgcgagaaaatgacaacggcaacacgacaagaag

SEQ ID NO: 332961 - DNA, 83 bp, Homo sapiens
gtggactccttcggcagtccacccaccgccgccgcctcccagtttcaggtttagctgtgcctcccagtgactataatgacaag

SEQ ID NO: 332962 - DNA, 73 bp, Homo sapiens
gaagaaggatgtccgggagctggtggaaaagtcaggtgggcagtgtcaaaccgggaaatgcttatagctcaaa

SEQ ID NO: 332963 - DNA, 76 bp, Homo sapiens
caaaggcaccggccttgatgaggcaatggaatggtactaggttttgacaagcttgcatcatgcgtgagtataagct

SEQ ID NO: 332964 - DNA, 83 bp, Homo sapiens
atacagaaggacatgcaaaacttgcagattttggggtagcaggtcaacttacattctaaggacatatggaattggctatggat

SEQ ID NO: 332965 - DNA, 75 bp, Homo sapiens
aatcacactgcctgaggccaaagataagctacgaaagtgccaacatcgagagcttcttcagcgggagctggtcca

SEQ ID NO: 332966 - DNA, 90 bp, Homo sapiens
ctcgaaggggacctcatgtccctgtgggacacaatgcccccaagctttggggccatttggatcacacgatgttttttcaagattttagac

SEQ ID NO: 332967 - DNA, 75 bp, Homo sapiens
ggatcgctgtgatcgtcacttggaactagaacagtctttggctagctggactcagaacttgaaagaacttcaaac

SEQ ID NO: 332968 - DNA, 100 bp, Homo sapiens
gagcgagtctcggagaagatgtggtggcttccgtttgttggtggaggaggtggcaggcctcggcggacttgttctttaagtacacctggaataacttttt

SEQ ID NO: 332969 - DNA, 51 bp, Homo sapiens
gcccagagtccgcggccggggcgcgggagtacgaggatgtcgtccaggaaa

SEQ ID NO: 332970 - DNA, 90 bp, Homo sapiens
tggataaagaccaagaagtgggattactggattatatggcttgcattgatgacaatgttgatatggtgaagtttctggtagaaaatggag

SEQ ID NO: 332971 - DNA, 75 bp, Homo sapiens
cctgttccatccaaactcttgccctttgagggaccagatacaaccagacctccaaagaaagacgaagaaaatgga

SEQ ID NO: 332972 - DNA, 100 bp, Homo sapiens
cagctccaaggacgccatcaagaagaagctgacagctgggtcttactggggatctggccagccttgggggcccttggagccctggcccagtggaagctcg

SEQ ID NO: 332973 - DNA, 75 bp, Homo sapiens
catttgctctctgcattccagttagcaaatgggataaaatctacgtggttgacttgagtaatgagcgagccatgt

SEQ ID NO: 332974 - DNA, 100 bp, Homo sapiens
gtagcaaatgaagctgaatttatcctgagcaggcagagagcagaagatattcacagacatgcggaatttgagggccctccagaatttccacagcatacac

SEQ ID NO: 332975 - DNA, 58 bp, Homo sapiens
ctctccttttcgtttccggaaacatgatgtgaagttcatttccaatccgccctccatg

SEQ ID NO: 332976 - DNA, 100 bp, Homo sapiens
caccattggagctcatcagactgaccgtgtcttacatcagttcagagaggttgctgtcttcctcgtccctccggcccttcttcctactcagcgtctcact

SEQ ID NO: 332977 - DNA, 100 bp, Homo sapiens
gacgatgcatcccaagtgtcctccactagcaacgatgttagttcttcagattttgaagaagggccgtcgaggaaaagctgaactagatgcagagcacgcc

SEQ ID NO: 332978 - DNA, 89 bp, Homo sapiens
cgtctaccgcgtgtataatcgacaccagtatccatttgttgttcttaacatttctgttgattcaggtgtattacctgactgcttaaccg

SEQ ID NO: 332979 - DNA, 90 bp, Homo sapiens
atcgcccaagtccctctactcgcgaggtggaaaaggattattcatacctgaaggagatatgtgatcaccaagccgaacagctgagcagaa

SEQ ID NO: 332980 - DNA, 74 bp, Homo sapiens
ccagagagcccaacgcctggtgctcaagactttctccgaggtccttccatagtgacgccccccaaggacatctg

SEQ ID NO: 332981 - DNA, 82 bp, Homo sapiens
tggggacagctgctggtgtggttcggagccgcggagccccccaagatgaacccagtggtggagccactgtcctggatgctgg

SEQ ID NO: 332982 - DNA, 90 bp, Homo sapiens
tcatttagagctgcggaacaggacgccctctgatccacacccactcgcccgggtctatggccacggtcggagagtggtcctgtgtgcgct

SEQ ID NO: 332983 - DNA, 100 bp, Homo sapiens
ccacatcaatgcactgccaatggcatttggctttatgtcccgagttgccctacaagcagagaagatgaatcatcacccagaatggttcaatgtatacaac

SEQ ID NO: 332984 - DNA, 90 bp, Homo sapiens
ggcgttgctggtgcgagtccttgtgccactgattaatgaacttgaatcagcaatacatcagctgtacaaacagcgagcttcccgccttgt

SEQ ID NO: 332985 - DNA, 100 bp, Homo sapiens
ccggcgcgggccgggagcagaggccgagaccctgcaggtacaccagaggatcgcttcctggcagaatttgggagctgtttattgcagcactgttgtgccc

SEQ ID NO: 332986 - DNA, 83 bp, Homo sapiens
ggacagttgtttggtgttttgcttcaggttatagatggagagacctataaaggtttctctggaaacccccctggtaagtgtgg

SEQ ID NO: 332987 - DNA, 100 bp, Homo sapiens
catgtctgtatgctgaagtcccttcatcctttcattggttggtggacagctctgcttatgataatgtcaacaaagttcgagtagctatcaagaaaatcag

SEQ ID NO: 332988 - DNA, 49 bp, Homo sapiens
agctgtgcgagagcctcctcacttggcactccagttctcgcctgaatta

SEQ ID NO: 332989 - DNA, 103 bp, Homo sapiens
tgacagcttcttgatctgtccccaggatgagatgaacacttttaacaagagaacaggactctatataaatcgctgtgggctcaccacctctaaggaggagcac

SEQ ID NO: 332990 - DNA, 100 bp, Homo sapiens
ccggcggtggcgcctgcggacctaactagctccaggttaggccgagctttgcgggaaagcagcgatttctcacattggcaaactgagagattttcttctg

SEQ ID NO: 332991 - DNA, 100 bp, Homo sapiens
ggagagagaatgagccagagggacacgctggtgcatctgtttgccggaggatcagccaaatggccgatgacacagtggcagaactggacaggcatctggc

SEQ ID NO: 332992 - DNA, 88 bp, Homo sapiens
cccaggagcagacagagaagctgctgcagtttcaggagtggagtcaacatatcaatggagcaagtcacagtcgtcgatgccagcttct

SEQ ID NO: 332993 - DNA, 74 bp, Homo sapiens
aagaaagtgagagtcattgatcccaggaaacaagagattgttgctaatgagtccctggaacgccagatgcgtga

SEQ ID NO: 332994 - DNA, 100 bp, Homo sapiens
cagacacttaccgaaaatggcgggcagccaaggcaggcgagaagaccatctctgtggtcctacaggtgactcgaaaagccctgtttcctggtgactctga

SEQ ID NO: 332995 - DNA, 75 bp, Homo sapiens
ctggattccatgaacagcaagggctgcaaggtatttaacatgaagtcgctccagattgtgttacctgcccgagca

SEQ ID NO: 332996 - DNA, 99 bp, Homo sapiens
gccacacagccccaaacctcagagactcagacctctcatctgccagaatcagaaagaattcatcacactgtgatgtacagttacccagcacgtgtacct

SEQ ID NO: 332997 - DNA, 100 bp, Homo sapiens
cagttctggtgtctcctctctaggtaccaggtcatcagtacaccatctgatattttcatggtgatggaatatgtctcaggaggagagctatttgattata

SEQ ID NO: 332998 - DNA, 76 bp, Homo sapiens
gcggaggctcgcgagatccgcatgaaggagctggagcggcagcagaaggagtgcaggtcgtaatctgaaggagtgg

SEQ ID NO: 332999 - DNA, 75 bp, Homo sapiens
agcggagagcggagcccggagcccgccgccccaggtgatcacaggtgctttacagtgcctcatctgggtcttgag

SEQ ID NO: 333000 - DNA, 88 bp, Homo sapiens
ccgcttcttgaatttctctctgtaaaggagggacatgagagatggctttagaagaaaaagtttctactcttcccattatgcgagagag

SEQ ID NO: 333001 - DNA, 100 bp, Homo sapiens
ctgcccagagagggccagagcgtcggggaggcaagatgatccaccagcggttccatcctacacttggagaaatctgacagaatattttgtggctgtggat

SEQ ID NO: 333002 - DNA, 74 bp, Homo sapiens
ggccatgctgacctacaagcagaagagggggggccctcagcctcttggccttgaacgggctgttcatcttgatt

SEQ ID NO: 333003 - DNA, 100 bp, Homo sapiens
cgggtctccggccggcggcggcggcggcggcggcggcggcgcagagttattgaactaacaggggatgtgactcctgatatgaaatccattgccaaggctg

SEQ ID NO: 333004 - DNA, 75 bp, Homo sapiens
tgtgaggctgccaaggaagctctggagcttttcctccgcaaccatgtctgacaaacccgatatggctgagatcga

SEQ ID NO: 333005 - DNA, 100 bp, Homo sapiens
ccctgatggccactcacgctgggggaccttcagcaacctctgggaacacaaccaagcaatcatcaagcacctcctcgttttttgctccactcaagcctgt

SEQ ID NO: 333006 - DNA, 80 bp, Homo sapiens
tcttgtttgtggatcgctgtgatcgtcacttgggagaagaaatgggtgaccgttggtgacacatccctacgaatctacaa

SEQ ID NO: 333007 - DNA, 101 bp, Homo sapiens
ttttgattcaagcagacagagagctgaaggaactgatattccaacagtaaaacctctcaaaccgaggagtgttgaatttcatgaaagaggaaagaatcata

SEQ ID NO: 333008 - DNA, 75 bp, Homo sapiens
agggcctgcagcgggagctggacggcgagcgcgagcggcgcgagaaaatttgaggcttaagcaacttcttccggg

SEQ ID NO: 333009 - DNA, 75 bp, Homo sapiens
gtcagaacaggcgctgcggctgatcatctccatcttcctgggggcttccatcgttggcgtgaactgccgctttgg

SEQ ID NO: 333010 - DNA, 100 bp, Homo sapiens
ctacacttggcaggcttcgaagagctacagaatatgctccaaagaagaggtacctgttcgcgctgcaggtgaagcaggacttggctcaaggcaggttgac

SEQ ID NO: 333011 - DNA, 100 bp, Homo sapiens
cccattgagcaatgcctgccttcacttgaaaactccaagtactgccgtttcaaccaggacccagaagcaggaagctgttttaggttatgtgaaagagatg

SEQ ID NO: 333012 - DNA, 100 bp, Homo sapiens
tcggtgagaacgtcagcgggctgcagcgcgccaaaaccgggacggacaagaccctggtgaaggaggtcgtacagcaacacagtcactcctggcggcaaac

SEQ ID NO: 333013 - DNA, 74 bp, Homo sapiens
atcaatcgcatcttccacgagcggttcccatttgagctggtgaagggaaaggggcgtattcgtcgaggaaacta

SEQ ID NO: 333014 - DNA, 75 bp, Homo sapiens
acactttgcacagttcggccatgtcagaaggtgcattttaccttttgtctggagggtgagcgacctgcgagactc

SEQ ID NO: 333015 - DNA, 100 bp, Homo sapiens
catctttgggcagccattgagattatacggaaccagaagcagattgccaacattgaccgtattacaaaaggtggactagcagaaagactaaatggactgc

SEQ ID NO: 333016 - DNA, 90 bp, Homo sapiens
ccgagcaggctgagcgatacgacgatggtcatcatgggccagtgctactacaacgagaccatcggcttcttctataacaacagtggcaaa

SEQ ID NO: 333017 - DNA, 90 bp, Homo sapiens
ctggaattggccggacagggacgttcattgtgattgatattcttattgacatcatcagagagaaagaaatatgagattacggagcagcgc

SEQ ID NO: 333018 - DNA, 90 bp, Homo sapiens
catcctgacatcgaaaacccggacctcgcttacctgcatgctggtgacttaagagattaaaattaatttggttgctgttggttctgaaca

SEQ ID NO: 333019 - DNA, 75 bp, Homo sapiens
tgctttactggaaagacccagaatatgccaagtatctaaagtgacttctgggggaacagaaagcatactgatggc

SEQ ID NO: 333020 - DNA, 75 bp, Homo sapiens
ttttcagtctaatctcattgaaagccactcaacaactctttatgtgacagcccacctgcacccaggtgaaataaa

SEQ ID NO: 333021 - DNA, 100 bp, Homo sapiens
ggggagagaataaaactccagcgagatccgggccgtgaacgaaagcagtgacggaggagcttgtaccaccgggaaagtacggtggccagactttaaccag

SEQ ID NO: 333022 - DNA, 99 bp, Homo sapiens
cagcttcccgagacatcaccttgataacaacgaacttgatgcaagtgataggtttgccaaggtcagacctctcatcatccggatgaactgcaatttcca

SEQ ID NO: 333023 - DNA, 100 bp, Homo sapiens
gacagttcaaggaggagaagcttgcagagcagctgaagcaagctgaggagctcaggttccagcaacagatagaaatgctttaagttcactctggggaaag

SEQ ID NO: 333024 - DNA, 100 bp, Homo sapiens
ttgaagcagaaagcaagtgaatacgagtcagaagggcagtgtaaaatatgtgaaaacagtatttccctcaatgcctataaagttgcagctgtcaaaggac

SEQ ID NO: 333025 - DNA, 100 bp, Homo sapiens
gcagcttcatgatattactgtaccgttagaagtttttgagttcatataagtaccaccgggttaattgtgaccccgcccccaagcagcccagtgacaactg

SEQ ID NO: 333026 - DNA, 98 bp, Homo sapiens
gaaaggattggattggcatctttagagtggggacccaaactgtatgcattgttccagatgcgctcttgccaaagcagcataaagcaaatgtaaccctt

SEQ ID NO: 333027 - DNA, 72 bp, Homo sapiens
ttgaacccttgaatcagaaaggcaagatatgagatcctgactccaaactccattcccaagggtttcatggac

SEQ ID NO: 333028 - DNA, 80 bp, Homo sapiens
gatttcggagaggccgcaggagtcatttcaaagtgactgagaccgaagatgatagtgatagtgacagcgatgatgatgaa

SEQ ID NO: 333029 - DNA, 82 bp, Homo sapiens
tctgattctccaatgggaataccaagggatttgcctgaagacctggataatctccatttttgtcatggactgttaaaacgtt

SEQ ID NO: 333030 - DNA, 74 bp, Homo sapiens
tcacgatcctgtaactgccaaacccaagttggttggagatgtggattttgaagctgagagagaaattgtgcgag

SEQ ID NO: 333031 - DNA, 80 bp, Homo sapiens
cgtggagatatggcgcaactgcggcgcgcaatagccctctggaacaagacaattcatgtgagataagaaagaagagccca

SEQ ID NO: 333032 - DNA, 82 bp, Homo sapiens
aagagaaagccagttatccacggactggaagatcaaaagaggattatgactgtaccttttaactttgtagctggaacacaag

SEQ ID NO: 333033 - DNA, 100 bp, Homo sapiens
gcaaagccattcctgacctcaccgcgcccgtggccgccgtgcaggcggccgtcagcaacctcgtccgggcctcattgctacgatttcagagtaccctggt

SEQ ID NO: 333034 - DNA, 87 bp, Homo sapiens
aagaccagaaacaaatcagagtctggaacaatatgaactggtctacaatgctgtattagaactatttaagagacagatggatgttat

SEQ ID NO: 333035 - DNA, 100 bp, Homo sapiens
gatccgcccacagacctcaaattcaaagacttacagattccagtctgctgttagatgattattcatccaagttgagccccaaaccaaagagagccaagca

SEQ ID NO: 333036 - DNA, 100 bp, Homo sapiens
cgttgtgccagcgactaaaaagaggaagatgagaatgtgcctactgctcctgatcctccaagtcaacatttacgtgggcatgggacaggcttttgctttg

SEQ ID NO: 333037 - DNA, 101 bp, Homo sapiens
gggcggctcgcgcccgggccgccacgctctcgggctctgcctcgtccaagtggtaagaagttcagaagcaagcctcagttggcaaggtacctgggaaatac

SEQ ID NO: 333038 - DNA, 80 bp, Homo sapiens
aggtgcagatcaagaccctggagggcgagttctcggtcaccatgtggtcctcagataacgaaggaggcccaacttcattc

SEQ ID NO: 333039 - DNA, 75 bp, Homo sapiens
gggagctctgaccgaggcgcctcgctggggcggggaccttgccttgcccgggcaacacagtcactcctggcggca

SEQ ID NO: 333040 - DNA, 100 bp, Homo sapiens
ggcaaagcgaaattggtcattctcgctaacaactgcccagctttgaggaagaaggtagataatgactataatgcccttcgagaaagactcagcaccttgc

SEQ ID NO: 333041 - DNA, 83 bp, Homo sapiens
tgtctccttcgacttggagtctttgtccaggacgggggagtggccacagcaggtcctatctggtggtgagtggctgtcatgat

SEQ ID NO: 333042 - DNA, 109 bp, Homo sapiens
gacgcggaggccgcctggggtagcggcggcgggagtcctggcgctctgcagacaatgcagatcttcgtgaagactctgactggtaagaccatcaccctcgaggttgagc

SEQ ID NO: 333043 - DNA, 49 bp, Homo sapiens
attggtgtaaggagcatcacgggaaggttcaaaccttgtactactcagc

SEQ ID NO: 333044 - DNA, 106 bp, Homo sapiens
aatagcagaagaataccatgaggtcaaaaaggaaatcaccctgcttgagcaaaggaagccccttcacagatgtagtcactacaaatcttaaattgcgaaatccatc

SEQ ID NO: 333045 - DNA, 100 bp, Homo sapiens
aaagctcgacttctcaatcccaagtggccaaagggtaaccaggagccgacaacaactcctgacgcaatggttcagccttttactaccatcccatttccac

SEQ ID NO: 333046 - DNA, 78 bp, Homo sapiens
cacatgcagctggccaaacaactggctggaatattgcaggtgcctttagaggagctgactaaggctttggaacagaaa

SEQ ID NO: 333047 - DNA, 75 bp, Homo sapiens
acaaatgacagttcaagcccagccacagattgccacattagcccagatttttgggaacgttacagatgctacctt

SEQ ID NO: 333048 - DNA, 97 bp, Homo sapiens
gaaaaaatcccaaggtctgcaaaggtagacttcgcttgaaaagatcgagaatggaggaggggatcggcactcacttgcagacatcaacagtttccag

SEQ ID NO: 333049 - DNA, 100 bp, Homo sapiens
tggatgatgagagtctgaaagagctattcagtcagtttggttatgaagacagtatggagtttccagaccatagtagacatttgctacagtgtctgagcga

SEQ ID NO: 333050 - DNA, 75 bp, Homo sapiens
catggacgtctggggcaaagggaccacggtcaccgtctcctcagcccagaaaattcatctgaacagccttcctac

SEQ ID NO: 333051 - DNA, 100 bp, Homo sapiens
accccgagctcccgcgggccgcgtcgggacccgcctaggcggccgccccggaacgatggtgacaaatatcccatggaaagtgataattcatttgatctgt

SEQ ID NO: 333052 - DNA, 98 bp, Homo sapiens
catttaaagagctgggcttgaacttcgtgagtttcgctctaaactgcccttgaaatgaagctggacttggagcttttctgcaattagataaaaaagga

SEQ ID NO: 333053 - DNA, 100 bp, Homo sapiens
ggaaattgtattctccgagtcagattggagcatttgtgttgatgaagatgaaagagactgcagtcttgaatccagataatagttttgaaatactggttga

SEQ ID NO: 333054 - DNA, 74 bp, Homo sapiens
cctcaaggacaacctcggcctgagacaccggaggaccggcctcccgcgacgatgcccctcaacgttagcttcac

SEQ ID NO: 333055 - DNA, 88 bp, Homo sapiens
gcggcgaatcacttataaatggcgccgaagcaggacccgaagcctaaattccaggagggtgcccgtggttgacacgagctgtgtcccc

SEQ ID NO: 333056 - DNA, 100 bp, Homo sapiens
atgacaagaccaaggtcaacaaggacaacaatgagatcgtggacaagatcatgggcaaaggacagatccagataaggagtcaggccagggcgggatgaca

SEQ ID NO: 333057 - DNA, 100 bp, Homo sapiens
cgggctgcgggagtgccctgctctggcctcgcttgttgctcttcggggactccatcacccaggtcgctgaaaattttgttccccctctgttggatgcagt

SEQ ID NO: 333058 - DNA, 100 bp, Homo sapiens
ctctacctgaccatcatcctgctcctgggtgccgtggcatgtcgatttgtccttcactacaggaaagtgaagaggaggacgctgacgccatggacgatga

SEQ ID NO: 333059 - DNA, 75 bp, Homo sapiens
gaatcaaagataaatccaaatactgcatatcagaaacaacagttttctggatatgccgcagaaggatccgtgcca

SEQ ID NO: 333060 - DNA, 74 bp, Homo sapiens
acttggcgaggttcagactcttggagccagaagctacatgacccctaaacgatggagtttcgcccttgttgccc

SEQ ID NO: 333061 - DNA, 100 bp, Homo sapiens
cttttaagtggagtggtggatcagaccaaagatggggtcctgatgaagaagctgttgtggatcttggcaaaactagctcaactgtgaacaccaagtttga

SEQ ID NO: 333062 - DNA, 75 bp, Homo sapiens
gaggatccctggatctggtggactttgtgaggcaacatcggataccactgggagctggattattctgtcaatcca

SEQ ID NO: 333063 - DNA, 101 bp, Homo sapiens
gggaaacaacaatgaagaggtaattcacttgaacaactttcactgccatcggggacaagatcgtaaagctgaaaattgaaatcatgaaagtagacaggact

SEQ ID NO: 333064 - DNA, 100 bp, Homo sapiens
tctgactacttgacacactggctcgagatgcttcctgggaattagaggaaaacgcttatcaagagcttctgcagcactatgagcgttgtgatgttcgaag

SEQ ID NO: 333065 - DNA, 80 bp, Homo sapiens
gtggtagttaagaatttgtaaaggccagagaactacctacgattctctcagcggccttatgccagcctggaccatcttgg

SEQ ID NO: 333066 - DNA, 75 bp, Homo sapiens
gtgaggcccaacagtggaattattgacccagggtcaactgtgactgtttcagatggcttaatggtacaaataact

SEQ ID NO: 333067 - DNA, 75 bp, Homo sapiens
caagaaaaatgaaattatggttgcaccagctcagtaaacgctctgccactgacctgtgtggcaggaatgatggaa

SEQ ID NO: 333068 - DNA, 98 bp, Homo sapiens
gaatctcttgttggcatttgaagcggctgaaagtgtaggcatcaaacccagcctggcagagaacagacagcagacacgagagagtccagatcctgcag

SEQ ID NO: 333069 - DNA, 96 bp, Homo sapiens
gactttctcgttttgatattgagatgagcatgagaggagatatatttgagagaattgttcatttacaggttcatcctaagttccactataaacagg

SEQ ID NO: 333070 - DNA, 75 bp, Homo sapiens
cgtccgtcggtctccgtccgtcggtccggggcccgcggcgccatggctcacgtcggctcccgcaagcgctcgagg

SEQ ID NO: 333071 - DNA, 90 bp, Homo sapiens
gttgcagaagatctggattccacacagcagcggcagcagcaggctgcaacggagaaggggctatatgtgtcacaaagatgtctacacgga

SEQ ID NO: 333072 - DNA, 87 bp, Homo sapiens
gcgcgttctcaagggcttgcagctgctccaaagacaacaggccctccctctgccctcccgtctgtgagctccctgcccagcaccacc

SEQ ID NO: 333073 - DNA, 100 bp, Homo sapiens
ggaggagatggactggctcataggtaatgcacaggtgacacaaacaaagtttctccccaatgctccgaaagctctcattgttgaaccttcccgggagtta

SEQ ID NO: 333074 - DNA, 96 bp, Homo sapiens
ggcttgtgaaatcatgcctctgcaaagatatgttgatgatgtgatcagccgcattgacaggatgtttcctgaaatgtccatccacttatccagacc

SEQ ID NO: 333075 - DNA, 75 bp, Homo sapiens
cgggaggaacatgacatcgcggaggtgctggagaatctggtaaaagcaccattgtgaagcagatgaggatcctgc

SEQ ID NO: 333076 - DNA, 80 bp, Homo sapiens
tgctaaccaacaggcacgacaagtttctggacactctccgagaggtgaaggaccctgctgcaggaagactatgggttctt

SEQ ID NO: 333077 - DNA, 74 bp, Homo sapiens
agccacccacaaacaaactacccattttcttttttggaactcatgagactggattgtattacacagagcatgaa

SEQ ID NO: 333078 - DNA, 50 bp, Homo sapiens
gccgatcccgacctggactcagacaaggggttactggggaggaccagcgt

SEQ ID NO: 333079 - DNA, 49 bp, Homo sapiens
agaagcagatggattcgtccttttagaacctgctaaggctgcctcagac

SEQ ID NO: 333080 - DNA, 90 bp, Homo sapiens
cagagtgtaatgctgtccgccaggccctgcaggacctgctttcggagtacatgggcaatttttgtttggctatgccaccacagtcatccc

SEQ ID NO: 333081 - DNA, 90 bp, Homo sapiens
ggaatatccctaaacccgcttccaaaggagcaccatactggaccaacacagaaaagatggaaaagcggctccatgctgtgcctgcggcca

SEQ ID NO: 333082 - DNA, 75 bp, Homo sapiens
acggaggtcaacctcactctgatctggtgtccttaagtttgctcgcttggtcaagtcctacgaagcccaggatcc

SEQ ID NO: 333083 - DNA, 149 bp, Homo sapiens
ctaggaaatacagatgacttcaccacagaaactttagaatggaggctcggttcttctgacattcttaattacagatcgaggagactggcagagggaaagaaagttcaactatggtggtggcaacaacaatccaccatggggaagcgaca

SEQ ID NO: 333084 - DNA, 75 bp, Homo sapiens
ccgggctgccccgcaggatcatcaaggaatataaatagtttctggaaaggacactgacaacttcaaagcaaaatg

SEQ ID NO: 333085 - DNA, 100 bp, Homo sapiens
cctcatcagaaatgttacacacggagtatcaaactctgctgccaagccagatgacgtgtactactgtggaataaagtacatcaaagatgatgtcatctta

SEQ ID NO: 333086 - DNA, 76 bp, Homo sapiens
gcgggagccgcacgcggcgatatggaagaggagggcaagaagggcaagaagatcttcctctgatggcgctgcctcc

SEQ ID NO: 333087 - DNA, 75 bp, Homo sapiens
aagaacagctggctagactggaggagagggaggtgcttgaactcgctttctccatcttgtatgactcaaactgcc

SEQ ID NO: 333088 - DNA, 75 bp, Homo sapiens
cacatcgagccactgaaaattcaggtcacaagctacctaactaagaagtttgctgaactacgcagccccaatgag

SEQ ID NO: 333089 - DNA, 89 bp, Homo sapiens
cgcaggcccccccgcgccgaccgcgttcctatggacagacgcacagacacctgcaggagtctccccaggacagtgctatcacccgggat

SEQ ID NO: 333090 - DNA, 100 bp, Homo sapiens
agaaagaagacgccacagacagcagcgcagtaccaccttccagagataggcggccttagcaacatgctgttccagtgctccctacctgacaccacagcca

SEQ ID NO: 333091 - DNA, 78 bp, Homo sapiens
tttctgcaggaaaagatctctctacttctcctaagctcttctcacagacagttttatcatcttatcatttttggcaca

SEQ ID NO: 333092 - DNA, 143 bp, Homo sapiens
aagtaatccaattcgaagaccaatttcagcagacagcgccatcatgaatccagctagcaaagtaattgcactgaaagagctggtggagttgagatctataatggagatcgtaaaataaaggtttccaacaccctggaaagccg

SEQ ID NO: 333093 - DNA, 82 bp, Homo sapiens
gcacttcctgcagtgggcattagccacgtccaggacatggatttgattgacatactttggaggcaagatatagatcttggag

SEQ ID NO: 333094 - DNA, 100 bp, Homo sapiens
atcggtggaatacaacataatggagttggaacaagaacttgaaaatgtaaagactcttaagacaaaattaggaaagctatttttgatacaccagatgagg

SEQ ID NO: 333095 - DNA, 100 bp, Homo sapiens
cctgaagtgagtcaggagctgtatgaccttaacgtggagctctccaaggctcctcctgctggaccctccagccccgggcctcaggagcccgagaaggagg

SEQ ID NO: 333096 - DNA, 75 bp, Homo sapiens
tttgccggaatatttcaagacaccgaaaggagggcatcctggctgtttcacccgtggacttgaacttgccattgg

SEQ ID NO: 333097 - DNA, 100 bp, Homo sapiens
ccgctctagcggccgggactctgaactatggcggagagagaagctcttcagaaacagctggatgaagcaaatcgagaagcacaaaaatatcgacagcagc

SEQ ID NO: 333098 - DNA, 111 bp, Homo sapiens
cgagctgagtggttgtgtggtcgcgtctcggaaaccggtagcgcttgcagcatgcaaattgtggctactaatttgccccctgaagatcaagatggctctggggatgactct

SEQ ID NO: 333099 - DNA, 50 bp, Homo sapiens
ccaggagtcatcggacgccagaatctgcaggttacgggcaggacttgagt

SEQ ID NO: 333100 - DNA, 90 bp, Homo sapiens
gccagaagacatttgaatctttggtagactttagcaaagccctaggaaagcatcctgtttcttgcaagaacctggagctggttgaaaaag

SEQ ID NO: 333101 - DNA, 98 bp, Homo sapiens
agccccgaggacgagctgtatggccaggaggcaagtgaggcctatctggttggcctttttgaagacaccaacctgtgtgctatccatgccaaacgtgt

SEQ ID NO: 333102 - DNA, 90 bp, Homo sapiens
caagtgcggacgctgtgcgagaagaataccctctaccatctgctttggtcagggtgccgctcgaggatttaaaagcaacaagaagaaaac

SEQ ID NO: 333103 - DNA, 50 bp, Homo sapiens
ctgaaggctgcgagggactaagagcagactcaccatctgctacctggata

SEQ ID NO: 333104 - DNA, 98 bp, Homo sapiens
aaacttaaaagcaagctggttctctgggatataaataaggccaagaaagcagagaactcatcaaatgaggaggaaacgtcaagtgaaggcaacatgag

SEQ ID NO: 333105 - DNA, 80 bp, Homo sapiens
ggcgactctgtgcctcgctgagggaattgcattttgtgaaaaaagaacaagaattttctgcaaggatcatatctaagtgc

SEQ ID NO: 333106 - DNA, 74 bp, Homo sapiens
agctggagattgagagactggaggagcaggtagagttggctttgtgggacacagctgggcaggaagattatgat

SEQ ID NO: 333107 - DNA, 75 bp, Homo sapiens
ggcggatctggaggagcagttgtctgatgaagagaagttatgaagaagccaagaatttattgaccaagaccaaga

SEQ ID NO: 333108 - DNA, 75 bp, Homo sapiens
ccaggtgaatccaacaagatcccccgtctgaggactgacctttttccatacctttatcaatgaatgtgtcaacct

SEQ ID NO: 333109 - DNA, 52 bp, Homo sapiens
gcaagacggtgccgagaagcagctgcgagcccgtcaccacttccccagcctc

SEQ ID NO: 333110 - DNA, 96 bp, Homo sapiens
cgccgtgtgcccaacggtcggtgtccccggctgaggcagcgcggccgcagcagccctgaaagaccacagcaagattctttcattcgtctcctccta

SEQ ID NO: 333111 - DNA, 100 bp, Homo sapiens
gttgccctgtgtcttccccaggaacagtgttgataaagactgctgaagaattgatgaattttagtaagggagaagaaaacctcatggatgcacaagtcaa

SEQ ID NO: 333112 - DNA, 75 bp, Homo sapiens
gaggcagcgcgggatcccagcctcaggcgtgcgcggacggtgtgcggtaccaggaagagcgccggtcagtaaagc

SEQ ID NO: 333113 - DNA, 98 bp, Homo sapiens
aggattccagtcttagcgatcagcatcagcaaaggctccgaggtgccagaggcatagtggacccaagtggagagattgtggaactggcgaaaggtgca

SEQ ID NO: 333114 - DNA, 90 bp, Homo sapiens
aaagtggcgaagagaaaacatttgcaaggattatccgaggtccttgaatgggcaagagggcacatgaagtacggcgtcctccacattcac

SEQ ID NO: 333115 - DNA, 100 bp, Homo sapiens
ccagtgtctgctctgcggggaggtgctgggcttcctgggcagctcgtcggtgttctgcaaagactgcaggaagtccaagccttatgcatttgatcgggtg

SEQ ID NO: 333116 - DNA, 50 bp, Homo sapiens
cgttgaccgctcctccaactaaccaacatgtagactgccaaagtgtatgg

SEQ ID NO: 333117 - DNA, 90 bp, Homo sapiens
gggcacctccaggtgggcaggagctaccactcagcaccatgagcaccgccacaggggtgaggccgagttcaaccgcatcatgagcctggt

SEQ ID NO: 333118 - DNA, 87 bp, Homo sapiens
ccaggcggaggcgtcgcgggagcctttggggcaccacagagatgcggacaatgcagatcttcgtgaagactctgactggtaagacca

SEQ ID NO: 333119 - DNA, 90 bp, Homo sapiens
acctgtgactcaaatttagaaaaagacaaagaggctgaatatgcaggacaggtaaaaagaacgtattctcatggtacttacagagctggc

SEQ ID NO: 333120 - DNA, 75 bp, Homo sapiens
cggcgcggcgctcgctcctacggttggcaaggccacaggcttcctcaagaactttctgatcgagcccttcgtccc

SEQ ID NO: 333121 - DNA, 74 bp, Homo sapiens
gggactttaatcactgaccatcccaatatacagaatttgaaagacatattggctgacctgatacctaaggagca

SEQ ID NO: 333122 - DNA, 50 bp, Homo sapiens
tggaagctgtggtggtggcaagaaatgtgaaacccagggccccaggaaac

SEQ ID NO: 333123 - DNA, 75 bp, Homo sapiens
ttattgacaagctaaaatctcagttacttcttgtgaattccactcaaggagccagcaccgctctttgaccttgcc

SEQ ID NO: 333124 - DNA, 75 bp, Homo sapiens
actgcaaggaacaaaatgtttgtaaattctccttttaccaagcttcagcgcctgctcctggtcatcactaaccag

SEQ ID NO: 333125 - DNA, 74 bp, Homo sapiens
agcatgtggccttacacgcccccatcagcctctgagcccaagtctgcacgtattcatccagatggcctgaagta

SEQ ID NO: 333126 - DNA, 100 bp, Homo sapiens
ctgtggtcggtgctggcggcggcgcttgggctctgtactaggttttgacaagcttgcatcatgcgtgagtataagctagtcgttcttggctcaggaggcg

SEQ ID NO: 333127 - DNA, 90 bp, Homo sapiens
gaagagctatggtgaaacaccactgaagcattgccaagaaaaagcttgtggtgaaggggggcaaaaaaaagaagcaagttctgaagttca

SEQ ID NO: 333128 - DNA, 100 bp, Homo sapiens
cctaccaaggcaagaagaacatcccgcggatcacgtgagaatgaggctctgtggcgggaggtggccagccttcggcagaagcatgcccagcaacagaaag

SEQ ID NO: 333129 - DNA, 76 bp, Homo sapiens
cagagaccctcagccttgactgggtcttcctgtccacttccaacgaagcggtctataagatctttgatgacagccc

SEQ ID NO: 333130 - DNA, 100 bp, Homo sapiens
cttggaccgagccgatcgccgcggggcagttcgggccggctgtcctggcgcggtgatcatttgaagatctgtccccagggttctacctgctgctctcaag

SEQ ID NO: 333131 - DNA, 75 bp, Homo sapiens
tgcagaggatcagaaccggtacctggatggcatgcttcccatcgacggtcagtgcgcacgttgtaatcagctgag

SEQ ID NO: 333132 - DNA, 100 bp, Homo sapiens
aaagaagtggaaacacccctaactctcccagattatggattggatatgtctacttctggatgcaaattttactgttgttgtaatgatgccagaagcaaag

SEQ ID NO: 333133 - DNA, 147 bp, Homo sapiens
cctcgctcctcgatcgaggacgacttcaactatggcagcagcgtggcctccgccaccgtgcacatccgaatgggtttatggctacaaatgatttgatgacggaactgcagaaagattccatcaagttggatgatgatagtgaaagga

SEQ ID NO: 333134 - DNA, 50 bp, Homo sapiens
aacgtgccatggagacgcttaacggtgttggagcgggccggagagaagta

SEQ ID NO: 333135 - DNA, 83 bp, Homo sapiens
acgttccatctgtggaaggacctaccaaccaggccactatgtacatggtatttgtatctatggaaacggagacttaaagtggc

SEQ ID NO: 333136 - DNA, 90 bp, Homo sapiens
agcccacacacaggtgaatttaaaggagcagccctggtgtcacctatcagtaaaagactcaagaatgaacaatccgtcagaaaccagtaa

SEQ ID NO: 333137 - DNA, 74 bp, Homo sapiens
ggtgcttctatggcaggatatggttcttttcaatgtaacagttacaatgaaaaaatgtgatgtcacaggaggaa

SEQ ID NO: 333138 - DNA, 75 bp, Homo sapiens
tcctcctgttgcctgcaggccagaaattcattgagtttgaagatgctctggaacaagagaagaaagagctgcaaa

SEQ ID NO: 333139 - DNA, 90 bp, Homo sapiens
gcgcgcggcgccggagacatgtccaggcggaaacagagcaacccccggcagatcaagcactagacgcttgaagcaaagctgccatcccag

SEQ ID NO: 333140 - DNA, 75 bp, Homo sapiens
aggccaagctgataaaacacaagaaggggattgtcaaccacagtccatgccatcactgccacccagaagactgtg

SEQ ID NO: 333141 - DNA, 75 bp, Homo sapiens
tctgagcgagccttgaaagagataaaagcggaagtttgccacacgctttaccgatttgttacaactcaagcaagg

SEQ ID NO: 333142 - DNA, 100 bp, Homo sapiens
gttggccagctatgtgtatccatggagacaagagtcaaccagaaagagattgggtacttaatgctgctgcagaagaatattttgcctgctggaacctgct

SEQ ID NO: 333143 - DNA, 100 bp, Homo sapiens
cacgtttcttccattcactcactggaatattgacccttatttatccagaagattgatcatcatatgggttccctgtatgatgagattcgtcagtttcgca

SEQ ID NO: 333144 - DNA, 50 bp, Homo sapiens
gacagtgttgagtttgattgaagtattgaagctgcttctggtggtaaagc

SEQ ID NO: 333145 - DNA, 85 bp, Homo sapiens
gcgaacaaggaaaatggtcatccccacctgtttgcttggtttctgcagaaaaatgtgggccccctccacctattgacaatggaga

SEQ ID NO: 333146 - DNA, 76 bp, Homo sapiens
atggataaaaagtcctttgaaatggtgctggatgaaattagaaagggcatttgatgtagaactactgtacatagca

SEQ ID NO: 333147 - DNA, 51 bp, Homo sapiens
tgactagcagcttcattttgaagtatccagctcacatagaagacattgact

SEQ ID NO: 333148 - DNA, 100 bp, Homo sapiens
gttctggtttgccactgggggtgctggcttctgcatcaatcgcaaactggctttgaagatggctccgtgggccagatcctggactcagagctgtttgagc

SEQ ID NO: 333149 - DNA, 75 bp, Homo sapiens
ccatcctgttcatcgaccagctcagcaaccgcgtgaaggacctgatgcatggcaccacactcctgatggttgctg

SEQ ID NO: 333150 - DNA, 75 bp, Homo sapiens
gaatcaacccagaacggatagctccctcctggaaaaggtgaatgaaaactttgccattgatttgatagcagagca

SEQ ID NO: 333151 - DNA, 100 bp, Homo sapiens
ccgacgaaaggatgccaaatttgtcgccgtgatcctgaaggcgctgacctacgacgagaagcggggtgcctgcagcgtgggcaccaacgtcagggacgcc

SEQ ID NO: 333152 - DNA, 75 bp, Homo sapiens
gcccccggcccaagggcgacttctccagccgggcccgcgaagtggagcttgaagaaatccgcaaatgtgggatga

SEQ ID NO: 333153 - DNA, 83 bp, Homo sapiens
aggtggtgcctctggcagtgacgaggacgaagtgtccgaggtaatactgcattgcatgattgtgcagaatctggaagtttgga

SEQ ID NO: 333154 - DNA, 90 bp, Homo sapiens
ccagaagctggttctgtatgagactagagctgctaatgtaatgcttgaatatgatattgatgaagctcaggcattgttggaaaagaattt

SEQ ID NO: 333155 - DNA, 98 bp, Homo sapiens
caatatgcaatcatcagcgaggcctggcggctagtggagggcgccaatgcttcggcattagagaaagagattggtccagaacagtttccggtcaatga

SEQ ID NO: 333156 - DNA, 100 bp, Homo sapiens
ccccgcaggcagcgcgcgaacgtgggcgtggggatggccaccagtttccggacagcttcgtgctgggttacgaaggtgagaatctgatgaaaattctaaa

SEQ ID NO: 333157 - DNA, 80 bp, Homo sapiens
ggcggagcagaggaaccacacgctgatcatggccttctggcggccgcccctggtttctcctggggggtgatgagcgggag

SEQ ID NO: 333158 - DNA, 100 bp, Homo sapiens
tttggctgatattgcaccttccacagatgacttgggaggaacaggaattaagcctttcctggaacgctttggagagcgttgtcaagaacatagcaaagaa

SEQ ID NO: 333159 - DNA, 92 bp, Homo sapiens
ctgcagctcttgggttttttgtggcttccttcgttattggagccaggcctacaccccaggaaatctgaaatagagtactatgctatgttggc

SEQ ID NO: 333160 - DNA, 100 bp, Homo sapiens
ccagctctctcttcagaacagagccaatggcttggaatgaggatcccatggtccattattgcctttaccaagtcgttacagaatgggctctcgagataca

SEQ ID NO: 333161 - DNA, 75 bp, Homo sapiens
tcatctatggggtcgcctgggactacaagtacctgactctgaaagtcaaaggttatatgtcaccacacccatctc

SEQ ID NO: 333162 - DNA, 80 bp, Homo sapiens
cgcgtccgccgattcctcctccttggtcgccgcgtccttggctggcgtgccgactcgcgggccgctgcacccaccgccaa

SEQ ID NO: 333163 - DNA, 100 bp, Homo sapiens
aggagatcgccattatccccagcaaaaagctccgcaacaagatagcagggttggtgtcaaaggaaatccccaaggcttcaaccagggtctggattgtgat

SEQ ID NO: 333164 - DNA, 90 bp, Homo sapiens
ctttacaagttaattgaagagtcttgtccacagctggcaaattcagtgcagatcaggaagccctcctatgacactgaaacagatcctagt

SEQ ID NO: 333165 - DNA, 80 bp, Homo sapiens
tgcgtcgccgggaccctcgcgcgcgaccgccgaatcgctcctgcagcagaggtatcgagaaccttccctgcgaacttcag

SEQ ID NO: 333166 - DNA, 100 bp, Homo sapiens
gagtgaaaagaaattgaagagtctggaagcagaaatccttcaattgcaggaggaacaggagtacagctgtgtagtaaagatgccttctggtgaatttgca

SEQ ID NO: 333167 - DNA, 98 bp, Homo sapiens
cgcggcgctggagagagacaagatgtccgccagagctgcggccgccaagaaaaacacaccttgactttagtcagatacatcactgtctgttaaaggaa

SEQ ID NO: 333168 - DNA, 83 bp, Homo sapiens
ttttccctcctcaaactgactttgcagccacggagagaatacagttatggccacccaggtaatggggcagtcttctggaggag

SEQ ID NO: 333169 - DNA, 83 bp, Homo sapiens
tgcttggcaaggcaagtagcggcggcgcttcaaggccgggctgggatcagatgggaagtggaacctcgtcatgaccagaaact

SEQ ID NO: 333170 - DNA, 82 bp, Homo sapiens
gtggagcggcacggctgaggcccgcaagcgcaagtcttccgtgtgtgctaagatcgtgcagctcctggggcagaatgaggtg

SEQ ID NO: 333171 - DNA, 98 bp, Homo sapiens
acgcataatggatgaaaggaaccgacagggagattccaggctgctgatcgttcagagttgataaagaccacagaaaacatagatgtgtcaatggacgt

SEQ ID NO: 333172 - DNA, 83 bp, Homo sapiens
tgttgaccgctgacccttggcctgctaactgaaacaaggggagattttaggaaagcaggcgacctgcctctgaagagtgtggc

SEQ ID NO: 333173 - DNA, 76 bp, Homo sapiens
ccctgttcctgaacggcagccccaagaacggaaaggatctttatgtcgctgaagctttatccactctggaatcctg

SEQ ID NO: 333174 - DNA, 102 bp, Homo sapiens
gaagatcaagaagctcattaagagcttggaggcggcccgcggccactgtatacatcagattctggagagtgttaaccacatccaccagcatgacatcgtcca

SEQ ID NO: 333175 - DNA, 82 bp, Homo sapiens
cacggaggggataggcacggacgcaacacttttggaacttagacgctagtgtttcccattaaacactaccaggacaaaatca

SEQ ID NO: 333176 - DNA, 100 bp, Homo sapiens
gctcccctcgtcgcagtttccagcccgacgagcttgttttgtcccggactcgctatatcgagaagtttactgactttcttcggctctttgtgagtgttca

SEQ ID NO: 333177 - DNA, 100 bp, Homo sapiens
gcccaagggcccggaggggcgctgggaaaccggcatgcggtgtactggaacagctccaaccagcatattaaaggtggaagaaggtccatatctttttctg

SEQ ID NO: 333178 - DNA, 100 bp, Homo sapiens
aataaacatgcaatgaacccaaaagggaaatgggcctgagtttacagtggctgtattctgctcgtggagacttcttccgtgctacttccagactaacaac

SEQ ID NO: 333179 - DNA, 75 bp, Homo sapiens
gagaggagaagagatgctggcgtgaaggggttggacgtgataagtatgagcctgcagctgtttcagaacaaggtg

SEQ ID NO: 333180 - DNA, 74 bp, Homo sapiens
gattttgtcgctggacgtctagagatgtgggcatggcagacaaatctgtagctgtgctccattgaagtgacttg

SEQ ID NO: 333181 - DNA, 82 bp, Homo sapiens
aggtgctggcgccgctgcccctccacggagatgcggcattccaaaagaactcactgtcctgattgggatagcagagaaagct

SEQ ID NO: 333182 - DNA, 83 bp, Homo sapiens
atttgcaggacaaaatgatcccttgaaagacagttacgtgtgtcccggcatggatatccggaacaacctcactaggttgcatg

SEQ ID NO: 333183 - DNA, 87 bp, Homo sapiens
ctctcgcttcctgacgctcctggcgcatctggtggtcgtcatcaccttattctggtcccgggctgtcagccagatgaaacagcaaaa

SEQ ID NO: 333184 - DNA, 87 bp, Homo sapiens
atgcgcgccatggtctcagtcagcatgtctatgagcagttcctgctgcagcttcaggtctctaattaacagaagatggcaaagccca

SEQ ID NO: 333185 - DNA, 79 bp, Homo sapiens
tgctttcctttccctcagcacacagaggatgatgctgactttgatgaagtttgcaggtcgaagtaagaaggaaaccaaa

SEQ ID NO: 333186 - DNA, 50 bp, Homo sapiens
acagccccacctatgacccctataagcgtgtccccagttgtcctcatcca

SEQ ID NO: 333187 - DNA, 90 bp, Homo sapiens
atcgaaaatgtgaaggccaagatccaggataaggaaggcattccccccgaccagcagaggctttcatagattctattcacaaagaataac

SEQ ID NO: 333188 - DNA, 75 bp, Homo sapiens
catgcatgctctcactaagcagttggaggctgtgtctgatatgggtaagtgtcaccttaccaaaggcaaacaggc

SEQ ID NO: 333189 - DNA, 75 bp, Homo sapiens
cctcagggcatgagctatacctaaaacgtaatggtattaagaattctgcggcaacctttggcactgcatccatga

SEQ ID NO: 333190 - DNA, 100 bp, Homo sapiens
gaccttacaagtatccccgttcgccaccaattatgggagggctggccaacttctgctacagacgactcatttttggctttcacccccaaccagtgaccaa

SEQ ID NO: 333191 - DNA, 83 bp, Homo sapiens
attttggatatggagccttatgtggaacataaagtaatgttgcaggtcagtggaatccagtttttatgcagcctctgccagag

SEQ ID NO: 333192 - DNA, 96 bp, Homo sapiens
agcgaggaaaggtgtgctgtgcctgaggccaggctcccacatcaggacgagaaggagccctcgagttaccgtgggagctgtgggagctgccctgtg

SEQ ID NO: 333193 - DNA, 90 bp, Homo sapiens
cggagccgcagcccgagcggcggggttcttgcatacactgagggacttcacggaaaatggatgttcagcgagatacgagctgtattttca

SEQ ID NO: 333194 - DNA, 73 bp, Homo sapiens
aggaatcctctgaagcaggagactgccctatccaggcttgtggaatatacccgtgctgatggcacagttggcc

SEQ ID NO: 333195 - DNA, 98 bp, Homo sapiens
gacgacatcatcgtcttcgcctatgcctgccaggctgctgggtgaggtggctttgaccccgggttgcccggccagcacgaccgaggaggtggctggac

SEQ ID NO: 333196 - DNA, 82 bp, Homo sapiens
cgggccctgccctgggctggaacgaccctggtcgtcaaagtcctacattttagctttcagtgctgaacttccttctccctta

SEQ ID NO: 333197 - DNA, 74 bp, Homo sapiens
gcccagctcacagccaccggtaccttcttccaggctgtgggtgagcgtggaggatgctcagatgcacaccgtca

SEQ ID NO: 333198 - DNA, 50 bp, Homo sapiens
gaaaggtttactcgacaaaggcaggggaactgatcacagccgcacatgag

SEQ ID NO: 333199 - DNA, 50 bp, Homo sapiens
cttcattgctccttcaggacatgggtatggctatcctgatccttcttacc

SEQ ID NO: 333200 - DNA, 74 bp, Homo sapiens
aaaggagccgcgtgtggaggaggctgaagtctcacatcagaggtgtcaagaactgataaatttcaaacggaaga

SEQ ID NO: 333201 - DNA, 75 bp, Homo sapiens
cgaccactggcacattcttgctgacaggaattactgaaccttcaacatgcctactataaactaaacagacaatac

SEQ ID NO: 333202 - DNA, 96 bp, Homo sapiens
cccgcacctctgggcagcagcggcagccgagactcacggtcaagctaaggcgaagagtggaacatacatatgatagttgagaaagacacatattct

SEQ ID NO: 333203 - DNA, 80 bp, Homo sapiens
ggcgggcgcagtttctcacgacgggccgagcctgccactctgagcgggctttggacaccatgaactttgatgtgattaag

SEQ ID NO: 333204 - DNA, 82 bp, Homo sapiens
gtgtggagccccggcagcaggagcgtcgcaggtgatgtgtccaatctagatcccaacttctcatttgaaggcaccaaactgg

SEQ ID NO: 333205 - DNA, 75 bp, Homo sapiens
tggcagcatgtatatcttttggtggaattgcgtttgttgccataaaaggagcatttaaagtttacttcaaacagc

SEQ ID NO: 333206 - DNA, 74 bp, Homo sapiens
ggggaaatgagttcaccagaaaccaacaggcagcacaggagatacttggtgttagatgaagctgatcggatgtt

SEQ ID NO: 333207 - DNA, 95 bp, Homo sapiens
ggaagtggccgtagcggcttgttggataaggccaaggaaaatgacttcaagcattttcattctgtgatttatatcaatgcctcagaaaacctgct

SEQ ID NO: 333208 - DNA, 88 bp, Homo sapiens
gtgctctcaacagacagaaggaacaacaaaggattgagagagaaaacttgatgccgaaagttcagtataaatcgaactgtaaaccatc

SEQ ID NO: 333209 - DNA, 50 bp, Homo sapiens
ttcaactctcaaagtagaaccctgcaagtctggaaaagtttgaaattcca

SEQ ID NO: 333210 - DNA, 80 bp, Homo sapiens
aaccaagctttagccgccgaggccgcgtgtcccaaaggccagaaaggtgactcttttgatggtgggacttgataatgctg

SEQ ID NO: 333211 - DNA, 101 bp, Homo sapiens
ggatttgctccagatgcagaacttcacattttcagggtctttaccaataatcagctgcaccacctcgtgagcgatgacgtctgcctgaaggtggtggagct

SEQ ID NO: 333212 - DNA, 100 bp, Homo sapiens
ctggaggctccgggcgcggggaagtcatgctcgcttcacggaggcaatagctagccggctctagaccaagatagaacagcccttcagaaagtgaagaagt

SEQ ID NO: 333213 - DNA, 98 bp, Homo sapiens
tcgtgtggcatgaaacagaagaagttcagctgcagctcagtgcggaaagcgtgggggaggtgtatataaagagtaccgagactggccagtacttggcc

SEQ ID NO: 333214 - DNA, 75 bp, Homo sapiens
tgtgtcctacaccaggcagcccccaaatcccggcccaggagctctttgttcaatgcctagccacctattcctaca

SEQ ID NO: 333215 - DNA, 75 bp, Homo sapiens
tcctcaaaatgttggagcgattctgtcggagccgtgggaacctggtggtgcaggactcagaattcatgattgaag

SEQ ID NO: 333216 - DNA, 100 bp, Homo sapiens
tcatcaggaaatactacgagactgtctcagcccatccctacaatttccaggcttggaaaaaaatatttttggagaagaatccaatgagtttactaatgac

SEQ ID NO: 333217 - DNA, 74 bp, Homo sapiens
tgaggatcgaatcttcactcccgctgtctcagcagtctacagcacgtgagaaagatcagtctaaagaaaaggag

SEQ ID NO: 333218 - DNA, 75 bp, Homo sapiens
agagaccaagagatggcagctgggttctttactgctggatcgcagttgccagtagtcatcagagtaccaaaactg

SEQ ID NO: 333219 - DNA, 100 bp, Homo sapiens
agcccaccgactttgaggatctggaggacggagaggacctgttcaccagcactgtctccaccctagaggaggactcagagagagtaatgataattaccgg

SEQ ID NO: 333220 - DNA, 50 bp, Homo sapiens
ggccgatgccacggagcaagtgggccagtactatactggcaattgctgga

SEQ ID NO: 333221 - DNA, 100 bp, Homo sapiens
ccctgatgaactaaagacttttgatatggaagatgaatacatgctggtcattgaagtcaacaagagagacatagtcttcctggtggatggctcatctgca

SEQ ID NO: 333222 - DNA, 115 bp, Homo sapiens
cgggcctcccagccgacatgtctctagtggcggaagccttcgtctcccagattgcagaaacttgtggtggagaatgttgatgtgttaacacaaatgaggaccagctttgacaaac

SEQ ID NO: 333223 - DNA, 102 bp, Homo sapiens
ggcttcccctgaccctttcggccctccccctcaggtgccctcgcgccccaaccgcgccccgcccggggtccccagaatcactatcagtggcccctgaggagc

SEQ ID NO: 333224 - DNA, 100 bp, Homo sapiens
cgcctgctccgacctggcctcccaaagttggctctgtgggactgttccggatgggcctctgggtcactgcccccatcgccttgctgaagtcgctcatcag

SEQ ID NO: 333225 - DNA, 100 bp, Homo sapiens
agaagaaatgaaggaagactatgacactatggggccagaagccacgatccagaccgcaattaacaatggtacaggattctgagaaacgaacccctcttca

SEQ ID NO: 333226 - DNA, 100 bp, Homo sapiens
ttcaggttgtccgagcatctgggaaggttccccactgaaggacttggtccagctgtctggcagggaggagagacagaagctctggcccgcctggataagc

SEQ ID NO: 333227 - DNA, 101 bp, Homo sapiens
ctccccggagctcccgggccagtagaatttaacacgtgaactggagaatggggaaaaacagcaactgcagatgttggatcgacttaaggagatccagaatc

SEQ ID NO: 333228 - DNA, 78 bp, Homo sapiens
catggccgcgatctatgggggtgtagagggatttattgctaaacatgggtgcatttttggataaacccaaaactgaaa

SEQ ID NO: 333229 - DNA, 87 bp, Homo sapiens
agaattcattgaaaacagctggtggacaaaattttgtggcgctctgcgtcccctgaagatgccatggacaatattaccaggcagaac

SEQ ID NO: 333230 - DNA, 75 bp, Homo sapiens
gaatggacaagcttaataaaataaccgtccccgccagtcagaagttgaggcctagaatatcctgcagtggtagag

SEQ ID NO: 333231 - DNA, 50 bp, Homo sapiens
ttggatcttgcacaggaaggaattaaagtcagtccttctaaaaaagaagc

SEQ ID NO: 333232 - DNA, 97 bp, Homo sapiens
ttgaagtacaacagatgaaggctcaggctagggaggagaaacatcagaagcagttggaaaggatcttcagcctgttaaacaagaaaacgaaaaaccc

SEQ ID NO: 333233 - DNA, 100 bp, Homo sapiens
caacgggtaacaagatacccactgatcattaaaaatatagactgggagctccatgaggtccgagacaacctgaagacgcccagctcagcagagactggct

SEQ ID NO: 333234 - DNA, 82 bp, Homo sapiens
gtgaggtcaacctgcgcccccagatgtcccagagcccgcagcttcatctcccagctcaaacaacacagcggccacaacagca

SEQ ID NO: 333235 - DNA, 82 bp, Homo sapiens
tggagagaagcagcggatcagcagagccgctgccatggcccagacactgcagatggagatcccgaacttcggcaacagcatc

SEQ ID NO: 333236 - DNA, 75 bp, Homo sapiens
gtgtgatccagtcttgggtgacaagtgggacggcgaaggctcgatggtgcctgggctgtgagtccggagacagag

SEQ ID NO: 333237 - DNA, 90 bp, Homo sapiens
atcagggcaagctgtgttccatggcagggaacttttggcagagctcccactactcagagtcaagatctccactgaagttggcatcacaaa

SEQ ID NO: 333238 - DNA, 107 bp, Homo sapiens
tccacgtgaagctcaccgacagtgccctgagggccttcgagagctaccgcgccagacagagacaagaggagcagcagcggcaccgcccctcaccctggagggtcctg

SEQ ID NO: 333239 - DNA, 80 bp, Homo sapiens
gggcgctgtgcatccacactggacgcgagctgcgctgcaaggtcccgcagcccccggaagccaatagactccctcaggga

SEQ ID NO: 333240 - DNA, 108 bp, Homo sapiens
ttctgcacgacgatgaggtgacagtcacgttggttgaatctggcgatgtggaacccatggatatggagggctgactatatacaccatgttttttcctggcacatcact

SEQ ID NO: 333241 - DNA, 98 bp, Homo sapiens
gggcatatgtctgcacgctgaggccgaggcggagaaggggcttcctgagcgtcccagtacactgacagagataaatttgcgcctcattttggtaagcg

SEQ ID NO: 333242 - DNA, 104 bp, Homo sapiens
ccatcatcacccaggcgcggagggaagacgccctggtgctcaccaagcaagagccaatcttcggacgtggtgattgtctcctctaagtacaaacagcgctatga

SEQ ID NO: 333243 - DNA, 49 bp, Homo sapiens
gacttctcaatcccaagtggccaaagatctcccttgagtttagaaatct

SEQ ID NO: 333244 - DNA, 90 bp, Homo sapiens
agcaggtttggcatgtcgagttatggatccaacaaagattctgataactggcaaaacaaggagaaataaagtgtagtccttctgaaagcc

SEQ ID NO: 333245 - DNA, 50 bp, Homo sapiens
gttgccttgagaattgaagacataagctgacgggtcgcctcatgctggcc

SEQ ID NO: 333246 - DNA, 100 bp, Homo sapiens
aacagctttatgaaacagcttgcttcctacagttaaaggcattaggatttcctgaaggacttgtgatacaagcgtattttgcttgtgagaagaatgagaa

SEQ ID NO: 333247 - DNA, 116 bp, Homo sapiens
cacggccagggcccacccagccaaagcccgggacctgtacaagggccgccagctacaagaataaacagccattggactcttcaaacaaaaacgctgtctccatcaagtactgcttt

SEQ ID NO: 333248 - DNA, 90 bp, Homo sapiens
ttccaaggggattcaaacttcaacagaatgtggcaaccaggctactgggaacgttatttggaaacattcctgtggaaaaccactcttctc

SEQ ID NO: 333249 - DNA, 100 bp, Homo sapiens
gcccggattggtcttggaggagcaacggctgcgcaggtgactcggtggcctcaagtgtctatttgtggagaccactgatgtcaatggcaaaactctcgag

SEQ ID NO: 333250 - DNA, 98 bp, Homo sapiens
gaaacttgatgcttctgggccaccatttgccagggcctcgctcgagagggtgtttgtgagatatggttgaccagtgaagacacgggggcttatggcag

SEQ ID NO: 333251 - DNA, 74 bp, Homo sapiens
ggacggcgagcgcgagcggcgcgagaaaaaacgcttcgttaagggactcaggcagtacgggaagaacttcttca

SEQ ID NO: 333252 - DNA, 74 bp, Homo sapiens
aaaaaacaccacagtactatcgtctatcattggatgaagtggctccggagatccctgggccctgtggaacttgc

SEQ ID NO: 333253 - DNA, 100 bp, Homo sapiens
gcgggcggagggggcggcggcagcgacggcagcggcggcggctggactaaacaggtcacctgcagaggatgtccggcttccagatcaacctcaacccgct

SEQ ID NO: 333254 - DNA, 100 bp, Homo sapiens
cgcggcttcctcaacttcacgctggcgcgagccccgtcctccttcgccgccgcgcacaaccgcacgtgcagaattcaaagaagctttttcactatttgac

SEQ ID NO: 333255 - DNA, 90 bp, Homo sapiens
gtgaacaggtgaccataactctgccaaatatagaaaaatgctgagccgattatcaggattagcaaatgttgttttgcatgaattatcagg

SEQ ID NO: 333256 - DNA, 75 bp, Homo sapiens
cgcgtggcaggggctctcggacatgctgccaacgacgcgaggttgtgcccacgtgcctcagggccttggtagaaa

SEQ ID NO: 333257 - DNA, 100 bp, Homo sapiens
ttggtatcaagcgggcctgggatgtggccaggcttcagtcactggacacaagctttctgggcgaggcggtggccagcgccatgcattcctcccgctaccc

SEQ ID NO: 333258 - DNA, 100 bp, Homo sapiens
tatacaaactaatggaaggatacagctatgcaaatatagaacactaaagtgttacatgacagatgtatgagactgcgattcctactgcaaggcctccaag

SEQ ID NO: 333259 - DNA, 50 bp, Homo sapiens
cgcgaatatcgtcatcgttagaagcggatagacatgggtcgatttgacct

SEQ ID NO: 333260 - DNA, 118 bp, Homo sapiens
agcagcgccagcggccgagcgggcggcttcctggcctgggcgctccggtggcggcggagggcgtgatggtgggcatgggtcagaaggattcctatgtgggcgacgaggcccagagcaa

SEQ ID NO: 333261 - DNA, 125 bp, Homo sapiens
ccggtctgtgtgatattagtgaagggactgttgttccagaggatcgctgcaaatctccaacctctggaaagaccacagcaagattctttcattcgtctcctcctagcctgggggaccaggctcga

SEQ ID NO: 333262 - DNA, 75 bp, Homo sapiens
ctgcgtgaggccgcggagcgccagctcaatgaaaaatattattcatctgtgccagaggaaggaggggcaacccat

SEQ ID NO: 333263 - DNA, 83 bp, Homo sapiens
aacatgcacagcctggcgacggctgcgatatgaagagaaggctactaaagacttggaacgatacaatagtcaaatgaagagag

SEQ ID NO: 333264 - DNA, 98 bp, Homo sapiens
gaggataatgagaaggtgcctactttgctaacggactacattttaaaagtgccctctggtggtcagaagatgctgtgctgtctcgttaggatgaatgg

SEQ ID NO: 333265 - DNA, 51 bp, Homo sapiens
gaaagcgaaaaactatgctgaccagagtcagtgggacagcatggaagaata

SEQ ID NO: 333266 - DNA, 94 bp, Homo sapiens
ctgaagggaggcaaggaggcggactgagcgctcccaattggggtgagaagccctaccactgcaactgggacggctgcggctggaagtttgcgcg

SEQ ID NO: 333267 - DNA, 50 bp, Homo sapiens
agctgtcctcatgtctctccagcaggaatgggtaccacagaccatgtcat

SEQ ID NO: 333268 - DNA, 82 bp, Homo sapiens
ctactgcctgggggctgaggatgacaaaaaagccttcatagagggcaaggagttggtgcacacctacaagggctgcatcagg

SEQ ID NO: 333269 - DNA, 51 bp, Homo sapiens
tttggctacccagcctacatctcgtttatggttggctgtgggagatgtgat

SEQ ID NO: 333270 - DNA, 100 bp, Homo sapiens
ctatccagcatctttgggcagccattgagattatacggaaccagaagcagattgccaacattgaccgtattacaaaagggcacatctgctcgataacaca

SEQ ID NO: 333271 - DNA, 100 bp, Homo sapiens
tagacctgaatgggcttgaccatctcacaactgctcgcgtgacgaccgcattcgtggcaggattgacatgtacgtggaggggacactggatctgctggaa

SEQ ID NO: 333272 - DNA, 101 bp, Homo sapiens
gaaggcatttgctgttggtgtccagcaacaacacggaggtagtcacgtttcccggaaatccgaacacttgagtgtcagaccacagactgcgttggaagaaa

SEQ ID NO: 333273 - DNA, 90 bp, Homo sapiens
gctcggccgatgaagtgcagaggtttttttctgttggccagtcagtgctgaaagatgtaagcaaagtgaagaagctgaagcaatctggag

SEQ ID NO: 333274 - DNA, 90 bp, Homo sapiens
gttttggggttgccatcggcccgtagtatgtgaaaatacctaggtgctgatatggaagaatttcatggcaggactttgcacgatgacgac

SEQ ID NO: 333275 - DNA, 127 bp, Homo sapiens
cccatccacacaacgaccctgacctggtcatggcgtccagctccggcctggcgtgaggaccccccaatccgcgtgagtcttgtgaaaatgccattgtgtgctggaaacctggcaagatggaagatga

SEQ ID NO: 333276 - DNA, 74 bp, Homo sapiens
ccgggcgggccgtcgcgggagagatcgaacggttggaagtaagcagccttgcccaaacatccagtgcagtggcc

SEQ ID NO: 333277 - DNA, 80 bp, Homo sapiens
cggccccggggccacctcacgttctgcttccgtctgacccctccgacttccgacaatgcagatcttcgtgaagactctga

SEQ ID NO: 333278 - DNA, 50 bp, Homo sapiens
ccagaacttccagctgcccccagtgtgcaggagaagagaattgggtggac

SEQ ID NO: 333279 - DNA, 98 bp, Homo sapiens
gcggcctgcgcgcgcctcccgggcggattccagccccgagcgggacagcgcggcggggagcgacgagaacttgcttgctagaaaacaaagtgcaaggc

SEQ ID NO: 333280 - DNA, 101 bp, Homo sapiens
ccaggtagcccaagagctatcaggggaagatatgcatcagttccatcgagccattactacagacgtaaaattcatcctgatcagaaaaatattaatgccta

SEQ ID NO: 333281 - DNA, 74 bp, Homo sapiens
tcagtacaactgtgcctggaaccagatgccctgtccgtcggcgctggtaactgataaatttcaaacggaagaga

SEQ ID NO: 333282 - DNA, 75 bp, Homo sapiens
gcggccgtaaggtgcatgggtagagatatgggcacggttatgaaatattttgtgttacttgtaacagttcaaaga

SEQ ID NO: 333283 - DNA, 74 bp, Homo sapiens
atttaagcctgatctaacccctagaaacagcatggcctgtatgagaagaaaaagacctcaagaaagcaacgaaa

SEQ ID NO: 333284 - DNA, 75 bp, Homo sapiens
ctatcgtggacgtcactggccctggtggggattgacagccacgggaaggcgtctacggtgacgtgcagcgcgtga

SEQ ID NO: 333285 - DNA, 83 bp, Homo sapiens
gctgcgggactctcattcctctgaaggccaagatcaaggctcgagatcttcgcgggaagaagaaggaggagctgctgaaacag

SEQ ID NO: 333286 - DNA, 90 bp, Homo sapiens
gaaaaactggatgttggtagaaaaagcaagagtttgttatatagcagtgattgatgagatttatcgtgtgttgagatatgtcaattctac

SEQ ID NO: 333287 - DNA, 100 bp, Homo sapiens
attatgaagatgacaaggatgatgatattagtgatactttctctgaaccagaccccaagactgcttctgagacagaaacagatatctgtgctgaatggga

SEQ ID NO: 333288 - DNA, 90 bp, Homo sapiens
ggaaaatctccccggtgactttcagctcagagagtggcaacagtgtgaaaagactgaaaccggaccctgagccagatgacaagaatcaag

SEQ ID NO: 333289 - DNA, 124 bp, Homo sapiens
tgggcgtcttcccaggctgtcatataactcctgagaatagtggttcttaactctgcagcggaggaggagaaagagatggacctcccggactcggcctcgagggtcttctgcggccgcatcctga

SEQ ID NO: 333290 - DNA, 100 bp, Homo sapiens
tggtggatgatgccagcacagagggttttgggctcaaaggccaaagtgagaagtccctgctgcaggagatggtgccggtggtgccaggccagacaggcag

SEQ ID NO: 333291 - DNA, 98 bp, Homo sapiens
tgaagtacaggctcagtctgcggccaagactccatcctgcaaggtctgtagcatctctgtctgttggagaaggcacaggtgtcagagcaccagtcaga

SEQ ID NO: 333292 - DNA, 90 bp, Homo sapiens
gagaaagctttccagcagtcagttgaacaagacaacttatttgataagcccctgaatgtgacagtgatccgcaggggggaaaaacaccag

SEQ ID NO: 333293 - DNA, 100 bp, Homo sapiens
atcttaagaagattcaagaaatggaaaagagcgatgaatctagcacagacttggaagagctgaaaaacgctgactggatggagtctggctctgtcgccca

SEQ ID NO: 333294 - DNA, 74 bp, Homo sapiens
gaacatcctcagctttatgtcctacgacgaaattagccagctccgcctggtgtccctggccagtgtccttccac

SEQ ID NO: 333295 - DNA, 100 bp, Homo sapiens
gaaagatcctacaggaatggatcctgatgatatttggcagctgtcctccagtcttaaaaggtcaataactgggagatggacaaactagagatggaagatg

SEQ ID NO: 333296 - DNA, 89 bp, Homo sapiens
taactgtagggaaggaagccttgattgtggacaaagccctagaagagccaaagtatagctcactgtatgctcagctatgtctgcgattg

SEQ ID NO: 333297 - DNA, 107 bp, Homo sapiens
atcttattggacaatgaatttcatgttaaggctccaaaagaagcacttgctcagtgtgtcttggcagagattccccagcaggtggtgggctacttcaatacatacaa

SEQ ID NO: 333298 - DNA, 100 bp, Homo sapiens
atcagtatccccctcgcctgccgggcgatctccattgaagttcaaactggaaacaagatggatgatgtgtcaagaagactaacagctgaaggaaaagaca

SEQ ID NO: 333299 - DNA, 83 bp, Homo sapiens
ctcagatggttattaatacgttttagcgcatttaaatcaaacggtattgagatggattgggttatgaaacataatggtccaaa

SEQ ID NO: 333300 - DNA, 82 bp, Homo sapiens
ggcccgaggccggaggaacccggactccggcgtagcgaggctgggaggcggcagaatgcagccagaggagggcacaggctgg

SEQ ID NO: 333301 - DNA, 135 bp, Homo sapiens
ttcctcttggaaggtgcatctgcagtacaggatatgaagaaattgagggttcttgccatgctgaagagctcactcattatgcttcagaaaacgtttgatctactaaataagaataagactggcatggctgttgaa

SEQ ID NO: 333302 - DNA, 90 bp, Homo sapiens
acaccaagaatggccacagccttgatcttgagccagatgattgtgcatccatttacatctttaatgtagatccacctccatctactttaa

SEQ ID NO: 333303 - DNA, 75 bp, Homo sapiens
gagcggcgcggtcttcgtggtgttcgtggcagccatggactttccccagcacagccagcatgtcttggaacagct

SEQ ID NO: 333304 - DNA, 100 bp, Homo sapiens
cctaattttatggatgtcttcacgtggtctttaccgtttgttggagaaaaaggttccaaggagcaggggcctcgacaaaggaagggagcagccccagcag

SEQ ID NO: 333305 - DNA, 50 bp, Homo sapiens
gcgccttgcagcactgctggaccaggcgatggatgactacagtgtgatcg

SEQ ID NO: 333306 - DNA, 90 bp, Homo sapiens
ctttgcagtgaacggcattctcttcaatcatgagagtcccagaagaggtgtggcttacattctaaagcttttggatcagtatcgggagtt

SEQ ID NO: 333307 - DNA, 83 bp, Homo sapiens
ggactgaccaaaaagcagctggacagcacaattggaatccaccctgtctgtgcagaggttcaggcaacagtagtgggttttct

SEQ ID NO: 333308 - DNA, 73 bp, Homo sapiens
ccttattatcggaccccgaggatcaggaaaaactatggttttgcaaaaggcatcaaattaaatcaagttcaaa

SEQ ID NO: 333309 - DNA, 75 bp, Homo sapiens
aatgggtttgaggactgtcccgatggcagcgatgaagagaactgcagtgttggctacgtttgtggttttaagaaa

SEQ ID NO: 333310 - DNA, 99 bp, Homo sapiens
atgctggtgccgctagccaagctgtcctgcctgggataaggaagcctgtgtgggtaccaacaatcaaagctacatctgtgacacaggacactgctgtgg

SEQ ID NO: 333311 - DNA, 111 bp, Homo sapiens
tccgtagggaggacaccgtgacttcccggacgctgggaaatggttggtcagcacattgtctcaagtagccttttgatgtcactgtggccatggccaactggtaggaccagc

SEQ ID NO: 333312 - DNA, 75 bp, Homo sapiens
cccactggctgctggagcttgtcaccaccagctctggcaggctgccctgagcacgctcaaccccaaccccacgga

SEQ ID NO: 333313 - DNA, 82 bp, Homo sapiens
atttggcatgaggagagaaaggaacctgaagtttttagcaaggaaggttttgggtcctgctcctcggtggtgttccttctta

SEQ ID NO: 333314 - DNA, 97 bp, Homo sapiens
tacagctttcactatggggtggagacgtggtactcagcaagctcgagttaaagttggatgtgctggaacagaagctgcagttcatcatctgctgtga

SEQ ID NO: 333315 - DNA, 87 bp, Homo sapiens
cctccacccaccggcccaccctacatttagcgcatcatgtgatccggagttgtctgctggttctcagcttgaagaagattctgcagt

SEQ ID NO: 333316 - DNA, 95 bp, Homo sapiens
attttagcttttctgtggctggtgaatggggatcccaggatctcacaatctcagataatgtgcaaaatggctcccatggttgggaaggatattac

SEQ ID NO: 333317 - DNA, 100 bp, Homo sapiens
cccagagggaaaagaagcccaaagttttaaagcatttggccatccagtgtcattggtctcagaggccagcagttattggagatgtccttcaagtctacag

SEQ ID NO: 333318 - DNA, 100 bp, Homo sapiens
ctcatcgctcgcatcgctgccgccaacgggcgcttctctgaagtagctttggaaagtagagaagaaaatccagtttgcttcttggagaacactggacagc

SEQ ID NO: 333319 - DNA, 100 bp, Homo sapiens
tgtttgaccaggcccagaggtccgtgcggcagcagctccagagctttgtcaaagaggtgtgggccgaagatatgctcatgtggtgttgaggaaagcagac

SEQ ID NO: 333320 - DNA, 90 bp, Homo sapiens
gaccgtgaccgagagcgtgaccgagagcgcgaatatcgtcatcgttagaaggctccaccgaggacaccgcgtccagcttgtgtggcgagg

SEQ ID NO: 333321 - DNA, 98 bp, Homo sapiens
cgagggctgggggccagaagacaagagagacggcgaggcgcgctccctgcccggcagcgactcggagtgcccttccgagaggccccggcgtactccaa

SEQ ID NO: 333322 - DNA, 100 bp, Homo sapiens
ctgtttattcaccatcaacaaagaagaccacacactgggaaacatcattaaatcgtgaggaaaagagccatgaatctaaacatcaggaatcagttaaaaa

SEQ ID NO: 333323 - DNA, 96 bp, Homo sapiens
ggacaaacccaaggtcatcattgtccaggcctgcagaggtgtgcatctagtgagagtgaagctgaaaatcttgaagcacaaccccagtctactgtc

SEQ ID NO: 333324 - DNA, 82 bp, Homo sapiens
gcgccgtggaccctgacggggacggtggctattatcatggaaaactaatttttcccagagaatttcctttcaaacctcccag

SEQ ID NO: 333325 - DNA, 90 bp, Homo sapiens
tatttcagaggaggggaacagtgatggaggttcatgtgtgcccagctgcccaaccccgtcctggacagcatcagcatcatcgacaccccc

SEQ ID NO: 333326 - DNA, 100 bp, Homo sapiens
ctgaagcctttaaatgcagcatctgcgatgtgaggaaaggcacctccaccagtgccggtggtggtgtgcacattgagccccggtatagacagttccccca

SEQ ID NO: 333327 - DNA, 76 bp, Homo sapiens
ggcaaagcgaaattggtcattctcgctaacaactgcccagctttgaggtttattacccagaactctttgtctgggt

SEQ ID NO: 333328 - DNA, 87 bp, Homo sapiens
ctcaagggggatcagctctattatttcaaagatgaagatgaaaccaagcccttgatctgggacttggctagtggcaaattaaaactg

SEQ ID NO: 333329 - DNA, 100 bp, Homo sapiens
ctgacaagaccaagtactaccttcaagcgggaattgacaaatcttcttggccttcaccccaaaattgaaatggctcgtgcaagctgctcggccctgatgt

SEQ ID NO: 333330 - DNA, 75 bp, Homo sapiens
gcaccccaacggcaacaaagaaaagaacgtgcctcttccagtggcttccggaagttcctggtccacaacgtcaag

SEQ ID NO: 333331 - DNA, 100 bp, Homo sapiens
gttgagcacggcgagcagtctcaggcctttagtgatgatgtttttcagttatgggacaaaaatattatatcaaaacactgaagctttgcaatctaaattc

SEQ ID NO: 333332 - DNA, 96 bp, Homo sapiens
tcaagatggaacaaagactgttgagtatgctccatgtagatcacgtttgtggagaaaaacagcgctttgagaagttgatggaacatttcaggaatg

SEQ ID NO: 333333 - DNA, 83 bp, Homo sapiens
ggcaacctctacaaggccaagttcatctcctccgtcaccagccacatctaccagcatgatgccttcttctgtagagtgggcgc

SEQ ID NO: 333334 - DNA, 90 bp, Homo sapiens
cgcgcacacacccggagtggccgcagatctgagccacatcgagaccaaagccgctgtgaaagatctttaatctcatgaagtacgacagct

SEQ ID NO: 333335 - DNA, 73 bp, Homo sapiens
agcagtctcaggcctttagtgatgatgctttggagtttaacccttctgccaatccagaggcaagcacaatatt

SEQ ID NO: 333336 - DNA, 96 bp, Homo sapiens
ctgaaaagacatctaatttcattgctcggcaggaggaggaggaggcccggctggccagcatgcccgcctggaggtgggacctcctgcggaagaagc

SEQ ID NO: 333337 - DNA, 100 bp, Homo sapiens
ggcgtctacaagagcgattgctacacatggacagtgatgatgaaattcctatcaggccctgaaagcagcagatctcacctgcattggaggatgagacgcc

SEQ ID NO: 333338 - DNA, 123 bp, Homo sapiens
cagactccaggtgaagcagccagcagaggtcagagagagacagctcacgttccggatcacagattctgctggccatattctctactccaaagaggatgcaaccaaggggaaatttgcctttac

SEQ ID NO: 333339 - DNA, 51 bp, Homo sapiens
gcgcccgcgccaccatcttcggctgaaggcgttcccacagctgtgcagaac

SEQ ID NO: 333340 - DNA, 82 bp, Homo sapiens
cagggcaagggtgtccgacggctggagcggagcccagcagccggggccgccctattacaccgacccaggaggaccggggatg

SEQ ID NO: 333341 - DNA, 82 bp, Homo sapiens
tgaagaacctgaaggacacactagatcctaattatctcatggctaatgaacgcatgaacctcatgaacatggccaagctgag

SEQ ID NO: 333342 - DNA, 96 bp, Homo sapiens
gaggattttgaggacacttgtggagagctcgaattccagaatgatgaaattgtgaggttccccaatacaactcatgagggtttcaatgtcaccctc

SEQ ID NO: 333343 - DNA, 74 bp, Homo sapiens
caaaaaactgttagagctgtcggacctcgcagtggcaatgagaagtggtaccatagaaacattaccagaaatca

SEQ ID NO: 333344 - DNA, 83 bp, Homo sapiens
cagacgctactcccgctggtttctcagtttttgaaatcatgaatcctgtttatagtcctggatcttctggggttccctatgca

SEQ ID NO: 333345 - DNA, 100 bp, Homo sapiens
tcacccaggaacaagtatctgacaggacttgatgacacgtaccttcgctgcattgagctgcacagccacacccttattcagctggagaggtgtttcacag

SEQ ID NO: 333346 - DNA, 105 bp, Homo sapiens
ggatcgacaagaccatgctggcaagtctgaaggtcaagcatagaatgtcaagctaaccaggcgtccgctacttcagaagagtgtactgtcgcatggggagtctgt

SEQ ID NO: 333347 - DNA, 100 bp, Homo sapiens
gaagcgggaagatggctgcagacaagcctgcagcggagctggagtttgttcagatcatcatcatcgtggtggtgatgatggtgatggtggtggtgatcac

SEQ ID NO: 333348 - DNA, 100 bp, Homo sapiens
acctacagctgtcaccttcatctcttctcaacactgccagctgtccccttggatctcccagacagacaacagggttgtagataagcatgagagtgtggag

SEQ ID NO: 333349 - DNA, 76 bp, Homo sapiens
cagtctcacatgaagaccaatttttacgtctagatttccatgcccatggaaggccaagatgctgaattatcaggga

SEQ ID NO: 333350 - DNA, 97 bp, Homo sapiens
cgccactgccgcaggaggcgtgagggccatgctgcaccttacaaaacggtctccgtccgcgcggccatcccgtccaccatcctccggcttccagctg

SEQ ID NO: 333351 - DNA, 98 bp, Homo sapiens
cctgtcggcagactggtgacttcacttttgagtgcaactgccttccaggtttattttcttgaaaaggctccaggcttcggcttggaaaatcccaccgc

SEQ ID NO: 333352 - DNA, 100 bp, Homo sapiens
ggagtgcgcagggcgacggccccacctccggccactgggacggcggcgcggagaaggcagatgagtgtgggtcagagagccaaactgactatatctccag

SEQ ID NO: 333353 - DNA, 100 bp, Homo sapiens
tggatgtagaaaatgagcagatactgaatgtaaaccctgcaggagacagtgtttcacaaaatgattttccttctgaagctcccatctccttgaatctttc

SEQ ID NO: 333354 - DNA, 96 bp, Homo sapiens
ctgcaatcacctccgaaagcacgtccagtatggcaatgtcccagctgtgtcagctgctgtgaaggtcctcagaatggttggaatgaccctccagct

SEQ ID NO: 333355 - DNA, 100 bp, Homo sapiens
cagttcctaccttatgagctcggttttcttatgcttataagagtggaacaggtaatgagaatcttcgccttgcgggaggtgttgtagcaggaaatgtggc

SEQ ID NO: 333356 - DNA, 75 bp, Homo sapiens
ggggggcgccccgatgagccccgagtgcgaggagccgccgccccccctcgcaggctcggggcccccagttcccgc

SEQ ID NO: 333357 - DNA, 108 bp, Homo sapiens
tttacatcgggaagcatcaatccggagtaactggcaagcaggcagcaatgaatgtggatcacgaggttaacctcttagtggaggaaattcatcgtttgggttcaaaaa

SEQ ID NO: 333358 - DNA, 98 bp, Homo sapiens
gttcctgtgggtgggggccacgccgcacctgcgcaacctcgccgtggccatgtgcagccgctacgtttcaagacaacagatgaattgtgaaagagagc

SEQ ID NO: 333359 - DNA, 51 bp, Homo sapiens
cttgtccatctgtaacttcattaaggaggaagtgcttgaaacctcgtcagc

SEQ ID NO: 333360 - DNA, 116 bp, Homo sapiens
atttggaggtggcaaacagcttcgcagtcactaatgcttacatcccagttaccagtgtccttgaattgatagtggcttctgtttgtcagtctcatataagaactacagctcatcag

SEQ ID NO: 333361 - DNA, 75 bp, Homo sapiens
ctgcatagtttcggtcatctaaaggaggttttaaacagtataacagagtgcctggaagagctgggatgtctggtt

SEQ ID NO: 333362 - DNA, 100 bp, Homo sapiens
aggaggaaggaagaggaagtgagagcagcggcagccggcggtgcagcagccggccgacccagagtgttttgggatttgagattgacgcggtgaactctgt

SEQ ID NO: 333363 - DNA, 101 bp, Homo sapiens
ttcgtacaccgcgacctcagccgcgaccgcccgctcgtactgctgctgcacctgctgcaacttgggccccttttcaggtatatgatgatggaaagtatgtg

SEQ ID NO: 333364 - DNA, 75 bp, Homo sapiens
ttttagtcctgactgtcactacatggctgtgttacttctgctctaagcgaaagacatgaggcctcagcctgaaat

SEQ ID NO: 333365 - DNA, 90 bp, Homo sapiens
gctgatgatcagaaacttatgatagatccggaaaatgaggcccataggaaacaagtgacttgctgagtccagataacactgactgtcaga

SEQ ID NO: 333366 - DNA, 87 bp, Homo sapiens
tttgatttccggagtcagtcattttactgtcaagacatttcttcggcattctgcaacagatggcccactgcgtgaccttggttcagc

SEQ ID NO: 333367 - DNA, 75 bp, Homo sapiens
accgagtgtcaggaaaacatcaccaagcatggtgaacgcattcttggtgttggtaacaaatgtggcaattatttt

SEQ ID NO: 333368 - DNA, 100 bp, Homo sapiens
cagaagtccaggctgagccaaaccaagcttcaagttagcttctttgaagggcagtctgcaccatgggactcggctaagaaagatgagaacagaatgaaga

SEQ ID NO: 333369 - DNA, 100 bp, Homo sapiens
cagcgggctgcagcgcgccaaaaccgggacggacaagaccctggtgaaggaggtcgtacaggagagcgaagaggaactttactcctcctgtcgccagctg

SEQ ID NO: 333370 - DNA, 51 bp, Homo sapiens
gcctccctagtagctgagattacaggtgcatgccaccacacccagctaatt

SEQ ID NO: 333371 - DNA, 97 bp, Homo sapiens
agcactgcgccgtttgggaacgcaactttgaggagacagtgcggtggtcttgtgaaaatgccattgtgtgctggaaacctggcaagatggaagatga

SEQ ID NO: 333372 - DNA, 101 bp, Homo sapiens
ggtcccgcacgtctgccgctgccaccggcgcgcccgaatggactagaggcttttaccagatttcttaaaactgaattcagtgaagaaaatattgaattttg

SEQ ID NO: 333373 - DNA, 83 bp, Homo sapiens
caaggagctaaagcagcgtgcgttcagccctgggggcgccctgcgtccggcagaggaggcgagcatcccgctcaggtgatgag

SEQ ID NO: 333374 - DNA, 88 bp, Homo sapiens
cagcctccccctgaagattctgccgctgattgctatcacttctgcagaatccagtgggttggttcttacttgaaatctccaaaattcc

SEQ ID NO: 333375 - DNA, 104 bp, Homo sapiens
ctagaatatacaaagacaaaaggagattctgatgaagaagttattcaagatgaattcagtttgcctgttctgtatgcaagttccgtagctttgatgacgaagag

SEQ ID NO: 333376 - DNA, 100 bp, Homo sapiens
tgggagctgctctgttgatgcttatcggaagctgtgctgaatggtttggtggccactgaggtgttgatgtggttttatgtcggagagattataggcaagc

SEQ ID NO: 333377 - DNA, 82 bp, Homo sapiens
tggacaccttctaagagtttggcgagtcagtgactgaagcgcccgtccattccaagcttgcattgaaaggctctagttacag

SEQ ID NO: 333378 - DNA, 95 bp, Homo sapiens
ttcatgcccaaatcccggaaactccagcgtgtctccagccgtgacttgcaggctacgttgaagcattggcttccaggttaggcctgtcaattcct

SEQ ID NO: 333379 - DNA, 100 bp, Homo sapiens
gtgccggcgagggggcagaggaggcggccaaggacctggccgacatcgcggccttcttccgatccgatcgcgctagcgagcttttatgaggacggagggg

SEQ ID NO: 333380 - DNA, 100 bp, Homo sapiens
aggatatcgacgtcgtgatccagaagtccagagctgaggactgcctgtttgcagtgcttgacaacatgaagaaagctctcaagttgctgaagactgaatt

SEQ ID NO: 333381 - DNA, 83 bp, Homo sapiens
agggacgtgcggagtgagtggcgctgcgggtggggccgtcggcggcgctggcggctatgagaggttttcctccgagtacccag

SEQ ID NO: 333382 - DNA, 90 bp, Homo sapiens
gagttgttcagaatcctccaaaaccagtcatgaccactagacccacagctgttaaagcaacagtagccggatcgagctgggagatgtgac

SEQ ID NO: 333383 - DNA, 90 bp, Homo sapiens
cgccgtgtggcacgacacaaaaatcaggtgacaaccagggcatccccatcatgtccagcatcaagctgaaagaggagcagcgcataacca

SEQ ID NO: 333384 - DNA, 100 bp, Homo sapiens
ctggttcctgccgcccgtctgcatggcccactgcatccgcctggcgctcatccgcttccacgtcaaggtggacgtctgatttatgaagctccccatccac

SEQ ID NO: 333385 - DNA, 82 bp, Homo sapiens
atagaattcactcaacaagtagaaacgtgagagaagaaaaaacacgctcagagataacctacaagcagaatgatgtggagat

SEQ ID NO: 333386 - DNA, 83 bp, Homo sapiens
tcccagttcatccccattcatcaccctggagccttccctcctcttcccagcaggccagtgagcaagaagaacccatcaggtga

SEQ ID NO: 333387 - DNA, 75 bp, Homo sapiens
ctgtggcaaactgaccaagcccaaacctcaagtttatatcctggaacctggagatcctcctttgttacagcaacc

SEQ ID NO: 333388 - DNA, 82 bp, Homo sapiens
gccgcagagcggggaggaggcggtggccctgctggaggagctctggatggcatgatcaacattgacatgactggagagaaga

SEQ ID NO: 333389 - DNA, 75 bp, Homo sapiens
tcttttccggccctgggatgtcacggtggagctggccctgctacagcgctcctaccaggacctggcctcgcagat

SEQ ID NO: 333390 - DNA, 75 bp, Homo sapiens
gaaatgaggaggagatggtggaggaggctgaagggtcctgaggacaccgtgagccagccaggcctggccgctggg

SEQ ID NO: 333391 - DNA, 83 bp, Homo sapiens
ctttcacaggctggatgaagattgggatccctgcatgtcactgagtccaccatgctttacagaagaagacagatttagtctgg

SEQ ID NO: 333392 - DNA, 98 bp, Homo sapiens
tttgttagatcatctctctattgtttacgtagctacagatgaatctgagacctcaggtggccagcatcgaaatgttcagccttttagtgatgaagatg

SEQ ID NO: 333393 - DNA, 98 bp, Homo sapiens
tggagatgaacctctaacacagtggaaaggaaccgttctggatcagaacgacaccgtaactatccgcactagaaagttcatgaccaaccgactacttc

SEQ ID NO: 333394 - DNA, 74 bp, Homo sapiens
gcttgtcctggctcttgccctcatcctggttctggaatcctcagttcaagagagaactcgatgccaccgcaacg

SEQ ID NO: 333395 - DNA, 74 bp, Homo sapiens
tgctataacctacaagcagttggacaggaccagaggagcgagagcagcaagaaccacacccagcagcaatgtca

SEQ ID NO: 333396 - DNA, 88 bp, Homo sapiens
ccagagccctggaacaaactgggtcccaatgatcaatacaagaatacagattctgttcatcttgctctgaaattaaataattctgaac

SEQ ID NO: 333397 - DNA, 100 bp, Homo sapiens
acaacaatgtcaaaggaacgacacttcccaggcaatcctttatcacaggatattctcaacttataccaggacccagatggaacccgaaagctactgaact

SEQ ID NO: 333398 - DNA, 87 bp, Homo sapiens
agcgacccgcgcaagcgcgagatcttcgaccgctacggggaggaagacaatgcagatcttcgtgaagactctgactggtaagaccat

SEQ ID NO: 333399 - DNA, 101 bp, Homo sapiens
gctgctcgcctgtctccgtcggaagggagcccaagctttgcagaggcttcaccgtatgttgtggaccatggggaatctggccctttgcgctgcaaccgctg

SEQ ID NO: 333400 - DNA, 100 bp, Homo sapiens
tatcattcgattacgaaataaaacggatccaaggagctggttctgctggttggaccaaacctcgtgagccagccacccctgacccaaatgaggagagctc

SEQ ID NO: 333401 - DNA, 101 bp, Homo sapiens
aaactcagcatgcttagcattcgagagaacaaaattaaacaactacctgctgaaattgtggctgacaagattttgaaaaagaaagaataccctctttatat

SEQ ID NO: 333402 - DNA, 83 bp, Homo sapiens
ggcagaggagggagcgtgtctgggcaagaaggttcagtttcggaaaccagccccaggtgcaacagacgcggtgccctcccgga

SEQ ID NO: 333403 - DNA, 102 bp, Homo sapiens
cgcggagcccggagctggggcgacgaggcgattgcgggggcctgggctaggcaccagattctccagccccaggctgtcagccaggccgagccgaaaacgtac

SEQ ID NO: 333404 - DNA, 100 bp, Homo sapiens
gaccttcctctgaaggcaaagtgacctgtgctgcattcatccgggtcgtgggctcggagtttgtacagaagtatctgggtgagggcccccgcatggtccg

SEQ ID NO: 333405 - DNA, 75 bp, Homo sapiens
cgtactgcacatcgtggtggtcggatttcaccacaagaagggctgccagaccgcccaggtttgctgaatgtgaag

SEQ ID NO: 333406 - DNA, 97 bp, Homo sapiens
gtttttcctgtcgtacgtgggacaggccacgctgtccgtccgcagtaccgacgcctgcagaagatggctgtgccacccacgtatgccgatcttggca

SEQ ID NO: 333407 - DNA, 96 bp, Homo sapiens
tcttaaaggactgatttttagaactccacatttgagcgaatgacaacagagctgctcaaggcgggaactctgagctaagcagtggaggtttctctg

SEQ ID NO: 333408 - DNA, 98 bp, Homo sapiens
cttggcccttgttcccccaaatgtctgactctgactctcggactgagaaacgcaaggggccaaaccagtgctcctgccacctctctggctgcccccta

SEQ ID NO: 333409 - DNA, 83 bp, Homo sapiens
cttcaagcccatcttggacttcagaacacctcacaactttgtgggttcagaaagacaggcaaaaactggagctactggacagc

SEQ ID NO: 333410 - DNA, 83 bp, Homo sapiens
cggcttggacgaagatggggagaaggaagcgagactcatacgcaacctcaatggccgtcctcatcgtcagcgggaacctcagc

SEQ ID NO: 333411 - DNA, 88 bp, Homo sapiens
ttcaagggacggatacaacgactagaggcatccttctttaaaagagaaatccacgttagctctccttgaggtctcgagttccctcggc

SEQ ID NO: 333412 - DNA, 83 bp, Homo sapiens
tggagccggagtgcgggcgcgccccaccaccgccctcaccatgacaatgcagatcttcgtgaagactctgactggtaagacca

SEQ ID NO: 333413 - DNA, 75 bp, Homo sapiens
acaagttgcatgaagagcatatcaatgcaggacgtacagttcaggagtccttcaataatgttaaacagtggctgc

SEQ ID NO: 333414 - DNA, 75 bp, Homo sapiens
atcccttgctcccatccctgcagcatgaacaagtatctggagtccatctttcaccatcttctcctgagattgtac

SEQ ID NO: 333415 - DNA, 100 bp, Homo sapiens
gttggctaccagggtatttagcctagttggcaagcgagcaatttccacctctgtgtgtgtacgagctcatgcatccgcagtgtcatgcagaagtacctgg

SEQ ID NO: 333416 - DNA, 75 bp, Homo sapiens
cctgcctcccctgcgtcccgccaccggccgcttctgtcctcgacctgaaggaaaagattatgcccttcattggct

SEQ ID NO: 333417 - DNA, 83 bp, Homo sapiens
cggggcacaggtgagccctggctgcgcgcgcggcccctcctccccggcgcctcccagttctccaaggagaagtacatcctgga

SEQ ID NO: 333418 - DNA, 104 bp, Homo sapiens
caacacataaaaattatttatccaacagctcctcccagaataactgaagtgaagtgatggactccgatttggagagtagtaagacgtgaaaggaatacacttgt

SEQ ID NO: 333419 - DNA, 100 bp, Homo sapiens
tgccgatgccagagccaggtgaactggaggagcgatttgccatcgtgctgctttgagagagaaaagaaccacagtggttgcacaactgaaacagcttcag

SEQ ID NO: 333420 - DNA, 100 bp, Homo sapiens
ttggctatgtcgagatcccctgtgtggccaagaagctggtgtgcggagatgaaggcatcgacatcctgtactcgggctcccagaaggccctgaacgcccc

SEQ ID NO: 333421 - DNA, 113 bp, Homo sapiens
cccaaagatgctgcgcagcaggatgcaaaggccgaagagaacaagaaggagcctctctgcaggcagaaaatctgctagaaaaatcacgggcaattcgccaagccagagacgag

SEQ ID NO: 333422 - DNA, 75 bp, Homo sapiens
agcgcggagcgtctactgtcagcagactatctgttatagtccctgggtcaagacaacaatttttataccttcgtc

SEQ ID NO: 333423 - DNA, 100 bp, Homo sapiens
ctcaagtgcgcccgaggcgcagggggcagcccttcgccacaagaagatgggcagatcatgtttgatgtggaaatgcacaccagcagggaccatagctctc

SEQ ID NO: 333424 - DNA, 83 bp, Homo sapiens
caacaggctgccaataaaggagcaagatggctaggggctttcaacagacctcacatctttcttcttatgaaattataactcct

SEQ ID NO: 333425 - DNA, 75 bp, Homo sapiens
tggaaaaaacttgtttaatggtgcagtcattggagaaatcgatgaagaaacagattctgcgcttgatttggggaa

SEQ ID NO: 333426 - DNA, 100 bp, Homo sapiens
ttctctggcaaggggaatgaggctgagaatgacctccatccgcaggacgaggagaacacaaagttatacctcaatttacttgaaatggaatatagtggtg

SEQ ID NO: 333427 - DNA, 75 bp, Homo sapiens
atgtgattgaggccctgcgcagggccaagttcaagtttcctggccgccagaagcaagccacccgaggggactgcc

SEQ ID NO: 333428 - DNA, 100 bp, Homo sapiens
cttcagctgccgcggtcgctccgagcggcgggccgcagaggcagcacgctggctcttctcctgaacttcctcgcctgcctggccagcttctgtgtggaaa

SEQ ID NO: 333429 - DNA, 98 bp, Homo sapiens
ctgtccctgctggaggagcgcttccggacagtaacagtgcctctaacatgaagcagaacagtttgcccattttccgggcaagcgtcactctggccatt

SEQ ID NO: 333430 - DNA, 75 bp, Homo sapiens
gtgaacttagctgttctttatagccaaatgttatcaggaactgttgccgttattacatcagatgggagaatgatt

SEQ ID NO: 333431 - DNA, 74 bp, Homo sapiens
ttacgtatttgtgtgacttgactcttcaaacacaaaggttccaagtttaagaaaattacttatcctctgggact

SEQ ID NO: 333432 - DNA, 83 bp, Homo sapiens
cgctccgtggccttagctgtgctcgcgctactctctctttctggcctggaggctatccagcattccctataaggagcccctgc

SEQ ID NO: 333433 - DNA, 50 bp, Homo sapiens
ctattgaaagagagtatgcacaggttttgatgatgatggttcagaatttc

SEQ ID NO: 333434 - DNA, 101 bp, Homo sapiens
caaggtctctcgcgggcgggagaacggaaaactcccaacttcctggaaaatatgagagccacacccgtgttcacacaggtgagaagccctttgagtgtgat

SEQ ID NO: 333435 - DNA, 100 bp, Homo sapiens
agcattggcgaccagcgcttcacggtgtgggccatgtttgaggattgccccagcattcagttctatgagtaataaatatccacaggctgttttcttggaa

SEQ ID NO: 333436 - DNA, 98 bp, Homo sapiens
gtttttaggaaacttgagaagcaactatacacctagaagtaatggctcaactgatttacagacaaatcaggtcctaaagaagacgaagagaagccttc

SEQ ID NO: 333437 - DNA, 100 bp, Homo sapiens
tgggaggaagtaccaggcagaccggcttcaggttactcaaatgagtcgtccagacttgattctctttctgatgaaatacctgatggctctcatagttggc

SEQ ID NO: 333438 - DNA, 97 bp, Homo sapiens
tgtggcaagagtagaaggagcatcgatgcagaagaagctcattcacacagaagacccatttaatgatgaacatcaggagaggcaagaggtggaaatg

SEQ ID NO: 333439 - DNA, 82 bp, Homo sapiens
ccatgtttgtcccagaatctacgtctaaactgcagaagtttacaagacctcctgccccccgaggtctgcagtctcctgaacc

SEQ ID NO: 333440 - DNA, 89 bp, Homo sapiens
ggatttctacgacccggagcacccgacccctgagcacgtgtggttctcaaatataggcattctgatgggaacttgtgtgttaaagtaac

SEQ ID NO: 333441 - DNA, 50 bp, Homo sapiens
ttttgttggattgaaacagctaatcgtctattacaatggctaccatggag

SEQ ID NO: 333442 - DNA, 82 bp, Homo sapiens
atgtcgggttattcgagtgaccgagaccgcggccgggaccgaggtcttccgtgtgtgctaagatcgtgcagctcctggggca

SEQ ID NO: 333443 - DNA, 83 bp, Homo sapiens
ctggaataaaagagggcagaaaaggcgccgggcgggcccgacacacgccggaggagccggccttatgccagcctggaccatct

SEQ ID NO: 333444 - DNA, 100 bp, Homo sapiens
tcctgcagcccagtggatggagtccagaatctacagacctgccagcctcccgagcacaacaaggagaggtgatgaggttggcatgtcgtttggatcccaa

SEQ ID NO: 333445 - DNA, 75 bp, Homo sapiens
cttcagaaaccaggctgctttcaggaacattgctgtggattcccaggattctggactctacttataatatcccta

SEQ ID NO: 333446 - DNA, 100 bp, Homo sapiens
tccccgccgagccgccaccgcaggtcgaggacggtcggactcccgcggcgggaggagcctgttcccctgagtgggatgccatcactgaaatggatgaaca

SEQ ID NO: 333447 - DNA, 75 bp, Homo sapiens
cgaggtcgtcgacgccatcatgaccacggcccagaggaaagaccacagcaagattctttcattcgtctcctccta

SEQ ID NO: 333448 - DNA, 75 bp, Homo sapiens
aaaagataaagtgttttggttttgatatggattatacccttgctggaataatgtatttgtggccttggacatgag

SEQ ID NO: 333449 - DNA, 90 bp, Homo sapiens
gcagttgccctctggcgccatgtcgcagaacggagcgcccgggatgcaggaggagagcctgcaggaccttcacggcatggtgcaactccc

SEQ ID NO: 333450 - DNA, 75 bp, Homo sapiens
ttcgcagtggtcgcttcttctccttgtgtattcattgccttcaagaaagctggtggctctacagttaagatccat

SEQ ID NO: 333451 - DNA, 98 bp, Homo sapiens
agacattctgcgtcaggtccgggctcctggacttcgcctttcccgagccctggaggtggggagaaaaggagcatggcggcatttgcaggaatgtgtga

SEQ ID NO: 333452 - DNA, 100 bp, Homo sapiens
gtgaggggcgcgcgcctgcccagctttgcagcccccgaacgcggcctcgcacaggatctttatgtcgctgaagctttatccactctggaatcctggagga

SEQ ID NO: 333453 - DNA, 96 bp, Homo sapiens
agaatataattatgactatgaaaatggctttgcaattggtatctccagtatacattcccctagtctaagggaaaggagtttcccaccaacccagcc

SEQ ID NO: 333454 - DNA, 100 bp, Homo sapiens
aaagaagaatcagcaaatactactgaaagtgcaatatttgagtatcactgcgaggaccgtataattgatgccggcccaaaaggaaattattctcgcttca

SEQ ID NO: 333455 - DNA, 76 bp, Homo sapiens
ggggagagcctgtttgcgcagtacccccggagggcggaaggccgccgagatgcctgtgaggagccaccaacatttg

SEQ ID NO: 333456 - DNA, 74 bp, Homo sapiens
tccttctggtgaattcaggaagactaatcaaagaatagataacaagtgcagtgaagagagaagggcacagttac

SEQ ID NO: 333457 - DNA, 90 bp, Homo sapiens
gcagcggcggcagcagcaccaggctctgcagcggcaacccccagcggcttaagccatggcattgtcacagccctggccattgcgggaacc

SEQ ID NO: 333458 - DNA, 96 bp, Homo sapiens
ccttctccaaggaccacgagcaactctacatcatgtcagagaggcagtccctggtacgtgagcccctttcccggcgccggcagctgctccgggaga

SEQ ID NO: 333459 - DNA, 96 bp, Homo sapiens
gcggcggcggccgaggacggggacagcgacgacgcggaggcagagaagggaacgcccggcccagccccgattcaggagcagttccagaaaaatccc

SEQ ID NO: 333460 - DNA, 50 bp, Homo sapiens
tgcttgaaaacatggggattggaattcggattgacttctaaggactcttg

SEQ ID NO: 333461 - DNA, 51 bp, Homo sapiens
ggtgaagggggcttcctgaccgaggaggagtatttgaagacttctgagcgg

SEQ ID NO: 333462 - DNA, 75 bp, Homo sapiens
cttcgagcttgtgccaaataccacatggaaatgaattctaaggttctggggctgctggtatggacgcttattgct

SEQ ID NO: 333463 - DNA, 83 bp, Homo sapiens
caagcagcagtgaggacaccaaaggttgctgcttttgctcagaggacatccatgaccctaatggtctttttgttcaagataaa

SEQ ID NO: 333464 - DNA, 82 bp, Homo sapiens
tagatattcagaagaaggatgctgttaaaaggattttttatcaagcagaaatgcatcgaacaacgagaatcaagatcactga

SEQ ID NO: 333465 - DNA, 100 bp, Homo sapiens
gacgacgacgacgaggaagaggaggtttctgaggagagccttgaacttaggaattcttcgagatcctggatcagaaatcgaagacagacaataccaaata

SEQ ID NO: 333466 - DNA, 50 bp, Homo sapiens
ggacttcgggagccagtagccaagatcctgaggaggatgaaggggctggc

SEQ ID NO: 333467 - DNA, 92 bp, Homo sapiens
gctccccagggcccacgggccagccccgccgccctcgcaacctggcagccgccgccgtggaagctttgggatgcgacatcagcaaatgagag

SEQ ID NO: 333468 - DNA, 90 bp, Homo sapiens
gggcggcgtgcccagcaagagattaaagatgcagtacgccacggggccgctgctcaagttccagatttgcaaatgaagctcgtgaccgag

SEQ ID NO: 333469 - DNA, 100 bp, Homo sapiens
tctcctctgctggagccaccagttcccgcaagcccagacaatgccggtggaggaatttgtggctggctggatctctggcagctgctcccaaccccagaac

SEQ ID NO: 333470 - DNA, 96 bp, Homo sapiens
ttccgagtcctggtggtgtcggccaagttcgaggggaaaccgctgcttcagagacacaggaccatggccaacctggagcgcaccttcatcgccatc

SEQ ID NO: 333471 - DNA, 100 bp, Homo sapiens
cactcggggactctgccttttaccggttggacgtgataagtatgagcctgcagctgtttcagaacaaggtgataaaaagggcaaaaagggcaaaaaagac

SEQ ID NO: 333472 - DNA, 98 bp, Homo sapiens
atcccagggagtgcaagcttagagcgtctggccaagaatcagaggaagtggatctacacagactgggccaatcattacctagccaaatccggccacaa

SEQ ID NO: 333473 - DNA, 100 bp, Homo sapiens
cgggagcacctgggggaccgcttgcagcggggacgcgaggacccgggctgggctttcctcacccggatttctccacccaggtgaactcctccctcacctc

SEQ ID NO: 333474 - DNA, 100 bp, Homo sapiens
atcatttaatgcataaaaactgcaatcatttttcttcagctttatcagagacttaattcagtgcacaaatgagatgaatgtgaacatcccacagttggca

SEQ ID NO: 333475 - DNA, 82 bp, Homo sapiens
ccactttcgccagcccgtgccgcgagcgcggcctgcaggagatcgctgccgttttgcccttgggagtaggatgtggtgaaag

SEQ ID NO: 333476 - DNA, 101 bp, Homo sapiens
gtcggggaaaatatagtgaagtatttgaggccattaatatcaccaacaatgagagagtggttgtaaaaatcctgaagattttctctgtgggcagttctttt

SEQ ID NO: 333477 - DNA, 82 bp, Homo sapiens
cgccgagatgacgggctttctgctgccgcccgcaagcagaggaagctcttcgtgggcggtcttgactggagcacgacccaag

SEQ ID NO: 333478 - DNA, 75 bp, Homo sapiens
cagaacttcaaaatactacaagcaggttttaagagaatgggtgttgacaaaagctaaaacgtcatcctctcttca

SEQ ID NO: 333479 - DNA, 75 bp, Homo sapiens
ctgagcctgttggaggaactggcccggaaacaggaggacggccgagaactactggtggcgtggccagaacacacg

SEQ ID NO: 333480 - DNA, 100 bp, Homo sapiens
caccccattccggaggacaaaggaaagtgtgctaataaggttcccgtgtcagtggctatgatgacacctcaagttatcactccccagcaaatgcagcaga

SEQ ID NO: 333481 - DNA, 76 bp, Homo sapiens
agccagttaggaggcttttcaatcactagttcagctttgaagatactgctataatttgaaaatttgaaattagtgt

SEQ ID NO: 333482 - DNA, 80 bp, Homo sapiens
gtgactttgctggaagatttggagagggagcttgatgaacctagacagcagctgagatctgtatctgtggacctgaatgt

SEQ ID NO: 333483 - DNA, 90 bp, Homo sapiens
cgctatggaggagctcgatggcgagccaacagtcacttccaaaagaaactcttccttcaaaacctgtgaagaaagagaaggaacagagga

SEQ ID NO: 333484 - DNA, 90 bp, Homo sapiens
aaggaatcatcgaggcatgggggtccacactgcaatgtttttgtggaacatggtggcacaagaatggctcaactctccaaatagagagaa

SEQ ID NO: 333485 - DNA, 98 bp, Homo sapiens
aaagacacatccctgcactctgccctgatggaagccatccactctgcgggagggaaggacagactacgcaagcatcctgaggttagcattacacttct

SEQ ID NO: 333486 - DNA, 49 bp, Homo sapiens
cgccggagccgcgaggccaaacttcccaagtaagaagcggaagaggagc

SEQ ID NO: 333487 - DNA, 50 bp, Homo sapiens
taattagcccaagaaacattatattcatacaagttggatggcttgaggac

SEQ ID NO: 333488 - DNA, 88 bp, Homo sapiens
ggaaggactggtcatctctttcatatctcaaaaccatggctcaggaaaacgacagcacgtgttctttttcactagtagaagtgacgtt

SEQ ID NO: 333489 - DNA, 101 bp, Homo sapiens
attgcaatcatggtgcagaaataccagtccccagtgagggtgtacaaatacccctttgaattaattatggctgcatatcacacctgaaaaattttatgtgg

SEQ ID NO: 333490 - DNA, 83 bp, Homo sapiens
cgcctccccggcgccgccgtggctcgacggagaccagctaggacaatgcagatcttcgtgaagactctgactggtaagaccat

SEQ ID NO: 333491 - DNA, 90 bp, Homo sapiens
cgtggatcagacactgcgagagcgggaggctggcaccgacagtgatgtgtgttctgaaattgtgaaccatgagtctagtacttaatgatc

SEQ ID NO: 333492 - DNA, 100 bp, Homo sapiens
cctgcaccagacccaggactcccaggtctactggacagtggcgtgtgggttttcagagaaagatgctgatgaggtgaaaggaatttttgtagataccaac

SEQ ID NO: 333493 - DNA, 74 bp, Homo sapiens
agctggtgcctgtgcaagttgttgagttgccagagtctgccctccgagacctcatcgtagccaccattgctgtc

SEQ ID NO: 333494 - DNA, 78 bp, Homo sapiens
gagaagggaaatggcaagggagcattccaggagagaaagggggggccctcagcctcttggccttgaacgggctgttca

SEQ ID NO: 333495 - DNA, 83 bp, Homo sapiens
ccgaggcagcgaggcaagggggagatcactcccgctgcgattcagaaggacccagatgatgtggtaccagttggccaaagaag

SEQ ID NO: 333496 - DNA, 51 bp, Homo sapiens
agcctcccgagtagttgggactacaggaagactatgaccgtctgaggcctt

SEQ ID NO: 333497 - DNA, 75 bp, Homo sapiens
aaatttgatgtttcgtcagagttactagagggaattgctagatgtgtggactgagctacaggatatccatgatgc

SEQ ID NO: 333498 - DNA, 83 bp, Homo sapiens
cgtacacagtgggcaggcacacgcaggccactactattccttcattaaggacaggcgactatttcttggcctctgccagctgc

SEQ ID NO: 333499 - DNA, 82 bp, Homo sapiens
agaggccgggggcagccgccatcggcagcgccaggcgtccgagctgggccacagcctgaacgagaacgtcctcaagcctgcg

SEQ ID NO: 333500 - DNA, 74 bp, Homo sapiens
ggcaagtacgtcaagaagtgccaggacatgatcatgactgagggttatgtggtccgaatcagtggtgggaacga

SEQ ID NO: 333501 - DNA, 100 bp, Homo sapiens
atcccagacaaatggaagtgttatgatgcccttcgaaaaatgatcaactattgaccatataggcgggacccttgcgtttgtcagcccaagcctggcggtg

SEQ ID NO: 333502 - DNA, 83 bp, Homo sapiens
gagctggtgtcctgcgcagactgtggacgctctgagaaaagaaaccttgtttattccctgtgaaaatgagaagatttctaaac

SEQ ID NO: 333503 - DNA, 100 bp, Homo sapiens
aatgcctatgatctggaagccaacctggctgtcctgaagctggatctggacaactctcctctgtccccaccttcaccaaggaccaaaagcagaacgcata

SEQ ID NO: 333504 - DNA, 83 bp, Homo sapiens
ctactccaacccaaacaacaaccaagccagtttaatggggatgaacgtagggcacttagcttcttccaccagaagggcctcca

SEQ ID NO: 333505 - DNA, 74 bp, Homo sapiens
ctagaaagaagaacctcggccacagagctagcgctgaacacagcccagtttgcaaagagtctagccatgcttgg

SEQ ID NO: 333506 - DNA, 90 bp, Homo sapiens
atgatattcagtggtgtttttctcaggtgaaaggagcagtagatgatgatgtagcagaagcacctgtggaatcctctcaagaggaacagt

SEQ ID NO: 333507 - DNA, 99 bp, Homo sapiens
tccaggaagatgcctttgggaagcatgtcaccaacccggccttcaccaaactccctagtctcacattcccagtcaggaggtcccaggcacccaggtggg

SEQ ID NO: 333508 - DNA, 90 bp, Homo sapiens
accagcgctcagcccacctgtgattatgggattggccaggagcacttcttcaagaagatcgaggctgctcactgcctggcctgcgacatg

SEQ ID NO: 333509 - DNA, 100 bp, Homo sapiens
gctgtgcattgttggtgggattctgctcgtgttccaaatcatcgcctttctggtgggaggcttgattgaaatggaatctagttcatcagactactataat

SEQ ID NO: 333510 - DNA, 89 bp, Homo sapiens
cctggcggagctccacgacgagctggaaaaggtgcaagcggtcttctctgtcttctttatggccagtaaaattctccagaagagattta

SEQ ID NO: 333511 - DNA, 100 bp, Homo sapiens
gggaggaagccctttctcctcggcactgtattctttacctgcttcccaatcccactgatgaggatcagcccatggttggagtgcagtggcacaatcacag

SEQ ID NO: 333512 - DNA, 95 bp, Homo sapiens
aggaaacatgctagaattacctggaacttcatcatcatctacttcacaggaattgccatttagtactattaatcccgtagatgcaatatatcaac

SEQ ID NO: 333513 - DNA, 83 bp, Homo sapiens
gcggcatggcgtcggaggggccgcgggagcccgaaagcgagaactccatccggcacaacctgtcactgcatagtcgattcatg

SEQ ID NO: 333514 - DNA, 83 bp, Homo sapiens
gtggaggtggagaagccacgagaggagctcttccagctgtttggctacggagacgtggcctgtcatctttacttcagagtgtt

SEQ ID NO: 333515 - DNA, 105 bp, Homo sapiens
ctcagatctgtggagcagatccgatggagaggctgagctgctccaggacttggggatattcaaatagaagccttgctgatgagagcctgtgagcccataattcag

SEQ ID NO: 333516 - DNA, 75 bp, Homo sapiens
caaaaggtgatctggacaaaggaacaggtatctcaggatgttgccttatggctgtttagcaacaggagatcgctc

SEQ ID NO: 333517 - DNA, 90 bp, Homo sapiens
cattaatgcaagtggaaggaaactcttcaccaaagaattgatcacatcatgaaagcattaaagggcagtatttaaagtcagttggcaagc

SEQ ID NO: 333518 - DNA, 99 bp, Homo sapiens
ttccggcggccgaagacactgcgactccggagacagcccaaatatcctcggaagagcgctcccaggagaaacaaagccgacagttagaatcagaaactg

SEQ ID NO: 333519 - DNA, 83 bp, Homo sapiens
cgccgcgtgtcctcggagcgcggtccctgtattggtctcctgctcctagaggagccttcacgtaaatgggtccagtcatgcct

SEQ ID NO: 333520 - DNA, 101 bp, Homo sapiens
ctcgctccgtggccttagctgtgctcgcgctactctctctttctggcctggaggctatccagcaaggatatggccctgaagccacatgagcggaaggagaa

SEQ ID NO: 333521 - DNA, 75 bp, Homo sapiens
aagggaaccaacccactttctcggcgccgcggctcttttctaaaagtgtagctacagcaagctgggtagcaggca

SEQ ID NO: 333522 - DNA, 90 bp, Homo sapiens
cgcaagttggctagtctctgcggccacctccggaagggtccgccggctgtgctgggacccagaccccaggaggcctcaccccacagcaag

SEQ ID NO: 333523 - DNA, 100 bp, Homo sapiens
ccaggtccaccacctgctccatttgcaactcctgcagtgtgatagtcctcggacagaatcacaaagcctccttcagcagagttcctcccccttcagagga

SEQ ID NO: 333524 - DNA, 96 bp, Homo sapiens
gttccacgattaagtgttggtgctgttagtagcaaacctactactcctactataggaatcatcatgttggttggctggttactgggaaaagatatc

SEQ ID NO: 333525 - DNA, 50 bp, Homo sapiens
gaagaatcccccagggcccagagatttgtgccaatgtaatggaatattgc

SEQ ID NO: 333526 - DNA, 96 bp, Homo sapiens
ctgaataaagctgttttggaactgtcaggtacctcaaagcggtcctgccctccggaggagcagcctcgaggctggtggttttcagagcaggaggcc

SEQ ID NO: 333527 - DNA, 82 bp, Homo sapiens
ctcacctatgatattcagtctttcacagatacagaaataaactatcaatcttgcccagactggagaaaggactgcagcaaca

SEQ ID NO: 333528 - DNA, 100 bp, Homo sapiens
cttacctcacaggacagtggccacgggatcctcatgttcactacccttcatgcatgaaagacaaagctactcaggttggcgtgcagtggtgtgatctcag

SEQ ID NO: 333529 - DNA, 100 bp, Homo sapiens
ggagaggaagcggcggcggcggcgccgggcccgggggtggtgacagcaggtctgaggtctcggcgcggaagatggccggcggcgtggacggccccatcgg

SEQ ID NO: 333530 - DNA, 75 bp, Homo sapiens
caggagagctgctaaaaattactgcggtgaacagtggggcccaggctttgatgagtggttcaaaccccatgctgg

SEQ ID NO: 333531 - DNA, 100 bp, Homo sapiens
cctcggggacccttcgtgtccggtggttgctgttgcttggcctggtgggcccagtcctcggtgcggcgcggccagcagatataatttctacagtagaatt

SEQ ID NO: 333532 - DNA, 100 bp, Homo sapiens
aaacaagtggaatagtgctgtcttccttgagcatcctcctcaagtggacaaaaggcttcaaggcatctggctgcgagggcgaggacgtggtgaccctgct

SEQ ID NO: 333533 - DNA, 100 bp, Homo sapiens
tctgtagaccagctccaacaggattccatggtagctgggatgttagggctcagtatcctggtgtgaaccagctatcctccagtataggaggattgagtct

SEQ ID NO: 333534 - DNA, 100 bp, Homo sapiens
caggaggtgcagatcacagaggagaagccactgttgccaggacagacgcctgaggcggccaaggctccaggaggccagagctctactgaagcggcggcgg

SEQ ID NO: 333535 - DNA, 51 bp, Homo sapiens
ccgccctggccatctaccatgtgatccctttgggcgtcccacaagcttcgc

SEQ ID NO: 333536 - DNA, 100 bp, Homo sapiens
cagaagacttgttccatgaaagtacattggggcacttccagtctcatcagattttccatgtcctggtggtggcagcagcctttgtccacttctatggagt

SEQ ID NO: 333537 - DNA, 50 bp, Homo sapiens
agcagtttcgggaggagttcaacgtaattctgactcgaaggacagaagag

SEQ ID NO: 333538 - DNA, 75 bp, Homo sapiens
gtggcggtgtgaactgtgaggagttcgccgagttccaggaggcagtgtcgcattgccctgaagaaggccaactgg

SEQ ID NO: 333539 - DNA, 100 bp, Homo sapiens
gctcttctgtctccgatttcctgaacggtctaagctgaaggacacttgtatattgtgatggaatactgtgatggaggggatctaatgcaaaagattaaac

SEQ ID NO: 333540 - DNA, 75 bp, Homo sapiens
ctaaaaacaaaattgccagaaaatctttcctctaaagtcaaactggggcataatcaacccatttcctgcttcaaa

SEQ ID NO: 333541 - DNA, 100 bp, Homo sapiens
tgtatgcactttactacaaagatggacttctctgtacagaactctaagaaggagctgatgtggaggagcagctgagacagttcaagatgacgaccacagt

SEQ ID NO: 333542 - DNA, 100 bp, Homo sapiens
gcctaaagtctgagagagggaagtcgcctctgtgctcgtgagtgcatggggtataagacaatggcgatgaccactcagaaggaggcctggtggagaacca

SEQ ID NO: 333543 - DNA, 75 bp, Homo sapiens
aaagtccacaaaaacagcacccgctcctagatggcgtagatggtgagatacccttcatcaagctgaagaagtttt

SEQ ID NO: 333544 - DNA, 83 bp, Homo sapiens
ctggcaaaagcacaaggattctcgctgtgacagagacaacaccgagtatgagaagttttaaaatcaaagatgggaaaatcgga

SEQ ID NO: 333545 - DNA, 90 bp, Homo sapiens
acataataagacacaatctattctgctgattcacaattatggagactgttgtcttctgtggcttcagcgtcacctagtgcaggctgccat

SEQ ID NO: 333546 - DNA, 100 bp, Homo sapiens
cagaaatcacattggaccctcctcccaactgtagattacaggagcttattaatcataagaaggctgaggacacagagaagaaagatgagcccagcaaata

SEQ ID NO: 333547 - DNA, 75 bp, Homo sapiens
aatggcaaataacttttccttggagagtcataacatatcactgactggaaaaccagtagattcccagacatcgcg

SEQ ID NO: 333548 - DNA, 100 bp, Homo sapiens
taagcgtgccgttcagggtccagaagaaacagctattgacctgaaaagtggttctggaaaagtgtaccaaggccctgcaaaaggtgctgctgatacaaca

SEQ ID NO: 333549 - DNA, 74 bp, Homo sapiens
taacctcggggaccgagatgcaggcctccggtgtggctgtctctgatggtgtcatcaaggtgttcaacgacatg

SEQ ID NO: 333550 - DNA, 50 bp, Homo sapiens
cccaggagtcatcggacgccagaatctggctcttgtcaggatggtgaagc

SEQ ID NO: 333551 - DNA, 50 bp, Homo sapiens
cacaggactatcttgcaggaacctagacccaacatgagtgaagtttcctg

SEQ ID NO: 333552 - DNA, 101 bp, Homo sapiens
atgacagttcacataagaagttcttcgatgtatctaaacttggcaccaagtatggtcatcatcagatttgaaatatttaaagtggatacaaaactatttca

SEQ ID NO: 333553 - DNA, 98 bp, Homo sapiens
tgcagagattttgttttgaattgtgaaatacttccacctcttttagagacattgccgagaatggctgcgcccccaccccagaagagcagctgccaaag

SEQ ID NO: 333554 - DNA, 100 bp, Homo sapiens
gcgcgagtgaggaaaggaggtactgtaggtgtgttccagagaacaagccttcagacatttgctatattgacgctgagctgtcaggggactcaggcttatg

SEQ ID NO: 333555 - DNA, 82 bp, Homo sapiens
acggctgcggcgacaattttgctcctgtgacgtttgatgacatcactgtgtacttactccaggaggaatgggtgctgctgag

SEQ ID NO: 333556 - DNA, 74 bp, Homo sapiens
ggcggatctctacatttctgaaggtgtccgcaatgttgccagtgtctgtctgcagattggctacccaactgttg

SEQ ID NO: 333557 - DNA, 82 bp, Homo sapiens
gtgagctcggccggcaaccgagggacccgcgtccaggggtcgggccccggctcagtggtcccaggcagctcgggtgtcggaa

SEQ ID NO: 333558 - DNA, 75 bp, Homo sapiens
ttgagccacgtgcatgaaccaaacccacttcgttcaagacaggtgtttaagcgtgcacagcgacttcaccgcggc

SEQ ID NO: 333559 - DNA, 90 bp, Homo sapiens
agcacgatgagctcaatcggcactgggacgttccatcctcagagcagcctgaactgttcctaaagaaacttcagcagtgctgtgtcattt

SEQ ID NO: 333560 - DNA, 125 bp, Homo sapiens
gcaaattattagctaagaaagcagaggttaatacaatccctggctttgatggagtagtcaaggccgaaatagaactatttgtgaacagacttgattcagtggaatcagttcttccttatgaatac

SEQ ID NO: 333561 - DNA, 100 bp, Homo sapiens
gtctccttgctctgggctgctccaggccaggccatgcggggggctgttgtggttccgactataaacagtacgtgtttggcggctgggcctgggcctggtg

SEQ ID NO: 333562 - DNA, 100 bp, Homo sapiens
acggcgtgggcatcattggcttcttcaagcgttgggccggagcactagcctcacggagaaggatctgaaagaagccaaggcgcggagccagcagattgca

SEQ ID NO: 333563 - DNA, 83 bp, Homo sapiens
atgctggtgccgctagccaagctgtcctgcctggcctactcaatttgaagacattgaggatgaagacctttatgatgatccac

SEQ ID NO: 333564 - DNA, 83 bp, Homo sapiens
caaaaagaaagcatctgccctgttgttcagcagtgatgaggaggtactggttcttgcacctacaagagagttggcaaatcaag

SEQ ID NO: 333565 - DNA, 75 bp, Homo sapiens
atgagtgatgtggaggaaaacaacttcgagggcagagcttgtccagccggaagccctgagggcagctgttcccac

SEQ ID NO: 333566 - DNA, 100 bp, Homo sapiens
agagtttggagccccggagtggggtgtcggcgcctcattcgggtggagctgagccggagacagttactccacaggatccgctgaacataggatgttgcca

SEQ ID NO: 333567 - DNA, 100 bp, Homo sapiens
acgtttagcatcagtgactcacaaatcagcaacacagaatttctgcaagtaattgattgcagagggaatggcatacatcgagcggaagaactacattcac

SEQ ID NO: 333568 - DNA, 100 bp, Homo sapiens
gagaggatcatggcggatggccccaggtgtaagcgcagaaagcaggcgaacccgcggcgcaataacggtcgccgccctggagaggcaggtgtttgacttc

SEQ ID NO: 333569 - DNA, 100 bp, Homo sapiens
ccatggaactcattattgcacatggacgggtttggaatcacttgctaggagtcttgtctctctgccacccaggacatcatggcagctcacctggtaaagc

SEQ ID NO: 333570 - DNA, 90 bp, Homo sapiens
cctgtctctcaggctccctggtctccctgcactgtcttgggactttaactgcacttcgaatgtgttaccaaggttatggttaccctttga

SEQ ID NO: 333571 - DNA, 89 bp, Homo sapiens
acgttcgcgtcatcacggacgagaactggagagaactgctggaaggagactggatgatagaattcactggaagacgcaacgcagtgagg

SEQ ID NO: 333572 - DNA, 134 bp, Homo sapiens
tctacacccagattatgcttttggaaaatgagaacaaaaatttaaagaaagatttgaagcactacaaacaagcagctgatcagaaattggctttggaaaaatggaaacctacatcaaattggaaaagcttggag

SEQ ID NO: 333573 - DNA, 82 bp, Homo sapiens
gagcctttggggcaccacagagatgcgggtccagctgggagctccccgacctccaggagggcaagatccaagccatcagcga

SEQ ID NO: 333574 - DNA, 75 bp, Homo sapiens
ggtccctgaagagggaagacacgcggaaacaggccaccccagcagacatgtttgccaaggcctttcgggtcaagt

SEQ ID NO: 333575 - DNA, 100 bp, Homo sapiens
cgtggctgcgtcaccgccgcccccccagacaagatggacaccgcggaggaagatgatgaaacatgcttggaataattataaaggttatgcctggggatta

SEQ ID NO: 333576 - DNA, 97 bp, Homo sapiens
aatgcagtcaccgtgggtggtgtggcagctggaattgggggcctcgaggttattgaaagctatgggttggcaggaatatcctgaaaatgatgagaat

SEQ ID NO: 333577 - DNA, 98 bp, Homo sapiens
gtgttcaccaaaacaccagcatggtgtaccagctttggctagatgatgctcagttggtagctggcagtgttgtgatggcttttgaagaagtatgcccg

SEQ ID NO: 333578 - DNA, 93 bp, Homo sapiens
agttggaagcagccgatccagcctgcggagcctgtggggcaggtgaaaggaaagcaagccaggatggatatttacgacactcaaaccttgggg

SEQ ID NO: 333579 - DNA, 100 bp, Homo sapiens
cttcaccgccaggacctccttcttcaggagagcgccccagggcaagccccgctccggccaacaagtattctgagagaagcctcacaaagtgtattggaat

SEQ ID NO: 333580 - DNA, 82 bp, Homo sapiens
ctcgctctgggtctccaggcccgcgaccgtccgccagtcgtcccgaggtgctgccttcacctgcctggagactgccttccgc

SEQ ID NO: 333581 - DNA, 90 bp, Homo sapiens
ggaaattcagcctcaaaaccgtcctgctgcttgctgaccaaatggtgacccagggcctggtcatcgggcagctgagcagccacttctcgg

SEQ ID NO: 333582 - DNA, 95 bp, Homo sapiens
gagagactgagcatgatgaaagtctcgttcctgttcctgctaacagttacttaggttgtgtgtgtcccgctgtggattctcatgtcctttctgtg

SEQ ID NO: 333583 - DNA, 51 bp, Homo sapiens
ggtggactcttcattccaatggatttcagccttccaagttctgatgtaaca

SEQ ID NO: 333584 - DNA, 89 bp, Homo sapiens
gtccccctctccgccccccaggaggggcgagagggagccgcagctgatgtcagtttatctggaagaatgtgaactggctaaacagcttt

SEQ ID NO: 333585 - DNA, 97 bp, Homo sapiens
gctgacagctcgagtgagcggactgcccaggacttcggaactagacgaggctgttggagagaaagtagtgagagatgcatttccggaagccattatc

SEQ ID NO: 333586 - DNA, 83 bp, Homo sapiens
cggattcatttagagctgcggaacaggacgccctctgatggcgaccattgacgaggtggagacggacgtggtggagattgagg

SEQ ID NO: 333587 - DNA, 82 bp, Homo sapiens
aaaagtgttaaatgtgatcagccttgaattttcagatacaaattctttatagctccaagctctacagattcttcaaatatat

SEQ ID NO: 333588 - DNA, 123 bp, Homo sapiens
taccagtgtgcagaagttctcgaatcattctttgtacagaaattgaaaggcttcaaagctagcagatttattgctaaacatgggtgcatttttggataaacccaaaactgaaaaacataatgc

SEQ ID NO: 333589 - DNA, 50 bp, Homo sapiens
gcctcctgaggatctgggattacagctatgagggcactggccggtcactg

SEQ ID NO: 333590 - DNA, 90 bp, Homo sapiens
gtggaggagttgagaaaaaccaatggcctgtctcctccctcctacacatttccagctcctgctgcagttattcctacagaagctgccatt

SEQ ID NO: 333591 - DNA, 100 bp, Homo sapiens
gggaggaagtggtgtctgagctaggtgctgatccgcagtggccgggtgcccattgtgtccttggagtgtgtgtcctgcaaggcacaggccgtgtacgaag

SEQ ID NO: 333592 - DNA, 75 bp, Homo sapiens
caagaatgttcgtgtcaactgtttggacgagagttgccatggagaaaattccagtgtcagcattcttgctccttg

SEQ ID NO: 333593 - DNA, 83 bp, Homo sapiens
catcgccgcttctagaccctactgcggtctcggatattgccggatgcccttggaaatcacccgtagctttatccagaaccgag

SEQ ID NO: 333594 - DNA, 90 bp, Homo sapiens
aagtgcgggcgcagctggcggagctggagctggagctctcggaggagctgcggtgcaaccctgggcagtttgcgtgtcgcagcggcacca

SEQ ID NO: 333595 - DNA, 75 bp, Homo sapiens
gatcaccttcgagtgcatcgaggacctgtctgaaggtcatcatcagatttgaaatatttaaagtggatacaaaac

SEQ ID NO: 333596 - DNA, 100 bp, Homo sapiens
cggcggggttcctggagcctcccgccgcgctccctccgccgccgcgcaacgctatctcccctggttcgaggtattttataagctgcttaacatcctggca

SEQ ID NO: 333597 - DNA, 83 bp, Homo sapiens
cttcaagggacttcgctgtgagacaggtcagagtggtgctgggaacaactgggccaaggggcactacacagaaggcgcggagc

SEQ ID NO: 333598 - DNA, 50 bp, Homo sapiens
gccaactgtttctttgaacagtaaatcagcttactttgcaaagaaggaag

SEQ ID NO: 333599 - DNA, 82 bp, Homo sapiens
cggagcttatactcctcccagtgacgggtctggagtgcgtgggggaccggctgttggcgggatggctgcaggccaggtttgg

SEQ ID NO: 333600 - DNA, 75 bp, Homo sapiens
tcagctagtcaactccctagaaggctgccagttggttacattgattacccacctagtacaacatcttacgggaag

SEQ ID NO: 333601 - DNA, 49 bp, Homo sapiens
ggcctacccgggatacggaggaggggtgtcagctgtgatgcatgtttaa

SEQ ID NO: 333602 - DNA, 100 bp, Homo sapiens
agggaggaccccagacaccggagactgggaaatggctgaccggttccctgatgtgttacctgcttctgctactgatccaaactgcagaacttctcattca

SEQ ID NO: 333603 - DNA, 83 bp, Homo sapiens
cagcccagtgcttctgtctcgactgcactttgagaagagaaaagaaaccttgtttattccctgtgaaaatgagaagatttcta

SEQ ID NO: 333604 - DNA, 100 bp, Homo sapiens
cctcccaaattgctgggattacagacattatacaacgtgaaggctgagatctttcccccttcgggaatggagtattgcagaacaggctccctctgctccc

SEQ ID NO: 333605 - DNA, 80 bp, Homo sapiens
cggcacaggagcctcctggaggcagcaggttctccagaagctggggaaggcagatgagaccaaggatgagcagtttgagc

SEQ ID NO: 333606 - DNA, 100 bp, Homo sapiens
aggcctgctcctccgtttgcaaggttctgaagaaggccttccaggccacgctcaggtggctcctgagctcacccaagacccccggctgctctgatctcgg

SEQ ID NO: 333607 - DNA, 83 bp, Homo sapiens
cggcgaggagggggcctcggacggcgactccggggatggcgaagcggcaccatgccggtggaaaggatgcgcatgcgcccgtg

SEQ ID NO: 333608 - DNA, 75 bp, Homo sapiens
attcccttcaattcaagtaacaggaactgtggctgcaccatctgtcttcatcttcccgccatctgatgagcagtt

SEQ ID NO: 333609 - DNA, 75 bp, Homo sapiens
agtatgaccgggtttctttgatgcgacctcaggaaggagatgagtttcttatctcagtcatcactatggtgcttc

SEQ ID NO: 333610 - DNA, 82 bp, Homo sapiens
ctgtggtctgagctagagggtgaagctggcggagcaggaggatgggcggtaattcagtgtcattggattttcagaattcctt

SEQ ID NO: 333611 - DNA, 89 bp, Homo sapiens
cggctctctgctcattggggcgttgaggacaaaacaagctatcgatcagggaagatctccagttataatagataacactaatatacaag

SEQ ID NO: 333612 - DNA, 75 bp, Homo sapiens
tgcccgaaacgccgaatataatcccaaggaaacccgaaccctagcggagattgccaaagtggagctggacaatat

SEQ ID NO: 333613 - DNA, 100 bp, Homo sapiens
cccaagcagatcgagcgctactcgcgcttttcgccgtcgccgctctccatcaaacaattcctggacttcggtactaggttttgacaagcttgcatcatgc

SEQ ID NO: 333614 - DNA, 99 bp, Homo sapiens
tcttagaaagtcctcattatgctgtgaaaatattaggtgaaggttgtggatgaacgaaggtaccggaaagtctttgaagatagtgtacgcatcatggac

SEQ ID NO: 333615 - DNA, 90 bp, Homo sapiens
gagcctcgcgcggcgctggagagagacaagatgtccgccagagctgcggccgccaagaatacagtcgctttgaatcgaagatacatgact

SEQ ID NO: 333616 - DNA, 51 bp, Homo sapiens
tgcacgctggggagtttgttgggaatacagttgagttttgccaaatttgac

SEQ ID NO: 333617 - DNA, 83 bp, Homo sapiens
gcgtcttccgctgcatccccatcttcggcatgtccttcgcctgccagtcggctttgttcgcgggggtcacagctctcatggct

SEQ ID NO: 333618 - DNA, 100 bp, Homo sapiens
cttggccatcaagatgatgtggaacatctcggtccgacactggttcagaatttgccatcgtcagtgcagactgtgtgtgagtcctggaacaacatcaata

SEQ ID NO: 333619 - DNA, 97 bp, Homo sapiens
tctcaagttaggggagagtttcgagaagcagccgcgctgcgccttccacactgtgcgctgcgcttaaattcctagcgaagtgccgtaagaaaaagaa

SEQ ID NO: 333620 - DNA, 100 bp, Homo sapiens
ttcaggttcctatggaagatcagatccgtttgaggcctggctctgaattacatctgacccccaaagctcagcaggtctttgatttgcgtcagtgtcatcg

SEQ ID NO: 333621 - DNA, 90 bp, Homo sapiens
ggcggttttggtgaataacatcaccacaggtgagaggctcatccgagtgctgcaagaaatatacagcctctgcagacactgcttctgaat

SEQ ID NO: 333622 - DNA, 100 bp, Homo sapiens
ggcaggagtgtttgacatagacctggaccagccagaggacgcgggctctgaggatgagctggaggagggggatgccaaccctgtggtaattgagccatca

SEQ ID NO: 333623 - DNA, 76 bp, Homo sapiens
ttttgtgcctcctggacacctcagggcctgctttcttccccgggcgatgtgcagagatctttgccaggggtcaaag

SEQ ID NO: 333624 - DNA, 97 bp, Homo sapiens
cgcagatcaaggccaactatgacgtgctggaaagcaacgtcctgaaggagcacgcagatgatgaccctagtctggccatcactggggtccctgtggt

SEQ ID NO: 333625 - DNA, 100 bp, Homo sapiens
ggaacgtttcttacaggatgtactgcagcaccacccatatcattgtcaagagagcagaacctgcacttgttgccaagtcttccatcttactagatgtgaa

SEQ ID NO: 333626 - DNA, 101 bp, Homo sapiens
tattgcgcgtggaacggctgcttttggaagaagatggctgtgccacccacgtatgccgatcttggcaaatctgccagggatgtcttcaccaagggctatgg

SEQ ID NO: 333627 - DNA, 75 bp, Homo sapiens
gcgctgcggaggagagtgagcccgagtccgtttgctcaaccccgaccctgatgctcccataagacagaaaatgcc

SEQ ID NO: 333628 - DNA, 100 bp, Homo sapiens
aaagaaggcaaggagagaatgtatgaagaacagtcacaggacaggctcacatgattcattcagctactgggtggatgaaaagtccccagtggggcctgac

SEQ ID NO: 333629 - DNA, 100 bp, Homo sapiens
ccgagcgcggggaactcgacttgaccggcgccaaacagaacacaggagtgtggctagtcaaggcactgggacgttcgggcgggtgcacctggtgaaggag

SEQ ID NO: 333630 - DNA, 100 bp, Homo sapiens
tccagtctctgatcgaaggggagtttccacagtgattgatgctgcctcaggtatgagggtgctggttgatgctcgagagaagcttcatattccctgggga

SEQ ID NO: 333631 - DNA, 75 bp, Homo sapiens
cggcacccagacaggtggcgacggcagaggagtgagcatgggtttatgcgtcttaggcattattgtgatggcgag

SEQ ID NO: 333632 - DNA, 83 bp, Homo sapiens
ttcaaccaggacccagaagcaggtcaaaatgcagatcttcgtgaaaacccttaccggcaagaccatcacccttgaggtggagc

SEQ ID NO: 333633 - DNA, 83 bp, Homo sapiens
cgctcaccttagccccgcgcccgaggatttttagactctgaggagcagttggagctaatccacattatggaaatggaaaccac

SEQ ID NO: 333634 - DNA, 75 bp, Homo sapiens
gaagtctgggggccgagaccacacaggagtccagattacatcctaccctgcagtcctggatggcgcctccgactt

SEQ ID NO: 333635 - DNA, 82 bp, Homo sapiens
gatcctggttccatgccgcagtaggacagcaggcccaagtctgcacatcccagggagttgaccacatttggccatttcccag

SEQ ID NO: 333636 - DNA, 139 bp, Homo sapiens
ggaggctctgaggggcaaccacagtgccctgctgcgggtcgctgactactgcgaggacaactatgtgcaggccatgcggaccctcagttggaagcacaccctgggcctggtgaccatggacgtggagctggccgaccgc

SEQ ID NO: 333637 - DNA, 50 bp, Homo sapiens
gtgccctcaacatctctcagagacgaaagacaaatcttcctattttcaag

SEQ ID NO: 333638 - DNA, 75 bp, Homo sapiens
ggcattgacatttaattttagggtcctttatatagaagggagagtaggcctgcacagctgaccacagttgggaaa

SEQ ID NO: 333639 - DNA, 90 bp, Homo sapiens
gggcttaagcctcacttgctggtcctcaacaagatggacttggcggatcttacagagcagcaggtgccatgtttcagaacagagtaagac

SEQ ID NO: 333640 - DNA, 83 bp, Homo sapiens
catccagagatgctggagaaagcgtcccgggagctgtggatgcgcgtctggtcaagggcagcctgcttctgcaaagtggtacg

SEQ ID NO: 333641 - DNA, 98 bp, Homo sapiens
tggcctcgagaccctgcctgcctgaggaggcctcggttggatgcgaaggagctgcagcatccagtgatgcgatagctgaaattcgagctatttgcatt

SEQ ID NO: 333642 - DNA, 100 bp, Homo sapiens
caatgacgtacagaagaaaacctttaccaaatggataaatgctcgattttcaaaggtctgccatcatggatgttctcgcagaagcaaatggcacctttgc

SEQ ID NO: 333643 - DNA, 145 bp, Homo sapiens
tagctcacagatacacccccaaagagcaactgaagattcatacgcagctggcagatattatcatagttgctgcagtctacatcggtaaactctgcaaaactccagcagttacagagcctgtgctaggagctacagggtgaagagg

SEQ ID NO: 333644 - DNA, 98 bp, Homo sapiens
gtcaaggccaccatgcccatctgggtggtcctcctgtcccggatcattatgaaggagaagcagagcaccaagccaatggagatcttcgtggatgatga

SEQ ID NO: 333645 - DNA, 101 bp, Homo sapiens
aggcagctgcaaggagggcggcgggactgcactcgagtgtccagacctgctcgatggaggcaagtgaggcctatctggttggcctttttgaagacaccaac

SEQ ID NO: 333646 - DNA, 90 bp, Homo sapiens
cggacggctgcgtcgcccgaggcgaggaggagcgctggcggaaacttggatttaactggccagaagcaggtattcaaagcagagaacaat

SEQ ID NO: 333647 - DNA, 76 bp, Homo sapiens
aaggcctcccagtacgttgtgtgaagagtatcattcgacagcaatcagaaacggagactgttcatctgtttatccc

SEQ ID NO: 333648 - DNA, 75 bp, Homo sapiens
gccccgagccatggctctcgccgtccgagtcgtttattgactgatgatgcttcggatgcacaatctgcatgggac

SEQ ID NO: 333649 - DNA, 98 bp, Homo sapiens
gaatcggagccccaaccgcgctgccgatgagcgtgaagccgtgcagaagaagaccttcaccaagtgggtcaattcccaccttgcccgtgtgtcctgcc

SEQ ID NO: 333650 - DNA, 101 bp, Homo sapiens
agttgactcacgattatagtcatagaacttgtttcctgtccacgcaatgtgtctgaatgcagccatgactgtgttctgacatcagaaggtcccttatgttt

SEQ ID NO: 333651 - DNA, 80 bp, Homo sapiens
aaatcctacgctaacactgtcgcagtttgaaagagaaagcttcttgctatctacctccaccatgatgaaagtgtgttaac

SEQ ID NO: 333652 - DNA, 100 bp, Homo sapiens
ccaggcggcgcggcggctcctcactcatcccagattgcttccaagtatgatcatcaggcagaagaagatcttcgcaattggatagaagaggtgacaggca

SEQ ID NO: 333653 - DNA, 100 bp, Homo sapiens
acctggagtccgtggatgaaggtggggtggcgtggcaagccggactaaggaccggggacttcttgattgaggccaagtcctgtatctgccatgtctgtgg

SEQ ID NO: 333654 - DNA, 100 bp, Homo sapiens
ctctcctacaaaaccagccagttactcagtaaagtggacgatagaagaaaaagagctgtttgaacaagggctggtatctcaacacccagtttattaaaaa

SEQ ID NO: 333655 - DNA, 74 bp, Homo sapiens
tcgacgccagaggatggattacccagtgccctgaaagcagcagatctcacctgcattggaggatgagacgccac

SEQ ID NO: 333656 - DNA, 50 bp, Homo sapiens
cggaatgcagtaccctcagcagcagcaaaagttcaaacagaccctccctc

SEQ ID NO: 333657 - DNA, 80 bp, Homo sapiens
tcatcacatggatcctcatccagtttgcatttagcccaagaagatgaaaggattgttcttgttgacaacaaatgtaagtg

SEQ ID NO: 333658 - DNA, 75 bp, Homo sapiens
gcaactggtcttggtagcggaggcacccgaatgctgcccgggtgaggtgccagaaccctgtggagcatcatgaac

SEQ ID NO: 333659 - DNA, 82 bp, Homo sapiens
ttctccaatgatatctacagcacctatcacttgttccctccaagacaactgaatgccgaggcctgcctggagccccagatca

SEQ ID NO: 333660 - DNA, 83 bp, Homo sapiens
ctgccctcctggcgggcccggcggctctcactatccaggtggtgatgatgtccagcaactctgtgaagcaggagaagaggagt

SEQ ID NO: 333661 - DNA, 95 bp, Homo sapiens
acctgctcagcgagtacatgaataatgtaaaataccatgaagattttgaaaaaacaaaggggagaggctttactcccgtcgtggacgatcctgtg

SEQ ID NO: 333662 - DNA, 90 bp, Homo sapiens
tgaagagctggtcattaagggatccatcctacagaactatcagaggactcctgaaacctggagagctacctgctgtataaaggctggcct

SEQ ID NO: 333663 - DNA, 90 bp, Homo sapiens
ccccgtccgggagggaggtggggggggtcagccccccgcccggccagccgccccgtccgggagggggagtcggtgaagtacttcctggac

SEQ ID NO: 333664 - DNA, 100 bp, Homo sapiens
gcacgtgcaactgcaaacgctctttgttccagagcatggagatcaggaagatttaggattcagatttatatcggaacaggtcagtcaccacccccccatc

SEQ ID NO: 333665 - DNA, 107 bp, Homo sapiens
tgctgctgtgtgggaagaagatttgtaaagaaaactcttagggaaatcctcattgacgattcaatttgttgaaggccaatttgtggactcctacgatccaaccatag

SEQ ID NO: 333666 - DNA, 136 bp, Homo sapiens
accagaccatgttagataaacttgtggatggacttgctacctcttgggtgaactctagcaattacaaggtggaaaaggattattcatacctgaaggagatatgtgatcaccaagccgaacagctgagcagaaccag

SEQ ID NO: 333667 - DNA, 101 bp, Homo sapiens
aagaggactggtgatctacgtgtgctttttcaagggagctgataaagaacttcttcccaaaatggcaatggctgccatccggaagaaactggtgattgttg

SEQ ID NO: 333668 - DNA, 50 bp, Homo sapiens
aactctgggatcacctgatcatttcagttacactcctggcacaccttaca

SEQ ID NO: 333669 - DNA, 100 bp, Homo sapiens
gtctggttgtgagcagggtctgcacgaaataaagctcctgggcaaggggacgtctgcagctgacttatgttcctgaggaagaattgaaggcagcagaaat

SEQ ID NO: 333670 - DNA, 100 bp, Homo sapiens
ggaaagaaaagaggctttggctttgttacttttgatgaccatgatcctgtggataaaatcgtatgcaatttgaatcaacccatagaagtgacagcgctgt

SEQ ID NO: 333671 - DNA, 87 bp, Homo sapiens
ggacggctctgtaggaaggaacttggttccccctccctcagcttccgccccaaaagaacccttaggagaaatcttgagagtggacag

SEQ ID NO: 333672 - DNA, 87 bp, Homo sapiens
agataccctctccagacaaacgcagtatttatatacggtccattgttgcagacagtctactctgaattggatcaggccaagttagaa

SEQ ID NO: 333673 - DNA, 75 bp, Homo sapiens
attctaatggaatcaggcagttttgtgtccatgtgaacaacttacaaatggtgatgatcatcaggtcaaggatag

SEQ ID NO: 333674 - DNA, 50 bp, Homo sapiens
tcatgtatcctgtgtttaatgaggtttaaacttacacgaatcgctttctg

SEQ ID NO: 333675 - DNA, 83 bp, Homo sapiens
cgccgacgccaaaggggacagcgagtcggaggaggacgaggacttggaagacgcaaacatgcagatctttgtgaagaccctca

SEQ ID NO: 333676 - DNA, 89 bp, Homo sapiens
cagactgcacctcgcagtctccccaggtccgcccagcagccgcgcttcagccagatattctctaagccgctttcatcatgggagaaata

SEQ ID NO: 333677 - DNA, 99 bp, Homo sapiens
aagcaggtggaattatgccctgttggttccaatgctgggattggctgcttttcgccctgccctgggagaagccctgccacacgtcgtgcccacgctgag

SEQ ID NO: 333678 - DNA, 75 bp, Homo sapiens
gctgccgagtggcccaccgccagagaccctcagccttgactgggttaatgcaattcttcattcagcatatagcga

SEQ ID NO: 333679 - DNA, 100 bp, Homo sapiens
tcctactcagaagaacttgtacagagatgtgatgttggagaactatagcaatctggttttcttggggttttggccaaattgggcgagggcacaaaataac

SEQ ID NO: 333680 - DNA, 100 bp, Homo sapiens
ggaagagttgaagaagtacctgtcgtagggagatttgggtagaagccctcatgctgagtgccttgctttccatgacatttcccctcaagcaccaacacat

SEQ ID NO: 333681 - DNA, 97 bp, Homo sapiens
tgcttatttaatacatttgaacaacttttggggtacttagaagatatccatttggggatgaagtctactttgacagctagcaaggcgacatgcaact

SEQ ID NO: 333682 - DNA, 100 bp, Homo sapiens
gcaacaggatgtgcagaaggagatggagaaaaccctacagcagatggaagaagtagtggttaagttgcttttacagagttaacaggtctccaagaaattt

SEQ ID NO: 333683 - DNA, 75 bp, Homo sapiens
ttggcatgcaagctcctagcatctggcagtggggccaagaaaataaggtcccagcatttgagggtgatgatggat

SEQ ID NO: 333684 - DNA, 100 bp, Homo sapiens
cgttggcgggagatgtcgaaccccgggacacgcaggaacggctccagcatcaagatccgtctgacaggacatgtcctcatagagatttcaagtacccaca

SEQ ID NO: 333685 - DNA, 90 bp, Homo sapiens
gattcggaggtccggtccgttgcctcaaaccagtcagagatggagttctcttcacttcaggacatggggacagagcacaggaaagggacc

SEQ ID NO: 333686 - DNA, 73 bp, Homo sapiens
tcgtcttcccctccaacatggagctgccaaacggaggcccgaagaaaaagaacctgaaaaagtaaatccacag

SEQ ID NO: 333687 - DNA, 100 bp, Homo sapiens
gtcgacatgagtgatgtggaggaaaacaacttcgagggcagaggccatgtgaaactttctgactttggtctttgcacaggactgaaaaaagcacatagga

SEQ ID NO: 333688 - DNA, 50 bp, Homo sapiens
ctaaaattagggcatgattaagacttaattcagtgcacaaatgagatgaa

SEQ ID NO: 333689 - DNA, 96 bp, Homo sapiens
ttggaacaacggaagctacagaagccttctttgcaatgacgcgattgtttcaatctaatgatgaacttaaaaggagtctagaaaatccagcagaaa

SEQ ID NO: 333690 - DNA, 99 bp, Homo sapiens
tttatgctgatcacaaacaaatccttgaaagaagaagatggagaagaaatagttacctatgatcgttgctgcttttgctcagaggacatccatgaccct

SEQ ID NO: 333691 - DNA, 96 bp, Homo sapiens
ttccggagtcagtcattttactgtcaagacatttcttcggcattctgcaacagtaagaagacatgttggataacaagaagaggtgtagagtttgca

SEQ ID NO: 333692 - DNA, 83 bp, Homo sapiens
ctgccatcagtaagctatactccaccatccggccctacctagagacttcccagactcccggccagccatcgaggacctcaagt

SEQ ID NO: 333693 - DNA, 98 bp, Homo sapiens
ggacacctgtgtcagcatgtgggacctggttctctccatcgccttgtctgtggggtgcactggtcattgacgagactctggatgttaaggaaatgatt

SEQ ID NO: 333694 - DNA, 100 bp, Homo sapiens
gtccacatttggaggagttaatgggtctctcttcacctcctctcggcacttctggatccagctgtgtgatagccgcactaggaaatacctggagtcacag

SEQ ID NO: 333695 - DNA, 80 bp, Homo sapiens
tcgcagtggtcgcttcttctccttggtctcgctctcgaagcagacattcccgtaagagcagaagccgaagtggcagcagc

SEQ ID NO: 333696 - DNA, 75 bp, Homo sapiens
agaggttcttttcagagcacatcctggtgtatagcctggaagcaggacgccgcctcttgaagctgggtaacgttc

SEQ ID NO: 333697 - DNA, 100 bp, Homo sapiens
aaggattccaagtaactcttatttggctcgcttctcatatgtgcggatgaaatatcttttcttttcctggttagtggtttttgttggaagctggattata

SEQ ID NO: 333698 - DNA, 82 bp, Homo sapiens
ccaggacagcatccaggcctcattggacagcattcgagggtgctttcttctgcgacctggtactcatctacctcatcaaaaa

SEQ ID NO: 333699 - DNA, 74 bp, Homo sapiens
ctggattgaattaaacaagacgtgcaaagcaagtggttcacgagcgcccgggggctggagaaggccaggcagca

SEQ ID NO: 333700 - DNA, 100 bp, Homo sapiens
gctcgggtcgttgtggtgcgctgtcttcccgcttgcgtcagggacctgcccgactcagtggacacccttgcactgcgcggcgtcgtgcaacgacacagtc

SEQ ID NO: 333701 - DNA, 100 bp, Homo sapiens
cgagcccgcacggagtccagggatgtggacagtcgccctgagatccagcgcctggacacgctgcctgctgtttcccggggagatcatgaaacgaggtcgc

SEQ ID NO: 333702 - DNA, 101 bp, Homo sapiens
tgaagatgagcacttacttggttgctttcattgtgggagagatgaagaacctgagtcaggacgtaaatggaaccctgtactttcaactggactgtcccatt

SEQ ID NO: 333703 - DNA, 82 bp, Homo sapiens
ccgggctgcggcgtgtgcgcgcccgccagctgctccggagatacgaaagccatcactgcccaggtagaagagaagcgcagga

SEQ ID NO: 333704 - DNA, 100 bp, Homo sapiens
ctacccacagcagatccttttacagaaactgcagtaggcttcttggaagtagaccaagggtgtccaatctttggcttccctgggccacatcggaagaaga

SEQ ID NO: 333705 - DNA, 50 bp, Homo sapiens
ttgacgagctgctagccagcaaataccaggtgttcggctgccagttggaa

SEQ ID NO: 333706 - DNA, 75 bp, Homo sapiens
gtcagttggcacccctttgaagagaagattgtcagcagttcggacagtcattttgtttactcattcagccctgtt

SEQ ID NO: 333707 - DNA, 75 bp, Homo sapiens
atttagtagtgaaaccaaatacatcctctaaaagaagttcattatcacacaagagggccaagatcagtcagggaa

SEQ ID NO: 333708 - DNA, 90 bp, Homo sapiens
tctctaacctaccagctgccactttccaggaatacttcattgctccatcagtagatatacaagaacaggtttatcgtgtccaaaaactcc

SEQ ID NO: 333709 - DNA, 105 bp, Homo sapiens
cgaagaatcaaggctgggccggacccggtggcctggcaacaggatggtaaggttgaagttacaaaagaaggtgtgaagttgtgtaccatgggtccaggaaaagtg

SEQ ID NO: 333710 - DNA, 96 bp, Homo sapiens
ctcactactgctcactgcatcacccgggtgactctggggggcccctgatctgcaacgggtacttgcagggccttgtgtctttcggaaaagccccgt

SEQ ID NO: 333711 - DNA, 101 bp, Homo sapiens
gtccagacaaggatagcattatgaacatagggtgccaagaagctctgccctcagtgcaacacgatcacagcgcccggagacctgcggaggatctacttgtg

SEQ ID NO: 333712 - DNA, 100 bp, Homo sapiens
ggctgggattggaactgtgtttgggagcctcatcattggttatgccagacaggggcaagtgtccgagtggtgaatcagctacttacagagatggatggtc

SEQ ID NO: 333713 - DNA, 90 bp, Homo sapiens
cagaggtgcagggcgaggacggacaggtggtgctcatcaagcaggagaaagaccgaagacgagttgtactgctgtcacaggaaatggacg

SEQ ID NO: 333714 - DNA, 75 bp, Homo sapiens
ataacctgaagcctgtggtggcagagttctatgggtcaaaagagggttacaagcctgatgaagggaaacgagggg

SEQ ID NO: 333715 - DNA, 98 bp, Homo sapiens
ctatgtactcaacttccatgggcgcgtcacacaggcctccgtgaagaacttccagatcatccatggcaatgaccatcgaagcaaagctgagatggatt

SEQ ID NO: 333716 - DNA, 83 bp, Homo sapiens
tcggctgtttgtggctctgcagggctgtatgtatgactggtataccaaggttacctcagtggtggtagatgttgtgcctcggc

SEQ ID NO: 333717 - DNA, 82 bp, Homo sapiens
caagaacctgcgggaggacggagagaaggcggcgcgggaggtgaagttgctgctgttggaggctgggaggcggcagaatgca

SEQ ID NO: 333718 - DNA, 97 bp, Homo sapiens
agaagctctacccactgccctcggcccgcggaacctctttcaggagctataaaagaaagggaggaatcatgtccacaattgcagctttctatggcgg

SEQ ID NO: 333719 - DNA, 100 bp, Homo sapiens
gttcaatattctaatgagatttacagttgatcagacccagacaccaagcttaaaggtgctgcacctgtactgtgacacttgctctgtacccatctgtcgt

SEQ ID NO: 333720 - DNA, 75 bp, Homo sapiens
cccgccaccgccggacttcaatgcccagtccccagctcgccagcgggatgttggaaattactattatggacaagg

SEQ ID NO: 333721 - DNA, 74 bp, Homo sapiens
atcatgctctggaattttggcatcaaggacaaacccaccttcatcaaaggggttatttcttatgagggtcatgg

SEQ ID NO: 333722 - DNA, 100 bp, Homo sapiens
gcttgggagagctcctgggccacccctcctttcaggtcaagactcggagccgtgggtcccgactgaacatcatcatcatcgctgagggtgccattgaccg

SEQ ID NO: 333723 - DNA, 51 bp, Homo sapiens
cgaatatcgtcatcgttagaagatgcctgtcttagatgtcaagctgaaaac

SEQ ID NO: 333724 - DNA, 83 bp, Homo sapiens
ccggcagctccaaccatgggaggccgcgtctttctcgccggccaagctcgctgaggccttcaagtacttcgtgcagggcatgg

SEQ ID NO: 333725 - DNA, 74 bp, Homo sapiens
ggatatagcacaccatccccagccaccttatttagtgtctctgacaaaaccggccttgtggaatttgcaagaaa

SEQ ID NO: 333726 - DNA, 100 bp, Homo sapiens
tcacaaagatacgaatctcttaagggggtttccaatacttatctacaggaatcgccatgaccccagctctgagggaggcaacagcaaagggtatcagctt

SEQ ID NO: 333727 - DNA, 75 bp, Homo sapiens
cacgcaaccccagatccatttacactttacaaaatgcttcggttacccacagtctttcgccagatgagaccggtg

SEQ ID NO: 333728 - DNA, 100 bp, Homo sapiens
gatgtgcatgaaggacagcctcttctcaatgaaattggcgtgttagccaaggctttcattgaccaagggaaactcatcccagatgatgtcatgactcggc

SEQ ID NO: 333729 - DNA, 90 bp, Homo sapiens
cacgattcttctaatggatgggaacatggggcatatcacacctgaaaaattttatgtggaagcttgtgatgatggagcagatgacgtact

SEQ ID NO: 333730 - DNA, 83 bp, Homo sapiens
ctggcttaggcatgtcctctgacccttgacctttctggctccagagagacgccctcctccattctcttaggctccaaccaagg

SEQ ID NO: 333731 - DNA, 100 bp, Homo sapiens
gcggcccgacgagctggagcgcctgtcaggctgggaggaggaggaggagagctgagctgaagaagcaggtggagagtgccgagctgaagaaccagcggct

SEQ ID NO: 333732 - DNA, 117 bp, Homo sapiens
gaagaccgcgcgcagggcctgcagcgggagctggacggcgagcgcgagcggcgcgagaaagttcgagaacttgtcttggacaattgcaaatcaaatgatggaaaaattgagggctta

SEQ ID NO: 333733 - DNA, 74 bp, Homo sapiens
accctactgcctggaggccggggagccgacgcctggcgttcccacagctgtgcagaacttagcgccacgcgctg

SEQ ID NO: 333734 - DNA, 75 bp, Homo sapiens
tgctcctcctggcatccgcagtggctgcgatggaaggttccgtggggaccccactgcctggagtacaggtgcgca

SEQ ID NO: 333735 - DNA, 75 bp, Homo sapiens
tccgcatcctggacagcgcgcccaccgtttaacttacatgtgtagagctggagcaattcggacagatgataactg

SEQ ID NO: 333736 - DNA, 82 bp, Homo sapiens
ccaccaacaacaccacaataatccacagccaaggttcctacaaacttgatgacttttgagtagaagcctgagaaaaaaagag

SEQ ID NO: 333737 - DNA, 75 bp, Homo sapiens
gcctggggcggccggccaggaaccacccgttaagagtcctgtgaagataaatcagattagcttggatgaaagtgg

SEQ ID NO: 333738 - DNA, 100 bp, Homo sapiens
tgggaaccccgagcacccctcagaggccgggaagttaaacttgtagccaccacctccgctcttcccgtcaccctcgcccccacttcgggccgaaagcacg

SEQ ID NO: 333739 - DNA, 117 bp, Homo sapiens
atcctgccgtccttctccactttcgccagcccgtgccgcgagcgcggcctgcaggagggggatatgagactttctactcggaatatcctgagtgttgcgtggatgtaaaacccattt

SEQ ID NO: 333740 - DNA, 90 bp, Homo sapiens
gcaaaaaatggtggagcagtggtctggctctgggagaggagtggacagcagctggttgagatacatccccatctggagacaggactgcca

SEQ ID NO: 333741 - DNA, 100 bp, Homo sapiens
aaaaactgaaggagacagaagcagccatggaaaaattaatcaacagagtgggacctaatggtgagaggtatacccgaaatcttgtggatcaaggaaatgg

SEQ ID NO: 333742 - DNA, 82 bp, Homo sapiens
atttacagaagcagtacgagaactggcagccaaggattctgctagcctaccaagaatccaagacacattttgtttgtgtgaa

SEQ ID NO: 333743 - DNA, 83 bp, Homo sapiens
atttgtgtgacttgactcttcaaacacaaaggaagctgtagagaaatatgaagaagtgctacataatttggaatttgccaagg

SEQ ID NO: 333744 - DNA, 51 bp, Homo sapiens
cacgattaggactgacaataaggtgccttagctggaccaattattgtggag

SEQ ID NO: 333745 - DNA, 102 bp, Homo sapiens
agtccatatgtaaccaaatattatggatcctatctgaagacctaatctgggagcctgcaagtgacaacagcctttgcggtccttagacagcttggcctggag

SEQ ID NO: 333746 - DNA, 83 bp, Homo sapiens
tcttggacgtcatcgagtctgtcaacctcttgactcctgggagagttggctctcaaggttctgatttagattcatcagcaact

SEQ ID NO: 333747 - DNA, 75 bp, Homo sapiens
agacaaatgcgctcagcttcaattgaatcagcatgattcttcagaggctcttcaggttctcctctgtcattcggt

SEQ ID NO: 333748 - DNA, 89 bp, Homo sapiens
ggcctgcgcgcgcctcccgggcggattccagccccgagcgggacagcgcggcggggagcgacgagtgaaaggtgtagcagtcactcggc

SEQ ID NO: 333749 - DNA, 101 bp, Homo sapiens
gtcatgaacccgagctatagagaaaggagatgaggagaatttgtgaagtaattaatgaagcagtatggaagcataatataatttatgtttcaagtgctgga

SEQ ID NO: 333750 - DNA, 82 bp, Homo sapiens
ctccaggccaagagggatccttcacccgtgtctgggggatatgagactttctactcggaatatcctgagtgttgcgtggatg

SEQ ID NO: 333751 - DNA, 75 bp, Homo sapiens
agccaggcagagctgcacccgctgccccagctcaaagaaagaagattggcccatgcacaagctggaatgttctcc

SEQ ID NO: 333752 - DNA, 50 bp, Homo sapiens
cggcaccacccatcttgagtatctgctactggtcagaagttatatgtaag

SEQ ID NO: 333753 - DNA, 88 bp, Homo sapiens
tctgcccagatagtgtctgcagctggattaacatctgctcgtgcagctgagatcctggcgcgagatggtcccaacgccctcactcccc

SEQ ID NO: 333754 - DNA, 100 bp, Homo sapiens
ctggaatttagcgctcgcccagctagccgcagctaaaagatggcggcaaggcagcccaggcaaatgtaagaataggcgatgtggttctcagcattgatgg

SEQ ID NO: 333755 - DNA, 82 bp, Homo sapiens
cgggagctggacggcgagcgcgagcggcgcgagaaaattggagctggagtgagccttccaggaattttggctgccaaatgtg

SEQ ID NO: 333756 - DNA, 75 bp, Homo sapiens
gtatgggctacaaagagaacgatgttgctatcggagctccacaagaagatgacttgcaaggtgctatttatattt

SEQ ID NO: 333757 - DNA, 99 bp, Homo sapiens
tcgacatgggcggagttctcattccttctccagggagagtcgctgcaggaggaagaacgtgcaaaacgtgaggagctagagcgaatactggaagagaat

SEQ ID NO: 333758 - DNA, 100 bp, Homo sapiens
ttttgaccagaatgctttggttaaacgaatcaaagagcaggaacgaatttcatatacacctccagagagcccagtgccgagttacgcttcctcgacgcca

SEQ ID NO: 333759 - DNA, 101 bp, Homo sapiens
caaaggctttgccgcagttcatcttcctccctgtgtactttccatttgccttcctgggtttgtggtaaatatgccagctctagaacacatgaatcagattt

SEQ ID NO: 333760 - DNA, 73 bp, Homo sapiens
agccgagggcgtactggcgacccggagtgatgagcccgcccgaggaagttccaggttaaaggcagcctcagct

SEQ ID NO: 333761 - DNA, 83 bp, Homo sapiens
gataaaaagagatgtggggggattctcgacctgctaacagaactggaccttttcgctgcaggacaagttcgagcatcttaaaa

SEQ ID NO: 333762 - DNA, 50 bp, Homo sapiens
cttccgttcctcctctcagagtggctcagatcatgtttgagaccttcaac

SEQ ID NO: 333763 - DNA, 100 bp, Homo sapiens
cggggttcggtggcctctagtgagatctggaggaagtggcagtttttgtctttgataaaaaactgattgacaagtatcaaaaatttgaaaaggatcaaat

SEQ ID NO: 333764 - DNA, 97 bp, Homo sapiens
gtagctaccttgtccggaacagccagaccagcaagcatgactactccctctccctgaggttatgcctccgcctcgttgccctgaaagccgcagcgac

SEQ ID NO: 333765 - DNA, 90 bp, Homo sapiens
cctggctgaacagcaacctccagcatgtggtcgtcattcactgcagggtcgattcctcgggacccacagtctcaccacgtctcctccaga

SEQ ID NO: 333766 - DNA, 96 bp, Homo sapiens
atgcagtctgtgctctaaggaatgacattcttgtttcaggcatctgcaggaaccacaccacactttggaggccatgctgcggcccagagtcaccac

SEQ ID NO: 333767 - DNA, 51 bp, Homo sapiens
aagacagttcctgtcataccttttaaaggcagccaatcctttctttaagtt

SEQ ID NO: 333768 - DNA, 101 bp, Homo sapiens
gtcatacgctgcctgcagtggaccacagtcatcgagaggaccttccacgtggattctccagacgagagttcctctgtgacgagggtgcaggtatctctggg

SEQ ID NO: 333769 - DNA, 83 bp, Homo sapiens
agcagtccaaactgcaggatccccgccaatatcgtcagacagcccacctgaggatattgaccataaggactcatatctcatta

SEQ ID NO: 333770 - DNA, 98 bp, Homo sapiens
gtgcaccccaccagcttcatcaaggtcctgtggaacatcttgaagcccctcatcagggtgagaaaattcatgaagacatctttgacatcatagaccga

SEQ ID NO: 333771 - DNA, 100 bp, Homo sapiens
ctgagggctccggggtaggtgggtgacggcggtcggaggtgtaggagggagccgtggaggtccaggtaatatttgaagctgaagtctcaggagggagaag

SEQ ID NO: 333772 - DNA, 100 bp, Homo sapiens
ggccgaggagagctcccggactttcaagatgggaccaaggtgatgatccgggagaagaaccccgatggcttcctgtcggcagcggagatgccccttttca

SEQ ID NO: 333773 - DNA, 100 bp, Homo sapiens
tcgactgctagagccgagcgaagcaacaaaactattgtgagtcgaggtatcattttctgcactcagcggacggggagggctgtgccaacatgctggtgga

SEQ ID NO: 333774 - DNA, 74 bp, Homo sapiens
ctcctgaagtgtctttggtccaacgttgttccagataaccagcccgagtcatgcagtcttttcgagaaaggtgt

SEQ ID NO: 333775 - DNA, 100 bp, Homo sapiens
gcaaagatattcaaactctaaaccatctgaattggctcaatgatgaggaagccacttggaggatgtgctttaccaaaatgagggagtaatctgagaaggc

SEQ ID NO: 333776 - DNA, 89 bp, Homo sapiens
atgtcctccattttccaccagaaggccgaaaaggtctcctctgagcctccggcctccataagacccaaaacagatgacacctcttccca

SEQ ID NO: 333777 - DNA, 82 bp, Homo sapiens
gtggaagggaaacacacttggagacaaacttcactttaaaatctgaatggaggagatgttaaagtaacccatcttgcaggac

SEQ ID NO: 333778 - DNA, 100 bp, Homo sapiens
cgggcttccttgccctgtccggggttctggggctgctggtatggacgcttattgctggaactgagtacttccgggtccccgcatttggctgggtcatgtt

SEQ ID NO: 333779 - DNA, 50 bp, Homo sapiens
gatgatgaagaggatgatgatgaagaattgaagccttcagctgactgtgg

SEQ ID NO: 333780 - DNA, 75 bp, Homo sapiens
cgcttttcacgtcacctggagagatgcacagaatgccatgcagattgtgggctttatggatcatgaagctgagtc

SEQ ID NO: 333781 - DNA, 101 bp, Homo sapiens
tcctgtgtggcgatggtcttcctgctggggctcatgtttgagggtaatactgaacaacctgtccaaactagcaagattggacttggaagaagagagtatca

SEQ ID NO: 333782 - DNA, 76 bp, Homo sapiens
cggagttccttgtggccgacgtgcaccaaggagcacgtgaattgcctctgcttacgttcaggccctgtcctaaacc

SEQ ID NO: 333783 - DNA, 82 bp, Homo sapiens
ggtacctctccttttccctctccctttccctaagcatcttcatgatacagttaagaggaatcttgacagcgccacttcccct

SEQ ID NO: 333784 - DNA, 90 bp, Homo sapiens
aggagaaattcagacggctcccgaggaaactggcagacctttcacttcgtatccaacaaattgaaacaactctcaatattttagatgcaa

SEQ ID NO: 333785 - DNA, 100 bp, Homo sapiens
cgccgatgccctctgcgcctgctgggcccgcaggtgactggttcttcaggaactgtgaaggtggtggttgtggactcggtcactgcggtggtttccccac

SEQ ID NO: 333786 - DNA, 50 bp, Homo sapiens
gccgccgcgtcccagtcccgaggtcgtggccctgaagttcatcccaaaat

SEQ ID NO: 333787 - DNA, 75 bp, Homo sapiens
gattctgttggactggcaaaacagatagctttgcatgctgaactgtgcacagccagagaacaacacatcacacac

SEQ ID NO: 333788 - DNA, 75 bp, Homo sapiens
ttaaaaagctgcacgcaagtgttaaacttctgcttgcgcgatctctggcctcttcaactgcatcaccatccaccc

SEQ ID NO: 333789 - DNA, 83 bp, Homo sapiens
ctccattggatttaaaagacagtcctcgtcagcactgactttcagctatggaatcggcctcgatctgtttatcgtcctttaaa

SEQ ID NO: 333790 - DNA, 74 bp, Homo sapiens
cctagcccagagacatggagagttgctacaacccaacagagaagattacagtatgtggggacacccatggccag

SEQ ID NO: 333791 - DNA, 100 bp, Homo sapiens
gtggtggtgctacagtccatcaagtaacagaagcatttaagcttatcacttcagataaaaaggatcagttcagtgatatgagaatcagcataaaccagac

SEQ ID NO: 333792 - DNA, 87 bp, Homo sapiens
aaacggatgtaaataagattgaggaatttcttgaagaagtcttatgccctcccaatgggtgcctgatagacatcctaggactataca

SEQ ID NO: 333793 - DNA, 86 bp, Homo sapiens
gactttttccggcggctgctcatggaagatggtacaagttgtgcaaagtgaggaagattactgtgggagtgaagggaatccctcac

SEQ ID NO: 333794 - DNA, 75 bp, Homo sapiens
aagtaaaagagaaatttcaacagttgcgtcacagaatacagaaagaagttttcccatttccagaagttagccaag

SEQ ID NO: 333795 - DNA, 90 bp, Homo sapiens
cttgaccgtcactagtagacgtttctgagtgtgtcgcggtcaccatggcgttggagaccagggccagccctggccacaccccaggctgtg

SEQ ID NO: 333796 - DNA, 71 bp, Homo sapiens
agaccggagctgttcctattcggccatcttggctcctccacaaatttcttcgcaagactatggaaaggaag

SEQ ID NO: 333797 - DNA, 88 bp, Homo sapiens
tcggggctctgacttcacagcagccgtcaccctggggaacccagacgtcctcgtgggttcaggtcaggctccgccccgccaagtccca

SEQ ID NO: 333798 - DNA, 75 bp, Homo sapiens
acatcttctggacctttgtccaggtatttgactggaatggttgacaaaaggacgcttgaaaagtatgaaagagaa

SEQ ID NO: 333799 - DNA, 100 bp, Homo sapiens
gatggccatggcataaggaactctatcccaggaatacagctttgcattaggcgtgcaatggaattgagttttgccctggtaaatgggaataatatccgag

SEQ ID NO: 333800 - DNA, 90 bp, Homo sapiens
gttctctaggccttttagaaaacatggtattggcaagcttgccagtgtacctgctggtggggctgtagccgtctctgctgccccaggctc

SEQ ID NO: 333801 - DNA, 83 bp, Homo sapiens
aaagcccaaagcaaggcccataaacggaggctacggtacaatgactcttcttgcttttcacctaagttgaataagcaccctgt

SEQ ID NO: 333802 - DNA, 98 bp, Homo sapiens
ccattttattttccctgctaggagttgctgtacataacactggtgctcaagtaaagctctttgtgacagggcttttcagcttaaatcaagatattcct

SEQ ID NO: 333803 - DNA, 71 bp, Homo sapiens
ttctacaaagaacagctggctagactggaggagagggtaaaaatgcatttgcaaagggagaaaatgaaggc

SEQ ID NO: 333804 - DNA, 78 bp, Homo sapiens
tagagaggaccccgggacatctgaaagccaggaaatggacccagtggcctttgaggatgtggctgtgaacttcaccca

SEQ ID NO: 333805 - DNA, 96 bp, Homo sapiens
caagcttctgaaagaaagattagagaaattcttccatcgggaagagtctaacctgtctctgcaagctcttgagtcccgccaagatgatattttaaa

SEQ ID NO: 333806 - DNA, 74 bp, Homo sapiens
tcagcttcacattctcaggaactctccttctttggtgtctcaatgagatcttggagtcagcagatgcaccctta

SEQ ID NO: 333807 - DNA, 100 bp, Homo sapiens
cggacctttcccgctggcgcgcagcctcagctagatcctatagcaatggaactcagcgatgcaaatctgcaaacactaacagaatatttaaagaaaacac

SEQ ID NO: 333808 - DNA, 51 bp, Homo sapiens
cctccccaactggcagcccgtgcagtgtgagaaagatcagtctaaagaaaa

SEQ ID NO: 333809 - DNA, 74 bp, Homo sapiens
gcagaagccgaaaccgccaaagccaaatgctgaccccctgaaggtgtacccgccactgaaggggagcttcccgg

SEQ ID NO: 333810 - DNA, 80 bp, Homo sapiens
gctttgttcagctgcagcatggagagatagataaacggggacctgttgcaatgagagtggcaaaattagcaattaatcaa

SEQ ID NO: 333811 - DNA, 85 bp, Homo sapiens
ctggttgatccttgaagattagaatataacaccagcaatcctgacttgttgctagtcatatttcaagtgacaggcatcagcctcc

SEQ ID NO: 333812 - DNA, 80 bp, Homo sapiens
tgttacttttgaacagtccattgaagctgtgcaagctatatatcttcatcataaaagaggagaaacagataaaagacaaa

SEQ ID NO: 333813 - DNA, 75 bp, Homo sapiens
cgaaggtggcggcgctgctgctcgggctgctcttggagccggcagcaaaagtggaccaagaaaccttgacagaaa

SEQ ID NO: 333814 - DNA, 99 bp, Homo sapiens
tcactgggagaagaacctctcataccctcgatgcgctggctccctccctccgaggctacttctcagggctggaagtcccgtcagttctgctgaatacta

SEQ ID NO: 333815 - DNA, 75 bp, Homo sapiens
acagtgggggtgtgcaaacccgagagaactggctgcagaaccttggcctgaaaatgctacattatatcagcaatt

SEQ ID NO: 333816 - DNA, 82 bp, Homo sapiens
aggaaaaactggagagcttcatcaaaaatagtgatagctttgataagacactttcttcatgagcaacaaaccccaaagatac

SEQ ID NO: 333817 - DNA, 103 bp, Homo sapiens
agtttgtatgccagaagaagggtttaaaggaggagcgatgggcagaaccagcacttccctcaggcactagacctgtcacgagtgaacttagttccctcctata

SEQ ID NO: 333818 - DNA, 100 bp, Homo sapiens
ctcggttggatgcgaaggagctgcagcatccagcttggatcctagcatgactatacattgtgacatggtcattacatatggattagaccaactggagaat

SEQ ID NO: 333819 - DNA, 98 bp, Homo sapiens
gactgtcgacctaaagcctgactggggcaaggaggagatgttaaagtaacccatcttgcaggacgacattgaagattggtcttctgttgatctaagat

SEQ ID NO: 333820 - DNA, 83 bp, Homo sapiens
gagctggcggacatcactttagaccctccacctaattgcaggtcttcagaactactagcagataatttggggggacttcatat

SEQ ID NO: 333821 - DNA, 96 bp, Homo sapiens
tcaatgttgtttatgccgtatccaaatatttgaatggtggtacttccataagcatggcacatcttttattgagcaagtatctgtaagccatttgca

SEQ ID NO: 333822 - DNA, 51 bp, Homo sapiens
ccccgtctgaggactgacctttttccgagaaatggcatgattcacgacgct

SEQ ID NO: 333823 - DNA, 74 bp, Homo sapiens
cagcaggctccgggctgaagattgcttctcttctctcctccaaggctccatctatgagatctctgggaatgagt

SEQ ID NO: 333824 - DNA, 90 bp, Homo sapiens
cggccaagaccagcgcgagggccctgggcaaggcccgacaggatgtacagttacccagcacgtgtacctcctcctcctcctattgctcgg

SEQ ID NO: 333825 - DNA, 75 bp, Homo sapiens
agctctacgcctcctacgtttacctgtccatgctcccgcggccgccccttccctgggccgggtcatgcgctgccc

SEQ ID NO: 333826 - DNA, 101 bp, Homo sapiens
tgttggtctgctggtgggactcaatgttctcgatgccaatctctgcttgaaaggagaagacttggattctcagtcttactactttgaccgcgatgatgtgg

SEQ ID NO: 333827 - DNA, 101 bp, Homo sapiens
ggccatccgtgtggtctccactggcaaggaaggtgtgatttacaatggcctcagtgactggctgtatgaaggaaaaccaattctgtgtcctcggaggacca

SEQ ID NO: 333828 - DNA, 100 bp, Homo sapiens
cttgtgttataaaaaatcggtggcaaagacgaacactgtatcttacaaagctgtctgcagatctccaggggagcccaccagcctagtcaacatggcctcg

SEQ ID NO: 333829 - DNA, 73 bp, Homo sapiens
gcagtggtcgcttcttctccttgacaaagccctggacttccctgggttcctggacatgatggcacctcgactc

SEQ ID NO: 333830 - DNA, 76 bp, Homo sapiens
gctctgcctccggggacaagaaactagagcaaataaccgttttgaaattgtgcacacatcttgaccaactcagcag

SEQ ID NO: 333831 - DNA, 88 bp, Homo sapiens
accattatcttaactgaggcacccaaaatgcttatgttcctgaggaagaattgaaggcagcagaaatagatgaagagcacgtggagga

SEQ ID NO: 333832 - DNA, 75 bp, Homo sapiens
gaagaatttcctctgaagcaccgaccgttccccagcacaccccaccccactcagccgctcagcctccctcagtta

SEQ ID NO: 333833 - DNA, 98 bp, Homo sapiens
tcattggagagatctctaaaaaagtggctcagattcagaatgcaaaccagtccagctacgggggcccagccagccagcagctgagtgggggttacgga

SEQ ID NO: 333834 - DNA, 75 bp, Homo sapiens
cctcagcctctccagcagctgggattacagaaactgttcaggttccattatcaaaacgagcaaaatttgttggac

SEQ ID NO: 333835 - DNA, 101 bp, Homo sapiens
agaagattaacctggagttaaggaacagatccccggaggaggtgaccattgtgaggtagatattttgttctaattttccagatgaggaagctgagacccta

SEQ ID NO: 333836 - DNA, 100 bp, Homo sapiens
tcctcctccagaaagacagattccgatgttcatgagagcgcagtttgactatgatcccaaaaaggacaatctgatcccttgcaaggaggcgggactgaag

SEQ ID NO: 333837 - DNA, 50 bp, Homo sapiens
ggcggccccacggcgagcatggttttaaaatcaaagatgggaaaatcgga

SEQ ID NO: 333838 - DNA, 100 bp, Homo sapiens
tgaagctctgctgccccgcaggcaccttcgggccctcctgccttcgacagtcattttgtttactcattcagccctgttgcaggtcccaataaactcttca

SEQ ID NO: 333839 - DNA, 100 bp, Homo sapiens
cagctttaatcgcagacttagaatccatgacagcaaatctgagcccaggctgcaagcacaaaggaagtttgctcagtctcagccgaatagtcccagcaca

SEQ ID NO: 333840 - DNA, 90 bp, Homo sapiens
ccgtggtgaagcatgaagtcacagggctactgttttccaatcctcagatggcccactgcgtgaccttggttcagctgtccatttcctgtg

SEQ ID NO: 333841 - DNA, 82 bp, Homo sapiens
tggcattgacatttaattttagggtcctttatatagaagggagagtaggcaagatcacgtctctggataccagcaccatgag

SEQ ID NO: 333842 - DNA, 100 bp, Homo sapiens
gatgatcaggatggtgctttcacaaaatggagagtggagaattcatggggtgaagaccatggccacaaaggttttcctccctcaagcaattcgacatctc

SEQ ID NO: 333843 - DNA, 75 bp, Homo sapiens
tctgtgtggactcggagaaacgcggtttacccctcactggagtcagatgaagacaaccccatctttaagtcccgg

SEQ ID NO: 333844 - DNA, 75 bp, Homo sapiens
gtggcaggagggcggcggcggcggctgcggtcgaagaaggggacgccgacaagatcaactactgctcggtgctcg

SEQ ID NO: 333845 - DNA, 101 bp, Homo sapiens
gttaaaaatcaacaccaggactacagtaaggctgaaatcattgaagtgcttggagtgcagaactgaaagaggaagtggcagtttttgtctttgataaaaaa

SEQ ID NO: 333846 - DNA, 100 bp, Homo sapiens
agaatgaagccgcggaccctcgcggagagatttacaaatagtgttttggcatcatggaacgtgtaggttgtactttaacgacaacttacgcccaccctag

SEQ ID NO: 333847 - DNA, 100 bp, Homo sapiens
gacttggaccctggaaaacctggccctcttcaatttctgacaaaagggttctgagcaaggttcaaccagtcaagaacaggccttatctgctcagcaagct

SEQ ID NO: 333848 - DNA, 98 bp, Homo sapiens
gtcggggaaccatggctgccccgagaggtgataagaagtacatcatggggcccaagctttccactcttgacgccactgtctttggacacttggcacag

SEQ ID NO: 333849 - DNA, 98 bp, Homo sapiens
ctgctgtttggccaccccctgttcctgcagaacacagggaccatgggctgtggctgcagctcacacccggaagatgactggatggaaaacatcgatgt

SEQ ID NO: 333850 - DNA, 100 bp, Homo sapiens
cccgaagaaagccagggcctatggcagagttttgtttggctatgccaccacagtcatccccagggtctatacatactatgtttcaactgtattatttgcc

SEQ ID NO: 333851 - DNA, 82 bp, Homo sapiens
gggtactacacaaccgtctccagccttggtctgagtggactgtcctgcagtggtgatcgccgctcgggaatgcgggcgtgaa

SEQ ID NO: 333852 - DNA, 98 bp, Homo sapiens
caacgaggaccgcaggggccagacagtcaatgccggtgtggctgagcgggctattgagggcacctacattgacaagaaatgccccttcactggtaatg

SEQ ID NO: 333853 - DNA, 100 bp, Homo sapiens
ctaccatgtcagccttcccagtagctggaactacagggctattcacgaaaagcagcagctctagagttcttaaaccgctttgaagaagccaagcgaacct

SEQ ID NO: 333854 - DNA, 90 bp, Homo sapiens
ccagagagggccagagcgtcggggaggcaagatgatccaccagcggttccatcctacacttgggtatgaggatacatgggctgcacttca

SEQ ID NO: 333855 - DNA, 75 bp, Homo sapiens
ccaccagctccccatcgcagaggccatgctgacctacaagcagaagaggccctgtctctgcccctggtggtcatc

SEQ ID NO: 333856 - DNA, 75 bp, Homo sapiens
atcccagatttctgtggcagaagatgatgatgaaagtgtgaagtgatctgtgaacctcccaacaacaaactggac

SEQ ID NO: 333857 - DNA, 100 bp, Homo sapiens
gctcagagatgccaagaagaatctagacagacaggcctttctagggtatcactgggatacatcagattggatgccaagcgttcctctgccggacatacaa

SEQ ID NO: 333858 - DNA, 107 bp, Homo sapiens
aggaggaccacctgcgggtcatctccatgcagaaggggggcaacatgaaggaggaccagtatcagctgtgctaccgtgcggccctggagtacctcggcagctttgac

SEQ ID NO: 333859 - DNA, 98 bp, Homo sapiens
tccgcgccacagaccccagccaggaagaattttaaatcgtttctccaaagacattggacacttggatgatttgctgccgctgacgtttttagatttca

SEQ ID NO: 333860 - DNA, 75 bp, Homo sapiens
cgtctctctgctgcggcgcggggaccgctgtgctctcggtgaatgactggcaggaggactgggtcgtgttctatg

SEQ ID NO: 333861 - DNA, 96 bp, Homo sapiens
gaagctggaagctgcagccacaatgtgcctttgcaggggagcctgagagccacagatagagaagtttttccctcatgtccttgagaaggaaaaaac

SEQ ID NO: 333862 - DNA, 98 bp, Homo sapiens
atcagatgagccgtcttgccaaggcactcaaggagttgcccctggtcctgtaattggacttcaggcaccatctactggtcttcttggcgcccggcccg

SEQ ID NO: 333863 - DNA, 82 bp, Homo sapiens
ccacctcatctttgacatggacggacttcttctgggtacaatgactcttcttgcttttcacctaagttgaataagcaccctg

SEQ ID NO: 333864 - DNA, 50 bp, Homo sapiens
gtggcgtcctggagccctcctcaggttttgagcaaaattttggactgtga

SEQ ID NO: 333865 - DNA, 82 bp, Homo sapiens
gcaaggagctaaagcagcgtgcgttcagccctggggttcaacagaatccctcaatcctagaccacagaccacaatttctcca

SEQ ID NO: 333866 - DNA, 76 bp, Homo sapiens
cagccgtggagaacctcaagaacatcttctcaggagcctgtgttggaagagatggtgatgggcctgggcgttttgt

SEQ ID NO: 333867 - DNA, 85 bp, Homo sapiens
aagaagagcagaaaatagcagccaggaaccaagaaaacttggaacatcatttacagcgagcaatttcagcacagcaagtgtttag

SEQ ID NO: 333868 - DNA, 75 bp, Homo sapiens
tggtgttgaaagtgaaatgtcatgcctctgaaaatgaagcacaaacgtgcagatatctgatagccctttccgttg

SEQ ID NO: 333869 - DNA, 101 bp, Homo sapiens
atgggagagtacatgagacgatgaagcaaagcctcctgacaaggtgatccgggcgggccccgcaggaattttatcccctcaccggcctcacactagtatcg

SEQ ID NO: 333870 - DNA, 75 bp, Homo sapiens
aaaattcactgtggtccagaagcagatatcggtgaggtgttggagagcacaatggctgaacaagtccttcctcag

SEQ ID NO: 333871 - DNA, 83 bp, Homo sapiens
gtgggccccagccccacagaccagcccagcattcagctggtaggtgagtgctgtcctcggctcactttcctcaagctctccgg

SEQ ID NO: 333872 - DNA, 50 bp, Homo sapiens
gggaagttcctttttgaagtagttccaggaactgcttcacaagattaaag

SEQ ID NO: 333873 - DNA, 75 bp, Homo sapiens
ctacgtctaaactgcagaagtttacaagccgagaggccccagcaacatgcagctacaattccagagacccctggc

SEQ ID NO: 333874 - DNA, 89 bp, Homo sapiens
cttctgtcagaatgccaatacaagcagttgccgtttccctggggagatggtaaccatactctattccataaccctcatgtgaatccact

SEQ ID NO: 333875 - DNA, 75 bp, Homo sapiens
aaagctcctcggcctcggcgtgctgcgcctccgcggctgccctgcgccaggtagctacagcaagctgggtagcag

SEQ ID NO: 333876 - DNA, 99 bp, Homo sapiens
tggacagaacttcatgtgtctgtggcagtcttgtaaaaaggctgaagtgcagtagtggagtagcgcaatcatggctcactgtagcattgactcccagac

SEQ ID NO: 333877 - DNA, 75 bp, Homo sapiens
attgtatgggtgttactttgctcaggatttgtacacacagatatgacgaaagacttgaaagaagaacatttaaag

SEQ ID NO: 333878 - DNA, 75 bp, Homo sapiens
cagggtgctttctggagacccccagaacctgtgaagcgtcagcccccgtagcacctctgttaccacgacttctag

SEQ ID NO: 333879 - DNA, 83 bp, Homo sapiens
cgggagacacagtgtcagaattacaaggacacattcagctaacgtattttagcaggtggagtgaggttgaagattcctgtgac

SEQ ID NO: 333880 - DNA, 100 bp, Homo sapiens
gaatgatcctggaatccaggaatgctatgatagacgacgagaatatcaattatctgactctaccaaatagattctgatcttcgaagtgcacttcttttgg

SEQ ID NO: 333881 - DNA, 148 bp, Homo sapiens
ctggaccctgctcagaggactctatacagggacgtgatgctggagaattataggaacctggtctccctgggttgaaccgtctaacaacagactttaatgtaattgtggaagcattgagcaaatccaaggcagaactcatggaaatcag

SEQ ID NO: 333882 - DNA, 90 bp, Homo sapiens
ggtttcaagacaacagatgaattgtgaaagagagcagctaagggattatctactatctagatccatctgttctgtccggcgtttcctgtt

SEQ ID NO: 333883 - DNA, 75 bp, Homo sapiens
gactgctccatcgaggcagccatggtgaaggttttaaaatcaaagatgggaaaatcggagaaaattgcccttccc

SEQ ID NO: 333884 - DNA, 75 bp, Homo sapiens
caggacatcctggaacctgggaaaggaggttttaaaagactacatcaagccagatggggaatatttggagttgtt

SEQ ID NO: 333885 - DNA, 87 bp, Homo sapiens
taccaaggacagagtcagtgatttccataaattgaagcaaaatatgtcacagatctaagcagcagggatttaattactgtacatcag

SEQ ID NO: 333886 - DNA, 100 bp, Homo sapiens
gagaaaacctagaaatttcctttaggaacatgtatcgattcgagggcactgggttttcaaacattcctcaacttatagatcatcactatacaacaaaaca

SEQ ID NO: 333887 - DNA, 90 bp, Homo sapiens
attggattggcatctttagaattgatttcctaaattcagtaatagtggaccttcaaaggaagaatcaagacctcaagatgaaggtggaga

SEQ ID NO: 333888 - DNA, 76 bp, Homo sapiens
aaaaaaggattgccacagtcccggaacttgtaatagctggcatcgttgagaatgaatggaaaagaacgtgctccag

SEQ ID NO: 333889 - DNA, 142 bp, Homo sapiens
ctcctaatcttggaccatacagtccatgtgtgctttgcgcctgcaatggacacagcgagacctgtgatcctgagacagactctgtggcaacagcatccgggccactactagtcgaagttgccaaaactcctggtgccagcct

SEQ ID NO: 333890 - DNA, 100 bp, Homo sapiens
catctctgtcctgaagctgaaagtggacaagtgctctcgacaggacaccgtcttcatgaagaagcagaaggtgatttactacctctgcatcttattgaaa

SEQ ID NO: 333891 - DNA, 74 bp, Homo sapiens
attctcctgccaccgcgtggtgcttgccgcagccagcaactatttcaggtaatagcctgcagctggtgttttga

SEQ ID NO: 333892 - DNA, 75 bp, Homo sapiens
ttcaagaatgaagccacggacccttgcggtgactgtgatgcactccatgcaggccggctacctggagaaggcgca

SEQ ID NO: 333893 - DNA, 98 bp, Homo sapiens
tcgcagacatggacaccaaacatttcctgccgctcgtttctccttggaccaagatgactgatggaaaactctccacctctacaaatggcgtagccttc

SEQ ID NO: 333894 - DNA, 82 bp, Homo sapiens
tcagctccgagtccagggcgagtgacttttttgaacgaaccattctgtgcaacagccttgtgtggagttgtgctgtgacggg

SEQ ID NO: 333895 - DNA, 83 bp, Homo sapiens
ctcatcccctggatgggggaccacaagatcctcatcgacagagagaagcaagcagaaggcccggaggagaacaagatccagct

SEQ ID NO: 333896 - DNA, 97 bp, Homo sapiens
tggacagcagcaacagtggcttcgggccggaggaagatggctctgagagattcctctgcgaatctgtttttagctatcaagtggcatccacgcttaa

SEQ ID NO: 333897 - DNA, 109 bp, Homo sapiens
caagcctcaagctgtgaagttcctttacactgggtctgggaggggctgaacgtggtgaagacaggccgagtgatgcttggggagaccaatccagcagattcaaagccag

SEQ ID NO: 333898 - DNA, 82 bp, Homo sapiens
ttcgtgctgtgcgggatcgacgcggacagcgggctggagcctgacgagctggcggctctacaaaaacctctggggcgctgtc

SEQ ID NO: 333899 - DNA, 75 bp, Homo sapiens
ctttgtctttgcagtggtcatctatttccagatgacagtcatgtccctttccagggacctcaaggacgactttca

SEQ ID NO: 333900 - DNA, 97 bp, Homo sapiens
ggcctattttgtggaatattcattgtactgaatattacccttgtgcttgccggttggacgtgataagtatgagcctgcagctgtttcagaacaaggt

SEQ ID NO: 333901 - DNA, 80 bp, Homo sapiens
aggatgtggtcgtggaactaaagaatgacctgagttcacacccaacctcttcctgaagcagatgctagagaggtaccaaa

SEQ ID NO: 333902 - DNA, 98 bp, Homo sapiens
tgatggttcactttttcaagcagtaggaattctggaggaaagcaggaatgttcagaggcaaatgaagattctgcagaataagcaagctcagattgtca

SEQ ID NO: 333903 - DNA, 99 bp, Homo sapiens
tgagatccccagtcagagccgtccagattgagaggatccagaatccagatctctggaatagctaccaggcaaagaaaaaaactatggatgccaagaatg

SEQ ID NO: 333904 - DNA, 88 bp, Homo sapiens
cgtgacctggggatcgctacggaccttaaaatacccgcaacagccccttcgtcccaagttgcacagtgaattaaaagatgctgttgaa

SEQ ID NO: 333905 - DNA, 82 bp, Homo sapiens
gggacagcatcgcccaggcccctgatggcagtggcagcaccatgatgcaaaccaagaccttctcctcttcctcctcatccaa

SEQ ID NO: 333906 - DNA, 82 bp, Homo sapiens
ttagctgtgctcgcgctactctctctttctggcctggaggctatccagcatctctgttgaggagctggcgcggaatctggtc

SEQ ID NO: 333907 - DNA, 95 bp, Homo sapiens
caacttgcagctcatctctattgatggtcatgtaatgtttgcagaaataaaaatggagaatggaaagtcaaaaggctgtggaacagtcagatttg

SEQ ID NO: 333908 - DNA, 50 bp, Homo sapiens
aaagttgtatccaggaaaatcattgtgcaagagggcacattgggagattc

SEQ ID NO: 333909 - DNA, 50 bp, Homo sapiens
ctatggacagacgcacagacacctgcagataatttctgctgctgaaacat

SEQ ID NO: 333910 - DNA, 82 bp, Homo sapiens
ggtgattcacgtgtgcccaggccctgaggtgggccggacctgggagtggcaggttttaaaatcaaagatgggaaaatcggag

SEQ ID NO: 333911 - DNA, 100 bp, Homo sapiens
ggcagataaacttttactcacaactccctccaaaaaatttacctgtcaagcttactactttgtatgagaacttaagtatacacaaccagcagttagaaga

SEQ ID NO: 333912 - DNA, 98 bp, Homo sapiens
taagcacacctggagcaacaacctggcggtgctcgagtgcctgcaggatgtgagggagagtcaacggttgcaggaaagtttgaagaaagtgaattaca

SEQ ID NO: 333913 - DNA, 95 bp, Homo sapiens
atattgaactgggcacagcatgcggaaaatactacagagtgtgcacactggctatcattgatccagatgggaatttcttagccataggctcacat

SEQ ID NO: 333914 - DNA, 100 bp, Homo sapiens
ttgctgccagtggtagcgctcgtctggcggagctgggccgggctctcgccatgggtcactgtcgcctctgccacgggaagttttcctcgagaagcctgcg

SEQ ID NO: 333915 - DNA, 73 bp, Homo sapiens
caaaattgaaaaaatggttgacctcacccagctgccactgcagagccccgccatggaagacacgccgttggtg

SEQ ID NO: 333916 - DNA, 83 bp, Homo sapiens
tatggtgaaacaccactgaagcattgccaaggaaattatctcattcaaagctagtgcaactttatggagtctgtatacagcgg

SEQ ID NO: 333917 - DNA, 75 bp, Homo sapiens
gtttatgtgggcagcttctcctggcaaaaaggcattgggatgaacgagccgctggtggactgtgagggctacccc

SEQ ID NO: 333918 - DNA, 75 bp, Homo sapiens
ccaacgtccgggaaaaacgacagttggaattgatcacaccttttcagttgtacttcaatcctgaattaatcttta

SEQ ID NO: 333919 - DNA, 98 bp, Homo sapiens
atgaggcaagcgcagggggacggggaccagcagctgtcgccgccgctctcaggagagaaaccctttatctgtgaaatctgtggcaaaagcttcaccag

SEQ ID NO: 333920 - DNA, 134 bp, Homo sapiens
caaccccagccgaccttgagctccaggagttcgtctcttacgtctgcggaagtgcagctgcctcagttcttagcgcagagtcatgtgctgttcctggggcttggatgatgtaggggaagcaaggtgaaagtggt

SEQ ID NO: 333921 - DNA, 74 bp, Homo sapiens
gcaggctccctgcctccctgcgtggtggactgtggcaccgggtatgatctcgtgaaatcttgagagaaactgaa

SEQ ID NO: 333922 - DNA, 75 bp, Homo sapiens
cggtcacaggcagctttggacgattctgagaacaataactccacaatggcgtcggcctcggagggtgaaatggag

SEQ ID NO: 333923 - DNA, 97 bp, Homo sapiens
ccggcctggagctcccagggccgagcccggaagcaggagatcattaagaccacggagcagctcatcgaggccgtcaacaacggtgactttgaggcct

SEQ ID NO: 333924 - DNA, 90 bp, Homo sapiens
cgacggttccgtctacaagaaacacccccaacagatcgaggagctgctagagctgctgatgactgagatcctgcaccccagcagccaggc

SEQ ID NO: 333925 - DNA, 139 bp, Homo sapiens
tgactgacaagaaattggagaataacatgcgtggagtggttctacgtgtagtaactgttctgggcggcgactggcggcgcgatggacctgaccgggctcctgctggacgaagaaggcaccttctccctcgccggcttcc

SEQ ID NO: 333926 - DNA, 113 bp, Homo sapiens
ctacaacttgtccacgacaccggctacttctcagctttaccatccctggaggagacctggcagcaggtagccctaatggagaaccttgtggaaagacttgtttggaagagaga

SEQ ID NO: 333927 - DNA, 90 bp, Homo sapiens
tggcaaccccggcggcggtcaaccctccgggtgtgcaactgaggaacatggctcaagaaactaatcacagccaagtgcctatgctttgtt

SEQ ID NO: 333928 - DNA, 116 bp, Homo sapiens
attttttttcccagattgaccccaaagttgcatttcctcgtcgagcgcaacccaaggtgaaaggtgtagcagtcactcggcctacacccacagcatcgaccttgtgaacccagcga

SEQ ID NO: 333929 - DNA, 100 bp, Homo sapiens
caaaattctgaactcaggacttggcaatgaagccatgtccctggagggagatgaatgggaactgagtaaagaaaatgtacaacctttaaggcaagggcgg

SEQ ID NO: 333930 - DNA, 74 bp, Homo sapiens
gtgcgggagagccccttgcagaagacgccgtacgaggtgggtttggaggatttgggacaacatctacaactgca

SEQ ID NO: 333931 - DNA, 110 bp, Homo sapiens
gccagtgggacgtctgagactttctccttcaagtacttggcagatcactctcttagcagtgtgtcccggcatggatatccggaacaacctcactaggttgcatgagctgg

SEQ ID NO: 333932 - DNA, 75 bp, Homo sapiens
agcatggagcctggggaaattctgcagtgagattcagaatggacagtttagaagaacctcagaaaaaagtcttta

SEQ ID NO: 333933 - DNA, 75 bp, Homo sapiens
aaagcctgcccagacggctcacctgtgcgggatggaacaaaaggtgagcacctgcggatctgtccccagggctac

SEQ ID NO: 333934 - DNA, 90 bp, Homo sapiens
tcgccaaggagatcgtctctctcatcgaggcccaaaccgccaagaacccagcttagactagaaagtctagaagacacacacataatgaag

SEQ ID NO: 333935 - DNA, 100 bp, Homo sapiens
agctggagcggatgctgacacacctggccacattcatcatggacaagagcgaagccatcacgtctgtggacgacgccatccggaagctggtgcagctgag

SEQ ID NO: 333936 - DNA, 83 bp, Homo sapiens
cgggaggaaggaacgaggcaaggagctaaagcagcgtgcgttcagccctgggggaacggcaggagcagctgatgggatatcgg

SEQ ID NO: 333937 - DNA, 101 bp, Homo sapiens
ggtgagaccatcaccaagcggtgagactatcacctatcgccaagtggttccagcaacagatagaaatgctttaagttcactctggggaaagctggcctctg

SEQ ID NO: 333938 - DNA, 100 bp, Homo sapiens
gctgcccagtaagggcgagggcactcctcatacttactgccggctgccccgcaacctcaaccctggcatgggacgctgagctggggcagcagtggacaca

SEQ ID NO: 333939 - DNA, 49 bp, Homo sapiens
ctccctgacctcttaatttcaggaggctgcaaagttggctttcacagtg

SEQ ID NO: 333940 - DNA, 83 bp, Homo sapiens
cgtggggcttccgcctcgtgggcggcaaggacttcgagcagcctctcgccatttcccggggggatatgagactttctactcgg

SEQ ID NO: 333941 - DNA, 87 bp, Homo sapiens
tttgggaaatgaagcaagcacagtgagagcgaaccatgtgctggatttagccagtcctgcatttttctatacttcaaatcaaaacgg

SEQ ID NO: 333942 - DNA, 74 bp, Homo sapiens
gcggaggcagaggtggaggcgctttgaaaggttagcactctacgtatatgaatatctgctccatgtaggagctc

SEQ ID NO: 333943 - DNA, 98 bp, Homo sapiens
tgcgatggacagaataactgtcaagacaacagtgatgaggaaagctgtgaaagttctcaagcaatcccacagagtattgatgaggaaactgaagtttg

SEQ ID NO: 333944 - DNA, 75 bp, Homo sapiens
agatcaccgtgacatccgaggtgcctttctccaaaagtattggtaaaggttttcaaggtgtcatgaaaagatggg

SEQ ID NO: 333945 - DNA, 100 bp, Homo sapiens
attagtgagaatggtcatgctgccgacaccctgacggccacgaacttccgagtggattctgagacgcccatccctgcaacgtcgagctggctcccgctct

SEQ ID NO: 333946 - DNA, 97 bp, Homo sapiens
aatgcttttgtgctgctcacagtcaccgctgtcattgtggataagccaatggacacgtcagtgttatctgaagaaggaggagagccttttcagaaga

SEQ ID NO: 333947 - DNA, 100 bp, Homo sapiens
gccacagtggctgccgccacctggtggtttgtgtatgacgccgagggacctcacatcaacttctaccagctggattcgctaaatattgtaatggatcaag

SEQ ID NO: 333948 - DNA, 83 bp, Homo sapiens
ccgggagccgtccgtgtcaccgccggaacctggcgcaggacccagccgccgcctccatctctgacggagactgtgacgcccgg

SEQ ID NO: 333949 - DNA, 75 bp, Homo sapiens
agcgaagagagtcaccgaccatgacgggtgtggatgaggtcaccattgtcaacattttgaccaaccgcagcaatg

SEQ ID NO: 333950 - DNA, 82 bp, Homo sapiens
cgacaagccgctggcagccgcggatctcaccgccgctcaggttgcagagtgggcaggatcttaagacccgataggtgcagaa

SEQ ID NO: 333951 - DNA, 50 bp, Homo sapiens
aagtgaagctgctgctactcgggggaaatttgcagtggtgagaaaatgta

SEQ ID NO: 333952 - DNA, 100 bp, Homo sapiens
acccggagaagcaggagccctactcggcagagcgccgccctgtgctgggctgccgggagctcgtcttcaggaacctctccaagatcctccctgccctgtg

SEQ ID NO: 333953 - DNA, 98 bp, Homo sapiens
taagaagagaaaaagagaagatgaagaaacccagcttgatatgttgtgatgtccttgcattgcccatttttaagcaagaagagtcgagtttgcctcct

SEQ ID NO: 333954 - DNA, 95 bp, Homo sapiens
aaagatagacaggctgctgaagcaaacaaaaacgccagcattttgttagaggagttagacttggaaaagaggcatttcatccttcatgaagccat

SEQ ID NO: 333955 - DNA, 98 bp, Homo sapiens
ctgagcaaggagcgggtccgtcgcggagccggagggcgggaggaacatgacatcgcggaggccgagacgcatccagagctttcgtgaccggggactgt

SEQ ID NO: 333956 - DNA, 75 bp, Homo sapiens
aagcggcagctgaggagactccggcgctcgccatggccgacgaaaagcccaagggaaagaatatggcaaagctga

SEQ ID NO: 333957 - DNA, 51 bp, Homo sapiens
cagatccaggccaatctccccgatgagagccagacccagggccctccagat

SEQ ID NO: 333958 - DNA, 95 bp, Homo sapiens
gtggaatatgccaaggaaaaactggagagcttcatcaaaaatagtgatagctttgataaggctgacaggacaactggatcagtttcattaaaaag

SEQ ID NO: 333959 - DNA, 74 bp, Homo sapiens
ctgcttcatatgcaaaagatccacttaataactatgcagtcaaggctcccaatcgtcaactcatgacttactgg

SEQ ID NO: 333960 - DNA, 75 bp, Homo sapiens
tcaggctcaacgaggaactcaaagtggatgaggaaagtgcccgtggttgacacgagctgtgtccccagctgttcc

SEQ ID NO: 333961 - DNA, 90 bp, Homo sapiens
gtccaggtggtcccagtgctattatgcctacttgactgcaggacaaagcagttccaattccagagaaaatgagtgaatgggcacctcgac

SEQ ID NO: 333962 - DNA, 50 bp, Homo sapiens
cttttacctacgttggcggccccagaaggcaatgaatcgctccctggcta

SEQ ID NO: 333963 - DNA, 74 bp, Homo sapiens
gaagattgctttggaaggagcaaatgtaatttataaacgtgatgttggactttgtgtccctggtgatgttggaa

SEQ ID NO: 333964 - DNA, 86 bp, Homo sapiens
ggcgaaaggaacggctgaaggccctacgggagaaaaccgggcgcaaggtgacttaagagattaaaattaatttggttgctgttggt

SEQ ID NO: 333965 - DNA, 97 bp, Homo sapiens
tgcccggcgacactgcacccatcccggctgcttttgctgcgccctctcagcttcccaagaaaggtgaaggtaggcaatgaagttgctacaggaacag

SEQ ID NO: 333966 - DNA, 100 bp, Homo sapiens
gcggcgtctggctgctgcggaccccgccgagtcctagcgcctggcctgcgcgccgctgcccgcgccacaggctggatagctgtggcctcacagccaaggc

SEQ ID NO: 333967 - DNA, 100 bp, Homo sapiens
gggtggaggacatcgacatccaggcgaactcggcctatcgctaccctccgaagtccgggtaccgtgagggttttctctggaagcgtggccgggacaacgg

SEQ ID NO: 333968 - DNA, 100 bp, Homo sapiens
gccgcgccccgggcgggcacagttacgcgccgcacggatcatggccgcagccgctctggggcaggctgaaggtgatgtggccgccctcaaccgacgcatc

SEQ ID NO: 333969 - DNA, 124 bp, Homo sapiens
ctacacgttcacggtgccccggcgccacctggagagaggccgcgtcctgggcagagagttgctggagaatgtaaccctaatccataaaccagtgtcgttgcaaccccgtgggctgatcaataaa

SEQ ID NO: 333970 - DNA, 88 bp, Homo sapiens
ctcttccaaccaggggctgagcttctgcgctgtggagaagccaggagcttttgatgggaggccagcagactatttattcatgctcctc

SEQ ID NO: 333971 - DNA, 88 bp, Homo sapiens
gggccctcaagcccagtcgggactcgagcctagggaggcgaggttcccgcaccggatagggaaaagaagatctcccggagcagtgccc

SEQ ID NO: 333972 - DNA, 96 bp, Homo sapiens
aggagcaggatttgcacccctcgctgggcttgctttggcaacagagtgcctgacccaggtcagattgaggaaacttgaatatttttgtatcctgaa

SEQ ID NO: 333973 - DNA, 75 bp, Homo sapiens
ttgatattgaagcaatgcttgaggctccttacaagaaggatgcattcagtctactagcatattcagatccctgga

SEQ ID NO: 333974 - DNA, 80 bp, Homo sapiens
gccgaaggggcgtctgcggctctccgccgtccccagccctgcctctccctgggctctgattgtcaaaagagtggggaatg

SEQ ID NO: 333975 - DNA, 75 bp, Homo sapiens
ccgttgcagcctcccttccccacgacggggcgcctctgcaactcacagattgtgagggtgaaactcccattcaca

SEQ ID NO: 333976 - DNA, 83 bp, Homo sapiens
ggaccagatcgaggagctgaaggccgagtttggaaattttagcattcaggtgccaggaatgcagatgggacagccagtgccag

SEQ ID NO: 333977 - DNA, 95 bp, Homo sapiens
atggaatgaaattgttctctggagatgacaaaggcaaaattgtttattcttctctggatctagaccaggtattgatgaagatgaccctactgctg

SEQ ID NO: 333978 - DNA, 121 bp, Homo sapiens
gcagccggggtttggtaccgagcggagaggagatgcacacggcactcgagtgtgaggtgacttaagagattaaaattaatttggttgctgttggttctgaacaaataatgagttcttttat

SEQ ID NO: 333979 - DNA, 75 bp, Homo sapiens
acctgacgctcgtcctcatcctggtcactagcggactcttcttcgccttcgactttccagagtgttgaatcttcc

SEQ ID NO: 333980 - DNA, 96 bp, Homo sapiens
ggaaaataatggccctcaaacgtctctagtgatccctgaaaagttccagcatattttgcgagtactcaacaccaacatcgatgggcggcggaaaat

SEQ ID NO: 333981 - DNA, 50 bp, Homo sapiens
acccaggaacaagtatctgacaggtcttccgaccccgaactccaccggag

SEQ ID NO: 333982 - DNA, 75 bp, Homo sapiens
ggccacagaagttgctgctgacgctctgggtgaagaatggaagtgggatgatgagacggacatggcccagctgga

SEQ ID NO: 333983 - DNA, 75 bp, Homo sapiens
tatcaacatgaagaagatgaagaggacttctatcaaggcactggtgaggtggattgatgatgaatcttctggcac

SEQ ID NO: 333984 - DNA, 50 bp, Homo sapiens
caggatgtgagcaacacgggaccgttccctgttcttcaggacaatttaga

SEQ ID NO: 333985 - DNA, 82 bp, Homo sapiens
tctgggtgttttgctaccgtgaccgtttaggctccacaaggctgacttcaggacctgggcctgcatggatttgtgccgagac

SEQ ID NO: 333986 - DNA, 83 bp, Homo sapiens
ctcagttggaagcagccgatccagcctgcggagcctgtggggcagtacccggcagtgtcacctgctcctggatgtcttcaact

SEQ ID NO: 333987 - DNA, 97 bp, Homo sapiens
tttactagttacaacgggtcaagaggttaaatatgatttgatggcccactgcgtgaccttggttcagctgtccatttcctgtgaccatctcattgac

SEQ ID NO: 333988 - DNA, 90 bp, Homo sapiens
gtttgctgatcgccccagggatcaggagatccagaatataagaagtttttagaaacctactgtgtggaggaagagaagaccagtgccaac

SEQ ID NO: 333989 - DNA, 51 bp, Homo sapiens
accaagcagcagaacaatgctggtattaatctctggagaagacacatccac

SEQ ID NO: 333990 - DNA, 78 bp, Homo sapiens
cggggtatcctctggacaagccggatgcagacggcagcacgggctgttcggctcttgaatcccagcgatgaaaccagg

SEQ ID NO: 333991 - DNA, 82 bp, Homo sapiens
accctaaaaatggcgattctgcaaccaagcacctgaaacagcaggtcaaaatgcagatcttcgtgaaaacccttaccggcaa

SEQ ID NO: 333992 - DNA, 100 bp, Homo sapiens
ttcgacattgccgtcgacggcgagcccttgggccgcgtctcctttgagtcttagttcacttgcacatggattcacataaactgaatggtgtaatgtctgg

SEQ ID NO: 333993 - DNA, 82 bp, Homo sapiens
gcgagccccgcactctctcgatgagtcggagaagtcccgtttgaattttgggaagattttgaagaagaccatgggaagggga

SEQ ID NO: 333994 - DNA, 100 bp, Homo sapiens
gaaaagggctcaggtttaagcgactggaatcattcctacatgattcctggcggcagaaacgtgacaaggtggagccgccaccaaaatgcagattttcgtg

SEQ ID NO: 333995 - DNA, 50 bp, Homo sapiens
cttcaagcagcgccgcaccttcgctggctgcaccttcgaggaggcaagtg

SEQ ID NO: 333996 - DNA, 133 bp, Homo sapiens
cagctccccagtgctcttctcgccggtcggccggcgtagctcgctaagctcgcgatcctggtgtatagcctggaagcaggacgccgcctcttgaagctgggtaacgttctccgtgacttcacgtgtgtcaacc

SEQ ID NO: 333997 - DNA, 98 bp, Homo sapiens
gcacagccatcacctaccagctgctggccatcctggacttcaacaacatccgcaagcggatgtcggtcatagactcaaagcagtatggagataaaatc

SEQ ID NO: 333998 - DNA, 82 bp, Homo sapiens
tcgcccgtgggggctgagcccgccgtctacccgtggccgctgccggtctacatgaaggatttgggggcagagcacttggcag

SEQ ID NO: 333999 - DNA, 74 bp, Homo sapiens
gatatatgttctctaggccttttagaaaacatgaatatgcttttaaggctattaaccagggtggccttacatca

SEQ ID NO: 334000 - DNA, 100 bp, Homo sapiens
gcaggagagatagaggcagcagaagccagggcagctgaaagacagagaccttcaggtttgtgattcagacactatgcttgacccagcctcatctgtggag

SEQ ID NO: 334001 - DNA, 87 bp, Homo sapiens
tccacgtgcggtgctcgtcgggagtgatcacctaccctacagggatcatggcccaagttgcaatgtccaccctccccgttgaagatg

SEQ ID NO: 334002 - DNA, 75 bp, Homo sapiens
aaaatcgcttggttaaaacctgacacttttaacaggtgtctgatgatttgtgagcctcaagtgactactctgtgg

SEQ ID NO: 334003 - DNA, 149 bp, Homo sapiens
tggagatcatatagtgtctgcctcaagggataaaactataaaaatgtgggaagtgcaaactgggacagtcattttgtttactcattcagccctgttgcaggtcccaataaactcttcataaggttgacagaagcaccctctgccaaggt

SEQ ID NO: 334004 - DNA, 50 bp, Homo sapiens
gagcaggaacctggagttttcagaacccttaggagaaatcttgagagtgg

SEQ ID NO: 334005 - DNA, 98 bp, Homo sapiens
ctcagacgccaggacatcccggaagctgggaaatggctgatcagttgatgttcgctttgcattttgttcgaggcatgcatcctgaactttttcaagaa

SEQ ID NO: 334006 - DNA, 82 bp, Homo sapiens
ctgtgttattctgcatattgcagttcttgtcaatgacctggatcccctaacaacagtgagagagcaatgcgagcagttggag

SEQ ID NO: 334007 - DNA, 74 bp, Homo sapiens
accagtcacccaagtgcattgcctttggaaacgagtggttttatgaagaaacagaaagcagtgatgatgttgaa

SEQ ID NO: 334008 - DNA, 96 bp, Homo sapiens
cttcctcctttgcatgatcctgtaaggacggaagagccgtttgcgagccgccgtgccagaaccggggctcctgcagccgcccgcagctctgtgtct

SEQ ID NO: 334009 - DNA, 74 bp, Homo sapiens
cgattcagagactgaaaaacctgaggctgatgacccaaagatgccttcaattaagttgcagagttctgatggag

SEQ ID NO: 334010 - DNA, 100 bp, Homo sapiens
gagcgcaaggacagcgcgaggtccgcgcagcccagcgcagccatgagtacgagagggcctccaaagtggaccagtttgtgacgcgcttcctgctgcggga

SEQ ID NO: 334011 - DNA, 88 bp, Homo sapiens
gaaaaagaagatatgtatgacgagattattgagttaaagaaggacgccaacaaggagagcagcaagacctccaagccacacaaggtga

SEQ ID NO: 334012 - DNA, 100 bp, Homo sapiens
aagcaaaggcgtcaggaatggttcttcctcagatccgagtgaagcctgacaggaccggtgtggtcacggatggtgtgaagcactccatgaaccccttctg

SEQ ID NO: 334013 - DNA, 98 bp, Homo sapiens
gctgaaagaagatctgtccagcatcatcctcctatcagaggaggacctccagacttaattcagtgcacaaatgagatgaatgtgaacatcccacagtt

SEQ ID NO: 334014 - DNA, 75 bp, Homo sapiens
ctctttggaatccatgtggctgaggttacctacaaacccctgaggccggacacaccagctgcgcgtgcactgcag

SEQ ID NO: 334015 - DNA, 75 bp, Homo sapiens
cgatgatgatgaagaggatgatgatgaagagcctccaccgctatgtctggctggtttacgagcaggacaggccgc

SEQ ID NO: 334016 - DNA, 51 bp, Homo sapiens
gcccgaggcagaggaaccggctcccaggttggtgatgtagtagaagtacag

SEQ ID NO: 334017 - DNA, 75 bp, Homo sapiens
ctggcagcaaagttcttatttacagaatcggatcaaactgcatcacggaagctgcacacgatgacaccctgtctg

SEQ ID NO: 334018 - DNA, 97 bp, Homo sapiens
attgtactggcctgctgctggcccgcagggaggcctgcagtatccctgggattgggaagcggatggctgagaaaatcatagagatcctggagagcgg

SEQ ID NO: 334019 - DNA, 112 bp, Homo sapiens
ttcacgcacgggatccagagcgccgcgcacttcgtcatgttcttcgcgccctgggtgaggtggctttgaccccgggttgcccggccagcacgaccgaggaggtggctggaca

SEQ ID NO: 334020 - DNA, 75 bp, Homo sapiens
gcctcgcgggcgcaatgaatccgcggcaggcacctgaatggacagaagaggacctcagccaactgacaagaagta

SEQ ID NO: 334021 - DNA, 88 bp, Homo sapiens
cgggctggcaggcgagggagcccgcgtcggctgagagcccacaggcccccacagcgccgtgccgtccctgcagtgacaccgaggtgct

SEQ ID NO: 334022 - DNA, 100 bp, Homo sapiens
gtcatcccagcactctgggaggccgaggttgcctaagtactcttgccagttcattgagatgtgtctgatggtgacagctgatcacgggccagccgtctct

SEQ ID NO: 334023 - DNA, 82 bp, Homo sapiens
gggtcggctacagggagggacccaccgtagagactaaggatagtaatgatgacactgaagatgtttcactgtttgatgcgga

SEQ ID NO: 334024 - DNA, 73 bp, Homo sapiens
aggccacgacttatggcatggccgacggtgacttcgtcaggccactgagaatgcaaaggaggaagtgaggcga

SEQ ID NO: 334025 - DNA, 87 bp, Homo sapiens
cggggctgggacccgatgcggttagagccgcggagcctggaagagccccgagccatcaacaacagcaacttgtgattggcggtgacc

SEQ ID NO: 334026 - DNA, 90 bp, Homo sapiens
cagaagaaacgatcggagtcctttcgtttccagcagacccttcgcaggtgttacagtcgggtgaaagaacatggtgttgggaaaagaaag

SEQ ID NO: 334027 - DNA, 100 bp, Homo sapiens
cggtcctggagctgctgcagcggccggggaacgcgcgctgcgcggactgcggcgccccgggtgctgtccttattcccagcccagtcaagagctaccgggg

SEQ ID NO: 334028 - DNA, 100 bp, Homo sapiens
ccagtcggtgctccggggaggtcacctgacgaggaggtatgatctcgtgaaaccttgagagaaactgaatgacgaatgaaactattgttcctgtttcaca

SEQ ID NO: 334029 - DNA, 50 bp, Homo sapiens
ccaacctgtcagtgctgcaagatcgacgagaacgtgctaggagcccagct

SEQ ID NO: 334030 - DNA, 97 bp, Homo sapiens
agaacggcacggccatctgtgtgtctgggcagtgcaaggaaggaaaatcacctcggcagtgtttgaaggaaggatactgcaactctttgaagtacgc

SEQ ID NO: 334031 - DNA, 75 bp, Homo sapiens
gctgccatcttctccgcgctatggctgcgttcggccgtcagctcaatctgaaattgaagtgtctgtctctgcaag

SEQ ID NO: 334032 - DNA, 119 bp, Homo sapiens
ggtcgtcgtcggcggcgagcagatcctgaagccagaactccaccccggcgcccgcgccatgcggcgggagaggttccccctaaaggactcaaaacgtctaatccaatggttaaaagctg

SEQ ID NO: 334033 - DNA, 89 bp, Homo sapiens
ctatccctgcctgtgactttcaaggaatcatgtggatcctctcagctccatgaaaatagtggttctcctgaaacttcaaggtccctgcc

SEQ ID NO: 334034 - DNA, 76 bp, Homo sapiens
ggagtgggcgatgccagcgtgccaggagccgagcccatgcagtggagggccaggtggaagatgtggttgggaacct

SEQ ID NO: 334035 - DNA, 74 bp, Homo sapiens
cctggctaaggaaaccctattacctccaggtactaatttggtcgaagcagataaccaagcggagtggaccgacg

SEQ ID NO: 334036 - DNA, 100 bp, Homo sapiens
ttagcacaactccggacacttgttttccagtgtgatcttacccttaaagctacgccagcatgtctccggacgccaccaagccgagccactggtgcagcgt

SEQ ID NO: 334037 - DNA, 100 bp, Homo sapiens
cacctctccagcggggacctgctccgggacaacatgctgcggggcacaggtgctggagaatctggtaaaagcaccattgtgaagcagatgaggatcctgc

SEQ ID NO: 334038 - DNA, 50 bp, Homo sapiens
gaggaagtactcagccgctaaatccaaggccaacctctaccccaccgtag

SEQ ID NO: 334039 - DNA, 96 bp, Homo sapiens
gtcctacctaattgcacggattgctttgaaagccttgatcaggggaaagaagtttcaggcacctgcaagagagacctgcgtggaatgtcagaagac

SEQ ID NO: 334040 - DNA, 82 bp, Homo sapiens
accctggagcctcagttggaagcagccgatccagcctgcggagcctgtggggcagcggaaatgagaaagcagagggagttct

SEQ ID NO: 334041 - DNA, 120 bp, Homo sapiens
ggggtttccggctgcagggcggtaaggatttcaacatgcctctgacaatctctagtatgccttcaattaagttgcagagttctgatggagagatatttgaagttgatgtggaaattgcca

SEQ ID NO: 334042 - DNA, 88 bp, Homo sapiens
ttacagcctagcaaggaaggcagcaattcaacctgtaagtctaaaagtgatgggtgtcatgaaaagtagggacggggtttcaccatgt

SEQ ID NO: 334043 - DNA, 75 bp, Homo sapiens
cttacgtatttgtgtgacttgactcttcaaacacaaaggaggaagaacgtgcaaaacgtgaggagctagagcgaa

SEQ ID NO: 334044 - DNA, 100 bp, Homo sapiens
atgtgtttaccgattacctctcagtagccatgctcatgatcggcgtgtttggatgtactttacaggaccagtcctgcctctgttgtagaagacatgtggt

SEQ ID NO: 334045 - DNA, 74 bp, Homo sapiens
ggatttctgctcacctggagaagggatggaaatacttcaacaagattgataatattgtcctgatgaaggactca

SEQ ID NO: 334046 - DNA, 90 bp, Homo sapiens
agcctgcagcccccctctgcgctgagcggcggccagccggcaggggtcgggccccggctcagtggtcccaggcagctcgggtgtcggaac

SEQ ID NO: 334047 - DNA, 100 bp, Homo sapiens
ccccaaagttgcatttcctcgtcgagcgcaacccaagtgtcacaccatgtctgaccggaaggcagtgatcaagaacgcagacatgtctgaggacatgcaa

SEQ ID NO: 334048 - DNA, 100 bp, Homo sapiens
gggagttctgttacgccatggaaaccgctctggtcacaccaatactgttgcagattgggatttagtgcaagaagaagaacagttgatggaagaaaagaaa

SEQ ID NO: 334049 - DNA, 87 bp, Homo sapiens
gagcgcccctccgagctggggttggacgctgccagtttgcacagcagcagaaatggttcaccaaaccaccagccagagccaccccct

SEQ ID NO: 334050 - DNA, 98 bp, Homo sapiens
gactgacaagaaatgagccttgaaggtcaatctgggtgacacccgagtctcctgacttccatggagtcactgattcatcactttaagttgtatactga

SEQ ID NO: 334051 - DNA, 100 bp, Homo sapiens
ggaacgaaaacgtagggaccacatcaaagacagctttcacagtttgcgggactcagtcccatcactccaaggagagaagttactctttcaacctgatcag

SEQ ID NO: 334052 - DNA, 87 bp, Homo sapiens
ttcaccttcaacttgggcttctcgggcaagttctatcatactggcgcggggcgaaggagctgctagaacaatgctgaggcgggtgag

SEQ ID NO: 334053 - DNA, 74 bp, Homo sapiens
cttcagccatcacgaggatgatttcggaacctggagaaaattgaagttattgccagtggactgtgagagaaaaa

SEQ ID NO: 334054 - DNA, 100 bp, Homo sapiens
gcggcgaggagaacgtcccgctggatctgacccgaggtactagcaaaggccagacgtcttactcaacaacttccctgccaccacctccaccatcccatcc

SEQ ID NO: 334055 - DNA, 93 bp, Homo sapiens
cggagctgggcgcggattcgccgaggcaccgaggcactcagaggagatggcccactgcgtgaccttggttcagctgtccatttcctgtgacca

SEQ ID NO: 334056 - DNA, 90 bp, Homo sapiens
gcagtgtctgagaccatgcagtcagctacgggaattcagtactctgtaacacccagctaccagggtcatctagtagcaggcacccaaatc

SEQ ID NO: 334057 - DNA, 75 bp, Homo sapiens
atttttgagaaggattttatttttgtaccccttaatgaagctactatactggcaattgctggagaagattttgca

SEQ ID NO: 334058 - DNA, 87 bp, Homo sapiens
gaaacatcagttcttgatcctgatgagatcatgtttcaggcatatggagacaaacagggaccactgcatggaatgttaatcaatact

SEQ ID NO: 334059 - DNA, 98 bp, Homo sapiens
ccttcgcggacccagtggatgtaaaccccttccagaagtgtcccatttgaagagaggatttctacactgttaaaatggctggacctgcccaaagctga

SEQ ID NO: 334060 - DNA, 100 bp, Homo sapiens
agaccgtcgtgacaacagagagagagcaattgctaaccatccaggaggagttaaacaacaaaaagtcagaattggaacaagcaaaggaagagcagtccca

SEQ ID NO: 334061 - DNA, 75 bp, Homo sapiens
aagtttgacggtcattccaattttcggctttgtgagaaaccttaccatcaaacacgatggccagcaacgttacca

SEQ ID NO: 334062 - DNA, 99 bp, Homo sapiens
gactttgcatatctggcatccaaatatccagattttaagcagcatgttcagataaatctgaatggaagagtgaggaacctagggaagtctggtcttcgg

SEQ ID NO: 334063 - DNA, 96 bp, Homo sapiens
ggcttgcatttgtttctgctgaccgcgggccctgccctgggctggaacgaccctggtcaaaatgcagatcttcgtgaaaacccttaccggcaagac

SEQ ID NO: 334064 - DNA, 74 bp, Homo sapiens
atggcgactgtcattcacaaccccctgaaagcctaatcttccagtaccaacaattgcagcaatagatggactcg

SEQ ID NO: 334065 - DNA, 100 bp, Homo sapiens
gtttcagcatgtccttctctgaatgatgaatacttttactactgtgacaacattaacgatcgtcagtatttaaacagatcacatcatgcgtgagtacaag

SEQ ID NO: 334066 - DNA, 71 bp, Homo sapiens
gatggcagccagtcagtggtggagaagcgagatgagcgcagtgtgaagagcacagctgtgcgggtggtaga

SEQ ID NO: 334067 - DNA, 100 bp, Homo sapiens
tttgtcaagtgaatacactaaggatgttggatccaaaagtcagttagtgacagctaatcccagcataattcggcaaagcttcatcactggtccagctgta

SEQ ID NO: 334068 - DNA, 82 bp, Homo sapiens
caagaggcagcctgggggccacagctgcttcagctttatcctgtggataaacgcagagtgaacgagtttggggagtcctacg

SEQ ID NO: 334069 - DNA, 75 bp, Homo sapiens
caggagttcatctacccggagaagcaggagccctactcggcagccaaggggcacgaggaagaaggcacggacgcc

SEQ ID NO: 334070 - DNA, 90 bp, Homo sapiens
ttcgccttgccctcttttattaaggagcctcaaacaaagccttccagttgtctggcgccgggagtgagaccctaaaacaaagaagaacac

SEQ ID NO: 334071 - DNA, 83 bp, Homo sapiens
gtcttaatgccttcaacgtaggcgatgactgctggagagatttaccagcatgagaattaagaaggagaaggaaaagcccaatt

SEQ ID NO: 334072 - DNA, 90 bp, Homo sapiens
cgaaccccgggacacgcaggaacggctccagcatcaagatccgtctgacaggattcaggagcagttccagaaaaatcccgacagttacaa

SEQ ID NO: 334073 - DNA, 97 bp, Homo sapiens
gagatggcactggagcaaatcacggcagtcactacgctggcctgctgctgtgggtctgcaggctgctctctctgctgtgattgctgccccaggattc

SEQ ID NO: 334074 - DNA, 83 bp, Homo sapiens
gctgtgggcgatgactatgctgctgtggtctggaggcctgagggcgagcccagagacaagaggagcagcagcggcaccgcccc

SEQ ID NO: 334075 - DNA, 50 bp, Homo sapiens
cacagcaccccgggctggcgtgagctcaaagatcctctcaagacagtatc

SEQ ID NO: 334076 - DNA, 100 bp, Homo sapiens
attcagattcctcctgggcctcctcgccccatttgcgacagcatttgctacctgctccagacaagagaacaatgccctggacatggctccagagatccac

SEQ ID NO: 334077 - DNA, 98 bp, Homo sapiens
gagtgttccttccgctagtgatcctttgcaccctgcttggagacggacttgcttccgattcgattgaatagactattgaccattgatacagatttgtt

SEQ ID NO: 334078 - DNA, 75 bp, Homo sapiens
cgcagcccgacgttccgctgctgggatcatgagcgtcttgttgttcatcgagcactcagtagaggtggcccatgg

SEQ ID NO: 334079 - DNA, 75 bp, Homo sapiens
ccaagtgctcaccacccgcaaacgcaagactggcacagcctccaggttggcgggctcatctgcgctggggttctg

SEQ ID NO: 334080 - DNA, 75 bp, Homo sapiens
ctggaaaacaatgcccagactcaatttagtgagttcagccaggccctggccatccggagctataccaagttcgtg

SEQ ID NO: 334081 - DNA, 82 bp, Homo sapiens
agatgaagtgtgagcactgcacgcgcaagatgcggcattccaaaagaactcactgtcctgattgggatagcagagaaagctg

SEQ ID NO: 334082 - DNA, 94 bp, Homo sapiens
acctgctgctgcttcaatgtccgcatcgcaaccaccgccctggccatctaccatgtgaacaccttccaccatgaccacctcagcaagttcccac

SEQ ID NO: 334083 - DNA, 100 bp, Homo sapiens
gatttcctcaggactccagattatctacaacactgatgaggcaacagcattattgagaaaagcccttacagaagagtgtggccgtaggtcagctattcac

SEQ ID NO: 334084 - DNA, 100 bp, Homo sapiens
agttcctccaggtttgccatcttcaggttattatattatgcaggacatggttatgaaaattttgggaacagcttcatggtccccgttgatgctccaaatc

SEQ ID NO: 334085 - DNA, 82 bp, Homo sapiens
gccgcaacgccgagcgcaccgacatctgcctgctcaaagcattttgaaagcgaagcagaagccgtagaatcagcggcgagcc

SEQ ID NO: 334086 - DNA, 100 bp, Homo sapiens
ctctgcgcggctttttgagcggtcccgcatcaaggctctggcaggtcctgaccactggcatgaacttttcccaaatgccaagggggaaaaccagtcgccc

SEQ ID NO: 334087 - DNA, 74 bp, Homo sapiens
taaatatgaggaagaaatcaagattcttactgataaactcaaggaggctattgagggcacctacattgacaaga

SEQ ID NO: 334088 - DNA, 90 bp, Homo sapiens
agtgctcagcctttccatgctctccatcacctatcacagcagcatccgctctctggaggtcagcaatctgaagatggtcttacggagcct

SEQ ID NO: 334089 - DNA, 75 bp, Homo sapiens
aaaagtctcgctatttggcaaaaggttcattaaagaagcggaagcagaatgaggctgccaaggaggcagagactc

SEQ ID NO: 334090 - DNA, 100 bp, Homo sapiens
ggactagcgaagatccggactgctcgggaagctccatccgaatgtgtctgccccccagaggtaccagcagaaaggtcccctcgtagacggagtatctcag

SEQ ID NO: 334091 - DNA, 100 bp, Homo sapiens
gtcatggcgccccgaagcctcctcctgctgctctcaggggccctggccctgaccgatacttgggcgggtgactacgaagtctcagtcaagttcaacgagg

SEQ ID NO: 334092 - DNA, 101 bp, Homo sapiens
tgttccttattttgtgcttgaacttgatcaaacaggttgtttacattcagagctctatcaataagaggaatacatattacagtgaattcgacaaccgcaca

SEQ ID NO: 334093 - DNA, 90 bp, Homo sapiens
aatgtctaagctgtctgtgaatgcccctgaattttacccttcaggttattcttccagttacacagggaagatggtgaaaggaatgggagg

SEQ ID NO: 334094 - DNA, 90 bp, Homo sapiens
atcgccggggaggcagcgcgggatcccagcctcaggcgtgcgcggacggtgtgcgggatggacaaccggaaattttctacacattttgga

SEQ ID NO: 334095 - DNA, 87 bp, Homo sapiens
gaccagccgcatctacacgtgggcccgaggaagaggtatcacctcttctgggctcaagatggacaacaagaagcgcctggcctacgc

SEQ ID NO: 334096 - DNA, 98 bp, Homo sapiens
agagatcgctgtctcgggagagaaatcacaagccgtcccgatccttctctaggtctcgtagctcctctggtgcaagtgtggtagctattgacaacaaa

SEQ ID NO: 334097 - DNA, 100 bp, Homo sapiens
tcacatcattcatgattttcagcttgctaagtactgtgacaacttactgaagaagtcagcgaaagggatgacagagaatgaagtggaagacaggctcacg

SEQ ID NO: 334098 - DNA, 100 bp, Homo sapiens
accaccacgggcaggactcactgaaggagtttgtgcagtttgtgtgctcggatggctcgggccaggccaccggacagggagaccctgcagcgtcatggtg

SEQ ID NO: 334099 - DNA, 87 bp, Homo sapiens
cgccgcacccaggacggaggctgcatgcccgaggaccaggccggcgcagccatgattgacgagatgcctgaggctgccgtgaaatca

SEQ ID NO: 334100 - DNA, 75 bp, Homo sapiens
gatgctgatggtgatggagattttgatgtggatgatgccaaagttttattaggttgtaaggatgcgaggcagcgg

SEQ ID NO: 334101 - DNA, 95 bp, Homo sapiens
ggcccgcggggtgaaggtggccgtgcgccgggagtaccccgggcaagtgctggatagaactattcagagaagctgtaactccccagggacaggtc

SEQ ID NO: 334102 - DNA, 90 bp, Homo sapiens
tatacactcttagtgctgtccagccacccacacagaatatgcctatgggtcctggagggatgaatcagagcggccctcccccacctccac

SEQ ID NO: 334103 - DNA, 75 bp, Homo sapiens
ttttcctcagaactactatattcagtggctaaatggctccctgattcatgtagccacgatggaggtgatgaacct

SEQ ID NO: 334104 - DNA, 51 bp, Homo sapiens
tgttctgccactaattggtggaaaacaccttctaagtgagcaacacagaaa

SEQ ID NO: 334105 - DNA, 87 bp, Homo sapiens
cttcacgcagtcaagaacgacttccaggatctccccaataatatgatttaccaagtcgccattaagtctcttcctcaagactggctg

SEQ ID NO: 334106 - DNA, 75 bp, Homo sapiens
gcaacttgcgcggtggaggtgttcgggctcctggaggacgagtttgcagatggcgtgtacctggttctgctcatg

SEQ ID NO: 334107 - DNA, 90 bp, Homo sapiens
tggaaccaattgttttacagtctgttccacatgatcattgtaataaggagtctactcttcatcttgtgttgagacttcgtggtggtgcta

SEQ ID NO: 334108 - DNA, 80 bp, Homo sapiens
acttgtgagagagagacaagaaggggaagcaaaaactgccaaccaactgatgtgagaaagatcagtctaaagaaaaggag

SEQ ID NO: 334109 - DNA, 82 bp, Homo sapiens
gagcattgattcatttggacaaggtgtggacactgccagcggctgcagccgacttggaatgacctgggagacaaatacaaca

SEQ ID NO: 334110 - DNA, 100 bp, Homo sapiens
caacacgttcttaaaaacctcgggcggcatgacggatccagagaaactcatcaggatttatcctgggctgttgataatcaggtgtatgtggccacagcct

SEQ ID NO: 334111 - DNA, 83 bp, Homo sapiens
cgaggctcggccgccccgccgcgagagtccggcagcgtcttctcttgagggagcaatttggagaagagctggaacccagactc

SEQ ID NO: 334112 - DNA, 100 bp, Homo sapiens
gcggcctaaactctcatctccggccctctcggcgtccgccagcgatggcacagactctttttgatcagaacaatgctgcaaaaaaagaagagtcagaaac

SEQ ID NO: 334113 - DNA, 75 bp, Homo sapiens
aagctaaaagcctaaatgtgaaatgctaatgacaagcctgagaaggtaaacttatgagtgctttgctgagtggcc

SEQ ID NO: 334114 - DNA, 83 bp, Homo sapiens
cagcgcgggatcccagcctcaggcgtgcgcggacggtgtgcggatgaaggatttgggggcagagcacttggcaggtcatgaag

SEQ ID NO: 334115 - DNA, 101 bp, Homo sapiens
gacgtgacactgaaaatcagtagaagaaatacgccacatttattctaccggggaagacagtggcatgcaatgatgctacctgttctgacccatcatatccg

SEQ ID NO: 334116 - DNA, 100 bp, Homo sapiens
gacagcagtggaggcagaagttcggcaccttatttctctgctgagtgtccagatcctccaaagacagatctgaaactctataaaacaggtcgggagatgc

SEQ ID NO: 334117 - DNA, 100 bp, Homo sapiens
cgccccgcagcccgctcaggaccagatggtgcacacgcttgccagcaacggggccaactccatctgggagcactccctgctggaccccgcacaagtgcag

SEQ ID NO: 334118 - DNA, 75 bp, Homo sapiens
gcacgggtcatcttttccccagaggcgtcggaatggacctgtgccacccagagggaggaagaaggagacttcaga

SEQ ID NO: 334119 - DNA, 100 bp, Homo sapiens
gtcatcaccaaggagctgacccgcgcggcctccgactatgccggcaagcaggcccacgtggagctggccgagaggatggagatgaagatgaggaagctga

SEQ ID NO: 334120 - DNA, 74 bp, Homo sapiens
tgcgtcagaagtcactcgcagtcccgtcagcccaggctctccagcagaactatctcctactactctttcccctg

SEQ ID NO: 334121 - DNA, 83 bp, Homo sapiens
atgtgccaaggctgaaattatcctacaaagttgatattcactgatggactccaaagaatcattaactcctggtagagaagaaa

SEQ ID NO: 334122 - DNA, 83 bp, Homo sapiens
cccatttcgcccctcgcgtccggagtccccgtggccaggtgagaagccctaccactgcaactgggacggctgcggctggaagt

SEQ ID NO: 334123 - DNA, 49 bp, Homo sapiens
ccccatccagcagttccttcaccaaggccacaccatgaggccccagccc

SEQ ID NO: 334124 - DNA, 75 bp, Homo sapiens
ctcagagcaagaaacctaccatactggcctcatgcgctcacgggttcggggggccgatgctgcccaagccaaggt

SEQ ID NO: 334125 - DNA, 50 bp, Homo sapiens
ggacagggccgcctgtcgccggcgtttgcctcagcatggagggcggggcc

SEQ ID NO: 334126 - DNA, 75 bp, Homo sapiens
ccatggtgaagtataggctgaggctacctgtgaacagtacgcagtgaatgttgttctaagctggtctatgtccat

SEQ ID NO: 334127 - DNA, 82 bp, Homo sapiens
cactgcctcagtatctgaacacaagggcttttttccagacttcaagctcccattccaacagtaagagcttcttccacatcac

SEQ ID NO: 334128 - DNA, 98 bp, Homo sapiens
ttcatgcacaaatttttatgtggaggtaagaaggtgttttaccctgtggtgttcagtctttacaatcctgccattgtttatgccaaccaggaagtgcc

SEQ ID NO: 334129 - DNA, 100 bp, Homo sapiens
ggctattggaaggaggagattctgaagataaggaggggtttgttaaagttgttaagaataaggcctactttaagagataccaagtgaaatttagaagacg

SEQ ID NO: 334130 - DNA, 75 bp, Homo sapiens
aaaatcaagaactggaggaacctgatcgcggtgctgggtcaagggattggttccaaaataatcaaaaaggtggct

SEQ ID NO: 334131 - DNA, 73 bp, Homo sapiens
tctgaaaaaagagaactggtattcaaagaggatggtcaggagcaactttagaggtggcagatgccagcccaat

SEQ ID NO: 334132 - DNA, 100 bp, Homo sapiens
gaagcggcggcggcggtggggactgcacgtagcccggcgctcggcatggctctcctggtgctcgagcttttatctcagttatcaggagtgagacgttctg

SEQ ID NO: 334133 - DNA, 98 bp, Homo sapiens
cctcagcctcccaagtggctgggattacggaaagaatcttcaagagggagacatagggaaaaggaagacataaaaatcactaaggaaagaactccaga

SEQ ID NO: 334134 - DNA, 100 bp, Homo sapiens
aagagatcaaagataaaatcttttgtgaaagtgtataactacaatcacctaatgcccacaaggaagggcctgtcccagtcggctttaccctatcgacgca

SEQ ID NO: 334135 - DNA, 51 bp, Homo sapiens
cagcaccctggggttgaggaactgcctactcattttattagtgctgcactc

SEQ ID NO: 334136 - DNA, 96 bp, Homo sapiens
tcaacaaggttctggacaagatgaagtctttctgccagaggtacttggaaggctccatcgcccctgaagacaaaggaagctgctcattgctgcctg

SEQ ID NO: 334137 - DNA, 100 bp, Homo sapiens
ctgtgtaagaagatagaacagtgtgactacccacctcttccttcagatcactattcagaagaagagaaaaacctttcaagtgcgatgagtgtaactttgc

SEQ ID NO: 334138 - DNA, 75 bp, Homo sapiens
tttgacaccaataattttcaaggaagaaaatcttaggttctactcagtgaatgtggattacagcaagctgaagaa

SEQ ID NO: 334139 - DNA, 83 bp, Homo sapiens
cggagcggccggggcctggggctgcctgccgggcggccgggcgcggcgagcccaggaattgaatgatctggcacgggaccctc

SEQ ID NO: 334140 - DNA, 100 bp, Homo sapiens
cttgtaccttgcgactcgtgaccaacatgctgtgatgtgtgccgagggaggaattgattgttagaaacggatagtaagtctttaagatctgtaaatgggt

SEQ ID NO: 334141 - DNA, 100 bp, Homo sapiens
gagggaattgtcctctgtggaagggactttcttttggccctaggccccttcctgcccctgtcgtcagcagatgttctgccttactcaatacgggtcttgt

SEQ ID NO: 334142 - DNA, 90 bp, Homo sapiens
ggaattgaatgatctggcacgggaccctccagcacagtgttcagcaggtcctgttggagatgataagttgtctgctggttctcagcttga

SEQ ID NO: 334143 - DNA, 100 bp, Homo sapiens
ggatgccactgacccagtttataaaactgtcacttcaagtacagaaaagggcttgattggttagctccattcagaaccaaatgcagtccaagggaggtta

SEQ ID NO: 334144 - DNA, 50 bp, Homo sapiens
ttcggagctacatccagtgaataaggaaaatgtttataggaggccttagc

SEQ ID NO: 334145 - DNA, 82 bp, Homo sapiens
gcccgactgctgcaggccggctacgagcccgagagaggagaaatgtctgaagtaagacccctctccagagacatcttgatgg

SEQ ID NO: 334146 - DNA, 100 bp, Homo sapiens
gctgcttaacaacctccgggcgcactccatcaacctgaaggagatcaacctgaggccgcagatgtcccagtgacagctggagtatcagccttggaagtat

SEQ ID NO: 334147 - DNA, 74 bp, Homo sapiens
cccaaaaagctccgcaggggctgtagggaggtcgttgaggacttccacatggagattggcacaggaccagactc

SEQ ID NO: 334148 - DNA, 100 bp, Homo sapiens
ccagcattcacacagacaagagcacaaacagcccaccacccaaaagcaaggtaaagtcagtgataaatcttttgtttgctgcatatactggagatgtgtc

SEQ ID NO: 334149 - DNA, 75 bp, Homo sapiens
cccggcgcggcccagcgccctcaggtgcaatggatgagcttcatagtctggatccaagaaggcaagagttattgg

SEQ ID NO: 334150 - DNA, 98 bp, Homo sapiens
ataacatctgttttttgtaacgttccacggtattcggaattggctacagaacataataagccttgcagtgagagaatttctttgtttggatgatccac

SEQ ID NO: 334151 - DNA, 95 bp, Homo sapiens
tgaggaaggggatggtaggagacaggagacctctaaagaccccagtagagacggggtttcaccgtgttagccaggatggtctcgatctcctgacc

SEQ ID NO: 334152 - DNA, 100 bp, Homo sapiens
atgttaaggaatatctggagaggtgatggatgtggacacactgtactaggccctgagagtggaacccttacatccataaactacccacagacctatccca

SEQ ID NO: 334153 - DNA, 83 bp, Homo sapiens
ggacactgaaattcagagaggggaagtgatttgcctcagcttgtactggacccccatcaaccgaatccccatcatggccaaac

SEQ ID NO: 334154 - DNA, 75 bp, Homo sapiens
tgtctgtgaagcagccgccctggagaaacagatcggtcctcagaatggttggaatgaccctccagctttgaacag

SEQ ID NO: 334155 - DNA, 82 bp, Homo sapiens
agtgaaatatcagattcagaggatgacagttgcaatacgagctcaactggaggcagtcctgtgcggaaatctgaagaaaaaa

SEQ ID NO: 334156 - DNA, 83 bp, Homo sapiens
gctaaagcagcgtgcgttcagccctgggggcccagctgtgctgctgtgttaacctggaggcattatggaacaggtaagtaagc

SEQ ID NO: 334157 - DNA, 75 bp, Homo sapiens
ccgaacttgggctcgggaagccggcggaccgcgtcctgcgccggagcaggtgctgggagaccgtgaagtgcaaag

SEQ ID NO: 334158 - DNA, 82 bp, Homo sapiens
tggagcagaaccccaggactgcgcccccgggagcgggcgcccagagtaaaggcatgacttcctggcaccacagggaaaatcg

SEQ ID NO: 334159 - DNA, 75 bp, Homo sapiens
acgggcccctggacgtcgtcacgctcactggagagaaggtggttgtgtcaaaccgattggtgacatctccatgct

SEQ ID NO: 334160 - DNA, 80 bp, Homo sapiens
cctcccgccgcgcccgggatgtattcgtccccgctctgcctcacccagaaacctgtttccctccaatcttgtggttgcag

SEQ ID NO: 334161 - DNA, 73 bp, Homo sapiens
tgcttttgcttcagcgttctgtggttgtcaacaggagtatagtcatggccaacagcaaaaaactcaagagggg

SEQ ID NO: 334162 - DNA, 98 bp, Homo sapiens
gcgaggcctgtggcacggtggggctgctgctggagcactcatttgagatcggttgaaggggcccggccaggactcggggaagggtggcctgagagcag

SEQ ID NO: 334163 - DNA, 50 bp, Homo sapiens
gaattatggcagcccagtcaaggcaggaatttgtggatgcttatgtgaat

SEQ ID NO: 334164 - DNA, 83 bp, Homo sapiens
ttggtgaagaccttggactctcaaactcgtacctttattgtgggggcccagtggtgggggaaaagtagctccagctcaaccat

SEQ ID NO: 334165 - DNA, 73 bp, Homo sapiens
catgtggctgcaggacctctgtcagagaatgaaacactcatcgcatggatcaaatctaaatcgctgtggtttc

SEQ ID NO: 334166 - DNA, 100 bp, Homo sapiens
ggaagtgcagctgcctcagttcttagcgcagagtaaccatgagaggtctcagactccaggacacctcttggaggcagggcagactcatcttcaggtggcc

SEQ ID NO: 334167 - DNA, 82 bp, Homo sapiens
acagacggcggaggaggcgcagccggacatttagccgctcatcttcggatgaagccccacccgcccttcaggatgccagcct

SEQ ID NO: 334168 - DNA, 75 bp, Homo sapiens
cgctttacccgactctttgggccgttatctcaccatgttggcagataaattgaacatgactccagaagaagctga

SEQ ID NO: 334169 - DNA, 99 bp, Homo sapiens
tgtggaaggcatggaagtcatcagaaggtccagaggtgtccttctaaagctggtagaggtttcacgagtcatcagggacccagaacccttctcttttgc

SEQ ID NO: 334170 - DNA, 50 bp, Homo sapiens
tataaagaagctttagctaaagttgacattttgctaaaggctgtgggaga

SEQ ID NO: 334171 - DNA, 100 bp, Homo sapiens
ctcagatgcaaatgatgtagttattactgtcccgtttgattttggagaaaagcaaaaaaatgctcttgggtatttattacagtatcaggagccaatacct

SEQ ID NO: 334172 - DNA, 51 bp, Homo sapiens
cctccctctccactcccatcttcaggatgtcctcctcgcactttcttacca

SEQ ID NO: 334173 - DNA, 80 bp, Homo sapiens
atgctctgagctatatgaccatccagcaaaaagaagatattacccacagtgcacaggaactgcaagcacatgttgaccag

SEQ ID NO: 334174 - DNA, 98 bp, Homo sapiens
cgaaatcggcatgtggtacgcgaaaaaacaggggcagaagaacaaggaagcggagaggcaagaggcagctggctaagagtcttgggcaggctggtgaa

SEQ ID NO: 334175 - DNA, 83 bp, Homo sapiens
cactggccgtggcaggagaggctggttgcctgacagcccgccagcctgggtcctgaacgaggctgtgggggccctgatgtacc

SEQ ID NO: 334176 - DNA, 98 bp, Homo sapiens
gtgaccaagcaaggtacccaccaggccgattatgtccattgttctcttggagcagctggtcatcatgtgtgtcatagctaccatagcttttggaatgg

SEQ ID NO: 334177 - DNA, 96 bp, Homo sapiens
tggtgagcctcatcacacaggatccgcccctggacatggaggagaaggtccgcttcaagtttgttgataagccggggcccttcgtgggaccctgcg

SEQ ID NO: 334178 - DNA, 83 bp, Homo sapiens
caacgcgaggagctcatcgggcagattagcgacatccgagtgcagaacctgcaaggtatcatgaactgatcactaaatatggg

SEQ ID NO: 334179 - DNA, 73 bp, Homo sapiens
ttacggtttacagcgaagtccacccagcgtttccgagcattgcagtgtcgagatggctatgaaccctgtgtaa

SEQ ID NO: 334180 - DNA, 83 bp, Homo sapiens
ccatcctgaaggctaccaactacaatggccttggacaagattcgctatgagagcctgacagacccttcgaagttggacagtgg

SEQ ID NO: 334181 - DNA, 101 bp, Homo sapiens
cggtgaagtgccatcttcggctaggtcgtcacaggctccggctcatggcatcaagtggcatccatcataagcatcctggtggggaagaagttttaagggaa

SEQ ID NO: 334182 - DNA, 100 bp, Homo sapiens
tctgtttgtaccatatccggaaaagttgtagctttcaaggtaactgtgacatttgatgatgtggccttatatttttcggaacaagagtgggagatcctgg

SEQ ID NO: 334183 - DNA, 106 bp, Homo sapiens
cagagttaatgtttgaacactacaacatccctgccttcttcctttgcaaaactgcagttttgacagcgtattgtaatagagattttgatgatgagaagatccttat

SEQ ID NO: 334184 - DNA, 100 bp, Homo sapiens
tggaggaggctgaggaggagaggacagaggtgcctggggcaacctccaccttgacggttccagataaatttgcgcctcattttggtaagcggaaaaacaa

SEQ ID NO: 334185 - DNA, 74 bp, Homo sapiens
aattttagggtcctttatatagaagggagagtagactctggccatctatgaccggtttggccggttgatgtatg

SEQ ID NO: 334186 - DNA, 75 bp, Homo sapiens
gtgggggctacggaggtggttatgacaactatggaggagggcgaggaggcttccgaggaggcagaggaggaggag

SEQ ID NO: 334187 - DNA, 73 bp, Homo sapiens
cttcttctctgatcagtgcccagaacaaggaaacaggtggcagggcccagccccgaaccagacaagggacccc

SEQ ID NO: 334188 - DNA, 100 bp, Homo sapiens
ctactttgagaactcctccagcaacccatacctgatccggagaatcgaggagctcaacaagctgtcctgaactccctacgccagctgggcacatctacca

SEQ ID NO: 334189 - DNA, 152 bp, Homo sapiens
agtgtcagcgatccagagactcgtgctgtctctttgtccctttcctgatggtgttacttcgattaactacttcaggtggtttagattagaatccaaacaaggaaaacgaatcaaaaacaggggtgagataaaggtcaatattcagtttatga

SEQ ID NO: 334190 - DNA, 98 bp, Homo sapiens
tgctcccccagattgatattgtgaacatcagcgacagctttgagatgacctatagatccctttctaaggcacaaaatgatgtgatggaaatgaagatg

SEQ ID NO: 334191 - DNA, 76 bp, Homo sapiens
gatgaagaggctttcaaagtacagttggttaccacagagaagcgcttcctcaaagacagtttgtacaatgaaggaa

SEQ ID NO: 334192 - DNA, 90 bp, Homo sapiens
gagatcactaaataagcttccacgccaggttttgagagattacctgaagttgcactcaaaagcaagatatactactaactttgaaatgga

SEQ ID NO: 334193 - DNA, 129 bp, Homo sapiens
ctggaggacatctgggggccacaaatgctccttctcctggagacgcaactcaagggggcagctggcattttatgctatgtgggagcctatgtcttcatcacttatgatgactatgaccacttctttgaa

SEQ ID NO: 334194 - DNA, 100 bp, Homo sapiens
agaagacatcaggaggaggaagacccaaggagaacaaggggaacagaaccaaccaggctttacaggccaagctataacatcagaaatggtgaatgaatac

SEQ ID NO: 334195 - DNA, 98 bp, Homo sapiens
gcggcggaagcggagaccatgttccgagcggcggctccggggcagctccggcgggcggtcgggaaagaggttaaagaagacacgcaagtatgatatca

SEQ ID NO: 334196 - DNA, 82 bp, Homo sapiens
cgtcagcactgactttcagctatggaatcggttttgaacgaagaatgtgatcagaactggtacaaggcagagcttaatggaa

SEQ ID NO: 334197 - DNA, 98 bp, Homo sapiens
tttaagacgaattaaagggagattacacagaagcaaaagccttgatagcatggatttctgtgagctcactattaagatgttctacgaggagcatttgc

SEQ ID NO: 334198 - DNA, 82 bp, Homo sapiens
tgagactcggggcgccagtccgggcaggggcagcgggagccggccggccaggcacatccctgctcaccctgatgggcttcag

SEQ ID NO: 334199 - DNA, 75 bp, Homo sapiens
caaatatcctcggaagagcgctcccaggagaaacaagaagtgagtgcttttggtgaggaaggtgaaggtgattat

SEQ ID NO: 334200 - DNA, 75 bp, Homo sapiens
gtcaatattgtcttaacatgcttcaaataaatcagatcacaaaatttgtccaggatagacatagagctagaagaa

SEQ ID NO: 334201 - DNA, 83 bp, Homo sapiens
agaaacacaagcgagaggaggaggaggatgatgatcagactcagtcacatgcccactcgaagtcgcactgctatggaaagtgg

SEQ ID NO: 334202 - DNA, 98 bp, Homo sapiens
tggaatctgccttctactccatcgtgggactcagcagccttggtgctcaggtgccagatgcaaaggagtccttcaataatgttaaacagtggctgcag

SEQ ID NO: 334203 - DNA, 98 bp, Homo sapiens
agctgcatgttcaagaagtggccggagagttctgcatgttgattcggaaaacaaagtgcatgatgaagtcttcagactgtgtcataaagcatgctggt

SEQ ID NO: 334204 - DNA, 83 bp, Homo sapiens
atccgctgcctgcaggactgccgcgagtgcactggaggcatggtatttgggaataagatgatcattccttccctggatggagc

SEQ ID NO: 334205 - DNA, 100 bp, Homo sapiens
gcaactggaacagcgagacacctggggatgaggagcttggatttgaagcagcagttgctgccttgggtgaggtcccagcttgaagagaaagaaaacaaga

SEQ ID NO: 334206 - DNA, 95 bp, Homo sapiens
cccctcggactgtgccggcgccgcacccgaggctctcgccagcccggcgccccggtgctgagaaatgcactcggtgatggaaagagagccactat

SEQ ID NO: 334207 - DNA, 80 bp, Homo sapiens
tatgatgattttgaagtcatttcacatcgaagccatgatttaaatatcggcgttaagagaagctgatcgtcgaagggcat

SEQ ID NO: 334208 - DNA, 75 bp, Homo sapiens
aaaaggcaacatcctgtcacaggccatgctctggcaaaaacgaataactcaagtcacctgtactggaaatcagtt

SEQ ID NO: 334209 - DNA, 82 bp, Homo sapiens
cctaccactataagagagtagaaagccctggtcccaacaagcatcagagtgctgtgacctgtttacagttcaacaagaactt

SEQ ID NO: 334210 - DNA, 75 bp, Homo sapiens
cgaagaggctggactcggattcgttgcctgaggctgaccccgcactacatctacccaccagccatcgtgcagccc

SEQ ID NO: 334211 - DNA, 100 bp, Homo sapiens
cctccttctgccccaccctggtcacttccccaccggaggtttatcacaagcctcctgacaaggtgatccgggcgggccccgcaggaattttatcccctca

SEQ ID NO: 334212 - DNA, 82 bp, Homo sapiens
ggcctattttcagaggccggaaaatgccctcaaacgcgccaacgttctttggggtgactttcaagatggactctactctaac

SEQ ID NO: 334213 - DNA, 82 bp, Homo sapiens
gcgagggcacactagcactttcctgtgagaagccctaccactgcaactgggacggctgcggctggaagtttgcgcgctcaga

SEQ ID NO: 334214 - DNA, 90 bp, Homo sapiens
actgtccgccagacctgctgctgcttcaatgtccgcatcgcaaccaccgccctggccatctaccatgtgcacgtggtgaggtgtgtatgg

SEQ ID NO: 334215 - DNA, 75 bp, Homo sapiens
aggtccgggctcctggacttcgcctttcccgagccctggaggtggggagaaaagagttaaacatgaagtttctgg

SEQ ID NO: 334216 - DNA, 98 bp, Homo sapiens
ttgcccccagtttacttcggattatagtctctgaccatgtggaattcccagtacgacaggcaggttatcaatactctggctgaccatcatcatcgtgg

SEQ ID NO: 334217 - DNA, 95 bp, Homo sapiens
actattggacctgctttgaggtcaacgagagggaggaggcagtggtatgtgtgcaacagagagaaattatgcgaatcactccaggctgtctttgt

SEQ ID NO: 334218 - DNA, 100 bp, Homo sapiens
ggatcacttgagccagggagttgaaggctgcagtgagccctgtttttgccaccacactccagcttgggcgaggaaacgagacctctttcgttccttctag

SEQ ID NO: 334219 - DNA, 50 bp, Homo sapiens
cccggccaccagcaattgtccggaacaggaaatatagtggtcattatgat

SEQ ID NO: 334220 - DNA, 74 bp, Homo sapiens
acgtggaaggaggctccccaagctggctggccattttgctgctgtgtgtggagagggagcactatgtctgcgga

SEQ ID NO: 334221 - DNA, 98 bp, Homo sapiens
tatgcagcaagtatctataatctatctaagaaacatgatcaacaattgacagaccatggagtatcatttggccttatgatgggaaatggagtaaaaca

SEQ ID NO: 334222 - DNA, 101 bp, Homo sapiens
aggacgtgtaccagaggatcgtgtggctccaggtcctggtgaacgccatcatcaacagtggtccccgggaggactccacacgcattgggcgcgccgggact

SEQ ID NO: 334223 - DNA, 99 bp, Homo sapiens
caggaaaggaagcattcagggaatttaggtgtagccagaagaaaatcaggagatgtttcacaaagcagaagaattattttctaaaacaacaaacaatga

SEQ ID NO: 334224 - DNA, 98 bp, Homo sapiens
cgaggctgacgacacctgcctggcacactgctgggtggtagtgcggctggacggccggaatttccatcggtctcctctgagcctccggcctccataag

SEQ ID NO: 334225 - DNA, 100 bp, Homo sapiens
taaaaaacttgttgctgcaagtcaagctgccttaggcttataacatcacatttaaaagcatctcagcctgggtgacagagcgagactccgtctcaaaaaa

SEQ ID NO: 334226 - DNA, 78 bp, Homo sapiens
tcagagatggcagcagaagctgcatatcaaactggaaacatgccctgaactgtcacagaatgaaaccagcgctcttca

SEQ ID NO: 334227 - DNA, 101 bp, Homo sapiens
taggcatctcccaggcgaccggctccgcagcaagatggcggacgagaaggacagggaagacaatgcagatcttcgtgaagactctgactggtaagaccatc

SEQ ID NO: 334228 - DNA, 50 bp, Homo sapiens
gtaccacagcagttacatattctggtgtcatggagaaactccagctgggc

SEQ ID NO: 334229 - DNA, 98 bp, Homo sapiens
ggtcttgctcggccgatgaagtgcagaggtttttttctggaacgagttgaagcagttaatatggctgaaggaatcattcacgacacagaaaccaagat

SEQ ID NO: 334230 - DNA, 87 bp, Homo sapiens
tagctaccgaaacgctctgaaaatcgagccggatatccgacatgaagccagtgacttcccatgtagagtggccaagcttcctaagaa

SEQ ID NO: 334231 - DNA, 100 bp, Homo sapiens
agatgctctctggtggggcacagaagctcctcagggtgctcccactgccgagtgagaactggggagctctagttggagaatggtgttgtcatcctgaccc

SEQ ID NO: 334232 - DNA, 87 bp, Homo sapiens
ttttccctctccctttccctaaggaatccagacgctctgcagtgtcccatcgtcttatgcggatggcggggaaaggcctccattcga

SEQ ID NO: 334233 - DNA, 74 bp, Homo sapiens
tgctcaggctataccatgcactagagcatctacctgggctggtgctcaggaagcccctatcaagaagaagcgcc

SEQ ID NO: 334234 - DNA, 51 bp, Homo sapiens
ctccgccctcctctccggctttgccatgcttcagtatcagacacagcacag

SEQ ID NO: 334235 - DNA, 83 bp, Homo sapiens
tcggtggactccttcggcagtccacccaccgccgccgcctcccaggcggaaggtgctctaccagcgtgcacccaggaatatcc

SEQ ID NO: 334236 - DNA, 80 bp, Homo sapiens
ttagtaatgctgattttattgttccggttgaaatcgatggaactatacatcagctgcccctggactaagaaatacttccg

SEQ ID NO: 334237 - DNA, 121 bp, Homo sapiens
cccacacccctgtattctcctccgaaccccttcatgcccaaatcccggaaactccagcgtgtctccagccgtgtgatcagggccaaagcggtcagtgagaaggaagtggactctggaaacg

SEQ ID NO: 334238 - DNA, 100 bp, Homo sapiens
cgaggtcatcttcggacgggaggggcaagccagccatcctgggaccccaggcgtgcaggttctctttgaggatgccttgtgaatacctctctttggatgc

SEQ ID NO: 334239 - DNA, 75 bp, Homo sapiens
gcggacctagacctggaatcgcccaagtccctctactcgcgaggttttgggatttgagattgacgcggtgaactc

SEQ ID NO: 334240 - DNA, 75 bp, Homo sapiens
cccaaagcgagcgaagctagggtcgccgccactgccgcaggaggcgtgagtaaggaagagcccaacactgctgga

SEQ ID NO: 334241 - DNA, 75 bp, Homo sapiens
gatgccctgcagtacctgcagaaggtctctggagacatcttcagcagagttacactgttagaccttatgatagcc

SEQ ID NO: 334242 - DNA, 100 bp, Homo sapiens
tggaagctttggagcagtgtattttgtggtttcctagaaacatgattgtttattggcattgatctcacagtctggtgaggacttctttactgataatgtc

SEQ ID NO: 334243 - DNA, 100 bp, Homo sapiens
actaagccttacaatacctctgtccataatagctgacatgtgtatgcaaaagtttggaaattttagcattcaggtgccaggaatgcagatgggacagcca

SEQ ID NO: 334244 - DNA, 75 bp, Homo sapiens
cgacagtacaaagaagactcttgtcacactaattgccaacaacaatggttgctgttgaagaaatctggttgcaga

SEQ ID NO: 334245 - DNA, 50 bp, Homo sapiens
tgcttcagcgttctgtggttgtcaacaggcaactcaaagttatgttgacg

SEQ ID NO: 334246 - DNA, 75 bp, Homo sapiens
gggaatcgtagtcttcctaggagttaacaggctgtgtataataggccacaaacagttgacaaagtacgaatcaga

SEQ ID NO: 334247 - DNA, 82 bp, Homo sapiens
tccgagccagccgctgttttgccggaggagcccctcaggccgatattagaaatggctactccccagtcaattttcatctttg

SEQ ID NO: 334248 - DNA, 75 bp, Homo sapiens
aatatagcagcaatttgggcaactttaattatggccatcacagagccatgaaccagcagcacatgatgccttccc

SEQ ID NO: 334249 - DNA, 100 bp, Homo sapiens
caagacctcatcaacaattaaggcttttgatgaggccattgctgaacttgatacactgaatgaagactcatacaaagacagcaccctcatcatgcagttg

SEQ ID NO: 334250 - DNA, 101 bp, Homo sapiens
aagcagagttcgagaactaagcaaattagctgagaccacagataaagtcaaacaaggcttttgggaagaatttgagcctgcagaattttcttcctgcccct

SEQ ID NO: 334251 - DNA, 100 bp, Homo sapiens
ggagttctggaacgggactttgcagaaatgtgtgcagactacatggcatctaccataggggaagattgttgatcgaatcgacaatgatggggatggcttt

SEQ ID NO: 334252 - DNA, 75 bp, Homo sapiens
ctgtcttgagaaaaggccagtgttgtccctactgcatagtggtctcacgtgtgaaacatggctacagattggctg

SEQ ID NO: 334253 - DNA, 83 bp, Homo sapiens
ggttttcgtacgggcggccgtgcgcgaggcgaggaactgtggctgcaccatctgtcttcatcttcccgccatctgatgagcag

SEQ ID NO: 334254 - DNA, 95 bp, Homo sapiens
accgctcttggtttgaatctggtcgcttccggagggactgcaaaagctctcagggatgctggtctggcagtcagatagtgtgtgtaccatatcag

SEQ ID NO: 334255 - DNA, 100 bp, Homo sapiens
tcccgcggcctggagtacaacgaggtcaacgtcaccctggacctgggccagctgcgtgcccagatgcgcgacctggcacggggcatgttcgtctttggct

SEQ ID NO: 334256 - DNA, 90 bp, Homo sapiens
gtagcaattaaaaagcactgtgaagcccttaaagtatctggagtccatctttcaccatcttctcctgagattgtactggaccgtgaccac

SEQ ID NO: 334257 - DNA, 96 bp, Homo sapiens
gaagattgagctgctgatgtcagttaactctgagaagtcgtcctcttcagaaagggaatgaaggatggcagcatgccgtgcattaaaagctgtttt

SEQ ID NO: 334258 - DNA, 76 bp, Homo sapiens
ctgctgttcggatttaacttcatcttctgggccgccctacagaagctgaaggcagaggagtatgttcaacagaaga

SEQ ID NO: 334259 - DNA, 82 bp, Homo sapiens
gctgctccgtggccacgaggacgtcaccatggaaatctggcattttttaaagtttgcgccccacaaagaggaaatattccaa

SEQ ID NO: 334260 - DNA, 90 bp, Homo sapiens
caagccgctggcagccgcggatctcaccgccgctcaggaattaaagctatagagagtcccaacaaagaagatgatacccagtggctgacc

SEQ ID NO: 334261 - DNA, 101 bp, Homo sapiens
tccatttcaaacttgtggttctgcgaacacgtggccatcagtaatcatgagcaacccattcgcacaccttgctgagccattggatcctgtacaaccaggaa

SEQ ID NO: 334262 - DNA, 75 bp, Homo sapiens
gcaatgtttagccaacccaaattaccttaattcagacctactccaatgaagtccattgtgttgaagagattctga

SEQ ID NO: 334263 - DNA, 96 bp, Homo sapiens
caaccgccctctcctgcatccaccagcagccaggaatccaaggttaagagcaggcttatgtgatcgctgtgcagtaactgaagaacatatgcggaa

SEQ ID NO: 334264 - DNA, 82 bp, Homo sapiens
tctgtgttgtgactgctttggacgtgggagtcacctgaaagccaggaaatgctggagaagaagcaggcgctccctccattcc

SEQ ID NO: 334265 - DNA, 97 bp, Homo sapiens
tgtttgagtacccggagtatcagagtaaagatggcaaaagtccactgcacatgacagctgtccatggaaggttcacacggtcacagaccctcattca

SEQ ID NO: 334266 - DNA, 50 bp, Homo sapiens
acccggacctcgcttacctgcatgctggtcagacatttgattcagcagga

SEQ ID NO: 334267 - DNA, 78 bp, Homo sapiens
tcaggcgtgcgcggacggtgtgcggaatatgccgagtttctacattgcaaaggaaagaaatttacagattttgatgaa

SEQ ID NO: 334268 - DNA, 82 bp, Homo sapiens
caacggcaaagttttgcagatcttcaacaagaggacccaggagaaattcgccctcaaagggtattccctcagcggatactac

SEQ ID NO: 334269 - DNA, 74 bp, Homo sapiens
gttgaaaaaccaaagctccctgctgcataagaccttgtcagaggtatataatgtttacatggcagggaggcagc

SEQ ID NO: 334270 - DNA, 90 bp, Homo sapiens
ctgaccattacacgcaaagatattcaaactctaaaccatctgaattggctcaatgatgaggaaggaaaatcacctcggcagtgtttgaag

SEQ ID NO: 334271 - DNA, 97 bp, Homo sapiens
aatttgaaagaaaaagctctttcatttatgaggcaaggtgtcatggagaaactccagctgggcccagagattctgcagcgggaaaatccaaggctta

SEQ ID NO: 334272 - DNA, 76 bp, Homo sapiens
gaagcagaaagcaagtgaatacgagtcagaagcctcgctcaaggagcacccccggggcaccctcctgtccgatggc

SEQ ID NO: 334273 - DNA, 50 bp, Homo sapiens
taatcccaacactttgggaggccgagataaatttccgctgtaagccgtcc

SEQ ID NO: 334274 - DNA, 96 bp, Homo sapiens
ccggaggaggaggggagaggcctggaggacaccaacatgatccaacttagaaataatgtttcattcaagataaggctcgtggcttaggagattgtg

SEQ ID NO: 334275 - DNA, 73 bp, Homo sapiens
aaaagggcccgggtagatcctactgttgaaaatgaggaaatgaacacatggatccaggctatctcttccgcca

SEQ ID NO: 334276 - DNA, 75 bp, Homo sapiens
caggaaacacatcaacacctgggtctcaaaaaagaccgaaggaagctgaagagggaactacccttttcattccga

SEQ ID NO: 334277 - DNA, 82 bp, Homo sapiens
acagccgcaaccaggaatgacttctaggaggagatatcaccaaacatgatggaacaggcggacagtccatttatggagacaa

SEQ ID NO: 334278 - DNA, 75 bp, Homo sapiens
ctgaggacttaaatgaagccactgattagcaatttaaagatcctctccaagttgcctgctaataaagatgccttt

SEQ ID NO: 334279 - DNA, 103 bp, Homo sapiens
ggggacctgcatgtgtgtgcgcgcgaaggagcggaagaatggcagtgctcaaactcaccgaccagctgggattctgtccctgaccgtcttcacagtccaggtg

SEQ ID NO: 334280 - DNA, 96 bp, Homo sapiens
ataaaatccagagaaaagaaaatcgttttaaactgctgaggtttgggggactgccaaaaagagcaagatcctgtccaaggaagaacagaaagtggt

SEQ ID NO: 334281 - DNA, 75 bp, Homo sapiens
tttctcttttgtctgcccctattgtaagtgcagatggaacacaacaggccttttccctcagaggagaccacagag

SEQ ID NO: 334282 - DNA, 100 bp, Homo sapiens
gacagtgttctgctttcatggagttcacagaagagtcgaggaggtaatggattaggaattagaattgtgggtggtaaagaaatcccgggacatagtggag

SEQ ID NO: 334283 - DNA, 100 bp, Homo sapiens
ctgaaaaagctgtggaaggctctggataaggaccagtacctgcccaggaaactgactcttgagctgtggaggaaattggtatcgaccgctaaacagtcat

SEQ ID NO: 334284 - DNA, 109 bp, Homo sapiens
cgccaagcgcagggagcccggctgagtggcagcccagatcaggatcctcatgaccagccaaagagaagaagaattaggaagcataaatcaaagaaaaaatttaaaaatc

SEQ ID NO: 334285 - DNA, 100 bp, Homo sapiens
ttcgagatcaggcctgaccgggataagctccaggcctaagatctggcaaacttggtgaacagtgtgaagcagttgttcgctttcccagactttttcagaa

SEQ ID NO: 334286 - DNA, 100 bp, Homo sapiens
ccctaaaattgccaaggaactgggatttcaacctgaaagtggaggctgcgaaaatagggtttacagagtccacggggaatgggatgcaagccagaagctg

SEQ ID NO: 334287 - DNA, 97 bp, Homo sapiens
tggaggcattttggggcagaatacagagatatggaatcagattttcagctgaactctcatctctcaacactggcaaatattcataagatctaccaca

SEQ ID NO: 334288 - DNA, 50 bp, Homo sapiens
agcgcttccgcaccatcacctccactcaacgttggtgaggactgtccagt

SEQ ID NO: 334289 - DNA, 83 bp, Homo sapiens
tgggggcctcgggcgccccgcagccccccaacatcctgctcctgctcatggacgacgctccctggggaagggaatgcagggtt

SEQ ID NO: 334290 - DNA, 82 bp, Homo sapiens
cttgcttatggcatctatgtcatccaccagtcctcctccgcctcctcctctctgcatgcgcgtcagagcccgtgccaagaac

SEQ ID NO: 334291 - DNA, 100 bp, Homo sapiens
catgaatgcaagaccctctaccaatagaaagattatgacttgttgaaagactcagatggttattaatacgttttagcgggattaatgaaaatcaagttcc

SEQ ID NO: 334292 - DNA, 100 bp, Homo sapiens
accgatgtcgggaaggtcactgaacctgctgatcccaaagaactaatcaagatggtcaccaggcatgtgactcgacatgagcacgaagcctggcctgaag

SEQ ID NO: 334293 - DNA, 80 bp, Homo sapiens
aaaaggcaaaaatcccatctaccgcaactctcagttcgagagtaaaggaattcatgatttgttcctgtagctgaaacata

SEQ ID NO: 334294 - DNA, 99 bp, Homo sapiens
agccacaaaatgaaatgacatttcaacaagtttgtcatcacgtaagagagaataggaagaaatgttggctatttggcgatgagaggtggtgaacagtga

SEQ ID NO: 334295 - DNA, 97 bp, Homo sapiens
gataacgggaggtgaatttccatgtcaacatagtcctggaccgtggcaaggaggtgtacagccctgactttcatagcctcggaggagaaggtcttgg

SEQ ID NO: 334296 - DNA, 73 bp, Homo sapiens
cggcggcccagctctctctgacacagcgcttctctgaagtagctttggaaagtagagaagaaaatccagtttg

SEQ ID NO: 334297 - DNA, 85 bp, Homo sapiens
gaaactttggaatctgtacccattattggtggtttttgggagactatctttggcaacagggctggtgaattaccatatctccgtc

SEQ ID NO: 334298 - DNA, 100 bp, Homo sapiens
gctcattggctggtcgcaagggaaacaactcctgagtatgttcacgatcggggtcagcttttgttctatggaaagagatgaggaagactctataatcgtc

SEQ ID NO: 334299 - DNA, 82 bp, Homo sapiens
ctccaagccggccaattccccccgcaccaaattgcatcgtttcccaggtgtgcaactgaggaacatggctcaagaaactaat

SEQ ID NO: 334300 - DNA, 100 bp, Homo sapiens
gctcgtgctcatctcctactgtcccacggccaccgaagagcctgccacagtgactcaggtcactcaaggaactatccgaccagctgccaacttcgatgct

SEQ ID NO: 334301 - DNA, 49 bp, Homo sapiens
cattattccaacggcttctgtacttatgaatgacccatattaaatcgcc

SEQ ID NO: 334302 - DNA, 100 bp, Homo sapiens
cgtcttgccaccgggcctgtcagttgacctaccccttgcacacctaccctaagcctccgggaggagttcctgggacacagccattgctgcccaattctat

SEQ ID NO: 334303 - DNA, 87 bp, Homo sapiens
accactgggcaaagaaagtatccctttgttcactaagaatctttccccagacaaaatcaacctgagcaccctgaaaggggagggtca

SEQ ID NO: 334304 - DNA, 97 bp, Homo sapiens
cgcccagaggcgagccctggtggaggaagaggtgagaaaactgatgcttggagatgtgatcactgcccagggtcacccaatgataacatgcatgcat

SEQ ID NO: 334305 - DNA, 100 bp, Homo sapiens
atgaagatgctgttagcctttgcagtctcgacataagtgtatatgaatgacctaaaggtacaaataaagacggagagagaacagtgccaactgggagcag

SEQ ID NO: 334306 - DNA, 98 bp, Homo sapiens
ttcgacaacgtttccctgaaattccagagggcgtggtgtctcagtgcatgttacaggactttgtgttttatgccccacgtctgagaatcaacaagcgg

SEQ ID NO: 334307 - DNA, 131 bp, Homo sapiens
cagctgccagatccgctgatctagtgcttctcgaaaaaaaccttcaggcggcccatggatattgatgatgttaagaagttcaaaccgggttacctggaagctactcttaattggtttagattatataaggt

SEQ ID NO: 334308 - DNA, 147 bp, Homo sapiens
tgcagctctctacctacttagatcccgccctggagctgggtcccaggaatgtgctgctgttcctgcaggacaaggtcattgattacaacggggaacgcacgctggatggttttaagaaattcctggagagcggtggccaggatgggg

SEQ ID NO: 334309 - DNA, 96 bp, Homo sapiens
cggggcatctatgccagtgagaggcccaagtccctagagctccagagattatattggggttgccattttgtgaagccatagacatgtggtcattgg

SEQ ID NO: 334310 - DNA, 75 bp, Homo sapiens
tcgcaaccaccgccctggccatctaccatgtgagtgcagcagctgccccgagccccgtgcttggcaacattcccc

SEQ ID NO: 334311 - DNA, 100 bp, Homo sapiens
cggctttgcatcggaaatcagctctacagttcagatgggaaagggctccttcaagtatgcctgggtcttggataaactgaaagctgagcgtgaacgtggt

SEQ ID NO: 334312 - DNA, 90 bp, Homo sapiens
ccatggacagagactaccacgtggcatgttaccactgtgaggtagaacacctgaaggagaagctcattagccaggcccaggaagtgagcc

SEQ ID NO: 334313 - DNA, 90 bp, Homo sapiens
gtgcccttcaagcagggcatggagtattaccgtgccctcaagacccggaatgtgcctgttcggttatgaagacagtatggagtttccaga

SEQ ID NO: 334314 - DNA, 76 bp, Homo sapiens
cccaatcaaaaaagaaactagcaaactttttaatgaggaaaggctgacgcaggagatccagagccgagagcgggac

SEQ ID NO: 334315 - DNA, 50 bp, Homo sapiens
ctgcgggtggggccgtcggcggcgctgccttatgccagcctggaccatct

SEQ ID NO: 334316 - DNA, 100 bp, Homo sapiens
accgggctagctttggcgaggggacggagccggatcaggagccgccgccgccatatcaggtgtcatggagaaactccagctgggcccagagattctgcag

SEQ ID NO: 334317 - DNA, 75 bp, Homo sapiens
gaaaataagatggaacccatccacataaggaaatctggcattttttaaagtttgcgccccacaaagaggaaatat

SEQ ID NO: 334318 - DNA, 110 bp, Homo sapiens
ggtgatctggacaaaggaacaggtatctcagacatatctgaagagatggattaagaatgctttggattaaggattgtggagcacatttcaatcattttaggattgtcaaa

SEQ ID NO: 334319 - DNA, 80 bp, Homo sapiens
tacaatggcacttcaatatggctcagaaagtgaagaagatgctgctttagctgacaaatttacatgtattggagaccaga

SEQ ID NO: 334320 - DNA, 100 bp, Homo sapiens
ggtggtctggagaccatggagaccctcacggagctgggcgacgagctgaccctgggagacatcgacggtgaaaggtgtagcagtcactcggcctacaccc

SEQ ID NO: 334321 - DNA, 80 bp, Homo sapiens
cgagaacagaatttcttttggcacctcctctccgcgcgttcttggggttacctgtcctgctgccgattcctggatgacaa

SEQ ID NO: 334322 - DNA, 82 bp, Homo sapiens
tgagacctgccgtgctgggtgggaaagcaggcaggatgggagagtcgccgatagaaccacctcttccctgcctcctgggctt

SEQ ID NO: 334323 - DNA, 100 bp, Homo sapiens
gggaggatgtcgggacaccccggaagctgggaaatgattctttcttgtggagaagttattcatgtgaagatccttggaattttggctcttattgatgaag

SEQ ID NO: 334324 - DNA, 50 bp, Homo sapiens
agcagaaccaactcggatattgttgagctcccagatggacgtatcatcaa

SEQ ID NO: 334325 - DNA, 74 bp, Homo sapiens
cttcgagcagctggagtactgggccaacaacttcgatgactttgcggaggatacgaagcgttttcggcttcctg

SEQ ID NO: 334326 - DNA, 98 bp, Homo sapiens
ctggtgcgcgtgggggtgatcagcttcgcccagaagggagagcacatctgcctgatccgcaaggtgaacgagaactggtacgagggacgcatcacggg

SEQ ID NO: 334327 - DNA, 100 bp, Homo sapiens
cagagcgctactcctggcagtgcgtcaatcagagcgtcctgtgcgcttgctcacttccgacagagaaaaacaaaaggtgacagttcgcattcggagaaaa

SEQ ID NO: 334328 - DNA, 100 bp, Homo sapiens
tgagagagatgcttaaaaatcaccagttactttaatgagaagcaagaggctactatgagcagactggagttggacctctgcccgttgtgctgttcaatgg

SEQ ID NO: 334329 - DNA, 96 bp, Homo sapiens
ttccacaatggcagctgggtccacctcaccatcaacgcgcccgattgaccgccagcgatacgacgagaacgaggacttgtcggacgtggaggagat

SEQ ID NO: 334330 - DNA, 97 bp, Homo sapiens
ctggcagcaccccgggccagctctggggaagggctgtgggacagatgatgtctaccatgttctacccactggtcacctttgtcctcctcctcatctg

SEQ ID NO: 334331 - DNA, 75 bp, Homo sapiens
ggggctggtggttgagcgaaggcggctggagaccgagctagatgggctcagagctgcgatatgcccagattgttt

SEQ ID NO: 334332 - DNA, 90 bp, Homo sapiens
atagctgaagaagaagaggaagtagccaaagagcaactaactgatgctgacaccaaagaatttggaggttttggttcagttagtggaaaa

SEQ ID NO: 334333 - DNA, 97 bp, Homo sapiens
gctcccgccgccgattgacccgcgctccgcccgtagtcgggccggcgttggagaccagggccagccctggccacaccccaggctgtgtcaccttcgt

SEQ ID NO: 334334 - DNA, 75 bp, Homo sapiens
gaggaaagcaggaggaggtggcggcggcgggaagatattatcaacgaggacattgccaagaggacgtgtgaggag

SEQ ID NO: 334335 - DNA, 75 bp, Homo sapiens
ccagaagcagcggctggaatttgcgttttatgtcattgaacagggaaagaatatggcaaagctgatgcaagatgg

SEQ ID NO: 334336 - DNA, 100 bp, Homo sapiens
tttgaaattgccaagtgccacatacagttcgagaacttgtcttggacaattgcaaatcaaatgatggaaaaattgagggcttaacagctgaatttgtgaa

SEQ ID NO: 334337 - DNA, 82 bp, Homo sapiens
cgggccattggacggtgtgccatcaaggtggaggccactccccacctgtcctgcctttgtgtgcctctgtgtctttgctggg

SEQ ID NO: 334338 - DNA, 96 bp, Homo sapiens
ccgccggagaggctgggcggctgccggtgacaggtgatcgtgttgccatcgagcctggtgctccccgagaaaatgatgaattctgcaagatgggcc

SEQ ID NO: 334339 - DNA, 75 bp, Homo sapiens
gtgggacccaaaatctgcctggaagataatgtgctcatgagaggctagaagattccaaactagaagctgtcagtg

SEQ ID NO: 334340 - DNA, 100 bp, Homo sapiens
tttctgggagaccgtgtggaacgatgccaaagaattgagctgaagcagggctacacatttttcatcccttccggactgtgtgcagctgaatcagtatacc

SEQ ID NO: 334341 - DNA, 101 bp, Homo sapiens
agccacaatttccatcaaaaagtgattaagcagagaatggagaagaaggttgattccagaccatcaaggaaatttccatccacacagattagcagttgaaa

SEQ ID NO: 334342 - DNA, 100 bp, Homo sapiens
aaattatccgactcctcggaccagcaggacaggtgctggagaatctggtaaaagcaccattgtgaagcagatgaggatcctgcatgttaatgggtttaat

SEQ ID NO: 334343 - DNA, 98 bp, Homo sapiens
aggatttggcactctacttaaaaccactaagtggaggtaaagatgactctgaaggagtttgccataatgaatgaggaccaagatgatgaagagtttct

SEQ ID NO: 334344 - DNA, 71 bp, Homo sapiens
ttctgcggatggttcgccgcaataacctgtttaacaggccgttgatgctcactgccatcagctgcatcctc

SEQ ID NO: 334345 - DNA, 100 bp, Homo sapiens
ctgagccatgcccatcgcagccgccccgaaggagccaggtgcagctctgtcatttccactctgctctgctgcacagaaggcagaagccctggccgtcccc

SEQ ID NO: 334346 - DNA, 99 bp, Homo sapiens
gtgaaagacctgtcttgagaaaaggccagtgttgtccctactgcatagatcctgaggaggatgaaggggctggccctggaggccgagagtgagctggag

SEQ ID NO: 334347 - DNA, 75 bp, Homo sapiens
cggcgaaggagctggaaaccgagccagggctgagccggctgacaacagtaacggcacagccaacaagatgaacgg

SEQ ID NO: 334348 - DNA, 100 bp, Homo sapiens
cctggatgttaccaagacagagagcgttgctgcagccgcccagtgggtgaaggagtgcgtgagagacaaaggttttgggtctagtaatactggttctgtg

SEQ ID NO: 334349 - DNA, 89 bp, Homo sapiens
ggctgagcagaggacccggcgggcggcctcgcgggtcagcatttggccatccagtgtcattggtctcagaggccagcagttattggaga

SEQ ID NO: 334350 - DNA, 100 bp, Homo sapiens
ctggggcccgccgccccgcgggggagggcggagctggcgcggcccctagctttctccttctggtgtggggcccgagattctggatgaaattgaagaacat

SEQ ID NO: 334351 - DNA, 90 bp, Homo sapiens
cttggttaaaacctgacacttttaacaggaagaacctctctatccagggcctccgctggtggctacagtggctgggcatcaacttcaccc

SEQ ID NO: 334352 - DNA, 124 bp, Homo sapiens
tctcatctctcccttcgcccagttccctgcatcctaagactcgaaggcagcacaggacctggaaaaattacatgacccccgcagcaaacacaagtttaagatccacacgtactccagccccacg

SEQ ID NO: 334353 - DNA, 74 bp, Homo sapiens
aagaagtggagcgtgtcctgaaggagttccaccaggccgggaagcccatcggggagcatttcctgaagacgtag

SEQ ID NO: 334354 - DNA, 75 bp, Homo sapiens
gcggtggctcccaagaagtccgagacacgcggtgaggcggcgacgggctccgggcagccgagagaccgccttcac

SEQ ID NO: 334355 - DNA, 98 bp, Homo sapiens
tctaatccagagctggtgagagcggtgactttggagaaagctacatccatattggaattttaccgggaacttggattgccgccgaaacagacagttaa

SEQ ID NO: 334356 - DNA, 100 bp, Homo sapiens
gaacatgtaggttttagaattttcatggatgccatactactttctttgactagaaagagtaaatgaatcatcacattatgatctagcctttacagatgta

SEQ ID NO: 334357 - DNA, 96 bp, Homo sapiens
catggtttccagtgcagcgcggagtgggcgatgccagcgtgccaggttttgggatttgagattgacgcggtgaactctgtccagttttcaaaccac

SEQ ID NO: 334358 - DNA, 75 bp, Homo sapiens
cgctgagacggtttttcacaagattggttgtgatcgtagccaaaaccttgtggacatttgtagagagaggcaatt

SEQ ID NO: 334359 - DNA, 82 bp, Homo sapiens
gcgcgggcaaggccatcggcgtcctgaccagcggcggcgacgcgcaagcggaagcgagagagtgagagtgaaagtgacgaga

SEQ ID NO: 334360 - DNA, 81 bp, Homo sapiens
ggactgcgccgcgtcttcctcaagatgagcagcaccagcagtaagagggctccgaccacggcaacccagaggctgaagcag

SEQ ID NO: 334361 - DNA, 99 bp, Homo sapiens
gcctcttcccgcacgcaatctgcctcggagacgttgataacgatacgaatttaagaagtgcaacatggccaggggctgcctctgctgcttgaagtacat

SEQ ID NO: 334362 - DNA, 97 bp, Homo sapiens
ctgtgcgatgggtcgtgacactgggcctgagctttgtctacatgattcgagtttacctgctgcaggccctcgggaccaaggatcacgtcatgactcc

SEQ ID NO: 334363 - DNA, 100 bp, Homo sapiens
ggagtagcacctgccaggagcacgtcccgccggcaggtcgcaggagccctgggagccgccgccatgggaagcaatgaggctccccaagaacacacctgag

SEQ ID NO: 334364 - DNA, 100 bp, Homo sapiens
gctttaacttgaaatcaaggaatgtagaaatcaggattgtcactgctgttccaagggcacacgcagagggatttggaattcctggagagttgcctttgtg

SEQ ID NO: 334365 - DNA, 100 bp, Homo sapiens
taagaagtgcctttcgcctcccaccatgattctgagacctccccagcaatgtggaactgtgtcatggagaaactccagctgggcccagagattctgcagc

SEQ ID NO: 334366 - DNA, 100 bp, Homo sapiens
catgattgctctcccctcccctagtatggaaggacccttgaacatctgtgaagaaatgactattctgcatggaggcttcttgctggccgagcagctgttc

SEQ ID NO: 334367 - DNA, 105 bp, Homo sapiens
tggagaccatggagaccctcacggagctgggcgacgagctgaccctgggagacatcgacgggccatgaagcccccaggaggagaatcgagcaatctttttggaag

SEQ ID NO: 334368 - DNA, 75 bp, Homo sapiens
tgtgaaggactccgggtgaggccggccacgccccgcacggggggcccggctcatcccagagatggaccagatctt

SEQ ID NO: 334369 - DNA, 75 bp, Homo sapiens
tggttcagattgcagtggaagacctgagccctgaccacccaggatgccaagtttgtggaggaacggagaaagcag

SEQ ID NO: 334370 - DNA, 102 bp, Homo sapiens
cttaaatcctctttacatcatagactttcagctacttgaagatagccatcagccgctacgtgactcttttctccaggtgggaagaagagcgctatcctgaag

SEQ ID NO: 334371 - DNA, 90 bp, Homo sapiens
cgcggagaagctgcatcccagaggagcgcgtccaggagcggacccggaattgaatgatctggcacgggaccctccagcacagtgttcagc

SEQ ID NO: 334372 - DNA, 100 bp, Homo sapiens
aatgaatgatcttcactatcttaatctggatacatgggagtggaatgaattgtgatttctagcttgtctcatgccataggcaagcaaaaggaaaagatag

SEQ ID NO: 334373 - DNA, 96 bp, Homo sapiens
ctcacatttccaagtacattctcaggtggagacctggcgatctagtgtatgttaactatgcacgaactgaagacttctttaaattggaacgggaca

SEQ ID NO: 334374 - DNA, 98 bp, Homo sapiens
cgctttcggcgcgggcccgggccccgagcgcccgaacagtgtttggatgcttaaagaagattatttgaagacggcttttggaatcaattagcatggac

SEQ ID NO: 334375 - DNA, 80 bp, Homo sapiens
tgtgttgttactgatgcagagatacagcaaaagagtctacataggactgatcctttgaaatactccagccatgactaaaa

SEQ ID NO: 334376 - DNA, 74 bp, Homo sapiens
gcaggaatacgaagagcagctgaaagaaaatgccagcgaggggcgaagtctaaaaatggaggaagatctttaag

SEQ ID NO: 334377 - DNA, 75 bp, Homo sapiens
agacataaaagcccggattcaggattcagatgaaccagatatggaatgtgcagatgtcccactattaactccaag

SEQ ID NO: 334378 - DNA, 100 bp, Homo sapiens
cagactccaactgtacaagaggagagtgaagaggaagaggctgagacccgtgctgaatttgcagagagaacggttgcaaaactggaaaagacaattgatg

SEQ ID NO: 334379 - DNA, 83 bp, Homo sapiens
gcgcctgttccgcagcccgcgtccgcgccggccccacagctctgcgtccgggccagaagcggactcctagaagaggggagcag

SEQ ID NO: 334380 - DNA, 98 bp, Homo sapiens
acattattgcgcgtggaacggctgcttttggaaggctgctgatactttggctgtgaggcaaaaaaggagaatttatgatatcaccaatgtcttagagg

SEQ ID NO: 334381 - DNA, 126 bp, Homo sapiens
cctcgatgcagccagtagcttggatccttgtgggcatgatccataatcggtttcaagataaaccgagaaaactggtgtacaatagagccatgccctgatgcagcatctcttctggcttccaagcag

SEQ ID NO: 334382 - DNA, 100 bp, Homo sapiens
agctatctacgggttcagttgataaaaataagaacaaagtgacaccactgcagaggatacagttgatatattagttggatggcatatagatcatactcag

SEQ ID NO: 334383 - DNA, 83 bp, Homo sapiens
gggcattcgtcttggtaaacttggtgtgagaatgagatggtgatcatgagacctggaaacaaatatgagtacaagttcggctt

SEQ ID NO: 334384 - DNA, 74 bp, Homo sapiens
actgctgatagcaccatcttcaaatttgtggaagcttatgagtgttgaagcctggaaatcccctccccttcccc

SEQ ID NO: 334385 - DNA, 82 bp, Homo sapiens
cggattcatttagagctgcggaacaggacgccctctgatcgggagatacagatgacccaccaagaattactcagaaccctgt

SEQ ID NO: 334386 - DNA, 74 bp, Homo sapiens
ttgtttctggatgattctaagaggaacttgctactaccagcaccatgccctaccaatatccagcactgaccccg

SEQ ID NO: 334387 - DNA, 75 bp, Homo sapiens
agcccagctcacagccaccggtaccttcttccagacaaagatcattccactcagcctgggacgatggggaggaaa

SEQ ID NO: 334388 - DNA, 98 bp, Homo sapiens
gagggaatgatccttactaaccacgaccatcaaatccgtgtcggagtccttacaggggatgccaacagacagatcagcgacctcaaatttaaacttgc

SEQ ID NO: 334389 - DNA, 75 bp, Homo sapiens
ccgggaccgccgccgccgccgccaccatggatccacctctgatgttcagtgaagactaccagaaaagtctgctag

SEQ ID NO: 334390 - DNA, 75 bp, Homo sapiens
ggacttcggcggcggcgcctcaggcacctcggcccggtacctggagtagaacagaaaaattattatgtctgtgtt

SEQ ID NO: 334391 - DNA, 100 bp, Homo sapiens
tagcacaccatccccagccaactttgaaatactcgtgggatatgaagtggaggtgcctagagggttgaagataatgaggacagatgaagaaatgtttgat

SEQ ID NO: 334392 - DNA, 75 bp, Homo sapiens
tgggaacccaggccccgccgaggcggccaggaccatggccaacctggagcgcaccttcatcgccatcaagccgga

SEQ ID NO: 334393 - DNA, 73 bp, Homo sapiens
gccgccctgggccgggccccaccggacggttcccacatcccatccccctcaccactgtgcagtgtgtatgcag

SEQ ID NO: 334394 - DNA, 75 bp, Homo sapiens
ctgatttctgatgatgaagcagaagtgaagtgaagacttacgatccttctggtgactccacacttccaacctgtt

SEQ ID NO: 334395 - DNA, 50 bp, Homo sapiens
cactattctagcatccgtgaaggagcagaaaacagctccttgaacacagt

SEQ ID NO: 334396 - DNA, 75 bp, Homo sapiens
ccatggtcaatgagaatacgaggatgtacattccagaggaaaaccaccaagggaaagtcgctggcgggcaagcgc

SEQ ID NO: 334397 - DNA, 50 bp, Homo sapiens
gaggatgtcaacaattttttggaggtatctctgcattagccagattggac

SEQ ID NO: 334398 - DNA, 75 bp, Homo sapiens
cttccttgctttcagaatttcacccaggttctgacagggagctgagcacataacgacttacacgttcaatactca

SEQ ID NO: 334399 - DNA, 83 bp, Homo sapiens
ctaaaacatcaatgaatgtaaatgaaatattcatggcaatagatttgggaattttccggcgggctgccatggtgttctacaca

SEQ ID NO: 334400 - DNA, 100 bp, Homo sapiens
agcagatttcccaagagcagcggaaaatgatccagtcacaggtggcacaagatctctgtaaagtagcaggcatagcaaaagttctggtggctcagcatga

SEQ ID NO: 334401 - DNA, 75 bp, Homo sapiens
ctccgctctgccgccggcgcggctcatgggcagagtcggccgggcgggccggacctgcctagagctggaacgtta

SEQ ID NO: 334402 - DNA, 100 bp, Homo sapiens
ctgtgatcctggactcgctgtaggttgttggatatgggaagtatgaactggaagaggatggtaccccttctagtgaggattcaaattcttcttgtgaagt

SEQ ID NO: 334403 - DNA, 75 bp, Homo sapiens
gtcctcgtcagcactgactttcagctatggaatcggagagaaatatgagttggagggaaggaaaagtggttctac

SEQ ID NO: 334404 - DNA, 90 bp, Homo sapiens
aaaaaaaacaaaggtatttatggaattccactgagtggtaatggatgatgcagttcaaataactaaggctccatctactctttgaagctt

SEQ ID NO: 334405 - DNA, 75 bp, Homo sapiens
tcttagcagcgcgcggagaagaacggggagccagcatggagatatggaccaaaaggaacgagacgtgattatgag

SEQ ID NO: 334406 - DNA, 97 bp, Homo sapiens
gcgaccccgactacctgcgcggcgcgctcggccgcctcaaggtcgcccaagtgctgttttcaagtcagcaaacatttactgaggatctactatgtac

SEQ ID NO: 334407 - DNA, 74 bp, Homo sapiens
gctggggaccctgagatcgtcaagtctcccagcgaccccaagcaataccgtgccggtggtggtgtgcacattga

SEQ ID NO: 334408 - DNA, 98 bp, Homo sapiens
accagtcgtgcatgttcttggtgaagtcggccagcctgagcaagcggaggacctacgccggcctgggcggtggaagaagatatccccatagcgaaaga

SEQ ID NO: 334409 - DNA, 75 bp, Homo sapiens
ggaaaagaaagcatactgcgagccctgctacattaataacatagctgatccagaagaactgttcacaaaattaga

SEQ ID NO: 334410 - DNA, 50 bp, Homo sapiens
ctaaggatcgctgtcctgacagaagaggtcctactgctctgttggctcat

SEQ ID NO: 334411 - DNA, 75 bp, Homo sapiens
ctggaagcgcagcaacagcaagctcccgggcaggcagacgcgtgccatgcctaccagatcattcaccgcaatggg

SEQ ID NO: 334412 - DNA, 75 bp, Homo sapiens
ctgcggcgcacgccttgcccgcccagaagcagctgacacaggatgatgatactgatgcggttgagattgctatcg

SEQ ID NO: 334413 - DNA, 82 bp, Homo sapiens
gaaacctcctacctccgttgaaaggagagccagttactaactttgtgtcccggcatggatatccggaacaacctcactaggt

SEQ ID NO: 334414 - DNA, 75 bp, Homo sapiens
cctatcattcacaaagggaaaactacagccaccacacacaaggccctggccaacgtcaacattgggagcctcatc

SEQ ID NO: 334415 - DNA, 89 bp, Homo sapiens
atctgtcttcggtggactccttcggcagtccacccaccgccgccgcctcccagactagacgcttgaagcaaagctgccatcccagaaga

SEQ ID NO: 334416 - DNA, 100 bp, Homo sapiens
atgaacagtaccaggaagaggcagaagaggagacactttttcaaaaatggcaatggtatcagaattcctcaagcaggcctggtttattgaaaatgaagag

SEQ ID NO: 334417 - DNA, 75 bp, Homo sapiens
tcttcctgtgcttatcatgattgctctcccctcccctagtatggaagcttgctttgaccagatcaagttctttaa

SEQ ID NO: 334418 - DNA, 75 bp, Homo sapiens
ttttggcttcgaggtttaccccttccagggggcaatggcggcttcctgtgttctactgcacactgggcagaagat

SEQ ID NO: 334419 - DNA, 100 bp, Homo sapiens
tggactgaaaattcttcaaaccggagtcgggtcggacgtggcccagtggaacatcgggagcctccggaccatcctggacatggtggagcgcgagtgcggc

SEQ ID NO: 334420 - DNA, 100 bp, Homo sapiens
gtcccgaggaagtgcaagacccggaactgtggctgcaccatctgtcttcatcttcccgccatctgatgagcagttgaaatctggaactgcctctgttgtg

SEQ ID NO: 334421 - DNA, 100 bp, Homo sapiens
tctccgccttccagttcggagagtgtggaaaagccactggcagtgattcaagtggtgtcattgatctcacaatggatgatgaagagagtggagcttcaca

SEQ ID NO: 334422 - DNA, 101 bp, Homo sapiens
gtatttgagactgactgaatcaggtctggaacattattgaaatgggagcgcttgtgagtgccttggctgatgacaccttacacttatggaatttacgtcag

SEQ ID NO: 334423 - DNA, 75 bp, Homo sapiens
tcctgaggaacttggctaggctggccccgagcggaaccagagaatgctgagggactctgcacttgtccaagagaa

SEQ ID NO: 334424 - DNA, 76 bp, Homo sapiens
ggcgagacgcgcagcgccggcgcccgggagacccaggaggagcccgcagagtgatcagcagctggactgtgccttg

SEQ ID NO: 334425 - DNA, 83 bp, Homo sapiens
cgagcagattctacaacacatggtggaatgtatccgggaggtcaacgaggtcatccagggaagcagagactttcaaggaacaa

SEQ ID NO: 334426 - DNA, 75 bp, Homo sapiens
gcttgaagaaatccatgccatgaagtcaggtcaattcagtgaagatatgatacccacagtgggcttcaacatgag

SEQ ID NO: 334427 - DNA, 95 bp, Homo sapiens
gaggaggacagttcgctacacagcaatgcatcgagacggtctggaaaatcccgaagcagaagcccgtattcatctaggcattcaagatctcgtag

SEQ ID NO: 334428 - DNA, 100 bp, Homo sapiens
ctgggtgttttgctaccgtgaccgtttaggctagagtggtgctattttatcggtagcagcagctccagtgttgttacagggaccagccatgcgtgacaac

SEQ ID NO: 334429 - DNA, 88 bp, Homo sapiens
aagatgccagcaaagaacagcagcttagacacagaaactgatgaccagcaacttgaggaagtaccattatataatgatgtaatgctcc

SEQ ID NO: 334430 - DNA, 98 bp, Homo sapiens
tcagctgtgtgtccagaacgtgccatggagacgcttaacggatgggaaggccattgtgactatgtggtgattacagttgtcttactactgagtttcct

SEQ ID NO: 334431 - DNA, 90 bp, Homo sapiens
gctcatattctacttcattcagaagatcaggtacacaaatgcacgcgacaggaaccaggatattgtacctgtggatgcatcttatgaagt

SEQ ID NO: 334432 - DNA, 51 bp, Homo sapiens
gttggaaaaagggatatgcaatttgggtgacctggtactgcttgatgtatg

SEQ ID NO: 334433 - DNA, 80 bp, Homo sapiens
aaggaaaagacagtgtagtcctgcaaaacattttgagcactgaagtcagtggatctgcatgaatctggaaaattgcaaca

SEQ ID NO: 334434 - DNA, 100 bp, Homo sapiens
ctggataatcccggggaggcccaaagtgccttctatgaaggtcctgggattccttctctgccggggagccccgtgtgctgggcctggccatggtacccgg

SEQ ID NO: 334435 - DNA, 100 bp, Homo sapiens
accacgcggctgcacaactgcaggaacaccgtcacgctgctggaggaggtgcaactgacatgggtgaaccccagggatccatgcggattctagtgacagg

SEQ ID NO: 334436 - DNA, 75 bp, Homo sapiens
caccgagtccagcccaggaaaatggagaggtttcagccatgccacagagctccggcagtcatgggcccgctatag

SEQ ID NO: 334437 - DNA, 83 bp, Homo sapiens
cagggatgcagtaccacttgcagttatgtcacgcatctgatgaagcgaattcagagaggcccagtaagaggtatctccatcaa

SEQ ID NO: 334438 - DNA, 100 bp, Homo sapiens
gacctatggggcctggaagtgcccgctgagaaagggagaagacagcagaggggttgccgagaaaatggagctggcgctggtgcctgtgagcgcccacggc

SEQ ID NO: 334439 - DNA, 80 bp, Homo sapiens
ggaagacagccacacggctgacattagctcccactttcaagaagcaatagacttcattgttttcaatggttccagcaggt

SEQ ID NO: 334440 - DNA, 100 bp, Homo sapiens
tgtggcctcgctcctcggaggttgaaaccaagactgaagactgaacctgaagaagtttccatagaagacagtgcccagagtgacctcaaagaagtgatgg

SEQ ID NO: 334441 - DNA, 75 bp, Homo sapiens
tcccgcaccatggaggaggacgacagctacgttggtgtctcacctttaactctccttatgctgggtgaaaacaaa

SEQ ID NO: 334442 - DNA, 51 bp, Homo sapiens
gcggccgcggcgatgactcggacccagttgcttctgcaggaagcctttttg

SEQ ID NO: 334443 - DNA, 50 bp, Homo sapiens
cacctgtcctcaggcatatcaaagaattcctagaggacctgtgcaacaac

SEQ ID NO: 334444 - DNA, 90 bp, Homo sapiens
cggatgccctgcagtacctgcagaaggtctctggagacatcttcagcaggttagcatacgtatcaaggacagtaactaccatggctcccg

SEQ ID NO: 334445 - DNA, 82 bp, Homo sapiens
atggcctacccgggatacggaggagggaataccctctaccatctgctttggtcagggtgccgctcgaggatttaaaagcaac

SEQ ID NO: 334446 - DNA, 82 bp, Homo sapiens
ccggagcgtcccagctgcgaggagctggagaatgctggaggagaccttaaggatggccaccaccactatgaaggagctgttg

SEQ ID NO: 334447 - DNA, 100 bp, Homo sapiens
gtgaagctgggacgccagccatgttccagaccgcttggcgccagaaaaagcagagagatcttgctaagatgagaaaatgtctcagaccagaagaactgac

SEQ ID NO: 334448 - DNA, 100 bp, Homo sapiens
ttgaaccactggaaagtgaggaattttgaagtacaccgtggtgacattgtatcattggtgttagctcccagcgatgccagatgggatcagcacagccctg

SEQ ID NO: 334449 - DNA, 98 bp, Homo sapiens
ccacacctctagtggacccctcagtatatggatacggagtacaaaaacggcccttggatgatggagggcctgctttcttccccgggcgatgtgcagag

SEQ ID NO: 334450 - DNA, 100 bp, Homo sapiens
gacttcgtgggacctgcccccgttgactgaccgctaccgcagggcctgccagagcctggggcaaggcctgcgtagatatccctcagctgctggaggaggc

SEQ ID NO: 334451 - DNA, 125 bp, Homo sapiens
ggcggacacggccaccgcctcagcgggagaggagtctccaccaggactgaccgctgccgcccagcacgtccagctctctctccagatcggattcaaccgcacatcatgacagatgttccggctac

SEQ ID NO: 334452 - DNA, 132 bp, Homo sapiens
cgacgagctgccgtggacccagggctgagccgtgaccatgagggccatcccgaaactgtgattgttttctggtgctcttggcgtggtctggggggccttcgtccagctccatggtctggcaggttcttgagg

SEQ ID NO: 334453 - DNA, 100 bp, Homo sapiens
tgccatgtacaccaccctgcgagatggacttatcgtgactgggggaaaggaaaggccgttaaacccatccagagtaatggctgcggccttacccaggacc

SEQ ID NO: 334454 - DNA, 102 bp, Homo sapiens
tcaccttgatttttaatcccacggacaaagtggccttggagagtatgcctctgctaggcttcaccattgctccagaaaaggaagagggcagcagtgaagtag

SEQ ID NO: 334455 - DNA, 75 bp, Homo sapiens
agcctgcgaaggtggcggcgctgctgctcgggctgctcttggagggttgtgagtcccggcccagcccctccaccc

SEQ ID NO: 334456 - DNA, 87 bp, Homo sapiens
ggaggctcatatattgctgcaggagatgcagaaactaccagaggccgttcagctaattgagaaggccagcatgatgtatctagaaaa

SEQ ID NO: 334457 - DNA, 100 bp, Homo sapiens
aaaccagttgaattaccagaaaacaggttaagcaaccttttccacgggatggataagaatactcctgtaagatacacagtgtattgcagccttattaaag

SEQ ID NO: 334458 - DNA, 80 bp, Homo sapiens
gacagtgacagcgatgctgaggatcgaggaacgttgtctggtgtggacactgccagcggctgcagccgacttggaatgac

SEQ ID NO: 334459 - DNA, 75 bp, Homo sapiens
gcaatcctaccatgtcagccttcccagtagctggaactacagttggtgagtatgtgaaagccctggagtgtgcca

SEQ ID NO: 334460 - DNA, 85 bp, Homo sapiens
agtggcgcctaaagtctgagagagggaagtcgcctctgtgctcgtgagtgcatggggtataaggaaagaccacagcaagattctt

SEQ ID NO: 334461 - DNA, 100 bp, Homo sapiens
tggcgctggccggatggaaatcctaatgacagtctccaaattcgcctccatctgtaccatgatgaaggcattttcaaagctggagcagagaggtctgaaa

SEQ ID NO: 334462 - DNA, 82 bp, Homo sapiens
gatcggcaactatggcatccccccagatgaaatggatgagttcggtctctgcaagtctattgaagacaatgaagtatatttg

SEQ ID NO: 334463 - DNA, 98 bp, Homo sapiens
tggagaggttccttcaggaggatcagaaatcacctgctaagaagctgactaatgcattaagcaagtccctgagctgtgcttccagccgtgaacctttg

SEQ ID NO: 334464 - DNA, 75 bp, Homo sapiens
gagcagtgggttctggtggagatggtacaggcgctttacgagcaaaaaggcattgggatgaacgagccgctggtg

SEQ ID NO: 334465 - DNA, 51 bp, Homo sapiens
ctttcctttccgtctggcggcagccatcagtcactattccaggtcctcagg

SEQ ID NO: 334466 - DNA, 90 bp, Homo sapiens
gtgggtcataaatcctagtggtggactgatttcaaagggacacccactaggcgctacaggcctggagctgctgaagactgctattgggaa

SEQ ID NO: 334467 - DNA, 100 bp, Homo sapiens
cgggtgagcttggggacgcacggagaggtgcagctgggcaagaaagtgaaggggggctccagcaagctgacaggccgtgtccttgctctgtcctttgatg

SEQ ID NO: 334468 - DNA, 75 bp, Homo sapiens
caggggagcaaggtgcaagagtccacaaagggacctgatgaagcgaagatcaagattgttgaacagataaatacg

SEQ ID NO: 334469 - DNA, 100 bp, Homo sapiens
gttctggactttgggcgtcccattgccatgatgtcaaagcagttggacatgttcaagaccaacctggaggaatttgccagcaaacacaagcaggagatcc

SEQ ID NO: 334470 - DNA, 80 bp, Homo sapiens
gttggaagcagccgatccagcctgcggagcctgtggggcagattgctgacagaactggaatctcctgcttggtggccctt

SEQ ID NO: 334471 - DNA, 89 bp, Homo sapiens
gcggcacagagagggcctgggagcttgctgcagcttcagtaagactttgaccccgacgcaggcttcagtgattgccgcggatcagaagc

SEQ ID NO: 334472 - DNA, 75 bp, Homo sapiens
ccttgaagtagatgtggatgactgtcaggttgtaaagaagaaagttctaccctttctgtcaaaatgaagtgtgat

SEQ ID NO: 334473 - DNA, 100 bp, Homo sapiens
ctgaaagggaagcaatactcgtgtattgcagttgctctacggtgagcccgggcgtgctggcagggatcgtgatgggagacctggtgctgacagtgctcat

SEQ ID NO: 334474 - DNA, 74 bp, Homo sapiens
atgatccggcaggagcgctccacatcctaccaggagccttcaataccccaggtcccaaactacaggctgtcgat

SEQ ID NO: 334475 - DNA, 82 bp, Homo sapiens
tcagcctcccgccggccgtctccttaacaccgaacaccacctgcctagagctggaacgttacctccagagcgagccctgcta

SEQ ID NO: 334476 - DNA, 83 bp, Homo sapiens
gcaagctgaaaaagaaatgtactccttgtgtcttttagcaacattaatggataacgaaggaggcccaacttcattcaataagg

SEQ ID NO: 334477 - DNA, 75 bp, Homo sapiens
ggagacgccgcggaggagaccggaccgaagacggaccgtgccgggaagaggtttcttgagtacaggcgatcaggc

SEQ ID NO: 334478 - DNA, 98 bp, Homo sapiens
tgggatgtttcggaatgggcattgtcgccaattttcaggaatgttccggagaatcacagcagctgccactaggctgttccgcagtgatggctgtggcg

SEQ ID NO: 334479 - DNA, 100 bp, Homo sapiens
cagttttgtcttgggcgtctttgccagcggatcacctctcctgatcctgactttcttggggtttgtgggagcagctcatcacaggcaaggaagatgctgc

SEQ ID NO: 334480 - DNA, 75 bp, Homo sapiens
ttccagcagtcagttgaacaagacaacttatttgatgttccatggagatcaggaatgttattaccaggatgacct

SEQ ID NO: 334481 - DNA, 87 bp, Homo sapiens
tagccttgcgactggcccagtatccaggtcgaggttctgcagaaggttgtgactttagtatacattaaacacagtgggaatatcact

SEQ ID NO: 334482 - DNA, 74 bp, Homo sapiens
atccagaccaaggccacggacatcctgcccaagtggctgcgcttcatccgaggatgaagatttgataaagtgga

SEQ ID NO: 334483 - DNA, 90 bp, Homo sapiens
ccgcgctggccgtcggactggagctctgggctgcggcgcacgccttgcccgcccaggccgagtccggtcctccgccatctggagctgctg

SEQ ID NO: 334484 - DNA, 98 bp, Homo sapiens
tctttccgccctaatggaggtctccagtttcgctccgctccatcccagtcaagggggctgaagatgatgaactagaagaagaagctgactggatctac

SEQ ID NO: 334485 - DNA, 100 bp, Homo sapiens
gtgtgtttcctcgccacaggtgcaagtccgcatgcaacaccatcgactcttcatttcccgacatcacccattatccagcagcctgggccttacttctcac

SEQ ID NO: 334486 - DNA, 50 bp, Homo sapiens
tacagaaacctcgtctccctggggaagaatcccactgatgcataccttga

SEQ ID NO: 334487 - DNA, 75 bp, Homo sapiens
tgcctgcacagtcacctcgagaagatgaagaaagcagcattcagtttgcctgagaatacagatcaacccacagaa

SEQ ID NO: 334488 - DNA, 100 bp, Homo sapiens
gcctgggccatgccgaaaaaaggagattgtgacatatcactgcattcaatacctagatgatcttcttgcgggagccaaagtgaacgaattaaccaagcat

SEQ ID NO: 334489 - DNA, 82 bp, Homo sapiens
tccggagggaccgggggagctcccaggcgcccggtcctcctgcatatgcccaagaggattgggagtggaatggacaccagca

SEQ ID NO: 334490 - DNA, 82 bp, Homo sapiens
cggccgccaagaagcacggcaccaaaaacaagcgcgaatctccctggaaaaggagacatgaatgtctgcaatgatacttcct

SEQ ID NO: 334491 - DNA, 95 bp, Homo sapiens
gacagaagcagatggattcgtccttttagtatgaaaacaaagttgcagtacgtgacagagtggcatttgcttgtaaattccttagtgatactcag

SEQ ID NO: 334492 - DNA, 76 bp, Homo sapiens
agaaattcaagccgccattaagcactctacacccccaagtgcatatgggtctgtcaaagcctatactaactttgat

SEQ ID NO: 334493 - DNA, 50 bp, Homo sapiens
gaagaagccacccgagcggactcccgagatccctgggtatcagtatgtgt

SEQ ID NO: 334494 - DNA, 82 bp, Homo sapiens
cacagactaatcttttggcttatgatgtctacaataattcggatttgttctacagagagtgcctccggagccagcgtggtgg

SEQ ID NO: 334495 - DNA, 75 bp, Homo sapiens
gacccttcatgccagtgctgggatttggcacttatgctcctgatcatatgggaaaactgacaaccatgcctgcag

SEQ ID NO: 334496 - DNA, 110 bp, Homo sapiens
aacagcagccacaggaaccttgatgcatttgaaacgccactttatgtttcgaaaccatctctgtttagtttttgaaatgctgtcctacaacctctatgacttgctgagaa

SEQ ID NO: 334497 - DNA, 100 bp, Homo sapiens
aaaaaactaatggaattagcctgcaacatgaagtgccctgaggagctgaaacccatgaaggatggctctggctgctacgaccactccaaaggcattgact

SEQ ID NO: 334498 - DNA, 100 bp, Homo sapiens
ttcagatgggatctttccggatcaatccagatggcagccagtcagtggtggaggatcactactcttggaatcaaagataaatccaaatactgcatatcag

SEQ ID NO: 334499 - DNA, 75 bp, Homo sapiens
cttggtctgagtggactgtcctgcaggtttcagtgttgactggtgggctcttggagtgctcatgtttgagatgat

SEQ ID NO: 334500 - DNA, 100 bp, Homo sapiens
ccgattccacaactacatcctcccgcacctgcggggcgaggaccgcgtctgccactgcaactgtggccgcggccagcaggaaacgaggggagcccttgat

SEQ ID NO: 334501 - DNA, 50 bp, Homo sapiens
cacatacgtcaaggaaattgaggaggccccgtgtgggccgcggcccggcc

SEQ ID NO: 334502 - DNA, 100 bp, Homo sapiens
cagtcccccaggatacagggtcaaaggagagcacaaccatcgcagttggaagcccatggggcaggcgaggattaaatccaccacacagggtgaaatctat

SEQ ID NO: 334503 - DNA, 51 bp, Homo sapiens
ttcgcagtggtcgcttcttctccttgttcagccaggccctggccatccgga

SEQ ID NO: 334504 - DNA, 75 bp, Homo sapiens
gcactactgtgaaagagacaatttgattggggaagaaacaaaggtgaccaagaatatggcccaggtgaccaaagc

SEQ ID NO: 334505 - DNA, 96 bp, Homo sapiens
cgcgaagctggccaaagcctgcccagacggctcacctgtgcgggatggaacaaaaggagtggattagaacaagatgacatgagaattttatacaaa

SEQ ID NO: 334506 - DNA, 100 bp, Homo sapiens
accgggcgcaccgaccatggcctccaaatgccccaagtgcgacaagaccgtgtacttcgggcgaccattgacgaggtggagacggacgtggtggagattg

SEQ ID NO: 334507 - DNA, 100 bp, Homo sapiens
agggtggaagctgggaaacccacaggaggcaaccacactagtttagatcgatgccttccagcacatgcagcattttgtccagaccatgcagcaacaggcc

SEQ ID NO: 334508 - DNA, 98 bp, Homo sapiens
cctgcaaccaccgctgtactttctgtctctatgaacttgactactctagacacctcatacaatgcagatcttcgtgaagactctgactggtaagacca

SEQ ID NO: 334509 - DNA, 82 bp, Homo sapiens
atgagtcatgtggcagtggaaaatgcgctcgggctggaccagcaggccctgggctgcatcttgtacctgctgtgcttccggc

SEQ ID NO: 334510 - DNA, 96 bp, Homo sapiens
aagtgaggagcccctccgcccggcagctgccccgtctgagaagtatccagctcacatagaagacattgactacgaggaaggaaaagtactcatcca

SEQ ID NO: 334511 - DNA, 80 bp, Homo sapiens
aagttcgagcactaatatttaagaaagaagatgttaactttcagtgtctttggtgcaacactaacaaggcttgtctggac

SEQ ID NO: 334512 - DNA, 82 bp, Homo sapiens
gagcaggctctgcgggaggtggagcacctgaagagatgccagcagctattactataacaagcgcattctgcacaagaccaag

SEQ ID NO: 334513 - DNA, 90 bp, Homo sapiens
gtgaattagaggtttataaagccacttaccacttcatctttgcacagaaaaacttctttacagagaatgtaactggtcactacatttccc

SEQ ID NO: 334514 - DNA, 100 bp, Homo sapiens
gacgatattgatattgaagcaatgcttgaggctccttacaagaaggactacaaatccctccaggatatcattgccatcctgggtatggatgaactttctg

SEQ ID NO: 334515 - DNA, 98 bp, Homo sapiens
gtcggtgacagcctcaagggcttcagcaccgcgcccatggcagagccagaccgagctgcagaggctggagacagagttgggccaacccgctgagcgct

SEQ ID NO: 334516 - DNA, 75 bp, Homo sapiens
tgaagaaaaccaagaactctgaggagtttgctgcagccatgtccagcccaagacctgcaaaatttacagagcgcc

SEQ ID NO: 334517 - DNA, 100 bp, Homo sapiens
ctctggggttccctactcccctgctatccccaacaagaggaaagacacacctaccaagaagccagtcaagcggccagagaggccagacttcacagacgcc

SEQ ID NO: 334518 - DNA, 75 bp, Homo sapiens
gcagccaagatggtgaagcagatcgagagcaagatctgcgagtgaagagggacgagggaaaagaaacaaagccac

SEQ ID NO: 334519 - DNA, 50 bp, Homo sapiens
tctctggaaagagtggggaacagattgactggggcgactttggggtagag

SEQ ID NO: 334520 - DNA, 88 bp, Homo sapiens
agctttgaagctggataggagtctccagtcttcctcttgatccatatgtttcagttggaactgataatgggagagaagcaattgaaag

SEQ ID NO: 334521 - DNA, 100 bp, Homo sapiens
cgagcctgggaggccggccggtgccagcacctttcggcttctgagacggcggcagcagcggcattcagaagttaaaatgcattttgctaatcagtcaata

SEQ ID NO: 334522 - DNA, 75 bp, Homo sapiens
ccaggagcgcttcagcctctaccaaaccagaagtctgatccatgagctgaaggttatgtgggtcatgaatttatt

SEQ ID NO: 334523 - DNA, 117 bp, Homo sapiens
ctggagaccatggagaccctcacggagctgggcgacgagctgaccctgggagacatcgacggtgctggagaatctggtaaaagcaccattgtgaagcagatgaggatcctgcatgtt

SEQ ID NO: 334524 - DNA, 83 bp, Homo sapiens
cccccagcccctcatcttccacatggagatgctgaaggcccgaatggaagtggatgcagatggaaatggtgctaagatatttg

SEQ ID NO: 334525 - DNA, 98 bp, Homo sapiens
aagacagtgaagaatgacaactcctcccgattcgagatctattgggaaactgattataaccactcgggcaccatcgatgcccacgagatgaggacagc

SEQ ID NO: 334526 - DNA, 50 bp, Homo sapiens
caacagcaggcctaacctccatgtgcagatggagtctcgctctgttgccc

SEQ ID NO: 334527 - DNA, 82 bp, Homo sapiens
ctcacggacgaggccgccctcagttgctgctccgacgcggaccccagtaccaaggttgtggcagcactgcctgaaggtatga

SEQ ID NO: 334528 - DNA, 83 bp, Homo sapiens
taagtggaattttggagatattcaaaggcacagccaaaattggtcagaaaggggagtaaagtgggacacgagcttcaaagtag

SEQ ID NO: 334529 - DNA, 97 bp, Homo sapiens
cttctgttcattggattcgtctgtgtcctattgagttttttcatggctagagtattcatgagaatgaaactgccattcgaaatcagagcaaagcctc

SEQ ID NO: 334530 - DNA, 101 bp, Homo sapiens
tttaaagagagataaagatgccatttatggccaagtccgacagctggaagaacaattaagaataatggatcagaccttgaaagcattaatggctgcagagg

SEQ ID NO: 334531 - DNA, 89 bp, Homo sapiens
aatcgaatctcttctccctccccttcttggttgtttacattcagagctctatcaataagaggaatacatattacagtgaattcgacaac

SEQ ID NO: 334532 - DNA, 90 bp, Homo sapiens
gtgctgcctttcagtttcgcctggccgaaagaaattttggcgctaattccaaaccagaatgctcttctaaaggacttggatattcttcat

SEQ ID NO: 334533 - DNA, 100 bp, Homo sapiens
tcaacttccaagtgataaattcaaggatgatccagttggaccttttggacaggaaagtgtaacatcagttacagaaattatatccagatcgagagacaga

SEQ ID NO: 334534 - DNA, 98 bp, Homo sapiens
aaacaaggatttctactaagagaacatttcacacctgaagcaacccaattagcatctgaacaattgcaagcaagatgctcttagtgatcttgcattac

SEQ ID NO: 334535 - DNA, 100 bp, Homo sapiens
ccagatatcatcatagagtcttctgctcttcctcaactaccaaaggaaagatgaatgggagggctgattttcgagagccgaatgcagaggttccaagacc

SEQ ID NO: 334536 - DNA, 50 bp, Homo sapiens
acaagatggacaccgcggaggaaggcacttggactagtaccctgcatgaa

SEQ ID NO: 334537 - DNA, 50 bp, Homo sapiens
tatggcatagatcttgggaaaattgcggtcgacttatcaaaggatctccc

SEQ ID NO: 334538 - DNA, 82 bp, Homo sapiens
tgcttctttggagaatgatatcaaaccactcacaggaggcaaagagtccgaaggtggagctgcacagccactcagaggtccc

SEQ ID NO: 334539 - DNA, 100 bp, Homo sapiens
agagacgtcatacttggaaatggctgcaggttcagacttgcaaaccatactgggtacatcaaagttgactggcaacgagtggagaaggacatgaagaaag

SEQ ID NO: 334540 - DNA, 100 bp, Homo sapiens
gaggaaatagtggcaggtgacagtctgcatgtgcagttttcagtcttccgtgtgtgctaagatcgtgcagctcctggggcagaatgaggtggactatcgc

SEQ ID NO: 334541 - DNA, 82 bp, Homo sapiens
aggcaccgacgtcatcatgctgaccaccaatcagatccgtaagagatcccgctgtgcgctggctgtgaccagcacatcctgg

SEQ ID NO: 334542 - DNA, 90 bp, Homo sapiens
tcaggaggacctgcaggaggacgcagacggatgcaaactcttccacatagactttggatatattttgggtcgggatccaaagcctcttcc

SEQ ID NO: 334543 - DNA, 50 bp, Homo sapiens
agcagatggttaaatttgctgccaaccagtgaaactgaaattgcattctt

SEQ ID NO: 334544 - DNA, 100 bp, Homo sapiens
gctgcagctgcgatctctgtggtaggcccaggtacgctccatggtgagtgactttgctgttttcctcactatcttcacaatggtgattattgattttttg

SEQ ID NO: 334545 - DNA, 100 bp, Homo sapiens
aatgtcagaagatgaagaagatgatagcagtggagaagagatcacccctgagtacctccagagcgtctgtgtccgcctgttcagtaaccagatgcggcag

SEQ ID NO: 334546 - DNA, 100 bp, Homo sapiens
cgaaaacgtagacgacggagtagcagattgagggcaatgaggccaaaatacccagatcacagattctgctggccatattctctactccaaagaggatgca

SEQ ID NO: 334547 - DNA, 96 bp, Homo sapiens
ccgggctgcagttccgggagcaggaggtacggaaccagggccaggcgaggaccaactccacctccgttaatccctatatcctgaagaagaacatga

SEQ ID NO: 334548 - DNA, 90 bp, Homo sapiens
cgcggcgtctccagcctcggtaccatggccgggatcatcaagaaacaaatcttgaagcacctctccagcatcctgaggttagcattacac

SEQ ID NO: 334549 - DNA, 98 bp, Homo sapiens
ttcttcatcgtgctattcctggtctacatcctgcgggtgcctttgaaaatcaacgacaacttgagcacaggtgctggtgaatctggtaaaagtacaat

SEQ ID NO: 334550 - DNA, 100 bp, Homo sapiens
gggaaaaatgctgaagtgctgtactcgatcgagtcagtgaaattggagcgatttgaaattccaatcaaggttcgattaagcccagagccatggacccctg

SEQ ID NO: 334551 - DNA, 100 bp, Homo sapiens
tcgctgcgctaaggaatgaaacccttccagctcgatctgctcttcgtctgcttcttcctcttcagtcaaggtgaatgcgtccccgtctctcacgtccagc

SEQ ID NO: 334552 - DNA, 75 bp, Homo sapiens
gaggtgcacgttcagcaagcaaatcagcagctgtcaagggcagcagattatcagtaccacctgtactctgagcct

SEQ ID NO: 334553 - DNA, 101 bp, Homo sapiens
ccctcctcttggctattttgctggcgtatttcatagtacctggagtagaacagaaaaattattatgtctgtgttcccttgggactcattggaaattgtaca

SEQ ID NO: 334554 - DNA, 82 bp, Homo sapiens
accccagcctctcgagtagctgggattacaaacgtgccccaccacacccagtgacgagtagcacagcccctctatggtttag

SEQ ID NO: 334555 - DNA, 95 bp, Homo sapiens
tgactatccccccttgcagcaattctttgttgttatggaacattgcctgaaacacggtcttaaaggaaaatgtttcaacgtgcgcaagagttgcg

SEQ ID NO: 334556 - DNA, 75 bp, Homo sapiens
ccgccccctgccccgcgtccctgccgacagcaataagagctaactgccatcaagagccatcagtatgtcttcaag

SEQ ID NO: 334557 - DNA, 95 bp, Homo sapiens
ggtcagggtcaagtcgtgttctgatcactactgacttgttggacagtaataccccacttttattcgctataatttgcaagaaagagaaaatggtg

SEQ ID NO: 334558 - DNA, 114 bp, Homo sapiens
gctggatgtaccgcatgtgatcactctgggactcgtggggctgcagcaccggattttaaacaagctgcactgataagccggactaacgggagcctttgtcacgccactgccatg

SEQ ID NO: 334559 - DNA, 100 bp, Homo sapiens
gaactgctgcatctgcaacaacagcagctttctgaaaaggatatgagcatgctcgaggagaggattaagcggtcagcaaagagaccctctgctgcaccaa

SEQ ID NO: 334560 - DNA, 96 bp, Homo sapiens
cgcaagacagtgtgcttgcaggagaccctaccaacaggaatcggataacaaggagctaaagtgttgtacatcagtacacagaagagacggatgtga

SEQ ID NO: 334561 - DNA, 83 bp, Homo sapiens
cctacgtcccgctgccgtcgccgccgccaccatgcccaagagaaagagaaccatggagtctggcagtaccgccgccagtgagg

SEQ ID NO: 334562 - DNA, 75 bp, Homo sapiens
cgattgggtcactcttggttgcttctggttcgtagtaggggttagtgtatcttaaatagtgaagatggagaaata

SEQ ID NO: 334563 - DNA, 98 bp, Homo sapiens
tgagcttgagatgctaggaagacttgggatgtacagttacccagcacgtgtacctcctcctcctcctattgctcgggctgtagtgccctcgaaacgtc

SEQ ID NO: 334564 - DNA, 76 bp, Homo sapiens
gagagtagttgagccaaaacgtgctgtagcaagagaggaaaagtctgcgggaaatggctgagcgtttagctgacaa

SEQ ID NO: 334565 - DNA, 100 bp, Homo sapiens
gccggggcaggggcggaggcggaggcagaggtggaggcgctttgaaagcgcgtgcctgcagacgaggcctacttcatagtcaaagagattctcgctacag

SEQ ID NO: 334566 - DNA, 49 bp, Homo sapiens
gcgagtggggacagcttcttcctaggtggtcttcgagggatagcacgag

SEQ ID NO: 334567 - DNA, 100 bp, Homo sapiens
acctttccaacacagatgtccaagctgccaaggaatacagaagcagatttacaaatgaagagacagtgtcattctgcttgagggtaatggtgggtgtcat

SEQ ID NO: 334568 - DNA, 100 bp, Homo sapiens
ggcatccagccccttcagacatggccaacgaaagaccctgaactagagtcccaggtcaacctgaagggcctgtcccagtcggctttaccctatcgacgca

SEQ ID NO: 334569 - DNA, 75 bp, Homo sapiens
caggcgccgcggcgaggagcgagcgctgcgaggtggcggcctgagagttgtctgctggttctcagcttgaagaag

SEQ ID NO: 334570 - DNA, 90 bp, Homo sapiens
cgaagctgtccttacttactgtcctcaaatacgtatattactcttccatggatgccccttgataacagatttttgcactgagtggccagc

SEQ ID NO: 334571 - DNA, 98 bp, Homo sapiens
ggacatctactgggtcagcttcatcctcggcggcggtggccgctagctccaaggaaggagtcgttcacgcctactgaggagcatgtgttggtggtgcg

SEQ ID NO: 334572 - DNA, 72 bp, Homo sapiens
cacaaccctcaaaggacatgaagatacagaattcgttgttgggaaggactggggaaacagctgtaacatttg

SEQ ID NO: 334573 - DNA, 78 bp, Homo sapiens
acccaggagaaattcgccctcaaagacggctgtcctcagcgaggggccgtgcacccgctcctgagcagcgccatgggc

SEQ ID NO: 334574 - DNA, 82 bp, Homo sapiens
cctccttctgcccttccttctgtatatggctgcgccccaaatcagcttctcccatggtacaagttgatgagaagggtgagaa

SEQ ID NO: 334575 - DNA, 75 bp, Homo sapiens
gcctcagcctcccgagtagttgggactacaggggaacactgtgaagaacatgttgcttttttcaaacagattttt

SEQ ID NO: 334576 - DNA, 100 bp, Homo sapiens
aaacaaaatgtcaacaaattgatggagaggtgagagacttcagaggctgccctttcttttcatctgctgcttgtgaaaggaaaacatcttgggcccccag

SEQ ID NO: 334577 - DNA, 90 bp, Homo sapiens
cctccatcgtgtggagccctcagctcttatgttcctcctgggcatcctggacttcctcttcgtcagccacgcctatcacagcatcctgac

SEQ ID NO: 334578 - DNA, 83 bp, Homo sapiens
cgtgaagctcaccgacagtgccctgagggccttcgagagctaccgcgccagacagactggacgccgggcatggcagtgccacg

SEQ ID NO: 334579 - DNA, 100 bp, Homo sapiens
ttgatgctaaggccttgcctcagaataagccaagagcctttttgggagcctggtaactggtcacattgttctgccacctgtggtcatttgggagcccgca

SEQ ID NO: 334580 - DNA, 149 bp, Homo sapiens
ggggctcaccatcagggacgtgctggccgtgatcaaacactgcaaggaccccctccggctcaagtgtgtcaagcaagatctttaatctcatgaagtacgacagctacagccgcttcttaaagtctgacttgtttttaaaacacaagcga

SEQ ID NO: 334581 - DNA, 83 bp, Homo sapiens
gaaggaacgaggcaaggagctaaagcagcgtgcgttcagccctggggctcctctgctgaacagcccctgggcgggagactcag

SEQ ID NO: 334582 - DNA, 90 bp, Homo sapiens
tctccttcaagggaataaaattttctaaggtccaaacactgcagtttcatccatttgaagcacagactctgatttctggctcatatgata

SEQ ID NO: 334583 - DNA, 100 bp, Homo sapiens
gtgctcaggtgccagatgcaaaggtaaaacttccttttcctgtagatcaaatcacagatcttccaaggaacgatttccagatgatgattaaaatgcacaa

SEQ ID NO: 334584 - DNA, 100 bp, Homo sapiens
tccacaaatgcagaagtaagaggatttatagatcagaatctcagtccaacaaaagtttttggctttcacccccaaccagtgaccaaagacttgaccactc

SEQ ID NO: 334585 - DNA, 88 bp, Homo sapiens
cttggacatatcaagcattggtgcacgatgtactggccatggtaggggaggagtgtgtaggtgccatcgtttgcaagttggatatgca

SEQ ID NO: 334586 - DNA, 90 bp, Homo sapiens
caaactggaaagatgcacattttgcctctggttggtggaaagcccatcctgagcccttctatcctagaccatctcatcaataatgaccgc

SEQ ID NO: 334587 - DNA, 98 bp, Homo sapiens
cacactctgggacagtgggagatttggaacagctttgagaagagcaagttgctgagacaaaggaaaacccactcccttggaggagcatgaccttttcc

SEQ ID NO: 334588 - DNA, 99 bp, Homo sapiens
ccaagttttacaggaaaactccagtgattttcaatcaaacattgcatagatacagggtatgatacagcatcctacaagaatgagcaaacctattctgat

SEQ ID NO: 334589 - DNA, 83 bp, Homo sapiens
ggcaccgcggatctggggccgtcctcagaacactctgctccagccaaggtggtgagggcagctgttcctaaacagcgcaaagg

SEQ ID NO: 334590 - DNA, 98 bp, Homo sapiens
caaaatcaatggccggacgaaagtgtcatggagaaactccagctgggcccagagattctgcagcgggaaaatccaaggcttatttatgccaggctgag

SEQ ID NO: 334591 - DNA, 90 bp, Homo sapiens
ctcaagatgtggatttaccttatcccctcaacaacttttcagtggcaagccaacccatggccagcacagacatgatggaataaagactga

SEQ ID NO: 334592 - DNA, 100 bp, Homo sapiens
caggcctccgtgaagaacttccagatcatccatggcaatgaccgtgggcacttcctctgtggtgtacccagcagccatgtttgccccccaggtggctgcc

SEQ ID NO: 334593 - DNA, 75 bp, Homo sapiens
caaggaacaagagatgcaagagtgtactatcagtgtactgttacccggacatacctattccttcacaagttctgg

SEQ ID NO: 334594 - DNA, 83 bp, Homo sapiens
cgacatgctcatggagaacatctccaccaaggccatcgtcagccagtggcagcaggagtccaaagagaaggtggtgtccctcc

SEQ ID NO: 334595 - DNA, 100 bp, Homo sapiens
cttggagctagtctacaatcaacatgagaatgaagcaaagtcattctttgagaaatcccagctctcctgttggcttcgtgcttggggtagatcttcttca

SEQ ID NO: 334596 - DNA, 74 bp, Homo sapiens
ttcattgctgcttcttatgctccatggactgcctatgtgcttgctgatgtcatggatgatcagttgaaatctat

SEQ ID NO: 334597 - DNA, 75 bp, Homo sapiens
ctcctgagtagctgggattgcaggcctgtttctttgacagcccagacttagagcaatgtgtccctcctttgagct

SEQ ID NO: 334598 - DNA, 76 bp, Homo sapiens
atccttacccgacctcagatgctcccttctgctcctggtgctgtacttctttgcagtatacaaggactagcagtta

SEQ ID NO: 334599 - DNA, 83 bp, Homo sapiens
tgagaacaggaccccccgcccccgaggaagacagcgaacccctcccaccacaggatgcccagacctctgggtcactgttgcac

SEQ ID NO: 334600 - DNA, 98 bp, Homo sapiens
aggggaagttcaggaaacatccaagaaaaatgtccttaaagcaattgagcaggctgatctactgcaggagaaggagctggcaaacagccctgactgtc

SEQ ID NO: 334601 - DNA, 75 bp, Homo sapiens
tgacaaatcatttctatgcagcgatcttgggatatgatgaggagacagaagaaattctggcagatgtgctcaagg

SEQ ID NO: 334602 - DNA, 90 bp, Homo sapiens
aatttacgccatgaaagtggtgaagaaagagctggtgcatgatgacgagaagctttgcatcgtccctatggttgtgatgttgaaccccag

SEQ ID NO: 334603 - DNA, 50 bp, Homo sapiens
ggaggatggaccaaagagatataaggggtcggagctacacatcatcctgg

SEQ ID NO: 334604 - DNA, 98 bp, Homo sapiens
cgcgtccgccccgcgagcacagagcctcgcctttgccgatccgccgcccgtccacacccgccgccagcttcccatcgacggtcagtgcgcacgttgta

SEQ ID NO: 334605 - DNA, 100 bp, Homo sapiens
ggcgcccgagtgccggcttctcccctacgcgctacacaagtggagctccttttcctccacctaccttcccgaggagcgtccccggatttcgacatccacc

SEQ ID NO: 334606 - DNA, 71 bp, Homo sapiens
cggctcactgcaagctccgcctcccaggtgagcgactggtgggaggagtacatctacctccgaggacgagg

SEQ ID NO: 334607 - DNA, 82 bp, Homo sapiens
caggcggaaacagagcaacccccggcagatcaagcgtactggctgtgatcgaacttctcaaccctcagagacttagatcttc

SEQ ID NO: 334608 - DNA, 111 bp, Homo sapiens
ctggaaccgggatggcgacgtctacactgagtcggaggcgaaggcctctccttccgatgaaaagagaaaggaagaatggactacagccaccaaacgtccctagtcccatgt

SEQ ID NO: 334609 - DNA, 100 bp, Homo sapiens
atggacttcatcgctttataatcactggggtgatcctgctggctgttggagtctggggcaaacttactctgggcacctatatctcccttattgccgagaa

SEQ ID NO: 334610 - DNA, 100 bp, Homo sapiens
tacagtgacagcacaggtcacagtaaggccaaaaatgtgcatactcacagagttagagagagggatggtggcatctatcgagctgtgcctattcgagtca

SEQ ID NO: 334611 - DNA, 101 bp, Homo sapiens
tggaggttcgcggctctaacggggctttctacaagctctagaggacaaaatcccagtccttggcacaaactcaggaaatggaagccggagtctgttttttg

SEQ ID NO: 334612 - DNA, 82 bp, Homo sapiens
gaaggcagagagcagagacatcccgatctggggaagaggatacgaagcgttttcggcttcctgcccggagctgtgcagcaaa

SEQ ID NO: 334613 - DNA, 97 bp, Homo sapiens
gtccccgcgccgggcctcaggctccttcctactgtccgagggccaccaggccgccgggggcctgctgcgcccgggctggcctgccactcctcctgct

SEQ ID NO: 334614 - DNA, 100 bp, Homo sapiens
ggaaacccagagctcctgtcaaccagccagacgttatgaagaggacatgtactggaggagaatggaggaagaacaacatcattgggatgatcgccgccga

SEQ ID NO: 334615 - DNA, 98 bp, Homo sapiens
agaagaccagcatggctgaagcgagccctggggaggagtgttatgaaagaagacagaaccaagttgtattgttagacacactggaacaagagatttca

SEQ ID NO: 334616 - DNA, 100 bp, Homo sapiens
cccatttcagaccaatgccagaggagcaacagctgctctgttaaaagcgaaaatgaaacaattgcctgcggcaacagttcgactcctttcaagttctcag

SEQ ID NO: 334617 - DNA, 75 bp, Homo sapiens
aaaccagaagaggaggttgcccagaagaaaaaggccacgcccagatttcttctaccgctgcttccctgatgggct

SEQ ID NO: 334618 - DNA, 99 bp, Homo sapiens
cggggagcccatggcgtacagtcaaggaggcggcaaaaaaaaagtctgctactactacgacgtatgtccgtggttcagaccctgtattaaagcttttgg

SEQ ID NO: 334619 - DNA, 95 bp, Homo sapiens
ctgctggtggcggcggagaggaaccggtggcatcgtctcccgagcctgctcctgccgccgagaatagcctaacatggcagaccagagacagcgct

SEQ ID NO: 334620 - DNA, 89 bp, Homo sapiens
tgatgcacagtattattgtcaaagagcttattgtcacattcttcttgggaattactgtgggtgtccgcaatgttgccagtgtctgtctg

SEQ ID NO: 334621 - DNA, 74 bp, Homo sapiens
gggctgggaacccgcggtggagcgggacacgaacgtgtacacctccagcatgagagccaaatacctcgccacga

SEQ ID NO: 334622 - DNA, 100 bp, Homo sapiens
ctgcccttccaggagctgcagatcgatgacaatgagtatgcctacctcaaagccatcatcttctttgacccaggtcttggtggatgtcagtgcttactcc

SEQ ID NO: 334623 - DNA, 100 bp, Homo sapiens
cgagatcctgcacatgtctttggttaatcatctcattttagtggagccttggggtttccctgaacgaccagaccttgctgatcaagacagaccaattcca

SEQ ID NO: 334624 - DNA, 75 bp, Homo sapiens
ccggcgggaactcgactcttggcgccaccgcctcatgcactgtgtagtattctaccttgtaaatactgttatttg

SEQ ID NO: 334625 - DNA, 98 bp, Homo sapiens
cactgcagaggtgctggagctggcaggttgtttacattcagagctctatcaataagaggaatacatattacagtgaattcgacaaccgcacaagttgg

SEQ ID NO: 334626 - DNA, 50 bp, Homo sapiens
gggaccggccgaaaggcgaggaaccgggagaagaaatgggtgaccgttgg

SEQ ID NO: 334627 - DNA, 100 bp, Homo sapiens
ggtcctggcccaggctcctgcagctttagcagatgttctggaaggagacagctcaggtgctggagaatctggtaaaagcaccattgtgaagcagatgagg

SEQ ID NO: 334628 - DNA, 75 bp, Homo sapiens
tgcagaactttgcctctactttctgctcaggaacagggcggatacctgaccaactcgtgatcctagacatgaagc

SEQ ID NO: 334629 - DNA, 90 bp, Homo sapiens
gcctcagtttgtgcaggacaccgacatggaacagggactcactggggcagagtcacctgatatgaaaaaggagcaagacccccctgccaa

SEQ ID NO: 334630 - DNA, 101 bp, Homo sapiens
agcagagacaccaggacagaaaagacagtgttctgctttcatggagttcacagaagagtcgaggagggccttcatcccagaataatcactgaaggatttga

SEQ ID NO: 334631 - DNA, 100 bp, Homo sapiens
tgcagtggaccacagcattcctgaaatacatccaggaaagacatggagattctcttaaaaagtgggctcgggatgagtttgaaggcctcttcaagcagcc

SEQ ID NO: 334632 - DNA, 82 bp, Homo sapiens
ctgcgcaggaggagtatgtcaagcgagccctgttgaacaggtagttaagcccccccaaaacaagacggaaagtgaaaatact

SEQ ID NO: 334633 - DNA, 83 bp, Homo sapiens
gaaaatcggcagctgagacggccttggccgatttggcagctgatcggaagctctttcgtcttgtctccaatgactccttcatc

SEQ ID NO: 334634 - DNA, 75 bp, Homo sapiens
tcttcctgtcgctcccggtcctggtggtggttctgtcgatcgtcttggaagaccctcctgaagtgtccatctccg

SEQ ID NO: 334635 - DNA, 80 bp, Homo sapiens
gccgagttcaacatcctcctggccaccgactcctacaagattctgaaaaagagttccacgtcctcccttatcgagtcttt

SEQ ID NO: 334636 - DNA, 74 bp, Homo sapiens
gattccaagtaactcttatttgattctttcagtgacctgtatagttcctatgtaatcttttacttcctgctgct

SEQ ID NO: 334637 - DNA, 100 bp, Homo sapiens
aggaaatgtctcgtctctggtatgggaaaaaagggagaagacatcaaccaattaatcataaatacactctggcatggctttgggaagaagacaagaattt

SEQ ID NO: 334638 - DNA, 100 bp, Homo sapiens
ttttttgccgctggtgtcaggagtattttcatattccaataccgataaatctttgagattgacaagtatctctatgccatgcggctctccgatgaaactc

SEQ ID NO: 334639 - DNA, 100 bp, Homo sapiens
caaaacccaacagaccaccaaatgttgacctgacgaaattccacaaaacctcttctggaaacagtacaaagggaatttcttgcagagctgtgttcagctg

SEQ ID NO: 334640 - DNA, 100 bp, Homo sapiens
atatatctggcctaccatccttctgctgctgaaccaatgccaacagctagtgagacctgcaacgacttccacccgatgttcttcacccacgacagatcct

SEQ ID NO: 334641 - DNA, 100 bp, Homo sapiens
gcaagttttcattgggcaaaatgggatttcagaacttatatttccacctcttccaatgtggcaccctttgcccagaaaaaagccaggaatgtatcgaggg

SEQ ID NO: 334642 - DNA, 82 bp, Homo sapiens
ctgggtacaagcattcctcgtcagcaacatgctcctagcagaagcctatggatctggaggcccctcgggaggcattggcaca

SEQ ID NO: 334643 - DNA, 75 bp, Homo sapiens
acagcaacagtctgcgttctgtggtggggataagcagacccttccagtgtactaatggtcacttgatgtgcgctg

SEQ ID NO: 334644 - DNA, 100 bp, Homo sapiens
tacggcttgtatgtatttcaaacgtttttatcttaataactcagtaatggaatatcaccccaggataataatcattggggacatcatagatcactatcga

SEQ ID NO: 334645 - DNA, 100 bp, Homo sapiens
gctgtgcctcccagcaccacagtccttctgcagtccctcgtccagccacccccaggtgttttaaggatttccaactgcagcgggctaacaagatggagct

SEQ ID NO: 334646 - DNA, 98 bp, Homo sapiens
aagtcctggctcagcaagactctcgagcccataaaactgtggatttagttactccactctgccatgtctttccaccactgcctgcacatttgagacca

SEQ ID NO: 334647 - DNA, 51 bp, Homo sapiens
acacgtatcctcctgcctagcgcaggttaaagctgaagctcaacaaagata

SEQ ID NO: 334648 - DNA, 97 bp, Homo sapiens
tgaaagaacatcacacagttgaagctccaggaggtcaaaaggtggttctacccaggcaataacccctacactgggacccccgactggttgtatgcag

SEQ ID NO: 334649 - DNA, 100 bp, Homo sapiens
aaaagaagaacttgatgtatctgtaagattcccttggagtgttcttgttgtggatgaagctcacaggttgaaaaaccaaagctccctgctgcataagacc

SEQ ID NO: 334650 - DNA, 90 bp, Homo sapiens
ttctgctgaccgcgggccctgccctgggctggaacgaccctgcggagtttaagagagctgtgaaagtagcaacaggacaagaactctcaa

SEQ ID NO: 334651 - DNA, 80 bp, Homo sapiens
cgcggcggggctgaggcggccgcggggcccgagcgcagatgaaggatttgggggcagagcacttggcaggtcatgaaggg

SEQ ID NO: 334652 - DNA, 90 bp, Homo sapiens
cggaaatgcccttacagcagcagcctcttagcaaatatccggctgtgatcaatgatatttcattctggttgccctctgagaattacgcag

SEQ ID NO: 334653 - DNA, 100 bp, Homo sapiens
cagcgctcctggcgctgctggctgcgctctgcccggcgagtcgggctctggaggaaaagaaaggacaacttgcctttgatgattttcaagagagttgtgc

SEQ ID NO: 334654 - DNA, 82 bp, Homo sapiens
gggtcagtccgagtgcctcagcctggccagaggagaagctgctgcagaagaatattttgcctgctggaacctgctgtatcta

SEQ ID NO: 334655 - DNA, 100 bp, Homo sapiens
ggttacttcttcctcaacaccagcaccgcagatgttgtcaaggtggcctaccaggaggccaggggtgtcgccatgtatccctctgaagaagatatgatcg

SEQ ID NO: 334656 - DNA, 82 bp, Homo sapiens
gcgcccagagccccgcgtttcagccctagggaagctcgatgcattctatttctcatcatttggctcataactggaggaaggc

SEQ ID NO: 334657 - DNA, 83 bp, Homo sapiens
cccgggcagccacccccggccctgctgccacagcagctcattgctatggacagtgctatcaccctgtggcagttccttcttca

SEQ ID NO: 334658 - DNA, 100 bp, Homo sapiens
aaaggcgatgccacagtgtcctatgaagacccacccactgccaaggctgccgtggaatggtttgatggtgtgcctaccgcatgttgccgctgctgtttct

SEQ ID NO: 334659 - DNA, 100 bp, Homo sapiens
cagagaacaaagaactcaacagcagcgttctggacctcaaggtatgcataagatgactccaccaattaaagatctgctgcctagactcacccccatctta

SEQ ID NO: 334660 - DNA, 83 bp, Homo sapiens
cagttactgtagaagtcactcaatataatccaccttttcaggtgggtcttcaaacaactctatgataaaggccttgtttatag

SEQ ID NO: 334661 - DNA, 100 bp, Homo sapiens
cctcatgcaagcgagggacctgggactgctcacagccaggtcacagatgtgacattgatgtgtccactgaagccatgtatgctgcaaccagacgagaagg

SEQ ID NO: 334662 - DNA, 83 bp, Homo sapiens
gaagttcgagcactaatatttaagaaagaagatgttaactttcaggatattagaaatggctactccccagtcaattttcatct

SEQ ID NO: 334663 - DNA, 98 bp, Homo sapiens
ccccgaagagttctacaacctggtgcgcttccggatcgggggcaagcggaaggtgatgcccaagatggaccaggccacgcccaccagccccatccgag

SEQ ID NO: 334664 - DNA, 75 bp, Homo sapiens
gaaaattagatctcctgtgtaagactagccacctttctgatacagatcaggatcctcatgaccagccaaagagaa

SEQ ID NO: 334665 - DNA, 80 bp, Homo sapiens
ggagcacctgaagagatgccagcaggagtacgagagggcctccaaagtggaccagtttgtgacgcgcttcctgctgcggg

SEQ ID NO: 334666 - DNA, 90 bp, Homo sapiens
cccaaagccaaggagaagttctcccagctggcagaagcctatgagatcacccggaagttcaggctgaattctgaaggcaaacttgagcag

SEQ ID NO: 334667 - DNA, 100 bp, Homo sapiens
ggggaagggccgcacgagcgaggacccccaccagccagcgctcccgtgggtggaaagtttttggtcatgaagaggaagagaggcaggcctaaggggtcca

SEQ ID NO: 334668 - DNA, 98 bp, Homo sapiens
gaaaagttcatccatctctagtttcaagagagacaagagagacacctccaacttcgacaaagagttcaccagacagcctgtggaactgacccccactg

SEQ ID NO: 334669 - DNA, 100 bp, Homo sapiens
aactggtactacatttccccgaggctcaccttccagtgcctggaggacctggtgaaccactattctgagaaaggtgatgcagagccagagagtccagaca

SEQ ID NO: 334670 - DNA, 96 bp, Homo sapiens
caaagttgaagttttgacctataaaaaggcagatactgatctggtataccgatggctgcagcctgagccagtgactttaagccttggacatcaagc

SEQ ID NO: 334671 - DNA, 75 bp, Homo sapiens
gtccacgtaggcattcaccccagcaaggtgtttcccattaaacactaccaggacaaaatcaggccttacatccag

SEQ ID NO: 334672 - DNA, 89 bp, Homo sapiens
gccctgcggaggcggcggtgcagcgctccggtgagaagccatttaaatgtgatcagtgcagttatgtggcctctaatcaacatgaagta

SEQ ID NO: 334673 - DNA, 137 bp, Homo sapiens
cagtggaggcttccaggtgaaactctatgacattgagcaacagcagataaggaacgccctggaaaacatcaggttcctcaagccaggacctacgcacctgttgtgagtggtgttatagttctgcagggcgcacaggt

SEQ ID NO: 334674 - DNA, 75 bp, Homo sapiens
gtcttccgtaacctgcgggagaggtttggaattgatgatcaagatttccaggttgaaggtttagaacagatgtgg

SEQ ID NO: 334675 - DNA, 98 bp, Homo sapiens
gcctgagcaagcggaggacctacgccggcctggggtgtccgcaatgttgccagtgtctgtctgcagattggctacccaactgttgcatcagtacccca

SEQ ID NO: 334676 - DNA, 100 bp, Homo sapiens
cggctgtgtggatgtcggcgaagccgcgggcgaggtaaaatgtcggttccaggaccttaccaggcggccactgggccttcctcagcaccatccgcacctc

SEQ ID NO: 334677 - DNA, 95 bp, Homo sapiens
gggtcatctttgctcccgaggagcggcatatttctcatctggcggaggtgtcctggggtagttggctccctagatctttagcttctactcccact

SEQ ID NO: 334678 - DNA, 98 bp, Homo sapiens
gttatctgagttcattggagtgggtgcttgtgcatatatgctaggtcagaaacccttcccttgtcaaaaatgcgatgccttcttttctaccaaatcta

SEQ ID NO: 334679 - DNA, 100 bp, Homo sapiens
cgtgcagatcgcctggcagatctaccgtcaccagcagaagataaaggtgtcccgacccaggctaagcttgagcatggctgagcaggagcccacagccgag

SEQ ID NO: 334680 - DNA, 100 bp, Homo sapiens
ggtgtaaggtgcgcagcagaaagcatttaaccagcatggctacttcatattttggaaagcagtttttaagacaacttgacaaaagtaagctgaagccagg

SEQ ID NO: 334681 - DNA, 83 bp, Homo sapiens
ggatcttcgaacttttgacacggctttggaaacgacgtcatgtgttagtttcagctgtgagttcaacatggaggcaaatcagt

SEQ ID NO: 334682 - DNA, 100 bp, Homo sapiens
cctgaatcctgtttcctacccactattcagccattgggtcacaagcgatgaaaagagcaccttgaaggggtaaaagcatgtctacgaagaaaagtatgtg

SEQ ID NO: 334683 - DNA, 51 bp, Homo sapiens
ctggggataacattcatgcagaacatcagatatccaggtgaaagaactgga

SEQ ID NO: 334684 - DNA, 82 bp, Homo sapiens
cgccgcggttaaccacgtctcgtccacgacctccctaggatgagttagatgaactccgtgctgagatggaagagatgagaga

SEQ ID NO: 334685 - DNA, 83 bp, Homo sapiens
cggcgaacgcggagagcacgccatgaaggcctcgggcacggatgcctaaatcaaaggaacttgtttcttcaagctcttctggc

SEQ ID NO: 334686 - DNA, 75 bp, Homo sapiens
agtagtcgctggagtccgcgcctccctggccaggcgggcaccacggcaggggctgagctaccctcatggaaggga

SEQ ID NO: 334687 - DNA, 97 bp, Homo sapiens
cctccacctacctgaagcagatgaagcttcgagtgatgaattcccaggagcagggcttctttcgccgaagcatccagaagaacatggtgtacacgtg

SEQ ID NO: 334688 - DNA, 90 bp, Homo sapiens
cgtggccttcgcgtctgcccggccaagaggcaaaggggaggttacgcagcaaaccatccagaagggaggagtggatgcgggccatccaga

SEQ ID NO: 334689 - DNA, 100 bp, Homo sapiens
cagaaggcttatgaggatggctgcaagactgtcgacctaaagcctgactggggcaaggtggcacaactctttacagacaactttgactaccaaactcgag

SEQ ID NO: 334690 - DNA, 75 bp, Homo sapiens
aaagtcttgcctccccttaccccgaaagccccgctcagaacctgcacttgttgccaagtcttccatcttactaga

SEQ ID NO: 334691 - DNA, 100 bp, Homo sapiens
cctgagcagcctggcctgccatgtccgggagaagacagcatgtcgggccccaggcctgtggtgctgagcgggccttcgggagctgggaagagcaccctgc

SEQ ID NO: 334692 - DNA, 100 bp, Homo sapiens
gtacgctgccgcctggatctgcggggagttctcagattcaatctcatccctcccagcagctccccttccaccccccggggaactgaagattgtcctggcc

SEQ ID NO: 334693 - DNA, 75 bp, Homo sapiens
aggaccagacaaatcaaattagtggttttgattttcagctgaactctcatctctcaacactggcaaatattcata

SEQ ID NO: 334694 - DNA, 110 bp, Homo sapiens
aaagcgaccattgagctcaaggccctcaggctgctgaacttccagaggcaggacacatttgacatccggatcctgatggccaagtctgtcaagtacacggtgaacttctt

SEQ ID NO: 334695 - DNA, 90 bp, Homo sapiens
cgttgtctaaatttcggtagccatggcacaagaatatacaactttcatcctttgaaacgtgtgctgaaaaagaagaatcagcaaatacta

SEQ ID NO: 334696 - DNA, 100 bp, Homo sapiens
cagtttttacggcagtcactgcctaccagaatcaactggtatttcaggagccagcagaggaagaacgagatggcagaaaaaagaaatatcctagtcccca

SEQ ID NO: 334697 - DNA, 100 bp, Homo sapiens
ttgtcttcattcactttcccccctcagtttctgaaatgattctccagaatttctcctcataaaaaaggcatacccagatggaagtagcaaagaaaagaga

SEQ ID NO: 334698 - DNA, 87 bp, Homo sapiens
tgcattagccagattggacatatgtaaagggacatcagtatatctggatcatcaggtgatgatgaacagtctacacagatggctgca

SEQ ID NO: 334699 - DNA, 98 bp, Homo sapiens
ctcggcgattatggacccggccgaggcggtgctgcaagagaaggcactcaagtttatgaacccagtgacttgattgtaaaaatttacagagcggaatc

SEQ ID NO: 334700 - DNA, 59 bp, Homo sapiens
caggtccgggtgaaagcctactaccgcgggtgattttacaacgagatgctgctctccat

SEQ ID NO: 334701 - DNA, 82 bp, Homo sapiens
ccgggtaccggccgtggaagcggccaccgactactgtcagcagctgtgccaggttcccagtctaagtgggtgactttccaag

SEQ ID NO: 334702 - DNA, 100 bp, Homo sapiens
aaattctcagcaaggaacgtcatcgacacagaatttccaggtgttgtggtgcgaccaattggtgaatttcgtagttccatagattaccaatatcagcttc

SEQ ID NO: 334703 - DNA, 101 bp, Homo sapiens
ctgacacgaagctgtacgacatcctgggcgtcccgcccggcgccagcgagaacgagctgaagaaggtacatcaggaacgtctctatcaagaatacaatttc

SEQ ID NO: 334704 - DNA, 83 bp, Homo sapiens
gactcatggaggctgagcatttattcagcctctgacctttttgagcctgggaaatgcttaccttgctctgaagaatatcagtg

SEQ ID NO: 334705 - DNA, 88 bp, Homo sapiens
gagggtgcctgggaatcggtcgcctggaggaccagtatttcccatggagggtacggttcctggagcagcagaacaagatgctggagac

SEQ ID NO: 334706 - DNA, 83 bp, Homo sapiens
cgagacggcgatccgggcgctcgagacttaccagagccacaagccttatgccagcctggaccatcttggaggcagtgtaggat

SEQ ID NO: 334707 - DNA, 100 bp, Homo sapiens
ccgagctgacgtggcttgaattgggaggggggcagctggagcctcaggcggcagcgcttctagctcaaactggaggattataaggatcgcctgaaaagtg

SEQ ID NO: 334708 - DNA, 50 bp, Homo sapiens
cagggaaagataacaggcaacgtgatacaatccgtgattctaactgcaac

SEQ ID NO: 334709 - DNA, 101 bp, Homo sapiens
ggacggcggggcctgggggaccgagcagcgggaggctgtctttcccttccagcctggaagtgttgcagaggtggagctgaagaagggagccactctcaaaa

SEQ ID NO: 334710 - DNA, 83 bp, Homo sapiens
gtccgtgcggcagcagctccagagctttgtcaaagaaactacaggatctcatgcacatctcacgggcccggaagccagcgttc

SEQ ID NO: 334711 - DNA, 90 bp, Homo sapiens
cttttgttcttgaggagtactgatcagttcctctgtgacgagggtgcaggtatctctggggactacatcgatcgcgtggacgagcccttg

SEQ ID NO: 334712 - DNA, 85 bp, Homo sapiens
gtcacaaaacagcagatttcccaagagcagcggaaaatgatccagtcacaggtgcaagttttgaaactgcttttgaatttgtctg

SEQ ID NO: 334713 - DNA, 100 bp, Homo sapiens
ctcccagcccggtgagacctgcctgaatggcgggaagtgtgaagcggccaatggcacggaggcctgcgtaggtcctatacgttgcttgtggaggcgtggg

SEQ ID NO: 334714 - DNA, 75 bp, Homo sapiens
ggaagccgaaaacaccctgcaatctttcagacaggctaaagaattacctccaaagccattgtcaagaccacagca

SEQ ID NO: 334715 - DNA, 102 bp, Homo sapiens
actgtccggtcagaatagagggtatgcatttatcaccttctgtggaaaggaagctgcacaggaagccgtgaaactgggttctgagcaaggttcaaccagtca

SEQ ID NO: 334716 - DNA, 50 bp, Homo sapiens
gattcaatgtcatccagagcccagagcagttccagggtcacccccgagag

SEQ ID NO: 334717 - DNA, 116 bp, Homo sapiens
gttaggagcgcagtggcggcgcaaccagccttctagggcggcggagatgccttcaattaagttgcagagttctgatggagagatatttgaagttgatgtggaaattgccaaacaat

SEQ ID NO: 334718 - DNA, 60 bp, Homo sapiens
caaacttggaaagagcaagatcggcagccctaaaaatgtttcatccatttgtggaccaaa

SEQ ID NO: 334719 - DNA, 88 bp, Homo sapiens
ccgctccgagtggaggcgactgggggctgaagagcgcgccgccctctcgtcccactttccagggtcgaagctgctgaagtggtttttc

SEQ ID NO: 334720 - DNA, 82 bp, Homo sapiens
tcggcgggagccagcgagccacgggagcgagccaggtaatcattaccaaatgaggaggaaaggacgatgtcatcgaggctct

SEQ ID NO: 334721 - DNA, 75 bp, Homo sapiens
gcctggagaggcactcggacctgaatggtgagcgaactgcggggagccggtgggagctcattcagactgcacttc

SEQ ID NO: 334722 - DNA, 74 bp, Homo sapiens
gctgccacgcctggaacaaggaccgcacccaaacccttgggagagcagttccgaaaagaagttcacattaagaa

SEQ ID NO: 334723 - DNA, 82 bp, Homo sapiens
agagtctggagtttatctggagtgaggtggccggttcttggtgggatctgagcagagtttattaaccacttaacctctcaga

SEQ ID NO: 334724 - DNA, 100 bp, Homo sapiens
tacagaaccttgatccgccatttagcattgatgggaagatggtagctgtaaacctggccactggaaaacgaaggttttggggccttgtcacagatgccag

SEQ ID NO: 334725 - DNA, 83 bp, Homo sapiens
gaccatcgccggagcctgaggacacttctctgtcgtcacagttagatgagcaatggcaggcgctggtgagcgcaaaggcaaga

SEQ ID NO: 334726 - DNA, 75 bp, Homo sapiens
agagagcccagtgggaggtggagcgggcggagctgcagctaaaagatggcggcaaggcagcccaggcaaatgtaa

SEQ ID NO: 334727 - DNA, 83 bp, Homo sapiens
ggcgttggaggccaccgtttccaggccatgcggaccctcagttggaagcacaccctgggcctggtgaccatggacgtggagct

SEQ ID NO: 334728 - DNA, 83 bp, Homo sapiens
cagagaaggaggaagtaatggggctgtgcataggggagacactgaggatgctagtgaaactgacctggcaaagcatgatgaag

SEQ ID NO: 334729 - DNA, 89 bp, Homo sapiens
tttattgcttcctactgttaccaaagagtactcgggagagcctggcttccaacacatcaagcattgttgaaagtaaccgtcgtcagaac

SEQ ID NO: 334730 - DNA, 100 bp, Homo sapiens
gtctgagggagatggtgacaagctcaaggcctgcgaggcgcaagcaaactgtcgagtaggagttgcagcactgaatactctagcaggctatattgactgg

SEQ ID NO: 334731 - DNA, 50 bp, Homo sapiens
ccagaggccagtggcactcccagctcgaatggcattgtgcccatcgtgga

SEQ ID NO: 334732 - DNA, 87 bp, Homo sapiens
gcttcgtggcccggcaccgttccgcggacgtgctcgattggcggcagtaagcacacaatgaatgatcacctgcatgtcggcagccac

SEQ ID NO: 334733 - DNA, 100 bp, Homo sapiens
tgggaagaaacctggaggcttttcttagagtttgaggttccatcaatggtgagcaccagcctgaatgcagaagcgctccagtatctccaagggtaccttc

SEQ ID NO: 334734 - DNA, 100 bp, Homo sapiens
ctttggcaagatcttcaagccctggaaatggaggaaaaaaaaaagtagtgataaatttaaagagacttcagaagacgatgacagtgagcctattttgggg

SEQ ID NO: 334735 - DNA, 83 bp, Homo sapiens
gcgcccggcgcccctgagccggccgagcggcgacggaccgcgagacctgcctagagctggaacgttacctccagagcgagccc

SEQ ID NO: 334736 - DNA, 75 bp, Homo sapiens
ggaagatggcggatctggaggagcagttgtctgatgaagagaagctcactgttaatgaagcggctgctcaactct

SEQ ID NO: 334737 - DNA, 74 bp, Homo sapiens
cctgctcccggagggagacgcgctgccgaggagaacccagcgggaatcagagatcattgatttcttcctggggg

SEQ ID NO: 334738 - DNA, 100 bp, Homo sapiens
ccgcagcagagacgacgcctgcagcaaggagaccaggaaggggtgagacaaggaagagatctgcgagtgaagagggacgagggaaaagaaacaaagccac

SEQ ID NO: 334739 - DNA, 89 bp, Homo sapiens
ggtggcccaggaggcggcaggacggccaagaccagcgcgagggccctgggcaaggcccgacagcactattcctgatcagagaactccag

SEQ ID NO: 334740 - DNA, 100 bp, Homo sapiens
gggcaactgggccatgagagggaaggaaacaagccaggtgagaattatgaagatgatgacctagtaaattctgatgaggttatgaagaaaccatgtccag

SEQ ID NO: 334741 - DNA, 82 bp, Homo sapiens
gcacatggtgggggccacaccatttgccgtggccaggctagaggtccctgtgcgttttattgcgacctgccggtgggaactt

SEQ ID NO: 334742 - DNA, 75 bp, Homo sapiens
cgccgcaagcaaggcaaaccccagcacttaagcaaacgggaattctcgcgcttgggcactgtttaaaggaaagtt

SEQ ID NO: 334743 - DNA, 120 bp, Homo sapiens
ggaagaccgcgcgcagggcctgcagcgggagctggacggcgagcgcgagcggcgcgagaaatgtggacgaatgtggaacctcgctctgtggctgtgttcccttggcactccttagtcccc

SEQ ID NO: 334744 - DNA, 50 bp, Homo sapiens
ggagaaaccaggcagtggcaaacagggacatggatgaaattggaaatcat

SEQ ID NO: 334745 - DNA, 102 bp, Homo sapiens
cgatttgaaaaaatggacaacctgctgcgggatcccaaatcggaagtgaattcggattgtttgctggttttaccaattcttgagattctgtatcatgttgaa

SEQ ID NO: 334746 - DNA, 98 bp, Homo sapiens
ctccgcggggtaatggggggtcagagtgccggaccccagcacacagaagccgagacgagcaatggtggaacaaagcggcaaaagatatcccatcaaaa

SEQ ID NO: 334747 - DNA, 74 bp, Homo sapiens
ccacgcgctcctcgccgtgctcagtgcctgttacttgggcaccccgagggtggtgatcatgaactcgatcctgg

SEQ ID NO: 334748 - DNA, 100 bp, Homo sapiens
ttctcctcgaggctgggcagccttgtccgcggcatcacagccctcacctccaagcacgtgtcatggagaaactccagctgggcccagagattctgcagcg

SEQ ID NO: 334749 - DNA, 82 bp, Homo sapiens
aaccacaggcctcaagtggaacctcagaaaccaagtgctacctcctggagcttctcttggaaatgggctcacaccagaggca

SEQ ID NO: 334750 - DNA, 113 bp, Homo sapiens
ggcactggacggggaatcaagagacccggtttctaatccctgctctgtcactaacaagctgcgtgatcttcgaaactggcagacctttcacttcgtatccaacaaattgaaac

SEQ ID NO: 334751 - DNA, 80 bp, Homo sapiens
aaaatgccatacaggacactgtgagggaacaagaccagagtttcacgaaaaccatgagctgttttccaagagcttcatct

SEQ ID NO: 334752 - DNA, 100 bp, Homo sapiens
ggcggaggaggaggaggctggagtgggcgcggaggcgaccgccatggcgttcctcaaactccgtgaccaggcaaaaatctccagccctacagagactgag

SEQ ID NO: 334753 - DNA, 83 bp, Homo sapiens
gcccacaagcagatctactactcggacaagtacttcgacgaacactacgagtaccggcgtcgaccagaagattatgatattca

SEQ ID NO: 334754 - DNA, 75 bp, Homo sapiens
ctgggagccgcgcacaccaccatcacttacctaatggtgtcctcagttgtgggcttctatagctctccactcttc

SEQ ID NO: 334755 - DNA, 100 bp, Homo sapiens
gctcttcccaaattccttcaatgataaattttgtgatcagatgatgggactttgaacatgtcggggatcgccctcagcagactcgcccaggagaggaaag

SEQ ID NO: 334756 - DNA, 82 bp, Homo sapiens
attttcataaagaaccacatccgtttccccaaattcaacttctccaagctgttttggagtcagcggaagatcaccaaggcca

SEQ ID NO: 334757 - DNA, 75 bp, Homo sapiens
tccgaagactacaaaaagcactatgttgttgtctgcattcaaaagagcattctattaaagctaccttaatttggc

SEQ ID NO: 334758 - DNA, 50 bp, Homo sapiens
caaatccgggggcaaggccaaaaagaagaggcatttcatccttcatgaag

SEQ ID NO: 334759 - DNA, 75 bp, Homo sapiens
tatgattaggccacaatcttcaatgagtaaacatattcctacttcccaagtaagaagcggaagaggagccgctgg

SEQ ID NO: 334760 - DNA, 76 bp, Homo sapiens
gctcctgcagcgagagctcacggaattcctctcgactctcttgagcctgagggatccattacagtttcaatgggta

SEQ ID NO: 334761 - DNA, 99 bp, Homo sapiens
tttgtaaaattgacagagaggggaaaccccgtaaagtggttggttgcagttgtgtagtagttaagatattctctaagccgctttcatcatgggagaaat

SEQ ID NO: 334762 - DNA, 90 bp, Homo sapiens
gcgattacaagacgattcacctgtccagcatccgaccaccgaggctggagggggagaacacccaggttactcactataaacaatatccac

SEQ ID NO: 334763 - DNA, 50 bp, Homo sapiens
aaatctggaggcagtatcacctaacggaattaagtagactggctggacag

SEQ ID NO: 334764 - DNA, 100 bp, Homo sapiens
cccctctccacgtccacctacgtcctccaggaggcatctcacaacgtccccaaccagagttccgagtcacttgctgttttttgaggaagagtctcgctac

SEQ ID NO: 334765 - DNA, 89 bp, Homo sapiens
acgtccagaagaccaagtacctgcagatcctgacctctctgatgagatggatcgacaatgcagatcttcgtgaagactctgactggtaa

SEQ ID NO: 334766 - DNA, 90 bp, Homo sapiens
gggcgcgcagctcgcgggtctttggacaccaccggtcctgagtccgcggacctgattggggatatgagggagcagctttcggatcacttc

SEQ ID NO: 334767 - DNA, 76 bp, Homo sapiens
aggaggtcgtccgggtgctgcaggcggttgtggactctctccaaggcctcaggcccaggcccaaggccaagtgaga

SEQ ID NO: 334768 - DNA, 75 bp, Homo sapiens
ctgacgtggaactttctggtgttatgttcagccccctcaagagtgctgatctgggacgatgcccgggagggcaag

SEQ ID NO: 334769 - DNA, 98 bp, Homo sapiens
agtgcagacgcagtggtggccctggagcagtatgccagcaagattatgtttgagaccttcaacaccccggccatgtacgtggccatccaggccgtgct

SEQ ID NO: 334770 - DNA, 75 bp, Homo sapiens
ggagggtcgaggcggcgcggcctgaggttgatggacggatggctacatggatgtgatggagatggtttactatcg

SEQ ID NO: 334771 - DNA, 88 bp, Homo sapiens
cgccatggctgcgtcggagctctacacaaaggcaaaacccatttatggcggttggctgctcctggctccagatgggaccgactttgac

SEQ ID NO: 334772 - DNA, 98 bp, Homo sapiens
gccgcacggccccggccccctcccagcctgccgctccggagagccgcccgccgaggatgcgacgcaccgcaggggtgagcccctccagactccgaata

SEQ ID NO: 334773 - DNA, 90 bp, Homo sapiens
cccttccccacgcaaccccagatccatttacactttacaatctgactgcagccatgagcagcaatgagtgcttcaagtgtggacgatctg

SEQ ID NO: 334774 - DNA, 98 bp, Homo sapiens
ttcaaccttcatgaaaccattactaaggtttctgctttgggacaaccatacatctaattccttaaagtagttttatatgtaaaacttgcaaagaatca

SEQ ID NO: 334775 - DNA, 83 bp, Homo sapiens
cgttgcgagaagttggaagtgtgaaagcattgatggaatgtgctttagaagttaaaaagctccctgtgctgtcaggaatctac

SEQ ID NO: 334776 - DNA, 90 bp, Homo sapiens
gcttgatgtcttcatcagtattaaaccaaagcccaaacagccaagcaaggaccagttacagaagtggatccgcggtaatgtgagtgcatg

SEQ ID NO: 334777 - DNA, 100 bp, Homo sapiens
ctctgcgctcctgcatctgcctccccatttgatgcggcagttatatcatgaatgtacgcttgtccatgctgacctcagtgagtataacatgctgtggcat

SEQ ID NO: 334778 - DNA, 76 bp, Homo sapiens
aacctcatcgctgcgacgaaaaattttatcatgtgggcaacctgctgcaactggttctgcctggatggacagcctg

SEQ ID NO: 334779 - DNA, 100 bp, Homo sapiens
gaaacccgcggcgaccacagccaaagcgggcgagtccatagaggccactgtattctattgaagaacatgtctaacagtaacactactcaagagaccctgg

SEQ ID NO: 334780 - DNA, 80 bp, Homo sapiens
tcagaagacagagggttttcttttgaggcttactgtggatttctccgtcctggagtttcttcagagaatctttctgcagt

SEQ ID NO: 334781 - DNA, 100 bp, Homo sapiens
cctgccagtaacacaaaattaatagcaatgaaaactgagaaggaggagatgagctttgagcctggtgaccagttccagatgttgaagtgaaaggagagtg

SEQ ID NO: 334782 - DNA, 100 bp, Homo sapiens
aggtgacagcaatcagctggcctggtttgatactgacctgtaaatcatcctttagaacgtatgaaggtcaactccctgtgctggccatcacagatcccga

SEQ ID NO: 334783 - DNA, 82 bp, Homo sapiens
gacgagctgaccctgggagacatcgacggcctccggtgtggctgtctctgatggtgtcatcaaggtgttcaacgacatgaag

SEQ ID NO: 334784 - DNA, 101 bp, Homo sapiens
ttgaagcctttcagagacagatctttgatgaagatcagaatgatccccttctgccagaaaagaggccagctctgcagccccctcggggacgcccccaccag

SEQ ID NO: 334785 - DNA, 96 bp, Homo sapiens
cagatgtgggagacacgccaaagctcccaagatatggaggtaccacatggttctcagagcagcgaaagttttcagtttcaaccaccattacctcct

SEQ ID NO: 334786 - DNA, 97 bp, Homo sapiens
ggtctccccatgtaaggtgactgcaggtcagcacttatcaccccgcacctgtctctccaggacattccacagccgtggtcagtctgcctggctccca

SEQ ID NO: 334787 - DNA, 75 bp, Homo sapiens
aaggggtctagatgtaaatgtcagtggaaaggagagctaccatcactaagtgcccaccagaagtatgtccgacaa

SEQ ID NO: 334788 - DNA, 95 bp, Homo sapiens
ccacctcctcctccagacgctctcagcagacttgagtcctggtccttctgcagaggcctgagcagatgaaggatttgggggcagagcacttggca

SEQ ID NO: 334789 - DNA, 90 bp, Homo sapiens
cacaacaccatctggcagcagatttcagcgggagcagccatggacagcccacctgaggatattgaccataaggactcatatctcattaca

SEQ ID NO: 334790 - DNA, 90 bp, Homo sapiens
tgcgggactcttttgacatcatcaagcgttacatggacggcatgaccgtggctctttccttcggggaacaagccgggcccttgctggccg

SEQ ID NO: 334791 - DNA, 50 bp, Homo sapiens
gtgctttctgtcccagaactccaggaaggatttgatgccctggatccctt

SEQ ID NO: 334792 - DNA, 100 bp, Homo sapiens
gaggagtataaaatccagtcctttgatgcagagacccagcagctgctgaagacagcactcaaagggattgtcaatgaggcagatcagattccgatttgac

SEQ ID NO: 334793 - DNA, 150 bp, Homo sapiens
tttgagactcgatttgaaaaaatggacaacctgctgcgggatcccaaatcggaagtgaattcggattgtttgctgagaagcctgtgtctcccaaatcaggaacactgaagagccctcccaaaggatttgatacgactgccataaacaaaa

SEQ ID NO: 334794 - DNA, 90 bp, Homo sapiens
ctcaaaatggcagcatccttcggacctcaccacgcgatcatctttcgtaagatcagtgatgtgaagaaagaggaggaggagcgcctccgg

SEQ ID NO: 334795 - DNA, 100 bp, Homo sapiens
acagagagaagagattgacacactaaagatgtccagtaagcagccaaaggattacctgatatggattcttcgatccttatacaccacaatggaggtatcc

SEQ ID NO: 334796 - DNA, 98 bp, Homo sapiens
ggacggcagcggccaagcaagaagaaagacgtggcagcaagcgggagtcggggatagtgtcatcggttcgggctccgtaggcaccaactgcaaggacc

SEQ ID NO: 334797 - DNA, 100 bp, Homo sapiens
tttacatgcattatccagggaccgaagtgactgtctaggagagcatttgtatgttatggtgaatgccaaatttgaaggcctgaggagcgatgcgacaggc

SEQ ID NO: 334798 - DNA, 90 bp, Homo sapiens
gttgtcggcgccgcggccgctgcggacggacgctcgcctgccggctgaggcctcgaaaaagcccaagacagcagaagcagacacctccag

SEQ ID NO: 334799 - DNA, 100 bp, Homo sapiens
ggaacctctacaacgaaggtgaagccacggaagataaggattttttatcaagcagaaatgcatcgaacaacgagaatcaagatcactgagctaaatcccc

SEQ ID NO: 334800 - DNA, 82 bp, Homo sapiens
gctaccactgcggctactgcgattccaaggagggcaaagcgtcctgcgaaccgggctgtgggtcggcccaaggggaagctgg

SEQ ID NO: 334801 - DNA, 100 bp, Homo sapiens
aggcaccgggatcgtgaccgagaccgtgaccgagagcgtgaccgagagcgcgaatatcgtcatcgttagaaggtggatccttttcataccttatttggaa

SEQ ID NO: 334802 - DNA, 100 bp, Homo sapiens
gtggcataggttatgaagctaatcctggcgttccaccagcaaccatgagtggttccatgatgggaagtgacatgagctccactggttcaacagcctctcc

SEQ ID NO: 334803 - DNA, 76 bp, Homo sapiens
ccttgactacggaggggttgccagattgactacttcaacaatcagatcattgttgacctcgtggagcaacagcaca

SEQ ID NO: 334804 - DNA, 122 bp, Homo sapiens
gatgggatctgcactgtaactgctggacccaaggacatggtggtcgggcactgcctccttacctgtgaggaatgcaaaataaagcatggattaagtgagaagggagactctcagccttcagc

SEQ ID NO: 334805 - DNA, 100 bp, Homo sapiens
tgaacggactgtcagacagggccaaagaagccaaggagtttctggtacagctgcgcaacatggtccagcagatccagccgattcgaagacagtctcttac

SEQ ID NO: 334806 - DNA, 50 bp, Homo sapiens
agtattgcaggacaagagatttaagggtgaatctgtaaaatatttcctgg

SEQ ID NO: 334807 - DNA, 50 bp, Homo sapiens
ctcactgcagcctccgcctcccagcaccccccggggaaagacattttctg

SEQ ID NO: 334808 - DNA, 87 bp, Homo sapiens
agggtcggaccccagtaccaggcggtggtgcccgacttcgaccccgggacttgccatgaggtgttgaagccttgtttcactgagttg

SEQ ID NO: 334809 - DNA, 82 bp, Homo sapiens
gcctagaatgcatcagtgcccttgtggcgaatggggctcacgtcgattgttcctgaaaatgataggcccaacccatggccag

SEQ ID NO: 334810 - DNA, 100 bp, Homo sapiens
acgagggccccgggcggacgccgcagagcgccgaggaggctttcctgctggtggcaaccgcctacgagacactcaagagccgagactgtctgaagctggg

SEQ ID NO: 334811 - DNA, 100 bp, Homo sapiens
gccgagccgcaggagagacacgctgggccgaccccagagcggcgctggacagggatggaagcttcctggcgccaggtggccggtggccgaggccgatccc

SEQ ID NO: 334812 - DNA, 100 bp, Homo sapiens
ctgctgcttgctgaccaaatgcaccagtggcagttcgcagcctccaggacttggctcgcatcgccatccggggcaccattaaaaagattattcatcagga

SEQ ID NO: 334813 - DNA, 100 bp, Homo sapiens
tgatgacaatgtctttgttccaccagagtcattgcaggaagtggatgagttccacctcattttagagtatcaagcaggccctggccaacgtcaacattgg

SEQ ID NO: 334814 - DNA, 100 bp, Homo sapiens
cctgccgcgccccatccgcaacctggaggtcaagttcaccaaggtttccaatacttatctacaggaatcgccatgaccccagctctgagggaggcaacag

SEQ ID NO: 334815 - DNA, 100 bp, Homo sapiens
gcagtaaattcttcagctgctcggacagatgaagctccccaaggagctgcaggtgactattatatggttaaaaagattttggaggaaaacagttcaggtg

SEQ ID NO: 334816 - DNA, 100 bp, Homo sapiens
cttccagtgttcgccgagaggtaccgggggtgacagctccgggaccggccgaaaggcgaggaaccgaatagcctaacatggcagaccagagacagcgctc

SEQ ID NO: 334817 - DNA, 50 bp, Homo sapiens
taacaccctgtaacagctgagacccattccaacaatctcgtaaaacatgg

SEQ ID NO: 334818 - DNA, 83 bp, Homo sapiens
tatttgtggctgccacctacaagctcatggatcatgtggggactgagccatccattaaggagaatgagtccctggaacgccag

SEQ ID NO: 334819 - DNA, 75 bp, Homo sapiens
tactcgagtatatatctgggatccacataatggagacattctgatggaatttggcatgctaatcacctacgacga

SEQ ID NO: 334820 - DNA, 76 bp, Homo sapiens
catccgaggtgcctttctccaaaagccccaggatgctcccctgcgcctcctgcctacccgggtctctactgctctg

SEQ ID NO: 334821 - DNA, 80 bp, Homo sapiens
tcgagcgtcccaccggctggaaatgcttcgtttaccacttcgccgtccatcgacgagtacaagccccaggatgctaccac

SEQ ID NO: 334822 - DNA, 100 bp, Homo sapiens
acctgcagcaatccctttgagtttccaagtcaggatatgtgcctttcagctttaaagagaattgaagaaatcatatggcagagagactctgtgaatgtaa

SEQ ID NO: 334823 - DNA, 100 bp, Homo sapiens
cgctgttgctggtctctggctccctcctcccagggccaggcgccgctcagaacgatggactctgtgactacatgactaataaaatatggcagaaatgaca

SEQ ID NO: 334824 - DNA, 90 bp, Homo sapiens
cacacagctgcttccattggccagtatgaagtggtgaaggagtgtgtgcagcggattgacttctaaagactcttggtacgtgaggaagaa

SEQ ID NO: 334825 - DNA, 75 bp, Homo sapiens
aggaaaagtggcagtggatgatagtgagtgctcaagtaaagctctttgtgacagggcttttcagcttaaatcaag

SEQ ID NO: 334826 - DNA, 80 bp, Homo sapiens
tcaagatcgagttcatcgggcagatcggtggaggcaatgcccagagctgtggcagccaccttgcagccgtgaagcaccag

SEQ ID NO: 334827 - DNA, 98 bp, Homo sapiens
cctcatcatctactccttcgtcttctgggaatccaaatgagactcagaacaatagcacaagctggcctgtcttcaaaagcactgaacaaaaatatcta

SEQ ID NO: 334828 - DNA, 100 bp, Homo sapiens
tgcagccccaagacagagcgctactcctggcagtgcgtcaatcagagcgtcctgtgcggttaattatagaaaatgccaagtaggaaatttgccgatggtg

SEQ ID NO: 334829 - DNA, 98 bp, Homo sapiens
ctggagccactcaggtttttcctaagctcaactctagccagctaggttcctggtgctttggggacatgcgtcgggatgtccaggaaatttttcgcatg

SEQ ID NO: 334830 - DNA, 74 bp, Homo sapiens
gcaaaacttcacgtagcggtgaaggtgaccaagaatatggcccaggtgaccaaagccctggacaaggccctgag

SEQ ID NO: 334831 - DNA, 75 bp, Homo sapiens
tgagcccctgccagagaggctggaggtagatgacattaatgctgataagaatatctcttctgcacagattgttgg

SEQ ID NO: 334832 - DNA, 51 bp, Homo sapiens
gctccctggaggaaaccagtgcattgtccatttgggaatggatgatgaagg

SEQ ID NO: 334833 - DNA, 82 bp, Homo sapiens
cagcgggagctggacggcgagcgcgagcggcgcgagaaaggttgtgagtcccggcccagcccctccacccccctgccccccc

SEQ ID NO: 334834 - DNA, 100 bp, Homo sapiens
acgtgcagaccatccgaagcctgtaactgtgaaaccagtaacaacggaacctggtcttccaggtcctttgggccctccaggtccggcaggtcctactgga

SEQ ID NO: 334835 - DNA, 100 bp, Homo sapiens
gaatggagcaaaatggcggatcatgtgcagtattctaccttgtaaatactgttatttgtatatactgtaaatgatgacatcggtgggcactaaccgagcc

SEQ ID NO: 334836 - DNA, 75 bp, Homo sapiens
cgaaaaatgtcacccttggacaagatgtctggcgataaagggatttctgccttccctgaatcagacaaccttttc

SEQ ID NO: 334837 - DNA, 90 bp, Homo sapiens
aaagcaagtgaatacgagtcagaagaggcggggtttcaccatgttgcccagactggtcttgaactcctgagcttaagcaatccacctgcc

SEQ ID NO: 334838 - DNA, 98 bp, Homo sapiens
gcacggactgctggagatggtggagtccgtcagagagaagcctcatcagtgccaagtctgtgggaagaccttctctcagagtggaagcaggaatgtgc

SEQ ID NO: 334839 - DNA, 75 bp, Homo sapiens
ggaacacaccgtgaacgccagttggattgcagttcagcctgtgccatatttcgggaggctgcaaggagggctcac

SEQ ID NO: 334840 - DNA, 90 bp, Homo sapiens
ctttatatagaagggagagtagagctaaaacgtcatcctctcttcagtgatgtggactgggaaaatctgcagcatcagactatgcctttc

SEQ ID NO: 334841 - DNA, 75 bp, Homo sapiens
cttcattctccccgagtggcgctaagaggaatgtttgctgggggattgaaggagatggaacaggaagaggtcctg

SEQ ID NO: 334842 - DNA, 74 bp, Homo sapiens
cttgtccagaactctgtcaaatgaagaacactttcaagaaccaggccctcgggaccaaggatcacgtcatgact

SEQ ID NO: 334843 - DNA, 75 bp, Homo sapiens
agaacaacaaggtgttgatgccgccggacgggttctggctggtgtggaccatcatcatcatcctgagctgctgct

SEQ ID NO: 334844 - DNA, 100 bp, Homo sapiens
atcataatagatttaaaaatatagaggaatcttggatccaaaaatatgacagcaaaccagtccagctacgggggcccagccagccagcagctgagtgggg

SEQ ID NO: 334845 - DNA, 50 bp, Homo sapiens
tggagatgaagcctaagaatatgatcagtgcttcttcgggcggaggagga

SEQ ID NO: 334846 - DNA, 74 bp, Homo sapiens
tactttcccatcaggtttcctgatgtgagcagatgatgataattccgaagaaggcttccacactattcattcag

SEQ ID NO: 334847 - DNA, 75 bp, Homo sapiens
acagcaactctgatgtggagttcttgaagcaactaagagatgtgtgcacagacccaggccatgcagatactggtg

SEQ ID NO: 334848 - DNA, 89 bp, Homo sapiens
gtagaaatgagaatgacagctgtgataaaaaaaaaattcatctgggcggtatctggaacttgcatcctggtggggaagaagttttaagg

SEQ ID NO: 334849 - DNA, 87 bp, Homo sapiens
aagtgtgcattttgacagagatcttccagaatttggggtatttgaagtataccatacaactgttttgaaaatccagcgtggacaatg

SEQ ID NO: 334850 - DNA, 100 bp, Homo sapiens
agaaggagggtcctctcagtgattaagagcttaaagcagcgcctgggtaagagtaacatccaggcacggttaggccgacccataggggccctggccaggg

SEQ ID NO: 334851 - DNA, 95 bp, Homo sapiens
gccaggtagagtgaagtcctacagagttatcaggttccagaccctgccttctcttctgaaagtcgacttgggaataagtgtcaagacggataatg

SEQ ID NO: 334852 - DNA, 82 bp, Homo sapiens
gcgcagaatggtggccacctggatgctggaggtgtcatcaatcttacagaagaagtgctgtgggtcaaagtgaatataaaca

SEQ ID NO: 334853 - DNA, 49 bp, Homo sapiens
gaagaagttccagcttttggggtatgtgacgcattcccagactcttcag

SEQ ID NO: 334854 - DNA, 75 bp, Homo sapiens
gcgatattgtcattattgatcagttcattgacaggtgctgttcctataatcagatgttcaagaggaacagcagca

SEQ ID NO: 334855 - DNA, 75 bp, Homo sapiens
gcagccggtgtgacctgtcccttcaggtgctggagaatctggtaaaagcaccattgtgaagcagatgaggatcct

SEQ ID NO: 334856 - DNA, 100 bp, Homo sapiens
ttgatgcgtcacactacgacagtgagaaaggagagacccactgctaaggagttattgaagcacaagtttatactacgcaatgcaaagaaaacttcctact

SEQ ID NO: 334857 - DNA, 73 bp, Homo sapiens
ctgcctcagcctcccgagtggctgggattacaggtgtctgcttttggggcagagttttcatcggaggcatgca

SEQ ID NO: 334858 - DNA, 82 bp, Homo sapiens
gtgccaagtccagagcctccaggctgagacagaatccttacgtgccctgcatttgcaagtgaggaagcagcacaaccctggg

SEQ ID NO: 334859 - DNA, 98 bp, Homo sapiens
ggcggacgggaaggcgggagacgagaagcctgaaaagtcgcagcgagctggagccgccggagggcttgctttcagaaatcctccgaaaggaagaggac

SEQ ID NO: 334860 - DNA, 100 bp, Homo sapiens
cccagttcagatgggacttccccgcgtgacagcacagagataacggccagccctgggcgaagatcgaacaccagggggacaagctggagatggcgagaga

SEQ ID NO: 334861 - DNA, 100 bp, Homo sapiens
tatggtgaaacaccactgaagcattgccaaggaccgtataatagacgctggccccaaaggaaactactctcgatttatgaatcacagctgccagcccaac

SEQ ID NO: 334862 - DNA, 97 bp, Homo sapiens
aatggcacttcattggccacctacagaaacaaaatgtcaacaaattgatggacgtgcagttcctggcctcggtgctgcccccagacacggatcctgc

SEQ ID NO: 334863 - DNA, 96 bp, Homo sapiens
caagactacaagagatcagtcattacaatagcaacttctgttgataagttgggaatggccttgatgaagatgacaggcatggccggggtcagctct

SEQ ID NO: 334864 - DNA, 90 bp, Homo sapiens
catgaaggaccgaacccaggagctccgcacggacctcagcagccatgtcgaagccccatagtgaagccgggactgccttcattcagaccc

SEQ ID NO: 334865 - DNA, 82 bp, Homo sapiens
ctaaaaatgcagaaccattgatcaatttggatgcccggtcctttggagtagaatggattgcaagttggctagtggtcacggt

SEQ ID NO: 334866 - DNA, 50 bp, Homo sapiens
attcagaaggagcaggattaccaaagggtctctaattaacagaagatggc

SEQ ID NO: 334867 - DNA, 101 bp, Homo sapiens
ctgcttgcccggcccccgcctgcctccgccggctacagcgggaagagcggtgctggagaatctggtaaaagcaccattgtgaagcagatgaggatcctgca

SEQ ID NO: 334868 - DNA, 75 bp, Homo sapiens
gcgcgagtgaggaaaggaggtactgtaggtttatcatgttcattccgatagctatgagacagaaaaccagcatta

SEQ ID NO: 334869 - DNA, 98 bp, Homo sapiens
ggcgccgggagctattgggacctgcgggagccagcaccgctctttgaccttgccatgcttgccttagatagtccagagagtggctggacagaggaaga

SEQ ID NO: 334870 - DNA, 99 bp, Homo sapiens
catggctcagccgggaactctgaacctcaataacgagctccaattaaggaacagctatatcctgcttccttctgtaagcagcatcgacttgtgcaaggg

SEQ ID NO: 334871 - DNA, 100 bp, Homo sapiens
tcacctgagagacggagccccggctcgcccgtgtgcagaggcagttgtgaaaaacttcaggacaaaaatgtttcatttaaggacttgtgctgctaagttg

SEQ ID NO: 334872 - DNA, 100 bp, Homo sapiens
aacaggaccttaaggagaaggaagatactattaaacagaggacaagtgaggttcagtttgcttgcctaaactggacttgaagcaatttaaactactggag

SEQ ID NO: 334873 - DNA, 90 bp, Homo sapiens
gccttcttcaacaccccggagaagagcgtggtgagcctcttccacgacccgccaggttctgctccagacgagcccttaccacgttgactc

SEQ ID NO: 334874 - DNA, 100 bp, Homo sapiens
gttgaccaagcaagcttccaggttgatgcctttggaacgtcattcattctcgatgtcgtgctaaatcagttgcaccattactcagacttctaaagagact

SEQ ID NO: 334875 - DNA, 100 bp, Homo sapiens
gatgttcagcagcgcggcagagtcatggggccgacatcggcctggctgcctggggacgcaaggccctggacattgctgagaacgagatgccgggcctgat

SEQ ID NO: 334876 - DNA, 100 bp, Homo sapiens
cctgaagcctcttgtcccttcattgtcatctgcttttgagagcatagagcctctggaccccagtgagaaggctaacaaagtcttggccagaatcttcaaa

SEQ ID NO: 334877 - DNA, 75 bp, Homo sapiens
tcttgagaaaatgtgccacctctcaggacagtgaggaggaatttggttctgagcgagatgagtaccgggagaagt

SEQ ID NO: 334878 - DNA, 104 bp, Homo sapiens
cgccgattcctcctccttggtcgccgcgtccttggctggcgtgaagcgccgcggagccatcaacagcaagcagctcacctacctggagaaataccggcccaaac

SEQ ID NO: 334879 - DNA, 124 bp, Homo sapiens
gtgtgggcagtgcccgtaagaagctggatgcttccatcctggaggaccgggataagccctatgcctgtgacagcaaggggatcaggcgagtgaagccgaagcgcaccacatccttcttcagccg

SEQ ID NO: 334880 - DNA, 75 bp, Homo sapiens
agcacccctccgtggagtccgtggtccagtgtgagatcgacgaggtgggaatggaagtggccccacatctcaaag

SEQ ID NO: 334881 - DNA, 100 bp, Homo sapiens
ccaacctcatgaatctcatcgccaccatctttgtctttgcagtggtcatctatttccaggcccagaccacactgaccacaaatgacattgtcattagcaa

SEQ ID NO: 334882 - DNA, 83 bp, Homo sapiens
gttgaaccagctgtgggagaaggcccagcgagtcctggaccggatcaaaggctcactgctgccccggcctggccacaactttg

SEQ ID NO: 334883 - DNA, 82 bp, Homo sapiens
cttcgggatttgcgacgctgtcacaggttccagggtataccccgcgaatgaaggtgctggagaatctggtaaaagcaccatt

SEQ ID NO: 334884 - DNA, 82 bp, Homo sapiens
cccgccgccgccgttggctggagactgggcggtgatcaggatctgaatgcacagggcgggtgttcagcgattgtttactacg

SEQ ID NO: 334885 - DNA, 98 bp, Homo sapiens
tccggataaaggagctgggaggtcctgattatggagatgcagactcatctgagcgtatcattgctcccatgcgctggggcttggtcccttcttggttc

SEQ ID NO: 334886 - DNA, 74 bp, Homo sapiens
ccgatcttccgacaagcccatccggacccctagccggagcatgcatgccatggacaatattaccaggcagaacc

SEQ ID NO: 334887 - DNA, 75 bp, Homo sapiens
cccccgcaggcgcccgcggcagcgaacggccaagcagatagaacttcagttcactattggcgaagccattaccag

SEQ ID NO: 334888 - DNA, 90 bp, Homo sapiens
gagtacaagaggatgccctgatggcagttagcacactggtggaaggacaagcaggaggacatgaagactattttggagggcatagatccg

SEQ ID NO: 334889 - DNA, 75 bp, Homo sapiens
ggcacccagtgctcatggtcaccggcttcgtcttcatccagggcatcggaaaaccaattctgtgtcctcggagga

SEQ ID NO: 334890 - DNA, 100 bp, Homo sapiens
gggcgcctggaggagctgtaccgcggcatggagccggcatcatggattccttcaaagtagtgctggaggggccagcaccttggggcttccggctgcaagg

SEQ ID NO: 334891 - DNA, 100 bp, Homo sapiens
atctcgtacaagatccttctttgtctataatgacggatctatactacctcagtcagacagatggagcaggtgattggcgggaaaaagaggccaaagatct

SEQ ID NO: 334892 - DNA, 100 bp, Homo sapiens
ctcagatgttgttgatgaagtaatacagaactgccccatcgatgtgcggcgcccgctgtataagacagagtctcgttctgtcacccagcctggtgtgcag

SEQ ID NO: 334893 - DNA, 74 bp, Homo sapiens
cgcggtggtcaagcgggccacgcacctcgtcaccaaggccaagctttccccagacatggccaacaagggtcctt

SEQ ID NO: 334894 - DNA, 97 bp, Homo sapiens
ccagtctgagtgtctgtccccagagcctcagtttgtgcaggacaccgacatggaacagggactcactggggtactttttggggatcctgaaagccaa

SEQ ID NO: 334895 - DNA, 75 bp, Homo sapiens
cggactcagggacacgccggctaccacctgagccggcacctgaactcctggggggaccgtcagtcttcctcttcc

SEQ ID NO: 334896 - DNA, 100 bp, Homo sapiens
cgcagaatctaccaacttcgccaccctgcggtggattgactacggcaaagtggccactcaggacccttgaacatctgtgaagaaatgactattctgcatg

SEQ ID NO: 334897 - DNA, 50 bp, Homo sapiens
agcctcctgaggagctgggattacaggctttgtagctgagcagtttctaa

SEQ ID NO: 334898 - DNA, 100 bp, Homo sapiens
gcccaaaggaaaaagtggttctggaaaagcggggaaagtgggctcgggatgagtttgaaggcctcttcaagcagccagcagaaaatgtcaaccagtacct

SEQ ID NO: 334899 - DNA, 100 bp, Homo sapiens
cgagatgctgatggggccttcacctgctgcaccaatgacaaggccacccaggtgcagtggtccagctgcaacatcttctccacccaggaccatgcggcgg

SEQ ID NO: 334900 - DNA, 100 bp, Homo sapiens
tcggtggactccttcggcagtccacccaccgccgccgcctcccaggtctctaattaacagaagatggcaaagcccagccacagcagctatgtccttcagc

SEQ ID NO: 334901 - DNA, 83 bp, Homo sapiens
atttgcagtgaggcccctaaagaggtagcatctccgcccccacttactgatactcctgacactacagcaaatgctgaaggaga

SEQ ID NO: 334902 - DNA, 100 bp, Homo sapiens
cagacccgcacctacgacggcgacggctacaagaagcgggccgcatgcctgtgtttccgcagcgagagcgaggaggagcctcagcaccccaatcagatga

SEQ ID NO: 334903 - DNA, 98 bp, Homo sapiens
gtgagcgctgagcccttggcagggccatgtttatgagtggactaagtgaaagcaaacaaacccatgtacacctgaggaatgtcgatgctgccacctta

SEQ ID NO: 334904 - DNA, 77 bp, Homo sapiens
gtgatttggccaccaaactcctggacagttggaaagacctaaagggacttcagtactagtgctaataacatccagat

SEQ ID NO: 334905 - DNA, 75 bp, Homo sapiens
atgatgccccacttggtgaatggagatgcagctcagcaggtttcagtgttgactggtgggctcttggagtgctca

SEQ ID NO: 334906 - DNA, 100 bp, Homo sapiens
tgtctgtacctactgatggtgctgtaaccacctcacagattccagcttcggaacaagagaccctgttcctctgtgacgagggtgcaggtatctctgggga

SEQ ID NO: 334907 - DNA, 73 bp, Homo sapiens
agagaaaggtgttcgtggagcggatgcgagaggcagtccagctcataccatgggtccaaaacgatgaaggatt

SEQ ID NO: 334908 - DNA, 99 bp, Homo sapiens
agagagaagaacattctcgaatacctagaatgggatgcctgtgaggagccaccaacatttgaagctatggagctcattggtaaaccaaaaccctactat

SEQ ID NO: 334909 - DNA, 50 bp, Homo sapiens
cctgtaggtttaattgcaggtgccagctcctgagatagtcaactatgaac

SEQ ID NO: 334910 - DNA, 100 bp, Homo sapiens
cgacggcagcggtcccagcggcagcagcagcggcgggaggagcctccgggcttcgagagctgtgcccaggagtgaacaaccagccctacctctgtgagag

SEQ ID NO: 334911 - DNA, 83 bp, Homo sapiens
gtcgtcggcctctgggcagcaggtcgaactggaaggtacacccttatagagaaatggagagatactgaaagacacttagcacc

SEQ ID NO: 334912 - DNA, 133 bp, Homo sapiens
tgccttgcggatttgctgccatgaaggatgttcgtactggaagtcatgaggacagacctggaatggccaaatatcaaggtgaagttcaaagtttgaaactggatgatgattcagttatagaaggagtaagcga

SEQ ID NO: 334913 - DNA, 75 bp, Homo sapiens
agacagcccggaatatcaagattcatctttttcactaattgtggcattcacagtggaaagccagatgacatcacc

SEQ ID NO: 334914 - DNA, 100 bp, Homo sapiens
aatttgcctccacttagtgagcggaagaatgatgtggaagatgtcaagtttgtgatcaactatgactatccaaacagctcagaggattatgtgcaccgta

SEQ ID NO: 334915 - DNA, 80 bp, Homo sapiens
attcagaaaagaagaagaagagggatactcccatgctgccaaaggataacaaagccattgacctttgccgattgtgttgg

SEQ ID NO: 334916 - DNA, 100 bp, Homo sapiens
aggacacccaatcaccgggcaacaggggagtacgtgctcatgatccgcgacgtgaccaccccgccgttcctggggcgcaggctgcccccggccttcaaac

SEQ ID NO: 334917 - DNA, 100 bp, Homo sapiens
agacgtggctcctgctgcacatgtatgacagtgacaagcccatgactgaagagttgctgaaacaacaaaagctgaattcacatgagaccactataactca

SEQ ID NO: 334918 - DNA, 51 bp, Homo sapiens
ggagctggaatgactggcaacccagtccagttacaacacagggatcacaac

SEQ ID NO: 334919 - DNA, 113 bp, Homo sapiens
gcaacttacccgagaacgtgcgggaagagaagatcatcgagcatttcaaacgacaatgcagatcttcgtgaagactctgactggtaagaccatcaccctcgaggttgagccca

SEQ ID NO: 334920 - DNA, 83 bp, Homo sapiens
gaggcagtgtgtgaagctgggacgccagccatgttccagaccgcttggcgccagatctgactgcagccatgagcagcaatgag

SEQ ID NO: 334921 - DNA, 49 bp, Homo sapiens
ggaagtgctgctgatgtgcaacaaaacctgctaaggctgcctcagacct

SEQ ID NO: 334922 - DNA, 75 bp, Homo sapiens
atttctcctgctctgcagcttctgttcagggatggttttagattgtcatctcaagaagctgcttctagttttggc

SEQ ID NO: 334923 - DNA, 99 bp, Homo sapiens
caattccatttggggaccagagatggacggtcactcagcctatggagattgtgaagatggaaagggtccaacccctggaagagaatgtgggaaatgcag

SEQ ID NO: 334924 - DNA, 80 bp, Homo sapiens
atccacggggtgctgcagatcctgttccagccattgagacccagagcagcagttctgaagagatagtgcccagccctccc

SEQ ID NO: 334925 - DNA, 90 bp, Homo sapiens
gcgccatggcccccattggcctcaaagctgttgtcggagagagactatctcaagcaggtgctggacattgatcttcatgctcagatccat

SEQ ID NO: 334926 - DNA, 82 bp, Homo sapiens
ctcctcacagccagtgaccttgcagccagtgacctcaaaggatttcagccacaggtagacagattggaagtcgtcaacaagc

SEQ ID NO: 334927 - DNA, 100 bp, Homo sapiens
cgggcgccaccccgctgtcccgagcccggagcctcgccattcccgacggacagagcgggatgccaccagcttgtccaaagggaagttccaggagctcctg

SEQ ID NO: 334928 - DNA, 99 bp, Homo sapiens
tttgatattagtgaagatgagccactgtggaagaagtatatttctcaggaggatacttcatcgagacttaaagtcaaagaatgtatttctgaaaaataa

SEQ ID NO: 334929 - DNA, 100 bp, Homo sapiens
ctggagcagctcatgcggcattactgcctttgctgggcaaccaaaggaggaaatgagcttgtggtggacacttcaaccctgcggtgtccctggcagccat

SEQ ID NO: 334930 - DNA, 90 bp, Homo sapiens
cgaagccatggccctggaggcggcgggagggccgccggaggaaacgctgtcactgtggaaacgattttcagctgaactctcatctctcaa

SEQ ID NO: 334931 - DNA, 82 bp, Homo sapiens
aaaggaatgaacatgtatttaaccaagttccaacaaaagaatgctgccgcaggtttggtgcacctcgatttggaggaagtag

SEQ ID NO: 334932 - DNA, 100 bp, Homo sapiens
cgcacaaggacacagcctgggggatggactgggcccttccacttaccagagaaaaatggctacaaacttcctagcacatgagaagatctggttcgacaag

SEQ ID NO: 334933 - DNA, 100 bp, Homo sapiens
tcagacattaactggcttgttcaaaggagacaagtgtcacagcctggttggaaaacccaagatatttatcattcaggctaaagaatccctgaaacaggcg

SEQ ID NO: 334934 - DNA, 75 bp, Homo sapiens
ggagcaattgaagctgactactaaggagaataagttggtgttggtattaggagatctgcacatcccacaccggtg

SEQ ID NO: 334935 - DNA, 50 bp, Homo sapiens
ctcccaagtagttgggactacaggtgcatgccaccacacccagctaatta

SEQ ID NO: 334936 - DNA, 82 bp, Homo sapiens
tgcagagtgctgaagacggggtagccacgaggcttggcttttttgtgggggctcctaattctcctaaaatatcggtggcgaa

SEQ ID NO: 334937 - DNA, 90 bp, Homo sapiens
acaggaaaattttctcctttgtgccagtgggactggaaggatcaccagcacatatgcggccagtcagcagctgtcaccgtccaggcagac

SEQ ID NO: 334938 - DNA, 100 bp, Homo sapiens
ctttcctgctggtggcaaccgcctacgagacactcaaggtggtgcaggcaacaggaggtcctgaactagccagttcagtacttagtcccctattgaataa

SEQ ID NO: 334939 - DNA, 82 bp, Homo sapiens
agaagaggatcgacgcctatgtcgacgagcagacaggggcaagtgtccgagtggtgaatcagctacttacagagatggatgg

SEQ ID NO: 334940 - DNA, 75 bp, Homo sapiens
ctcctggagggcctcccaagccctggcctgaaggtaccagccatctttccatggagtggacctgtcggccctccg

SEQ ID NO: 334941 - DNA, 101 bp, Homo sapiens
gagacccggggaagaaggaccagaaggagtcagaggaggagttagaggaggaggaggaggaggaagaggtggacatggaaggcaacgaacaggatcaggac

SEQ ID NO: 334942 - DNA, 112 bp, Homo sapiens
gtcgattgcactttactgggggatttgcctcagatggagttacaggcactggtgaggtggattgatgatgaatcttctggcacacctggagcaactccagaacacagtcgtg

SEQ ID NO: 334943 - DNA, 75 bp, Homo sapiens
ctggaaggaagcgactgcactgatccaggttgaaaactaagcatggggaagagctgcaaggtggtcgtgtgtggc

SEQ ID NO: 334944 - DNA, 100 bp, Homo sapiens
tcggcatcgggcgacagcaggtcacagtggacgaggtgttggcggaagtacgaggatgtcgtccaggaaagattgtgcagatgactgaagcagaagttcg

SEQ ID NO: 334945 - DNA, 100 bp, Homo sapiens
ccgagagcgcgaatatcgtcatcgttagaaggaagctgttttaggttatgtgaaagagatgtttcctcatctctaaggcttaccagaagctctgatttga

SEQ ID NO: 334946 - DNA, 75 bp, Homo sapiens
gcccagtcctcggtgcggcgcggccagtgaccatgcagcaggtggccaggacagtggctaaagtggagctctcag

SEQ ID NO: 334947 - DNA, 83 bp, Homo sapiens
cgggctctgaggatgagctggaggagggggataaagataaagtttctctaaccaagaccccaaaactggagcgtggcgatggc

SEQ ID NO: 334948 - DNA, 87 bp, Homo sapiens
attgaaattatctctggtgctgcagctcttgctgtgctgtggctttcattgagaagctagacgcccagtctttgaatctaagtcagg

SEQ ID NO: 334949 - DNA, 80 bp, Homo sapiens
aacaaaggcgacccaagacacccagagagggacagtgtcgggcggccgaagcacatgcgggtgatggctggagccctgga

SEQ ID NO: 334950 - DNA, 75 bp, Homo sapiens
caagctgaacttccggaaggcggtgatccagctcaccaccaagacgcaggaattggtggagagaaggcgcaccat

SEQ ID NO: 334951 - DNA, 75 bp, Homo sapiens
cctcaagatgctaatgtggtcttcaaaagagcagaagagttggactaaatgctcttccttcagaggattatccgg

SEQ ID NO: 334952 - DNA, 90 bp, Homo sapiens
cagaggatgcagtggaggccatcaggggccttgataacacagagtttcaagggtaagcttgatgattaccaggaacgaatgaacaaaggg

SEQ ID NO: 334953 - DNA, 100 bp, Homo sapiens
gaaagtgctctggatgccacagggtggtaatttgtgcatggaaaatggctggggtgaagaggagactaggattcaaccctatgaaaagataaaggccagg

SEQ ID NO: 334954 - DNA, 88 bp, Homo sapiens
gccgacaaggaggtgaagcggccccagcactcccagctgcgcagggcctgccaggtggcgctcgtattaattttaaagacccacagtt

SEQ ID NO: 334955 - DNA, 90 bp, Homo sapiens
aatgctcgacggaaggcagcgccgcggatcgaatgatctgccgacaccccaggccatcgagccccaggccatcgtgcagcaggtcccagc

SEQ ID NO: 334956 - DNA, 82 bp, Homo sapiens
tggctctccggcaccggtccgtactccagcgaggtgaccatggaggaagaagatgagtctcgagggaagacagaggagtcgg

SEQ ID NO: 334957 - DNA, 75 bp, Homo sapiens
ttgaagcagttttctcagctgcctgctaacatagctgtttgcagttctaagtatgaatctgatgaacaagaaaag

SEQ ID NO: 334958 - DNA, 95 bp, Homo sapiens
aactatagagtttgtggacagatttatattgggtgagcagggcagcatttccttctcccactgctgctgagatggcagaaattagtcgaattcag

SEQ ID NO: 334959 - DNA, 83 bp, Homo sapiens
gctgccttctgctctccagcgctctcagcaccaagtgtgggcagaagaaaaagctagtgatcaacagtggcaatggagctgtg

SEQ ID NO: 334960 - DNA, 51 bp, Homo sapiens
agaatgctaaggaagctgtggcaaatcgacctgatgccccatgacctcatc

SEQ ID NO: 334961 - DNA, 99 bp, Homo sapiens
ctactgggaaattgatattaggaccacaagaagaaaagggaaagcagcatgttggccaggatatattgcagaggaagaaccgatgctggaacgtcgttg

SEQ ID NO: 334962 - DNA, 82 bp, Homo sapiens
tcccactctgcatggtgttccacatcattgacttactgctttgtgagcttcgttgtgtggaagatcttcagacaattcaagt

SEQ ID NO: 334963 - DNA, 75 bp, Homo sapiens
agtcccactatgcgctgcccctgggccgcaagaagggagccaagctgggaggagtctgctactagtcttatcagc

SEQ ID NO: 334964 - DNA, 100 bp, Homo sapiens
agagcgtgaagatcaagatcgatctttaatctcatgaagtacgacagctacagccgcttcttaaagtctgacttgtttttaaaacacaagcgaaccgagg

SEQ ID NO: 334965 - DNA, 90 bp, Homo sapiens
gctcagcaacatcgctatgcaggtgcggaagctggtgggcactcagcaccctctgcttaccacagccagacagcgtttgtttgaaaattt

SEQ ID NO: 334966 - DNA, 98 bp, Homo sapiens
aaagcacaaagcatggagaccctccctccaggtgggatgtgtgtgggctgaaattccgagctgcggttgtgcatgagaatacacccttcgtggtaccc

SEQ ID NO: 334967 - DNA, 96 bp, Homo sapiens
cagccaggagtcatgagcgacagcggcgagcagaactacggcgagcggacatgtccatcttcgggcactgccctgcccatgatgacttctacttgg

SEQ ID NO: 334968 - DNA, 100 bp, Homo sapiens
cgtcagtaatgcctggaatgatgatgtctcatatgtctcaggcttccatgcagcctgccttaccgaggagaattctgcctaagccaactcgaaaaagccg

SEQ ID NO: 334969 - DNA, 83 bp, Homo sapiens
ggcaggggcagcgggagccggccggggaccaatcccccagaggtgggaaaatgtggaggagccaaacctggatgagctgctgg

SEQ ID NO: 334970 - DNA, 75 bp, Homo sapiens
ggcgggggcgacagggccgattccggagtgggttgtttacattcagagctctatcaataagaggaatacatatta

SEQ ID NO: 334971 - DNA, 100 bp, Homo sapiens
ccagatgaggacccggaggaccctccgtgggcacctggcaaagatctatgccatgcactgggggaccgactcaaggttccaagttccccatcaagtggac

SEQ ID NO: 334972 - DNA, 100 bp, Homo sapiens
cttttgtggcgctcttgctcctctctccttggcctctcctgggatcggcccaaggccagttctccgcaggccctcgggaccaaggatcacgtcatgactc

SEQ ID NO: 334973 - DNA, 75 bp, Homo sapiens
caccagcaatgaatgagcgttccagcttctccgataagccgtatctttttctgaggcctgcagcattaagatggg

SEQ ID NO: 334974 - DNA, 75 bp, Homo sapiens
gatggggatggggcgttgtcagaagcggaagctcagggcctggagaacagctggcgccagcaccgcgaggccgcg

SEQ ID NO: 334975 - DNA, 72 bp, Homo sapiens
catacgatgtgcctaatccagttcattttccagacactgaaagagcagaatggctaaataaggtaagattag

SEQ ID NO: 334976 - DNA, 101 bp, Homo sapiens
tgggagtgggctagaaggggaccacctgtctgacacctccacaacgtcgctggagctcgattcacggttgtttcacgaagaaatccagaggatgtccagga

SEQ ID NO: 334977 - DNA, 100 bp, Homo sapiens
ggacaatttgctcaacatggcctacggcgtcaagaggaggtagaagaggatgatccagtgcctgagatccgtcgagatcactttgaagaagccatgcgct

SEQ ID NO: 334978 - DNA, 82 bp, Homo sapiens
gctgctggggacagctgctggtgtggttcggagccgcggatgccatggacaatattaccaggcagaaccaattctacgatac

SEQ ID NO: 334979 - DNA, 88 bp, Homo sapiens
ttcgaggcgccgccgccgccgccgcagccgccggagccgcaatgcctaaaggaggaaactctgatgaggaagaaagtgcttcagaatc

SEQ ID NO: 334980 - DNA, 74 bp, Homo sapiens
tgtataagagtatgtgtctcactgcaccttcaatggcattgagtagtactatactggcaattgctggagaagat

SEQ ID NO: 334981 - DNA, 110 bp, Homo sapiens
ccggcctcaccatgttggtgctgtttgaaacgtctgtgggttacgccatctttaaggtttggtgcacctcgatttggaggaagtagggcagggcccttatctggaaagaa

SEQ ID NO: 334982 - DNA, 51 bp, Homo sapiens
agtggaaccaacccagccgaccccccaggccaaacgtaccaagaaagtcgg

SEQ ID NO: 334983 - DNA, 120 bp, Homo sapiens
aagaagaccattcagatgggatctttccggatcaatccagatggcagccagtcagtggtggaggtagagttggctttgtgggacacagctgggcaggaagattatgatcgcctgaggccc

SEQ ID NO: 334984 - DNA, 100 bp, Homo sapiens
cccgtgccgcgtctccgcgttcccagcccgggtccccgcgttcacagccccagcgcaggagccaagttacaccctgtttaaccctgccttcaaagggacg

SEQ ID NO: 334985 - DNA, 74 bp, Homo sapiens
gagacaccaaagaagagaaagacaaggatgaccaggaatgggaaagccccaggccgactgcagcagtggcccag

SEQ ID NO: 334986 - DNA, 75 bp, Homo sapiens
ttctggactttgggcgtcccattgccatggtaaccacctgctgttccaacaagtgcccatggttgaaattgacgg

SEQ ID NO: 334987 - DNA, 109 bp, Homo sapiens
atatgatgagcgtctagagattaacgactccgaagaggttgcaagtatttatactccaaccccaagacaccaagattggagctggagtgagccttccaggaattttggc

SEQ ID NO: 334988 - DNA, 100 bp, Homo sapiens
acaagccagagatgaatgtggttttgaaaaatgtcaaaccagaccaatgggtgaaggatgcaatgcagtatgcttctgaatctaaagatactgaattggc

SEQ ID NO: 334989 - DNA, 82 bp, Homo sapiens
caccgccgccccctccggcgtgttcatgcccccgggttggaatcgaagcctcttaaaatggcagatgacttggacttcgaga

SEQ ID NO: 334990 - DNA, 85 bp, Homo sapiens
ggattccaagtaactcttatttgtttttcagaagaagtgaagtcaagatgaagaaccatttgcttttctggggagtcctggcggt

SEQ ID NO: 334991 - DNA, 82 bp, Homo sapiens
cggactgaagctggtgcgcaaggacagggaaaatggagctgatagtatcctggatcttggattagtagactcctcagaaaag

SEQ ID NO: 334992 - DNA, 76 bp, Homo sapiens
ccaggttccaaatcatcaatgaagcaagtaagaatggtggtttggcctggagtgatgatgcagatggaggccgggg

SEQ ID NO: 334993 - DNA, 51 bp, Homo sapiens
gcaggagctggcgtctctggagaaaggtgatctgtgaaaatggttcgctat

SEQ ID NO: 334994 - DNA, 126 bp, Homo sapiens
gcagatcgccgtggtgggcggccagagcgccggcaagagctcggtgctcgagaacttcgtgggcagagatatgaatcaggttcttgatgcctatgaaaataagaagccattttatctgtacacggg

SEQ ID NO: 334995 - DNA, 83 bp, Homo sapiens
ctgactctgactctcggactgagaaacgcaagggctggaccccaatggagaacaggtggtgtggcaggcgagcgggtgggcag

SEQ ID NO: 334996 - DNA, 100 bp, Homo sapiens
ctggaagttataacgctacacgaagaactaagaatattattagcacaagagcaccatactttgaggatggctctgagtaaatcaatgcatgcaagaaata

SEQ ID NO: 334997 - DNA, 75 bp, Homo sapiens
cgagaggtaccgggggtgacagctccgggaccggccgaaaggcgaggaaccggaggaggaagccaagaatctggt

SEQ ID NO: 334998 - DNA, 117 bp, Homo sapiens
cgaggagagcacggaccgcacgcctcttctaccgggcgccccacgggccgaagccgacaatgcagatcttcgtgaagactctgactggtaagaccatcaccctcgaggttgagccca

SEQ ID NO: 334999 - DNA, 75 bp, Homo sapiens
gtgagacccatggctcactggaggaggccatgctcactgtggatgcggcccccttcctgccagccccctgccctt

SEQ ID NO: 335000 - DNA, 50 bp, Homo sapiens
aaaaattctaggaccaaaacctcagagaacgccagatcaagtgtcccaag

SEQ ID NO: 335001 - DNA, 74 bp, Homo sapiens
tgccggcctagcgtcctggaattacttcaatcaagaaagctgaactagaagcagctgtgagaaagaagattgaa

SEQ ID NO: 335002 - DNA, 114 bp, Homo sapiens
ctgccgtccttctccactttcgccagcccgtgccgcgagcgcggcctgcaggaggattttttatcaagcagaaatgcatcgaacaacgagaatcaagatcactgagctaaatcc

SEQ ID NO: 335003 - DNA, 98 bp, Homo sapiens
tgagcacaggcctgcggtacaagagcaagctggcgaccccaggtgagcacctgcggatctgtccccagggctacacctgctgcaccagcgagatggag

SEQ ID NO: 335004 - DNA, 75 bp, Homo sapiens
tccatttcgtggttcacccgctgccgggcaccgaggaccagctcaatgacagactgattcttgctattccaaatc

SEQ ID NO: 335005 - DNA, 82 bp, Homo sapiens
agcagcgcctgatcgagtccctccggaactcacactccagtttgcagaaaaaacttcagcatgtgccaggaacacaacctca

SEQ ID NO: 335006 - DNA, 75 bp, Homo sapiens
cattgctatttttgcacttcagttcacatactatttatggggccgttgctccagggagaactgcaaatatcttca

SEQ ID NO: 335007 - DNA, 101 bp, Homo sapiens
tgactgcaaaaatgacatcaacattctgaaatgtggcagtattcggcttggagaaaaggaatccgatcatgggacacaaacctgattgaatgcaacttgga

SEQ ID NO: 335008 - DNA, 100 bp, Homo sapiens
gcaaccgctccggcaacgccaaccgctccgctgcgcgcaggctgggctgcaggctctcggctgcagcgctgggtcaaaatgcagatcttcgtgaaaaccc

SEQ ID NO: 335009 - DNA, 112 bp, Homo sapiens
acttggaccagtttactccagtaaaaattgaaggttatgaagatcaggcatgtcaacatcgctctaattcagagataatctgttgtaccactccttccctgcaacagctgaa

SEQ ID NO: 335010 - DNA, 82 bp, Homo sapiens
taacctggagttaaggaacagatccccggaggagccttatgccagcctggaccatcttggaggcagtgtaggatcatggaag

SEQ ID NO: 335011 - DNA, 74 bp, Homo sapiens
tgtcaagacatttcttcggcattctgcaacagtgtccactggctccgtgacgcaggtgtcctcggtgagcacgg

SEQ ID NO: 335012 - DNA, 100 bp, Homo sapiens
gtggacaggagaagcccagctgagagccaacaacatctgcttctacggcgagtgttcctactactgctccacggagcacgccctgtgcgggaagccagac

SEQ ID NO: 335013 - DNA, 97 bp, Homo sapiens
atggttctatgaggaacgagccaagaaatttccaactggagatcttggccctgattgcattcatctgcatagagaccatcatggcatgctccccgtg

SEQ ID NO: 335014 - DNA, 100 bp, Homo sapiens
aaagctgtacaagagatcatgcaggtgatgatccaatgccctttgacattaaagctgagatgacactgaagacaaatttttttgccactagaaacatgtg

SEQ ID NO: 335015 - DNA, 100 bp, Homo sapiens
ggggtctctgatgcctattattgtaaggagtgcaccatccaggagaaggacgccggtctaattgaagccaacggagaactcaaggtcttcatagaccaga

SEQ ID NO: 335016 - DNA, 100 bp, Homo sapiens
cgtgaatccatcgagagtgagattaggcgagaacgagagaggcagacaaacccatcagccatggtatatgatgatggaaagtatgtgtatgtagtaacag

SEQ ID NO: 335017 - DNA, 75 bp, Homo sapiens
ggtgatgatatccgcccagacactgactggcagagtcctggtctacatccggataaaagacgatgaatggaatat

SEQ ID NO: 335018 - DNA, 100 bp, Homo sapiens
aacagcatgggaagcaaaggccatggcagtaatagcgtgtttatctgacacggaccatggaggagcaggacttggagcgaaggttcgagctgctgagccg

SEQ ID NO: 335019 - DNA, 100 bp, Homo sapiens
gcaggacaccgacatggaacagggactcactgggggttcttgattattacagacctctttctgaaaagcccggaattggtacaagccatgtttcccaaac

SEQ ID NO: 335020 - DNA, 101 bp, Homo sapiens
ggaacttggttatggttgtctcaaggcatggaggagtgacggcaggaactttctgtgctctgacaacccttatgcaccaactagaaaaagaaaattccgtg

SEQ ID NO: 335021 - DNA, 83 bp, Homo sapiens
cacgcctcttctaccgggcgccccacgggccgaagccggtgaaagacccctgacaaaagacaatcatcttctgggtacatttg

SEQ ID NO: 335022 - DNA, 83 bp, Homo sapiens
cttctgtctcgactgcactttgagaagctctttcgacgtgtagcagcagctttgccgggaatggaaagcacacaggacagaag

SEQ ID NO: 335023 - DNA, 100 bp, Homo sapiens
catggcagaaggtggatttgatccctgtgaatgtgtttgctctcatgaacatgcaatgagaagactgatcaatctgggatgattctctgaacgactgtcg

SEQ ID NO: 335024 - DNA, 102 bp, Homo sapiens
ctcaaacaggaagatgggagcctctgccttgtacagttcccatcaccaatggcaccagcatgatatcattgatcattcctcccaaagaccagatttcacgag

SEQ ID NO: 335025 - DNA, 100 bp, Homo sapiens
ctcgaagaacagctgtggaaagaagttgcaaaacactggaacttggagcgtgatgcccagaagtgtgtgaactggtctgtgaccacaaagatgagaaccg

SEQ ID NO: 335026 - DNA, 101 bp, Homo sapiens
cactcgctttcctcggattcccggatgtgggccgagacgcatccagagctttcgtgaccggggactgttctgaagcaggcctcgtggatgacgtatccgac

SEQ ID NO: 335027 - DNA, 87 bp, Homo sapiens
ctggaggctgagtacgacagcctcaaacaggagctggagcagctcaaagaggtcacccgccatgtcgaccttgctggacattaagag

SEQ ID NO: 335028 - DNA, 83 bp, Homo sapiens
ccttgtttatcaaagccagcttttgcctctctgctgaggcaacagatcccctaatttgtggctgaaagatgttctcaaggaag

SEQ ID NO: 335029 - DNA, 101 bp, Homo sapiens
aattctgaactcaaagacgacttgcttttgtatcaggacgaggaggcgctgaacgactccattatttctggtactccaaagattcaggtttactcacgtca

SEQ ID NO: 335030 - DNA, 75 bp, Homo sapiens
cgcgccgctgccctccggctccgcgggcggcccacggcgaggtgcttttgaagatgatgatatcacgcacgttga

SEQ ID NO: 335031 - DNA, 73 bp, Homo sapiens
cttcatcactggaattgatgtcacctccaaggatatttggccttgacattaaaggcagagactgtggcaatga

SEQ ID NO: 335032 - DNA, 75 bp, Homo sapiens
tgttccattttgtgcctcctggacacctcagtgttgaattcaactgaaggcgaggaatgttggtgatgaagctga

SEQ ID NO: 335033 - DNA, 90 bp, Homo sapiens
gagcaggtgtatgatcttttggaggaggaggatgaatttgatagagagttttagttactatccagcagaaaacttgatagagtacaaatg

SEQ ID NO: 335034 - DNA, 83 bp, Homo sapiens
ctgcccttcgccaaggagatcgtctctctcatcgaggcccaaaccgccaagcgagttctatgagcctgaggctttaatgatgg

SEQ ID NO: 335035 - DNA, 97 bp, Homo sapiens
tctcagatgaagcggtgaaaaaagattcagagttggataagcacttggaatcacgggttgaagttgttgacctcctgtactggagagacattaagaa

SEQ ID NO: 335036 - DNA, 90 bp, Homo sapiens
cgcgcctcgggccgtcgggagcggagcctcctcgggaccaggtggacgtgcaagtcagagaaatggtgaaactcctgttttccgaagatc

SEQ ID NO: 335037 - DNA, 75 bp, Homo sapiens
cgaaaagcatcctgggttcaggctgacatctgcacttaacaggagaagctgtctttgctcggtgcttatcatctc

SEQ ID NO: 335038 - DNA, 50 bp, Homo sapiens
ggagaggctgaagtcacacaatggattgtattacacagagcatgaatata

SEQ ID NO: 335039 - DNA, 75 bp, Homo sapiens
cgtcaggccgcgacgagggcgctgagatgagcagcaccagcagtaagagggctccgaccacggcaacccagaggc

SEQ ID NO: 335040 - DNA, 96 bp, Homo sapiens
aaatcaagcaattcaaagagcaggtcgtctgcgggacctgcaggctgggacaatgaaaagaaaatagctattttacatgaaaattttacaaccgtg

SEQ ID NO: 335041 - DNA, 75 bp, Homo sapiens
tcgtcatgctctttgtagcgtggtgcttctgttgctcacaggtcacggaaagggagttgaagtctggaggagcca

SEQ ID NO: 335042 - DNA, 100 bp, Homo sapiens
gcgaagtgcgcggcgcccaggcctcccagcagcagtcccgagcagaggtgcgtctgccgatggccccctgaagttgctgcccgagagctacttcgacgtg

SEQ ID NO: 335043 - DNA, 100 bp, Homo sapiens
cagtttgtattgtaccgcataactgaagccactaagacggttagcattgaagaacgtctgggagcaatggatatagacacacacaaaaaaggaaaggaag

SEQ ID NO: 335044 - DNA, 83 bp, Homo sapiens
agatcaaggattcggagaaaggtctctacaggtccctcctcgttagtatagtggttgctgcttttgctcagaggacatccatg

SEQ ID NO: 335045 - DNA, 100 bp, Homo sapiens
catgaccacagtggaccagctcgagtctcaagtggacaatgagatgcccgagtggtaaaagacatggcaacaggaaagtctaagggatatggctttgtct

SEQ ID NO: 335046 - DNA, 88 bp, Homo sapiens
aacacatcaccttgatttttaatcccacggtctgttgcggttctcccacttttccataagcagaacaagaaccaaatcaaacgtctta

SEQ ID NO: 335047 - DNA, 82 bp, Homo sapiens
tggcggagctgacggtggaggttcgcggctctaacggggctttctacaagttgtcgagatgtccacagaaggaggatttggt

SEQ ID NO: 335048 - DNA, 88 bp, Homo sapiens
taaagcttcttaagatatcaggaattattcttaaaacgggagagagtcagaatcaactagacgcaaacatgcagatctttgtgaagac

SEQ ID NO: 335049 - DNA, 75 bp, Homo sapiens
aaaaagtttgtcattaaacccatcgacaagaaggcacctactgcttttcaggaagccttggacgctgcaggtgat

SEQ ID NO: 335050 - DNA, 100 bp, Homo sapiens
tctccaaggcggagatccgctacgagggcatcctctacaccatcgacaccgaaaactccaccgtagcccttgccaaaggcaggaaatgactacatttgaa

SEQ ID NO: 335051 - DNA, 100 bp, Homo sapiens
aaggaagatggcggatctggaggagcagttgtctgatgaagagaaggccctgggaggagcggggacactgaggacctctctccaaattggcctctcaact

SEQ ID NO: 335052 - DNA, 51 bp, Homo sapiens
agcgggcagaaggctggtgacaaggccagaagcctgtcttagatgttcatg

SEQ ID NO: 335053 - DNA, 89 bp, Homo sapiens
gctgtcagaggtgggcggctttgaccgagaggctgctggagctcgtgtttggacgcacttatgaaaatatgcatcagtttaatactgtc

SEQ ID NO: 335054 - DNA, 82 bp, Homo sapiens
gatggatgaagacggcggcggcgagggtggtggcgatcgaaaagtatcctccttgcacacctcccgagttcagaggcagatg

SEQ ID NO: 335055 - DNA, 98 bp, Homo sapiens
gttggaccttccggagcttctcagaagacagagggttttcttttgagaaaagggagatttcattgccctggatcttggtgggtcttcctttcgaattc

SEQ ID NO: 335056 - DNA, 100 bp, Homo sapiens
gaccattaaaggatttgaaactctcgtagaaaaggagtggataagctttggacacaggtttgcactggaatgtatcctgtcaggtataatgtcagtgaat

SEQ ID NO: 335057 - DNA, 75 bp, Homo sapiens
ctgcacatcgtcattgacatccctatcaatgtctacaaggttctgtcagtgtgtgtggaagaagaaaacataatt

SEQ ID NO: 335058 - DNA, 100 bp, Homo sapiens
tggagtttgaggagatggacattttggaccagggagccctacagcgtctcttcaaaaagcttgtggctataggaatgaggaatcacccattggatttgcg

SEQ ID NO: 335059 - DNA, 99 bp, Homo sapiens
gcagaccccaggcatatcctcctcttcatcctggagcacatcatggtggctttaaactccagagaacctcatatgtgtttagtaagagatatttcaaac

SEQ ID NO: 335060 - DNA, 82 bp, Homo sapiens
cctggccgccccgagcggagcctggaggtggtggcggtggcggcccgcgatctgagccgtgcgaaggagtttgcacagaaac

SEQ ID NO: 335061 - DNA, 100 bp, Homo sapiens
cgggatcccagcctcaggcctgcacggacggtgttggttgggtgccaccatggcaactgcaccatacaactactcttacatctttaaatatattattatt

SEQ ID NO: 335062 - DNA, 96 bp, Homo sapiens
ccaaatacgtctgggcagccacggccgggggcgtctttcagagcattacggtttccacttgagcggcacagtgacagaacctgcaatacaatcgga

SEQ ID NO: 335063 - DNA, 82 bp, Homo sapiens
ccagaccaggctccttggtgagaagaccaccacagcggcagttgatattcactgatggactccaaagaatcattaactcctg

SEQ ID NO: 335064 - DNA, 129 bp, Homo sapiens
atttggagtagtttcaaatacaagattgattgctgctgctacttctgtatggaccaccaagctcaccgcagagcgcagcctccgcggacccgaggaccgccctgcgcgcagtctcgagcagcaaccagg

SEQ ID NO: 335065 - DNA, 80 bp, Homo sapiens
ctgcggtggcgtctccacacgggacaagcagatcttttgaaatatgctaagaatgagacattggagaacctgaaacaaat

SEQ ID NO: 335066 - DNA, 100 bp, Homo sapiens
atcctggtcctcgatccgcccacagacctcaaattcaaagataaagaaatgggggctcagagcagtcaagaacatgccccaagttattcgtcagtgaggc

SEQ ID NO: 335067 - DNA, 83 bp, Homo sapiens
agctgtgtcagtagtggacggccagacagagtccccggaggctgtgatgcagatccatccgccctagcaaaatatgttctggc

SEQ ID NO: 335068 - DNA, 75 bp, Homo sapiens
taaagcttgaaatgctacatttccaagcaaggccatcagtgaagagaaagagtgggagaaaaaggtttgaggaga

SEQ ID NO: 335069 - DNA, 97 bp, Homo sapiens
tcacattcctcatggttggttcaaagcaagcaagagaaatggtactagagattatccgagaaaaagaccaagctgactttcggggtgtacgcggcga

SEQ ID NO: 335070 - DNA, 101 bp, Homo sapiens
tgcggatgttagatatacttgcagaatatttgaaatatcgtcaattcccctttcaaagtcaccttatctctctaagccgagaaaagtggcctcctggaggt

SEQ ID NO: 335071 - DNA, 74 bp, Homo sapiens
ccttggaagtggatccttcccccgaaagcccggctttcaggggtccctgtgaaggtgaccaacgtcaaggatgg

SEQ ID NO: 335072 - DNA, 75 bp, Homo sapiens
acgcagcccgtccccaagctggtgatcctggtggagggattgaaatgtctgagttcatccgagaggccacacccc

SEQ ID NO: 335073 - DNA, 74 bp, Homo sapiens
tccttttccctctccctttccctaaggtgaaaggtgtagcagtcactcggcctacacccacagcatcgaccttg

SEQ ID NO: 335074 - DNA, 98 bp, Homo sapiens
ctgccgccgccggccgcctgggaccttgcggtgaggctgcgcggggccgaggccgcctccgagcgccagtaatagctcttcaagtctgcaataaaaaa

SEQ ID NO: 335075 - DNA, 75 bp, Homo sapiens
cctatgaccctggaattactgcaggcagcaagaattattgccaagttagcagcttggggaaaagaactgatggaa

SEQ ID NO: 335076 - DNA, 90 bp, Homo sapiens
cctgttttaagtctttcctttgatcctaaggacatctttctggaaaaccagtgttctctggacatgaaaagcaaactgaatacaagtaaa

SEQ ID NO: 335077 - DNA, 83 bp, Homo sapiens
caaacagtcggcctatgactcgaagcatgcacttaatgaagttgatcctggtgactggcagaaattcgtgaagaagggactca

SEQ ID NO: 335078 - DNA, 74 bp, Homo sapiens
cttaagcacttttaccgaaaaccttctccccagctcgccatggccaaacagctgcaggcccgaaggctagacgg

SEQ ID NO: 335079 - DNA, 96 bp, Homo sapiens
cactttcgaaaagaagatgcaaaggcagcatgaacttagtgaggaagaaatgtacatcttcatggagtactgcgatgaggggactttagaagaggt

SEQ ID NO: 335080 - DNA, 115 bp, Homo sapiens
catgatctggctggacctgaaggaggccggtgactttcacttccagccagctgtgaagaagctgagatctgtatctgtggacctgaatgttgatccctcgcttcagattgacata

SEQ ID NO: 335081 - DNA, 100 bp, Homo sapiens
gagcggcggtagcgcaggggagattacttttctggaaggttacactcctggcacaccttacaaagtgtcctgttcccccaccagcggggctgtgccaccg

SEQ ID NO: 335082 - DNA, 90 bp, Homo sapiens
acaccagtggggcagtgcctcggttgtagatgagcatgagagtgtggagcagagtcggcgagcgcaagtcgagcccatcaacctggacag

SEQ ID NO: 335083 - DNA, 90 bp, Homo sapiens
cccagagctaacgggagtcccagtcaccaggagactaaagtccatcaaaaacatccagaaaattaccaagtctatgaaaatggtagcggc

SEQ ID NO: 335084 - DNA, 98 bp, Homo sapiens
ccttgctcgggatggtgccacaggaggctgtgcgggccccgctccgcttcgaatggattttcagctgaactctcatctctcaacactggcaaatattc

SEQ ID NO: 335085 - DNA, 100 bp, Homo sapiens
tggctgtgctcagggcctctgagggcaagaaagacacaacatttgcctgcaacaaggacagcggccagtggcactactttgatgacaacagcgtctcccc

SEQ ID NO: 335086 - DNA, 98 bp, Homo sapiens
cacgctggtgctggccatcatgctgcagagtggccgggctgagtactaccagttcaaatctacctgatgacatctttgaaaatggaaaggcagccgag

SEQ ID NO: 335087 - DNA, 100 bp, Homo sapiens
gtcgctagcaaacctcatcccgcccgtgaaggccacgccattaaagcgcttcagtcaaaccctgcaggatctcaaagatttcatgagacaagctggggaa

SEQ ID NO: 335088 - DNA, 132 bp, Homo sapiens
gtggcggtggcatgagggtcggaccccagtaccaggcggtggtgcccgacttcgaccccgctaaaccatttacacagctggtgaaagaaatgcagcttcatcgagaagactttgaaataattaaagtaattg

SEQ ID NO: 335089 - DNA, 100 bp, Homo sapiens
ccagaggtcgtggaggtggccgtggaggcagaggtggcatgggatttcttcggtgcagaaaaaaaatgaagatttaggacaggaggaaattgttcaactt

SEQ ID NO: 335090 - DNA, 75 bp, Homo sapiens
ggaaaaacgaccttcgtgaaacgtcatttgactggtgaatttgagaagaaagacatgaggctgagctggttccgg

SEQ ID NO: 335091 - DNA, 100 bp, Homo sapiens
atgccaatcttttagacattccattggaaggctttatcctgtggataaacgcagagtgaacgagtttggggagtcctacgaggagaaggccacgcgggcg

SEQ ID NO: 335092 - DNA, 76 bp, Homo sapiens
actggcatccgttctgatgtctgtcaggcaatgaatcgctccctggctaatgtgattcttggaggctatggcacca

SEQ ID NO: 335093 - DNA, 100 bp, Homo sapiens
ggagattctcagggcaacccagatctcttcagaacttgatgatgatgttccaaaagcaaactgcctctccactgaaagcactgacactccgaaggcccct

SEQ ID NO: 335094 - DNA, 139 bp, Homo sapiens
ccccaatcattggaagatttggaacctcactgaaaattggtattgttggattgccaaatgttgggttggatggcaagcatgtggtgtttggcaaagtgaaagaaggcatgaatattgtggaggccatggagcgctttgg

SEQ ID NO: 335095 - DNA, 145 bp, Homo sapiens
ctcctcaagcccccaaggcccttcggcgggcccctgctgaaagaccggcatgccctattctgtgggcttccgcgaagtgctggagaatctggtaaaagcaccattgtgaagcagatgaggatcctgcatgttaatgggtttaatg

SEQ ID NO: 335096 - DNA, 89 bp, Homo sapiens
cttttggagttccaggactgctcatggtaattgcacttgtcacagttgcagattatatttctagagctgagtctcagagcagacaaaga

SEQ ID NO: 335097 - DNA, 98 bp, Homo sapiens
ttaattctttattgaagacctataacattttttatgagaaccagaaaaatctgcatattttatatggagaggtagcaaaagatatggcagcggcagca

SEQ ID NO: 335098 - DNA, 116 bp, Homo sapiens
tggcacttcattggccacctacagaaacaaaatgtcaacaaattgatgggacttcctccgtcaggcagctggcaggacctgaaggatcacatgcgagaagctggggatgtctgtta

SEQ ID NO: 335099 - DNA, 49 bp, Homo sapiens
acaacaccacaataatccacagccaaggcatccgtgtacaagatttgca

SEQ ID NO: 335100 - DNA, 100 bp, Homo sapiens
ctgctgggctccggggacactttgcgttcgggctgggagcgtgctttccacgacggtgacacgcttccctggattgggtggaatgaatcttacttgttga

SEQ ID NO: 335101 - DNA, 80 bp, Homo sapiens
gcagaaggagcaggctctgcgggaggtggagcacctgaagagatgccagcaggtgaccagcgccatgtccagccaggtgg

SEQ ID NO: 335102 - DNA, 101 bp, Homo sapiens
aaaagcaactgctgcttattgcgggccttacccgggagcggggcctactacacagtagcaaatgcaatggcaccagcatgatatcattgatcattcctccc

SEQ ID NO: 335103 - DNA, 50 bp, Homo sapiens
tgtcaattccagaatacaaactttaccgatttgttacaactcaagcaagg

SEQ ID NO: 335104 - DNA, 100 bp, Homo sapiens
ctggggtgtggaaaaacccggtactgtgcactattctttcccaggaaccattggataaggataaagtcacttatataagaagaaccttgatgtgaccaag

SEQ ID NO: 335105 - DNA, 83 bp, Homo sapiens
gggacccaccgctgccctcagctccgagtccagggcgagggccgagaactactggtggcgtggccagaacacacggacgctgt

SEQ ID NO: 335106 - DNA, 83 bp, Homo sapiens
ccgagcccgtcaccctgagatggagcagaagtcaattcatctggaaagactatctctgagtcagacttaaaccactctttttc

SEQ ID NO: 335107 - DNA, 85 bp, Homo sapiens
gagactaaagctggacacccgcccgccggtgttagacaaacccagtaggctaactgaaaaggaacttgctgaggctgcaagcaag

SEQ ID NO: 335108 - DNA, 83 bp, Homo sapiens
gaacgaggcaaggagctaaagcagcgtgcgttcagccctgggatgggggctccggaggtggcgcccaggctctgagctaccct

SEQ ID NO: 335109 - DNA, 100 bp, Homo sapiens
cgctccggaggaaacggagcgctgccctgcagcccgagcccatcaaggtgtacggacaggaaggtgctcgggtcttcggggcactgggtcccatcggtcc

SEQ ID NO: 335110 - DNA, 51 bp, Homo sapiens
gcgggcggacggcggaggcgcctcccaggaagttggtgaaccatctaaaga

SEQ ID NO: 335111 - DNA, 96 bp, Homo sapiens
cagcactctgggcgaaaattggatgtgaaaatgaagccagaccgaggtgtcatggagaaactccagctgggcccagagattctgcagcgggaaaat

SEQ ID NO: 335112 - DNA, 97 bp, Homo sapiens
ttctgggtgactcagcttcgagcttgtgccaaataccacatggaaatgaattctaagggaacttaggctgcggaactatgtcccggaggatgaggac

SEQ ID NO: 335113 - DNA, 75 bp, Homo sapiens
tactaacgtcctgtgtcactgaggagcatttcatactactgaagctgaagctagttctcagagtttgactcagat

SEQ ID NO: 335114 - DNA, 50 bp, Homo sapiens
ggtccgcccagcagccgcgcttcagccagcgccatcatgaccgggtccta

SEQ ID NO: 335115 - DNA, 100 bp, Homo sapiens
ttacagtgcagtcttatcgaaggatgtgcatgaaggacagcctcttctcaatgagatgaggatgacatcaatgatgtgacttctatggcaggggtcaacc

SEQ ID NO: 335116 - DNA, 50 bp, Homo sapiens
aacaagcgtccctgatccagaaggtgattccagaggggtgactaccatat

SEQ ID NO: 335117 - DNA, 100 bp, Homo sapiens
gttgcgccagtgccccctgcttctgccccagaaccggtcgaaaaccgtgtatgagggattcatctcggctcagggaagcaatgttatggaagatcaggat

SEQ ID NO: 335118 - DNA, 100 bp, Homo sapiens
cccagcaccacagtccttctgcagtccctcgtccagccacccccaggagatcaaagacgctggccttcagacctgatcagactcccaggggcagccacca

SEQ ID NO: 335119 - DNA, 100 bp, Homo sapiens
tggatatgctccatgacaagtggtacagggtggttccctgtggcaagagaagttttgctgtcacggaggtggttattggtggtagaaataaatatttaat

SEQ ID NO: 335120 - DNA, 100 bp, Homo sapiens
gctggcaccgcctgctccagggtgattgacatctctatgatccttgcagaagccatcaggagaactcacaatggagaatccgtttcttacctattcagcc

SEQ ID NO: 335121 - DNA, 90 bp, Homo sapiens
gttgacacttaccatgctgctgcccttaggccactgcagaacaaattagacttgcacagatgatttcggaccataatgatgctgactttg

SEQ ID NO: 335122 - DNA, 83 bp, Homo sapiens
ggcctgcagcgggagctggacggcgagcgcgagcggcgcgagaaaataccggggagaccacgacgctgcctcctgggcgccat

SEQ ID NO: 335123 - DNA, 50 bp, Homo sapiens
aagaagctgacccctgaaggaaacaaagcttccttcaaaatgtctactgt

SEQ ID NO: 335124 - DNA, 88 bp, Homo sapiens
ctgcaaccccgcagagcgcatccatcaaagctttgcgcaacgccaacctcaggcgagatggtgtggatgaggtcaccattgtcaacat

SEQ ID NO: 335125 - DNA, 100 bp, Homo sapiens
tcgtgaaggagctcctggagctgggcagtggagctactgctgtggttcaggcagccctatgcaaacccaggcaagaacgtgtagcaataaaacggatcaa

SEQ ID NO: 335126 - DNA, 75 bp, Homo sapiens
acagctttgatgactacccacctagaagaggtgatgatagctttggagacaggcaattgaaggaacagactaaaa

SEQ ID NO: 335127 - DNA, 83 bp, Homo sapiens
ccaccggaggagcgggagccaagcagggaacggcaggagcagctgatgggatatcggaagagagggccgaagcccaaaccgct

SEQ ID NO: 335128 - DNA, 100 bp, Homo sapiens
gaagcggcagctgaggagactccggcgctcgccatggccgacgaaaagcccaagcccgtggaagccaccgatgatgccttttgggaccagttctgggcag

SEQ ID NO: 335129 - DNA, 75 bp, Homo sapiens
ccaccttcatctccaccatcgggcatatcgatgcatttacttcaaaactttttctactggaagaaattacctcag

SEQ ID NO: 335130 - DNA, 122 bp, Homo sapiens
agacagtgggggaaagcatgggactttttgatgtggagtaaagccagagaaggaaaattcatctactcacagtgtcatggagaaactccagctgggcccagagattctgcagcgggaaaatc

SEQ ID NO: 335131 - DNA, 83 bp, Homo sapiens
ctgaaatgaattcaacaattaatattcatcgcacttcttctggaactgtggctgcaccatctgtcttcatcttcccgccatct

SEQ ID NO: 335132 - DNA, 100 bp, Homo sapiens
tgctctggaattttggcatcaaggacaaacccaccttcatcaaaggggttggatggcaagcatgtggtgtttggcaaagtgaaagaaggcatgaatattg

SEQ ID NO: 335133 - DNA, 98 bp, Homo sapiens
tgaaggagtttggaattgaccctcaaaacatgttcgagttctgggataccactttacctgcattgtgaaggtactttttaccctactgtacacacagg

SEQ ID NO: 335134 - DNA, 100 bp, Homo sapiens
aggcgcctcgggtccccgcaccacctcctgctgccttcccgtcgccgctcccgaagcttttccaggctatgacttctgccaggtcctgcagtggtttgcc

SEQ ID NO: 335135 - DNA, 100 bp, Homo sapiens
ggttgcggctgctgctcctacggatattgcgcaagactggggcgttggaaaccctaataactgaagtgaagtgatggactccgatttggagagtagtaag

SEQ ID NO: 335136 - DNA, 75 bp, Homo sapiens
ccagcctgcggagcctgtggggcagcttgctgatgaccgtatggcactggtgtcaggcatcagcttagatccaga

SEQ ID NO: 335137 - DNA, 100 bp, Homo sapiens
agccaccaacgcgcacgggcgccacgcgcggcgcatcacggtgcgcgtggccgctcctgtgcagaatgaaggccctggggtggagatgctgctgtcctca

SEQ ID NO: 335138 - DNA, 87 bp, Homo sapiens
atgttccagtgcctcgagcgctcaggatggaggaagactcgatccgcctgcctgcgcacctgcctcctctctgctatatgaaatatg

SEQ ID NO: 335139 - DNA, 50 bp, Homo sapiens
attcgtgtcggtcctagtcatcagggacaaactctgcctgggcgagtcct

SEQ ID NO: 335140 - DNA, 74 bp, Homo sapiens
atgaatggagcaaaatggcggatcatgtgcagtttcaccagtgatcattaaagaatgggcagcttacaaaggaa

SEQ ID NO: 335141 - DNA, 100 bp, Homo sapiens
gcacagcgaaggagaagccccagtgcactagccattgaagtatttgaagcacatttgggaagccacattttgcaggctgaggttcaactatgctacctgg

SEQ ID NO: 335142 - DNA, 82 bp, Homo sapiens
gccggtagctgcagctggagcagtggcgtttggaggagactcgggcaagaatatcacggcatgggcatgagtagcttgaaac

SEQ ID NO: 335143 - DNA, 89 bp, Homo sapiens
acccgctgcaggaggcggcggcggacgggtgcagaggcgggctgcgtgcacttcccccacacggcgccctgtgaggtgcgcgtgctcat

SEQ ID NO: 335144 - DNA, 83 bp, Homo sapiens
ccagtcctcatcctggatgaagccaccagcgctttggatgccgagagcgagtatctgacaaactgggaagattgagcctgtgg

SEQ ID NO: 335145 - DNA, 101 bp, Homo sapiens
ctcagccatatgctcctgttttcccggctatgccatcatggcggatggcgtgtcctgtgaagtcttattgttacaggtatcgctgtgctgctcggagccag

SEQ ID NO: 335146 - DNA, 82 bp, Homo sapiens
ggaggagcgaggcagctgtactaggactgggaacggatgcctgtgaggagccaccaacatttgaagctatggagctcattgg

SEQ ID NO: 335147 - DNA, 74 bp, Homo sapiens
ctttttcttcaccttctacacaggctacccgatttggggtgctgtgtttggcttatttcaaaacctttgtccct

SEQ ID NO: 335148 - DNA, 74 bp, Homo sapiens
ctaaagacggcaatgtgctgcttcacgaaatgctgagatctgtatctgtggacctgaatgttgatccctcgctt

SEQ ID NO: 335149 - DNA, 82 bp, Homo sapiens
ctactgctgcctctgtcactcctggtgaccagcattcaaggtcccagaacagttttcttctgggctccaattatgaaatggg

SEQ ID NO: 335150 - DNA, 100 bp, Homo sapiens
ggcaagaggaaaaacaaagcagccgaaacacacccagacgcacacttctgccaagcatagccaccacgtttgtgaagtgtggatatgcaggctctaactt

SEQ ID NO: 335151 - DNA, 96 bp, Homo sapiens
tgaccgaggcgcctcgctggggcggggaccttgccttgcccgggagaaactccagaaaatcttgccaaacttctgaccaggatgtatttaaaatca

SEQ ID NO: 335152 - DNA, 88 bp, Homo sapiens
gacttcaacatgatggagcaaaagaagagggtgtccatgattctgcaaagccctctggaggagaaagctcgcctagaagcagaggcca

SEQ ID NO: 335153 - DNA, 112 bp, Homo sapiens
gagatctcctgtgctgcgaccactgcccggctgccttccacctccagtgctgtgagggagactctgatgtggactcggagctggaggaccgtgttgacggggtcaagtcctg

SEQ ID NO: 335154 - DNA, 101 bp, Homo sapiens
ggcaatacaaagcagcgtatcgatgagtttgaagcaatatttggagcaagaggtggtggtggccttcccccgaagaaatttggtaatcctggggagcgttt

SEQ ID NO: 335155 - DNA, 97 bp, Homo sapiens
ttcttcgctaccccacagcttctgctcatggatctagtgaaaagccatttgatgtatgcggtcagagaagaagtggaggtcctcaaagagcaaatca

SEQ ID NO: 335156 - DNA, 100 bp, Homo sapiens
gcagccagttactatggcagttgcaaaatattcaggagaccgtcgttgccttgtatttccagagaacaggtgtagaatgagccaaggagactcaaaccca

SEQ ID NO: 335157 - DNA, 75 bp, Homo sapiens
agcagaaaatagcagccaggaaccaagaaaacttgacaagttggatggcttgaggactggtactaaaaggaaacg

SEQ ID NO: 335158 - DNA, 80 bp, Homo sapiens
cctggagcctcagttggaagcagccgatccagcctgcggagcctgtggggcaggagtgtttctcaggagctatcagaaac

SEQ ID NO: 335159 - DNA, 75 bp, Homo sapiens
accaaagtgggaaacattgaaatcaagtctgaaatggttgtgacaaataatctcttggatctgccgcccccctct

SEQ ID NO: 335160 - DNA, 74 bp, Homo sapiens
gtgcctttatctgatgatgatgaaagttacacagataattggccttttgaatgttttcacaccacagaaatccc

SEQ ID NO: 335161 - DNA, 82 bp, Homo sapiens
aacaacatgaaacagcatctcagacttctttcccagatgtttataatgagggcacacagatgacttcaaacctgcttctatt

SEQ ID NO: 335162 - DNA, 100 bp, Homo sapiens
cagagggagatgtcaggtgggagaaaggccatccgggatggtgtcattgaggccagcatcaaccacgagaagggctatgtccaatccaaggagatgattg

SEQ ID NO: 335163 - DNA, 101 bp, Homo sapiens
ctggcccgtcatggagatggaaaaggagttcgagcagatcgacaagtccgggagctgggcggccatttaccagttacatgggaattggtctttctgctcaa

SEQ ID NO: 335164 - DNA, 95 bp, Homo sapiens
agcaacttttcctggcctattaaaatacaggcacagtgtggatacaagtccaggatatcatgagtcagattccaagaagtctgaagatctatcct

SEQ ID NO: 335165 - DNA, 74 bp, Homo sapiens
gaaatcgagggcgagaagatcaaggcaagaactcccctggagcaggaaattttcaacctcctccataagaacaa

SEQ ID NO: 335166 - DNA, 73 bp, Homo sapiens
aagatccgagtaccatttttacgtcaggttgttcccattagtaaaaaggaatcagagatcattgatttcttcc

SEQ ID NO: 335167 - DNA, 100 bp, Homo sapiens
aaagaaacaagccgtggaataggtgtatcaagtaatggtgcaaagcctgaagatttaaatgtggatgaatttgaggaaatattcaagacaaaagcccaag

SEQ ID NO: 335168 - DNA, 96 bp, Homo sapiens
tgaagctctcgaggctgctaagagactaagccaagaataaggagacgggtgctttggctgcggccaaagtcattgaaaccaagagtgaggaggagc

SEQ ID NO: 335169 - DNA, 82 bp, Homo sapiens
gcgggactgcggcggcgccggcctccggggagaaacgggatcacatgcagtggtctaaggaagaagaagcagcagccagaaa

SEQ ID NO: 335170 - DNA, 83 bp, Homo sapiens
gtcgccgctgtccccaccactgcagccatgatctccttaacggacacgcagaccatgacagttgaaaaagcaagtccagtggg

SEQ ID NO: 335171 - DNA, 98 bp, Homo sapiens
gagacgctgggagcgagcgcagcaaagcgcccagcctgccgcctcgctgtccctgcggcttctgggggcgggcgctaatattgacacctgctcagaag

SEQ ID NO: 335172 - DNA, 100 bp, Homo sapiens
aggtggccggcacccccatgtttgtggtcaaggcctatctgcccgtcaacgagtcctttggcagaaccaccccagtgcacctccctggcctggtctgctg

SEQ ID NO: 335173 - DNA, 74 bp, Homo sapiens
gggttaacactccagtgggatgaacagacaaaccccacaagcactgcatacgttacttatatcaaattgcacat

SEQ ID NO: 335174 - DNA, 96 bp, Homo sapiens
ccgaggagcgcttccgccctcagtggaggggctgcttgctctcggtgactacatgaatgtccagtgccatgcctgcattggaggcaccaatgttgg

SEQ ID NO: 335175 - DNA, 51 bp, Homo sapiens
tggatcacggatgtaggaagtgggcaagaggcctgggacaactcattagag

SEQ ID NO: 335176 - DNA, 100 bp, Homo sapiens
gtaaacctaattctgcccttgatgtcacaggatctcttgaaggatgactacgacaaccatactggaattgatttggttggcactataatagccaccatta

SEQ ID NO: 335177 - DNA, 100 bp, Homo sapiens
ttatcccagagctttgctacattggaacagggccgcctctcaagcggatgtgatgctggtacaacccagagtagaatttattctgtctttcattgaccac

SEQ ID NO: 335178 - DNA, 90 bp, Homo sapiens
ctgctttctgaggccacaggaaaggggccgtcggtcgccgccatgacagcgagcgaggcggaggtcttcccataggcctgcagtagggct

SEQ ID NO: 335179 - DNA, 100 bp, Homo sapiens
agctgcaaagctgggagagactggaccagaccatgggcctgagcatcagggagggcaatgagccaggggagaccactcagatcacataccatcagcttct

SEQ ID NO: 335180 - DNA, 75 bp, Homo sapiens
aagaacacacctgtctatgtgtcctcaccaacctggggtgaatcacaagcctttgagaacagcctgagccttcag

SEQ ID NO: 335181 - DNA, 82 bp, Homo sapiens
agaagatgaagctttgagtaacattgccagagaggcctctctgctgatggtggtgccaagcgccaggagcacctatcccgat

SEQ ID NO: 335182 - DNA, 83 bp, Homo sapiens
aagaagaagagcatgatcggcatgtccaccaaggtgatgtgtccaatctagatcccaacttctcatttgaaggcaccaaactg

SEQ ID NO: 335183 - DNA, 90 bp, Homo sapiens
cgggctcagacagttggcaagaaaaccccgaggagccctgttccaaagcctcctggaccgtccaagaaaatttctagaaggaggagttgg

SEQ ID NO: 335184 - DNA, 74 bp, Homo sapiens
gaatctggattgtcacctttgctgcaaaaaattacggaaataaactatcaatcttgcccagactggagaaagga

SEQ ID NO: 335185 - DNA, 89 bp, Homo sapiens
agaaaaagttcagtgggaagcatgtcgtctttatcgctcagggcttccgagtggacctgccaatcaagtcggcccgctaccgtggccag

SEQ ID NO: 335186 - DNA, 76 bp, Homo sapiens
atttcctctcctcccctctggatttctcagaggttgccaatttggcctgttccatctccaacaatgaagaaggggt

SEQ ID NO: 335187 - DNA, 75 bp, Homo sapiens
cacaaaagcgaaatgggcacaccacagatatgaatatcgtgtagagatggttcaccagtcctgtaatgatcctac

SEQ ID NO: 335188 - DNA, 75 bp, Homo sapiens
gaagagttgtcccagctcggcccgcgggggagccccgggagccgcacgcgtccgtctccaagagagtatgaagag

SEQ ID NO: 335189 - DNA, 50 bp, Homo sapiens
aacagtacgcagtgaatgttccaagaaggatcaagaaggtggagaagaaa

SEQ ID NO: 335190 - DNA, 100 bp, Homo sapiens
ggcggggcaaaggatccgtctgaggcggcgacgagtggctgatgaattcatccgagcaaatgccaccaacaagctgacagtcatagctgagcaaatccaa

SEQ ID NO: 335191 - DNA, 82 bp, Homo sapiens
ccgtgctccgttggagccccagtggaaactgcctgctgtctggggacaggggacaaactctgcctgggcgagtccttttcct

SEQ ID NO: 335192 - DNA, 100 bp, Homo sapiens
gttcctctatcacctcctgtctttcaatgccgtcgattacttttgcttcaccaatgtcttcacaactatccgaaactcttatcactactattgattctag

SEQ ID NO: 335193 - DNA, 82 bp, Homo sapiens
ggagattccacccaaacttgctggtcactgggagccgggaagatttccagaggattccagaacttgccatcaacccactggg

SEQ ID NO: 335194 - DNA, 83 bp, Homo sapiens
acggaatatctgcagcaagtattcgattcctggtgcccctgatgatgaagcagtacggatatttttagaatttgagagagttg

SEQ ID NO: 335195 - DNA, 74 bp, Homo sapiens
aaagcgaagctgattatcctggaaaacactatttacctattttccaagatctagaaatggccattgcctactgg

SEQ ID NO: 335196 - DNA, 75 bp, Homo sapiens
tagggctcctgccgtggtggacctgggagaagtgtctggtgtgctggagaatctggtaaaagcaccattgtgaag

SEQ ID NO: 335197 - DNA, 99 bp, Homo sapiens
gaggcaactgggccacccacgtctatgtaccatgtagaacacctgaaggagaagctcattagccaggcccaggaagtgagccgactgcgatctgagctg

SEQ ID NO: 335198 - DNA, 82 bp, Homo sapiens
cgggaaaaacagtatgcgccgaggtgataaaagaaaatgtggctgaagttacccgaagttcagcttgcagtgtaattcagaa

SEQ ID NO: 335199 - DNA, 123 bp, Homo sapiens
cgtcccggtcatctgggcgtgcgggtcccgggttttgatcgcgcgtttgtgtaggtctttgcatttctaagccatatgtgatctccttattggagcaagggagagagccttgggagatgacga

SEQ ID NO: 335200 - DNA, 74 bp, Homo sapiens
aagaagaagctataaaaccccctttgaaagttcaaggagcagggacaagttacaggaatgttctccaagcagca

SEQ ID NO: 335201 - DNA, 75 bp, Homo sapiens
gccctgtctcctcgcagatgagggtgctgataagactgtgaaaggcccagatggactgaccgcctttgaagccac

SEQ ID NO: 335202 - DNA, 88 bp, Homo sapiens
caaaagattgagctgcactgtattcctgcatcctctggtatcacgattccaaaacccccaaagccaccagataagccgctgatgccct

SEQ ID NO: 335203 - DNA, 74 bp, Homo sapiens
ggctggaggacacacctaaacatgtggaatcccaatgccgggtttcccaaactctcgattgcctcttgcaagca

SEQ ID NO: 335204 - DNA, 100 bp, Homo sapiens
ccgagcaggaggcgccatcatggaacaagatcactcaaggtgaaggataatctactaataccagcactttgaatgaaaatttgtttctctgccacaaact

SEQ ID NO: 335205 - DNA, 75 bp, Homo sapiens
caaggactttgtgactgtcttggccaagattacgggcagggacgacctgtcaaagcgcggagtggaccaaacctg

SEQ ID NO: 335206 - DNA, 100 bp, Homo sapiens
aaattaaaggcagaaaggcatccaaacctatatctgattcaaggttcaagctgaagaagaaatattagagagaaatctaactaactgtgaaaaagaaaat

SEQ ID NO: 335207 - DNA, 83 bp, Homo sapiens
tgtgcggcgcccgctgtataaggtttttagaacttcagccataaaaatgggcagaattttccttgatcatatcggtggtaccc

SEQ ID NO: 335208 - DNA, 88 bp, Homo sapiens
agaatctacaaattttgctactgtcagatggattgactatggaaaagttgccaaattggcgcatattaaatttcctattgactacccc

SEQ ID NO: 335209 - DNA, 75 bp, Homo sapiens
ttttgccagacattactacttcctaggcagaatgcttggaaagtgccttgctttccatgacatttcccctcaagc

SEQ ID NO: 335210 - DNA, 100 bp, Homo sapiens
agcacagagcctcgcctttgccgatccgccgcccgtccacacccgccgccagtaagactttgaccccgacgcaggcttcagtgattgccgcggatcagaa

SEQ ID NO: 335211 - DNA, 100 bp, Homo sapiens
cccgctaccggactacatgtcggaggagaagctgcaggagaaagggtgtccgcaatgttgccagtgtctgtctgcagattggctacccaactgttgcatc

SEQ ID NO: 335212 - DNA, 90 bp, Homo sapiens
cattaatggggaagggcctgtcggttctcctacgtggacgccgacgggtccccagtgaatgtcgtgcagctgaacttcctgaaactgctg

SEQ ID NO: 335213 - DNA, 134 bp, Homo sapiens
tgctgcctgtggcatttattactttgaagtgaagattgtcagcaaaggaagagatggctgtgtcagcgtgttatgatgccgtcccgtaccaacctggctactggaatccccagtagtaaagtgaaatattcaag

SEQ ID NO: 335214 - DNA, 124 bp, Homo sapiens
agcatttgccgggttggtggctcctgcacatttttacagttctccagtccttctctttcggccccttcacagatgtagtcactacaaatcttaaattgcgaaatccatcggatagaaaagtgtg

SEQ ID NO: 335215 - DNA, 100 bp, Homo sapiens
atttatgaaagcacttgaatggggaaattcataagtgatctacttcagttagtctctatgacagaaaattcacgaattgtgagagtaagagttatagccg

SEQ ID NO: 335216 - DNA, 134 bp, Homo sapiens
caggctgcgagcggggacttcactgctctgctgtctcctgcaagaactggctcaagaaatttgcctcgaaaaccaattgttgacctcctgtactggagagacattaagaagactggagtggtgtttggtgccag

SEQ ID NO: 335217 - DNA, 75 bp, Homo sapiens
gatcaatcttaccagagggccctcaggggccaactcaccctatgcagcacagcccaccagctacgactatgatgc

SEQ ID NO: 335218 - DNA, 101 bp, Homo sapiens
cggggtcgggagccgcccggggcagggctcgggagagcgggtatccagctcacatagaagacattgactacgaggaaggaaaagtactcatccatttcaag

SEQ ID NO: 335219 - DNA, 75 bp, Homo sapiens
ccatgatgcatgccttagaagtgttaaattcacaggaaacagatctgctattactaaaacatttttgatgttgtg

SEQ ID NO: 335220 - DNA, 136 bp, Homo sapiens
gggaagaagaagaaacgggccgcgaaccgcagtatcatgctggccaagaagatcatcattaaggacggaggcacgtgtgcaaagatccaccttacaaagtagaagaatctgggtatgctggtttcattttgccaat

SEQ ID NO: 335221 - DNA, 87 bp, Homo sapiens
cgatgttatactgatgtgtttttccatcgacagccctgatagtttaggaaccctaaggactctgcaatatgaataattccctagaga

SEQ ID NO: 335222 - DNA, 75 bp, Homo sapiens
cttcggcagtccacccaccgccgccgcctcccaggggatcctgctaaagcggagcggcaagtccctgaacaagga

SEQ ID NO: 335223 - DNA, 75 bp, Homo sapiens
acttttgagattggtgctcgtttggaggcactggactacttacaaaaatgatatcttaatgcaattcagacaatg

SEQ ID NO: 335224 - DNA, 100 bp, Homo sapiens
cttttgtggcgctcttgctcctctctccttggcctctcctgggatcggcccaaggccagttctccgcaggattttttatcaagcagaaatgcatcgaaca

SEQ ID NO: 335225 - DNA, 100 bp, Homo sapiens
tggaaaataaagattacagagaaaaaaccaacaccttcctgtgcagtcctgttggaatttgttcaaaccttgtactactcagctgatcacaagctgcttg

SEQ ID NO: 335226 - DNA, 100 bp, Homo sapiens
cggatactggtcttctcgtcggattgcccatgcacttgttgcagaaacagccaaggtgcaccctttgctcccgggctcatccaccatcatgatccatgac

SEQ ID NO: 335227 - DNA, 90 bp, Homo sapiens
gtcaagagtcttcatctccagctgcctcagttttcttatcactaaaacagcaactattgcagatatcatccgaacatgtttgggacccaa

SEQ ID NO: 335228 - DNA, 100 bp, Homo sapiens
catttggctttgcctttctggacacagaagtatttgtgacagcctctgcctgtgagtttctggatattgtagagctgctgctccagtctggtgctgaccc

SEQ ID NO: 335229 - DNA, 99 bp, Homo sapiens
aactccggctgggctcccggtggcactttctgccgaccctgagatgtacccgccacgcctgcgggactgacctctagaatgagatgtgcctggccacac

SEQ ID NO: 335230 - DNA, 100 bp, Homo sapiens
tgctgtctgtggtgtggctgtgggacccgtgagcaagcagcgacgccagcggcggagaaccgacgaaagatggatgatgatgacgacgacgatgacgtag

SEQ ID NO: 335231 - DNA, 100 bp, Homo sapiens
tttaattttagggtcctttatatagaagggagagtagattagtaagcaactctctgaagaatatgaaaggattgtcaatcctgagaaggccacagaggac

SEQ ID NO: 335232 - DNA, 100 bp, Homo sapiens
ccagccgacacttagggaaaatagaacctacgctgaaattttgggggcaggttctcttgctaggtttttctatatgagtggagaagacagctgttaccag

SEQ ID NO: 335233 - DNA, 149 bp, Homo sapiens
gccgaggcggcgggcgggagacccgcaccagcgcagccggccctcggcgggacgtgacgcagcgcccggggcgcgggtgtcatggagaaactccagctgggcccagagattctgcagcgggaaaatccaaggcttatttatgccaggct

SEQ ID NO: 335234 - DNA, 83 bp, Homo sapiens
gattttccgagtgaatctgcggacgctgcgcggctactacaatcagagcgaggccgggccgggactgtcacttggtgatacag

SEQ ID NO: 335235 - DNA, 75 bp, Homo sapiens
ggcgggagagtgagagaaaggctggaagacgagcccaataggggcacaaaacgtccccgggatgatgaagaggag

SEQ ID NO: 335236 - DNA, 96 bp, Homo sapiens
gttcctgatggagctgtaaagccacccacaaacaaactacccattttcttttttggaactcatgagactgagatggaagattttcgaggtatagca

SEQ ID NO: 335237 - DNA, 97 bp, Homo sapiens
gatggccgcccccgtggatctagagctgaagaaggaattgaatgatctggcacgggaccctccagcacagtgttcagcaggtcctgttggagatgat

SEQ ID NO: 335238 - DNA, 100 bp, Homo sapiens
ggaatttcaagaatacaatcttgtagtctgtgggttctggcaccacctgagcccactgggcatctggtcatccctggcacctctcctttggagccacctt

SEQ ID NO: 335239 - DNA, 100 bp, Homo sapiens
ggaagattcgcaactgcagaagaaatagccatgctctgcgtgtatttggcttctgatgaagatgttgacaatgcgtctctggcacgtcttgaccttgaac

SEQ ID NO: 335240 - DNA, 96 bp, Homo sapiens
gtttatgcaaaaaccacacttgggcgcctcttcatggtcttcttcatcctcgggggactggcctttcgggaagacttggaatgccttattcaagaa

SEQ ID NO: 335241 - DNA, 75 bp, Homo sapiens
caagaacttctacgggggcaatggcatcgtgggagcgcaggtggtgatctttgtgaagtctgtgcagcggtgcat

SEQ ID NO: 335242 - DNA, 95 bp, Homo sapiens
tagcctacttcattgacagcaccagccaagtgaataggtcagagaagagagggccggcagacattccaccgctttgacaagttcaactccaaata

SEQ ID NO: 335243 - DNA, 100 bp, Homo sapiens
aagaggaaccacaagaaaatcaaaagaaacttttgcccttatcagtaacacctgaggtggatattccatctattataaccaagaaactattaaaagcagc

SEQ ID NO: 335244 - DNA, 80 bp, Homo sapiens
tgggaccccggaatcccgcgcgctgcccacgattcgcttctgagtttggtgccctggttgtcagatgttggaaagcagta

SEQ ID NO: 335245 - DNA, 97 bp, Homo sapiens
cgcactccactctgactcccaggacgggcaccaggttcaaatggtgaaagacgatgacccctcctggaagcccacttttatcgtgaaacctgatggt

SEQ ID NO: 335246 - DNA, 75 bp, Homo sapiens
ttccgttggagtagaagtgtccagcgacagcttctgggagttgggccatatggtgctcttcccagtctggttcct

SEQ ID NO: 335247 - DNA, 50 bp, Homo sapiens
gtcgctgatccctgaagaccaaatagtaacttggatccacttacagaaac

SEQ ID NO: 335248 - DNA, 75 bp, Homo sapiens
gctgccatggagcccagcagcaagatagtgctgcaagagggaaattcccaaaagaagtcaaatatttcagagaaa

SEQ ID NO: 335249 - DNA, 90 bp, Homo sapiens
aggagcccccccatccccgcgccggcccacgggggggccctcagcctcttggccttgaacgggctgttcatcttgattcacaaacacaac

SEQ ID NO: 335250 - DNA, 83 bp, Homo sapiens
gggaacccaggccccgccgaggcggccagcaattctgtggtgttcttggtcacacatttatggagtttctgaagggcagtgga

SEQ ID NO: 335251 - DNA, 50 bp, Homo sapiens
gattggacccacagggcagatgggagaggagttcattacttcggaagtgg

SEQ ID NO: 335252 - DNA, 87 bp, Homo sapiens
tcaaccgcatgaagcagctggctaaccagaccgtgggcagacatgcgtcgggatgtccaggaaatttttcgcatgaccccccacgag

SEQ ID NO: 335253 - DNA, 82 bp, Homo sapiens
agctgcagcacgtggaggactaccgccggccctgtcctgccctgccaacagccgctatgagctctgcggccctgcttgcccg

SEQ ID NO: 335254 - DNA, 83 bp, Homo sapiens
ctggatggtcagaactggctgaatgaccaggaattacatgaatgacagtcttcgaaccaatgtgtttgttcgatttcaaccag

SEQ ID NO: 335255 - DNA, 74 bp, Homo sapiens
caccacctgccacaccgtgaagctgcggggagccccgttcaatgtcacagaggcggaggttgcagtgagctgag

SEQ ID NO: 335256 - DNA, 101 bp, Homo sapiens
gaagatcatcgagcatttcaaacgcagaaagatgaaggtcttagaatcattgattggaatgatccagaaattcccttatgatgaccctacttacgataaac

SEQ ID NO: 335257 - DNA, 75 bp, Homo sapiens
agctaattacacctcctcctccaccaccctcaccagaaagcaggttggcaacattgtacaagtcacccagccaga

SEQ ID NO: 335258 - DNA, 96 bp, Homo sapiens
atggagccgctggggtcccttttgcctcagatactattttgaagagctctcagcatggcggctcctctacgtcacttgcgtccaccaaagtctgca

SEQ ID NO: 335259 - DNA, 90 bp, Homo sapiens
cagtcactttcgtgtggtagccacaggctctggctgtgccctggtccagctgcagccactgacaggacacatgacggaagtgtgtatttt

SEQ ID NO: 335260 - DNA, 101 bp, Homo sapiens
tgaaaacgagcccctatcctaggattacctgaaggtgaaacagattgagccagaaggaagacaatgctgctgccactgcagagccccgccatggaagacac

SEQ ID NO: 335261 - DNA, 75 bp, Homo sapiens
agccgctgtgggctcctggggagatggaggggccggggctgggctcgcagttggttcgactatgcaatgagggcg

SEQ ID NO: 335262 - DNA, 74 bp, Homo sapiens
gctagtctgaccctccgccaggcaaaaggaagctttggtgtcatccccagcactcctctggccatccatacacc

SEQ ID NO: 335263 - DNA, 89 bp, Homo sapiens
cagcttcaaggagcaatgcagcagtttaaccagagattcatttatgggaacaacgactatcgtctattccacaagatgagtaacagcca

SEQ ID NO: 335264 - DNA, 82 bp, Homo sapiens
ctcgctctgggtctccaggcccgcgaccgtccgccagtcgtcccgaggtgaaagaaaatggcccgaaccaagcagactgctc

SEQ ID NO: 335265 - DNA, 107 bp, Homo sapiens
ttctaatttgaaccatgtttggattgaagccgcctctgtattacttaccagactcggtgaaatacctggagtgctcagctctcacccagagaggcctgaaaaccgtg

SEQ ID NO: 335266 - DNA, 97 bp, Homo sapiens
cccgcgtccgccgattcctcctccttggtcgccgcgtccttggctggcgtcctgcggtggaagcacacctcctccctgaaggtggccaacgagcccg

SEQ ID NO: 335267 - DNA, 90 bp, Homo sapiens
agaaggggaagatgacaacccaccatgccccaggcctgtctcctccctcctacacatttccagctcctgctgcagttattcctacagaag

SEQ ID NO: 335268 - DNA, 49 bp, Homo sapiens
atatattgaaacttcggagctggtctaccttctgcttccctggaaagga

SEQ ID NO: 335269 - DNA, 103 bp, Homo sapiens
ataagaactattgaagacctagatgaaaatcagctgaaagatgagttttttaaacttctgcaggttccaattgtggacaagataaggaccattgctcaggctg

SEQ ID NO: 335270 - DNA, 74 bp, Homo sapiens
atagtggcaggtgacagtctgcatgtgcagttttcaggcgcattgaacagtcctgggcactacatgtaaattaa

SEQ ID NO: 335271 - DNA, 75 bp, Homo sapiens
gtcgttcttgctcttcgagggcgagaaacctggaatcatttttctgataatgaggcagagcgggttaaaatgatg

SEQ ID NO: 335272 - DNA, 89 bp, Homo sapiens
cttccaggcagagctgtggatcaaagaattatgtgtgaataagagtactcatgaattcaagccacagagtggagcagagatcaaagaag

SEQ ID NO: 335273 - DNA, 50 bp, Homo sapiens
ctctcatcgaggcccaaaccgccaagcgacctggcatgtcaccagggaac

SEQ ID NO: 335274 - DNA, 83 bp, Homo sapiens
cccgggagcaggaggagctgctggcgcccgcagatggtaatcattaccaaatgaggaggaaaggacgatgtcatcgaggctct

SEQ ID NO: 335275 - DNA, 82 bp, Homo sapiens
cagagcctcgcctttgccgatccgccgcccgtccacacccgccgccaggcacttccgttccggcgcccctccggtcatcaac

SEQ ID NO: 335276 - DNA, 50 bp, Homo sapiens
aacacatctttacacactaacccagagcatgttccagatcccagagtttg

SEQ ID NO: 335277 - DNA, 82 bp, Homo sapiens
ctcgacaaagatggggttgtcctctttaagaagcttccccgggcgctgcctggacaggcctgcctgcgtgctgggacatgtc

SEQ ID NO: 335278 - DNA, 75 bp, Homo sapiens
gcgtgccaggccttggagaacagcacgtccccgctgagtgattcaaccctatgaaaagataaaggccaggggctt

SEQ ID NO: 335279 - DNA, 83 bp, Homo sapiens
gaggaccccgggacatctgaaagccaggaaatggaagaaggtagataatgactataatgcccttcgagaaagactcagcacct

SEQ ID NO: 335280 - DNA, 88 bp, Homo sapiens
tccagcagtggcacatggagcggtgaagagtgaagatgtgggggaatgaggctgcccagaatccagactccaaaatgatgcaaatcaa

SEQ ID NO: 335281 - DNA, 89 bp, Homo sapiens
cgacaagggtgttcccgaactagagtgggagtatacggaggagatagaacgtttaaaacgagatcttgctgcagcccgtgagaaaaatg

SEQ ID NO: 335282 - DNA, 90 bp, Homo sapiens
ggacacctttcacagctatcagggaagcgagttgaagaatttctcagcaaagatatcagttatcttatttcaaataagaaggaagctaaa

SEQ ID NO: 335283 - DNA, 75 bp, Homo sapiens
cttcccctggacagaaggcaaagttggtgtatgaagaaggtcccggatgttacaggtcagagccctccagacccc

SEQ ID NO: 335284 - DNA, 98 bp, Homo sapiens
gaggcccaaaggggaagcctagcggagctcagtgtggcagctgctggcctctgggccggaaggatgccaattctgcgcttctcagtaactacgaggta

SEQ ID NO: 335285 - DNA, 90 bp, Homo sapiens
gtcgccgttcgctgcgctgccgggaaacctgtccagtttaagtcgtcttggtctgagatataacagactgtcagcaatacccagatcatt

SEQ ID NO: 335286 - DNA, 80 bp, Homo sapiens
ggccaagaaagacaaagacccagtgaacaaatccgggggcaaggccaaaaagaagtgcaaaatggcaactcttaaggaaa

SEQ ID NO: 335287 - DNA, 75 bp, Homo sapiens
ccagacaagatggacaccgcggaggaagggtgatgaattagaagacaatggaaagaatttctacgaatctgatga

SEQ ID NO: 335288 - DNA, 51 bp, Homo sapiens
cgcggctgcgcgaggagcaggaaaagatacttgccagaactaatacagctg

SEQ ID NO: 335289 - DNA, 100 bp, Homo sapiens
cgcgtccgccccgcgagcacagagcctcgcctttgccgatccgccgcccgtccacacccgccgccagcttgaggagttcctgaaccagagctcgcccttc

SEQ ID NO: 335290 - DNA, 75 bp, Homo sapiens
tacactgaaattcatcctgagatgaggaaaatgtttataggaggccttagctgggacactacaaagaaagatctg

SEQ ID NO: 335291 - DNA, 73 bp, Homo sapiens
ggagaggccctcagcttgtctgcactggcagtgacgatggcacagttaaggacttgattattcttagaaatgc

SEQ ID NO: 335292 - DNA, 95 bp, Homo sapiens
atggccagtgaggaagtcttgaagaatagagccataaagaaagcaaagcgcagaaatgttggatttgaaggaatgcagagagcaaccaatgtcac

SEQ ID NO: 335293 - DNA, 75 bp, Homo sapiens
gtttttagtccattgactatgcagcctaatggtagacatagctgacattgagaatgaagagaaccgctactgtct

SEQ ID NO: 335294 - DNA, 75 bp, Homo sapiens
aggatccagaaaccgccccagcgatggaagaggatcaggagctggagagctgagtccacctcaggacgaggccag

SEQ ID NO: 335295 - DNA, 100 bp, Homo sapiens
attgcctcaaggatgtcatatctatgagtaccgcgagagcaacaaacctgtcatttactccatcctttatagtgatgctacaggacgaagaggaatggat

SEQ ID NO: 335296 - DNA, 100 bp, Homo sapiens
caagggcaggatcctcaccgtggaggaccattattatgaaggttttcctttggaatatggataaatacaccatgatacggaaactagaaggacatcacca

SEQ ID NO: 335297 - DNA, 145 bp, Homo sapiens
tgaacttattgaaaagtacattaaagaaggaaagattgtaccagttgagataaccatcagtttattaaagagggctttgaacttggcctactccagcatttacggcagctaccggaacttcgtgggacctccacactttcaagtc

SEQ ID NO: 335298 - DNA, 100 bp, Homo sapiens
gaatggcaccctcacctcccagcccaacaacagtgcaccaattccagctggacatcactgtgaaaatgggacgggataaagtccgagaaatgtttatgaa

SEQ ID NO: 335299 - DNA, 75 bp, Homo sapiens
gcttgccctggtcttgctcggccgatgaagtgcagaggtttttttctggcaccagtctgctgagtggcggtcgtg

SEQ ID NO: 335300 - DNA, 90 bp, Homo sapiens
ccgacctcatcagtgagctgtccctgctggaggagcgcttccggatcaaattttctccggtggctaaaaagttgtttgtggtaactgcag

SEQ ID NO: 335301 - DNA, 101 bp, Homo sapiens
cgatatgataaagacgatgaagccccctctgatgtatgaagtgtaacagaacagactttaccacctgaaactgctgcttcaagttcagatcaggcaaggaa

SEQ ID NO: 335302 - DNA, 82 bp, Homo sapiens
gtcatgtggtggtgaaaaatgaccctgaactggaccagcagataacgaaggaggcccaacttcattcaataaggagcctgac

SEQ ID NO: 335303 - DNA, 101 bp, Homo sapiens
gagacttggaaacacctactttatagtcctgattcaagtgttggcggatggaagggaggagactcctgaccctcagaatgtagagatggggttttgccatg

SEQ ID NO: 335304 - DNA, 75 bp, Homo sapiens
aaattatctctggtgctgcagctctactctcaaagatgaagacttttgtaaacgtgtatctttggctactgtgga

SEQ ID NO: 335305 - DNA, 73 bp, Homo sapiens
cgggagcgcggaacagcttgtccacccgccggccggaccaggctatgactttgcagccgtcctggagtggttc

SEQ ID NO: 335306 - DNA, 111 bp, Homo sapiens
ctggccgagagccgcggctccgtgtttctggaaagtgacagcaggaaagaccacagcaagattctttcattcgtctcctcctagcctgggggaccaggctcgaactgaccc

SEQ ID NO: 335307 - DNA, 97 bp, Homo sapiens
cggtttttagtccattgactatgcagcctaatggtcacaaacatgtcagacaaaagtgaattaaaggctgagttggaacgtaagaagcagcgactgg

SEQ ID NO: 335308 - DNA, 102 bp, Homo sapiens
ttcggtggactccttcggcagtccacccaccgccgccgcctcccaggaaccacgtgaatgttgagggggcgacacacaagcaggtggtggacctgattcgag

SEQ ID NO: 335309 - DNA, 50 bp, Homo sapiens
gagtgcatcaaaggtgtgaacacaggtgcatatgtactccaggtcaaggc

SEQ ID NO: 335310 - DNA, 90 bp, Homo sapiens
tgtatggtggtggcaggggccatcgctgccgtctttcacacactgatagaattcaagaggaacgtgatgagagacataaaacaaaaggca

SEQ ID NO: 335311 - DNA, 75 bp, Homo sapiens
tgaatccaacaagatcccccgtctgaggactgacctttttccgcagagtggcatgattccgactggatactctca

SEQ ID NO: 335312 - DNA, 75 bp, Homo sapiens
cttctgcatccttaactgagaatgaggtgacctgagcatctctgcagaccgcctgagtgagaagcgctctcccaa

SEQ ID NO: 335313 - DNA, 75 bp, Homo sapiens
gcacagatgagtaacgtgaatttgtccgtctccgacttctggagtttccgtttaggtaaaatggatagaataata

SEQ ID NO: 335314 - DNA, 88 bp, Homo sapiens
tgattcagattttgaagctaaagttaagcagatctcttccgttccctgctggcagttcatcagctggatcagccacatggtggcctta

SEQ ID NO: 335315 - DNA, 100 bp, Homo sapiens
cagcccccgaaggccctatcaggacatggagtatgaaagacgagccatccaaaactctgtttgtcaaaggcctgtctgaggataccactgaagagacatt

SEQ ID NO: 335316 - DNA, 100 bp, Homo sapiens
actcggccctcattctgcacgacgatgaggtgacagtcacgatgcttgtttgctactgatgggtgtgagcaagttagatattctataccggagacttctc

SEQ ID NO: 335317 - DNA, 75 bp, Homo sapiens
gaaaggagctcggggactcccccaaagacaagctctgggagacgtggaggcctctgaagctgaagaccacttctt

SEQ ID NO: 335318 - DNA, 100 bp, Homo sapiens
atgccctctctcttcatcttcacttgaaataccggatgattttggagtgtttgggaaatgggaagtaatgacagctggcacctgaactaagtacttttat

SEQ ID NO: 335319 - DNA, 100 bp, Homo sapiens
ggctgagctgggcatggagcaccaggcggtggtgggcgccgtgaagagccttcaggcgctgggcgagagacgagttgtactgctgtcacaggaaatggac

SEQ ID NO: 335320 - DNA, 75 bp, Homo sapiens
acctgatgacaaggacctgcagtgctgcagccttgtcagacccaagcagtagactttcaacttctcctcctcctc

SEQ ID NO: 335321 - DNA, 90 bp, Homo sapiens
gaacctggttcctaagcctgtaccacctccttccaagataattagcaccatggagcctcaggtgtcaaatggtccgacatccaatacaag

SEQ ID NO: 335322 - DNA, 75 bp, Homo sapiens
gtaaagaaggaaaaagcagtaaagccagaggaagtataaccccgttttcacacgaatggccccttcacatatttg

SEQ ID NO: 335323 - DNA, 100 bp, Homo sapiens
gggaccccccttactacagtggtgtgattcgtgcagaaaggtgtaaaaggaagagaatgtctcctggacctaattgccacaatgctggtactacagttta

SEQ ID NO: 335324 - DNA, 89 bp, Homo sapiens
acaaccagaagctcagggagaagttgaaggaggaggagaacacagtggtgcaccaattccagctggacatcactgtgaaaatgggacgg

SEQ ID NO: 335325 - DNA, 82 bp, Homo sapiens
gtccagggccagccgccatgacgaacggttttaaaatcaaagatgggaaaatcggagaaaattgcccttccccatggccagc

SEQ ID NO: 335326 - DNA, 83 bp, Homo sapiens
agaagactgagagtcaccacaaggccaaggcagcccctgtcaaagggaacaggaagcagtccacggagggtgacgccctagac

SEQ ID NO: 335327 - DNA, 50 bp, Homo sapiens
accgatatagctcgccaggtgagataattgacgaccttgccaacctagtg

SEQ ID NO: 335328 - DNA, 75 bp, Homo sapiens
gaagaaaaagaaagatgcgctctaagaaagaagattcctctgacagtggtttctaccatgaatgaaatgaagagt

SEQ ID NO: 335329 - DNA, 80 bp, Homo sapiens
ctatgtgttcgtgttcctgggcctcatcctgtactgtgtgacacctgctccacttcaccttttgccatgagtaaaagctc

SEQ ID NO: 335330 - DNA, 75 bp, Homo sapiens
cagggcttccactgattctacattatggaatgggtaccacagaccatgtcatcgtcctggcgtccacgaaccgag

SEQ ID NO: 335331 - DNA, 100 bp, Homo sapiens
gggagtcttgccgatgtggtggacacactgaaacagaagaagcttgaggaaatgactcggactgaacaagagggccctcgggaccaaggatcacgtcatg

SEQ ID NO: 335332 - DNA, 75 bp, Homo sapiens
catgctgctgcccgccagggcccagatggcctcagagaaccatggctactgccaagggaatcgccataggcatcg

SEQ ID NO: 335333 - DNA, 80 bp, Homo sapiens
ttcagagagcaactatcctccccagcctgtggacatctctacagcaatgagtgaacgggcacttgctcagaaaagactca

SEQ ID NO: 335334 - DNA, 100 bp, Homo sapiens
caagtggccatggggagcctcagcggtctgcgcctggcagcaggacacagcattgttggttttgccatgtactattttacctatgacccgtggattggca

SEQ ID NO: 335335 - DNA, 83 bp, Homo sapiens
cgccgccgagaggaggcctatgagaatcaggctgtttcctctgcgagaaccaggagtgaactggcatgccaagcccctcacgc

SEQ ID NO: 335336 - DNA, 87 bp, Homo sapiens
ggccgagcctggcctgggccgcgtccatcacctggcactcaagggtgaggacgcttgagcggaagttagaagcaaaaatgatcaagg

SEQ ID NO: 335337 - DNA, 100 bp, Homo sapiens
aaggagctagctgaaataacccttgatcctcctcctaattgcaggtaccctcttagtggcatgggtttaccaacatttaaagaatggatccaaaataccc

SEQ ID NO: 335338 - DNA, 101 bp, Homo sapiens
gccatctgtgacttcccatgaaacttctgatttcttccctaggcctttacgatgactcagtggcctctgaggatgtggctgtgaacttcacacttgaggag

SEQ ID NO: 335339 - DNA, 74 bp, Homo sapiens
aagcagccgatccagcctgcggagcctgtggggcaggaagccagcagacctgcagaacttggctcccgggaccc

SEQ ID NO: 335340 - DNA, 100 bp, Homo sapiens
ccggacatgatggtcgagggccgcctgctcgttcctgacagaatatctcacattcttgaaggtggcattgaagagcactaagatcggaagatgagtgagc

SEQ ID NO: 335341 - DNA, 80 bp, Homo sapiens
aaaagaagaacttattccagagaaactggccaagatcctgtgaagccacctggcagctctttacaagcaccagctgattt

SEQ ID NO: 335342 - DNA, 101 bp, Homo sapiens
caggacccatttgtgtccattgatctcttggagcagctggggatcatggtgttggataaatacaaccctccagaccacttcctccctgagtcctacacctg

SEQ ID NO: 335343 - DNA, 99 bp, Homo sapiens
tcatgccgagatggaccttgggcagctcagttcacaagatggggtcgaggatttggtcttttgggttccatttttggaaaggatggtgtattaaaccag

SEQ ID NO: 335344 - DNA, 146 bp, Homo sapiens
tgatggcaacggccaacttcggcaagatccagatcgggatttacgtggagatcaagcgcagcgatggtgtccggctttgctggcccagcaagcctgataagcatgaagctcttatctttggtggctgtggtcgggtgtttgctggt

SEQ ID NO: 335345 - DNA, 90 bp, Homo sapiens
ctcggccaactccacggccgcctgcacggagctggccaagcgcatcacagagctgatcttcagacaagttctcagcgtttaaatctttca

SEQ ID NO: 335346 - DNA, 75 bp, Homo sapiens
caagcatcagcctggaggaggccgggcctcgaaaaagcccaagacagcagaagcagacacctccagtgaactagc

SEQ ID NO: 335347 - DNA, 75 bp, Homo sapiens
gtttacttctcctccttctttgttcaagactgggcttccaccgagcagtaccttctccaggcaaattccgttccc

SEQ ID NO: 335348 - DNA, 75 bp, Homo sapiens
ggaatgtctttcctaccatctaaaatacgaaggtttctggctggagctctgcgtgcctcttgctgtgccctacct

SEQ ID NO: 335349 - DNA, 75 bp, Homo sapiens
gagcggcaactcgcgcactcaaagtttgaaaaagtaccagaaggtcctatccctccatctacaccaaagtttgca

SEQ ID NO: 335350 - DNA, 100 bp, Homo sapiens
ccgaaaccccttggctccagtgcaccatgagcttggtttgatccgcaaacctgcctcgttcatgaccagcatctgcgatgagcgaggacaggagctcatc

SEQ ID NO: 335351 - DNA, 75 bp, Homo sapiens
cgaaggacagctggaagccttgtcactggaggcgagtcagcccagctcaacattggcaatgtgctccctgtgggc

SEQ ID NO: 335352 - DNA, 74 bp, Homo sapiens
gcagctggctctgggccttgaacattccgaaactgtcaagattggcaagttgacattttgctaaaggctgtggg

SEQ ID NO: 335353 - DNA, 100 bp, Homo sapiens
ggggataagaagctgctggtccagagggcgagtgtgggagccaagaatgccacgctggaaaatgatgaagttctggttgctggatttggtcgcaaaggtc

SEQ ID NO: 335354 - DNA, 82 bp, Homo sapiens
ctttgctcaaggatcccagttttctctggatgacgtggattttttatcaagcagaaatgcatcgaacaacgagaatcaagat

SEQ ID NO: 335355 - DNA, 50 bp, Homo sapiens
ctacccgggatacggaggagggatctgttacctaaagcaataaaaaatgg

SEQ ID NO: 335356 - DNA, 101 bp, Homo sapiens
ctgcaccggaaatgtgcctaccagtgttctaagaacggaagcatctgggctggatggaatttagcatcaagcagagtcccctttctgttcagagtgttgta

SEQ ID NO: 335357 - DNA, 80 bp, Homo sapiens
ccggacaaagaaacgagcgctcgcctggcaggagatcgcagatgctgcggatgcttctgagccccggtggtgtgtcccag

SEQ ID NO: 335358 - DNA, 82 bp, Homo sapiens
agaaaaagaaagaggacgatgatggagaaatcgatgatggggaaatagacgtgctgactgggttacttttttaaacactagg

SEQ ID NO: 335359 - DNA, 75 bp, Homo sapiens
ggccagctgccgcgactgggaggagcgccggaacgccgaggcccagggtgttcctgaaaagaaggtacttccaat

SEQ ID NO: 335360 - DNA, 75 bp, Homo sapiens
cgcgccggctatggccgtgccctggggctgagccctcagttaagatccttctattctacgtaatattttatggct

SEQ ID NO: 335361 - DNA, 83 bp, Homo sapiens
ggaagacatttatgaaagcccaaatcacctgtacttggtcatgcagctttcctggtccagaactttacacagaaaaggtgctc

SEQ ID NO: 335362 - DNA, 83 bp, Homo sapiens
tctgacaacgtggatcgttgttttgaaacgaacctctttcaggagctataaaagaaagggaggaatcatgtccacaattgcag

SEQ ID NO: 335363 - DNA, 50 bp, Homo sapiens
tgtggggccaaacgcatcatgaaccagagactgctgctactttgaaacgt

SEQ ID NO: 335364 - DNA, 58 bp, Homo sapiens
ccagcctgtcagccctaattggggaagcggaatcaatagtggatgaacaagagagtaa

SEQ ID NO: 335365 - DNA, 82 bp, Homo sapiens
cagctcctggttcaacgaggccattgacttcatagtacttggaccatgagactgtttcagccactttcatcgacagcagtgg

SEQ ID NO: 335366 - DNA, 50 bp, Homo sapiens
cctggaacagcagcatcattgtcaaagtggaagagaaagccaatacccac

SEQ ID NO: 335367 - DNA, 83 bp, Homo sapiens
ctgagcaacatccgcgagttcctgcgcggctgcggggcttccctgcggctggaggggtgcgtcttgacagagtacgtggaggt

SEQ ID NO: 335368 - DNA, 85 bp, Homo sapiens
taaagtggaagatttgcttaaaagaccagatgtggatgttcgccaagcagcttttcagtctctgggacctttcatatctactttt

SEQ ID NO: 335369 - DNA, 97 bp, Homo sapiens
gacatagttcctggtgatattgtagaaattgctggcttgtctgagacgacaggaatatagaagagacccaaatgagaagaaacgcgatcagttttgg

SEQ ID NO: 335370 - DNA, 102 bp, Homo sapiens
gctgctgccgcctgacggggctcccgagcacggtgctggagaatctggtaaaagcaccattgtgaagcagatgaggatcctgcatgttaatgggtttaatgg

SEQ ID NO: 335371 - DNA, 90 bp, Homo sapiens
gttccccggcccacagtgggggtgtgcaaacccgagagaactgggttatacattggctcttcaaagacgttcacctcatcagagaaatcc

SEQ ID NO: 335372 - DNA, 100 bp, Homo sapiens
caaagaagtgatgctggaaaatctcaggaatctggtctcattgggatcaagattataggaccggcccaagtgaggagaaacccagcaggcttattcgatt

SEQ ID NO: 335373 - DNA, 100 bp, Homo sapiens
cttgggtgcgccttcccggcgtctaggggagcgaaggctgaggtggcagcggcaggagagtccggccgcgacaggacgatcgcccaggaccacaccgcag

SEQ ID NO: 335374 - DNA, 111 bp, Homo sapiens
gacgcgcggcgtttacccagcgcagcgttccaccgctcgggtttggctggatctgttacctaaagcaataaaaaatggccagaggatcagtgtccgatgaggaaatgatgg

SEQ ID NO: 335375 - DNA, 100 bp, Homo sapiens
gccggccaaggatgaagcctcacttcagatattctggaggaaggtgtgaacgcaactttgcctcccagggaacaaacatcctccttctaagtggtagatg

SEQ ID NO: 335376 - DNA, 75 bp, Homo sapiens
gtcccccttcctctgggtgtccttgtctcctgctatcaggcccgaaagaattatcgcaaatatttccggtcagag

SEQ ID NO: 335377 - DNA, 100 bp, Homo sapiens
ctccgccaccgtcttcaggccagatggttcacaggcaccagccagaccccctaaaccacgaccgcgcaggactgcaccagaaattcaccacagaaaaccc

SEQ ID NO: 335378 - DNA, 74 bp, Homo sapiens
acctactcatggatggcggctacatcaacaatctgccaggtgctggaaacgtgcgtagcaacagtaggccgagt

SEQ ID NO: 335379 - DNA, 75 bp, Homo sapiens
caccatcaaagagatcagagaccagggctcctgtggctcctgctgggcctcaaaacttccaatgtcaataattat

SEQ ID NO: 335380 - DNA, 74 bp, Homo sapiens
gggaatggcaaactgtagaagctgtggccaccggactccagaattatatccagatcgagagacagaagattctg

SEQ ID NO: 335381 - DNA, 75 bp, Homo sapiens
ctcggcgctgccgtctctggaggagtactggcaacagttgcctttccccatcttcctggttctgctccttcgtgg

SEQ ID NO: 335382 - DNA, 83 bp, Homo sapiens
caagagcaggagcccggcaccccccgccgacaaggaggggaacggcaggagcagctgatgggatatcggaagagagggccgaa

SEQ ID NO: 335383 - DNA, 100 bp, Homo sapiens
ctgcagagctggacctgatcttccttcgaggcattatggaaagtcccatagtaagatccctggccaaggaattgaatgatctggcacgggaccctccagc

SEQ ID NO: 335384 - DNA, 90 bp, Homo sapiens
tggtgccaaaaaggatcagtatttcttagacaagaagatggtcacgaccagagaagctctcgcatcccgtgacctccagacaaggagcca

SEQ ID NO: 335385 - DNA, 100 bp, Homo sapiens
tttgtggggactggagagacaagtaaactctcagagtaactgtcccctctgactaccatttctaagactgatgaagagaagcagcagggcttacctgtgg

SEQ ID NO: 335386 - DNA, 88 bp, Homo sapiens
ctggtgcaaacagactcaagaggctcggagaaccagcttgggctacaagatcaagctgcagagaccattgaagctctgcatgcagcag

SEQ ID NO: 335387 - DNA, 90 bp, Homo sapiens
gaacaatttgaggtcctaaagcaacaaaaagaaataatagaacaagggatagatttggatgatcatggtgattttactgctgcttgtggc

SEQ ID NO: 335388 - DNA, 97 bp, Homo sapiens
ctctagatgccctcaactatgctctccgctgtgtccacagcgttcaaggtggggcagctgcagctctcccacaatctgagtttggtgatcctggtac

SEQ ID NO: 335389 - DNA, 100 bp, Homo sapiens
aggagagcacaaccatcgcagttggaagcccatggggcaggatttgaccctaaagcatggctggaggactggtgcaatcatcccagagttgagatctgag

SEQ ID NO: 335390 - DNA, 87 bp, Homo sapiens
aagaaaagactaccgcactgaaagtggctggcacatgtgtatcaatcccaaggaatgatgagagctgcagagatgtgttacagaaag

SEQ ID NO: 335391 - DNA, 88 bp, Homo sapiens
gcttgaatgtctgccgaaatgttcaagtttaccaaaagagaggcaccgctggaacactaatgaggaaggagcagttggttcaatctct

SEQ ID NO: 335392 - DNA, 100 bp, Homo sapiens
cgaaaattggatgtgaaaatgaagccagaccgagctttgaagtttaaatccaatggagaagactcaagaaacagtccaaagaattcttctagaaccctat

SEQ ID NO: 335393 - DNA, 90 bp, Homo sapiens
tgaaaagcgtcaagaagaggaggaagccatgcgtaggctgtttaaggaagacagagcaggcattggataatattcttattaaggtaaaga

SEQ ID NO: 335394 - DNA, 100 bp, Homo sapiens
aactgaaggccattccccagttctgttttcccgatgccaaggattgggttcctgtccagcagttcaccagtgccggtggtggtgtgcacattgagccccg

SEQ ID NO: 335395 - DNA, 101 bp, Homo sapiens
tcaaaattaaaagaggagcagcatggcatttcagtcactggtttgcagagtccagccctaccacttatgtcttggatgaagatgaacctcgattccttgaa

SEQ ID NO: 335396 - DNA, 75 bp, Homo sapiens
gcggctacatcaacaatctgccagcggagctccctgggtcctcagcagtgaggctggcctccctgcgtgacctgc

SEQ ID NO: 335397 - DNA, 75 bp, Homo sapiens
agtttctggtcactccccaggattatgcgcggtgggtcatgataactgggtacgtggagttctgttccattctgg

SEQ ID NO: 335398 - DNA, 101 bp, Homo sapiens
tgttgtaagccttagcagccttgatctgaagttccatgccattgcagtgtcaactaggcctcagttacttttcagtttgcccaaattgagcccatctcaac

SEQ ID NO: 335399 - DNA, 50 bp, Homo sapiens
tgagaatgtgtctcttgccaaagcgaagaatatactgatgataatgctct

SEQ ID NO: 335400 - DNA, 80 bp, Homo sapiens
ggtcccttttgcctcagatactattttgaaggtattaataggggaccctattaccacatgtctttctccctcagtgtatg

SEQ ID NO: 335401 - DNA, 75 bp, Homo sapiens
caggaagcgcggggcggcggcgaaaggacgttcgtgccctcgtgaggctggcatgcaggatggcaggacagcccg

SEQ ID NO: 335402 - DNA, 74 bp, Homo sapiens
gagagcctgggcaagactggagagtggaagaagttgttccgaatgtaattgaaccttccttcggcctgggtagg

SEQ ID NO: 335403 - DNA, 83 bp, Homo sapiens
catggccactgactcatgggccctggcggtggacgagcaggaagctgcggctgagtcgcatctcaggtttcatttcacaatgc

SEQ ID NO: 335404 - DNA, 74 bp, Homo sapiens
cgatcatcgagctaaaatatcgtgttgtatttgattttcatcaagcagctgatggtatccaggaacaacagaga

SEQ ID NO: 335405 - DNA, 90 bp, Homo sapiens
gcgcgggggaggagaggagcggccggcccgcctccatcgacgagtacaagccccaggatgctaccaccaacccgtccctgatcctggccg

SEQ ID NO: 335406 - DNA, 101 bp, Homo sapiens
atgattttgagcgtcgcagagaacttagaaggcaaaagagggaggagatgcgactcgaagcagaaagtttctgatgaagaattgaaaagaagagtagctga

SEQ ID NO: 335407 - DNA, 51 bp, Homo sapiens
aggcttcacgggaacatactgccatgaaagcgcctacaaatcgaggacttc

SEQ ID NO: 335408 - DNA, 90 bp, Homo sapiens
gccatgttcttctccgcggcgctccgggcccgggcggctggcctcaccgcccactggatgtgtggtttttaacaacagaggagtggcggg

SEQ ID NO: 335409 - DNA, 50 bp, Homo sapiens
cagacctggcccgggacatgctcatgcagctcattggtgggcagtattac

SEQ ID NO: 335410 - DNA, 100 bp, Homo sapiens
tgcagctcaagctgaccattgtggatgccgtgggctttggggatcagatcaataaggatgagagttccagggccctgcgaaccagaagacctcatcgacg

SEQ ID NO: 335411 - DNA, 101 bp, Homo sapiens
ccgggacgcgcggcggcaccgggaggccgggccgagcgctattgacctgaaaagtggttctggaaaagtgtaccaaggccctgcaaaaggtgctgctgata

SEQ ID NO: 335412 - DNA, 97 bp, Homo sapiens
ggcattgtggaactgctcctgacttcagacaacaaggatgggctgagcaaggggattgtccagggagagccccacagtcttcgttataacctcacgg

SEQ ID NO: 335413 - DNA, 82 bp, Homo sapiens
tggttccccaacatgcctcaccctcatctatatcctttggcagctcacagctattacaatttgggtgatgtgagccatgatt

SEQ ID NO: 335414 - DNA, 100 bp, Homo sapiens
cttcagcatcgtcacggacactcctgagctacagagactgaagaggactcaggagcaaatcagtaataattattggatcagatatggaggacgacaggat

SEQ ID NO: 335415 - DNA, 98 bp, Homo sapiens
ggtgctcttcatcaccttcgtggtcgtctggtcctactacgcgtacgtggtggagctctgcgtgtgatgttaaagtctttagtgaagatgggacaagc

SEQ ID NO: 335416 - DNA, 97 bp, Homo sapiens
gatcctacgtgcatgaagatggacgaggtcctgtacagcatcgccgagaagtttggggcggaattccgaaggttctctctggaccgtcataagcctg

SEQ ID NO: 335417 - DNA, 100 bp, Homo sapiens
cttccttccttactttgtcttggtatactacatggcaaaatgggaaagtgtaaacaggaacatcgataagtagtgtaaaaacttgcacaatgaaatccga

SEQ ID NO: 335418 - DNA, 76 bp, Homo sapiens
aatttgaggacctggattccctgctcagtgccctgagtctcaatgaagagtgcgccaacctgcaggccgccattgc

SEQ ID NO: 335419 - DNA, 100 bp, Homo sapiens
gcacctcctcgccagcagccgtccggagccagccaacgagcggtagattttcgttccgtcacccaggctggagtgcagtggtgtgaccttggcttgctgc

SEQ ID NO: 335420 - DNA, 83 bp, Homo sapiens
cggtgccgtgtgtgcgtgagagaagaccagtctttcctctaggtactccaaagattcaggtttactcacgtcatccagcagag

SEQ ID NO: 335421 - DNA, 100 bp, Homo sapiens
aaaaaatttgctggatattgatgcgccagtcactggttggtttcagtgctgatgaaacttgggactctgcaatagatacatggagcccatcagaatggca

SEQ ID NO: 335422 - DNA, 90 bp, Homo sapiens
agtaaaactactcatgtcagctgttctgcaggatcccatgagaagctgattgctgtgtttgaagaacaagaaccactccacaagattgag

SEQ ID NO: 335423 - DNA, 100 bp, Homo sapiens
ctcgaaggcagcacaggacctggaaaaattacatgacttcacaacgggataaagtgaagtagcttcggcttgtgaatgtgcattgcagagacgtgggaga

SEQ ID NO: 335424 - DNA, 100 bp, Homo sapiens
cactgacattgacagcaaacagagattcgggttctgccgcttatcttcaggagcgaagagctgcttctgtatcttaagtttgccagggtttggatacctg

SEQ ID NO: 335425 - DNA, 75 bp, Homo sapiens
ggaggctaaagagatattgtccaggttccgctgtgtggcagctgattgcttccttcctgaggcttccaatctcag

SEQ ID NO: 335426 - DNA, 75 bp, Homo sapiens
catgagcatggcagaggcacccccagggacattagcaagtcatctggggacctggagaatgatgagcaggcagcc

SEQ ID NO: 335427 - DNA, 98 bp, Homo sapiens
tttgtggatcgctgtgatcgtcacttggattgatgaggagcttctgggagatggacacagctatagtcctagagctattcattcatggctgaccaggg

SEQ ID NO: 335428 - DNA, 75 bp, Homo sapiens
atggcggatgccctgcagtacctgcagaaggtctctggagacatcttcagcagatcctgataacttaagtgactc

SEQ ID NO: 335429 - DNA, 100 bp, Homo sapiens
caagaagccagtcaagcggccaggcttgcagggtggcccccgctccgacttcgacatggcctatgagcgtggccggatctccgtgtccctgcaggaagag

SEQ ID NO: 335430 - DNA, 100 bp, Homo sapiens
tcaacagaagaaaagcccagctgctggcccgcgtcaacaaggagcatgagcacaagctgaagttatgccccgtggtgccctgcttgtcaaaatcttcaac

SEQ ID NO: 335431 - DNA, 50 bp, Homo sapiens
cgagaccagcctgggcaacatgagagttgtcatcgaaaataacaagacta

SEQ ID NO: 335432 - DNA, 83 bp, Homo sapiens
caccgcggtgcggacccagcacgcctgggccgggggctgcagcatggcctgacctctcgggacacacccagccctgtggaccc

SEQ ID NO: 335433 - DNA, 102 bp, Homo sapiens
gggctcaccaccctggcgcaggcggtgcaagcaggctccaactattatgtgcgcatcctgagcaccatcgatcgggagctgctcaagcccaacgcctcagtg

SEQ ID NO: 335434 - DNA, 83 bp, Homo sapiens
atcatctagaaggacaaatgaacttcaatgcagattctagccaacataaaggaactgtggctgcaccatctgtcttcatcttc

SEQ ID NO: 335435 - DNA, 100 bp, Homo sapiens
ggaagaattttactgcgaagttttgctcctggatgaatccaagttaacccttaccacccagcagcagggcatcaaggctggaagcgcaattcattgaccc

SEQ ID NO: 335436 - DNA, 83 bp, Homo sapiens
ccgctatcctgccaactctatcgtggtcgtaggaggctgtcctgtctgcagacaatgcagatcttcgtgaagactctgactgg

SEQ ID NO: 335437 - DNA, 83 bp, Homo sapiens
caggcggtgacagagtggagccatggctagagtaaaggcatgacttcctggcaccacagggaaaatcgggtgcaagcccagaa

SEQ ID NO: 335438 - DNA, 100 bp, Homo sapiens
ctcagatcagggagctggaggagaaggctatggaagagctcaaggagatcatacagagcgatcgtcttctgatcaaaggaggtaaaattgttaatgatga

SEQ ID NO: 335439 - DNA, 100 bp, Homo sapiens
ctcccaagtagatgggattacaggtcagctggttaagatgctgctttatacagaggtaactcgctatctggattttaaagtgactgaagggagctttgtc

SEQ ID NO: 335440 - DNA, 132 bp, Homo sapiens
ggcatgcagcagttacttccactcaagaatcgtaggccaggctgatggagagctgaacattactcttccagaagaggcttctgcagaacccccaggtcaggccacatcattgaggctgcaggatctctcttc

SEQ ID NO: 335441 - DNA, 75 bp, Homo sapiens
ccgaatcaaagcggcgcattgagtgacaccacagccaaagccctatgggaagctttactgaacactaagcacaaa

SEQ ID NO: 335442 - DNA, 100 bp, Homo sapiens
ttaacagcaactctgatgtggagttcttgaagcaactaaggtatgacgattactactattatggtccacctcatatgccccctccaacaagaggtcgagg

SEQ ID NO: 335443 - DNA, 88 bp, Homo sapiens
atccttgttgccgtcccttcgcctccttcaccgccgcagaccccttcaagttctagtcatggggtattgtgaacgtagcctcctccac

SEQ ID NO: 335444 - DNA, 75 bp, Homo sapiens
tggacagatgatgccagttaattactttgaatagcatgcaagcggcaagatgtcctacagatgaattatctttaa

SEQ ID NO: 335445 - DNA, 97 bp, Homo sapiens
aacagtgtggcccgccatgttcttctccgcggcgctccgggcccgggcggctggcctcaccgcccactggagtcactgctagttggattgaagcaca

SEQ ID NO: 335446 - DNA, 100 bp, Homo sapiens
tcattcccaaaatgaaaatttctccaaaaaggatgtcatgttcctggcctggtggagccgccaccaaaatgcagattttcgtgaaaacccttacggggaa

SEQ ID NO: 335447 - DNA, 100 bp, Homo sapiens
aagagagaccttggagtaattcgtcgacaggtaaggagtgccaatggaccgatgcctgcctgtctcatccctgtgcaaatggaagtacctgtaccactgt

SEQ ID NO: 335448 - DNA, 100 bp, Homo sapiens
cattgccaccaccaccaccaccaccacagagtctgtggaagaggtggttcgagacaagttggatggcttgaggactggtactaaaaggaaacgtgactgg

SEQ ID NO: 335449 - DNA, 99 bp, Homo sapiens
agcagcaagtgcgcggttggggccactgcgaggccgttttagatatgattctataacagactcttccagaaatgatatgaagaggaaatttgccctgac

SEQ ID NO: 335450 - DNA, 82 bp, Homo sapiens
ctttatgggccccctggttgcggaaagagcagttttatggccctacggaaggctctgacccatctggaaatgcggcgagctg

SEQ ID NO: 335451 - DNA, 75 bp, Homo sapiens
caggggtcagctgggccgcaggggcgcgcagcgcggggagctgccaggtcagctacacaacctggatcttaccac

SEQ ID NO: 335452 - DNA, 90 bp, Homo sapiens
ggcgagtttccgatttaaagctgagctgcgaggaaaatggcggcgggaggaattgaatgatctggcacgggaccctccagcacagtgttc

SEQ ID NO: 335453 - DNA, 100 bp, Homo sapiens
tagattttggaggcaaagatggagagattttaagtgggcagaccaacatccacctcagcaaaaacttcttcctgacgaatcgcgccagggagcgctcaga

SEQ ID NO: 335454 - DNA, 100 bp, Homo sapiens
aggccagacggccggctctgtgagcgccaagaccggctgaagactacgtctactttgagaactcctccagcaacccatacctgatccggagaatcgagga

SEQ ID NO: 335455 - DNA, 99 bp, Homo sapiens
ctccgtcgcctcaaacaggagctgatcgtcagtatttaaacagatcacatcatgcgtgagtacaagctagtggtccttggttcaggaggcgttgggaag

SEQ ID NO: 335456 - DNA, 98 bp, Homo sapiens
tttcatgaatttcaagagagtaccattggggattttgagaagagggggaaaaaggaagtttgtcctgtcctggatcagtttctttgtcatgtagccaa

SEQ ID NO: 335457 - DNA, 100 bp, Homo sapiens
tctgaatccggttttcaacgagactctccggcgtctgaccaaacacaccaagttcgtgcgggacatgattcgggaggtgtgtggctttgccccgtacgag

SEQ ID NO: 335458 - DNA, 87 bp, Homo sapiens
cactggaagcaaagatcaaaccattcgaatctggagctgttctagaggccgagcaagtcaagccagagatctgttatcaaaaatgtt

SEQ ID NO: 335459 - DNA, 100 bp, Homo sapiens
aagcaggcagccagccaggaagggaggcagaagcatgctaagaacaacagtcaggccaagccttctgcctgtgatggtacaggtttgcagattccgccag

SEQ ID NO: 335460 - DNA, 83 bp, Homo sapiens
caaatttgaaaggcttcgaggcagcggtgcagctctgtcatttccactctgctctgctgcacagaaggcagaagccctggccg

SEQ ID NO: 335461 - DNA, 98 bp, Homo sapiens
gtgtctctggattcaagtcccaggagtcctgaccagagagcagaaagttgtacaagggattgatttaaaccaaattcgaggacttgggtttgatgcca

SEQ ID NO: 335462 - DNA, 100 bp, Homo sapiens
gaggacctgaaggacgcgcaggagaagctggagctcacggagaagaaggcctccgaccaccagtggcagttcgcagcctccaggacttggctcgcatcgc

SEQ ID NO: 335463 - DNA, 51 bp, Homo sapiens
cgacagcagcagcagcgcgtctccttcagcttcactgctgtatctcccagt

SEQ ID NO: 335464 - DNA, 98 bp, Homo sapiens
gttcaaagtccagtatctctaggagaagatttgcagtggtggcctgataaggctgcaagaaagcgtaagattgccattcgaaaagcccaggggaaaaa

SEQ ID NO: 335465 - DNA, 87 bp, Homo sapiens
ctgacagcagccatcgaggcgagccagagcctgcagtcccacacggtcactatcatatgacaaaggctttgccgcagttcatcttcc

SEQ ID NO: 335466 - DNA, 98 bp, Homo sapiens
aagaaggggacttgggcccagtttatggcttccagtggaggcattttggggcagaatacagagatatggaatcagtctgtgacactgcatacagatgt

SEQ ID NO: 335467 - DNA, 49 bp, Homo sapiens
ggcgccccgcggcatggcagcctcaggtactccaaagattcaggtttac

SEQ ID NO: 335468 - DNA, 74 bp, Homo sapiens
tcaggcgtgcgcggacggtgtgcggccaaaactggacaagccaaggcatctgtagccaaagtaaacaaatctac

SEQ ID NO: 335469 - DNA, 83 bp, Homo sapiens
gcgtccccggcgcgaagaggctggactcggattcgttgcctgagatgcacaccggctgcaccatgtcagcagcctggcctggc

SEQ ID NO: 335470 - DNA, 74 bp, Homo sapiens
cagacaggtggcgacggcagaggatgagacggtttaagcggaagcatcttactgccattgactgccagcatttg

SEQ ID NO: 335471 - DNA, 88 bp, Homo sapiens
tcgagtgttggataacttctctgacatagtagaaggtccatccctcatgaaaaatgactgaccactgctgggcagcaggagggatgat

SEQ ID NO: 335472 - DNA, 100 bp, Homo sapiens
cggggaaccgcagcgcagtgacagtgcagaaccccggcgcggcccttggctaatttgcgccagaaagttactcactcagtacaaactgatcttagtcact

SEQ ID NO: 335473 - DNA, 82 bp, Homo sapiens
ctctggctaaattccagacagagcccaaagggagccttcaggcacatgacacatcatcactgcccacggtcattatgagaaa

SEQ ID NO: 335474 - DNA, 90 bp, Homo sapiens
gcgcacctggtgcgggccctctggaccctggagtacaccccgcagcacagccgcgacttcaagtcagtcactcagccagaatctacaggg

SEQ ID NO: 335475 - DNA, 50 bp, Homo sapiens
cgagccagagcctgcagtcccacacggttcggagcgaccttggccgttgg

SEQ ID NO: 335476 - DNA, 75 bp, Homo sapiens
ttatgtgcctgtaaaagaatacccagattcttgtgaaaatgccattgtgtgctggaaacctggcaagatggaaga

SEQ ID NO: 335477 - DNA, 100 bp, Homo sapiens
tgcaacttgctattcgtggagatgaagaattggattctctcatcaaggctacaattgctggtggtggttcttcagatagatcctgaagttacagatgaag

SEQ ID NO: 335478 - DNA, 100 bp, Homo sapiens
ctgagcagcgtgcaggagtcccaggtggcccagcaggccagtatctcaacatcaaactaactgacatcagtgtcacagaccctgagaaataccctcacat

SEQ ID NO: 335479 - DNA, 75 bp, Homo sapiens
aaatctcaaagatctcgtacaagatccttctttggaacagaaagaacagcttcaaaagatgaaagacttcgggtc

SEQ ID NO: 335480 - DNA, 83 bp, Homo sapiens
ctcgtcaaaaaatattcacagttcataaactttcctatttatgtatggagcagcaaggagtacttcttgcaagcagagctgac

SEQ ID NO: 335481 - DNA, 97 bp, Homo sapiens
ggagacgtatttctatccctgcccatgtggagataacttctccatcaccaaggaatgtatcctgtcaggtataatgtcagtgaatggcaagaaagtt

SEQ ID NO: 335482 - DNA, 74 bp, Homo sapiens
ctagtgtttgccggagccatggaatttgctgaagggggtccactggacggggcctgagctacaacttcacccac

SEQ ID NO: 335483 - DNA, 95 bp, Homo sapiens
ggaacgcgggcgcctgaaggagttgttgtctcggcagcgcccgcggagacgtgaagaggaattgaagccattttttatgaaggaagttggcagtc

SEQ ID NO: 335484 - DNA, 102 bp, Homo sapiens
aggaggtcattctgccctttcttgggctgtgttcacggggcaagattcttgccaagagaattaatgtgcgtattgagcacattaagcactctaagagccgag

SEQ ID NO: 335485 - DNA, 50 bp, Homo sapiens
caagatcaagaccggcgtggtgaagcggttctagtaaataccgcttgctg

SEQ ID NO: 335486 - DNA, 74 bp, Homo sapiens
ctcggttggatgcgaaggagctgcagcatccagactgaaactgttgaggagcccatggaggaagaagaagcagc

SEQ ID NO: 335487 - DNA, 75 bp, Homo sapiens
tggaggacgttaactctaacgtgaacgcggaccaggagggtgatattcatgaggatttttgcagcgtttgcagaa

SEQ ID NO: 335488 - DNA, 96 bp, Homo sapiens
gccgccctcagctcgaagtcagccaccatggaggcgcaggcacaagagaatttggatggagagacccggaactgccggaagtgattcagatgttgc

SEQ ID NO: 335489 - DNA, 76 bp, Homo sapiens
ggccgcctagagtggttcagccacaaggagattctacaagggggttgctcctctctggatgagacagataccatac

SEQ ID NO: 335490 - DNA, 90 bp, Homo sapiens
gccactgtaagtggggagagaagctgctcagaacacggctctagataaggaggggcagattttctgcagcaagcactgtcaagacagcgg

SEQ ID NO: 335491 - DNA, 100 bp, Homo sapiens
attctggggcagtatcaacggagtctccggggacacctcctacctgttcatcactggccctgatgttgtgaagtctgtcaccaatgaggatgttacccag

SEQ ID NO: 335492 - DNA, 101 bp, Homo sapiens
cgcgagttccgggagcgggccttgcgcgcgcggtgggtcgaggcggacgcgcggctgcgccagcatgtgcagtctttgccaacaaaaaaaattaccaagaa

SEQ ID NO: 335493 - DNA, 99 bp, Homo sapiens
acctgacaggccacagtgacttccatctcttcaaagaaggaattaaacccatgtgggagcaatttccagtttatgtactaccaaaagtagagtatcaag

SEQ ID NO: 335494 - DNA, 100 bp, Homo sapiens
tgtgatgttggagaactacagaaacctcgtctccctgggtttggaaatatcttgggatggagacagttttgtagaagtcatggctgcgccgcatctcaag

SEQ ID NO: 335495 - DNA, 75 bp, Homo sapiens
ctgcctttgccgccaccatgcccaaaacgttgaaaacgaggcccactgcgactttgtgaagctgcgggagatgct

SEQ ID NO: 335496 - DNA, 75 bp, Homo sapiens
agagacggagccccggctcgcccgtgtgcagagggcgtgatggtgggcatgggtcagaaggattcctatgtgggc

SEQ ID NO: 335497 - DNA, 75 bp, Homo sapiens
attcagacccatttccagtcatgacggtcttgcgagtggctggttccctgcagaagagcacagaagtgatgaagg

SEQ ID NO: 335498 - DNA, 98 bp, Homo sapiens
ttgtctactccacatagaccatccactgcctcagggtcttcagtggtaacagccagtgtgcaggttcaatgtatctatgcctgcctacctcaatctgc

SEQ ID NO: 335499 - DNA, 83 bp, Homo sapiens
gcaaccattgacgccatgtcgggttattcgagtgaccgagaccgcggccgggaccgagggctctccgtgtgaaatggtcccat

SEQ ID NO: 335500 - DNA, 100 bp, Homo sapiens
gccgtgattgtcagtttcctgaggcctccccagccacgctttctgtacagcctgcagaactgcctgttgcagtctccaaggcaccatgaatgccatcgtg

SEQ ID NO: 335501 - DNA, 85 bp, Homo sapiens
agcaggcccgttggaagtggttgtgaaggaagcagccaccctcgccatggcctccccgcccgcctgcccctcggaggaggacgag

SEQ ID NO: 335502 - DNA, 100 bp, Homo sapiens
ctgagcgtgacgggcaccgtgtgccatgtggggaaggcggaggaccgggagcggctggtggccacggaatgatgagaagacagcagctgattacaagatt

SEQ ID NO: 335503 - DNA, 83 bp, Homo sapiens
cttagccacccggagagaaggcatgagagctaataatgaaggtggtgtttttaaggctcatcttactttcccaaaagattatc

SEQ ID NO: 335504 - DNA, 75 bp, Homo sapiens
atccaagaggccttgaaacgtcccatcaagagtgatgtggagggactgggaagagtcacggcagatggtgggagc

SEQ ID NO: 335505 - DNA, 100 bp, Homo sapiens
gattgactatggtctctccggctaccagagacggtctcgccacattgcccagactggtctgaaagtcttgggctcaagagatcctcccgcttccgccttc

SEQ ID NO: 335506 - DNA, 50 bp, Homo sapiens
gagaaagcccacatcaacctggtgaggcgccatgtcagaaccggctgggg

SEQ ID NO: 335507 - DNA, 100 bp, Homo sapiens
cccgaagagtcggccagccccgaactgccggagtaggggtgggaaccaaactttttcctgccccgggacagacacactcggtgaaatacctggagtgctc

SEQ ID NO: 335508 - DNA, 100 bp, Homo sapiens
agaacaccctgccgaccaaagagattatggcagagaacgatgtggacaatgagctcttggactatgaagatgatgaggtggagacagcagctgggggaga

SEQ ID NO: 335509 - DNA, 51 bp, Homo sapiens
agcaagaacgggaacaaaactctggtttcagagagtatgcagtatcctttc

SEQ ID NO: 335510 - DNA, 74 bp, Homo sapiens
cgtaccatctgctcctcagtagacaagctggacaaggtgttccggctgccggtgcaggagtgcctgagctaccc

SEQ ID NO: 335511 - DNA, 50 bp, Homo sapiens
gcccacaactcttgtcctaccacctcaatggagtttcactcttgttgccc

SEQ ID NO: 335512 - DNA, 100 bp, Homo sapiens
ccgagcgggcggcttcctggcctgggcgctccggtggcggcggagggttgtgagtcccggcccagcccctccacccccctgcccccccgatgcgaccatg

SEQ ID NO: 335513 - DNA, 74 bp, Homo sapiens
agcggggcaggagcgcttccgcaccatcacctccacgtgctggagaatctggtaaaagcaccattgtgaagcag

SEQ ID NO: 335514 - DNA, 101 bp, Homo sapiens
gcacttaagcctcggaacaactttaccaggaatgaatctgaagtctgctgcagtaaaacacagaaggctttaaaatgttttcttgcataaaattcaaaact

SEQ ID NO: 335515 - DNA, 82 bp, Homo sapiens
gggaggcggcggcagctgcggcggggccggcctttccatgggtaaggagaaggcacttagcctccagatgatgaaatactgg

SEQ ID NO: 335516 - DNA, 75 bp, Homo sapiens
gctaagccagaccggtcctcgtttgtaccgtccctcttcaggtccctccttgtggtccatttctgggcaccatgg

SEQ ID NO: 335517 - DNA, 83 bp, Homo sapiens
cagatgaggatgaggaagggaaattacctgaggacatcatgaagattgctcgagactttaatcccaactggatgagtgctgtg

SEQ ID NO: 335518 - DNA, 50 bp, Homo sapiens
gggcgctggtctgctcccagccggggtcgggccccggctcagtggtccca

SEQ ID NO: 335519 - DNA, 100 bp, Homo sapiens
tctcgctccggagccgctgcacatttcgttggtcgcattatgtttcagctcttctcagacatatgtccaaaaacatgcaaaaacttcctttgcttgtgct

SEQ ID NO: 335520 - DNA, 101 bp, Homo sapiens
gaggatggtcatccgcgtgttcatcgcctcttcctcgggcttcgtggcgcttagaccatgctcagcctccaagcagccttgtcatcgacaaagaatctgaa

SEQ ID NO: 335521 - DNA, 100 bp, Homo sapiens
atatgccaaggaaaaactggagagcttcatcaaaaatagtgatagctttgataagtggatcatccatgccatggagtatgaacttcagatccgtggcgga

SEQ ID NO: 335522 - DNA, 100 bp, Homo sapiens
gccaccgaaggaagcatcccagacaccgggaaggtaatgattgatgaatccctttcatccgatgaccctgattcatatgtgacattgacggttgtccggt

SEQ ID NO: 335523 - DNA, 82 bp, Homo sapiens
ggcagcgcccgcggagacgtgaagaggtgaaaggtgtagcagtcactcggcctacacccacagcatcgaccttgtgaaccca

SEQ ID NO: 335524 - DNA, 100 bp, Homo sapiens
ggtttgtgctcaagggggatcagctctattatttcaaagatgaagatgaaaccaagcccttgatactagctcagtcatgtactgaaatcctagaattgca

SEQ ID NO: 335525 - DNA, 81 bp, Homo sapiens
aattgctgcagctattgctgctgtcaatgcattgcatggcaggtggtttgctggaactagaggctgctatccagccagata

SEQ ID NO: 335526 - DNA, 75 bp, Homo sapiens
ggacgggcgccacattctcaacaccacggaattccatcactgcctcctaaaccaccaaaacctactactgtagcc

SEQ ID NO: 335527 - DNA, 75 bp, Homo sapiens
cctccgagcgcaaggacagcgcgaggtccgcgcagcccagcgcagccatggtttggacagaggagccaaaggcca

SEQ ID NO: 335528 - DNA, 100 bp, Homo sapiens
gcagcgaagaagatcgaaaattaaacctcagtcaagttcatccgagaagtaacaccatatatcaagaagccatcattagtatcagatctgccgtgggaag

SEQ ID NO: 335529 - DNA, 75 bp, Homo sapiens
gttatttttcagcgtgaacaagagaccatcatcgacatcttggagtactcaaacaagaagaggctgcagcaattg

SEQ ID NO: 335530 - DNA, 50 bp, Homo sapiens
cggcatgcggcccaacgccaagaacaacaagtttgcctgcaatggtactg

SEQ ID NO: 335531 - DNA, 98 bp, Homo sapiens
gaaagcacagtgcctgcagacatgctgtcactgctccacacatcaacgctggcagtccttggggctcgaaaacctcacagcacgggtagctctgaacg

SEQ ID NO: 335532 - DNA, 100 bp, Homo sapiens
tgcagatgaagtggagagagtcggaggggagcggcctcggctacctggtgcaggtgaagcccatggcaggtcaaacgatcaaggagcaaaggcgggctgg

SEQ ID NO: 335533 - DNA, 100 bp, Homo sapiens
ccaccatcaagctgtctaagtccaaagatttttacccaggccaagatgttcataaatataaagagcatcttatggatgtgttcaaccttaatagtaaccc

SEQ ID NO: 335534 - DNA, 83 bp, Homo sapiens
cgccatcatgaatccagctagcaaagtaattgcactgaaagttgctctatatgcaatcagtgctgtctactttgctggagtga

SEQ ID NO: 335535 - DNA, 90 bp, Homo sapiens
aactgtaaaactagaatttgttcacatgtttcatttctatgtctcctgaagctgtccaatggttggtcaaagaaaaagtgatgtatgaaa

SEQ ID NO: 335536 - DNA, 100 bp, Homo sapiens
aagttttcagcctcatccagcaggcggtgacccgctaccggaaggccatcgccaaggggcaatgaaaactattctaggtgatcaacgaaaacagatgctc

SEQ ID NO: 335537 - DNA, 100 bp, Homo sapiens
caacaccgagttcaagaacacccgcaccaacgagaaggtggagctcatgaaggacttcagcatttgggtccttttggcaacatccccaacatcgtggcag

SEQ ID NO: 335538 - DNA, 74 bp, Homo sapiens
tctcaatcagaattactagattttctctcaaactacgaggaatgatgagaagacagcagctgattacaagattt

SEQ ID NO: 335539 - DNA, 88 bp, Homo sapiens
tctggaaagctttaggagttcacagtatcttgcaggagagagagttactgcctgtgaagaaatttgaaagtgagattctggaagcaat

SEQ ID NO: 335540 - DNA, 100 bp, Homo sapiens
gcggcggcgccaagcaagtgctctacgtgcctgtcaagaccacggagtacaagcgcaagctagccagagtttccctggtgcgcaaagaactcaggtcccg

SEQ ID NO: 335541 - DNA, 88 bp, Homo sapiens
tccatgttttacatttctttccagaattatacaatatttgaaacagagctgtcagtcagtgctgaattagtgcctacctcatcatgga

SEQ ID NO: 335542 - DNA, 101 bp, Homo sapiens
gcctggaatatgaaggcttccccgtcccgatgttccaggtcatccagccagagcgtgcgctgtacatccaggccaacaactgcgtggaggccaaggactgg

SEQ ID NO: 335543 - DNA, 101 bp, Homo sapiens
ggagctccttttcctccacctaccttcccgaatcgtcagtatttaaacagatcacatcatgcgtgagtacaagctagtggtccttggttcaggaggcgttg

SEQ ID NO: 335544 - DNA, 75 bp, Homo sapiens
cattgacatccctatcaatgtctacaaggcctgctggtgggtacccttgatgttgtgttggactccagcgcccgg

SEQ ID NO: 335545 - DNA, 100 bp, Homo sapiens
attcgtagcaggttccagctgaatcttgacaagaccatagagagttgcaaagcacaattagcagctgctggagtgtaataagtgccgaaacagctatcac

SEQ ID NO: 335546 - DNA, 75 bp, Homo sapiens
tactgccgcttcagttctcccggtgtggccacgagtcggaaatgcactcggtgatggaaagagagccactattct

SEQ ID NO: 335547 - DNA, 83 bp, Homo sapiens
aacgccgagcgcaccgacatctgcctgctcaaagccgaggtgctcggtggagtcatggcagtgccctttgtggaagactggga

SEQ ID NO: 335548 - DNA, 98 bp, Homo sapiens
cccgggtttggtagagtgacttctattcactaaaaccatgtgtctgaactgaagaagcttgggctcacttccacaaatattacatgcagcaaactgga

SEQ ID NO: 335549 - DNA, 100 bp, Homo sapiens
ggcagtgcggcgggttacggcctggtcaggtgaaattcgatgctactgtgatgctgcccactgtgtagccactggttatatgtgtaaatctgagctcagc

SEQ ID NO: 335550 - DNA, 101 bp, Homo sapiens
acagctctctgatcctcagacggtggctggtgcctttggctacttccagcaggattgagagctactcatgtaagatggcaggagacgacaaacacatgttc

SEQ ID NO: 335551 - DNA, 100 bp, Homo sapiens
agaaagagtgtctcatcttcttcaagataacttgccaaaatatcccaagtgtccttcaagatatcactgtactcatgaagctggtgtacatagtgttggg

SEQ ID NO: 335552 - DNA, 82 bp, Homo sapiens
aaaacacatctttacacactaaacaccagagccggaagtggaaccgcccagtgcccccgagctcaagcaagggctgtatgag

SEQ ID NO: 335553 - DNA, 88 bp, Homo sapiens
cagtgtgggttccatcttacttgtcacctgctcattgggaactttggtctcagcttagagcaatcccgggcccagatggccctgtgga

SEQ ID NO: 335554 - DNA, 90 bp, Homo sapiens
gagaaatcaaagttaacatctttgatatggctggacatcccttcttctatgaggtggagccatcgaagcccccacccacaggctgacaga

SEQ ID NO: 335555 - DNA, 75 bp, Homo sapiens
taggaaaaaagctgaaggcaactatggatgctgggaaactgagggagcactatgtctgcggaagtccccgaggca

SEQ ID NO: 335556 - DNA, 100 bp, Homo sapiens
gtctataagctttgcaacagaattacagagtatgatgcccgccatgttcatagaggataaagcagtagacaccctggcttacctcagtgacggtgacgcc

SEQ ID NO: 335557 - DNA, 98 bp, Homo sapiens
gaatcaaagaagtaggagatgatacttcctcttcttgacagccttatggttaagtgcctgatttgagatggggtcccaggtctcggtggaatcgggag

SEQ ID NO: 335558 - DNA, 101 bp, Homo sapiens
cggcgccgccgcccccgggctcgcggcctgcagagtttatgtggccgaggcagacaagtggaattaggccttgctgcaggggacttcatttccttctcagt

SEQ ID NO: 335559 - DNA, 101 bp, Homo sapiens
ctttctttgtggtcttcatttgtgaatacataggagctcatgggacacatgtagctagtatagctgctggacactttccagaagaacctgaacggaatggg

SEQ ID NO: 335560 - DNA, 100 bp, Homo sapiens
cagaacactattcacaaagattgcctgcagtttattgctctttcaccatgcctggatcacttcctttgaatgcagaagcttgctggccaaaagatgtggg

SEQ ID NO: 335561 - DNA, 75 bp, Homo sapiens
atgaccctcgtagtggctgcggcgcgggccgagaaggaagaaggactccatgaaagatgacagaagaagttattg

SEQ ID NO: 335562 - DNA, 105 bp, Homo sapiens
tctcctcggcactgtattctttacctgcttcccaatcccactgatgaggatcagcccatggcatcagtgtcattccaggacgtgactgtggaattcagccaggag

SEQ ID NO: 335563 - DNA, 75 bp, Homo sapiens
caccgtgaggcagggggacacagccatcctcagacactgtgcatcttagccaacatagcggatgggacaacagca

SEQ ID NO: 335564 - DNA, 82 bp, Homo sapiens
gcctggcagccccgctctctgcacttctcagatgaccaagatggtgctgcagatggtgctgaggatggagaacccaccaagc

SEQ ID NO: 335565 - DNA, 75 bp, Homo sapiens
ggatccagctgttagtcgggtaggcataggtctggtgagctgtaccttctttctggcagtgaatggtctgtattc

SEQ ID NO: 335566 - DNA, 122 bp, Homo sapiens
agaaggcttatgaggatggctgcaagactgtcgacctaaagcctgactggggcaagttaagtgggcagaccaacatccacctcagcaaaaacttcttcctgacgaatcgcgccagggagcgc

SEQ ID NO: 335567 - DNA, 87 bp, Homo sapiens
gagtacaacacggtggcaagcaagtttaatcagacctgctcacacttcagaatagagaagagagcctgttacctatccataaacccc

SEQ ID NO: 335568 - DNA, 100 bp, Homo sapiens
ggagcagcgctgcagccgcagccgcagccgccgccggccaggcagtacatgccacactactacccttcctgctcttgtgcgcacacctaccctgatgatg

SEQ ID NO: 335569 - DNA, 100 bp, Homo sapiens
cactgccagcataagtctcagcagcaacctgaaacgaacagccagcaaccctaaagtggagaatgaggatgaggaaggtgctcgggtcttcggggcactg

SEQ ID NO: 335570 - DNA, 100 bp, Homo sapiens
atctcaaagaaagaaacaagttcttggcaagagaggcatcctccttgaagtatttggctgaggagttttcaatcccaggtatagttaataaagtgtcttc

SEQ ID NO: 335571 - DNA, 90 bp, Homo sapiens
atccgggatgggatccacggacccctgctaagtgctttggggacgagtactacggggccgtggaggaggagaagccacaatttgaggaag

SEQ ID NO: 335572 - DNA, 90 bp, Homo sapiens
ggcgcgaagaggctggactcggattcgttgcctgagactcaagtaggacgttttgctcctcaattttctggctaccagcaacaagattct

SEQ ID NO: 335573 - DNA, 90 bp, Homo sapiens
gctagggtcgccgccactgccgcaggaggcgtgagctttcatgaagcagaggaggatgggtctgaacgactttattcagaagattgccaa

SEQ ID NO: 335574 - DNA, 51 bp, Homo sapiens
tgaaaacgtattttaaagatggcaaatgatgaataaggtatttggaggtac

SEQ ID NO: 335575 - DNA, 97 bp, Homo sapiens
cgcgggctccatcagcatggctgagccgcggcgagtcctttgcacatgttggcaacacacgcatccgcatcggcctccctgcccacaaagcgccaca

SEQ ID NO: 335576 - DNA, 83 bp, Homo sapiens
gttaggacctggaaatgtacagaaagaagtctcatcttcctttgaccacgttatcaaggagggccatgttcaccggcggcatg

SEQ ID NO: 335577 - DNA, 87 bp, Homo sapiens
tttcctcgtcgagcgcaacccaaggaaagtatgtgatggtgatgggagtggttcaggcctgcagccctgagccctgcctgcaggctg

SEQ ID NO: 335578 - DNA, 74 bp, Homo sapiens
tgggctggcgttaactgtgcggaggcagttttggaccaatcgaatacaaaggccccatgagtgctgtttacatt

SEQ ID NO: 335579 - DNA, 83 bp, Homo sapiens
cgggattttacttctgggaagcagcactgttactcaggaagaggatcacctagcccgggtagaagaggcaatcacccgtatgc

SEQ ID NO: 335580 - DNA, 101 bp, Homo sapiens
gctatgtgccctctttgttcctaaagcagcagccgctcttctaaaacattcaaaccaaagaagaatatccctgaaggatctcatcagtatgaactcttaaa

SEQ ID NO: 335581 - DNA, 75 bp, Homo sapiens
gtccgcgctgcttccacccaacttcctgttagactgtctcgaggatgcctacggagctggctgcacttcagaatg

SEQ ID NO: 335582 - DNA, 82 bp, Homo sapiens
ggcgtggtggcccagtactaccggcccctgcatgtttgcctgcaatgagatttcattctctacatttaaaggacatcctttc

SEQ ID NO: 335583 - DNA, 100 bp, Homo sapiens
gcggctgcgtcgggctgcaggagaagatggcggtctccacaggctcttgatggaaatgtgtatgatcatctcaaggattatttaatagccttcagccgga

SEQ ID NO: 335584 - DNA, 145 bp, Homo sapiens
caggatacaaggcagccatagttcacaatgttgattctgatgacctcattagcatgggatccaacgacacaatctgcacatcgtgctgccacacgaggcttcattcgttatggctggcgctggggttggagaactgcagtgtttg

SEQ ID NO: 335585 - DNA, 101 bp, Homo sapiens
cggggaacgactgcggcgcgctgctggacgaagagctctcctccttcttcctcaactatctcgctgacacgcagtgtatgctgatggtagcatatgtttag

SEQ ID NO: 335586 - DNA, 97 bp, Homo sapiens
tgcaagaaactgttgaattagacccgtttcctatagatgagaaaccatacaagctgtggtttggccggaagaatgtgctgttcgtgaccatgggcat

SEQ ID NO: 335587 - DNA, 90 bp, Homo sapiens
gaaatttgatgacctagatggaacacatgctctgatgatgaagttctcgctggagaagctgcaccaaggcatcacagtctcagaccctcc

SEQ ID NO: 335588 - DNA, 75 bp, Homo sapiens
gatcggggacggagagaacacgagcccatcagaaaaggatgcgcctccacttagcaaggctgggcaggatgtggt

SEQ ID NO: 335589 - DNA, 100 bp, Homo sapiens
agaatcacgcccagaataaagccaagctcatctctgagacccggaggaggttcgaagctgagtatgtgacaggtactaggttttgacaagcttgcatcat

SEQ ID NO: 335590 - DNA, 106 bp, Homo sapiens
cgagccgggatctcaggtcctcgggggcggcggccacgccaaggacggagtgcctggtgaagaatgtgatgggatcactagcatgtctgcggagagcggccctggg

SEQ ID NO: 335591 - DNA, 101 bp, Homo sapiens
ggccttctggccaggcgtctgcgaaatcatatggctgtagcattcgtgctatccctgggggttgcagctttgtataaggccaggagtggtggctcacacct

SEQ ID NO: 335592 - DNA, 100 bp, Homo sapiens
gtctgtgtttgaagtcaacattcgatttattggaggcctacttgcagcatattacctatcaggagaggagtcacaatatggagcttccgtttctgccaag

SEQ ID NO: 335593 - DNA, 74 bp, Homo sapiens
tggctccgggggtggcgggcgcagctgctgtgacaggatcacgcagatttgcgaagccatttcttcacagttgg

SEQ ID NO: 335594 - DNA, 75 bp, Homo sapiens
gcggctttcaacccccacctcagcccagcaattcgtttccgttactatggcaatgacggcagggactacaacaac

SEQ ID NO: 335595 - DNA, 91 bp, Homo sapiens
cggaggcggaaggggaaagcctggagtcctggctcaggattgtcaatgaggcagatcagattccgatttgacgggcaaccaatcaatgaaa

SEQ ID NO: 335596 - DNA, 100 bp, Homo sapiens
ccgctgaggtggacgtgtacaacccgacgaggaacgaatgggacaagatcccgtccatgaatcagttccacgcactctcctctcctcagtctcctttccc

SEQ ID NO: 335597 - DNA, 93 bp, Homo sapiens
tttcgccagcccgtgccgcgagcgcggcctgcaggaggaacccaagacagaccaggatgaggagcattgccggaaagtcaacgagtatctgaa

SEQ ID NO: 335598 - DNA, 76 bp, Homo sapiens
tgagagagtggttgtaaaaatcctgaaggtgtgatgaatgcagactctgctaccattttggctgtttggatcctcc

SEQ ID NO: 335599 - DNA, 83 bp, Homo sapiens
cagaggtggaggcgctttgaaagcgaagaatagccagaattcagcaaatcgaaaaggacatacttcgtatacgacagctttta

SEQ ID NO: 335600 - DNA, 90 bp, Homo sapiens
aagagagaccccaaggcatcctatgatgcctggaagaagtgtcttcctatcagaggggtagaagataaggagtcttggcatgggaagccc

SEQ ID NO: 335601 - DNA, 88 bp, Homo sapiens
acacttcttatggagaaacaggagtcccagttcctccttttggatgtaccttctcttctgagttttatggacgaggagccccctacaa

SEQ ID NO: 335602 - DNA, 90 bp, Homo sapiens
gtcttcagatcttcacagcacagttcctgggaaggtggagccaccagcctctccttggatagcactataatatgcagaaatctacaaatt

SEQ ID NO: 335603 - DNA, 83 bp, Homo sapiens
cccggcccggaggaggctcatgcgggatttcaagcgactagacgcttgaagcaaagctgccatcccagaagacgacatgctct

SEQ ID NO: 335604 - DNA, 98 bp, Homo sapiens
ccatccaatggatgcaggaaaactgacatgcacaccacagagcgtggcgatggaacagtaaccgggcttgtgagagggctctgcagtataaactagga

SEQ ID NO: 335605 - DNA, 83 bp, Homo sapiens
caagtatccgccagtcaataggaagtacgagtgtaagtaaggaggtctctgtaccatggctcgtacaaagcagactgcccgca

SEQ ID NO: 335606 - DNA, 98 bp, Homo sapiens
aagaagcatcgttaaagtctctcttcaccctgccgtcatgtctaagtcagagttgattatggaagattcccacaagagtaccacgtcagagacagcac

SEQ ID NO: 335607 - DNA, 75 bp, Homo sapiens
gattcgcagtggtcgcttcttctccttgatggtctgtcttctgctgatcccaactctgattggaatgcaccagca

SEQ ID NO: 335608 - DNA, 75 bp, Homo sapiens
agcagctggaattgattcgtttacagatggagcaaatgcaggatatgggccctcacattttccaaacctgtccat

SEQ ID NO: 335609 - DNA, 100 bp, Homo sapiens
gcagaacttgaaggttaaaccactagcccatttcacaggtttgttcggacagtgttaccattttctcaggaatttcaaagagataagcagcctaatgcac

SEQ ID NO: 335610 - DNA, 98 bp, Homo sapiens
tgaagaatctcttatgatgcctgcagtttttcatactgttgcttcaaggacacagcttgcattggaaatctatacctttggaagaatattgggaaaag

SEQ ID NO: 335611 - DNA, 75 bp, Homo sapiens
ctttgctgagaaatcactgatgggaagtgagacttgttaaacttgaaagaaatacactttcgggaaatggcctct

SEQ ID NO: 335612 - DNA, 101 bp, Homo sapiens
cggttgcggccgcaccgccctccgcggccgccccctggggatccagcgagcgcggtgcaatggatgagcttcatagtctggatccaagaaggcaagagtta

SEQ ID NO: 335613 - DNA, 75 bp, Homo sapiens
ccacgaaccgggaactccactttgtggcaccgtgagattctccaggctccactttgaggctctgatgaacattcc

SEQ ID NO: 335614 - DNA, 100 bp, Homo sapiens
aagttcccatcgtcccaggaactagaggatgcctcctgctgttctcttaagaaagattccaacccaatgtttgaagaaaacaggtctgaaacaaggtctt

SEQ ID NO: 335615 - DNA, 50 bp, Homo sapiens
cagctgccatccactgactcgtaaacttccctctgtgtgttgcagtcctg

SEQ ID NO: 335616 - DNA, 74 bp, Homo sapiens
accagtacaccttggccagcactgatggagatcttataacaatttttgatagttctgacctttcctttgcaatt

SEQ ID NO: 335617 - DNA, 74 bp, Homo sapiens
attggcatttttgtcacctccaacaacatccgcgagatcgaggttgctgaaaagccaggagtcaaaatgactga

SEQ ID NO: 335618 - DNA, 100 bp, Homo sapiens
agttcatgtgggccctgaaaaacggagacttggatgaggtgaaagactatgtggccaagattacataccggttacggcacctccttcgtgcaaggtgtga

SEQ ID NO: 335619 - DNA, 75 bp, Homo sapiens
gacacacctaaacatgtggaatcccaatgccgatctggaccccctggagctcagcgaggggaaggtgctttcctt

SEQ ID NO: 335620 - DNA, 76 bp, Homo sapiens
gggaacggcgcgggtggtagaggaggagccgcgggctcggagtgaaacacaaatcttttctaacggctgaggactg

SEQ ID NO: 335621 - DNA, 73 bp, Homo sapiens
caccccgagaaccgtcagtttgagccagatgagaatagtgacagtggtacaggaaagaaagaaaaagaaaaga

SEQ ID NO: 335622 - DNA, 100 bp, Homo sapiens
cgagatcctcggggccccagaggccgcggacaccgacctggagaccagagtgaactccgagcaggaacacttcctcattgtcccttttgggcttctttac

SEQ ID NO: 335623 - DNA, 100 bp, Homo sapiens
cagagatcggcggagaccctcgaagtgcgcaaacttgacactcaccctgaccggtgtccctggccagtgtccttccacctgtccacaagcatggggaaca

SEQ ID NO: 335624 - DNA, 101 bp, Homo sapiens
ccacattgaagacaatctcaaggaccaaaaaagaacttcgtgtgaaaattttcctggggttgctacaagcctcaggaaaaatcagattacttgatgttggc

SEQ ID NO: 335625 - DNA, 74 bp, Homo sapiens
tgaagaagatcgtaacaacttatgacatgaacagctttgctgagccatcaaggtctaatggaagcatggttcgg

SEQ ID NO: 335626 - DNA, 100 bp, Homo sapiens
ctttcgttggcaatcaactaccttttgtaggatttacatattatagcaatcgtaggttgacgagattagagagatggttgacaatgatttaggttttcaa

SEQ ID NO: 335627 - DNA, 75 bp, Homo sapiens
cgccagatcaacctggagctctacgcctcctacgtttacctgtccatgctgcaagctttcttcctggtggcagat

SEQ ID NO: 335628 - DNA, 82 bp, Homo sapiens
aacgaggtcaacgtcaccctggacctgggccaggttaatttggagtggcccctggagtcagtttcctacaccatccgaggcc

SEQ ID NO: 335629 - DNA, 100 bp, Homo sapiens
ggagcaacgggagtgtcctggacccagctgagcgggcggtcattcgcatcgcagaggagcaggagcggcttcgcttggagcaggagcgagagcaggaaca

SEQ ID NO: 335630 - DNA, 121 bp, Homo sapiens
cctcaccatggccgatggggttcctggtgtgcagaacattctcaaaattggcttcctgaatgacaaggtggcgagagaagcatgtccggtcactccgggcctggccacatgatgaaccgag

SEQ ID NO: 335631 - DNA, 74 bp, Homo sapiens
aaaactagcatcctcctggaggagctcgggaaaattcgtccaacatactctcagagttagatgaagaatttgat

SEQ ID NO: 335632 - DNA, 49 bp, Homo sapiens
ttgcatcttcctctggctctacagcgatggtgttatctgaaaaggttag

SEQ ID NO: 335633 - DNA, 75 bp, Homo sapiens
aaaagccaagaggaggacagttcgctacacagcaatgcatcgagacttatcagatgtagacttcctagatgattc

SEQ ID NO: 335634 - DNA, 90 bp, Homo sapiens
ctttcacagtttgcgggactcagtcccatcactccaaggagagaagctatccagtcagttcgctgctattcccatgggtcacaggagaca

SEQ ID NO: 335635 - DNA, 100 bp, Homo sapiens
aattaaagcaattatgaaagaagtcattccttttttgaaggctgctgatactttggctgtgaggcaaaaaaggagaatttatgatatcaccaatgtctta

SEQ ID NO: 335636 - DNA, 88 bp, Homo sapiens
aattgtaattcttatggtagatgaaaagatgagcccaacaattggaaaacaattacttaagaaaaatatgtcgtaactgcaagtgtgg

SEQ ID NO: 335637 - DNA, 80 bp, Homo sapiens
acacggccagatctgccctccagctaactggcatgaacctcccctctccagttatcagtagcaagaattggctacgactc

SEQ ID NO: 335638 - DNA, 100 bp, Homo sapiens
cggactatttgtagtcatgtacagaacatgatcaagggtgttacactgtttgagaaaaatgtcctggactgctgcatttccctgctgactgagagctccc

SEQ ID NO: 335639 - DNA, 89 bp, Homo sapiens
cgcgaccgccgaatcgctcctgcagcagaggtttggtgcacctcgatttggaggaagtagggcagggcccttatctggaaagaagtttg

SEQ ID NO: 335640 - DNA, 102 bp, Homo sapiens
tatccatctctcgaagacttgaaggacctagatgtgaaggctggtggaggctgtgtaatgaccattggagaaatgctacgatcttttctcacaaaactggag

SEQ ID NO: 335641 - DNA, 100 bp, Homo sapiens
gacgatctttttcttgctgcgaagaagattcctggaatctcatcaactgctatgtgatgatgatgccatttaaacgacaggctctagtggaatttgaaaa

SEQ ID NO: 335642 - DNA, 82 bp, Homo sapiens
aaaagcccacttggcgatgggttacagtaagagtgccctgtgggacatcgagaccggccagcagacgaccacgtttaccgga

SEQ ID NO: 335643 - DNA, 74 bp, Homo sapiens
cccaccagcatcctccaaagcactgaacgcccggcccagcaatgttcatggctcccgctcagatggcatatccc

SEQ ID NO: 335644 - DNA, 90 bp, Homo sapiens
cctggatttatttctcgattcgctgtcggaggagaatgagaccctggtggagtttgctattgggttaatgcgagatgatacaatatacga

SEQ ID NO: 335645 - DNA, 98 bp, Homo sapiens
aaaaggaatcgtgctggaaaaagtcgatacagtgtggaaatgtccatcagacacctgaaaaagacggagctgcttagtaaggttgaagctttgaagaa

SEQ ID NO: 335646 - DNA, 82 bp, Homo sapiens
acagaaagagtcaacagcagtggcaacagagtcactcaagggaaaggattaatgccagatggtaccagcagatttacttgca

SEQ ID NO: 335647 - DNA, 100 bp, Homo sapiens
ggagttcctgaagaagaacctgcgagccgacaacgccttcatgctgctcacgcagaggcaccttccactagcaacagtctccccaggcacaacacagcta

SEQ ID NO: 335648 - DNA, 87 bp, Homo sapiens
gcttcatcctcggcggcggtggccgctagctccaaggaagccaagctctactccaggaagtgaaaatgtgctgcctcgagagccgct

SEQ ID NO: 335649 - DNA, 100 bp, Homo sapiens
ctgaaggccattgtaaatgtcataggtgtttgctgagaacaaggatgagattgctttagtcctgtttggtacagatggcactgacaatcccctttctggt

SEQ ID NO: 335650 - DNA, 100 bp, Homo sapiens
aaatacaaacaggtagccggatcagatcccagactggaacaagattaccattcgaagtgagtgatggattggaactgagaccgaaatataatggaatttt

SEQ ID NO: 335651 - DNA, 80 bp, Homo sapiens
ggaaaaccccgaaaacgcaagaagcgtaggagaggagacgccgtgagcgggacgaccagatgtaccgagagcggctgcgc

SEQ ID NO: 335652 - DNA, 85 bp, Homo sapiens
gttggagttttacaactcgaagaagacatccaacagccagaaatacatgagctttacagatgtgtatatctcatgattgatatgg

SEQ ID NO: 335653 - DNA, 50 bp, Homo sapiens
ccgacatggaacagggactcactggggggttctatggcctggatgagtct

SEQ ID NO: 335654 - DNA, 100 bp, Homo sapiens
aaggacccacaaagaagtagagtggctcataagtggtttcttcaggtgagctgcgttctctacgggaggagatttccctgttagagcatgagaaagaaag

SEQ ID NO: 335655 - DNA, 82 bp, Homo sapiens
catacccatttaatccccctaaggggcctctagagaaatccttacaaagttcttcagtttcagaaagacagaggaatgtgga

SEQ ID NO: 335656 - DNA, 83 bp, Homo sapiens
ggagatcctgatgaagttcgagcactaatatttaagaaagaagatgttaactttcagattgaagaatgtcccggattccactg

SEQ ID NO: 335657 - DNA, 100 bp, Homo sapiens
aaagacttgatggtctggtagaaacaccaacaggatacattgaaagtctttaacacctctgtgtgaagatgacaaccaggcacaggaaatcattaagaag

SEQ ID NO: 335658 - DNA, 100 bp, Homo sapiens
cccaaattgaggcgcaatgatgagaggatgtggtggtctactctgatgtcaatcttgagggctaggcaagaaaattggatgtatattttgaatatgaaga

SEQ ID NO: 335659 - DNA, 74 bp, Homo sapiens
tggatgttagctgtgttggcctttcctgttggggttgttgctccgactgtgtgttccaggagtggtggctctga

SEQ ID NO: 335660 - DNA, 50 bp, Homo sapiens
gctgcagagtctgcgggagaaataacgaaggaggcccaacttcattcaat

SEQ ID NO: 335661 - DNA, 50 bp, Homo sapiens
ctgctggtcagcactgcggctggattactttgatattgtgaagagcccca

SEQ ID NO: 335662 - DNA, 97 bp, Homo sapiens
ttcacttccctcggtctgggcttctctgaggcggcgagagatggtcaggtctggagctcgaccgggccagaccatgggggatgtgaagctggttgcc

SEQ ID NO: 335663 - DNA, 82 bp, Homo sapiens
gggagcactggaagtacgggcagttgcagtgttggagctaaagttgcctgttcactctgatcgtagtattggaagttctggc

SEQ ID NO: 335664 - DNA, 100 bp, Homo sapiens
atcccagatctacctgacgggcctgcgagggttgaagattgtgaagcaatagcctaagaaatgactgctgtccatgcaggcaacataaacttcaagtggg

SEQ ID NO: 335665 - DNA, 100 bp, Homo sapiens
cctactggctgggaagaagcatatacttttgaaggtgcaagatactatataaacccttagagatttgtttgattccatggataaaacttcttccagtatt

SEQ ID NO: 335666 - DNA, 50 bp, Homo sapiens
ggccactcggagtcgcccgagaaagtctcgctctgtcgcacagtctggag

SEQ ID NO: 335667 - DNA, 49 bp, Homo sapiens
cagcctgcggagcctgtggggcaggtactgtgagaatagagatgtttcg

SEQ ID NO: 335668 - DNA, 83 bp, Homo sapiens
cagattcgcagtggtcgcttcttctccttggctatggaaagggcaaatggaatggagctggatggtagaagaattcgggtgga

SEQ ID NO: 335669 - DNA, 90 bp, Homo sapiens
gcagaaggtctctggagacatcttcagcagctccagcggcgccatgagcaaatgaaaaagaatttggaagcacagcacaaagaattggag

SEQ ID NO: 335670 - DNA, 75 bp, Homo sapiens
ttgtgcaggacaccgacatggaacagggactcactggggatccagctctaatctatgataagtgtgtggaagagg

SEQ ID NO: 335671 - DNA, 56 bp, Homo sapiens
attgaagagacgttaaaatacttccgctactgttggattgattcgaaatcttgccc

SEQ ID NO: 335672 - DNA, 89 bp, Homo sapiens
cctcggggcgccgacggtcacgatgaggagcgggaaggcctcctgcaccctggagaccgtgtgggaagacaagcacaagtatgaggagg

SEQ ID NO: 335673 - DNA, 75 bp, Homo sapiens
ataagatgtggcgctttcatgtcgaatatttgtgtggaagtaatcgaaaagacaacatatttattgatcctggat

SEQ ID NO: 335674 - DNA, 90 bp, Homo sapiens
gaggccggccggtgccagcacctttcggcttctgagacggcggcagcagcggcattcagagtgaagatagtccaagtcctaagagacagc

SEQ ID NO: 335675 - DNA, 100 bp, Homo sapiens
ttcgtctggtggccttttgtccctttgcctcatcccaggttgccttggaaaatgccaacgccgtgtctgaagtcctcctgcccctgctcgagtcttgcag

SEQ ID NO: 335676 - DNA, 50 bp, Homo sapiens
ctgggctagaaaaactccatcttagggagcatttcctgaagacgtagtca

SEQ ID NO: 335677 - DNA, 100 bp, Homo sapiens
caaccaccacctcgaagcaggtcatcccatagcttgccttcagaagcttcctcacaaccgcaaggccagcaccttctctctaaagcccaagaggagtttg

SEQ ID NO: 335678 - DNA, 80 bp, Homo sapiens
aggaaaatcatattatagatggagtaaaggaactatcgtgagcataggtgaccctaagaaaaaatatacaagatatgaaa

SEQ ID NO: 335679 - DNA, 75 bp, Homo sapiens
agcctgcccagacggctcacctgtgcgggatggaacaaaagttggtgttggtattaggagatctgcacatcccac

SEQ ID NO: 335680 - DNA, 75 bp, Homo sapiens
caacaacctgctgggcaccttcatctggaataaggactccctggcactggggaaaacagaggaggaggcactgaa

SEQ ID NO: 335681 - DNA, 75 bp, Homo sapiens
caaagacctgttcttaaaaaaagtatcaccttttgccatgatagcatttctttcattggacagttccttacaagg

SEQ ID NO: 335682 - DNA, 100 bp, Homo sapiens
gacgacttcgggcgtggggggcccgggtgcaggcccaaggccacaccctgcaggggcctgcgaggtcaaccgccagaaccgagccggctactcggccctc

SEQ ID NO: 335683 - DNA, 51 bp, Homo sapiens
atgttaatgatggcagtacagtcagactggacttgaacactaagtcttcaa

SEQ ID NO: 335684 - DNA, 51 bp, Homo sapiens
agtctgtggaagaggtggttcgagccaggctctcccggctctcgctggcgc

SEQ ID NO: 335685 - DNA, 75 bp, Homo sapiens
catccgcgacctcatgccaaagaccatcatgcacctcatgatcaacaatatctccatttgccaggagatgcccag

SEQ ID NO: 335686 - DNA, 74 bp, Homo sapiens
tcccaccactgctcctcaacgtgcggcctcatcataagaagatgcaagtggaccaggaggaaccacatgttgaa

SEQ ID NO: 335687 - DNA, 98 bp, Homo sapiens
acgggggcctcaacctctccagagccattggtactggtgtggcatactcggacagagaagcccaagatgaagcaggaggagcagctgcagcggcaggg

SEQ ID NO: 335688 - DNA, 82 bp, Homo sapiens
ataactcctgagaatagtggttcttaactctctgattttcacacccgctaccactgtggctgctgtacagtctgacattcct

SEQ ID NO: 335689 - DNA, 90 bp, Homo sapiens
ggggtctggaagccagagaccaacgagatcctgcacatgtctttgtcattgattacaacggggaacgcacgctggatggttttaagaaat

SEQ ID NO: 335690 - DNA, 83 bp, Homo sapiens
aatttgctagtaacgtcatggaggatgaacgacaggtataatgggtctctcccaaatggcgatagaggaaggaggaaaagtag

SEQ ID NO: 335691 - DNA, 82 bp, Homo sapiens
tgtctggagcagtggagcccaaagacccctggagacatgtgcctccggagccagcgtggtggccatagacaacaagatcgaa

SEQ ID NO: 335692 - DNA, 100 bp, Homo sapiens
aaaaaatctggagggactccaacttcaatgatacacaatcatcatcttactagttctctgtgttgctcgctaaccagtcccccagttcagtagactggag

SEQ ID NO: 335693 - DNA, 100 bp, Homo sapiens
gagccttatgttgccctggttcccgagatggtgatggaaagtggggactggctggttggtggagaccttcaggtgctggagaaaataagatggaatgatg

SEQ ID NO: 335694 - DNA, 100 bp, Homo sapiens
gctccggctccggcttctgctgttgctcttctccgccgcggcactgatccccacagactcacatgacattatcgatgcagaggtgacctgcaaagcagcc

SEQ ID NO: 335695 - DNA, 100 bp, Homo sapiens
tcgaaacagatacagagatgtaagcccataaggtgcttcctggaggggcctgccccactgttcctgtgctgagttccaggacagcctcaacttcagctac

SEQ ID NO: 335696 - DNA, 82 bp, Homo sapiens
ctcttggatacctacgggagacttaaaaggccctcagaccacaggattaatggttgctccttgagggcaggacagttcttat

SEQ ID NO: 335697 - DNA, 96 bp, Homo sapiens
gacaaagtacatgagagatcccacttttgtaagactgaattccagtgatccaagtctcataggttatttggcagctaattctagatttggatcatt

SEQ ID NO: 335698 - DNA, 100 bp, Homo sapiens
gcgacctcagccgcgaccgcccgctcgtactgctgctgcacctgctgcaacttgggccccttttcaggtaaaataccatgaagattttgaaaaaacaaag

SEQ ID NO: 335699 - DNA, 100 bp, Homo sapiens
ccgagaccagccagtggagctgctgaatcctgcccgcgtgaaccacatgcccagcacgggcgggaggcagcaccgggctcttgatggacttggcagccaa

SEQ ID NO: 335700 - DNA, 75 bp, Homo sapiens
ctttccttatcaagaaggatgcacaagatgagtcatcattccccggattgaacgtactcttgcttatatcatcac

SEQ ID NO: 335701 - DNA, 75 bp, Homo sapiens
tactcttgttaccagaattccaaaggttctgtctgcgaaacttgtatctgttttaaagaaggcacttgaaattac

SEQ ID NO: 335702 - DNA, 143 bp, Homo sapiens
ttctgagcgtgtgccagaagatccagctttgttgaaaagcgaagccgttagtcccttaatacaaagggtgctacagtgaagatcatccagatgctgcagcactttgaacacctggcacctgtactggttgcagccgtgagtct

SEQ ID NO: 335703 - DNA, 98 bp, Homo sapiens
ttactttggtagcagaaaaccttgcaacttacatggaaagcatgagactatatgctagagattgtgttgtatcgcgagcaggaagtcctggactgtga

SEQ ID NO: 335704 - DNA, 96 bp, Homo sapiens
ctggaccaggaggaggttttcaggaccaaaattgtggaaaagtcactctgcgccgtgccgtccctgcagtgacaccgaggtgctcctagccgtctg

SEQ ID NO: 335705 - DNA, 100 bp, Homo sapiens
ttatctcaccagactgaggcgatacgagatagcagtgaatctggatctcactgaaagacaggctcgggttatgtatgattttgctgctgaacctggaaat

SEQ ID NO: 335706 - DNA, 101 bp, Homo sapiens
cgagctgttcgtgggccgcgcgggttacctgtgtgccgcgctggtgctcaagcagaaactcgcccaggagggtcagtatagaccttctgatttgctgtgcc

SEQ ID NO: 335707 - DNA, 50 bp, Homo sapiens
cacccctgaagccgagaaatgatgccagcacgagccgccgcttcacgccg

SEQ ID NO: 335708 - DNA, 100 bp, Homo sapiens
cctgggattgcggtcgcagcttcactcattgatgcccatgcaggaggactaggtgccgacgccaccgccgagcccatgatcctggaacagtacgtggtgg

SEQ ID NO: 335709 - DNA, 83 bp, Homo sapiens
gaaaatttttgtcttggggcccaaatacagtcctcttgagtttttacgaagggagtccttcaataatgttaaacagtggctgc

SEQ ID NO: 335710 - DNA, 100 bp, Homo sapiens
cgcagacagagctattccagcaccagcagaggctgtatgtttgaaaagggccccaggcagttttatgatgacacctgtgttgtcccagaaaaattcgatg

SEQ ID NO: 335711 - DNA, 75 bp, Homo sapiens
gcggaggctgagccggccgcgggcgcgaccggaggcaggttcttgattattacagacctctttctgaaaagcccg

SEQ ID NO: 335712 - DNA, 102 bp, Homo sapiens
gtgaacgtgctgtggaatatatggtatcactaccattaaagttaacattcgtaatgccaattccctgggaggaggcttccattgctggacctgcgatgtccg

SEQ ID NO: 335713 - DNA, 74 bp, Homo sapiens
accgttctgcccccagaactaggaactcgaatcatttatgacagaaagtttctgttggatcgtcgcaattctcc

SEQ ID NO: 335714 - DNA, 100 bp, Homo sapiens
acttcgtctatgtggcgcccggcataggatttttagactctgaggagcagttggagctaatccacattatggaaatggaaaccaccgaacctgagccaga

SEQ ID NO: 335715 - DNA, 74 bp, Homo sapiens
gatcggggacccgctgatcttccagctcccctcacccaacgtcgtctgccgcagcgggaaccgcaagagcttgg

SEQ ID NO: 335716 - DNA, 99 bp, Homo sapiens
cgagttccagaggctgctcggcttccagctcaatcctgccggttgcgccttcttcctggacatgaccaactgatacgtaggtaacctttccagagatgt

SEQ ID NO: 335717 - DNA, 119 bp, Homo sapiens
tctcagctttgtcgtatttgggttttgaaacttaccaggttatctctcaggctgctgtggttcatgccacagccaaagttaatggagaatcatcctcatttgcaccaactgataatgcg

SEQ ID NO: 335718 - DNA, 83 bp, Homo sapiens
cggaggagtcagctgtgtgtccagaacgtgccatggagacgcttaacggtgttgagccagtgcaggttcaggaaactgtggaa

SEQ ID NO: 335719 - DNA, 80 bp, Homo sapiens
ttacgccatggaaaccgctctggtcacaccaatactgttgcagattgggcaacaggtttgtctatgctggctctaactcg

SEQ ID NO: 335720 - DNA, 111 bp, Homo sapiens
cccatcctgccgtccttctccactttcgccagcccgtgccgcgagcgcggcctgcaggaggccaccagcttgggctccccacggagggcagcaagtgggacttggggaacc

SEQ ID NO: 335721 - DNA, 82 bp, Homo sapiens
gacaagccgctggcagccgcggatctcaccgccgctcaggcaaccaaccagtggttcatcccagccgtgaggggggacattc

SEQ ID NO: 335722 - DNA, 82 bp, Homo sapiens
gtctggtttgatcacaagacgggcaaggaaccacgtgaatgttgagggggcgacacacaagcaggtggtggacctgattcga

SEQ ID NO: 335723 - DNA, 100 bp, Homo sapiens
tagacaataccacaacaacacattttgcagagtctattatcctcccagtccacaacgctgaaccgtggctggacgaatgtttgaggtctgttttgcaaca

SEQ ID NO: 335724 - DNA, 51 bp, Homo sapiens
gagcgaagtacagcttatggatgggaaaatcagtcgcctatatgccttatg

SEQ ID NO: 335725 - DNA, 142 bp, Homo sapiens
gccacttgcctgagcgccccggcggcccgagcgcgccccaagcccgggcgccaccgctgccacctccgcgagggcaaaggtgaagaaaggcgtgaacatcatcggcgtgcgagccagcagcccttccatttgggatgtcaag

SEQ ID NO: 335726 - DNA, 73 bp, Homo sapiens
accggagaatccgcatctggggcacggaggtttgagttcctgagatctagttggtgagagacatgatgttcta

SEQ ID NO: 335727 - DNA, 100 bp, Homo sapiens
cagttttacgatttaaaacttcgccagaatttgaatttaaaaactggtcaactcctgaaaaagatgcacattgatgattcttaccaagcttcagtctgtc

SEQ ID NO: 335728 - DNA, 98 bp, Homo sapiens
aaactcagcatgcttagcattcgagagaacaaaattaaacaactacctgctgaaattggcctggagctgctgaagactgctattgggaaagctggcta

SEQ ID NO: 335729 - DNA, 100 bp, Homo sapiens
gaaggccttgtgctgaccaagctgctcacctcggtgacttgcttttggagggcttcaacaactacaccttcctctccaatggctttgtgcccatcccagc

SEQ ID NO: 335730 - DNA, 74 bp, Homo sapiens
gcagttgtctgatgaagagaagcaagaagatccatcgcagagtcctaaagaagaacccactgaaaaacttgaga

SEQ ID NO: 335731 - DNA, 100 bp, Homo sapiens
cccgatatctgatgggggttgggatggatggcaagcggcggccaggcccagggcccggggtgcccccaaagcgggcccgtgggggcctctgggatgatga

SEQ ID NO: 335732 - DNA, 110 bp, Homo sapiens
caaagatgagatttacctgtgagatgtttcatcccaacagtaagtgacatttcattctgctcatccccaaggcaaagttggatgtttttaaagtggaaaaaaaaatgaac

SEQ ID NO: 335733 - DNA, 75 bp, Homo sapiens
gtgagcctcccgcccaaggagaatgcgctcttcaagcggatcttgttggccgtaaaccaaagacccagcaatcac

SEQ ID NO: 335734 - DNA, 75 bp, Homo sapiens
caatgatgagaggatgtggtggtctactctgatgtcaatcttgagggctagccctcccaggcccaatacttcaaa

SEQ ID NO: 335735 - DNA, 80 bp, Homo sapiens
ggaagatgatgggtcaaaaatcattggtccctagctgttggtagtaagtccggttataaatttttctccctttcttctgt

SEQ ID NO: 335736 - DNA, 75 bp, Homo sapiens
caaaagagttgattgaaattatctctggtgctgcagctcttatcgtcagtgaagcaggagcatcaatctacagtg

SEQ ID NO: 335737 - DNA, 96 bp, Homo sapiens
ggtggaggacctggatatggcaaccagggtgggggctacggaggtggttatgacaactatggaggaggtgatggtggatataatggatttggaggt

SEQ ID NO: 335738 - DNA, 87 bp, Homo sapiens
ggcccggagcgcggtggcgcggcgcgggggactttgaacatgtcggggatcgccctcagcagactcgcccaggagaggaaagcatgg

SEQ ID NO: 335739 - DNA, 100 bp, Homo sapiens
tgacaaccaggcaatgctggatagataccgaattcttatcacaaaggttgacctgacagttcaagaaaaggagaaatatcttaatgtgtctcgctggttt

SEQ ID NO: 335740 - DNA, 83 bp, Homo sapiens
ggaaaatggtctgctctgcgaatcggtcatcaagagagagggcacaggtacagagatgcccatgattggggaccgagtctttg

SEQ ID NO: 335741 - DNA, 100 bp, Homo sapiens
gaagttggagcgatgtcattctgctgagcttgcacttaacgtaatcacatgctgcagttggagaagaaacttgaacgtgaacttgaggatgatgcacgag

SEQ ID NO: 335742 - DNA, 98 bp, Homo sapiens
gacgcgccagcagcgcagcaccgattcctctcgggctcttgggcgctgctctgagaaataacatctgctttgctgccgagctcagaggagaccccaga

SEQ ID NO: 335743 - DNA, 75 bp, Homo sapiens
ccgcctggtcgtgggactcggcatcgatcagccggcagtccattgatgcactcaaagactggttcagagatgaaa

SEQ ID NO: 335744 - DNA, 75 bp, Homo sapiens
cacgcgggcaagcaggactacaaccgcgaggaggacgccgcgctcttcaagatctggcagtgtggtggggttctg

SEQ ID NO: 335745 - DNA, 75 bp, Homo sapiens
gtacaagtggaccaactatctgagcggttacctgtgcatgacagatgagtggttctctgagtatgtctacgaagt

SEQ ID NO: 335746 - DNA, 100 bp, Homo sapiens
tctttacttcccaaaacatcctggaatatccctcagcctggtgagggtgatgttcgggaggaggccttgtccacagatcttagcaaagcaatgtctcaag

SEQ ID NO: 335747 - DNA, 82 bp, Homo sapiens
tgtcccaaggaacacctgggcaacagaatattggtcaagttgctgaccttgaaggcctattccctggtggattccagtcaag

SEQ ID NO: 335748 - DNA, 75 bp, Homo sapiens
ggataaataaggctgttggagataaacttcctgaatgtgaagcagatatatgcacactttctgagaaggagagac

SEQ ID NO: 335749 - DNA, 100 bp, Homo sapiens
gacgtaatcaaagacggcaacgcgcttatcagcgctatgagaatgcccttaaagatagccgttttcccccaatgacaagggatgagctgccacggctttt

SEQ ID NO: 335750 - DNA, 83 bp, Homo sapiens
catccactattctttctccatcaccaggaatccggtcaataatgagcatgttacaccagacagctatattccatgccttgcag

SEQ ID NO: 335751 - DNA, 51 bp, Homo sapiens
aggagactcctgaccctcagaatgctgatgatgggagaaccagttactacc

SEQ ID NO: 335752 - DNA, 75 bp, Homo sapiens
cctcagatccagtgataattgacagaaaaggagataccgctggccctccatattcacaagctctgcatctgtggg

SEQ ID NO: 335753 - DNA, 90 bp, Homo sapiens
gccgtctcctggctgctgcttgcatatctctttcgacgtgtagcagcagctttgccgggaatggaaagcacacaggacagaagcagagaa

SEQ ID NO: 335754 - DNA, 101 bp, Homo sapiens
gccgtctcctgcagcggcccccgccgggcgcacctatgttggcagcatgcctggtcgcatcatcaacggcttgaagactgtgggagtgaacaacccagtgt

SEQ ID NO: 335755 - DNA, 75 bp, Homo sapiens
acaggcctttagtgatgtggtggtaagatgtatggttagcatggcctcattgaaagaactagatcaaagactctt

SEQ ID NO: 335756 - DNA, 75 bp, Homo sapiens
atttgtacacatgtacaatgcccaatgcgatgctttgcatcctaaatcagattccgtcctatttcagtgttccgg

SEQ ID NO: 335757 - DNA, 100 bp, Homo sapiens
ttaatggattaagtgttcctattcttcaacatccagaccttcaagatgtgttacttattcctgttattggacccaggaaaatgtttataggaggccttag

SEQ ID NO: 335758 - DNA, 83 bp, Homo sapiens
ccgagcgcaaggacagcgcgaggtccgcgcagcccagcgcagccataggctgaggggatctggcggtggagcgctaggatcag

SEQ ID NO: 335759 - DNA, 82 bp, Homo sapiens
gggcttgatcatcgcctaccacacacgtgaagtccaggctggctacagcaaacatcattcaagatgtccagcaaagggagca

SEQ ID NO: 335760 - DNA, 100 bp, Homo sapiens
ctttatagcagaaacttgtgaagcgttccagctgaaagtccaatctctaaagtcagtttacgttgcgagacatgtatgagcaatttcaaaatatcatgaa

SEQ ID NO: 335761 - DNA, 100 bp, Homo sapiens
atcttgactcactgcaacttccgcctcccaggttcaggctgttctcctacctcagcctcctgagttgctgggattacagtagagacggggtttcgccgtg

SEQ ID NO: 335762 - DNA, 75 bp, Homo sapiens
cctagtccgaggtgccaccgtggaaggacagaatgagcactgcagtttcctcctgaaggctggctccggctctcc

SEQ ID NO: 335763 - DNA, 98 bp, Homo sapiens
tctttgatgaaactagaaagaccacgaacttcaaaggggaaagcaaggccaaagacagggagaaggctggactctgtgaagctgagcaggagcagatg

SEQ ID NO: 335764 - DNA, 100 bp, Homo sapiens
ctaaagtgttacatgacagatgtatgaggtgcagattcactttataggaacagcttcagcttcagtgatgaaaaactgaattctccaacagactctaccc

SEQ ID NO: 335765 - DNA, 98 bp, Homo sapiens
aaagaagtttgtccttctgctattgatcctgaagatgttcagagaattccaacttcttacaagaacagatatttataagaaaacaaggcacattttgg

SEQ ID NO: 335766 - DNA, 100 bp, Homo sapiens
actgactctctcttttcctgataacatggccagcaagaaagtaattacagtgtttggagcaacaggcatcgtcatgtgatcatcacctaagaactagaac

SEQ ID NO: 335767 - DNA, 87 bp, Homo sapiens
acatctaggaagaacgtgcaaggatgcgaattgtgaatcgcttctccaaacagctcttcaatggccaacaaggaattattattcaaa

SEQ ID NO: 335768 - DNA, 75 bp, Homo sapiens
gaacatttcaataaattgatggccagacctgcagttgctctacactttcagtatatttgccttccctccatgatc

SEQ ID NO: 335769 - DNA, 100 bp, Homo sapiens
gaccaagccaacgatggtctttcctctgcattgctgatcttgtacttggattcagcaaggaaccttccgcaatctgcacatcgtgctgccacacgaggct

SEQ ID NO: 335770 - DNA, 101 bp, Homo sapiens
tgagaagttcccgcttgtggagcaaacatttttccccaaccataagccaatgggccatgaaatgacaagcattggactgctacttggtgtttctgctgcaa

SEQ ID NO: 335771 - DNA, 120 bp, Homo sapiens
ttcctctactcctacacatgatgatgtacagcagagcttttttcttgctgaaacattaaaccgaattaagaaagtggtttccatctacggaagcagcattgatgtggaactccagcagag

SEQ ID NO: 335772 - DNA, 50 bp, Homo sapiens
caattctttggagaaaaatggatgaagttggttgaatctggcgatgtgga

SEQ ID NO: 335773 - DNA, 100 bp, Homo sapiens
tcgagactgtaggcactgccatggcccctgtgctcagtaaggactcggcggacatcgagatggcccgtccttaaaagaaacaacaggacccagcagacag

SEQ ID NO: 335774 - DNA, 74 bp, Homo sapiens
cagagtccgcggccggggcgcgggaggaaatcatccacaaagggcacgtggtcacagaggagaccttcagtttc

SEQ ID NO: 335775 - DNA, 82 bp, Homo sapiens
cccaggatacagggtcaaaggagagcacaaccatcgcagttggaagcccatggggcagataacgaaggaggcccaacttcat

SEQ ID NO: 335776 - DNA, 75 bp, Homo sapiens
aataggacaaagaacagaccgctggttcgtggacagatcagctgccactgcagagccccgccatggaagacacgc

SEQ ID NO: 335777 - DNA, 100 bp, Homo sapiens
tcagaaaaacctgttaaatgcaaatttgattaaaggtggtggctgtggccttgaaaacagtcatgtgaaaactcatcaccttaaggtgttaagtgtaagg

SEQ ID NO: 335778 - DNA, 98 bp, Homo sapiens
tcggactgtggcggcttcggcggctcaggttgtggtagaggcggaggctcaggcagcttgagactcgctctttactgagcgtgtttgaagaagatgct

SEQ ID NO: 335779 - DNA, 100 bp, Homo sapiens
gttcacggcggacgttcttgttctgtggagaataacggctgcacctggagattgacgcagagtgggcggcggtggtgggtacctatgatggcgggcctgc

SEQ ID NO: 335780 - DNA, 83 bp, Homo sapiens
gagctcgccccgaacgggggtcttcctcctccgccgttgacagaatgttgtaccatctttgggtaggcagacttccctgacga

SEQ ID NO: 335781 - DNA, 75 bp, Homo sapiens
agcgagccacgggagcgagccaggaagcggggagaggtggtgagagatgacccctgttgaggatttcattggtgt

SEQ ID NO: 335782 - DNA, 100 bp, Homo sapiens
gaagagaggcctgcgagcactccggcgaggccaaggccttccaggactatgaggctactcacagtcgaactacaactccccggggtccggccagaactac

SEQ ID NO: 335783 - DNA, 75 bp, Homo sapiens
atgatatgctaagaaagaatcttgtcactttagccactgctactacagggcaagttaaagtcttcagagccctgt

SEQ ID NO: 335784 - DNA, 95 bp, Homo sapiens
ttcatccttgtttaatgactttggtgccctcaacatctctcagagacgaaaggttattctggtacaagttaacccaggagaagcatttacaataa

SEQ ID NO: 335785 - DNA, 100 bp, Homo sapiens
tgggcagcacatgacgtatttgagttgaagcagttttctcagctgcctgctaacatagctgtttgcagttctaagcttcttccagaccagctggtcttgc

SEQ ID NO: 335786 - DNA, 96 bp, Homo sapiens
gtgacatgttgataaaaaatgatgggacttcaaaatgagcgtccctgactacatgcagtgtgctgaggaccaccagacgctgctcgtggtggtcca

SEQ ID NO: 335787 - DNA, 100 bp, Homo sapiens
gctaagtggatcctctggccagctgactgcacttcttttttgagaaaggaaggaatatatcctgactgattacagcccacctgaggatattgaccataag

SEQ ID NO: 335788 - DNA, 75 bp, Homo sapiens
gacaagccgctggcagccgcggatctcaccgccgctcaggaggattaccccaatggcacctggctgggcgacgag

SEQ ID NO: 335789 - DNA, 100 bp, Homo sapiens
agaattaaatgccgagaaggccagtacggtccccaggtgcatccaatttttcaactttaccaaagatctctccttcatctctatcaaataattataacaa

SEQ ID NO: 335790 - DNA, 95 bp, Homo sapiens
tagtaaccctgccaaatacatcagcttgtaggagacagaggccaagaagcttgagagaagaaaaatttcagaaaaattgtctcaatttgactaga

SEQ ID NO: 335791 - DNA, 90 bp, Homo sapiens
cgcggcgtctccagcctcggtaccatggccgggatcatcaagaaacaaatcttgaagcacctctccagggtgtactctgtgtgaccgcgc

SEQ ID NO: 335792 - DNA, 98 bp, Homo sapiens
gaagataaacctttatcatctgagtccttgtcagaatcagagtatattgaggagcgaaggacaaggttgcccttttgataggaaatatgaattaccgg

SEQ ID NO: 335793 - DNA, 100 bp, Homo sapiens
cgtcatcgagtgtgacgtggtgaaaggcgccatgtggacggcagtgtttgatgagccagcgaactcaacgcccacagccccaggagtggtgagggacgtg

SEQ ID NO: 335794 - DNA, 73 bp, Homo sapiens
cgccttcgccctttccacctcgcggcagttcggtgtttcaggcctcacctgaagatcatgaaaaatacggtgg

SEQ ID NO: 335795 - DNA, 74 bp, Homo sapiens
cgggccgtgccccagatgcccaccgggatggagaaggaggaggaatcgttttatcttcaagacactaaaagtag

SEQ ID NO: 335796 - DNA, 81 bp, Homo sapiens
aacaactcgggcgccgacgagatcggttacagaatgtctgaaggggacagtgtgggagaatccgtccatgggaaaccttcg

SEQ ID NO: 335797 - DNA, 94 bp, Homo sapiens
tcatgctctttgtagcgtggtgcttctgttgctcacagtaatcaagatgattaccaactggttcgaaaacttggtcggggaaaatatagtgaag

SEQ ID NO: 335798 - DNA, 100 bp, Homo sapiens
ctacaatctaagaaggatttcagcaaatttggagcaggttcacagccatgaatgaaccacagtgcttctacaacgagtccattgccttcttttataaccg

SEQ ID NO: 335799 - DNA, 98 bp, Homo sapiens
tcttgagtgtgtatctctacatgcgctctttgaaagcgccccggaatgacctgtcgcctgccagctctgaagtgatacgtgaaattgagatgagtgtg

SEQ ID NO: 335800 - DNA, 75 bp, Homo sapiens
gtggatcgctgtgatcgtcacttggagggtgcatctgcccggaagactcagactcctgcagcccagccagtacca

SEQ ID NO: 335801 - DNA, 100 bp, Homo sapiens
atcttgttacctgtggaaatcagaagagagaatatagtaaaaatacgcagtacagtcccagcttatcacacagactttcagccaccacaatcagctggca

SEQ ID NO: 335802 - DNA, 100 bp, Homo sapiens
catgggccctggcggtggacgagcaggaagctgcggctgagtcggtacttcttgcaagggatatgcattagcacatactcaagaaggggaagaaaagaag

SEQ ID NO: 335803 - DNA, 95 bp, Homo sapiens
cccactcctccaagaaccaacccccaaattggctgggacaggtaacagagattcaaaggtaccttcagaaggaaagaaatctctctacacagatg

SEQ ID NO: 335804 - DNA, 100 bp, Homo sapiens
ggatgtcatttggaaaaacactagagacagacggctggcagctggaatttaccatgcaagaagctgtgcaatgtttacatgctctagaagaatactgtcc

SEQ ID NO: 335805 - DNA, 100 bp, Homo sapiens
tgaaggtcatttaaccaacctcagctttacaaaccctgaatttataactgagtatcagaatggcaaagcaacttaaccttccagaaaatacagatgattg

SEQ ID NO: 335806 - DNA, 89 bp, Homo sapiens
gttgaagggaattattttcatgcagacagcttgtcaagctgtgcagcatcaaagaggcaggagatgaggacggggacttggttgccttt

SEQ ID NO: 335807 - DNA, 76 bp, Homo sapiens
tattgccttattttttctcatggatgttcttcttcgagtatttgtagaaggctattggaatcagatgcaaagatgg

SEQ ID NO: 335808 - DNA, 82 bp, Homo sapiens
acgtgcgggaagagaagatcatcgagcatttcaaacgccgctgccatggcccagacactgcagatggagatcccgaacttcg

SEQ ID NO: 335809 - DNA, 74 bp, Homo sapiens
gacaaatcaaattagtggttttggtttctgttatcagtggaacctatcttggtttggattacatgagtaagcaa

SEQ ID NO: 335810 - DNA, 98 bp, Homo sapiens
tgaagaaaatgtgtgttgattttttgaaagaacaagttgatgcttcaaattgtcttgttgagtcactcagtcatcgctaaggactcattagctggtta

SEQ ID NO: 335811 - DNA, 83 bp, Homo sapiens
tgaatcctgcggcagaagccgagttcaacatcctcctggccaccgactcctacaagccacgccgcaatgaagagcttcttaca

SEQ ID NO: 335812 - DNA, 96 bp, Homo sapiens
ggatattctggtggggagatgaacccaacctagtgggtgtaatacatcatgaactgcaggaaatgttttagcaagtgcatcagctgacaacactgt

SEQ ID NO: 335813 - DNA, 50 bp, Homo sapiens
agaaggggttacgctgtttggccggatgactggtcccgggtgcccctgaa

SEQ ID NO: 335814 - DNA, 148 bp, Homo sapiens
gtgggcttctcagcgggtcaagtgcagtacctggatctcatcaaaaaggacaccagcaagctgttcaatgaggaggaacaggcctttgagagcagccagaagtacaaagaggggaagtacatcattgaactcaaccacatgatcaaag

SEQ ID NO: 335815 - DNA, 90 bp, Homo sapiens
ttttcaaatatgggattgctgcactcaaaaggctatgagaatggtacaaacagattgagactccagaagcaaatcttgaagagcgaaaag

SEQ ID NO: 335816 - DNA, 90 bp, Homo sapiens
tggaaagagaagactgatagagacttcgttaagggtgactgtcgttcctacagttacgtgtgtggaatctccagtaaagatgaacctgac

SEQ ID NO: 335817 - DNA, 100 bp, Homo sapiens
gcaggaacccagcagatctactcccaaggaagcccatttccctctggacactccgggaaggccttcaggctggcatgatcatagacaacggagtcaaaac

SEQ ID NO: 335818 - DNA, 74 bp, Homo sapiens
ggtagcttcaaacagctcacagttaaggtccaccttcatccgaagaggctgaatcataaatataacccagtgtc

SEQ ID NO: 335819 - DNA, 100 bp, Homo sapiens
gctgccatcccggccacgcgggtggaggtgtccgtgtcctgcaggtctcttgcagctgaatggggtaaatatggaatgcgattcaatgtgattcaaccag

SEQ ID NO: 335820 - DNA, 92 bp, Homo sapiens
cgcagagccgagtgcagaagatctgggtgcccgtggaccacaggccctcgttgcccagatgtaatagcctgcagctggtgttttgagaagcc

SEQ ID NO: 335821 - DNA, 75 bp, Homo sapiens
ctgttgcagcacttgttccccaaacaagtgctcctacattctggtccaggaggcccaggaggtcctgggggaccc

SEQ ID NO: 335822 - DNA, 82 bp, Homo sapiens
agaatatgaagaggaggaggaggaggactatgacgaggaggaggaagagtccagtgaagacctgcctagagctggaacgtta

SEQ ID NO: 335823 - DNA, 49 bp, Homo sapiens
tattttaaaagctgatgttccaaggatattgaggcaacaatgaactcgg

SEQ ID NO: 335824 - DNA, 51 bp, Homo sapiens
cgcgaatatcgtcatcgttagaagattgcaagactggaggaagataaagaa

SEQ ID NO: 335825 - DNA, 90 bp, Homo sapiens
ctgcctgcagggatggtctccttttaaagcaggttgtgtgcagcattcagtacactgaagttggagattgagttcaaggagacccaagca

SEQ ID NO: 335826 - DNA, 74 bp, Homo sapiens
cccagcctcaggcgtgcgcggacggtgtgcggtcccaggggcagccactggcctcccagcccccggtcgtcgac

SEQ ID NO: 335827 - DNA, 82 bp, Homo sapiens
ttccacaagaaccgcgaggacagagacttcccaagtaagaagcggaagaggagccgctggaaccaagacacaatggaacaga

SEQ ID NO: 335828 - DNA, 90 bp, Homo sapiens
gagagcggtgcggaggactgagggtgactgtcgttcctacagttacgtgtgtggaatctccagtaaagatgaacctgactgggaatcact

SEQ ID NO: 335829 - DNA, 90 bp, Homo sapiens
gatgggccgagctcctccctctgctccagcagtgccaagtggtcagggctcctgaccgtggaccccgccaagcggctgaagctcgaggga

SEQ ID NO: 335830 - DNA, 90 bp, Homo sapiens
agatcatcaagctgctgctcgtcttctatgtcaagaagagcacgaacttccaggagccggtgcagccgctgacacagcagcaggtggcgc

SEQ ID NO: 335831 - DNA, 74 bp, Homo sapiens
gcagtcatcgtgcctgaaggagtacatgccctttatgaagatattcttgaggcttcgatgtttttgaagcaggc

SEQ ID NO: 335832 - DNA, 97 bp, Homo sapiens
actggtcaaatgcactgtccagacggagatccgggtgaagccatataatgtctacatcacagttgcttacccaccagacacagacacacctggcttt

SEQ ID NO: 335833 - DNA, 100 bp, Homo sapiens
ggctagacgctagacctgccatgtggagatccggggcggacgttgatattcactgatggactccaaagaatcattaactcctggtagagaagaaaacccc

SEQ ID NO: 335834 - DNA, 100 bp, Homo sapiens
tggaccacatagacatttacgcggatgtcggcgaagagttcaaccaggtgcttgtgagtgaggattctgacagtgatggcattgtggcccacttccctgc

SEQ ID NO: 335835 - DNA, 100 bp, Homo sapiens
gatcgatctaagatggcgactgtcgaaccgttgacggactggacaaagcttctatagcaaactcagatggccccacagcaggttcccaaacacctccctt

SEQ ID NO: 335836 - DNA, 99 bp, Homo sapiens
cgagcgctcgagaaagtcctctcgggagaagcagcgcctgttcccggggcagatccaggttcaggcggtgcgtctttctacgtgaataggattttgtgg

SEQ ID NO: 335837 - DNA, 100 bp, Homo sapiens
ctctgggtgggcaacttacccgagaacgtgcgggaagagaagatcatcgagcatttcaaacgcgggcaggctctggatctcggcgggatcaggccaggca

SEQ ID NO: 335838 - DNA, 80 bp, Homo sapiens
agattagttttagttgcagcatggaacaattacaggatcaatatggaaattatgtaatccaacatgtactggagcacggt

SEQ ID NO: 335839 - DNA, 75 bp, Homo sapiens
ccgcccgcggcgaggtggcccggaccgcagtgccccaagagagggggggccctcagcctcttggccttgaacggg

SEQ ID NO: 335840 - DNA, 137 bp, Homo sapiens
gggtagtctcgggatgccgtccgaagtcggcgacagcggccggggcgcaggcgcccgtgcggaatggcagggtggagagattcaaccagttagcgtgaaagttggagataaagttcttctcccagaatatggaggca

SEQ ID NO: 335841 - DNA, 82 bp, Homo sapiens
ctgccgtgtgaaccatgtgactttgtcacagcccaagatagttaagtgggaggatgctaaaggcacactttcattgatgcct

SEQ ID NO: 335842 - DNA, 100 bp, Homo sapiens
tctggggactggccccaccgacctcatagggagtgaactactttatgtccaagggtatcctggatgattcgccaaaggaaatagcaaagtttatcttctg

SEQ ID NO: 335843 - DNA, 75 bp, Homo sapiens
cgtgagcataaaaacattgttcaccaacaacggcctgtgcaggagacatggcggacgcagcatctccgtgctctg

SEQ ID NO: 335844 - DNA, 100 bp, Homo sapiens
caggctgtaggtttagttgagcaccggaaagaacgaagtggagcgagaaatctcattcagaacagagtgtggcctgtattactcctactacaagcagatg

SEQ ID NO: 335845 - DNA, 90 bp, Homo sapiens
caggactcgctgagcggagtcgggggagacgtgcaggaggccttcgcacaaggtgatctgtgaaaatggttcgctattcacttgacccgg

SEQ ID NO: 335846 - DNA, 97 bp, Homo sapiens
caaagactcaagccagacatcacggttttacccagtggtgaaagaaggacggacactggatgccaagtgccttgctttccatgacatttcccctcaa

SEQ ID NO: 335847 - DNA, 100 bp, Homo sapiens
accgggccggcggcgacctgcactttcccgcagacaggggctgacgtttaccctacgtcctggtgaggtgacggcgctggtgggacccaatgggtctggg

SEQ ID NO: 335848 - DNA, 119 bp, Homo sapiens
gaagtatctagaaccacgtgtccctatgacgcgtttagaacgggtcacgtgagcgcctcgcctggatatgccttcaattaagttgcagagttctgatggagagatatttgaagttgatg

SEQ ID NO: 335849 - DNA, 96 bp, Homo sapiens
cttgggcgggggatgtgagcgctgagcccttggcagagctgaaaccaccaatgggtgaggtcgtcacccctacggccccccaggagcctcctgagt

SEQ ID NO: 335850 - DNA, 100 bp, Homo sapiens
agaaagattctggaggaaaggtttacaagcaggccacgattgaatctctgaaggggatcatggaagctgataaagatgacacacaacaaattcttaagga

SEQ ID NO: 335851 - DNA, 100 bp, Homo sapiens
gcactatgctaccctctactttgtattttgtgtggattcctcagagagtgaacttggaatcttggacctcatccaggaaacggcactgcccagtctgcag

SEQ ID NO: 335852 - DNA, 100 bp, Homo sapiens
aaaaagaaggaatccacgttctaatcctgtgtaccaagtctgagaatgccaggcttgtggtgcagatcgacaacgccaagctggctgcggatgatttcag

SEQ ID NO: 335853 - DNA, 100 bp, Homo sapiens
cagcccccgccgtagccgcctccgagcccgccgccacatcctctgaggtgaaaggtgtagcagtcactcggcctacacccacagcatcgaccttgtgaac

SEQ ID NO: 335854 - DNA, 51 bp, Homo sapiens
acgacttactctctacccttggcagctgccactgcagagccccgccatgga

SEQ ID NO: 335855 - DNA, 83 bp, Homo sapiens
gaaggaacgaggcaaggagctaaagcagcgtgcgttcagccctgggaaagcactccaaagacctccgccagctgcagccctgc

SEQ ID NO: 335856 - DNA, 98 bp, Homo sapiens
taagaacatactagaagtcccttctgctaggacaacgaggtattcaaagcaatgagtatcccacagatcagaaatccttcgctgcctcccccagaaaa

SEQ ID NO: 335857 - DNA, 75 bp, Homo sapiens
ttaacacctctgccgctgctaaaagatccagacatttaatgtggatgcaccatgccagaccgtggaagatttaac

SEQ ID NO: 335858 - DNA, 101 bp, Homo sapiens
ccagttcgcagtcaagatctcgttccagttccagagaacgttcgagatctcgtgggtcgaaatcaagatatgagatcctgactccaaactccattcccaag

SEQ ID NO: 335859 - DNA, 100 bp, Homo sapiens
acaaatcatggagccgctggggtcccttttgcctcagatactattttgaaggtttttcttcacatacctcctgcctcacagtgccccgccttcactgcgt

SEQ ID NO: 335860 - DNA, 100 bp, Homo sapiens
caggcccgggagcgcgatgtggagcgcttctttaagggctacgggaagatcctggaggtggatctgaagaacggccacagcaccacaagttattgttcca

SEQ ID NO: 335861 - DNA, 100 bp, Homo sapiens
tattgggcgatgcacctgcaagcctggctatgagcctgagaacagcgtggcatgcaaggtgtttcctgaggttataggcgggtgtttgaggagtacatgc

SEQ ID NO: 335862 - DNA, 101 bp, Homo sapiens
tggggcgcttgggtcggcctcgaggacaccggagaggggcgccacgccgccgtggccgcaggttcttgatcaatatgaacgagaaggatttaacttcctag

SEQ ID NO: 335863 - DNA, 100 bp, Homo sapiens
ggggcactcacctgtgcaaccccagggacctggaaagacagacaggatggggaggaggttcttcagtgtatgcctggaatcttccacttgactcagatca

SEQ ID NO: 335864 - DNA, 100 bp, Homo sapiens
cagccgcctgcccggagccaccgcctgaagcacccaccgaagacgaccatgacgagctctagctggatgggcgcagagcctttgacgacccctatgccct

SEQ ID NO: 335865 - DNA, 74 bp, Homo sapiens
ccactttcgccagcccgtgccgcgagcgcggcctgcaggaggtcgcctgcgaggccgctggccaggcctgagcc

SEQ ID NO: 335866 - DNA, 75 bp, Homo sapiens
tcgagtccgcgcggggagcgcacgcggggcgggcggcgacaggtgctggagaatctggtaaaagcaccattgtga

SEQ ID NO: 335867 - DNA, 100 bp, Homo sapiens
tccgagtcagattggagcatttgtgttgatgaagatgaaagagactgcaggtatgaaataatgtactcttgctggagaaccgatcccttagaccgcccca

SEQ ID NO: 335868 - DNA, 100 bp, Homo sapiens
gcgcgcgccccgctgcctcgccgccacactttcctgggagcggcggccacggaggcaccatgaagaagtcttactcagtcgtgcaggagcagagctcacg

SEQ ID NO: 335869 - DNA, 100 bp, Homo sapiens
cagatcgacaagtccgggagctgggcggccatttaccagggctgctcttcacctatcgtggtgaagtttgctgacactcagaaggacaaagagcaaaggc

SEQ ID NO: 335870 - DNA, 75 bp, Homo sapiens
tttgtgtgcaatgccccgggctgtggacagatacttggcatatcgaaattttatgattgacacgtatcgtctaaa

SEQ ID NO: 335871 - DNA, 100 bp, Homo sapiens
caccttccctacagatatcaagaatacttcagtcaccaacgtgccaaatatgccagagactgctgctactttgaaacgtacgatagaggccctgatggac

SEQ ID NO: 335872 - DNA, 75 bp, Homo sapiens
ctattgccttattttttctcatggatgttcttcttcgagtatttgtagaaggtctcttcttgtgacagtgaggac

SEQ ID NO: 335873 - DNA, 100 bp, Homo sapiens
cccgttgaaggtgctaccgctgacgacacccctggtggatggcgaggatgagagataagctgtcattggaaggaatagtggtacaaagagctgaatgccg

SEQ ID NO: 335874 - DNA, 100 bp, Homo sapiens
gggaaaactcctgaggagattcgcaagaccttcaatatcaaaaatgactttactgaagaggaggaagcccagtttgttacaggaacaactttttgacgtg

SEQ ID NO: 335875 - DNA, 100 bp, Homo sapiens
atgagcagaaaggagttggggcttgatgaaggcgtggatagcctgaaggcagccattcaggagctgaccagtgctttggtgcatctaaaactgcatcttt

SEQ ID NO: 335876 - DNA, 74 bp, Homo sapiens
ttcgggacattaccaaaccactcattttagcttgcattcacaagagatgggctctgtggtctgtggaatgaaat

SEQ ID NO: 335877 - DNA, 82 bp, Homo sapiens
ctggctctggaattgctactgctgcctctgtcactcctggtgaccagcattcaaggaagaggatcacctagcccgggtagaa

SEQ ID NO: 335878 - DNA, 112 bp, Homo sapiens
tgccctccccacaaaggtcagcaccccgagcatcactgtgccctccccacaaagacttgtgcaccatggacaattttgctgagggagatttcactgtggcggattatgcctt

SEQ ID NO: 335879 - DNA, 75 bp, Homo sapiens
cggcgcgcgaggacccgagccaggcggggacaggacggcggggcgagccaggcctttttgcaaatgtgtaacttg

SEQ ID NO: 335880 - DNA, 83 bp, Homo sapiens
attccctgcggtgtgcaagtccgactggaacagctgggattctgtccctgaccgtcttcacagtccaggtgatcttgactact

SEQ ID NO: 335881 - DNA, 98 bp, Homo sapiens
ttcctgcttttggtttccctggcaggggttgaactgtggagtgtgtggaaatgagccgtcagactgctacagcattacctaccggtacctcgaagtgt

SEQ ID NO: 335882 - DNA, 100 bp, Homo sapiens
cgcgtggaagccttcagcgacggagtctacgccatcgtggccacgcttctcatcctggacatctggccgttggcatccactgtgaatgataagctggagc

SEQ ID NO: 335883 - DNA, 75 bp, Homo sapiens
tgaagaaattgagggttcttgccatgtttgaaagtctctcaagcatattgaaacttcctggaaaaaagactttta

SEQ ID NO: 335884 - DNA, 100 bp, Homo sapiens
ctaaacctgatgagaaaggagagatgcaggtccacctaatcatcctgtgaaagtggtttctctatggaaagctttgtttgcttcctacaaatacatgctt

SEQ ID NO: 335885 - DNA, 75 bp, Homo sapiens
agcactggggaaacgatccgctcccaaaacggatggtgccatgacaatggtgtgaactacaagattggagagaag

SEQ ID NO: 335886 - DNA, 50 bp, Homo sapiens
tctctctgccacaatggtagttgaggagttcaaagaaggacgcagagcca

SEQ ID NO: 335887 - DNA, 75 bp, Homo sapiens
atttacgtggagatcaagcgcagcgatgataagtaatggaacatcatctgtgatcgtctccagaaagaggccatc

SEQ ID NO: 335888 - DNA, 100 bp, Homo sapiens
atgaagatgtcttttgaaaggtgtactgcaaggaacaaaatgtttgtaaattctccttttaccaaggaattgaatgatctggcacgggaccctccagcac

SEQ ID NO: 335889 - DNA, 87 bp, Homo sapiens
ctgctgaggccgggccggccgcccagacgctgcccgcgggcccggccacggcggagccaagctcctggcctgcgcggcttccggatc

SEQ ID NO: 335890 - DNA, 100 bp, Homo sapiens
ccatattctaccttggtgaataacagcgagtgtgttgcaaacatgaaagtcgttgaagaaagttggaaaagattctactgtcttactaatctgcatcacc

SEQ ID NO: 335891 - DNA, 100 bp, Homo sapiens
gctccgtgaccagccggctgggctcggtattccccttcctgctagtcctggtggatctgcagtacgaaggatctccccaataatatgatttaccaagtcg

SEQ ID NO: 335892 - DNA, 138 bp, Homo sapiens
aagctgctgtacctctcatcaggtcccagaaaattgacgtagctcatgtgacgtcaaaagtaaatactgtgctggtggcctcagtttacccccggaagcctcaagctgtagagcggcatgtccttcccatcctctggc

SEQ ID NO: 335893 - DNA, 50 bp, Homo sapiens
tctactcaagagtggaagttttcacaggattctccttttacaaatgcagg

SEQ ID NO: 335894 - DNA, 75 bp, Homo sapiens
tctcggcagaccccaggcatatcctcctcttcatcctggagcacatcatggtgatattctgcctccatggtggcc

SEQ ID NO: 335895 - DNA, 90 bp, Homo sapiens
tgagtatgacatgaccaagatgcccgagtgctacttctactccaagttcggttatgaactgactggtttagccagaggtggggaacagtt

SEQ ID NO: 335896 - DNA, 101 bp, Homo sapiens
ggcaagatccagatcgggatttacgtggagatcaagcgcagcgatggagtacttcttgcaagcagagctgacaagcaacgtcttaaaaacaggcgtggtgc

SEQ ID NO: 335897 - DNA, 100 bp, Homo sapiens
gcgcgcatgggcctgttcctggcccgcagccgccacctacccagtgaccatgataggtttttagaacttcagccataaaaatgggcagaattttccttga

SEQ ID NO: 335898 - DNA, 90 bp, Homo sapiens
cttggagaaacagttttctaaatcttccagagctgcacaccaggaacttagtgatttggcccgtgaccctccagcacaatgttctgcagg

SEQ ID NO: 335899 - DNA, 100 bp, Homo sapiens
atttgaggcctcagtgaaagccaagcataatctaatgacagttgaacagaataatgaatccttcaggttcctgttccgtagatgtgagtgccatgttttg

SEQ ID NO: 335900 - DNA, 96 bp, Homo sapiens
tacaggtcggagaggtcagcaacagggacatcgtggagacggtgctcaacctggttttaaaatcaaagatgggaaaatcggagaaaattgcccttc

SEQ ID NO: 335901 - DNA, 100 bp, Homo sapiens
cggtgtctgctcctgtcgccttcgcctcctaatccctagccactatggttaatgacccagagactgcagtaaaggaattagaagctctcttgggttttac

SEQ ID NO: 335902 - DNA, 90 bp, Homo sapiens
catttgaagacgttccttgaggaggtttgaaaaagaatttagataatgggctgtgtgcaatgtaaggataaagaagcaacaaaactgacg

SEQ ID NO: 335903 - DNA, 75 bp, Homo sapiens
ctccagaatgtcagcatggaggctgctgggcaggtcatgagtcaccatgaggtgtcgtggaatatgatgcagaag

SEQ ID NO: 335904 - DNA, 82 bp, Homo sapiens
ctggccagtgattcacgaaaacgcaaattgccatgtgatactccaggacaagggcattcaactcagaaacagacagtttcaa

SEQ ID NO: 335905 - DNA, 76 bp, Homo sapiens
gacttcccgtcacaatttcatttgttgatcccggcaccgccagtaatctatgccagcaattatgacaatgttagca

SEQ ID NO: 335906 - DNA, 75 bp, Homo sapiens
ttataccctggtacttctagtctaaaacaggatttgactctactaatccaggttgggataattcttcactattcc

SEQ ID NO: 335907 - DNA, 87 bp, Homo sapiens
cgtctcgtccacgacctccctagggactttgaacatgtcggggatcgccctcagcagactcgcccaggagaggaaagcatggaggaa

SEQ ID NO: 335908 - DNA, 97 bp, Homo sapiens
agggatggcacgctgtgcttgagaccaacctgacgggtaccttctacatgtgcaaagcaggatagtggccaaagcctccaagaacctcatgtccacg

SEQ ID NO: 335909 - DNA, 100 bp, Homo sapiens
aaacttccttttactattagcccatcaagaaatgaagaacgagattcagacacaggaatatattaaaggaatctgtgaacctgaactagaagaaagagaa

SEQ ID NO: 335910 - DNA, 75 bp, Homo sapiens
cagcagccatggaggacgagatgcccaagactcttgtttgaaagatgtatggtgatcttgaaacctccagacaca

SEQ ID NO: 335911 - DNA, 98 bp, Homo sapiens
ctacccccgcacccacgcggccctgctgaaagtggcgcaaatgattcagaatggacagtttagaagaacctcagaaaaaagtctttaaggctcgaaaa

SEQ ID NO: 335912 - DNA, 74 bp, Homo sapiens
acagattctattcatgaacaatgctatttcaaacaacatggatggaattggaggacattatcatatgcgaaaca

SEQ ID NO: 335913 - DNA, 100 bp, Homo sapiens
acgagatgacaactccgcagcaaacaactccgcaaacgaaaaagaacgacatgatgcaatcttcaggaaagtaagaggttgacttgctggtgaaggtggg

SEQ ID NO: 335914 - DNA, 82 bp, Homo sapiens
gtcgaggacggtcggactcccgcggcgggaggagcctgttcccctgagatatggctcgtggacagcagaaaattcagtctca

SEQ ID NO: 335915 - DNA, 75 bp, Homo sapiens
gctgatgtgaaaaataccacgacaaaaccaccctagcttctaaccctcctttatgtgactcagagaaaggagacc

SEQ ID NO: 335916 - DNA, 100 bp, Homo sapiens
ccctgcgctgccgccgctctgaggagttaaagcaccatggcactgcaacaggcccagatgttgctgagcatgaacagcctggaggcggtgaatgcgggcg

SEQ ID NO: 335917 - DNA, 100 bp, Homo sapiens
gctggccagggacctcaaggaagcttatgacagacaaggcgcctctgtcgaagagccttctgctggtccccagtgccctctccctcctgctcgccctcct

SEQ ID NO: 335918 - DNA, 75 bp, Homo sapiens
cccaccctgtagaagatggaatcatggatgctgccaattttgtgatgctgtgtaaccccatctgcggcgtcagct

SEQ ID NO: 335919 - DNA, 121 bp, Homo sapiens
gtggaaacagcagatgtaccctcagtacgccacctactattacccccagtatctgcaagccaaggacaaaactttcggtttgaagaataagaaaggagcaaagcaacagaagtttatcaag

SEQ ID NO: 335920 - DNA, 75 bp, Homo sapiens
gcgcgagtgaggaaaggaggtactgtagacccctcctcctgtagagagtggtgctgccctctcgggatgtacctg

SEQ ID NO: 335921 - DNA, 100 bp, Homo sapiens
gagggaaaatgagctaacgtactactgctgcaagaaggacctgtgtaactttaacgaacagcttgaaaatggtggccaccaaatatgaagtgagtgtcta

SEQ ID NO: 335922 - DNA, 75 bp, Homo sapiens
gttgggctgtgacgctgctgctggggtcaggtctgtgagctggatattatctttaattttgaaaaggcttatttc

SEQ ID NO: 335923 - DNA, 98 bp, Homo sapiens
ggtgcggcctcaccatacaggaacagggcagacgttagcgtgagtgatcactctcaatcccggcatggcttctcgctgtttctgggatgctgacactg

SEQ ID NO: 335924 - DNA, 100 bp, Homo sapiens
acttcatctactttcctggctcgcgcccttccaggagcctttcccaccggagcctgcgaggagaggttttgatacttatagaggactcccttcaatttcc

SEQ ID NO: 335925 - DNA, 100 bp, Homo sapiens
ttgttcgctccctggataagatggaaaatgccaacattccttctgtgtccctgtccaagcgagaggaatcaagagagacccggccaaggcttttgtgccc

SEQ ID NO: 335926 - DNA, 75 bp, Homo sapiens
ataaaactgaagatgtgaatactctgatgttgctatcggagctccacaagaagatgacttgcaaggtgctattta

SEQ ID NO: 335927 - DNA, 100 bp, Homo sapiens
aaattatctctggtgctgcagctcttactatactggcaattgctggagaagattttgcaattgttgcttctgatactcgattgagtgaagggttttcaat

SEQ ID NO: 335928 - DNA, 51 bp, Homo sapiens
gagaccaacgagatcctgcacatgtctttgaatttgctgacacaatatctt

SEQ ID NO: 335929 - DNA, 75 bp, Homo sapiens
cctcagtgatccagaaccaaggcctccccagccctctaaaacagtacataccgagcatcaaatattaaggcaccc

SEQ ID NO: 335930 - DNA, 99 bp, Homo sapiens
ttgcttcttgagagaagccggatggatgtgcatgcagggagtgtatcgcattaagttcaaggagagctttgctgagatgaacaggggctcgaacgagtg

SEQ ID NO: 335931 - DNA, 90 bp, Homo sapiens
cccgagaaaccgcagcactacacgattctaaagctgaaagtggataaaaacaaaatggtagccacatccggtgtaaaaaaagctatattt

SEQ ID NO: 335932 - DNA, 100 bp, Homo sapiens
tggctattgtctttgaaagcaacagctcctaccttggacgggaggaggtgcgggagacgcggcggcggcacgagcggcgcctggtggaggtggacagcag

SEQ ID NO: 335933 - DNA, 75 bp, Homo sapiens
gctgggcatcctgatttacattcagaagccaggcacctcattgagaagtcagtgcgtaagatcgtctccttgctg

SEQ ID NO: 335934 - DNA, 90 bp, Homo sapiens
gaaacccacaggaggcaaccacactagtttagggcagggtgccatttgccgtgcctgacaaagtgctgtggccacagctgtgtgaggcgc

SEQ ID NO: 335935 - DNA, 50 bp, Homo sapiens
caaaataaagtccctttgctcgggtggctcctatggacggaaaacagtct

SEQ ID NO: 335936 - DNA, 90 bp, Homo sapiens
gggcactgccctgatccgatacagcaccaaacaggaggcggccaaggcccaaactgcactgcacatatgaagaagatgactttatgtgta

SEQ ID NO: 335937 - DNA, 76 bp, Homo sapiens
cctaccctcactttccgtctgcttggctcccccagcaagccctggatgaaaacatggacctcttggaaggtataac

SEQ ID NO: 335938 - DNA, 75 bp, Homo sapiens
aaggattccaagtaactcttatttgtctctggatggtcgtcagatccgtgtggatcatgcaggcaagtctgctcg

SEQ ID NO: 335939 - DNA, 100 bp, Homo sapiens
cgggagggggccctgagcctcctgcaacacctgcggcctcactgggacccccaggaggtgaccctgcaggtttgcaacacaactacagacaggaaacatg

SEQ ID NO: 335940 - DNA, 98 bp, Homo sapiens
aagaccctcctgccaaaaggaaatgcatctttatgtcagaaacacaaagcagcccaaccaaaggtctggcagttgtagaaccatccatgatgctcttg

SEQ ID NO: 335941 - DNA, 83 bp, Homo sapiens
ccttgctggggatggatctggtcagttcctgcggatggtggatgcctgtgccagcttcctcactgaagccttgaacccagaaa

SEQ ID NO: 335942 - DNA, 75 bp, Homo sapiens
ctcaagcaggacaatcgcactttataccacctgcgattactgcagctggctaagagtcttgggcaggctggtgaa

SEQ ID NO: 335943 - DNA, 100 bp, Homo sapiens
cctgtaccttttaacaccacagaggatccagatattagcacagcagaccttggtgatgtgctacaggctgaagaaaaagtcccagtcggtggatattaat

SEQ ID NO: 335944 - DNA, 112 bp, Homo sapiens
aggctgcgacttgttaatcaaccggtcaggctggacgtgcacgcagcccggcgggaggataaagaccaccacggtgagaagccctaccactgcaactgggacggctgcggct

SEQ ID NO: 335945 - DNA, 118 bp, Homo sapiens
aagaaggcggaggacaaggccaagagggccaagggcaaaggccgaggttttgcacactagggaccaagaagccctcggggacactgctgagaaaagactgccgaagggaagaccagcg

SEQ ID NO: 335946 - DNA, 97 bp, Homo sapiens
cgtcgctagaactcagttgtgcgttgcggccagtcgccactgctatgttgatgatggagacacagtgacagatttcatggcccaagagcgagaaaga

SEQ ID NO: 335947 - DNA, 110 bp, Homo sapiens
cgcgcagggcctgcagcgggagctggacggcgagcgcgagcggcgcgagaaacatttaaatcaaacggtattgagatggattgggttatgaaacataatggtccaaatga

SEQ ID NO: 335948 - DNA, 100 bp, Homo sapiens
gcacacctggatccaggataacggaggctggggtgaggcgctcaggcaagttctggtcaaccgttactatggaaacgtcagaccttcgggacgaagagag

SEQ ID NO: 335949 - DNA, 100 bp, Homo sapiens
ctgcggcgagcgcgtgatcgtagagcacgcccggggcccgcgtcgcgatcgcgacggctacagctacggaagccgcagctactaaaactcgacttagcaa

SEQ ID NO: 335950 - DNA, 95 bp, Homo sapiens
cggggaccgtccagcccagcgattctcagtcagatgatgattattctccaccgtctaagagaccaaaggccaatgagctaccgcagccaccagtc

SEQ ID NO: 335951 - DNA, 88 bp, Homo sapiens
ccatggccttctacgttgtgaaaatggagaaccgcctggcccagcacaccctccaggccctgcagagtgagctggacagcctgcgcgc

SEQ ID NO: 335952 - DNA, 98 bp, Homo sapiens
cttttcccttacctcgacccttttgattccgcctcacagttgatggagccaggcagagctgatccggaagcaggcccaggagaagtttgaactaagtg

SEQ ID NO: 335953 - DNA, 101 bp, Homo sapiens
caagaatgtttttgaccagaaaaccgacaaccttcccagaaagtccaagctcgtgctacattaacaagctattctgaaaatgtggaacgcacaaaatatgc

SEQ ID NO: 335954 - DNA, 100 bp, Homo sapiens
ttttcaccgcggccatcctgcaggcacagttgccgattacagtttaaaaagcagaaactcctcctagaactggaccagtatgccccagatgtggccgaac

SEQ ID NO: 335955 - DNA, 91 bp, Homo sapiens
tggcaatggcacaaagttctctcgatcagggcatacatctttcttcgacaaaggttcaaatctgaacatcaatgatgtactagggaactac

SEQ ID NO: 335956 - DNA, 75 bp, Homo sapiens
ctgttcgaaagcatcttgagaggaacagaaaggattaagatacactcctgctgtgcccccatctttcctccaaac

SEQ ID NO: 335957 - DNA, 83 bp, Homo sapiens
cgctcctgcgggcttagcaggaaagggtgcctaaggtggaagttaaacgagctgagcctcgggacagcaagagccaagcgccg

SEQ ID NO: 335958 - DNA, 75 bp, Homo sapiens
aagcttacgtctctgctcttcagtacaatcctggcaacaaaccatggatttctcttccccgaggaaagggtatcc

SEQ ID NO: 335959 - DNA, 82 bp, Homo sapiens
ccggaggccgcggatagcggggcctacacgcttgaatgtgttcaagaatgatcaggatacttgggactacacaaaccccaat

SEQ ID NO: 335960 - DNA, 100 bp, Homo sapiens
cttccgaagatgccggactccggaacagcaagaactgcaccgaaccagatacattccaccgttgatctgggggaaaagtggacacatccagacagccttg

SEQ ID NO: 335961 - DNA, 97 bp, Homo sapiens
caacagtgtgaaaagactgaaaccggaccctgagccagatgacaagaatcaagttttaaaagaaggtagacagctgacctatgagaaagtgaacttg

SEQ ID NO: 335962 - DNA, 74 bp, Homo sapiens
gaggtggaggaggaggaggaagaggaaggaagagctactgttaaccaggatacaagattagacaacagagtcat

SEQ ID NO: 335963 - DNA, 101 bp, Homo sapiens
gcatgcccaccactgccacaaacgccgcaccaggtcttgtagcagcgcctcctcgcatgcttttcacttccactgcatctctcgctggctcaaaacacgac

SEQ ID NO: 335964 - DNA, 51 bp, Homo sapiens
atggggcagaggacgaggagtgggatgactcactggttgtgtggaaggaag

SEQ ID NO: 335965 - DNA, 99 bp, Homo sapiens
cacagcgcttcagaaaagagtgggacagggacaagcatatctaagaggctgaacatgaatccacagatcagctttcccatggtttggcatggacattgg

SEQ ID NO: 335966 - DNA, 74 bp, Homo sapiens
tggttttaaaaaatacatatctggttttggctgcctgggtctcagccatttgggtccccattggcccctgtggg

SEQ ID NO: 335967 - DNA, 97 bp, Homo sapiens
ggagaaggttctgtctatcagtgctgcgagaaaggaaagaaacaagtttgctctcagcggatcgaaattgcccagaagcatcctgatatctatgcag

SEQ ID NO: 335968 - DNA, 82 bp, Homo sapiens
gcagacccgttcaccagaaatattggtcaagactacctgattgctctgtccctgcagcagcaacagccacgaggcccgctgg

SEQ ID NO: 335969 - DNA, 51 bp, Homo sapiens
gtggagatatggcgcaactgcggcgcgagaactacgatgacccgcacaaaa

SEQ ID NO: 335970 - DNA, 100 bp, Homo sapiens
cggcgctgctcccgggggcgacggaagccctacaggtggcaactactagcccaactgccaatactactggtactgctactacttcctcaaccactgtggg

SEQ ID NO: 335971 - DNA, 90 bp, Homo sapiens
gagccgggaagacgcggggaagaggaggcggaaaaggacgcaaagttctccggcgagggtctcactctgtcaaccaggctggagtgcagt

SEQ ID NO: 335972 - DNA, 83 bp, Homo sapiens
gctgaagcaggtgtccgcggggcagacgtcggtgtatgccctggatgagaatggaggcaagtgaggcctatctggttggcctt

SEQ ID NO: 335973 - DNA, 74 bp, Homo sapiens
cttctgccgccggccggcgcgtcgtccccacaggccggtctaattgaagccaacggagaactcaaggtcttcat

SEQ ID NO: 335974 - DNA, 90 bp, Homo sapiens
agcacgtccaccaacctgaccatgacctttaacaaccagctgaccactgtccacaaccaggaccgtataatagacgctggccccaaagga

SEQ ID NO: 335975 - DNA, 100 bp, Homo sapiens
cggagagccacgcatgcgcactggtttctgcataaagaccaactcctcggaagggaaggttttcatcaacatctgccactccccctctatccctcctccc

SEQ ID NO: 335976 - DNA, 100 bp, Homo sapiens
tcacagctctggattaccttgcaccttatgccaagcaccctggaggagaagaggttctgctggaacaagctggtgtagatgcaagtgaaagctttgaaga

SEQ ID NO: 335977 - DNA, 75 bp, Homo sapiens
cagaaagcaggcgaacccgcggcgcaataacgaatctgtctatgatcttctcccaaaggagttacagttacctcc

SEQ ID NO: 335978 - DNA, 101 bp, Homo sapiens
aggcaagatctgtgctgtgcagatcctttggattgaggctgctgtgcacaggaatatggacctcctgccccccgaggtctgcagtctcctgaacccagcag

SEQ ID NO: 335979 - DNA, 83 bp, Homo sapiens
ggctgtactgctccccaagaagactgagagtcaccacaaggccaaggcatcctgaggttagcattacacttctcccagtggag

SEQ ID NO: 335980 - DNA, 97 bp, Homo sapiens
ctgatatgtctcctcatttacacaggtcagtgcaactgaatggccagcccttagtgatggtggacgacgggaccctcccagaattgaagccccgccc

SEQ ID NO: 335981 - DNA, 75 bp, Homo sapiens
acaagctcctgttatacagcagtaaaagacatgtagtctctgccaacttcaccctccatgaggcttactgcctgc

SEQ ID NO: 335982 - DNA, 98 bp, Homo sapiens
ggcggcggcggcggcggcctcggctcttccagccaccccctctccagtctgctcagcattccccgtcggagccctttctagagaaaccagtgccggat

SEQ ID NO: 335983 - DNA, 87 bp, Homo sapiens
gtactccaggtccgacccgcgaacccctctgggatccccgccgctctgtctacaacccgaggggaacgcccttttgcttgtgactgg

SEQ ID NO: 335984 - DNA, 95 bp, Homo sapiens
ccctagcaccccgagaaccgtcagtttgagccagatgtgagttattctccccacctcagaagtaccagcttttggtgtatcatgcagattctctc

SEQ ID NO: 335985 - DNA, 82 bp, Homo sapiens
tgatctctgcaagtgctccagtagccggcagtacctgcgattgtccagaacatcgtgggcacagctctgatgattttagtgg

SEQ ID NO: 335986 - DNA, 80 bp, Homo sapiens
gtatatactgtggtggagatgaatacagctgcagatatcttcaaacagtatatgaaggtggtggagacactgccacttgc

SEQ ID NO: 335987 - DNA, 101 bp, Homo sapiens
agcacaaactctgcgcggacgacgaatgcagcagtgtccctggccagtgtccttccacctgtccacaagcatggggaacatcttcgccaacctcttcaagg

SEQ ID NO: 335988 - DNA, 75 bp, Homo sapiens
agtgtgccctatccacttcccaactagtggcctgtactaaggttatctcctcagccaacagagctgtggttggtg

SEQ ID NO: 335989 - DNA, 100 bp, Homo sapiens
gggggagattctgctcacggaactgcagctgtggcagaggtaaaacttcgagatgatcaatatacactggaacacatgcatgcttttggaatgtataatt

SEQ ID NO: 335990 - DNA, 82 bp, Homo sapiens
cagattcgcagtggtcgcttcttctccttggaaattctgaaacagccacacctacaaatgtagacttgcctcaggtcatccc

SEQ ID NO: 335991 - DNA, 97 bp, Homo sapiens
agcttcctatggatctgcgggaccgcttcacggaaatgcgcgagatggacctgcaggtgcagagtattcaaaacctttgaccacatggcccgtcagg

SEQ ID NO: 335992 - DNA, 98 bp, Homo sapiens
agggttgtagacatggcggccatcagggaaccactgtctcaattcctaagaggaagccatttcttcccaggaaacaatgttatttatgaaaaaacaat

SEQ ID NO: 335993 - DNA, 74 bp, Homo sapiens
gaggctgctgggcaggtcatgagtcaccatggaacggaaaacagttcttccttcaaagcatgcagtacctgaag

SEQ ID NO: 335994 - DNA, 75 bp, Homo sapiens
ccgagttagaaatcctacaaaggaccttgccgactgcagcagtggcccagggcaaagagtgtgcgtcatcgatga

SEQ ID NO: 335995 - DNA, 53 bp, Homo sapiens
gcctcccaagtagctgggactgcaggaacagcagtctcagcggttagcagcac

SEQ ID NO: 335996 - DNA, 74 bp, Homo sapiens
tgcaaaagtggaagcgaagccgaaaaaggcagcagcgaaggaatgctttgaagaggacccagggcgcaagtgga

SEQ ID NO: 335997 - DNA, 48 bp, Homo sapiens
aagtgcggggacctccggcgaataaagagttttgcggcctccaggtgg

SEQ ID NO: 335998 - DNA, 100 bp, Homo sapiens
gcatcggcctgcagttgcccttcagcagctggtacgtggatcggggcggaaacggctgtctgatggccccagagtttaagctatgaagaaggacatccct

SEQ ID NO: 335999 - DNA, 90 bp, Homo sapiens
cctagatgccaaaaggaagatgccaatggcaacatagtctatgagaagaactgcagaaatgagatcacccctgacctgctacctcggccg

SEQ ID NO: 336000 - DNA, 75 bp, Homo sapiens
cccaatgggaccctggaggaatgtcagcaccagaccaacaagcaagtagctactcttccaccagtgagcgcgggc

SEQ ID NO: 336001 - DNA, 83 bp, Homo sapiens
cgcggattcgccgaggcaccgaggcactcagaggaggttgagaacttgttgcttagtaaccaagggaccattaagctgtgtga

SEQ ID NO: 336002 - DNA, 74 bp, Homo sapiens
ctctaaaccttatagcctgcttatgggggaaggtcagcccaaggccaaccccactgtcactctgttcccgccct

SEQ ID NO: 336003 - DNA, 75 bp, Homo sapiens
gggcgtggccaccgtcaaggccaacatcacgcccttcggcgccgaccagggatctgctggaggaaggaaaggcca

SEQ ID NO: 336004 - DNA, 75 bp, Homo sapiens
attgtcgacatgcctactgataatcctggcagcaaatatgaagtctatggaccctgcctcaggttattcaaataa

SEQ ID NO: 336005 - DNA, 83 bp, Homo sapiens
gtctttgtgcacatttacatcaaggccaaatttgagtttcatcatggtgactatgaaaaacagtttctgcatgtactgagccg

SEQ ID NO: 336006 - DNA, 100 bp, Homo sapiens
cccggaatgcctgaaccaactgttttgagacattaccagaaacatctttaccaaattatgccacaaatttgaaagacaagagttctttagtttcatctct

SEQ ID NO: 336007 - DNA, 99 bp, Homo sapiens
actgtgggtcttgtgctgcccatgcttataaacaagtggatccgtctattacgaatctgtctgctattcaggatagagaaatttgctgctattcaattt

SEQ ID NO: 336008 - DNA, 84 bp, Homo sapiens
ggagacctgggtcccagtggagaggcctcaccatgtagtattctgagagaagcctcacaaagtgtattggaattactattgaaa

SEQ ID NO: 336009 - DNA, 82 bp, Homo sapiens
ccggccgctctgcgggactctgaggaaaagctcgcaccaggagccttcacgtaaatgggtccagtcatgcctcccagtaaga

SEQ ID NO: 336010 - DNA, 100 bp, Homo sapiens
aaatcactaaggaaagaactccagaaagtgaagaagaaaatgtagaatgggaaactaatagagatgacctctcccggagctcctcgccaccctcactgct

SEQ ID NO: 336011 - DNA, 83 bp, Homo sapiens
gaggccctgcggaggcggcggtgcagcgctccgatgcagcagcttttttatgagaattacgagcagaacaaaaaggggtacat

SEQ ID NO: 336012 - DNA, 100 bp, Homo sapiens
cctggtcaatgtcaatgggtcacctgagcctgtgaaactgaccattagtttctgagaacaaggctctgtgccatccctcgtctgttgactccctctccac

SEQ ID NO: 336013 - DNA, 97 bp, Homo sapiens
caagatctctcctggagggataagccagggttgaagctttgagagaagcagcaactgctgttgagcaagagaaagaaatccttctggaaatgatcca

SEQ ID NO: 336014 - DNA, 83 bp, Homo sapiens
gtgacccttatgcaacagtttctctagtgggcccttctagatattcttactgattctccgggctctgcagctcttgacccggc

SEQ ID NO: 336015 - DNA, 100 bp, Homo sapiens
agcctggagcccgcgcgggctctgctgcgctggtggcggagcccggggcccggagccggcgcccccggcgcgggtgactccccggacagctcaacaccaa

SEQ ID NO: 336016 - DNA, 90 bp, Homo sapiens
ggaagactcccactccctgaaatctggagtgaagaacgccgccatccagccaccattccaagggtatcgggtgctgcttcggtatgaagg

SEQ ID NO: 336017 - DNA, 101 bp, Homo sapiens
taaggacatttgttctcgaatgcagttttgtcagcctgacccaagccttccccctctcaccatcagcaaccatgagttgcaaaagcttctcatttcagaga

SEQ ID NO: 336018 - DNA, 100 bp, Homo sapiens
gagaagcaagtgttagtgcattggggcttttacccagacaggtgtgatccctcacatccacaaatctctgattggaaagaagggacagcagaaaactgct

SEQ ID NO: 336019 - DNA, 100 bp, Homo sapiens
taacaagacgacctcttgtgctgcagcttgttacttctaaagcagacaagttggatggcttgaggactggtactaaaaggaaacgtgactgggaggccat

SEQ ID NO: 336020 - DNA, 96 bp, Homo sapiens
ctgggaacttggtttaatgaacacacacattccagagaactgtggagggatctgtaggcctttctgtccagcgctctgtttttggagaaagaaatt

SEQ ID NO: 336021 - DNA, 82 bp, Homo sapiens
cgaggtgctttccagccgcgagctgtcaggccgagtgtcaggccgggcagaagtccattggaatattaagcccaggagttgc

SEQ ID NO: 336022 - DNA, 75 bp, Homo sapiens
catagagtcgcagggagcccaccgggcgggcctggccaaggtgaaaggtgtagcagtcactcggcctacacccac

SEQ ID NO: 336023 - DNA, 98 bp, Homo sapiens
ctcggcagggaggatgacggagctgcagtcggcactgctactgcgaagacagctggcaggagcttgaagaaatccgcaaatgtgggatgaaaaacttc

SEQ ID NO: 336024 - DNA, 100 bp, Homo sapiens
tcggaatgcactacaacaggaaaatcatattatagatggagtaaagagagaactcgatgccaccgcaacggtattggcgaaccggcaggatgaaagtgag

SEQ ID NO: 336025 - DNA, 75 bp, Homo sapiens
gctatgaagacacgcttcttctggaagaccagccaacaggccacacgtgtctacacttagcctctatccatggct

SEQ ID NO: 336026 - DNA, 100 bp, Homo sapiens
gttcggtgaccgcagcactggggaaacgatccgctcccaaaacggaagctgaatatggtgggcatgatcagatagatttgtatgacgatgtcatatctcc

SEQ ID NO: 336027 - DNA, 100 bp, Homo sapiens
tgctgtgaagtccgtccgggaaacggaggaaaaaaagagttgcgggaggctgtcggctaataacggattggaggctgttgtcattggagaagttcatgag

SEQ ID NO: 336028 - DNA, 83 bp, Homo sapiens
gtcttctgcggctctcggtgccctctccttttcgtttccggaaacatggccaacgtggaacctgttgtgccgtcagaggcttc

SEQ ID NO: 336029 - DNA, 99 bp, Homo sapiens
gcactgtagggttttgtggaattgggagcctaattgatttcattcttatttcaatgcaggggcttctttcctgtcgttgttggctttattagaagagtg

SEQ ID NO: 336030 - DNA, 101 bp, Homo sapiens
ctgggagagtggagtggctggcctcaggccacacggaaaggacagagcgggatgccaccagcttgtccaaagggaagttccaggagctcctggtgggcatc

SEQ ID NO: 336031 - DNA, 113 bp, Homo sapiens
cccgggtcgccgcgccacagccgctgcggatcatgctgggatgaaagcagctccatcagtagtggactcagcgatgcctcagacaatctcagttcagaagaattcaatgccag

SEQ ID NO: 336032 - DNA, 74 bp, Homo sapiens
ttcttggatgaattgcttgctttggaggttctcccatgggcaggtggtctctctggatgagctgcgccccttcc

SEQ ID NO: 336033 - DNA, 73 bp, Homo sapiens
ttttcaaagcctaccaaaatctatcagaatcaagctttgcgactctgtctgggtagcactagtgttggaggtc

SEQ ID NO: 336034 - DNA, 82 bp, Homo sapiens
gaacgatgttggactcatagtcactgccagaaaggcttcccaggtggcttcccctcttcccctgggggctgatttccactga

SEQ ID NO: 336035 - DNA, 100 bp, Homo sapiens
agcgaataaagtttatcacgccggggactaccgaccagactcccggaaatcatgttggtaggatcccagtctttttcgcctggagggcccaatgggatca

SEQ ID NO: 336036 - DNA, 98 bp, Homo sapiens
cggaaatgaggaggagatggtggaggaggctgaaggttatactactccaactgccccccaggcatacagccagcctgtccaggggtatggcactggtg

SEQ ID NO: 336037 - DNA, 100 bp, Homo sapiens
gctgcagagagagagagaagagaggagattgcagcagcgaaccaatcccaaggtcttatgaacttacccggaaggaccgactgtacaaaaacattattcg

SEQ ID NO: 336038 - DNA, 100 bp, Homo sapiens
gcccttccagcccctggctcgactggtccagccacaatgtcaagtgctccaaccctcaaatcaccgagttttacaggcgtttatcagaggaaatgacaca

SEQ ID NO: 336039 - DNA, 75 bp, Homo sapiens
agttgtggagagctgattcccaaatctaaagaatatggattgtgctcagttccgtttgaaaataagctctatcta

SEQ ID NO: 336040 - DNA, 100 bp, Homo sapiens
gaaagacacctggccagcggtccagagctgatgcaggcaggagtagggctgattggagccattgtacagtgtcgggaacataccaggacactgagaatag

SEQ ID NO: 336041 - DNA, 75 bp, Homo sapiens
ggaactggccatgaggctggacttgaccgaggcccgagtccagactagacgcttgaagcaaagctgccatcccag

SEQ ID NO: 336042 - DNA, 83 bp, Homo sapiens
gttggagttggaatttgtgcaatgtttagccaacccaaattaccttaattagaccatcatgcagacatcagagactgggtcgg

SEQ ID NO: 336043 - DNA, 85 bp, Homo sapiens
gccgggagcgcggaacagcttgtccacccgccggccggaccagacaatgcagatcttcgtgaagactctgactggtaagaccatc

SEQ ID NO: 336044 - DNA, 101 bp, Homo sapiens
acatggatatccgtcagtttgtccacatcaaaaaagaatgttacgttcataacttactaaggattagtgtatattttccaaccttgaggcatgaaattctg

SEQ ID NO: 336045 - DNA, 50 bp, Homo sapiens
aggaatatatcctgactgattattatgtctaagcatttggacagtccccc

SEQ ID NO: 336046 - DNA, 82 bp, Homo sapiens
gttgctgatcgcctgggtggttgttggcgtgtccctgcagcgaaggatcctggttcgtgctggccgtgggcagcgccgtctt

SEQ ID NO: 336047 - DNA, 75 bp, Homo sapiens
gtgcagcatgtcgcacttccctctcttctagcagcaggtgccgtgagcgatgtggagatgcaggaacactatgat

SEQ ID NO: 336048 - DNA, 90 bp, Homo sapiens
attttttttcaagaactgccgtcttctttgcctgcactaatgggtctccgtctctccaccgggggcttcatccttccagggaggagaaga

SEQ ID NO: 336049 - DNA, 49 bp, Homo sapiens
ggacttaagaatggtgcctggcagatagagattaacgagaccagaagga

SEQ ID NO: 336050 - DNA, 98 bp, Homo sapiens
attgctttcctcacagtctgactgcgagagttgtgaaaaattgggatgtgcttctgaggtgggctgtggaatgccatcctcccctggtgaagacacaa

SEQ ID NO: 336051 - DNA, 100 bp, Homo sapiens
gtatattttacacccttggagaatgtgggctcatatccttttcagactacattttcctcacaactgttctttccatttctcacatggtcatagaggaagt

SEQ ID NO: 336052 - DNA, 50 bp, Homo sapiens
gaatgattgctggccaggttttagcaaaactggttgaacagcggatgaag

SEQ ID NO: 336053 - DNA, 90 bp, Homo sapiens
ctcctaaagtgctgggactgcaggtcacgacatttagtgagaacttcagtgaagatttcatacattggcctcatgacccagagctccttg

SEQ ID NO: 336054 - DNA, 90 bp, Homo sapiens
atgaaagacttcctcaaggactacagtatgcacttaatgtccctgagaatttgtgaagtaattaatgaagcagtatggaagcataatata

SEQ ID NO: 336055 - DNA, 97 bp, Homo sapiens
tgaacaacaatgaattggagaccattccaaatctgggaccagtctcggcaaatattacacttctctccttcaaagtgtgggatgctgtctcaggaga

SEQ ID NO: 336056 - DNA, 100 bp, Homo sapiens
aggtggccgcagctgtggccggagaggcattatccaattggtttgctatttgatcttcttgcatcaagttcagctcttccttggaacatcacagtacatt

SEQ ID NO: 336057 - DNA, 98 bp, Homo sapiens
gtggccgaaatgttattttaacgagactgttcgccatggatttccctatcaaccctcagccctggcctttgatcctgtacagaagatcctggcagtgg

SEQ ID NO: 336058 - DNA, 80 bp, Homo sapiens
gcgagcgaggaggatggcggagtcggggctcctgacgcactgcctcctaaaccaccaaaacctactactgtagccaacaa

SEQ ID NO: 336059 - DNA, 88 bp, Homo sapiens
cagcacagacagaatccctgctaccaatacagtttatgtaacttgatggaagaaaatggaattactccaaaaagacaagtgctcaagc

SEQ ID NO: 336060 - DNA, 101 bp, Homo sapiens
ccgaggagaaaacagcaggcacccaagcgggcggcaggttgatgccggcccaggatggatcagacctgtgaactacccagaagaaattgtctgctgccctt

SEQ ID NO: 336061 - DNA, 83 bp, Homo sapiens
tcccaaagtgctgtgattacaggccagattacctgtccctaatactgagcagaagctggtgaatgaaacaggagatccctcag

SEQ ID NO: 336062 - DNA, 100 bp, Homo sapiens
cagaattccaaacaacacgcgaacacccgagatctcaggggatttggctgacgcctcacaaacctccacattgcagcgtgcagggtcaaagacagccggc

SEQ ID NO: 336063 - DNA, 100 bp, Homo sapiens
accaggttctccttcgaggaacagagaaaatgaaaccagcagacagaatttgtcaggatcaatatggaaattatgtaatccaacatgtactggagcacgg

SEQ ID NO: 336064 - DNA, 75 bp, Homo sapiens
ccatcgtgtgcctgatgatcacgcagctggctggcttcagtggaccaatcaccgaagtggccttggagtacaaca

SEQ ID NO: 336065 - DNA, 101 bp, Homo sapiens
ctccgggcccgcccccggcctatgcccccactaacggggacttcacctttgtctcctcagcagacgcggaagcgggaacttcattgcaggccgtgtgtcac

SEQ ID NO: 336066 - DNA, 99 bp, Homo sapiens
ccaggcgatggtgcactggacgggcgagaacagcagcaacccagcccttgctgacatctacacagagcacgcccatcaggtggtggtggccaagtatgc

SEQ ID NO: 336067 - DNA, 51 bp, Homo sapiens
gctcggatccctgaatttgatccagtgatggaatggggagaagatattaaa

SEQ ID NO: 336068 - DNA, 100 bp, Homo sapiens
ggggtgtttctggccacgtgcttcaacgctctgctgcccgctgtgagggaaaaggttcgtgctggccgtgggcagcgccgtctttgatgccatgttcaac

SEQ ID NO: 336069 - DNA, 99 bp, Homo sapiens
cgggcagaggcgacctccccgcgttccatgcgcacagggacaggggtgctcagaaccacacgttgcagaggctgcaacaggtgctgcacgcaggctcag

SEQ ID NO: 336070 - DNA, 75 bp, Homo sapiens
actgcattcctaccggtgtgacagcaggttacgggcaggacttgagtggcttcggacagggcttctcagacccca

SEQ ID NO: 336071 - DNA, 100 bp, Homo sapiens
gaagaggtcatctcgctcggagcttcgctcggaagggtctttgttccctgcagccctcccacgggaaaagaagatctcccggagcagtgccctgaaagtg

SEQ ID NO: 336072 - DNA, 96 bp, Homo sapiens
gcctaacaagatggaagcaggtttaaaattttacataagaagttacctttttcagaataatccagaatggctactctgatctatgttgataaggaa

SEQ ID NO: 336073 - DNA, 98 bp, Homo sapiens
ttccctctgtgcggcggccggcgggaccataagggcttaactcatatatttaacccccctccaaaaacacctgtggaatcctctcaagaggaacagtc

SEQ ID NO: 336074 - DNA, 96 bp, Homo sapiens
gccccgagcattgtgggcctcatcatcttcctcctgtgcaccctcttcatcagttctgttgcttttcccgcgagctggtgaattcccagccccaga

SEQ ID NO: 336075 - DNA, 82 bp, Homo sapiens
ctgggcacgaggaccatgctgggccggagcctccgagaaaacctaaaggcagacccagaagagctttttacaaaactagaga

SEQ ID NO: 336076 - DNA, 88 bp, Homo sapiens
tcctacagagattcatatgagagttatgctgactttggtttctgtgcccagatcacccctgagcagagcaaacgcagtaccatggtcg

SEQ ID NO: 336077 - DNA, 90 bp, Homo sapiens
cgttcacgacagaaaactgcagttcatgtgctaaacttttggtgcttaaatccagctgtggaagagagaagggcacagttacctaagtat

SEQ ID NO: 336078 - DNA, 83 bp, Homo sapiens
gccgcgcatcgtccgcagacgccgccaccgccatgggctcctgaggatactggtatcgggatgacacaggaagagctggtgtc

SEQ ID NO: 336079 - DNA, 83 bp, Homo sapiens
gacgcagagccgagtgcagaagatctgggtgcccgtggaccacaggccctcgttgcccagatcaaaagactgttgaagtagag

SEQ ID NO: 336080 - DNA, 100 bp, Homo sapiens
caggtgctccacgaagacgaaaccacgacggcgccccgctcagcgagctgtcctggccatcctccctcgccgtggtggctgtgtctttctccgggctctt

SEQ ID NO: 336081 - DNA, 49 bp, Homo sapiens
tttcacctctcaggcatcatggcattgaagatctcaaacagacaaatca

SEQ ID NO: 336082 - DNA, 100 bp, Homo sapiens
tgaaaagattgaaaatatctacatgcgaagtgagcctgttgctcaggtgtttgtccacggagaaagcctgcaggccgggatagaaaatcgtcagctggac

SEQ ID NO: 336083 - DNA, 100 bp, Homo sapiens
aaaggctccacctggtgatgaagattatctttctcaaggaatagatctttctggaatagaagtgatagaaaatgatctactttttattgcaagagcccga

SEQ ID NO: 336084 - DNA, 95 bp, Homo sapiens
atccgctggagcggagccggccgtacgcggtgctgcgagggcagaacctggctggcgttgcagacggggcgtgaacccccacccatctggcgagt

SEQ ID NO: 336085 - DNA, 98 bp, Homo sapiens
ccgcggcgatgactcggacccagattgctcgagactttaatcccaactggatgagtgctgtggaaatcttggatgatgacaattttctgggggctgaa

SEQ ID NO: 336086 - DNA, 50 bp, Homo sapiens
aaaagacctgagaacctggtagccaggctgcggcccactacaaaggcacg

SEQ ID NO: 336087 - DNA, 82 bp, Homo sapiens
gagttcatcttccacgtggtcctcagcatccactctagaagccaaagccaagccacccgtgggaaactgttacaacagctgc

SEQ ID NO: 336088 - DNA, 97 bp, Homo sapiens
caacatcatggcctgctacaatgaactgctccagctggagtttggagaggtgcgatcacaactgaaactcagggtctcgctctgttgcccaggctgg

SEQ ID NO: 336089 - DNA, 100 bp, Homo sapiens
ctaggttttttcctagaaacaggacttcagagagcccatgtcctctatttcaaaaatgggcccttccttctaccatgattatagtagcagtttattgtcc

SEQ ID NO: 336090 - DNA, 89 bp, Homo sapiens
atttttggcaggcgctggttggacagacaaaaaatgatttggtggtcagcttgcctgaggagcgcccgattgaccgccagcgatacgac

SEQ ID NO: 336091 - DNA, 100 bp, Homo sapiens
ctggtgaacgtggtgcagctggtcttccagggcctaagggtgacagaggtgatcctggcaaaaacggtgataaaggtcatgctggtcttgctggtgctcg

SEQ ID NO: 336092 - DNA, 100 bp, Homo sapiens
gaggttagacttgtttcttatatgtgatgccattccagcactggactcatggaggctgagcatttattcaggagtggtcattcactgtaaccacaggatc

SEQ ID NO: 336093 - DNA, 100 bp, Homo sapiens
aggaaaaagaaaaaggggtcgtcctggccggcctccagctaaggcatcatcttcataaggactcctggaaagcacacttctggggctgatggtataggag

SEQ ID NO: 336094 - DNA, 105 bp, Homo sapiens
atatgattctcttcctccttgcctttctgcttttctgtggactcctcttctacatcaacttggctgaccattggaaagatcgtcagtatttaaacagatcacatc

SEQ ID NO: 336095 - DNA, 96 bp, Homo sapiens
cttgcctaaatgaggaatgtctttcctaccatctaaaatacgaaggtttctggctggcttaatcttctccatacagagctggctaaacagttggca

SEQ ID NO: 336096 - DNA, 75 bp, Homo sapiens
gacatcgacgccgcctggcaggccctgcgcaccaggttctgggccggagaaggggcgacgttcgggcaccccccg

SEQ ID NO: 336097 - DNA, 82 bp, Homo sapiens
gcacgctgctgtgtgagcagcaggtacggacattgctgcaggagaagaggttgccatcaagcttgaatgtgtcaaaaccaaa

SEQ ID NO: 336098 - DNA, 100 bp, Homo sapiens
cttctcctggagacgcaactcaaggtgtttgatcagtatgtaaagaccagggcagaggaagaacgcagggaaaagaaaaataaaataatgcaagccaagg

SEQ ID NO: 336099 - DNA, 75 bp, Homo sapiens
gtgttagtgaatggcatgaagtactcagacatagatattatcctacttaaggtttgaagatgccgcatttggatt

SEQ ID NO: 336100 - DNA, 103 bp, Homo sapiens
ggcggagtcctttggtcccaggcatcatcacagttattgacaccgaaaccgttggagagggccaggccccagtgaaatatcatggagacagatcaaaggagag

SEQ ID NO: 336101 - DNA, 100 bp, Homo sapiens
gttttctactcttacaaaggaactgtccacactgctgaaaaatctgatttggaggccaatcactgccaccttttatttccctgtgggtccaggaactgga

SEQ ID NO: 336102 - DNA, 77 bp, Homo sapiens
aaattaccaggttgcatcttcactgataggaatacatgaaggcagctcaaagaatgtcatctaaagttcagcagcag

SEQ ID NO: 336103 - DNA, 100 bp, Homo sapiens
ggcccctcttctcctccaacccagaactggacaatctgttattagaggaagtaacacaaggggatatgagtgcagcagacacatttctgtccgatctgcc

SEQ ID NO: 336104 - DNA, 100 bp, Homo sapiens
agaaacccgaggactgcaaagtgcccccaaggcccttagaggctgaaggtgcccagctgcagggcggcagtaatgaggttggtgttcgaggaagagacat

SEQ ID NO: 336105 - DNA, 100 bp, Homo sapiens
tgatggcctcggagcgcccggagccggaggttgcagatgaatacatgttttccctagaagagaataagaagtccaagggacgccgtcagcctttaagcaa

SEQ ID NO: 336106 - DNA, 83 bp, Homo sapiens
cgacgttccatctgtggaaggacctaccaaccagatatgggacacagcaggacaggaacggttccagtctctcggtgtggcct

SEQ ID NO: 336107 - DNA, 75 bp, Homo sapiens
attccaagtaactcttatttgacgctgttggaagctctgactgtggcagttgttggtaagccgtaactgcatttc

SEQ ID NO: 336108 - DNA, 100 bp, Homo sapiens
agctctacgcctcctacgtttacctgtccatgccgaggcctgcctggagccccagatcaccccttcctactacaccacttctgacgctgtcatttccact

SEQ ID NO: 336109 - DNA, 73 bp, Homo sapiens
cagaagtccagagctgaggactgcctgtttgcaggtccctgtgcgttttattgcgacctgccggtgggaactt

SEQ ID NO: 336110 - DNA, 90 bp, Homo sapiens
atctatttgtaaaggccagcagcttgtgatgatgccaaacaaggtgctgctgttttttcaaacgaaggaaaaggaaaaccatacagcgcc

SEQ ID NO: 336111 - DNA, 75 bp, Homo sapiens
ctggcgtggtagttaaaggcccagatgataggaatcccatctcatttagtattatgcagatatgccagcagaaga

SEQ ID NO: 336112 - DNA, 100 bp, Homo sapiens
taatcatcagacagaattggaagtccctagaacacctcgaacacctacaagtgatcatggagctcagcttggtctccatggggctggtggtgatggaata

SEQ ID NO: 336113 - DNA, 100 bp, Homo sapiens
gtgaggagcctctccgcccggcagccaccccatctgggaatagccggatcgagctgggagatgtgacaccacacaatattaaacagttgaaaagattgaa

SEQ ID NO: 336114 - DNA, 75 bp, Homo sapiens
tgaggagaggggagcttggggggcgcctgctgccaagggctgcctgggtctcagccatttgggtccccattggcc

SEQ ID NO: 336115 - DNA, 74 bp, Homo sapiens
aagagaactgtctcctggtgaccgagcacccgcctccgggcatcttcaactacaatgcagatcttcgtgaagac

SEQ ID NO: 336116 - DNA, 75 bp, Homo sapiens
aagcatgctctggaaatgttcccagaacattgcacgatgcctcctggctactgaaagcattaaaatgctggtgac

SEQ ID NO: 336117 - DNA, 100 bp, Homo sapiens
atatccagaggtgccacccgaggagttccgcccctttctggcaaagatgagggggattcttaaggaagagcctaggctggatgtcttgatcaataacgca

SEQ ID NO: 336118 - DNA, 100 bp, Homo sapiens
gaattcctgccagacccctcagctttgcagaggctcacaggacacctgcatgcccaaggcactccaccgtatgtgatcaacctggatccagcagtacatg

SEQ ID NO: 336119 - DNA, 75 bp, Homo sapiens
agcgcatccatttccccagtgacaaaggcatatatggtgctggttgtctcattacggaaggatgtcgtggagagg

SEQ ID NO: 336120 - DNA, 50 bp, Homo sapiens
ttggcgatgggttacagtaagaggagacagaagaaattctggcagatgtg

SEQ ID NO: 336121 - DNA, 88 bp, Homo sapiens
tggtgccttcattcatgaaaagcatgcccatacgattaaacctgcgttgggggccgtcccgctcctaaggcaggaagatggtggccgc

SEQ ID NO: 336122 - DNA, 100 bp, Homo sapiens
tagccacggtgtggcagctgctctgaaccaggacctggacccggacccaaagtgccatgtctttaattttctccttggaccaagatgactgatggaaaac

SEQ ID NO: 336123 - DNA, 100 bp, Homo sapiens
caacaggaagtccaccagctacaagaaaagttagcaatgatggaaagtggggtgagagactatagcaagcaggcctggcaaaaagcacgaagtgatgggt

SEQ ID NO: 336124 - DNA, 82 bp, Homo sapiens
gcaccacctcctgctgccttcccgtcgccgctcccgaagcttttccaggtgctggagaatctggtaaaagcaccattgtgaa

SEQ ID NO: 336125 - DNA, 74 bp, Homo sapiens
agtacacacacaagatctaccacctgcagagatttccacaagacggcaccctatgtcgtcactggcagcgtaga

SEQ ID NO: 336126 - DNA, 98 bp, Homo sapiens
cccaggacactgtccggatcttccctccctgatgagaccaagaataactgggaagtgtcagctctttctcgggctgcccagaaaggatttaataaagt

SEQ ID NO: 336127 - DNA, 100 bp, Homo sapiens
ttacacagatggaaccagaaaagatacgaggctctaggagaggaaagatatggatgaagttgaagagaaatctaaagatgttataaactttactgccgag

SEQ ID NO: 336128 - DNA, 100 bp, Homo sapiens
cacaccctccagacccccgtccagtgaattcttgattcgcctttgccagtctcatctcgtgtctgctttgttaagttccatgatccagactcagcagttg

SEQ ID NO: 336129 - DNA, 100 bp, Homo sapiens
tggagcgcccccagccctgggtgggggctgtctcggcaccttcacctccctgctgctgctggcgtcgacagatggcagtggcagcaccatgatgcaaacc

SEQ ID NO: 336130 - DNA, 50 bp, Homo sapiens
ctgcagacggcgagacctcctgcacagcagaagaagatctttacaatcca

SEQ ID NO: 336131 - DNA, 83 bp, Homo sapiens
ccacatcaacggcgggggcagcgcagctgagcagcgtgagaagatcaagcaggtatcatgaactgatcactaaatatgggaag

SEQ ID NO: 336132 - DNA, 101 bp, Homo sapiens
aaaactgggcgtctgcttgggaatctattgtggaaacccagacaggggcaagtgtccgagtggtgaatcagctacttacagagatggatggtctggaagca

SEQ ID NO: 336133 - DNA, 100 bp, Homo sapiens
gcgtcaccgccgcccccccagacaagatggacaccgcggaggaagagctccactggttcaacagcctctcctccagtttcgaccccagtcacaggacaca

SEQ ID NO: 336134 - DNA, 74 bp, Homo sapiens
ggaaccctggtcaccgtctcctcaggagacacacggacatcgggaacggacggaggaaggatgtgcagttgcag

SEQ ID NO: 336135 - DNA, 51 bp, Homo sapiens
agaggagaagagatgctggcgtgaaggggtgagccctattcccagaggcag

SEQ ID NO: 336136 - DNA, 98 bp, Homo sapiens
tgggataaacggagagcagcagccgcccgcttcaaccccaggggaccagaggaactcagccctgattgcggtgtgagttcttgatacgaatgaaaggc

SEQ ID NO: 336137 - DNA, 103 bp, Homo sapiens
gtgcacatggctgaccacccctaaaagcacctggccccgctacagcaaaccaggtgagaagccctaccactgcaactgggacggctgcggctggaagtttgcg

SEQ ID NO: 336138 - DNA, 90 bp, Homo sapiens
gaagtttctaggaaaggccggacaccaggcaccctttcttgggccgcgaggtccctatctcgaacggctcaggattcgtggtggctgccg

SEQ ID NO: 336139 - DNA, 100 bp, Homo sapiens
tggagaggggcgggacctggagagagggaatgtttaattcagccttggaagtggccaaatttgaaggtgctgtgattcgaactgtcagtgggataagggg

SEQ ID NO: 336140 - DNA, 85 bp, Homo sapiens
ccctgaaggcctgggccatggccggacgctgttcctcgttatgaagaagtgccacatctgccccattcctcatcttcatcttccc

SEQ ID NO: 336141 - DNA, 75 bp, Homo sapiens
ttggaaggcatctctcctgaatattttcagtctgtaagttatcattaccatgttggtgacctgttcagtttgctg

SEQ ID NO: 336142 - DNA, 74 bp, Homo sapiens
tgggatgatgacaatgtagaggatgacttctctaatcagttacgactcaatgatgaggcacggcggctcattgc

SEQ ID NO: 336143 - DNA, 100 bp, Homo sapiens
ctcatggttccagtctatcctcaggcaggacctaaggtcctacttggaactatgttgtgcttctggactccacactccccagatcccagtatgactacat

SEQ ID NO: 336144 - DNA, 101 bp, Homo sapiens
atggagaacatgaagccagtcctgacaatgggcagaacgaattcagtgatatcattaagtccagatctggtgaatctggattgggaaagtcgacattaatc

SEQ ID NO: 336145 - DNA, 98 bp, Homo sapiens
atactgctatactgaaacctgaatcaggctgtcttgataacatcaacggaccgagaaagtcgttacgaggaagaagaagaacaaagtcgaagtatgag

SEQ ID NO: 336146 - DNA, 98 bp, Homo sapiens
gggggcctcatcagaaatgttacacacggagtatcaaactctgctgccaagattatgtttgagaccttcaacaccccggccatgtacgtggccatcca

SEQ ID NO: 336147 - DNA, 88 bp, Homo sapiens
ctggagttgtttgacttagtggaggaggtgcagctcaacttctaccagttcctcggggtgcagcagattgtcctgggtcacataatgc

SEQ ID NO: 336148 - DNA, 74 bp, Homo sapiens
ttcaaggagtttgggaaaaaccgcgaagtcatggggctctgtcgggaaggtactccaaagattcaggtttactc

SEQ ID NO: 336149 - DNA, 100 bp, Homo sapiens
ggcggcgatgcggggctgctggaggcggagaggcacggaggagccgctggggctgccgccacggccgcccggagcttattcagctgattctgaatcatct

SEQ ID NO: 336150 - DNA, 90 bp, Homo sapiens
ggccggccggaagtcttctcccctgcacttcgctgcaggggagttgctgagtcagcccagaccggaaggagtggcagagatcatttgccc

SEQ ID NO: 336151 - DNA, 98 bp, Homo sapiens
gtgtggctgtaacttacgtgtactttaccaacgagctgaagcaggcgtccgagctgggccacagcctgaacgagaacgtcctcaagcctgcgcaggag

SEQ ID NO: 336152 - DNA, 80 bp, Homo sapiens
ggaaacgcttgtagggtttcaccagggtcaacggactgcgtgtgttactccaccgtgggcaccagcgacgcagaaacctc

SEQ ID NO: 336153 - DNA, 81 bp, Homo sapiens
tggatccgcgggacaagaaaattcatgcgacctgcctagagctggaacgttacctccagagcgagccctgctatgtttcag

SEQ ID NO: 336154 - DNA, 100 bp, Homo sapiens
catgaacttccttgtctcccacatcactcggaagccccccatcaaggtggcagggcccagccccgaaccagacaagggacccctcaaggagcttcattct

SEQ ID NO: 336155 - DNA, 98 bp, Homo sapiens
tgctcctattgtcgcactaagttctgtgcgcgctgcggaggccgcgtgtctctacggtcaaacaacaatgcatacttggaatgaatccttctagagac

SEQ ID NO: 336156 - DNA, 74 bp, Homo sapiens
cggcggccggagcgcccccggcctctgtcggctccgtaggctcagcctccatccctgtgagatcactgccctga

SEQ ID NO: 336157 - DNA, 98 bp, Homo sapiens
taggtggaaagaatctgatgagccttttaggcctgttcaggtgaagtattacagacacttagcacctgatcacttgctgcaaatatgtcatcgactag

SEQ ID NO: 336158 - DNA, 76 bp, Homo sapiens
tgcctatgaccggcgtcgagaatttcaactggattatacttactcagctgttaagagtaggcaatttcttcagttc

SEQ ID NO: 336159 - DNA, 75 bp, Homo sapiens
caaacccctttggccctgtatcaggagcacaggtggatgaaaatactaggaaaagtttatttaagttacgttcta

SEQ ID NO: 336160 - DNA, 106 bp, Homo sapiens
gtgccgggcggggggcccgggttcgccgagccgcaggagagacacgctgggccgaccccagagcggcgctggacagaccattcccggagtaataaatccagttgga

SEQ ID NO: 336161 - DNA, 100 bp, Homo sapiens
ccggcgtgtgccccgacggcgacgagcccagctgagagccagcctggaggttacccagcagcaggccacccaggccgaaggccagctactagagctgcgc

SEQ ID NO: 336162 - DNA, 120 bp, Homo sapiens
gtagaattgtagtggatgaaaaatcaggtcaggtgacactggaagataccagccatccagtccaatggatcagatgggcaagatgagacctcagccatatggcgggactaacccatactc

SEQ ID NO: 336163 - DNA, 101 bp, Homo sapiens
cttttcaccaaggagccctacctggatgagcagagagctgtgaaatatctttggcttgcagccaacaatgggcccagtgtttcccgggctctttgagttct

SEQ ID NO: 336164 - DNA, 100 bp, Homo sapiens
ctggacctgccgcagatcgctgtagtgggcggccagagcgccggcaagagctcggtgctggagaacttcgtgggccgtgtatgtggtagaagaccaaaga

SEQ ID NO: 336165 - DNA, 73 bp, Homo sapiens
tgagccatgtacgcaaaatacaaaccagtccagctacgggggcccagccagccagcagctgagtgggggttac

SEQ ID NO: 336166 - DNA, 100 bp, Homo sapiens
gtttgtcagcagccaaggtgtttccaggaagttcagagagaacagctcagcaaaacccagcagctcagattcctgccaggcagcgggagattgaaatgaa

SEQ ID NO: 336167 - DNA, 100 bp, Homo sapiens
aataatccagagatttccacagaaggactgggatgatacaccttttccacagggaattgagttgatgattctttgggattgggacttaaaacaatggtat

SEQ ID NO: 336168 - DNA, 82 bp, Homo sapiens
gggagccccgggagccgcacgccgaggtgctcggtggagtcatggcagtgccctttgtggaagactgggacttggtgcaaac

SEQ ID NO: 336169 - DNA, 116 bp, Homo sapiens
tgacatctacctccatcaggaccccagatgtctgacagccctgtgtgacaccaagataagtaacccgcagggccgtaggcagccatggcgcccagccggaatggcatggtcttgaa

SEQ ID NO: 336170 - DNA, 99 bp, Homo sapiens
ctgccgcgtgttcctgcaagcagaaaaggagttaactaggttcagggagcaagtttccgaggttggaaagaagtgacttcactgtttaacaaagatgat

SEQ ID NO: 336171 - DNA, 75 bp, Homo sapiens
acgccaagcacgtggtgggctatggccaccttgagtccggcagcgtcttctcttgagggagcaatttggagaaga

SEQ ID NO: 336172 - DNA, 100 bp, Homo sapiens
agggtcatctcttctattgtacctgcagactgctggagttaataccaccgacaaagagatggaggtgcttcacttaagaaatgtctcctttgaggacgca

SEQ ID NO: 336173 - DNA, 50 bp, Homo sapiens
ctcatactctgttatagataaacaaggtgtgctgggcatcaaggtgaaga

SEQ ID NO: 336174 - DNA, 80 bp, Homo sapiens
tgaagaatttctctgaatctcctaaatttcgtagtctacactttctgaattttccagttgctgtggttggctgataaata

SEQ ID NO: 336175 - DNA, 74 bp, Homo sapiens
atgctttaggggagaaatttgtgccacagcctgctgaggaggtgctactacattccaagaatatcagaaaactg

SEQ ID NO: 336176 - DNA, 50 bp, Homo sapiens
ctgctctatccagcatcattgaggccgcatctacaagtgcttgtttactg

SEQ ID NO: 336177 - DNA, 101 bp, Homo sapiens
gttcagtcagattggaccctgtaaaagctgtaaaatgataacagaggatcttcaagatgaagttcaaagggagaatactaatctgcaaaaactacaggccc

SEQ ID NO: 336178 - DNA, 90 bp, Homo sapiens
tcaacatgagtatggaccagaagaaaacctagaagatgacatgtaccgactcagtgacctttgaagatgtggctgtgaacttcacccagg

SEQ ID NO: 336179 - DNA, 90 bp, Homo sapiens
cgtcctggcgcgatgcgtcaagtacactgaaattcatcctgagatgagtacaatggtcagttccgttcaaggaaacacatatcccagcca

SEQ ID NO: 336180 - DNA, 98 bp, Homo sapiens
gattgtgcaagaaccatgggaggggcgtcagggacaggagagagtggcaagagtacgtttatcaagcagatgagaatcatccatgggtcaggatactc

SEQ ID NO: 336181 - DNA, 100 bp, Homo sapiens
accagtttcggtcctggaggtggggccgggcctgcgtagtgaaactgcgtaggaacctgggaagaaggttaatttggagtggcccctggagtcagtttcc

SEQ ID NO: 336182 - DNA, 100 bp, Homo sapiens
gcgcaggcgctgcagaaagtgaagatcgaggtgaacgagagtggcacggtggcctcctcatccacagggatcatggcccaagttgcaatgtccaccctcc

SEQ ID NO: 336183 - DNA, 100 bp, Homo sapiens
gaggcccctcacagcaaaggacacattcccacaggaaacaagtcgaccttctgtagcaaagcagcttcttgccgaaatcgagctatagcagattatcttc

SEQ ID NO: 336184 - DNA, 90 bp, Homo sapiens
gggactggcactcttcaggaaccaccagtcttcttaccaggagtgccttggtgaagcacatgagccttgtgactgccaaacatggaagaa

SEQ ID NO: 336185 - DNA, 120 bp, Homo sapiens
ggagacgtcggttgagcggcggcgaacatgcgcttttgacacattggagcctcccctggtgaagacacaaactgtcaccatctcagataatgccaatgctgtgaaaagtgaaatcccaac

SEQ ID NO: 336186 - DNA, 50 bp, Homo sapiens
gccaaagtaaccagatctaacatgagaatcaggaaacccaggcccaacgg

SEQ ID NO: 336187 - DNA, 100 bp, Homo sapiens
ctcgctgctgctgaaagcgcgtcaaggaaattgagaggctgactgagcgactagaagaaaaagagagggagatgcagcagctgctgagccagccccaaca

SEQ ID NO: 336188 - DNA, 100 bp, Homo sapiens
gcctatctgcatccctcaggagaatttccaggtggaagcctgtggccagcggacttcaaggataactggaggattgccggctccagacaggaagtggccc

SEQ ID NO: 336189 - DNA, 80 bp, Homo sapiens
gtccgtccgccgccaccacccactccggacacaggttaaacccatccagagtaatggctgcggccttacccaggaccctg

SEQ ID NO: 336190 - DNA, 83 bp, Homo sapiens
cgccgcgggacctctccgggccatgggtgcgcgcggagccatggttatcatgtcggagttcagcgcggaccccgcgggccagg

SEQ ID NO: 336191 - DNA, 88 bp, Homo sapiens
tgtttggaaagacccaggagaagccgcccaaagaactggattgactcagtcagcattgacacccttatcttcactttggagtttacta

SEQ ID NO: 336192 - DNA, 90 bp, Homo sapiens
ctggaatgcatccaagagaatccctcaacatgctggtatttaccttgctgtggattgctgactggatggtccatcacttctggaggaaag

SEQ ID NO: 336193 - DNA, 51 bp, Homo sapiens
ttctggtcagagatacttcttaaaggatgactggaaaccatacaagcttag

SEQ ID NO: 336194 - DNA, 71 bp, Homo sapiens
agctgctgcgcacgaccggcgcctcggacaccttcgagggttggggtcaacatatttcactggcacctatt

SEQ ID NO: 336195 - DNA, 100 bp, Homo sapiens
aaagagcaagagctgtagagtctagccctggggtgaggatgccacggctacccggctctgccccagagcacatcagctatgtgccccagctctcaaacga

SEQ ID NO: 336196 - DNA, 50 bp, Homo sapiens
cgccgcctccctgcttcttaacaggaccagtcctgcctctgttgtagaag

SEQ ID NO: 336197 - DNA, 100 bp, Homo sapiens
caggactttctgcttttgtagatcaacctaagcagtgtttggtgtataaaacagaccaagctcaagatgtaaagaagattgagaaattccacagtcaact

SEQ ID NO: 336198 - DNA, 101 bp, Homo sapiens
cctgaagctcactaatggcatttggattttggccgaactacgtatccagccaggaaaccccaattacacggtggcagtagagaagagcatcacagaagttg

SEQ ID NO: 336199 - DNA, 83 bp, Homo sapiens
cctggatcttcgaacttttgacacggctttggaaacgacgtcatgtgttagcgctttgaacttcaagattcaggaagctctct

SEQ ID NO: 336200 - DNA, 83 bp, Homo sapiens
gtgcgcgcgaaggagcggaagaatggcagtgctcaaactcaccgaccaggttgaagatgacagcgatgcagagacctatggag

SEQ ID NO: 336201 - DNA, 96 bp, Homo sapiens
gaccagagttcctccgatggccaggaaccttttagtacttccgtggttctcaccattcaggaagcccttcagctcactgttcaaaaagtagtgggt

SEQ ID NO: 336202 - DNA, 96 bp, Homo sapiens
gcatggagaggggccgtggcccctgcagcggaaccggacccagtccctgagccgcccctacacccacagatggcccactgcgtgaccttggttcag

SEQ ID NO: 336203 - DNA, 90 bp, Homo sapiens
aaaggagcagccctggtgtcacctatcagtaaaagccctttctaaggcacaaaatgatgtgatggaaatgaagatgcagtcagagagact

SEQ ID NO: 336204 - DNA, 90 bp, Homo sapiens
atttgcagctgggctccttcactttggtctcggcttttatctgcctccctgaacctgcaatgcttcttttgccacccgagaccgtctgcg

SEQ ID NO: 336205 - DNA, 50 bp, Homo sapiens
gcgacccttctgattatgagagaaaccagaatcaggaaacccaggcccaa

SEQ ID NO: 336206 - DNA, 50 bp, Homo sapiens
tctcaactaggctgctcccagaagtggttatcaagttatacccaaccagc

SEQ ID NO: 336207 - DNA, 100 bp, Homo sapiens
caggccatcaggtgctggactatatggaagtacatgaaggactatttccccatctcgattctgctcctaagtgtaggagagaacttggtgcctcttccac

SEQ ID NO: 336208 - DNA, 100 bp, Homo sapiens
tggtgctgctgtgtaaggagaagcccacaaccgccctcctggacaaggtggccgacaacctggccatccagcttgctagctatgccaagaccaagacgag

SEQ ID NO: 336209 - DNA, 83 bp, Homo sapiens
gccgatccagcctgcggagcctgtggggcaggatggcagaggagcaggagttcacccagctctgcaagttgcctgcacagccc

SEQ ID NO: 336210 - DNA, 82 bp, Homo sapiens
cgtcgcgggagcctttggggcaccacagagatgcggggcccatttggaggccagcgctgagaagtggaacaggttgctgatg

SEQ ID NO: 336211 - DNA, 98 bp, Homo sapiens
gtatggcaacatgacagaggaccatgtgatgcacctgctccagcaagcaagtagctactcttccaccagtgagcgcgggctggacctcttagattcta

SEQ ID NO: 336212 - DNA, 101 bp, Homo sapiens
aaagtaagaacaaacaaagaaacactggagatattcagaactcctaaaagacgacggcctgcacgttcaatttttgatggtttccgggattttcagactga

SEQ ID NO: 336213 - DNA, 100 bp, Homo sapiens
attttggctgctgcaggagccattttagggagatgcagttaaagacttgatgcttcgctttctgggtgaaaaagctgcagcaaagagacaagtcctaaat

SEQ ID NO: 336214 - DNA, 97 bp, Homo sapiens
ttcctaagagataccgctcagaagaaaatgcaaaaaaactaatggaattagcctgcaacatgaaggcactttccacacatgaggagaagaagagctt

SEQ ID NO: 336215 - DNA, 75 bp, Homo sapiens
agaagtatagacctgcctccgcctcagtatcggctctgattggagagttgtctgctggttctcagcttgaagaag

SEQ ID NO: 336216 - DNA, 98 bp, Homo sapiens
gaaagccccagccacccatcaaatcagagagaaggaatccaccttcttacgctatggcaggtgatcacccccgaggagattgtggaccccaacgtgga

SEQ ID NO: 336217 - DNA, 75 bp, Homo sapiens
gaaaataagaacacagtggatgtcgagaacggtgcttctatggcaggatatgggttctatggcctggatgagtct

SEQ ID NO: 336218 - DNA, 110 bp, Homo sapiens
cggagccggactgcggttggggcgggaagagccggggccgtggctgacatggagcagaatatgacagatacctagcatctagcaaaataatggcagctgcttaccttgac

SEQ ID NO: 336219 - DNA, 75 bp, Homo sapiens
tctgaggaatctgtgctttctgtcccagaactccaggccacggcgtatgcctccgaggacggggtcctgaccgag

SEQ ID NO: 336220 - DNA, 123 bp, Homo sapiens
gagcgcggagcccggctcccgcaccatggaggaggacgacagctacgagacagcctggagctgttgcccaaagaattggaagtcatttagttccaactgctactttatttctactgaatcagc

SEQ ID NO: 336221 - DNA, 90 bp, Homo sapiens
gttccaccgctcgggtttggctggggaactctaatgatccaggacaaagaagttaccctggagtatgtatcaagcctggatttttggtac

SEQ ID NO: 336222 - DNA, 75 bp, Homo sapiens
gggctaaatccaaatgctgattcagactttagacaaaggggcatccgtttccgaggctttagtatccctgaatgc

SEQ ID NO: 336223 - DNA, 74 bp, Homo sapiens
tgggaaactttgtgtacacttatcaccttttgccatgatagcatttctttcattggacagttccttacaagggc

SEQ ID NO: 336224 - DNA, 75 bp, Homo sapiens
tgaagaaggttctggagaaaaagttccatactgtcagtggaagcaagacaatgcagatcttcgtgaagactctga

SEQ ID NO: 336225 - DNA, 90 bp, Homo sapiens
ctttgaaaatgatttaattgaatcaagctgcaaagtaactagatgcaatcttcttaccgcgaagaagccaggggaataggtagccacatc

SEQ ID NO: 336226 - DNA, 50 bp, Homo sapiens
acctgagtcaggacgtaaatggaaccctgattcaacctagaatgacactg

SEQ ID NO: 336227 - DNA, 100 bp, Homo sapiens
acgactgcggcgcgctgctggacgaagagctctcctccttcttcctcaactatctcgctgacacgcaggagctttcaagttgtggatggaataaaaaaga

SEQ ID NO: 336228 - DNA, 50 bp, Homo sapiens
gccttcctcgtcatccccctgcaccaggtctatgttaacaatgaatgggc

SEQ ID NO: 336229 - DNA, 83 bp, Homo sapiens
ctgaaggccaggttttgcagtggtctgagtttcctgctctacgaaacgcactcttttgccttgaagcggcattggacagtggt

SEQ ID NO: 336230 - DNA, 74 bp, Homo sapiens
ttcaaccctgacgcagatgccaaagcgctgcggaaagccatgaagggactcgacccgaccgcatgtctgtcatg

SEQ ID NO: 336231 - DNA, 128 bp, Homo sapiens
ggggccgccatggagcccgactcggtgattgaggacaagaccatcgagctcatggtgaagaacgaggtggagaagctcccccgacagcagcggaaggaaagcatgaagcagaagatggaggagcacac

SEQ ID NO: 336232 - DNA, 105 bp, Homo sapiens
gttccacgtgaagctcaccgacagtgccctgagggccttcgagagctaccgcgccagacagctggtcagtgagaaggtcggaggggccgaggggaccaagctgga

SEQ ID NO: 336233 - DNA, 97 bp, Homo sapiens
ccaacacctgtaaatttgatggggaatgtttaagaattggagacactgtgacttgcgtctgtcagttcaaggtgtcatggagaaactccagctgggc

SEQ ID NO: 336234 - DNA, 75 bp, Homo sapiens
agtgtgcgaagatttccaatcatttctaaactcctctggtgcaagtgtggtagctattgacaacaaaatcgagca

SEQ ID NO: 336235 - DNA, 100 bp, Homo sapiens
cacagaacttcctgtccagcatcaatgaggagatcacaccccgacggcagtccatgacggtgaagaagggagagagtcggatggcagagagcttgcgcct

SEQ ID NO: 336236 - DNA, 87 bp, Homo sapiens
ttcaccagacattgtttccaacctctcttcagttccccttcaaatgctgttttatctcagcggaacgtactacgccctgtatttcct

SEQ ID NO: 336237 - DNA, 138 bp, Homo sapiens
acaagggaaggtgacatgaaaggagctcagacaatttctgtccagcaacatgacagcaagctcaggctgagtcttcttcaagatcaaaagccgaaatgcacacatgaaaactcacaggcagcaggaggaacaacagag

SEQ ID NO: 336238 - DNA, 83 bp, Homo sapiens
cgaggtccggtttggtctggcctggcaggtcccggcccgcttcacagtcgaggagagaaaggctacttcacccccctcaacac

SEQ ID NO: 336239 - DNA, 75 bp, Homo sapiens
gcagtggtcgcttcttctccttgctgtccgcaggcttgtccaaaaggaaacatcggaatgaccacttaacatcta

SEQ ID NO: 336240 - DNA, 98 bp, Homo sapiens
ggaggcgtcgcgggagcctttggggcaccacagagatgcggatgatgactttgaccagtttgataagcctggcgcggaacggtcgtggagaagaagag

SEQ ID NO: 336241 - DNA, 100 bp, Homo sapiens
caaatttcactttggacacgtgagtcagagggtccacatatagcctcagttacattagctgcttatgaatgcaattcagttaattttcccgaaccaccct

SEQ ID NO: 336242 - DNA, 75 bp, Homo sapiens
gggagaagatggctttaaagaatacacttcaaggcgactacgtgcacaagtctgtgtttatcattttcttccaag

SEQ ID NO: 336243 - DNA, 100 bp, Homo sapiens
gttctcggaaaccatccacgacccttgtctttggtgcaacactaacaaggcttgtctggactacccagttacaagcgtcttgccaccggcttccctttgt

SEQ ID NO: 336244 - DNA, 75 bp, Homo sapiens
ggcaagtaacatgactaaaaagaagcgggagaatctgggcgtcgctctagagggttttggccaaattgggcgagg

SEQ ID NO: 336245 - DNA, 90 bp, Homo sapiens
gaattggaagctaaagctaccaaagacgtagaaagaaatcttagcaggtcatcatcagatttgaaatatttaaagtggatacaaaactat

SEQ ID NO: 336246 - DNA, 82 bp, Homo sapiens
cttcggtggactccttcggcagtccacccaccgccgccgcctcccagacttcccagactcccggccagccatcgaggacctc

SEQ ID NO: 336247 - DNA, 82 bp, Homo sapiens
gcgccggctatggccgtgccctggggctgagccctcagtcactattccaggtcctcaggatatagccgtgacctaaacacag

SEQ ID NO: 336248 - DNA, 83 bp, Homo sapiens
tcttgacaaccaagggcctccgtctggatttccaaggaagaatttcctctgaagcaccggactccctggaggaaaagcggaag

SEQ ID NO: 336249 - DNA, 100 bp, Homo sapiens
gccgcgggctgcggacgctcggtcccgcgctgcgcatccccgcggacgccacagcgctaacatagataccctggagcgaatagccgggctggaacaggag

SEQ ID NO: 336250 - DNA, 50 bp, Homo sapiens
ttttagaattgcacttggaggacaagcctcttagcaaatatccggctgtg

SEQ ID NO: 336251 - DNA, 75 bp, Homo sapiens
cacaccctcacgagtcatggatggcaagaggatctcctcctatgatgacagatcatctctgttaatgcccatgtt

SEQ ID NO: 336252 - DNA, 75 bp, Homo sapiens
tccagagctgctgcagaaaagctgtttgggtccacatcacgctgagcacccatgagtgtgccggcctttcagaac

SEQ ID NO: 336253 - DNA, 50 bp, Homo sapiens
ccgcgaccgtccgccagtcgtcccgaggacagagggcttggtggactcct

SEQ ID NO: 336254 - DNA, 88 bp, Homo sapiens
tcagcttacacagaagctattagctgttagtaaggccgtcgctttcgggttctctcatcgcttcgtcgttcgccaatgtttgaggaga

SEQ ID NO: 336255 - DNA, 83 bp, Homo sapiens
cggagagaggctgcctcctgcagcccccatagcagaatccacattcatctcaatggaaggatcctgccttaagtcaacttatt

SEQ ID NO: 336256 - DNA, 100 bp, Homo sapiens
gctcaaggcctttggctatgtcgagatcccctgtgtggccaagaagctggtgtgcggagatgaaggcccataccactcgttccagtcagaggtgcttggc

SEQ ID NO: 336257 - DNA, 90 bp, Homo sapiens
gagctaggattggagacctacaaagtgaatgaggttgagcgtctgatccaccatgtaaaggtcatcgctgaacgggccaatgaaatgaac

SEQ ID NO: 336258 - DNA, 74 bp, Homo sapiens
cgggctgtgtgccccttctccacccagaggatcccattgaagataccacgctgcatgtgtccttagtagtcatg

SEQ ID NO: 336259 - DNA, 100 bp, Homo sapiens
tgatttttataggaagggagttgatttactcctagaaggtgttcaagtgatggaatggggagaagatattaaagcagtttcaaaagatgaagcagtgatg

SEQ ID NO: 336260 - DNA, 101 bp, Homo sapiens
ccctaccccgtcccagaaattcggagggtggccctggactcgttggtgctgcaggtttttccagagcttctcggatgccctaatcgacgaggacccccagg

SEQ ID NO: 336261 - DNA, 100 bp, Homo sapiens
ttcaagtactccgtcatgatcaacaaggccacgccctacaactacccagctggaaatcttccatttggttatgtatcgaaactaccagcggaagaatgac

SEQ ID NO: 336262 - DNA, 83 bp, Homo sapiens
gaaaagtgtgaggctgccaaggaagctctggaggctgaaaggttccctgagtcgaggtgactggtacaagacaaaggagatcc

SEQ ID NO: 336263 - DNA, 100 bp, Homo sapiens
ttcgtctcggaaaccccgcctcttacagtcacgagactctcaaagatgaagacttttgtaaacgtgtatctttggctactgtggataaaacagttgaaac

SEQ ID NO: 336264 - DNA, 90 bp, Homo sapiens
ttcatctgggcggtatctggaacttgagagagtggactccagagattgtcatttcaggacactttgatggtgtccaagacctagtctggg

SEQ ID NO: 336265 - DNA, 100 bp, Homo sapiens
ttttcacagcaactggaccattttacattcccactagcagggcaaatctgagtagcctccaagaggcacacaagcagaggatgggctgtgttgccctgac

SEQ ID NO: 336266 - DNA, 98 bp, Homo sapiens
cgcaggcgtaccatccacaccttcccctgcctcaaggagctgtgcaccagcccccgaatccagactccaaaatgatgcaaatcaacctgactggattt

SEQ ID NO: 336267 - DNA, 100 bp, Homo sapiens
ttccgccactgcccaaactgctgaagcagctcccgcgaggaccacccgattgtaaaccatggctgtgtggatacaagctcagcagctccaaggagaagcc

SEQ ID NO: 336268 - DNA, 100 bp, Homo sapiens
tgttgcagccggagcggccgctggaggcccggcacgcggtgctggctctgctgaaggccatcgtgcaggggcagggtctctcattcatcacttttatctg

SEQ ID NO: 336269 - DNA, 73 bp, Homo sapiens
cggctctgaggttgctcgcgcgcccccgccgtgtgccctgctttacaccagctgtgcagggcagcgtcggctc

SEQ ID NO: 336270 - DNA, 100 bp, Homo sapiens
ctttgggcagccattgagattatacggaaccagaagcagattgccaacattgaccgtattacaaaggcggcgactggcggcgcgatggacctgaccgggc

SEQ ID NO: 336271 - DNA, 103 bp, Homo sapiens
gagctctgcgcgctgctgggcgccccccgggacagtctccgaagtctcgagcagacaatgcagatcttcgtgaagactctgactggtaagaccatcaccctcg

SEQ ID NO: 336272 - DNA, 51 bp, Homo sapiens
gaccaacgagatcctgcacatgtcttttgagaaagatcagtctaaagaaaa

SEQ ID NO: 336273 - DNA, 98 bp, Homo sapiens
ggcgacatggaggacggcgtgctcaaggagggcttcctggtcaagaggaagtcctccagctctgcatcttccgaggcctcggaaacctgccagtccgt

SEQ ID NO: 336274 - DNA, 98 bp, Homo sapiens
tccctgctgcgggacagcagctgagtcacctctactttcctgctaccgctgcctgtgagctgaaggggctgaaccatacactcctttttctacaacca

SEQ ID NO: 336275 - DNA, 100 bp, Homo sapiens
attttgctgtctcctcctaatacggcatgcccaagagaatcgtaaatgcaaaaattgcttgccttgacttcagcctgcaaaaaacaaaaatgaagcttgg

SEQ ID NO: 336276 - DNA, 51 bp, Homo sapiens
acggcgccttcggcaaggtttacaaggagcaggccgggctctcgccatggg

SEQ ID NO: 336277 - DNA, 101 bp, Homo sapiens
tgaaggagttcaagaattcccagaagaggcagcatgcggaaggcattgctgggagcctgaaaactgtgaatgtggagtacgacaaggagttctcccctcgt

SEQ ID NO: 336278 - DNA, 75 bp, Homo sapiens
gaaaaacaaccacactgcttcgatcctggacaggatgcaggcagatcgtgagtgcatctccatccacgttggcca

SEQ ID NO: 336279 - DNA, 98 bp, Homo sapiens
gtcaccactgaacaatatcagaaagctgctgaagaggtggaagcaaagttcaacctgctcttgaggttcacagatgatacctttgatccagaacttgc

SEQ ID NO: 336280 - DNA, 50 bp, Homo sapiens
ctgaccgctctggcccagggtgtgaaggagaacgacctgctcagaatgag

SEQ ID NO: 336281 - DNA, 100 bp, Homo sapiens
agagaattcagctccagttcaaaagcctacaaaatctgagactgtcattgcttttataaggtaaagcttgcatttccttcaacaagaaggattacagagg

SEQ ID NO: 336282 - DNA, 75 bp, Homo sapiens
ctcatccacagagccacatctgttagatttgcatctgctggtgatgatggaattgtagttgtgtggaatgcccag

SEQ ID NO: 336283 - DNA, 75 bp, Homo sapiens
aaagactgttccaaaaacagtggataattttgtggccttagctacaggagagggtgaatcctgtgagctgctagc

SEQ ID NO: 336284 - DNA, 74 bp, Homo sapiens
aggcgggccagtgcggcaaccagatcggcgccaagccacagcctggcagctctgatcaggaaagtgaggaacag

SEQ ID NO: 336285 - DNA, 83 bp, Homo sapiens
gacatgggagacccggggtcggaaggagtgcatccgccccaacccttttccccctcgtctcctgtgagaattccccgtcggat

SEQ ID NO: 336286 - DNA, 82 bp, Homo sapiens
catcattggttggctcctgacaacgtgcacggagccaggaggaactctctcccagtccgcctttgttgaatccatccacgcc

SEQ ID NO: 336287 - DNA, 71 bp, Homo sapiens
ctacaaccctgctcagctggcacaggcctgcacccccatgttccgggagtactccctgcaggttctgaaga

SEQ ID NO: 336288 - DNA, 90 bp, Homo sapiens
gctgacgaagcattttgcaacgcagttcggagttattatgaggtcaccatggctgttattggctcccttgctgtccccagctgttcccca

SEQ ID NO: 336289 - DNA, 83 bp, Homo sapiens
aagggactttaatcactgaccatcccaatatacagcaggaacgaatgcaggaatttgggaactgagctgtgcaagtgctgaag

SEQ ID NO: 336290 - DNA, 115 bp, Homo sapiens
ctccagtcgcgcacaagtgttatctctgtaccgggcgatgctgagagagagcaagcgtttcagcgcctacaattacaggttgaaaggattgttgacaaaaggaaaaataaaaaag

SEQ ID NO: 336291 - DNA, 92 bp, Homo sapiens
ctcagagtgcactgagatcccaggaggatggccacatccccccgggctacatctcacagttgtcgagatgtccacagaaggaggatttggtg

SEQ ID NO: 336292 - DNA, 49 bp, Homo sapiens
ataatactcaccctactattgagttcctgaatgttccaatgtttcgaaa

SEQ ID NO: 336293 - DNA, 100 bp, Homo sapiens
ggggcttcgggaagcagggattccagtgccaagctggattgccttttgcaattcttacttcaaggcatacccccttccaacgaggagtattctgtaatga

SEQ ID NO: 336294 - DNA, 88 bp, Homo sapiens
ccggggagaagctggagctggtggcaggatgaatctggttatagatggacaagagacgatcattctgcaagcaggcaacctgaataca

SEQ ID NO: 336295 - DNA, 100 bp, Homo sapiens
cccagaggatggatttttcaaaaaaactaaacggaaggtagtgccaccttctcctatgactgtaatgtgtgtggctggtattggacttgttgtattattc

SEQ ID NO: 336296 - DNA, 74 bp, Homo sapiens
gacggcgccctgggtggccctcgccctcctctggggatcgctgtgcgccgaatagaaatgtactgtcgagagct

SEQ ID NO: 336297 - DNA, 137 bp, Homo sapiens
gaaatcatgtcaagcgaagccttgaaaaagctgccctgagacggtgtcccgccgaaaggacccagatgatgtggtaccagttggccaaagaagagcctggtgttggtgcatgtgctttggactagcatttatgcttg

SEQ ID NO: 336298 - DNA, 75 bp, Homo sapiens
tgacatttaattttagggtcctttatatagaagggagagtagaaactcattttaaccagcagtgccagtgtcatc

SEQ ID NO: 336299 - DNA, 80 bp, Homo sapiens
cagtcagaagatacaagtcacggttgatggtatgatctcgtgaaatcttgagagaaactgaatgacgaatgaaactattg

SEQ ID NO: 336300 - DNA, 100 bp, Homo sapiens
aacaagtccaaggatgaatcccagtccctgttacggtttttcagttatgggacaaaaatattatatcaaaacactgaagctttgcaatctaaattctttt

SEQ ID NO: 336301 - DNA, 72 bp, Homo sapiens
actcagtcccatcactccaaggagagaagacgagatgatgcctattggccagaaggaaagcgtgtggcaatg

SEQ ID NO: 336302 - DNA, 123 bp, Homo sapiens
ctcagagagcgcggggtccggacagccgcgcgctgagggtctcggggcgggcgccgcgggacctctccgggccatggcttcggaaccaaaaagaagcttcccagagccggggccaggagcccc

SEQ ID NO: 336303 - DNA, 75 bp, Homo sapiens
caaccgtagatgctcctgtcgctccttcagacaaagttcaaggagcagggacaagttacaggaatgttctccaag

SEQ ID NO: 336304 - DNA, 75 bp, Homo sapiens
gctgcaggagaagatggcggtctccacagtgatcccagggcaccgccgtgtgaatataaagattggctgacaaaa

SEQ ID NO: 336305 - DNA, 90 bp, Homo sapiens
acagtctagctgcagagattgttacacctgaaatcaggacatatgagacatcgctgctggtagaagaggccattagtgaggagcttccct

SEQ ID NO: 336306 - DNA, 74 bp, Homo sapiens
gtacacacctcattgtgcaagaaccaaaaggtatctagaagagcagaagacagagaatggaaaagataaggaac

SEQ ID NO: 336307 - DNA, 75 bp, Homo sapiens
atctaacgtttaccctagcaaaccatgtacccgtgtaatgtggacaccacctctccgtgaaagcttctcatatcc

SEQ ID NO: 336308 - DNA, 76 bp, Homo sapiens
aactacagccagatgcggatccgggccaagcagtgggccgagggggggccctcagcctcttggccttgaacgggct

SEQ ID NO: 336309 - DNA, 90 bp, Homo sapiens
ttcggccatggaagctgccggcagccctgcggctacggagacagatgtagccatagctgtaacgtataaccatgatgggtcttatagcat

SEQ ID NO: 336310 - DNA, 95 bp, Homo sapiens
ttgggaataaaaagtattgtaacagctgaagtgtcttcaatgcctgcttatctgggagcacagatggtgtatttggaccagttaaaaacccctgg

SEQ ID NO: 336311 - DNA, 50 bp, Homo sapiens
cgggcgctggtctgctcccagccgggcttgctctcaattttgcgcaagtt

SEQ ID NO: 336312 - DNA, 74 bp, Homo sapiens
aaaaatgtccttaaagcaattgagcaggctgatctactgcaggaggattttttatcaagcagaaatgcatcgaa

SEQ ID NO: 336313 - DNA, 100 bp, Homo sapiens
ccgcggctctcctcctgtcggtcctgcagttcttttgtccccgggtagagtgttctaagaacggaagcatctgggctggatggaatttagcatcaagcag

SEQ ID NO: 336314 - DNA, 75 bp, Homo sapiens
tggagcgcattggactgttcagtcatgcggagattaaggctttgttcgcgggggtcacagctctcatggctgcag

SEQ ID NO: 336315 - DNA, 100 bp, Homo sapiens
cgcttgtccactgtccgccagacctgctgctgcttcaatgtccgcatcgcaaccaccgccctggccatctaccatgtgggttgtgagtcccggcccagcc

SEQ ID NO: 336316 - DNA, 100 bp, Homo sapiens
tggaaatgttaatggctgtagcactgccgaagaatctgtatctcaaaatgtggaagggacccaggctgattcaggtggcagaactggtgaagccattgta

SEQ ID NO: 336317 - DNA, 82 bp, Homo sapiens
tgaaacagagtatggctgcagaggatccatctgtcttagcaaggctgtcatcacacatttacgaggtttcttctcagactcc

SEQ ID NO: 336318 - DNA, 82 bp, Homo sapiens
gccttacaagggacaccatagcctctcaccctaaggaattcagtttgcctgttctgtatgcaagttccgtagctttgatgac

SEQ ID NO: 336319 - DNA, 100 bp, Homo sapiens
agtgattttgaattttttggcagcagaagggcgactgagtactcaacatattgactgtatttgggctgcagcacaggactggctggacaatggcccagaa

SEQ ID NO: 336320 - DNA, 100 bp, Homo sapiens
tcaaccggacctacctccatcatcacatgaccaaagcattcctcttctatgacaatgcaggcagttaacaagaagatggatccacaaaagacattacaaa

SEQ ID NO: 336321 - DNA, 50 bp, Homo sapiens
gactgactgggcaacatgttattcagagaaatggaataatcgtatcgctg

SEQ ID NO: 336322 - DNA, 99 bp, Homo sapiens
acagcatcagcatcatcgacacccccgggatcctgtctggagagaagcagcggatcagcagagggagtgcatccgccccaacccttttccccctcgtct

SEQ ID NO: 336323 - DNA, 85 bp, Homo sapiens
ctctctttctggcctggaggctatccagcgcctgaagctgcccagcaggcattccaaggcctgggtcctggtttctccggttaca

SEQ ID NO: 336324 - DNA, 50 bp, Homo sapiens
cgggaggagcctgttcccctgagatctaattacttgtttggacactgcat

SEQ ID NO: 336325 - DNA, 75 bp, Homo sapiens
cccgagggccagaccatcaaagggcgtgtgggcaccgtgggttacatggtcagggactatgcggcgcaaacatct

SEQ ID NO: 336326 - DNA, 100 bp, Homo sapiens
gtaaatgttgagcctttttggcctggcttgtttgcaaaggcatacacatccctgtgatcatgagtctggctcaaagccaatttatagcaaatcatccatt

SEQ ID NO: 336327 - DNA, 100 bp, Homo sapiens
gggggacgagcagcagcggctcctcaacacccctcgaaggacaaatatcagtggatgggttcatgcgctatctgagtggagaagaaaacggagtcgtttc

SEQ ID NO: 336328 - DNA, 75 bp, Homo sapiens
ctggggtgtctctgagcaccctggaggagatgctgtgtgctgtggacccacctggggttcatggagtgggccacg

SEQ ID NO: 336329 - DNA, 101 bp, Homo sapiens
tcttgggcgttcccgacccttagctacccacgatgtttcagacagtccccgacacgtcgtcttacatcaagacttggtcttgctctgtcacccaggctgga

SEQ ID NO: 336330 - DNA, 101 bp, Homo sapiens
ggagaggagcccacgtcgcctgtcacccaatatctccagccgcgcagtcccgaagagtacatatctgaagagatggattaagaatgctttggattaaggat

SEQ ID NO: 336331 - DNA, 88 bp, Homo sapiens
gaagtgagcgacacactctgcgtcctcgcctcaccaggtgaatccagtctggaaaaagtgtttggaagaacaaggcttgaagtttgtt

SEQ ID NO: 336332 - DNA, 80 bp, Homo sapiens
ggccctgattcttttgcttctgcggccagagtcaggatcgcagtgaagccactttgataaagaggtttaaaggtgaaggg

SEQ ID NO: 336333 - DNA, 75 bp, Homo sapiens
gttgatagagactcagctgaaagcatgtgcctcttttatacgaaccagtctgttgtccaggctggagtgcagttg

SEQ ID NO: 336334 - DNA, 73 bp, Homo sapiens
ggagctgctggtttcattcgaggtttcgggccggagtctttgttgctggctatgaaagcctgaaaaagaatga

SEQ ID NO: 336335 - DNA, 85 bp, Homo sapiens
tgctccagagactggcaatcagacgatacagatggcaaattttggttaaaccacaacgactggattaagcagtatgaaacactag

SEQ ID NO: 336336 - DNA, 101 bp, Homo sapiens
cggccgggagcccgccgcgctggtagcggagccggcgcacgtgcaggagccaccagtggtgcaggagcagttggggtccatttcaagccgcggtaaggctg

SEQ ID NO: 336337 - DNA, 75 bp, Homo sapiens
attcgcagtggtcgcttcttctccttggtgtattacctgactgcttaaccgatggctctgatgtggtcagtgacc

SEQ ID NO: 336338 - DNA, 100 bp, Homo sapiens
ccctgggcggccgtggacaacatgatggtcagaaaaggggacacggcggtgcttagtgagaaagatcagtctaaagaaaaggagaagaaagtgaaaaaaa

SEQ ID NO: 336339 - DNA, 75 bp, Homo sapiens
agctggacggcgagcgcgagcggcgcgagaaagccttctggcggccgcccctggtttctcctggggggtgatgag

SEQ ID NO: 336340 - DNA, 101 bp, Homo sapiens
atggacaatgcatgccctcgttatcttgaaaagtccagggaccttgacccagcccctctcagcagacgcttcatgataggaaggactgaaaagtcttgtgg

SEQ ID NO: 336341 - DNA, 76 bp, Homo sapiens
gctgttgcttcccagactggtggtgaatcctccatagtctgagtttgcctacctctgtcctagagcgaagcctgag

SEQ ID NO: 336342 - DNA, 100 bp, Homo sapiens
cggagctgcctgacaatctgaaggaagcagtgcatcgagctggagcagcagtttgacttcttgaaggacctggtggcatctgttcccgacatgcaggggg

SEQ ID NO: 336343 - DNA, 75 bp, Homo sapiens
ccgtttgttcaggaaccaccagtgacagaatagggccagatttgagtgtgtgaatttttgagtgaaacctggaac

SEQ ID NO: 336344 - DNA, 98 bp, Homo sapiens
catgctcatggcaaaagggaagctgaaaccaactcagaatgcttctgagaagaatcctcactatggatgggctcattgaggacattaagcatcggcgg

SEQ ID NO: 336345 - DNA, 88 bp, Homo sapiens
caatatgaagaaaattcacacctcacctccgttcctcattggattaacagcaatacattagaactgataaatttcaaacggaagagag

SEQ ID NO: 336346 - DNA, 98 bp, Homo sapiens
attctgagtaacaataagatatccgagctgaagaatggctcattttctgggttaagtctccttgaaagattgcctcaggcccaggcccaaggccaagt

SEQ ID NO: 336347 - DNA, 97 bp, Homo sapiens
agactcataccagagggccacacttttcaagtggatcaaatcatgtatgaacgtttgcaggagtccctcagccggtgatgtctccagcagccggctt

SEQ ID NO: 336348 - DNA, 85 bp, Homo sapiens
ctatgtggaccctgcggaatccaccggcgcagtttcatctagcgactggttttaaaatcaaagatgggaaaatcggagaaaattg

SEQ ID NO: 336349 - DNA, 75 bp, Homo sapiens
ctttgcctcatcccaggttgccttggaaaatgccaacgccgtgtctgaagaccatggtagcatttgacatggacg

SEQ ID NO: 336350 - DNA, 100 bp, Homo sapiens
gaaacttctgctaatcatactgagctctaggagtgccgttctgctggtcgtagagaggagtaaagtcacacccaaagattatgtctactttgagaattcc

SEQ ID NO: 336351 - DNA, 101 bp, Homo sapiens
cgggaatttgtgagacagtattacacactgctgaaccaggccccagacatgctgcataggtcagtttaggggctggtgcaaaggatgagttgcacattgtt

SEQ ID NO: 336352 - DNA, 100 bp, Homo sapiens
caatccttcggttacaagcggtttgtttggagactgccagggaccatgttttgcccattgactattactttccaccccagaagacctgcctgatctgtgg

SEQ ID NO: 336353 - DNA, 75 bp, Homo sapiens
ctccaacatggcagccttttccttagaacaccaaagattgtctctggcaaagatatgatgcccctccttcataat

SEQ ID NO: 336354 - DNA, 90 bp, Homo sapiens
gggctgccaccctcgttcccccgattggggccgcaggaattgaatgatctggcacgggaccctccagcacagtgttcagcaggtcctgtt

SEQ ID NO: 336355 - DNA, 100 bp, Homo sapiens
tcaaggtcatcgaggccaacaacccattccaggctgtgcaggaaggtgtcatggagaaactccagctgggcccagagattctgcagcgggaaaatccaag

SEQ ID NO: 336356 - DNA, 100 bp, Homo sapiens
cccaacaccatgccgtccgccttctctgtcagctctttccccgtcagcatcccagccgtgctcacgtgtggacgaatgtggaacctcgctctgtggctgt

SEQ ID NO: 336357 - DNA, 90 bp, Homo sapiens
ttaccagctcacctctcaccgcgcatgtttggaggagcccagtttcctccaattgcagcacaagaccttccttttgttctaaaggctggc

SEQ ID NO: 336358 - DNA, 100 bp, Homo sapiens
gaaaggccttagtaggcctttctaagtctcctaaaggatgtggtgcagattcactttataggaacagcttcagcttcagtgatgaaaaactgaattctcc

SEQ ID NO: 336359 - DNA, 101 bp, Homo sapiens
cgccgccgaagaagcatcgttaaagtctctcttcaccctgccgtcatgtctaagtcagagtttaacggatgaagagtcccggaaaaattgggaagaatttg

SEQ ID NO: 336360 - DNA, 75 bp, Homo sapiens
cagcatccttgatgataaaccagtaaatgtatgaacgctgccgtccgtgccgtggtgcgcatgggtatctacgtg

SEQ ID NO: 336361 - DNA, 98 bp, Homo sapiens
ccggaccggggcgggtccagtcccgggcgggccgtcgcgggagaggtctcctctgagcctccggcctccataagacccaaaacagatgacacctcttc

SEQ ID NO: 336362 - DNA, 100 bp, Homo sapiens
tgctgattccgatatagtgcccccagccagtacctgggtgttccccaccttgggcatcatgcaccacaacaaacaggccatcctctgtcacccttcccta

SEQ ID NO: 336363 - DNA, 75 bp, Homo sapiens
agctcgaggcccggctggcgcacctgggcgtgcaggtattttggcctctccccagtctgctcctggaaacttgga

SEQ ID NO: 336364 - DNA, 50 bp, Homo sapiens
actctgctggctttggcgtatacacaggcggtcaagaagcagatcgagac

SEQ ID NO: 336365 - DNA, 82 bp, Homo sapiens
cgctgcgcggcgcggcggccgggccctcgagacggggacggctcttgtcaggatggtgaagctgttcatcggaaacctgccc

SEQ ID NO: 336366 - DNA, 78 bp, Homo sapiens
cccacatcaggacagctgttccttggccatcccaaagctattctgggggcaacagagccaaacatttcagtaatgcag

SEQ ID NO: 336367 - DNA, 75 bp, Homo sapiens
ggaaatgcccttacagcagcagggaaagcattaacttttgagctacgtccagaatagcatcatcttcatgggtat

SEQ ID NO: 336368 - DNA, 82 bp, Homo sapiens
gttctcccggcagcagcccgacgcaaaccaaggatctggggatcttcgcactatcccaagaaactatgttccaacttcctgt

SEQ ID NO: 336369 - DNA, 75 bp, Homo sapiens
ggaacccaggagcagttgggagttttaaagaatgccagcctttttaaagatttgagttctgtgaacctgcatttg

SEQ ID NO: 336370 - DNA, 95 bp, Homo sapiens
aaccaacggcaagctgccactgtgggcaaagcggctgggttccccactgaaggacttggtccagctgtctggcagggaggagagacagaagctct

SEQ ID NO: 336371 - DNA, 75 bp, Homo sapiens
ttttgcctgtaattgaatatccttttaagaattgattttgatgaaggctggcaacgcggtaaaaatattgcttcg

SEQ ID NO: 336372 - DNA, 100 bp, Homo sapiens
gctgaggaggggccccagcagcccccgaaggccctatcaggacatggagtatgaaagacgaaaaagcttgtggtgaaggggggcaaaaaaaagaagcaag

SEQ ID NO: 336373 - DNA, 75 bp, Homo sapiens
cttcaggaacctgctgtcagtggatattaataaggcagcggaaagaagaaatatgaatacggctccatcaagacc

SEQ ID NO: 336374 - DNA, 73 bp, Homo sapiens
gggaagccaccaggattacatcatctgctgcttttcctccgcaaccatgtctgacaaacccgatatggctgag

SEQ ID NO: 336375 - DNA, 100 bp, Homo sapiens
tccagctccgggtgcagggaaaggagaaacaccagacactggaagtctcactgtctcgaggccttggtgtaccttgttgtagtgtttgaaaacatctgag

SEQ ID NO: 336376 - DNA, 82 bp, Homo sapiens
acagacaggtggagaaggtggtagacaagttcatcaagcaaagggactaccaccagcagcttttatcaaaatacaactcaaa

SEQ ID NO: 336377 - DNA, 100 bp, Homo sapiens
gcaaaatggcggatcatgtgcagacacgaatgcagagtttgagtccagatcccaaagcccagtacacaagtatctacggagccctcaagaaaatcatgcg

SEQ ID NO: 336378 - DNA, 100 bp, Homo sapiens
tggccaccgcccctgggaagcccttttggaaagcaaagtggaagatgctttctacaaaggtgaactcaggctgaatgaggaaaaattatggaagaaaagc

SEQ ID NO: 336379 - DNA, 100 bp, Homo sapiens
ggatgcggctcgtggtggatggcatggggcgctttggcagatgtttctttctcagcaaaatagaggagaagcttacccctcttccagaagataatagtat

SEQ ID NO: 336380 - DNA, 125 bp, Homo sapiens
ttctcagaagctgcacaggaggaaagcagtgacaaagaaagaagttgtcattctttgcacgagctgggcctccagaagagaggatgctgtctggtgctgggctacatggccaaggacaagtttcg

SEQ ID NO: 336381 - DNA, 100 bp, Homo sapiens
gctgttactggaaagatttttacctcattacttcaagggcgtgctcagtatctacaaagacccagatgagcaccatgccaggactgcccacccggccctg

SEQ ID NO: 336382 - DNA, 50 bp, Homo sapiens
gggctgcctcgccgcgtctcgccacggtgaagaacgaggtggagaagctc

SEQ ID NO: 336383 - DNA, 100 bp, Homo sapiens
atttacttgttggggccctcttgataaaaagagatgtggggggattctcgacctgctaacagaactggaccttttcgtgcacttggaggctcctcagctc

SEQ ID NO: 336384 - DNA, 100 bp, Homo sapiens
agcaatgtttgaacaaactcgaagaacagctgtggaaagaagttgcaaaacactggagacagggtctagctatgttgccccggctggtatcaaactcctg

SEQ ID NO: 336385 - DNA, 49 bp, Homo sapiens
ctgggttgaccctctgcctgatggtgttcgaaatccgcaccactgatga

SEQ ID NO: 336386 - DNA, 82 bp, Homo sapiens
aggactttaggagaaagttgctgaaggcaggagggaattttaaagttcaagtcctcagcttcctctggactcatactcaaaa

SEQ ID NO: 336387 - DNA, 100 bp, Homo sapiens
tatgaccagcaagaggatggggccctggatgagggggaagggcctcaaagccagaagcctggtggaatgaaggcaggaacatttgatccttacccatcac

SEQ ID NO: 336388 - DNA, 75 bp, Homo sapiens
tattgctgtgggtgctgggacttcccgtccgcggcgtggaggaaaatgtggacacagacttgccaggcagcctgg

SEQ ID NO: 336389 - DNA, 78 bp, Homo sapiens
ggaagatgacgattcagagactgaaaaacctgaggctgatgacccaaaggtaagaatgattgatgttggctgatattg

SEQ ID NO: 336390 - DNA, 50 bp, Homo sapiens
cgcgagcaagaatcagcaggatgacgggtgtgcggcgacatccatggaca

SEQ ID NO: 336391 - DNA, 50 bp, Homo sapiens
cttttgaccaaaggaatgggttacggtgggaacctaaattattctgcaag

SEQ ID NO: 336392 - DNA, 100 bp, Homo sapiens
gcactggaggagcggcgggcttcagacagccaacttctctttgcctgaaaaatgcgactatatggatgaggtgacatatggggagctggagaaggaggaa

SEQ ID NO: 336393 - DNA, 71 bp, Homo sapiens
ccatctggccctggtgaggtgaagagtttaccacctaggatgacttcagtgactagatcagagatcataga

SEQ ID NO: 336394 - DNA, 100 bp, Homo sapiens
gaagggaggctacacctctgggaccttcaggatgaagatttgataaagtggaaggcactgtttgaggaagtccctgagttactcactgaggcagagaaga

SEQ ID NO: 336395 - DNA, 83 bp, Homo sapiens
gagctagaactcaaggtgcccctggtggtccggcttgaagtgaaaatgcctcgtgtaaaagcagctcaagctggaagacagag

SEQ ID NO: 336396 - DNA, 89 bp, Homo sapiens
ccaacgcctggctcggagcagcagcctctgaggaatgggccttgacgaaggagaagtcggtgaagcacatggatttgtgccttactgtg

SEQ ID NO: 336397 - DNA, 74 bp, Homo sapiens
aagccagcgttacagtaatgttccaggtggatttcattgactgggtagacaacatgtggccaaggcacttgaag

SEQ ID NO: 336398 - DNA, 109 bp, Homo sapiens
tcctttcctgatatcctcacacttcctcctggatgatggcatggagatggtgcgtgagcagtacactacagccacagaaggcatctgcatagagaggccagagaatcag

SEQ ID NO: 336399 - DNA, 98 bp, Homo sapiens
ttacccttcagtcggcccaagaaatcaaaataaaggaaacacatttcatatactgcaggtttgtgggggagagaaaccttatttgtctccagacattc

SEQ ID NO: 336400 - DNA, 101 bp, Homo sapiens
cacaggcacctgggagtgcctcacccagcatgaatggtgaagaggctggaatatgggcaggtgtttgagaagtcccccctgcgggtgaagaacttcgggat

SEQ ID NO: 336401 - DNA, 100 bp, Homo sapiens
ggcacctgcgaagatgcttccctgtgcaagagtttgctgctttgtggtgcacaagcggtgccatgaatttgtcacattctcctgccctggcgctgacaag

SEQ ID NO: 336402 - DNA, 74 bp, Homo sapiens
cattcagtcctctcgatataagaaggaatcaaagtcaggccttgtgaaaccagcatgttggcagataaattgaa

SEQ ID NO: 336403 - DNA, 98 bp, Homo sapiens
gctgttgctgccgccatacgcgctctccctgtttagtctctagtgatccctgaaaagttccagcatattttgcgagtactcaacaccaacatcgatgg

SEQ ID NO: 336404 - DNA, 51 bp, Homo sapiens
tgcagacagctgtgactatgaaggggggtcacaggaagctcagttctacac

SEQ ID NO: 336405 - DNA, 88 bp, Homo sapiens
agaaggtctctggagacatcttcagcaggtatggcatttcaaatatagatacaaccattgaaggaacgtcagatgacctgactgttgt

SEQ ID NO: 336406 - DNA, 48 bp, Homo sapiens
gactccctgcagatgttcctgccccagaccctgctctcagcggcccac

SEQ ID NO: 336407 - DNA, 51 bp, Homo sapiens
tcctccagctgttgttgctgctgcaaatatttccatggttcaagctgcttc

SEQ ID NO: 336408 - DNA, 75 bp, Homo sapiens
cacgagttcaacgcccacctggtttgtcgcatgtgctgtatggggagtgcatccgccccaacccttttccccctc

SEQ ID NO: 336409 - DNA, 90 bp, Homo sapiens
ggcgttcttccgctggctcagccgcaagtacccgtccatcatagtcaactgcgtggaagagaagatgttcttcagcttctgtgagaagaa

SEQ ID NO: 336410 - DNA, 100 bp, Homo sapiens
gctcggatccgagactggcagcatgagcagcatgagggtttcgaaaaaacgatgaaatgaaagctatggatgttttaccaattttgaaggaaaaagttgc

SEQ ID NO: 336411 - DNA, 100 bp, Homo sapiens
tcttaagctacctccttatgacatacctggttgggtatctacagccattggttgctgttcaggtcagctttgctcctaacaacactgggaaagaagtaac

SEQ ID NO: 336412 - DNA, 83 bp, Homo sapiens
ggatattaagactgcagccaaggaactgtggctgcaccatctgtcttcatcttcccgccatctgatgagcagttgaaatctgg

SEQ ID NO: 336413 - DNA, 155 bp, Homo sapiens
gccagagcctggagtctgcgaaggccgggacccggttccccggcccacagtgggggtgtgcaaacccgagagaactggacatgcgtcgggatgtccaggaaatttttcgcatgaccccccacgagaagcaggtcatgatgttcagtgctaccttg

SEQ ID NO: 336414 - DNA, 98 bp, Homo sapiens
gcttttaatgataattcatgacagaagggagtttgctaaatttgaaaaggagaaaatgaatgccaaatgggacacgattggctctaccagtgcacctg

SEQ ID NO: 336415 - DNA, 73 bp, Homo sapiens
agatcttggcaaagcttctccctcagtatttagaccaggttcatgatcaagagggcccaaggacggaagcgct

SEQ ID NO: 336416 - DNA, 100 bp, Homo sapiens
tggactgttgcgggccccgggacctgggctgggaacccgcggtggagcgggacacgaacgtgcctgtcaggattggagctgctttccgagcacctggacc

SEQ ID NO: 336417 - DNA, 100 bp, Homo sapiens
cttctgggccaccatttgccagggcctcgctcgagcaacacttcttgttgctgtaaatgaacttcgtaggaatgctcgggctaaaggaatgtcattttac

SEQ ID NO: 336418 - DNA, 75 bp, Homo sapiens
aaaatggcgccctacagcctactggtgactcggctgcaggaaagaccacagcaagattctttcattcgtctcctc

SEQ ID NO: 336419 - DNA, 100 bp, Homo sapiens
ctaaagacttggatttccaactccaggaccctttccttctctacagaaatgccagatgttggatggcaagcatgtggtgtttggcaaagtgaaagaaggc

SEQ ID NO: 336420 - DNA, 100 bp, Homo sapiens
accactggaaagtgaggaattttgaagtacaccgtggtgacattgtatcattggtacagtaaggattgtatcctggagccgctttccctgccagaaagtc

SEQ ID NO: 336421 - DNA, 82 bp, Homo sapiens
cgatggtgaaaagggtcctcctgctcacagtgtgaataacagttgctctaggtcgtaaccagcctttgaaaaaggagaaacc

SEQ ID NO: 336422 - DNA, 75 bp, Homo sapiens
gaagtctactaatggacagttagtcacccacctacatgttgagattatcaacgcctgatgactgtggcagaaggc

SEQ ID NO: 336423 - DNA, 100 bp, Homo sapiens
gtgtaatgaaattatcaactggcttgataagaatcagcacctgttccttggacaagaatacctgcttcttctgaggaattccttttttctgacctcagtc

SEQ ID NO: 336424 - DNA, 100 bp, Homo sapiens
ttttgcgccggggtggaaaggtgcttgcaatggatctgttgactgtgaagataccactaatcataatatcctccaggggcaccaccacgaggcgatttgt

SEQ ID NO: 336425 - DNA, 50 bp, Homo sapiens
tgaagagggaagacacgcggaaacaggtccatgatgggaaaaaaagcatc

SEQ ID NO: 336426 - DNA, 83 bp, Homo sapiens
tacgaccaacttttcgttcagtgggacttgcttcacggtttttcgttggaatatacgttgcacatttatggcgattctgagtg

SEQ ID NO: 336427 - DNA, 92 bp, Homo sapiens
agaagtcagagacaagaagaggctaacatgactgataccactataatttagtgaaacagtgacatttaaggatgtggctgttgaccttaccc

SEQ ID NO: 336428 - DNA, 75 bp, Homo sapiens
gaccagactcatcgaggcctgaattgctccagcctcgacaaggtgctggggcaaccaatggaaaagacaagacat

SEQ ID NO: 336429 - DNA, 75 bp, Homo sapiens
ccgccctggccatctaccatgtgggagtgcatccgccccaacccttttccccctcgtctcctgtgagaattcccc

SEQ ID NO: 336430 - DNA, 74 bp, Homo sapiens
caggcatgttgtataaatgtacaggtgagtgtttctatggttggctagaacctctgttggccagaatagctgag

SEQ ID NO: 336431 - DNA, 98 bp, Homo sapiens
ctgccgcagatcgcaggaccgtggagaagacttggaagctcatggacaaagtggactgcatcaaaacatgtaaacaaggacctcggtaatatggaaga

SEQ ID NO: 336432 - DNA, 101 bp, Homo sapiens
ccctgcaccatgctcatagaggatgtggatgccctcaagtcctggctggccaagttactggagccgataacaaaatccagtctcatagcagaggagaatat

SEQ ID NO: 336433 - DNA, 100 bp, Homo sapiens
gcctggcctgcgcgccgctgcccgcgccacaggtgaatgaaaactttgccattgatttgatagcagagcagcccgtgagcgaggtggagactcgggtgat

SEQ ID NO: 336434 - DNA, 98 bp, Homo sapiens
cccagccaccatgagcaccaagcagatcacttgcagcaagatggattctggatatactctgagtattgtaacaaccacctggatgcttgcatggagct

SEQ ID NO: 336435 - DNA, 100 bp, Homo sapiens
aaaggtggtggcaatgcagtaaaggtaacctgtgtatggtgactggaggtgctaacctaggaagaattggtgtgatcaccaacagagagaggcaccctgg

SEQ ID NO: 336436 - DNA, 83 bp, Homo sapiens
tcagcaattcaccagcaaggccgagttccaaagaggtgtttgaaagctcgagaacattttggtacagtaaaaacacatctaac

SEQ ID NO: 336437 - DNA, 75 bp, Homo sapiens
agagccaaatattacattcaaaatggcattcagagttttatgcagaggcgccttttcctgtggggactgctcccg

SEQ ID NO: 336438 - DNA, 82 bp, Homo sapiens
agaaaattgaaggctccaaatccttagctcagagctggaggatgaaggatcgggtggccagcatcgaaatgttcagcctttt

SEQ ID NO: 336439 - DNA, 75 bp, Homo sapiens
aagagcaagcctaactcaagccattggcacacagacatgcgtcgggatgtccaggaaatttttcgcatgaccccc

SEQ ID NO: 336440 - DNA, 100 bp, Homo sapiens
ggtcccaatcccccactctttccgccctaatggaggtctccagtttcgcaatatgtcggacgccttggccaacgccgtgtgccagcgctgccaggcccgc

SEQ ID NO: 336441 - DNA, 100 bp, Homo sapiens
ttcttactggatttcttcatggtgtccattttatttagcaagcttgctgatgaccgtatggcactggtgtcaggcatcagcttagatccagaagcagcga

SEQ ID NO: 336442 - DNA, 82 bp, Homo sapiens
ggatggcgtgcagcgcaaccacgagacggccttccaagggaaatcctcattgacgattcaatttgttgaaggccaatttgtg

SEQ ID NO: 336443 - DNA, 83 bp, Homo sapiens
ttgtggtcaagtgcctcacccctttctacaaggagggcaagtttgcttccaagtctggcttcagccttgtcatgaaccaccca

SEQ ID NO: 336444 - DNA, 75 bp, Homo sapiens
aagcatggacgggagaatggaagcagccacacgggggggctctcacctccagccaactcgtggagaaggtgtagg

SEQ ID NO: 336445 - DNA, 97 bp, Homo sapiens
atttaacatggtggcaagtgacatgatctcactggaccgcagcgtcaatgacttacgccaagaagagtctcctgttatggctggaggtctctttgct

SEQ ID NO: 336446 - DNA, 75 bp, Homo sapiens
gacggattcatttagagctgcggaacaggacgccctctgatgttcacctccatttctcaatgtgaaagctttaca

SEQ ID NO: 336447 - DNA, 82 bp, Homo sapiens
cccccttccccacgcaaccccagatccatttacactttacaaagctccaccatgaggcgaggtggatggaggaagcgagctg

SEQ ID NO: 336448 - DNA, 83 bp, Homo sapiens
gtggatctggattctaaggcaacacttccttgaagaaacaagcttacaggttatacattggctcttcaaagacgttcacctca

SEQ ID NO: 336449 - DNA, 89 bp, Homo sapiens
ctggagtgcggggcgcccggcgccaggggagccgccacagcccgagcgggaagaagttccgcagcaagccgcagctggcgcgctacctg

SEQ ID NO: 336450 - DNA, 100 bp, Homo sapiens
cgtgagtgggcgccgccgccaccgcccccgccgccgtcgtctcggtagcagccttcgccacgccggggtcttcagttgagtgtgcgaggaaaaaataaaa

SEQ ID NO: 336451 - DNA, 100 bp, Homo sapiens
atctgccgcagctagaaatgctcaagaaccagctggaccagatgtggacgagtgctcactagcagaaaaaacctgtgtgaggaaaaacgaaaactgctac

SEQ ID NO: 336452 - DNA, 100 bp, Homo sapiens
caagagcactagtgtctagaaggcactaaggttggaaaatggatataccttatttgattatgatgttggactgaatgatataattcagctgctagttcgc

SEQ ID NO: 336453 - DNA, 75 bp, Homo sapiens
caaatttgatgaagtgcaaagttcaggcggtatgattttgagtgtctgcaaagtgtcccagaagcttttgttgac

SEQ ID NO: 336454 - DNA, 74 bp, Homo sapiens
gccccgggcggcgtcggcgactcgggccccggagaggcagaaataaaacgtcttcaagaagccaataaggcagc

SEQ ID NO: 336455 - DNA, 83 bp, Homo sapiens
gtctcagcccttcacatcctcattcttatactgcttttcgtggccactttggacaagcaaaatgatgcttcaacacccaggcc

SEQ ID NO: 336456 - DNA, 100 bp, Homo sapiens
agacgctgccagcatcgccgccgccaggtgctggagaatctggtaaaagcaccattgtgaagcagatgaggatcctgcatgttaatgggtttaatggaga

SEQ ID NO: 336457 - DNA, 82 bp, Homo sapiens
tctcgctcggctgcgggaaatcgggctgaagcgactgagtccgcgatggagccccctcggaaaaccacactgagagttgcat

SEQ ID NO: 336458 - DNA, 129 bp, Homo sapiens
tgctgaacaggctcttcagtgcgagttcctccgagatgtggaaccctcaaaaatgcctccaccagagcttttaaaaccaaggatggctatattgtagttggagcaggaaataaccagcagtttgccacc

SEQ ID NO: 336459 - DNA, 89 bp, Homo sapiens
tgggagacaaagaagagcctgaaagagccaaatcttaccttctggaccatgatgaaatctatgggaacagcttgatttctactgtgatc

SEQ ID NO: 336460 - DNA, 74 bp, Homo sapiens
gcagacatcagctcctggttcaacgaggccattgacttcataggtgtgaagatgccttaagaaaaaataagagc

SEQ ID NO: 336461 - DNA, 82 bp, Homo sapiens
ttatctttttcaataaggtagagattgttggcatgttgcagtttctgtagaaaatgtttcctgactgcaatgagggaaagcg

SEQ ID NO: 336462 - DNA, 100 bp, Homo sapiens
atctggacaaaggaacaggtatctcagatggagtttcactcttgttgcccaggctggagtgcaatggcgtgacctcggctggctgcaaccttcacctccc

SEQ ID NO: 336463 - DNA, 100 bp, Homo sapiens
tcagggaaagccgttgcctatgttcatgagcggcccagttctgtaccaggagaagctgctgaagccggcagctttgctgctggagaagggtgccgaccag

SEQ ID NO: 336464 - DNA, 75 bp, Homo sapiens
gctgcagctcctcctgtgcggctggaaagggctacccctgcaaaacatgtaagatagtgctgaactccatagaac

SEQ ID NO: 336465 - DNA, 75 bp, Homo sapiens
cccgtacggtacggccagcgagcccagcgagaaggccaaggattatatgcgtcaggcaggagaagtgacttatgc

SEQ ID NO: 336466 - DNA, 101 bp, Homo sapiens
tggtgccacaggaggctgtgcgggccccgctccgcttcgaatggaaaccctggccctggatgcccatgttggctgccctggttgcagtaacagccatcgtg

SEQ ID NO: 336467 - DNA, 90 bp, Homo sapiens
ttatgcctgtatccagccttattgtgggctgttggagaagtctgggggcttggaaatcatctttgatgtttaccaggccgacgctgtggc

SEQ ID NO: 336468 - DNA, 76 bp, Homo sapiens
agatcctgtgtcacccggcaactcagaaacatcaggtccaagcggggatctgatgagcttctttcttctggcatca

SEQ ID NO: 336469 - DNA, 75 bp, Homo sapiens
ctgcgcttcaacagctccagcctgcagtgccagaattcctcgggctatgagggcctcgtggagggaggtgagaac

SEQ ID NO: 336470 - DNA, 90 bp, Homo sapiens
tttcaataaattgatggccagacctgcagttgctctacactttcaggaaaacggacgatgtattactaagctggaaaacatggggtttcg

SEQ ID NO: 336471 - DNA, 82 bp, Homo sapiens
atgtactgggggattcgcagggaggatgtcgggacaccccggaagctgggaaatggctttaaaggagatagatgaagttggg

SEQ ID NO: 336472 - DNA, 75 bp, Homo sapiens
aacggctgaaggccctacgggagaaaaccgggcgcaaggtaaagggagaagatgaggaagagaacaatttggaag

SEQ ID NO: 336473 - DNA, 83 bp, Homo sapiens
caacgacgttccatctgtggaaggacctaccaaccagccccatggctgggggttatggagtgatgggtgacgatggttctatt

SEQ ID NO: 336474 - DNA, 98 bp, Homo sapiens
gcatcctatggctcaaagaaagatgattataactgtagtgaaatgtagtattgccaagtcccaagccctctacagtgcccaaagagggctgaagacaa

SEQ ID NO: 336475 - DNA, 98 bp, Homo sapiens
gttggtggtgacaagaacggcggtacccgggtggttaaacttcgcaaaatgaaaataatgttgagtttccatgaagaacaggaagtactgccagaaac

SEQ ID NO: 336476 - DNA, 100 bp, Homo sapiens
gcaagagtttgttatatagcagtcttgcagatacttgacttatatgctcaggtatatgaagaactcctggcaattcctgttgttaaaggaagaaagacgg

SEQ ID NO: 336477 - DNA, 83 bp, Homo sapiens
ggcctacatccagcacaagtgctacagcgatgcagccgccaagaagcagcgccgatgtggaagtggccagattctgagccgcc

SEQ ID NO: 336478 - DNA, 75 bp, Homo sapiens
ggagatcgtgggcgagctgggcgacggcgccttcggcaaggtttacaaggaacaatggcgctgtcttcagtggca

SEQ ID NO: 336479 - DNA, 75 bp, Homo sapiens
caggcatttcaatcacattatggcctcatgcattgtgcgtcagcagcaatgtttatggtgaaaaatggcaacggg

SEQ ID NO: 336480 - DNA, 74 bp, Homo sapiens
gaaaatcctttgatgggttgggcatcaacgaaacgttttgatggtaaattacaatcagaatcaactaataatgg

SEQ ID NO: 336481 - DNA, 100 bp, Homo sapiens
tgaaggagcggaaggttaatgttcttcagaagaagtgagccccatgcacggttctatgcagctcagatagtgctaacattcgagtacctccattcactag

SEQ ID NO: 336482 - DNA, 87 bp, Homo sapiens
gatcctgcggctccctccaggtattaagggagatatcccaaagctcttttgaaacagatggtcaccatgtttagatattagcagtcc

SEQ ID NO: 336483 - DNA, 74 bp, Homo sapiens
tttacaccactgggatgtaacagaggagggagccatggatttgctgcgggagctgaaggccatgcctatcacgc

SEQ ID NO: 336484 - DNA, 82 bp, Homo sapiens
acctcatcccctggatgggggaccacaagatcctcatcgacagttcaaggagcagggacaagttacaggaatgttctccaag

SEQ ID NO: 336485 - DNA, 50 bp, Homo sapiens
ctcagagaagtccctccaccggctctgtgaggctgacgcttgtgcttgcc

SEQ ID NO: 336486 - DNA, 82 bp, Homo sapiens
cagtgccatcctttcccaggctgatgctcgacaggcacgagatgacatcctgaatggctcccaccctgtctcctttgacaag

SEQ ID NO: 336487 - DNA, 83 bp, Homo sapiens
ccggggagaagcaggtgtctgtggggcccaagagaagtaccatctcggagccctccctaaggcatatcctgataatcatctca

SEQ ID NO: 336488 - DNA, 75 bp, Homo sapiens
ctggagtgagagaagaaatgctgtggcatctgttgtcgcaggtatattggcatgttatttgaaagcaattgagac

SEQ ID NO: 336489 - DNA, 82 bp, Homo sapiens
gagcgccgggaggatcgcaagctggatgagcttctaggcaaggaccacacgcaggtggatggccgagcctcgatttaacaac

SEQ ID NO: 336490 - DNA, 83 bp, Homo sapiens
ccaactttagggacaagcaatgtcttcatcgagaggcacatcacatccccaaagcaccgaacaagatttgtgatgaaatggag

SEQ ID NO: 336491 - DNA, 90 bp, Homo sapiens
cttgtaaccacctaacaaattttgcagtactgatggcacatgtggaagttaaggatattgtacctgtggatgcatcttatgaagtaaaag

SEQ ID NO: 336492 - DNA, 85 bp, Homo sapiens
ggattggaggtgtcagtgttaaaggaacctctacaacgaaggtgaagccacggaagataaggggaaattgagggctttcgcctta

SEQ ID NO: 336493 - DNA, 100 bp, Homo sapiens
gccgccgcccccggagctgctggtttcattcgaggtttcgggccgattgcagatttgaaggcagccaggcagcttgcgtctgaaatcacctccaaaggag

SEQ ID NO: 336494 - DNA, 75 bp, Homo sapiens
aaattttactttctgacaatgcagcttctcttgcagtgcagatttatcagcaagactgttgaacgcataactgcc

SEQ ID NO: 336495 - DNA, 101 bp, Homo sapiens
tctcattagtgagaatggtcatgctgccgacaccctgacggccacgaacttccgagtggtttgctaatccagactttacacaacctatctcagaagttgta

SEQ ID NO: 336496 - DNA, 82 bp, Homo sapiens
taccaggcgaagctggccgagcaggctgagcgatacgacgaagtccattggaatattaagcccaggagttgctttggggatg

SEQ ID NO: 336497 - DNA, 97 bp, Homo sapiens
cgtggacgtgaaggaggaatggcaggacgaagatcttcccagagtgcatctccctcgccccctgagagtctcgtggaggaggagcgaccgagtggcc

SEQ ID NO: 336498 - DNA, 96 bp, Homo sapiens
gacaggctgcattggggccaaacacagaatcagcaaagaggaggccatgcgctggttccagcagaaggaattgaatgatctggcacgggaccctcc

SEQ ID NO: 336499 - DNA, 98 bp, Homo sapiens
ttgctgtgaatgtgaagaatcagaaatctttactgattccaatatgccctccaaatccttggttatggaatatttggctcatcccagtacactcggct

SEQ ID NO: 336500 - DNA, 75 bp, Homo sapiens
ccgccgctgccgcttccaccacagccttgaaaagatcttttgaggtcgaggaggtcgagacacccaactccaccc

SEQ ID NO: 336501 - DNA, 89 bp, Homo sapiens
cacgacgaggcggtgcaggcgttgaagcgcgcgggcaaggaagtgctgctggaaggtaaataccagctgtcccctacagtgaatatgcc

SEQ ID NO: 336502 - DNA, 110 bp, Homo sapiens
gagaattggagatggggaccgccctggacatcaagattaaaagagcgaataaagtttatcacgccggggtacccactgatggtaatgctggcctgctggctgaaccccag

SEQ ID NO: 336503 - DNA, 76 bp, Homo sapiens
ctgaagacctcagaccggcaccagatttatgtgatcagtttggctgaaccccgtctgcccctgcagctggatgatg

SEQ ID NO: 336504 - DNA, 50 bp, Homo sapiens
aggctgtttgaacaggatgctgagaagtgaggaggacatgtaccgtgctg

SEQ ID NO: 336505 - DNA, 100 bp, Homo sapiens
ggagtctggtcaggcgtcaggctagtccgacgaagagtggggcaacatgcaggttctggtgacttacggtggcgatcccatccctaaaagccctttcact

SEQ ID NO: 336506 - DNA, 91 bp, Homo sapiens
agagaggcctcccggctcgacaagttcaagcagctgcttgccggccccaacacggaccttgaaaaactgttcttgaaaaccacctgctatt

SEQ ID NO: 336507 - DNA, 98 bp, Homo sapiens
tatgcatcagttccatcgagccattactacaggcacaagaatagccgcccagtgactgccaagtgagtgaaccagcctgcttggagcctgcctctttc

SEQ ID NO: 336508 - DNA, 75 bp, Homo sapiens
gggaagttaattgccagagcattgagaagttcagctgttgtagagggaccatggctaaacctcctggatcattag

SEQ ID NO: 336509 - DNA, 83 bp, Homo sapiens
cacctccagtagtaaattatgaagaagatgcacgatcagttacatctatgttactggctgaccaacaaagttcctatcaaaag

SEQ ID NO: 336510 - DNA, 74 bp, Homo sapiens
ccatgattgtgaggcctccccagccatgtggaactgtgcatgtgagggaaccctggcttgttcaacctgtcacc

SEQ ID NO: 336511 - DNA, 75 bp, Homo sapiens
aaacgccaagccagctgcgtcctaatccaaaagtggttggaataaaaacagggttgaatgagttccagaaagcag

SEQ ID NO: 336512 - DNA, 100 bp, Homo sapiens
cccgcctgaaggcaccttggccaggtccccgtccattgatagcattcagaaagatcccagctgttatttcaagaaaccaagaagggccaggagaaatggg

SEQ ID NO: 336513 - DNA, 83 bp, Homo sapiens
tttgtttctcattctcatatttcaccaataaagcacatccaaatccataatggctgctgctggagtacctgttgtggagggtt

SEQ ID NO: 336514 - DNA, 88 bp, Homo sapiens
atatcagttatacagaaatactactttgggaaacagtcttcaggagagcctagatgagctcatacagagacagagttttgccatgctg

SEQ ID NO: 336515 - DNA, 100 bp, Homo sapiens
aagaaccaggactggagccaggcgatattatcattgtgttagatcagaaggaccatgctgtttttactcgatgttagtaggcaggaagaggcggagggag

SEQ ID NO: 336516 - DNA, 90 bp, Homo sapiens
ggagcagttgctggtgctgctgaagtccctagggaaccaccaattcttcccagatggatcctgagcttgaaaaaaaactgaaagagaata

SEQ ID NO: 336517 - DNA, 75 bp, Homo sapiens
ctgccaccgcgtggtgcttgccgcagccagcaactatttcaggttttgagcaaaattttggactgtgaagcaagg

SEQ ID NO: 336518 - DNA, 100 bp, Homo sapiens
gcttctgctgtccttctttgtggagagcaagtgaagaaaatatttggaagctctgtgaatacatcaaaaaccatgaccagtatcctttagaagaatgtta

SEQ ID NO: 336519 - DNA, 75 bp, Homo sapiens
gccaacatggcggcgcccagtggcgtccacctgctcgtccgcagagagactcaccgcactgtgttaaaccagatc

SEQ ID NO: 336520 - DNA, 75 bp, Homo sapiens
aacaagtgctcctacattctggtgggctggatgacactttgcacacaattattgattatgcctgtgagcagaaca

SEQ ID NO: 336521 - DNA, 100 bp, Homo sapiens
ggggtgcagtgtgtctggtcttatgaggctacccacctttctgttctgagacccctcaagagacatataagaaggtgatgaactggaaagaaactttgac

SEQ ID NO: 336522 - DNA, 83 bp, Homo sapiens
cgctggaatcagtcactgtcagcgacagacccctcggggtgtccatcacaaaagccgaggctctaagggatggaaataagctg

SEQ ID NO: 336523 - DNA, 100 bp, Homo sapiens
agacatggagattctcttaaaaaggacacagagtctgggatctaataattcagtcattttggatggactaaaaagaagacagaattttctgcaaaatgtc

SEQ ID NO: 336524 - DNA, 100 bp, Homo sapiens
gcaacggccaacttcggcaagatccagatcgggatttacgtggagatcaagcgcagcgatgatcagaccaaacattgtctggcttgcactgtaaaactag

SEQ ID NO: 336525 - DNA, 101 bp, Homo sapiens
tccaggaagaggagccgagcatctgggccgagaccattccgtatggagagccggctctagaggacaaaatcccagtccttggcacaaactcaggaaatgga

SEQ ID NO: 336526 - DNA, 50 bp, Homo sapiens
cggtgacagagtggagccatggctagagttcagagggctgtgtacaagga

SEQ ID NO: 336527 - DNA, 51 bp, Homo sapiens
ctgcctctgtgtacgctgaggggggaggttttatgacttacctagtggagc

SEQ ID NO: 336528 - DNA, 80 bp, Homo sapiens
gcatgtggatgaagctctagaacatttgatgagagttttagagaagaagactgaagatgtctttggtggacttgggaaag

SEQ ID NO: 336529 - DNA, 101 bp, Homo sapiens
gatctgggtctaaccttgaaacagtgaggtgctggagaatctggtaaaagcaccattgtgaagcagatgaggatcctgcatgttaatgggtttaatggaga

SEQ ID NO: 336530 - DNA, 95 bp, Homo sapiens
gtggaaacgcttgtagggcttcaccagaaggcaattctcaagttcaactactcagtgcaggaggagagcgacacttgtctgggaggcaaatggtc

SEQ ID NO: 336531 - DNA, 75 bp, Homo sapiens
gatatcctaaaatttcctgaagaactggaacacgtagaaagtgcaagcaaaggcttttaaggataccggaaaaac

SEQ ID NO: 336532 - DNA, 100 bp, Homo sapiens
gaacatattatctcgaagcacaagcccgtggatcccccaattacagtatgcctttcaggacaaaaatcacctttatctgatggaatctcgctctgttgcc

SEQ ID NO: 336533 - DNA, 88 bp, Homo sapiens
cggcgcagccccaaagcgagcgaagctagggtcgccgccactgccgcaggaggcgtgaggactacttccagcaacccagtctcctgcc

SEQ ID NO: 336534 - DNA, 100 bp, Homo sapiens
ccggtcggccggcgtagctcgctaagctcgcggtaagagcttctgttcgtgtgcagggaaagcagctcacagacgccgttaaaaccagcttcatctttcc

SEQ ID NO: 336535 - DNA, 90 bp, Homo sapiens
cgcgaccgagacggcagtgcggcggaagcggacctgaaggagaagaaggagaaggtggaggagaaggcaagccggaaagagcgaaagaaa

SEQ ID NO: 336536 - DNA, 75 bp, Homo sapiens
caatggagacgccgccgctgcctcccgcgtatatgaatgacctaaaggtacaaataaagacggagagagaacagt

SEQ ID NO: 336537 - DNA, 100 bp, Homo sapiens
gattcacgggtagagattggcttcgggctgagctagcagtgagcaccttttggcccaatgaatatcaggtttggtgcacctcgatttggaggaagtaggg

SEQ ID NO: 336538 - DNA, 101 bp, Homo sapiens
tgtttctggaatcacccctagatctttcttgaagacttgaattagattacagcgatggggacacagaaggcatagaatgtcaagctaaccaggcgtccgct

SEQ ID NO: 336539 - DNA, 75 bp, Homo sapiens
ttaacatcgtgacctccagttccatccatgttgctgcaaatggtagctacagcaagctgggtagcaggcagatcc

SEQ ID NO: 336540 - DNA, 100 bp, Homo sapiens
tcgagacttaccagagccacaaggttctgcggggagtgtctccagccctgcctgcaggtgccatccccgctgtgcccactctgccgcctgcccttcgacc

SEQ ID NO: 336541 - DNA, 100 bp, Homo sapiens
ttaaggattccaagtaactcttatttggaaccagcagcacaaacactgttggggcaacagtgaacagccaagccgcccaagctcagcctcctgccatgac

SEQ ID NO: 336542 - DNA, 148 bp, Homo sapiens
cgccaccatccacgccagccgcaccatgccgctcctaagcctgcacagccgcggcggcagcagcagtgagagaacatccagtcatggataaaaatgagctggttcagaaggccaaactggccgagcaggctgagcgatatgatgacat

SEQ ID NO: 336543 - DNA, 100 bp, Homo sapiens
ccaaagtggtgtgcttctaccggaggcgggacatctccagcaccctcatcgccctggccgacaagcacgcaaggagagatgacatgctggacgtggagac

SEQ ID NO: 336544 - DNA, 75 bp, Homo sapiens
atcaaagagcaaacagattcagtggcctgcattgatgatgaaacatgcttggaataattataaaggttatgcctg

SEQ ID NO: 336545 - DNA, 50 bp, Homo sapiens
ggggctcctgagtgggggcttgaccatggcactggtgaggtggattgatg

SEQ ID NO: 336546 - DNA, 75 bp, Homo sapiens
tattctcaagctgtcacaggaatgtgttcagagcaacattgttttgttgacacaagcatttagaagaaagtttgt

SEQ ID NO: 336547 - DNA, 83 bp, Homo sapiens
ggaagcagccgatccagcctgcggagcctgtggggcaggccagcatccttcagaaaaagcatccccgaggaggaagacgaatc

SEQ ID NO: 336548 - DNA, 75 bp, Homo sapiens
caccgctgccctcagctccgagtccagggcgagggggggccctcagcctcttggccttgaacgggctgttcatct

SEQ ID NO: 336549 - DNA, 82 bp, Homo sapiens
taatcttgtacttcaagaggaggaatcacgctcggaaacaatggatgtggacgagtgctcactagcagaaaaaacctgtgtg

SEQ ID NO: 336550 - DNA, 89 bp, Homo sapiens
ctggttgccttggtaggcaataaaagtgatttgaagatattaaagctagaaattggaactagaaaatcaaaagaattcaaggcatctta

SEQ ID NO: 336551 - DNA, 119 bp, Homo sapiens
tggggcagctcggcagcatggcgtccgtgacgctgagcgaggcggagaaggtgtacatcgtgcatggcgtccaggagcctgtgtgaaatgcagcaaaggggtgtttggggctggccagg

SEQ ID NO: 336552 - DNA, 100 bp, Homo sapiens
gcattcctacagatataaatagcacaaggccaatcagcccccccacggtgtcccccaactctctctctacgaacatttcaacagcccacatcccacccct

SEQ ID NO: 336553 - DNA, 100 bp, Homo sapiens
ttgtgaaagtgtataactacaatcacctaatgcccacaagggtggctgaggtcctggaaggcaaaggagcagggaagaaaggccgttttcagggcaaggc

SEQ ID NO: 336554 - DNA, 74 bp, Homo sapiens
tgaacaacctaccaagtgatgtgatataaaaccagctaatgtgttcattacagccactggggtggtaaaacttg

SEQ ID NO: 336555 - DNA, 75 bp, Homo sapiens
ttggccatatttgtcactgtgatctccctcttggtgtacaagtataagtgtgctagcggagtgtctagattgtcc

SEQ ID NO: 336556 - DNA, 83 bp, Homo sapiens
cgcggtgcgcaagcgcaaccgtcggtgggtcggggatcggtcgcctgagaggtgtcgtgaaaactacccctaaaagccaaaat

SEQ ID NO: 336557 - DNA, 98 bp, Homo sapiens
ctccagctaccggcccaaggccatctacctggacatcgatggacgcattcagaagttacagaatgtctgaaggggacagtgtgggagaatccgtccat

SEQ ID NO: 336558 - DNA, 51 bp, Homo sapiens
ctgccaacgccccggtggagaagctgagtctccagagaatacagagggcaa

SEQ ID NO: 336559 - DNA, 100 bp, Homo sapiens
aagccccaggggccattggaccctacagctctgcaagtgagtctggttctcaaagcacttgtgatccacttgtgactccaacagccctggctgcctgtac

SEQ ID NO: 336560 - DNA, 82 bp, Homo sapiens
tcttctcacagaaggaagataaactccacatatttctgtaagtaaggaggtctctgtaccatggctcgtacaaagcagactg

SEQ ID NO: 336561 - DNA, 137 bp, Homo sapiens
ccccggctgcagctccaggagcaagtactccaggaagcacagagctgtaccagtacacggcccacgttgccagatccagacatttaatgtggatgcaccatgccagaccgtggaagatttaacgaatggggttgtga

SEQ ID NO: 336562 - DNA, 100 bp, Homo sapiens
agcagatcccccccagccccacatcgtaggtctggccgtgggcctgggcttcggggcactggcagaggtcgccaagaagagcctgcgctccgaggacccc

SEQ ID NO: 336563 - DNA, 100 bp, Homo sapiens
gctgttaatgccagtgaaaaaacagttgtggaagcgttatttcagagggattcacttgttcgacaaagtcagctctgtggcactctgtaagctgctccag

SEQ ID NO: 336564 - DNA, 75 bp, Homo sapiens
atctcagactactgtgtgtggattcagaaagtcaagcctaaagatattggaagacctaaggctgaagttgctgca

SEQ ID NO: 336565 - DNA, 100 bp, Homo sapiens
gacactcctgaagtcgggaaatggtcgcgtggggcaggcagtggcgctgcgggccaaggccttcggcttcaacgtgctcttctacgacccttacttgtcg

SEQ ID NO: 336566 - DNA, 75 bp, Homo sapiens
ggaaatgcatatccacactggcagcagcaggctcctcctgatccagatgagctgcttcagaaagagcaaaactat

SEQ ID NO: 336567 - DNA, 98 bp, Homo sapiens
ggagattgcagctgacaaactgctgagcctgccaatgcaacagccacggaagattaagcagtatgaatctgatgaacaagaaaagagtgcctatcaag

SEQ ID NO: 336568 - DNA, 90 bp, Homo sapiens
acattggcacggcactcaagttcctcgaaggaagaaaggatgacaagtctgttcctcatgaagagtaccgttcacatgatggtaaaacac

SEQ ID NO: 336569 - DNA, 82 bp, Homo sapiens
gggacgcggggtctcgcggcgcctggcagcagagaccaccagaaggttatttctcaaactctgaggctgcggagttcacaca

SEQ ID NO: 336570 - DNA, 139 bp, Homo sapiens
gaaacacccacatacaggagacaccaaagaagagaaagacaaggatgaccaggaatgggaaagccccagagaatttggatggagagacccggaactgccggaagtgattcagatgttgcagcaccagtttccctcggtc

SEQ ID NO: 336571 - DNA, 83 bp, Homo sapiens
ctgaagcgactgagtccgcgatggagagtggcagaatttagtgacatttggaagcttttcaaacatggttccctgtagtcatc

SEQ ID NO: 336572 - DNA, 75 bp, Homo sapiens
agtacttgcactcgcgggacgtggtataccgcgacatcaagatacaaactggactctcaggacaaaacgacacca

SEQ ID NO: 336573 - DNA, 124 bp, Homo sapiens
cgagcttctcagtcagtcctgcctcatcccagccatgtcatcttatctacgaaatgattcagacaatgcctgtggaagacaagtcagaccccccagaggggtctgaggaagccgcagagccccg

SEQ ID NO: 336574 - DNA, 82 bp, Homo sapiens
cctggagcctcagttggaagcagccgatccagcctgcggagcctgtggggcaggtactgaacgacacctgggtctccttccc

SEQ ID NO: 336575 - DNA, 90 bp, Homo sapiens
caggaaagccccagccacccatcaaatcagagagaaggaatccaccttcttacgctatggcagaggaggctgcggaggaggaggaggaag

SEQ ID NO: 336576 - DNA, 100 bp, Homo sapiens
cctgcccctcacactgccatcccccagccaccaactacagcagctgatggtgacggccacccacggactctgtcacttgctgggattcacacacggcacg

SEQ ID NO: 336577 - DNA, 100 bp, Homo sapiens
ggcacggaccaattcgggaacaaatactactacatcccgcagtacaagaactggagagatccaaggttttgccatcaaggggggacgatttaccaaagcc

SEQ ID NO: 336578 - DNA, 83 bp, Homo sapiens
gctccccaagaagactgagagtcaccacaaggccaagggaatcccagtcagaagttccagcctgccactgttctctgatgcca

SEQ ID NO: 336579 - DNA, 98 bp, Homo sapiens
tccagttaaggttggaaagatggatgctacttcctattctaatcctgatgaatttgagcgaatatatgagcctctggatgtcaaaagtaaaaagattc

SEQ ID NO: 336580 - DNA, 74 bp, Homo sapiens
ccctcctgaagaggcggcgctcagacagaacacgacctcgagatgatatcctcagtagacgtgaaagatcaaaa

SEQ ID NO: 336581 - DNA, 100 bp, Homo sapiens
gaaaacgaagatgacgtgtatggaaactcatcaggacggaagcacaggggccactcagagtcgcccgagaaggtcctgagaacattatctgtagctgtat

SEQ ID NO: 336582 - DNA, 74 bp, Homo sapiens
aactctgcctggacaggctgcagctggaggctattcataagctatggcctgctgtgcagttagccaacttctac

SEQ ID NO: 336583 - DNA, 90 bp, Homo sapiens
aaggctttggcaaagctggggattggccagctgactgctcaggaagtaaaatcgctatcagttgagggatttgcagttgataaaatggct

SEQ ID NO: 336584 - DNA, 76 bp, Homo sapiens
gtgcaactggagcacctgcagtccagcaggcgcggggcgaaggagctgctagaacaatgctgaggcgggtgaggtg

SEQ ID NO: 336585 - DNA, 83 bp, Homo sapiens
ccagcttccagttagtggatatagcacaccatccccagccaccccgactatctgagatcggccaagatgactgaggtgatgat

SEQ ID NO: 336586 - DNA, 114 bp, Homo sapiens
ccggatggtgctggccacttgcttgggatcctttatcctggtcatcttctatttccaaaggggatatgagactttctactcggaatatcctgagtgttgcgtggatgtaaaacc

SEQ ID NO: 336587 - DNA, 100 bp, Homo sapiens
gaagactttgaacgcactcctcagagtccgactctcccacctgctaagaatgttgtaccatctttgggtaggcagacttccctgacgacatcagtgatac

SEQ ID NO: 336588 - DNA, 83 bp, Homo sapiens
ccggattgtactgtatggggactccaattgcttggatgacagtcaccgacagaagggtccgcgggagagctgtggggcttggt

SEQ ID NO: 336589 - DNA, 98 bp, Homo sapiens
acaatggaagtagtagttgttgagcagagggaaagggataggagaaggatgtggactgcagtgctgcagtgccagttagttgaatccatggacatgaa

SEQ ID NO: 336590 - DNA, 50 bp, Homo sapiens
caaggaacgtttggggtttcctagacttcacagagaatgcagttgtcttg

SEQ ID NO: 336591 - DNA, 82 bp, Homo sapiens
gtcggcactgctactgcgaagacagctggcagccaaaacaacttcccgacaagtggcagcacgatcttttcgacagtggctt

SEQ ID NO: 336592 - DNA, 88 bp, Homo sapiens
ttttagttcaatgcttcaaacgctcttcaggcgcagtgtgcgttcagctgtgtcagctaatggtgtctttcctgaagactatcttccc

SEQ ID NO: 336593 - DNA, 101 bp, Homo sapiens
gccgcgcagccctcggagcacgatgcagccctgggagtgagggcagaacccaactctgctgaggagcccctgggacagctcacagctgcactgggagagct

SEQ ID NO: 336594 - DNA, 75 bp, Homo sapiens
cggttgatactactttgaccttccgagtgcagtggtggtgttcccactgatgaagagcaggcgactgggttggag

SEQ ID NO: 336595 - DNA, 98 bp, Homo sapiens
gaccacggatttgcattgccgaggacgggaccccagggcagcgaagcaggcttcaacggaccacaccaaaatgccatctcaaatggaacacgccatgg

SEQ ID NO: 336596 - DNA, 50 bp, Homo sapiens
cccctcgcccgcccgggccgccaggcctgatcttttggccagaaggagat

SEQ ID NO: 336597 - DNA, 83 bp, Homo sapiens
catcttccagtgctgataattatggcattagccatcctgaaaaccttcaccccaaatatcatcagtcggaagatcaaggaaga

SEQ ID NO: 336598 - DNA, 100 bp, Homo sapiens
aaagaggctgtcagaaagctggcttatcaggaactgtggctgcaccatctgtcttcatcttcccgccatctgatgagcagttgaaatctggaactgcctc

SEQ ID NO: 336599 - DNA, 76 bp, Homo sapiens
aactatcagtttttgcagacggacaaaaaagaacaggagaagtctgaacacggggaaatttgcagtggtgagaaaa

SEQ ID NO: 336600 - DNA, 100 bp, Homo sapiens
ccagcatattaaagtccacacaggtactgaacgacacctgggtctccttcccttcctggtctgaggactccacgttcgtcagctccaagaagacaccgta

SEQ ID NO: 336601 - DNA, 75 bp, Homo sapiens
acctggatctttgctagaaagagaggttgtttctgttgaaaaggaaaaaaataaactgaagcggaaaaaactgga

SEQ ID NO: 336602 - DNA, 82 bp, Homo sapiens
agaggccgtgtagcgtcgccgttactccgaggagataccagtcggtagaggagaaattcactgcatgtaactatgaccacgc

SEQ ID NO: 336603 - DNA, 97 bp, Homo sapiens
agatgttgcaggtagctttggcctccataaccaagaactcaatattagtttaacttcaataggtttattgtctgaagatgatgagaaactgaaaaag

SEQ ID NO: 336604 - DNA, 100 bp, Homo sapiens
cgtctctgaagagcccttgcttttgcctggacccccagcatcatggtttcccatttcatggggtctctcagagacagggtttcgccgtgttggccagact

SEQ ID NO: 336605 - DNA, 100 bp, Homo sapiens
agcagacccagcagcagcagcagacggccgccttggtgcggcagctccagaagcagctttccaatcagtgtactgttacccggacatacctattccttca

SEQ ID NO: 336606 - DNA, 51 bp, Homo sapiens
agcggcagtttcgtgagcgacctcagcaggcccagacatgtccgtccttgt

SEQ ID NO: 336607 - DNA, 97 bp, Homo sapiens
ttgttctcacaatgccagttcctgagattctgcagcttcaaggtgacatcaccaccttcactcaagactgcttgcaactgattgcagacagtgaaac

SEQ ID NO: 336608 - DNA, 98 bp, Homo sapiens
ggccttcgcgtctgcccggccaagaggcaaaggggaggttacgcagcaaaccatccagaagagtttatgtggccgaggcagacaagtggaattaggcc

SEQ ID NO: 336609 - DNA, 100 bp, Homo sapiens
ggcacgcggtgctggctctgctgaaggccatcgtgcaggggcaggcctgaggtcctttcgagactgctggggaacctggtggtgaagaacaagaaggccc

SEQ ID NO: 336610 - DNA, 50 bp, Homo sapiens
gtggactctgccgacaccggagagagatttgtcaaagatgaaagtgacct

SEQ ID NO: 336611 - DNA, 88 bp, Homo sapiens
cctggatggtgaagaaggagggaacaagaggcccatgccctgctgttcatcaaagaaaaagggttcttttggtcacccaccactggcc

SEQ ID NO: 336612 - DNA, 87 bp, Homo sapiens
ttaatcttgtttgcaattatttcgaaggggagaaatcatctggatcagatgtgtcttgctgaatcagggctctcttatccctgccat

SEQ ID NO: 336613 - DNA, 75 bp, Homo sapiens
ggagattccggcctggagctcccagggccgagatctcagtgaccagctgctggaggtggtcggcttggaaggagc

SEQ ID NO: 336614 - DNA, 75 bp, Homo sapiens
gtcgcagttcttgtttgtggatcgctgtgatcgtcacttgattctcattcagattgtggatgcctcgtcagtcat

SEQ ID NO: 336615 - DNA, 74 bp, Homo sapiens
tcagcttcacctccatgggcatcaacatgtgtactaatggtcacttgatgtgcgctggctgttttatccaccta

SEQ ID NO: 336616 - DNA, 100 bp, Homo sapiens
tggaacttgccctgtctcctcgcagatgagggaacagaaagaacagcttcaaaagatgaaagacttcgggtctgagccacagatggctgaccatctacca

SEQ ID NO: 336617 - DNA, 100 bp, Homo sapiens
aggatttcctccacctgtacctccagctcctgcccctcctaaagctgaagccaaagcgaaggctttaaaggccaagaaggcagtgttgaaaggtgtccac

SEQ ID NO: 336618 - DNA, 90 bp, Homo sapiens
cggagcgctgaggcgggcgttttcttggatgaattgcttgctttggagctgtgagccgtgagctttgaggcggtgggatgtgtcagcaga

SEQ ID NO: 336619 - DNA, 100 bp, Homo sapiens
gtgttggaacttcgttgcttgcttgcctgtgcgcgcgtgcgcggacatggcctcaaacgggcgccctgcgtccggcagaggaggcgagcatcccgctcag

SEQ ID NO: 336620 - DNA, 100 bp, Homo sapiens
ccgccgcgatggtgacccggttcctgggcccacgctaccgggagctggtcaagaactggtttttcgttggaatatacgttgcacatttatggcgattctg

SEQ ID NO: 336621 - DNA, 75 bp, Homo sapiens
cgcacgggatccagagcgccgcgcacttcgtcatgttcttcgcgccctggtgagacatggaatccattaaaattg

SEQ ID NO: 336622 - DNA, 101 bp, Homo sapiens
aaaagcttcagagttctctaaaaaaactggctgtgaataatatagctggtattgaagagggctacttctacaagtccgaacagccagtccagcaaaatgaa

SEQ ID NO: 336623 - DNA, 75 bp, Homo sapiens
gggggcgagagtgaacgattcaacccgggggagctcaggaaagaaaggagaggctatccaaatttgaatctattc

SEQ ID NO: 336624 - DNA, 73 bp, Homo sapiens
ggaaagctgagcagctaatgtcagatgagaattgctttaaggtgtggcatgcagcattttggaaggaaaattg

SEQ ID NO: 336625 - DNA, 82 bp, Homo sapiens
gtcagaggtgggcggctttgaccgagaggctgctggagctcgtgtttggacgcgtctctaattaacagaagatggcaaagcc

SEQ ID NO: 336626 - DNA, 100 bp, Homo sapiens
accagatccgggagcacgtcatcgccatcgaagtgaatggtagtgtctagaaagggtatgtcccttcaagagagaggtgccaatgtccaaccggcctaat

SEQ ID NO: 336627 - DNA, 98 bp, Homo sapiens
aggacccgggctttagctatggcagcggcagcaccgggagtcagcagagtgaagtggagaatgagaatcactgcgacttcgtgaagctgcgggagatg

SEQ ID NO: 336628 - DNA, 75 bp, Homo sapiens
tgtacttgcaagaaacctcaggacttgagtaacagcaacatgaaaaggatgcgcctccacttagcaaggctgggc

SEQ ID NO: 336629 - DNA, 82 bp, Homo sapiens
cgccgcctctccttgctgcagccatggagcctccggtgtggctgtctctgatggtgtcatcaaggtgttcaacgacatgaag

SEQ ID NO: 336630 - DNA, 100 bp, Homo sapiens
gtggagatgcccatcctgaaggacgtggccactgtggccttctgcgacgcgcagtccacgcaggagatccatgagaagagctcaggccccggggcctcca

SEQ ID NO: 336631 - DNA, 88 bp, Homo sapiens
ggttttgactctattatgaaacagcaaagatacgatgaatggattaaagcagataaaatagtaagacctgctgataaaaatgtgccaa

SEQ ID NO: 336632 - DNA, 82 bp, Homo sapiens
tatcgacgtcgtgatccagaagtccagagctgaggactgcctgtttgcagctgataggaagatgtcttcaggaaatgctaaa

SEQ ID NO: 336633 - DNA, 80 bp, Homo sapiens
gctcctaagcctgcacagccgcggcggcagcagcagtgagagggcaaaggaggagcccaacatcctgggttggagtttgg

SEQ ID NO: 336634 - DNA, 83 bp, Homo sapiens
gtcacctttgaacatgttaaaggggaactgtggctgcaccatctgtcttcatcttcccgccatctgatgagcagttgaaatct

SEQ ID NO: 336635 - DNA, 73 bp, Homo sapiens
ggttagatcagtataattcatctgcagatacttgtactcatgcttattggtttagcttcttctcccgagataa

SEQ ID NO: 336636 - DNA, 96 bp, Homo sapiens
ttgcaacttttgttaccaaaggaatcagagtcaacaaacactcgggtcctatacttcagcatcttttcaatgttctgtctcattggactagctacc

SEQ ID NO: 336637 - DNA, 74 bp, Homo sapiens
tacgctaagactgaacaggatattcagagaagttctgtggatgggcaggtggtagcactgctggtacagaatct

SEQ ID NO: 336638 - DNA, 95 bp, Homo sapiens
gcctggtgcgctccctgcgtttcgggtggggccgcgcaggcaaggacaaggccacagagtcggggtcttcacgtaagactttgaccccgacgcag

SEQ ID NO: 336639 - DNA, 75 bp, Homo sapiens
cagtatgcctttcaggacaaaaatcacctttatctgtcgtcattgaattttgagaagcattctgaaaactttgca

SEQ ID NO: 336640 - DNA, 74 bp, Homo sapiens
gggaggagactggagcccggttaggaagaatggagttggcgactcgctaccagcttgataactatggacagcaa

SEQ ID NO: 336641 - DNA, 90 bp, Homo sapiens
attttttctcatggatgttcttcttcgagtatttgtagaagggtacaggtgaacaaaggcagagtaaactgtcaccccagatgcaggtac

SEQ ID NO: 336642 - DNA, 75 bp, Homo sapiens
ctttgaaggaggatgctccagcagtgaggagatttctagtgaagatgatgagctggtagaagagaagaagcagca

SEQ ID NO: 336643 - DNA, 97 bp, Homo sapiens
gcccgacggccacctcttccaagtggagtacgcgcaggaggccgtcaagaagggctcgaccgcgggaagaaggagaaagggccaacccctgaagaag

SEQ ID NO: 336644 - DNA, 87 bp, Homo sapiens
ggcgagtacgaccctcggagacaccgatatgaccatcaccagaggcccaacctcgtctccctggacctgggcttcaacgacctgaca

SEQ ID NO: 336645 - DNA, 101 bp, Homo sapiens
gtgctgctggcatacctggaggcaagggagaaaagggtcctgctggagagcgtggtgctccaggccctgcagggcccagaggagctgctggagaacctggc

SEQ ID NO: 336646 - DNA, 98 bp, Homo sapiens
gatacattttctgcttttggtaacatcctttcatgtaagcgtccctccccacccccaaatgttgactatccattagatggagagaagattttacatat

SEQ ID NO: 336647 - DNA, 100 bp, Homo sapiens
aggatctggggatcttcgcactatcccaaggttcagcctggagaaggaaataaagctgctttcaatgacatgagagccttgtctggaggtgaacgttctt

SEQ ID NO: 336648 - DNA, 76 bp, Homo sapiens
ccatgaccccccagagcccggcgtgagggggccgagatgccatggacaatattaccaggcagaaccaattctacga

SEQ ID NO: 336649 - DNA, 82 bp, Homo sapiens
gagaggagaagatttgacttctgaacatcctttgttagtatgtgccaagagttgtaacctctgcacaacagaaagcaggaag

SEQ ID NO: 336650 - DNA, 75 bp, Homo sapiens
cgggggccgctctgggatcccggccaccagcaattgtccggatggtgctgctccactggtgcctgctgtggctcc

SEQ ID NO: 336651 - DNA, 83 bp, Homo sapiens
acagcccgcccgaccccgtcccgaccctggccgccccgagcggagcctggagggaacggcaggagcagctgatgggatatcgg

SEQ ID NO: 336652 - DNA, 100 bp, Homo sapiens
gccggtgccagcacctttcggcttctgagacggcggcagcagcggcattcaggcatagaatgtcaagctaaccaggcgtccgctacttcagaagagtgta

SEQ ID NO: 336653 - DNA, 100 bp, Homo sapiens
gtttcaactgctgtattgcagaacagcctcagcctgagcagatgtctcaagtattagatgccatgtttgaaaaattggtcaaagatggggagcatgtaat

SEQ ID NO: 336654 - DNA, 98 bp, Homo sapiens
gagctccaggagttcgtctcttacgtctgcggaagtgcagctgcctcagttcttagcgcaggcagaatccagagaccacatttgaagtatatgttgaa

SEQ ID NO: 336655 - DNA, 138 bp, Homo sapiens
gatctccttcctagagcaaggcaaagagccctggatggtggagagagtggtgtctggaggcctgtgtccagctttcagccgtgccccaattccaatggctgtggtccgcagagagctatcctgtgagagctatcctat

SEQ ID NO: 336656 - DNA, 50 bp, Homo sapiens
cgtaccacctggatgttgtgggtgggaatgatggttagatgctgccgaac

SEQ ID NO: 336657 - DNA, 101 bp, Homo sapiens
ccaacctgccctcctacaacatggaccgggccgcggtccagaccaacatgagagacggaactgggaacagccaggtgccccaaagcaaatacgcggagctg

SEQ ID NO: 336658 - DNA, 75 bp, Homo sapiens
ccagtgagggtcaacgtcaagcgggagtatgaccacatgaatggatccaggcccagaagtctggctcaggagagg

SEQ ID NO: 336659 - DNA, 50 bp, Homo sapiens
ggaaggtagatgtcattcaagaaccagaaacagaagcctatcagttgctg

SEQ ID NO: 336660 - DNA, 101 bp, Homo sapiens
cagggccaggcgccgctcagaacgcatgcttttcacttccactgcatctctcgctggctcaaaacacgacaggtgtgtccattggacaacagagagtggga

SEQ ID NO: 336661 - DNA, 97 bp, Homo sapiens
cccggaaagtgcgttttaaggcgaagtcatgatgtattctcccatctgtctcactcaggtgtcatggagaaactccagctgggcccagagattctgc

SEQ ID NO: 336662 - DNA, 75 bp, Homo sapiens
acctcccccagaatttgtccgagatgtcatggatctgactgcagccatgagcagcaatgagtgcttcaagtgtgg

SEQ ID NO: 336663 - DNA, 75 bp, Homo sapiens
agaaggctccctatgaatctcttatcattgatgggcgtctactagaaaaatctcagagggtagaagccatcattg

SEQ ID NO: 336664 - DNA, 75 bp, Homo sapiens
gaaagcactggtaaaccgcaagatcacagtgccaggcaacttccaaggggcccggcgagcagccaaggaggccaa

SEQ ID NO: 336665 - DNA, 114 bp, Homo sapiens
gttcggttgtcgcccgttggccgcgcggcgccgcgctcggcggccgccattgcagtgaattttgaagattgcaccggtcgacaaaggacagcctatttttccctcgacacccga

SEQ ID NO: 336666 - DNA, 90 bp, Homo sapiens
tgaggaggacaacagctacaaccggggaaatggaggcaaacgaccattttaactttactggccttccccctgcacctgctgcctcaggac

SEQ ID NO: 336667 - DNA, 100 bp, Homo sapiens
cactgctactgcgaagacagctggcaggtcatgccctgcctggaggccgtggccttgatcctgcttatcctgctggttccagacccaccccggggagctg

SEQ ID NO: 336668 - DNA, 100 bp, Homo sapiens
aaaatgtgacaggatcatgaatgtcaaagaacacactgttgcagcagctaggagtggctcctttttctgagggcccttggcccttgtacattcaccctca

SEQ ID NO: 336669 - DNA, 74 bp, Homo sapiens
gcggggctggccgccatgcacaagctgcacttcctgcacagggccatgatccaaaggaaccagagcagttgaga

SEQ ID NO: 336670 - DNA, 90 bp, Homo sapiens
ccccgcgtgggctcgtgcgagtcggcctcaggttaaagaattgcccacccttaaggatatggactttctcaacaagaaccagaaagtata

SEQ ID NO: 336671 - DNA, 82 bp, Homo sapiens
ctggagaggttaaagagacccgttcagagtcctacagtggcagggctgaaatctctttaatgatggagggaagcaggcagac

SEQ ID NO: 336672 - DNA, 50 bp, Homo sapiens
agattttgaagctaaagttaagcaggtggtgaaattgcctctacctttga

SEQ ID NO: 336673 - DNA, 101 bp, Homo sapiens
atggcccacgtgagacactttcggacattagtttcgggattttacttctgggaagcagcactgttactcagggcaagtgtccagagaatggctgggatgaa

SEQ ID NO: 336674 - DNA, 99 bp, Homo sapiens
caaacagaaggactatttctcaacaatctgcagaaaagttttcctgctctacgaaacgcactcttttgccttgaagcggcattggacagtggtgtcact

SEQ ID NO: 336675 - DNA, 105 bp, Homo sapiens
taaaatctttgtttttcacaggtcatagagaagagatactttttaagagaaggtaatcagtacatttctggatttgggaatgagtgttcttcagaggatcctcgc

SEQ ID NO: 336676 - DNA, 82 bp, Homo sapiens
tcagtatcatggatgaatttcagggctctccaatgtcagatgtggtcagtagggagctccatgcccaagctcaagaacgact

SEQ ID NO: 336677 - DNA, 100 bp, Homo sapiens
tgaaatcactgcaccttaaaaacaaaagattgagctgcactgtattcctcatcttcctcatcgaccacgcctggacgtgccgtgtggagcacgcgcgcca

SEQ ID NO: 336678 - DNA, 101 bp, Homo sapiens
cgccgcgctgcgcaagctcgccaaacaggcggaggagcccagaggtgctggagaatctggtaaaagcaccattgtgaagcagatgaggatcctgcatgtta

SEQ ID NO: 336679 - DNA, 100 bp, Homo sapiens
aatgttggagccgtctgcaaagtgtccccggcaagaagctcaatctgaaattgaagtgtctgtctctgcaaggaatatcagaaggctactaagtttccag

SEQ ID NO: 336680 - DNA, 101 bp, Homo sapiens
ttatcagtggatttgtgataacttcccatattatagagaggctggcagtggttggaaggcatgaacaaccgggaggtgctggagcaggtggagcgaggcta

SEQ ID NO: 336681 - DNA, 90 bp, Homo sapiens
gttaatgatgatgtcaggagggcagcagtagaatcacttgggttcattctattcagcctgcctagggtagttaaaagacgagtgaatgct

SEQ ID NO: 336682 - DNA, 82 bp, Homo sapiens
tcactccgcccggccccagccctagcgctggccgcgaccccggcgcacttctcagaacttctggatgagttttcccagaacg

SEQ ID NO: 336683 - DNA, 75 bp, Homo sapiens
ccctgtccttccgttgtctacactgcggtctcgttggagacctttggcgacttggcctttggcgacatcttcctc

SEQ ID NO: 336684 - DNA, 74 bp, Homo sapiens
cgcgggcccggccacggcggagccaagagtgcctggtgaagaatgtgatgggatcactagcatgtctgcggaga

SEQ ID NO: 336685 - DNA, 100 bp, Homo sapiens
aatggggctaagcgaggcggaggcgatcggtgctgattcggcgcgatttgaggagctgctgctgcaggactccagtgggggtgactcatgtgcttctgag

SEQ ID NO: 336686 - DNA, 82 bp, Homo sapiens
agaacgcgctcctccgcctgctgcccgggctgggtaacgtgaagcacctggttctcttcctccatgaggctgtcctggtgca

SEQ ID NO: 336687 - DNA, 83 bp, Homo sapiens
cgtggcccggccgcactatggctaataccaagctgctattttacacttgaagagggagcacaaagaagaaattgaaaacctgc

SEQ ID NO: 336688 - DNA, 74 bp, Homo sapiens
caaactccaccagccccgtgtccttcattgccacgtacagggcaaacctggtggacctgcagaagaagctggag

SEQ ID NO: 336689 - DNA, 95 bp, Homo sapiens
cgccattttagcaacgcagaagcccggcgccgggaagcctcagctcgcctgaaggcatgtactggcattgaaaacattgacgaagctattacatt

SEQ ID NO: 336690 - DNA, 90 bp, Homo sapiens
gtcttaaaatcctgctctggccggattccagactcgtgggggaaaggctgatctgctgatttgggtcctactttaatgacaagacctgga

SEQ ID NO: 336691 - DNA, 100 bp, Homo sapiens
tcccggcgttcttccgctggctcagccgcaagtacccgtccatcatagtcaactgcgtggaagagaaggaaaattgcctaagaattatgacccaaaagtt

SEQ ID NO: 336692 - DNA, 83 bp, Homo sapiens
gtccggcccggggccccgggatctcggctgtccttcctcccgagcctggcagagagcaggtgtgtgatacacgtcgtcaggtg

SEQ ID NO: 336693 - DNA, 98 bp, Homo sapiens
caaaaaggacatctttggagccagttgaaaacaatcctcgaacaggaaatcttggtgcactaattaaggtcttcctttctagaaccaaagaactaaaa

SEQ ID NO: 336694 - DNA, 74 bp, Homo sapiens
tggagtgtacaagtccgcggagcagggggaggtggaaccttcagaagtttagtctttttggagacataagtgtt

SEQ ID NO: 336695 - DNA, 83 bp, Homo sapiens
tggcggcggcgtgatgttctcggcaggagcggagagtttgctccaccaggccagggaaatcctcattgacgattcaatttgtt

SEQ ID NO: 336696 - DNA, 75 bp, Homo sapiens
gggactatgtgggcacgctggagttcctggtgtcggtgttggtaaatcatgcttattgctacagtttacagacaa

SEQ ID NO: 336697 - DNA, 101 bp, Homo sapiens
gaatccactgatagaaatcatttccatcaataccggtgcctgaaacagtacatgcagctggcaatccgagaaggatgtgggtctcccatcacttgccctga

SEQ ID NO: 336698 - DNA, 75 bp, Homo sapiens
tgccagcgcctcttctaccggggcaagcaggtgcagcggaactgctgcctgacgctctgcaacttcagcatcccc

SEQ ID NO: 336699 - DNA, 100 bp, Homo sapiens
ggcgtgtacaagatccattagctgagctagtgaaaattgagccaaagcacattggagttggaatgtatcaggctgaccaactgactgaagagcagattgc

SEQ ID NO: 336700 - DNA, 74 bp, Homo sapiens
ctggatgtgaaaacaaagtcttgcagtggcgtggttttctgtctcaactggtctctgacaagcctctgactgaa

SEQ ID NO: 336701 - DNA, 97 bp, Homo sapiens
cctgggagtcatcctgtacaccctcgtcagcggctccctgcccttcgacgggcacaacctcaaggaactcttggtgtaataacagaagctacaataa

SEQ ID NO: 336702 - DNA, 82 bp, Homo sapiens
tgcaccagtagcttttctgagaatacttgctgaaaaggaagttttctggaatggggtcaaagaattgactgtagatccaact

SEQ ID NO: 336703 - DNA, 105 bp, Homo sapiens
cgcggccccgcaagccagacctgcaggtgtacctgccgcgacaccgaggtggtgaaggcatttgtgatcctggcctcgcagttcctatcccatgacccagaacag

SEQ ID NO: 336704 - DNA, 85 bp, Homo sapiens
agctgctcgcagcaactgtgctactcctcaccatctgcagccttgaaggggactgtgaccctcctgggaatccagttcatggcta

SEQ ID NO: 336705 - DNA, 75 bp, Homo sapiens
tgctgccatgagcaaagaggaggtcgacagaagcgcatactgtgctgcctccgtagcctcgctgaccaacatcat

SEQ ID NO: 336706 - DNA, 74 bp, Homo sapiens
acgtggaaagcgcatacaggaccctaaacagataccctgcagtgcactgtagaacagaagataagaacttttct

SEQ ID NO: 336707 - DNA, 83 bp, Homo sapiens
ctactcagcatggatatccaggtgctgagccaggagcagcagcctttctattcctggtcgggtggcttccagtggtcttcagt

SEQ ID NO: 336708 - DNA, 98 bp, Homo sapiens
agcctgagagatggaaactactatgcatgtaaacaaatgaagcagcgctttgaaaggctaaagaattacctccaaagccattgtcaagaccacagcag

SEQ ID NO: 336709 - DNA, 97 bp, Homo sapiens
tgccaccctcaaggagttcacgttcatgggcgagggaacagatgagaaacccggcaatgaaaggacaccacatcatttgaagcattctttcaatcca

SEQ ID NO: 336710 - DNA, 100 bp, Homo sapiens
gaataattatgaacatggaaaagaatttaccaacttcctggataccatcatcagggcagagtgcttcttacaagtaacctgtgtatggtgactggaggtg

SEQ ID NO: 336711 - DNA, 100 bp, Homo sapiens
ccacgtgcatgaaccaaacccacttcgttcaagacaggtgtttaagcgtatatttgcttacttaaactaccatgttcctcgaacgagacgagaaatcctg

SEQ ID NO: 336712 - DNA, 75 bp, Homo sapiens
tcatcagtccaaaggggatcccactgctaaaaagggattaatgaaaatcaagttccatcctcagacaagaggtaa

SEQ ID NO: 336713 - DNA, 75 bp, Homo sapiens
gtcacctaaagttaggcggcactccagccccagctcggtggatcagtacaagggaaagcgggatttggagtcact

SEQ ID NO: 336714 - DNA, 99 bp, Homo sapiens
aaggtgtcctgtgtcactcccaatttctgaggccttttcagatattaatggcaaagttcagaccattgttttgacatctggtacattatcaccaatgaa

SEQ ID NO: 336715 - DNA, 96 bp, Homo sapiens
caggaaaggaacgggatgatcatgaagagttagcctggcctggcataatggatgtgcagcacattaagaggagagacatcgtgctgaagcgagaac

SEQ ID NO: 336716 - DNA, 75 bp, Homo sapiens
gacccggcagtacggcaaatatggcggaggtccaatgatgcatcagcagcctccttctcagcaatacaatatgcc

SEQ ID NO: 336717 - DNA, 100 bp, Homo sapiens
aaagttcttgggacaaacttcatttgactgtgcaacttacatcatctgaattggagtccacacttgaaacactaaaagctgaaaatcaacctataagaga

SEQ ID NO: 336718 - DNA, 75 bp, Homo sapiens
tcccattgcagcccaggtggataaggaacatctcttcccagcggctcagaaggtgcttcctggaggggcctgccc

SEQ ID NO: 336719 - DNA, 75 bp, Homo sapiens
gggcttggtaccgtgctgcccagaatgcccttcgggaggagccagcaccgctctttgaccttgccatgcttgcct

SEQ ID NO: 336720 - DNA, 100 bp, Homo sapiens
gaaaatttgtgcaacacatcaagatttctagacccaaaccattatcagcagttccaaagcaagttgtaacaggaactgtgttgacaagatctgttttcat

SEQ ID NO: 336721 - DNA, 101 bp, Homo sapiens
tcaacatgattgaccagaaccgtgatggcttcattgacaaggaggacctgcacgacatgctggcctcgctgggtgggcccatctggggcagggaagagcac

SEQ ID NO: 336722 - DNA, 100 bp, Homo sapiens
gggcccggagactctgggctgcgggtgggaactggagcgcagagtccgcggccggcacgggaaaggtgtggccgacgacgatgccctcgctgaggagcgc

SEQ ID NO: 336723 - DNA, 50 bp, Homo sapiens
ctaatgagtctgaccattttgaggtggctttggctgaagcctaattccac

SEQ ID NO: 336724 - DNA, 80 bp, Homo sapiens
cacggagtcgccgcggagcgcagaccgattattgaccgacctattcgaggtcgtggtggtcttggaagaggtcgaggggg

SEQ ID NO: 336725 - DNA, 82 bp, Homo sapiens
gggggcgcgaggggaacggaggccagagctgcggatgagttccacccgttcatcgaggccctgctgcctcacgtccgcgcct

SEQ ID NO: 336726 - DNA, 50 bp, Homo sapiens
atgaagtgcagaggtttttttctgaatctgaatctgaagctgaagaaggt

SEQ ID NO: 336727 - DNA, 50 bp, Homo sapiens
atgggaaggacaggcagagctaaacaagaagagaagctgaatttggacga

SEQ ID NO: 336728 - DNA, 96 bp, Homo sapiens
gtcccggaacaaagcttatcattacaggtgaaaagaacggaggggagcccgatgacgctgaactagtaaggctcagtaagaggctggtggagaacg

SEQ ID NO: 336729 - DNA, 98 bp, Homo sapiens
agtcagcctggggaatgagacccaaactgctcatacagaattacgcatttccacttctaatggtgataacgtggtgctggaccagacctacctgtggc

SEQ ID NO: 336730 - DNA, 100 bp, Homo sapiens
gagcttgaccagttacggcaggaggccgagcaacttaagaaccagattcgaatcagaagatttcttggttatacatgctcgtgatgatttaacagctgtt

SEQ ID NO: 336731 - DNA, 100 bp, Homo sapiens
ggggagacggtgatcggccgcgggccgctgctgggagagagcacagaatggggattcaacacctcggcaatgcccttttagtgtgcgagcaaccacggga

SEQ ID NO: 336732 - DNA, 116 bp, Homo sapiens
ggagatccgctacgagggcatcctctacaccatcgacaccgaaaactccaccgtagcccttgccaaaggtattcctggagtggagagccactctttttgacctgccctacatcaga

SEQ ID NO: 336733 - DNA, 100 bp, Homo sapiens
tctttcttctatttcttgtggatattatggctaataacacaacaagtttagggagtccatggccagaaaacttttggggatgaggatgggacagaagagg

SEQ ID NO: 336734 - DNA, 83 bp, Homo sapiens
cttctcacaatgaggctccctgctcagctcctggggctgctaatgctctgggtctctgcttccttcaaaatgtctactgttca

SEQ ID NO: 336735 - DNA, 100 bp, Homo sapiens
ccctggtccggcagccgcacaccatcctgcgcgtcgtgtcttgggtgtctgacttccagcaactgctggcctgtgccagggtgcaagctgagcactggag

SEQ ID NO: 336736 - DNA, 95 bp, Homo sapiens
tttaggtccagaagtgtccaaaccacaagttctcaaaactctctgaaaaatggctccctccgagttaaggcctccggtgtggctgtctctgatgg

SEQ ID NO: 336737 - DNA, 82 bp, Homo sapiens
tgcagcccagctccgcccgcagccgccgcggaccaggcagagacaagaggagcagcagcggcaccgcccctcaccctggagg

SEQ ID NO: 336738 - DNA, 100 bp, Homo sapiens
acttccttttactattagcccatcaagaaatgaagaacgagattcagacacagcctcccagtgcaacgtcagcttaaagaagcagaggagccgcagcatc

SEQ ID NO: 336739 - DNA, 100 bp, Homo sapiens
catcaaatacctgctgttcggatttaacttcatcttctggcgtgagtgcatctccatccacgttggccaggctggtgtccagattggcaatgcctgctgg

SEQ ID NO: 336740 - DNA, 90 bp, Homo sapiens
tagcagattgagggcaatgaggccaaaatacccagttcacatggatgcagtggagccaaccacaccagcatcacaagcccccaaatcacc

SEQ ID NO: 336741 - DNA, 101 bp, Homo sapiens
ggcttcccaacaccatgccgtccgccttctctgtcagctctttccccgtcagcatcccagccgtgctcacggtgtcccgacccaggctaagcttgagcatg

SEQ ID NO: 336742 - DNA, 83 bp, Homo sapiens
tcctgcatttggccaccaagacctgggaacaagtcaaacggccgaagccctgcagcccacgctacagccggagatgcagctcg

SEQ ID NO: 336743 - DNA, 75 bp, Homo sapiens
gcagacagagctattccagcaccagcagagttggtgcttcccgtgctgctgttgatgctggctttgttcccaatg

SEQ ID NO: 336744 - DNA, 100 bp, Homo sapiens
tctgggttctgctgtcaatggtgttgtccaacgagatgatgcctattggccagaaggaaagcgtgtggcaatggaggaccgatatcgtgcagactttccc

SEQ ID NO: 336745 - DNA, 99 bp, Homo sapiens
atttaacccccctccaaaaagtcgaagaattccatccactgacgccaacctgccatctggcggtaagggcttcaaactccgaagacagccttcagagcc

SEQ ID NO: 336746 - DNA, 108 bp, Homo sapiens
gatgacactctggagctgtctatcatgcccaaggacgaggacatcctccagctgttggtaccaacaaagagctctgctgcctcgtctatacctcctggcagattccac

SEQ ID NO: 336747 - DNA, 100 bp, Homo sapiens
ccccaaggccaacagagagaagatgactcagctctcctgccacagctcctcaccccctgaaaatgttcgcctgctccaagtttgtctccactccctcctt

SEQ ID NO: 336748 - DNA, 79 bp, Homo sapiens
tcagatcagtagaagcagatttcttttggatagtgatgggaaaaggtgaatggcgtcctgcccatcctccccctgctct

SEQ ID NO: 336749 - DNA, 82 bp, Homo sapiens
ggaaatcgggctgaagcgactgagtccgcgatggagacccccttccaatcctcgggcctggacaccagccggaccacccggc

SEQ ID NO: 336750 - DNA, 128 bp, Homo sapiens
cctggacccagagtgtgggggaaatatctctggagaagccctcactccaaaggctgtccaggcgcaataggaattccagggaagaaatgtggtacaatcatacttacagcagaggaattaaactgttg

SEQ ID NO: 336751 - DNA, 75 bp, Homo sapiens
agagctgctcctcagccgtgggggtgacaaaattgaattgcttatcttgaaggccaagagaaatctagagcagtg

SEQ ID NO: 336752 - DNA, 80 bp, Homo sapiens
agttcccaacttcaccttcaacttgggcttctcgggcaagttctatcatactgtggcggccctcccagcacgcgcatcac

SEQ ID NO: 336753 - DNA, 100 bp, Homo sapiens
gatgccccaggacacagagactttatcaaaaacatgattacagggacatctcaggctgacctgtgctcgccctcggatctcctccagggcactgcccggg

SEQ ID NO: 336754 - DNA, 102 bp, Homo sapiens
gttttcccgtagcagacggtgccaggaagtgtttggattgtgagctatttcagaactgttctcaggactcattattttaacatttgggagaaacacagccag

SEQ ID NO: 336755 - DNA, 100 bp, Homo sapiens
gtggcagcagccagaggaggaatatggcgctcttaggcagccgagcggagctggaagcggacgagtcaccaggtgtcaagatgctgcaagtacataggac

SEQ ID NO: 336756 - DNA, 75 bp, Homo sapiens
tggagcttagccattggcaacgagttaaatatcacccacggtggtatcacggaaaacttgacagaacgatagcag

SEQ ID NO: 336757 - DNA, 82 bp, Homo sapiens
aggagccgctcttaggcgacacacctggaagcaggagtgagctgagtcgacagaaacttcatacccaagagctgctttctca

SEQ ID NO: 336758 - DNA, 50 bp, Homo sapiens
gcgtacgtggtggagctctgcgtgtgacccagatgatgtggtaccagttg

SEQ ID NO: 336759 - DNA, 75 bp, Homo sapiens
ctttgtccccacccagcactgatgatattataaaattgtttgacttcacagacacgactcaggcttagtggcatg

SEQ ID NO: 336760 - DNA, 95 bp, Homo sapiens
atcgatttttcacctgtgctgcatttctctggatagcaatggcaccagcatgatatcattgatcattcctcccaaagaccagatttcacgagtgg

SEQ ID NO: 336761 - DNA, 109 bp, Homo sapiens
ctgggaaggtggagccaccagcctctccttgattcaaccctatgaaaagataaaggccaggggcttgcctgataatatatcttccgtgttgaacaaactagtggtggtg

SEQ ID NO: 336762 - DNA, 101 bp, Homo sapiens
cccctggatgggatctgcctcagcgaatcagacaagacagccgtgctcaccttaataagagaagagacaatcaactgaaggcactaactgagaaaaacaaa

SEQ ID NO: 336763 - DNA, 90 bp, Homo sapiens
gccctgcagtacctgcagaaggtctctggagacatcttcagcagattttggaagatggcaaagttcatgacacccgtgatccaggacaac

SEQ ID NO: 336764 - DNA, 99 bp, Homo sapiens
ctagctctcagcggctgcgaagtctgtaaacctggtggccaagtctggagcccggcactgtggtcataacagagcaggcagtggatacctgcttcaagg

SEQ ID NO: 336765 - DNA, 75 bp, Homo sapiens
ctcacccgcgcctgcgacctcggtgggacagtcacttcctcctccctccccacccctgtcgcatccacgtgcgac

SEQ ID NO: 336766 - DNA, 90 bp, Homo sapiens
cagttgcagggtcacagaaacatcgctcagagagtggcaacagtgtgaaaagactgaaaccggaccctgagccagatgacaagaatcaag

SEQ ID NO: 336767 - DNA, 101 bp, Homo sapiens
ctgaacttgaggagatccagcagcaactactgcactaccagaccaccaagcagaacctctgatgatgagctagttgtgaaccccaaagtgttccctcacat

SEQ ID NO: 336768 - DNA, 83 bp, Homo sapiens
gaagaagtcggctctgggctccagtgcgggaatcacacacatacctcaggccacacgtgtctacacttagcctctatccatgg

SEQ ID NO: 336769 - DNA, 100 bp, Homo sapiens
gagcacggatgccccccggagccgcgggctggcagagttgctgggagcctgagcacctttcgtttttcggctcagagaaagccaagtgcaacttgcttca

SEQ ID NO: 336770 - DNA, 51 bp, Homo sapiens
aacctgaaagtggaggctgcgaaaatagagagacaagagagacacctccaa

SEQ ID NO: 336771 - DNA, 74 bp, Homo sapiens
tcctcaaaaaatcttcttggttctgctacaacaacatggccaatctttcctaagctgctcagcttacaagaaaa

SEQ ID NO: 336772 - DNA, 100 bp, Homo sapiens
cgtgccggcgccgcccggaccgccaggttgcttataaaaagggagtcaaacatctttctgctcttcttgatccagaggtcctgtccattttcgtgcctcc

SEQ ID NO: 336773 - DNA, 100 bp, Homo sapiens
aggactgtacacaacattcctgtcaccagcaataaagacggcagctggctgccagcctctgggaggacgttggcctgcagtggcagaaggagaatgagga

SEQ ID NO: 336774 - DNA, 91 bp, Homo sapiens
tgcgcgggctcgagagctcgccccgaacgggggtcttcctcctccgccgttgacaggtcaaaatgcagatcttcgtgaaaacccttaccgg

SEQ ID NO: 336775 - DNA, 83 bp, Homo sapiens
gtctttccaaaaggtcaaggttcacaagaatgaaactagtgatcgagaagatggcctccccaaaggacatcatgtgacagact

SEQ ID NO: 336776 - DNA, 89 bp, Homo sapiens
aagcctctgctctgcctccggggacaagaaactagagcaaataaccgttttgaaattgtccaagacaagctgctgctatctgcgtgcca

SEQ ID NO: 336777 - DNA, 75 bp, Homo sapiens
caaaaaaggaccagttcctcggatgtgccccctcacagagagatgaaggggagcgtcgctggattttctctgaga

SEQ ID NO: 336778 - DNA, 82 bp, Homo sapiens
gcccgggcagcagtggcggcagcgcccgagagagcaattctgtggtgttcttggtcacacatttatggagtttctgaagggc

SEQ ID NO: 336779 - DNA, 86 bp, Homo sapiens
gcggattcgccgaggcaccgaggcactcagaggaggcttcttccccgggagctcgcagggctgcgacgccttcctgcggcataaga

SEQ ID NO: 336780 - DNA, 75 bp, Homo sapiens
cctagcagggctctagagaccacgtgaagtctcctcgatatataagggatatgttgatgatcctcgaaacactga

SEQ ID NO: 336781 - DNA, 88 bp, Homo sapiens
aggaagcaaagcaaatggagaatggcatgctggtgacggacagtgcagggaagcaactgcagagctacctctacccagatggaaagac

SEQ ID NO: 336782 - DNA, 50 bp, Homo sapiens
ctgaggctcagagatgggtggagaaatctccgagaagcaagggataatgc

SEQ ID NO: 336783 - DNA, 100 bp, Homo sapiens
cggacgcaacctgctgaggctcctcgaggtgctctcgggagagatactggtaaaaagatggcctatcagaaggtccatgcagatcaaagagctccaggac

SEQ ID NO: 336784 - DNA, 100 bp, Homo sapiens
cctgtaagaacagaaaatcgtcttatagttgagaatttatcctcaagagtcagctggcaggatgaatgtgggggtggcacacagcgaagtaaaccccaac

SEQ ID NO: 336785 - DNA, 100 bp, Homo sapiens
gctccccagcagagagcggccccacaacaaaagaggtccagcccctcagagggattgtgtccacctggaaatcttcagaggaactagacatggacaaggt

SEQ ID NO: 336786 - DNA, 95 bp, Homo sapiens
caggaatgcagcagagaggactcgccatcgtggccttggctgtctgtgcggccctacatgcctcagaagttaccttatcccatatcacacaactg

SEQ ID NO: 336787 - DNA, 100 bp, Homo sapiens
ggagacctcagcactcaagcagcaggagcagcccgcggcgaccaagatcaggaacctgccctgacacctagctcccctgtttgacaaccctaagttggat

SEQ ID NO: 336788 - DNA, 75 bp, Homo sapiens
ttttgctctcagatgctgccagggtccctgaagagggaagacacgcggaaacagattccagctacatatctgaca

SEQ ID NO: 336789 - DNA, 100 bp, Homo sapiens
ggagagagaatgagccagagggacacgctggtgcatctgtttgccggagggccccaggcctcttcctacagccccgcagtggccgcctcttcagcacctg

SEQ ID NO: 336790 - DNA, 96 bp, Homo sapiens
cctgcgactcgcgggtgtgacgttgaagatgtcggccttctgagccgactgcggtggtcaagagatgacttgtggggggaccacagtctggaggtg

SEQ ID NO: 336791 - DNA, 75 bp, Homo sapiens
agctgcagaatgtgtagtaccttaaaagacatgcgtcgggatgtccaggaaatttttcgcatgaccccccacgag

SEQ ID NO: 336792 - DNA, 100 bp, Homo sapiens
agagctccgcggattgggttacgtcgccggaagtggggcgggactctattgtggcgttaattgtgtgaggaacacgccggcctttttagccgaaagactg

SEQ ID NO: 336793 - DNA, 90 bp, Homo sapiens
tttaaacccacgacttctcgcctgaagcagcctctgcagcactgcaccaggcgctgaggttagagaaataactaagactgcgcccttcac

SEQ ID NO: 336794 - DNA, 82 bp, Homo sapiens
aaaattctgaactcaggacttggcaaatttaatccagagactgacttcactatagaacccacagttgtatcaatggttgggg

SEQ ID NO: 336795 - DNA, 75 bp, Homo sapiens
aagcccatgaagagatggtggattctcactgagttttgactagcggaagaaaagattacatgaagcagatgacat

SEQ ID NO: 336796 - DNA, 74 bp, Homo sapiens
cccttcatgcatgaaagacaaagctactcagatataatgaagatctggaacttgaagatgccattcatacagcc

SEQ ID NO: 336797 - DNA, 100 bp, Homo sapiens
ctaacttcctcggccgagccgggccgcgccgccgctgccgccgccgcgcgcgggcaaccacacctccaaatcaaggaaggccagattctcctgtctatgc

SEQ ID NO: 336798 - DNA, 96 bp, Homo sapiens
gttggcgggagatgtcgaaccccgggacacgcaggaacggctccagcatcaagatccgtctgacaggccattgaaactgctctggactgcctgaaa

SEQ ID NO: 336799 - DNA, 83 bp, Homo sapiens
aacacgggacaccgcggaagccgggaaatgattgtcagcagcctgctgcctccgtaccgccacagtgctcacaactagccggg

SEQ ID NO: 336800 - DNA, 100 bp, Homo sapiens
ctgcttcccgtctgcgcgagtccacgcagctccccaggtgtcatggagaaactccagctgggcccagagattctgcagcgggaaaatccaaggcttattt

SEQ ID NO: 336801 - DNA, 74 bp, Homo sapiens
cctggatgtgatgagcagcatggattttgtgacaaaccaggggaatgcaagttttttgcgggaacatacaatgt

SEQ ID NO: 336802 - DNA, 99 bp, Homo sapiens
gtcaattacttcaaatccaaaccagtagagaccccacctgaacagaatggcaccctcacctcccagcccaacaacagtacctaagactaatgctttctg

SEQ ID NO: 336803 - DNA, 51 bp, Homo sapiens
tacccgcccgcctgctcggcgaccagtattctaccttgtaaatactgttat

SEQ ID NO: 336804 - DNA, 83 bp, Homo sapiens
tgctgccgccggcgaaggaggaggcgttgccggatatggctcgtggacagcagaaaattcagtctcagcagaaaaatgccaaa

SEQ ID NO: 336805 - DNA, 98 bp, Homo sapiens
cacactcagtcactccagctccacgggcagacacctgcacagagcctccaagcccttgcctccagcccctgctccagatgagtatcttgtgtccccca

SEQ ID NO: 336806 - DNA, 98 bp, Homo sapiens
aacaacctaactccagatatctacctaattgattgtactatactggcaattgctggagaagattttgcaattgttgcttctgatactcgattgagtga

SEQ ID NO: 336807 - DNA, 90 bp, Homo sapiens
ctattcagtgcaagctctatcagtactacttagatcacttaacaggtggcgacctgcacatgacccagtttttccgaggcaatctggctg

SEQ ID NO: 336808 - DNA, 50 bp, Homo sapiens
ctcaacaacttttcagtggcaaatgcacagtaatcaaaagggcttacttc

SEQ ID NO: 336809 - DNA, 82 bp, Homo sapiens
atagagttgagcctgtgggacacttcggccttgaaaagatcttttgaggtcgaggaggtcgagacacccaactccaccccac

SEQ ID NO: 336810 - DNA, 75 bp, Homo sapiens
aaattcccggaaccgcgattcggcgtgtcagttttagttactatccagcagaaaacttgatagagtacaaatggc

SEQ ID NO: 336811 - DNA, 82 bp, Homo sapiens
gacacgtttacccacttgaaacagcggtcttgcgagtggctggttccctgcagaagagcacagaagtgatgaaggccatgca

SEQ ID NO: 336812 - DNA, 100 bp, Homo sapiens
aattcatgaagaaggggctggatccgtgggtcagagaacacaggaccagtttgccatcccaaggccgaagtgtcaaatcaacagtgccttgacatctttc

SEQ ID NO: 336813 - DNA, 75 bp, Homo sapiens
taacccaggagcagacagagaagctgctgcagtttcaggagtacgaccccagcaaagcgacctttgtgaaggtgg

SEQ ID NO: 336814 - DNA, 98 bp, Homo sapiens
gtggccgtgccaaagccgccccgaagaccaagccagccacaccgagcgtgcagcagtaccgcgtcgccatgactgccaaggactgctccatcatgatt

SEQ ID NO: 336815 - DNA, 90 bp, Homo sapiens
ggcggctctctggtccgcagcggcaacagtaacgaaaaacagggctgttatgcagatgtatcttccattttgtggaatcgccatatctaa

SEQ ID NO: 336816 - DNA, 97 bp, Homo sapiens
aaaagtagagaaggatcaaggacggatgatgaagtagtacagagggatcagacttgttataacataattccactttataattcaatgaagaagaaag

SEQ ID NO: 336817 - DNA, 131 bp, Homo sapiens
ctggagatgaccgactggccctgggacttcttcatcaacctgagtgcggccgactaccccatcagtgtgaagattgctcctggagcagttgtatgtgtagaaagtgaaatcagaggagatgtaactatcgg

SEQ ID NO: 336818 - DNA, 75 bp, Homo sapiens
atcgaatctcttctccctccccttcttgatgaggaaaatgaggcccaaagaagtgatgccacttggttaaggtcc

SEQ ID NO: 336819 - DNA, 100 bp, Homo sapiens
ctgcgggacgacaacgagcagctcatcacccagtacgagcgggagaaggcgctgcgcaagcacgctgaggagatggcccactgcgtgaccttggttcagc

SEQ ID NO: 336820 - DNA, 83 bp, Homo sapiens
aacaacctcaaaaccaaaaccagacacagcacaagcagcggccacagatgtggacgagtgctcactagcagaaaaaacctgtg

SEQ ID NO: 336821 - DNA, 101 bp, Homo sapiens
ttccctgggctggtgaagtacatgaactcagggccggttgtggccatggatcttaagattgaaagtgatgttcaagaaccaactgaaccagaggatgacct

SEQ ID NO: 336822 - DNA, 76 bp, Homo sapiens
cgaacatgtcgcggcctgtcagatgagttctggttctccgatgggtccttatcagataagtccaagtgcgcagatc

SEQ ID NO: 336823 - DNA, 82 bp, Homo sapiens
cgccgcctctccttgctgcagccatggagtgtctgtgacctttgaggatgtggctgtgacattcacccaggaggagtgggga

SEQ ID NO: 336824 - DNA, 82 bp, Homo sapiens
tccgcccaggcgcagatgcgggccctgctggaccagctcatgggcacggctcgggacgcaaaatgatgcttcaacacccagg

SEQ ID NO: 336825 - DNA, 101 bp, Homo sapiens
ttgacaagatgtcacctgaaagtggtcacagccgcatctttgaagggccgttgctccagggagaactgcaaatatcttcatccacccccacatttaaaaac

SEQ ID NO: 336826 - DNA, 101 bp, Homo sapiens
cgacgatcccccacagaagccccctcggtccatcaccctcaggaggctggctatgtggctacccccatagctatggttcaggcagccatgactcttctaag

SEQ ID NO: 336827 - DNA, 90 bp, Homo sapiens
ctgcagtacctgcagaaggtctctggagacatcttcagcagccttgaaaagatcttttgaggtcgaggaggtcgagacacccaactccac

SEQ ID NO: 336828 - DNA, 100 bp, Homo sapiens
tgaaaatccgaagtgccgcggaaagtggagcggagcccagggagaatatgctggactggccactatccgagcctacttaaaccagaaaggagaggggcac

SEQ ID NO: 336829 - DNA, 98 bp, Homo sapiens
atgcagctcactgatttcatcctcaagtttccgcacagagaacggagaccaacctgggctgaagaaagaagattaaatgctgaaacatttggaatccc

SEQ ID NO: 336830 - DNA, 100 bp, Homo sapiens
caaattggactagctttgctgaagaatgaaatggaatacaaacagaagcttgcacgagtaacccaggtccgcaaggaactgaaatcccatattcagagct

SEQ ID NO: 336831 - DNA, 100 bp, Homo sapiens
tgttttgatccctaaaataatgagagaaaaggccaaagagaggtgttctgaacaagttcaaggttaaacccatccagagtaatggctgcggccttaccca

SEQ ID NO: 336832 - DNA, 100 bp, Homo sapiens
gccttttataataaagacacttatcttgcccaagagctggcatggcggacaccgacctgttcatggaatgtgaggaggaggagttggagccatggcagaa

SEQ ID NO: 336833 - DNA, 90 bp, Homo sapiens
ggccggccggccctgcccgggctgggtgaggggcgcccgcctcaagctagagacagggactgagaaacggaaatactaccatcctccagc

SEQ ID NO: 336834 - DNA, 100 bp, Homo sapiens
gcctgcgcggcgggaagcggcggcggcggctccagcgtcctaagagaaacgatggaaagaactttctaaggaagacttatctcctgcctttgatcattca

SEQ ID NO: 336835 - DNA, 100 bp, Homo sapiens
tcacattcggttatctctaacgttggaaaacggccgttaattaaggaaaagttgagccagggcgtgaccctcgtcgtggacagatacgcattttctggtg

SEQ ID NO: 336836 - DNA, 75 bp, Homo sapiens
ccgatactgagcttcttcctatttgccatgggttgcccagagaaaaattcaggaaattctgactcaggtaaagca

SEQ ID NO: 336837 - DNA, 100 bp, Homo sapiens
gaggcttcgcgggaagacgcggcggcggcggcggaggatgagcctgcagagcgcgcagtacctccgctccgtgaagctatggctgccttaagaaagtcag

SEQ ID NO: 336838 - DNA, 97 bp, Homo sapiens
gcacctttcggcttctgagacggcggcagcagcggcattcagtttcagaagaggagccccgccgaggcatgagggccgtgctccccccagaggaagg

SEQ ID NO: 336839 - DNA, 100 bp, Homo sapiens
ccatagccgagcagactggcatctgtaaggtgcggccgccgccgcttttccttccctccatgagaaagaagccagctctgtctgacggcagcaatcctga

SEQ ID NO: 336840 - DNA, 74 bp, Homo sapiens
tgtgcgggatcgacgcggacagcgggctggagcctgacgagctggcgggccagaagcggactcctagaagaggg

SEQ ID NO: 336841 - DNA, 98 bp, Homo sapiens
gtactatgcctgtatctctgctgaaggctcatgaagctgaaaggcaagatcacctgttgcctgaagcagaagaaatcactatgatcagtattcaactt

SEQ ID NO: 336842 - DNA, 111 bp, Homo sapiens
aacaggagcggaacattgcctagtagaccctgaggctttacaacagtgccactgacccctatgtaataatttttcaccatgcatcggaaaaaggtggataaccgaatccgg

SEQ ID NO: 336843 - DNA, 75 bp, Homo sapiens
cggcgagccgcgggcgtttactcttagcagaagctcacctgccttcctggatgctctgcagaaccaggctgaggc

SEQ ID NO: 336844 - DNA, 100 bp, Homo sapiens
ggtaagctcttgccgtcttgctcattctgttactagaggactggcttatcttcacacagaattaccacgaggagtgttcagactgcatcacagtgcttcc

SEQ ID NO: 336845 - DNA, 88 bp, Homo sapiens
taaccatgaagacttgaacttaatacagcaagaaagaccatcaagtttaccagaagccaccattcttcagagggcaatgaaggcacag

SEQ ID NO: 336846 - DNA, 90 bp, Homo sapiens
agtgcaagcttagagcgtctggccaagaatcagaggaagtgggtggagccgccaccaaaatgcagattttcgtgaaaacccttacgggga

SEQ ID NO: 336847 - DNA, 97 bp, Homo sapiens
tgaaagtctaaccatcatatttagaaccagctgtttaccagagtggtgtccctggccagtgtccttccacctgtccacaagcatggggaacatcttc

SEQ ID NO: 336848 - DNA, 80 bp, Homo sapiens
ccagaaccttcagcctcattgccaaatcctccatcaaaggttcatgtgaaaatggcggatgaggctgtctgtgttggccc

SEQ ID NO: 336849 - DNA, 82 bp, Homo sapiens
ctgctcagacgctccgagaagcttcaggcagcataacacttacaggtcaaaatgcagatcttcgtgaaaacccttaccggca

SEQ ID NO: 336850 - DNA, 75 bp, Homo sapiens
ggacaaaatggcgaagatcgccaagactcacgaaggtcttatatccagatggccaggctcagatgattcacccca

SEQ ID NO: 336851 - DNA, 100 bp, Homo sapiens
gaaagagaaaggaataagattcaaagtgaactggatgtatccagcaacatttcccaaaaggatgtgtttgatttaaagatcacagctgaattaaatgcat

SEQ ID NO: 336852 - DNA, 118 bp, Homo sapiens
ttattggagcaagggaaagaaccctggctggggaaaagggaagtgaaaagagatctgttttcagggaacctcagaacctgttctggatccacagcaaatccaagcatttgatcagctt

SEQ ID NO: 336853 - DNA, 90 bp, Homo sapiens
cgggcaagccctccgagaagaacctctacgccgacatcgacgccgcgtggcaggcgctgcgcacccggacctcagcagccatgtcgaagc

SEQ ID NO: 336854 - DNA, 52 bp, Homo sapiens
aagtgagcaacattgtaaaagaggttaaccccaaagattggctttccttgga

SEQ ID NO: 336855 - DNA, 100 bp, Homo sapiens
gcggggcgagggcgcggctcgaggcatccctgcagggcgctcctccgagtccctcggcgctctgagcccacaggcctgcacagctgaccacagttgggaa

SEQ ID NO: 336856 - DNA, 90 bp, Homo sapiens
gccatggccatgggcacacccagcaccacggagaggatttccacctctggccagatcctgcgcagccgaggctgtgttagcgccaaggac

SEQ ID NO: 336857 - DNA, 75 bp, Homo sapiens
cctgtacagcctgcagaactaggcctaacatcgtgtcccagctcagccaagcctgcgatggagccataacgagtc

SEQ ID NO: 336858 - DNA, 98 bp, Homo sapiens
actggaagatgattttcttaaggctaaatcctggaataaaaagttctatgattatgaagcaaacatgccagacaggtgtgatctccattcctttgtac

SEQ ID NO: 336859 - DNA, 96 bp, Homo sapiens
ggaagccacgtgcagacatctacaaccttcgatctcctgacgagcaagccgattttttcagttgatattcaccctgacgggaccaagttcgcaact

SEQ ID NO: 336860 - DNA, 141 bp, Homo sapiens
ccaggactctccccgcctctccagcttcacccagcaccaccggcccgtcatcgccgtgcacagcgggtgagaactctgtctcagtcgacgggaagtgcagtgactccacgctactgagcaacttgttagaagagatgaagg

SEQ ID NO: 336861 - DNA, 143 bp, Homo sapiens
atgaagggcttctcgtcctcagagtcggagagctccagtgagtccagctcctctgacagcgaagactccgaaacagcatctgcattgccgggaccggatatgagcatgaaacctagtgccgccccgtctccatcccctgcact

SEQ ID NO: 336862 - DNA, 80 bp, Homo sapiens
cacctccccaggtgatgcctgaagctcaagggactgtgtccaccctcagatacctgcactttaatcagatagaaactttg

SEQ ID NO: 336863 - DNA, 100 bp, Homo sapiens
gcgctgcgccgcaacgccgagcgcaccgacatctgcctgctcaaaggattatatctgtccaagatgcgagtctggttttatcgaggagcttccggaagag

SEQ ID NO: 336864 - DNA, 75 bp, Homo sapiens
agattatggctttgtccccacccagcactgatgatattataaacgggacgaccctgggacagtctccactggggc

SEQ ID NO: 336865 - DNA, 96 bp, Homo sapiens
gcctcagcctcccgagaagctgggattacaggtactggacacaggagagcagctgatggtccccgtggaagtcctggaagtggataacaaggaggc

SEQ ID NO: 336866 - DNA, 90 bp, Homo sapiens
gtcatgaagccgacaagcccgggagacacagtgtcagaattacaaggacgtagacaagtttggcaacgagatcacccagctggcccggcc

SEQ ID NO: 336867 - DNA, 100 bp, Homo sapiens
gtgcctgatgatcacgcagctggctggcttcagtggaccacatttggccatccagtgtcattggtctcagaggccagcagttattggagatgtccttcaa

SEQ ID NO: 336868 - DNA, 100 bp, Homo sapiens
gtggatgccaagaccaaattagaggctcaggtcaatgtgacggtggactacattagaccagccagcccagccacagagacagtgcctgccttttcagagc

SEQ ID NO: 336869 - DNA, 100 bp, Homo sapiens
ttgctcttccatccgcctttgatcgtcttcctcttcagccatccaggaccggagcagggccccaagcccccgggcctggtgggggacgcgcttcttccca

SEQ ID NO: 336870 - DNA, 90 bp, Homo sapiens
gtcacaatcccctcggccgttgccctcggctagcatgacccgcctgatgcggtcccgcacagcctctggttccagcgtcacttctctgga

SEQ ID NO: 336871 - DNA, 101 bp, Homo sapiens
atagccacctagctgagagcactagccctgtgcagacggttaagaagattgtctaccaaatatagaacagaaaagatatatcccacagccactggagaaaa

SEQ ID NO: 336872 - DNA, 75 bp, Homo sapiens
agacagctggcaagaggcagcctgggggccacagctgcttcagcggctgagccagaggccaactgcagaggaact

SEQ ID NO: 336873 - DNA, 98 bp, Homo sapiens
cggagggggctttgctggtctttcttggactattccagagaggtgtatggttgaagcctggaattttttgcggcaacattgcaataggttgaatatag

SEQ ID NO: 336874 - DNA, 90 bp, Homo sapiens
aggggacgcggcggagctgcgcaagatttctccacccaggtgaactcctccctcacctccccgacggggcgaggctccatggctgccccc

SEQ ID NO: 336875 - DNA, 50 bp, Homo sapiens
actccatctaagccaacatgtggtctctgacccctcccaaggatcatgcc

SEQ ID NO: 336876 - DNA, 88 bp, Homo sapiens
ttagctgtgctcgcgctactctctctttctggcctggaggctatccagcactattgcccagaagaaaagatgtttggttttcacaagc

SEQ ID NO: 336877 - DNA, 100 bp, Homo sapiens
ctgcctcagcctcccaagcagctgggtctacagtttccacgggctcccttgctcagcagtatgcgcaccctaacgctaccctgcacccacatactccaca

SEQ ID NO: 336878 - DNA, 74 bp, Homo sapiens
cccatcactgcttccctcagccataacagctacctcctgccccatctccttccatctaaacctggcctggacac

SEQ ID NO: 336879 - DNA, 90 bp, Homo sapiens
cgaaaaccagataccagccaaaaattctagtacagaacctaaagcctcaaaaccaactttagatcccatcattactgttgagggacttag

SEQ ID NO: 336880 - DNA, 101 bp, Homo sapiens
gtcaatcgagatctcactgaggctgttcctcgacttccaggagaaacactaatcactggtatcaacttgaactgaaggatgactacatcattagaactaat

SEQ ID NO: 336881 - DNA, 95 bp, Homo sapiens
aggattccaagtaactcttatttggaaaagcccgatggctccccagtatttattgccttcagatcctctacaaagaaaagtgtgcagtacgacga

SEQ ID NO: 336882 - DNA, 88 bp, Homo sapiens
tgccgctgccctacggcttctccgccatgcaaggctggcgcgtctccatggaggcagcggtagtagtggtgttcaattttgccatggt

SEQ ID NO: 336883 - DNA, 83 bp, Homo sapiens
tggaaacaatggcatttacagaaagagtcaacagcagtggcaacaggaaaagaaagctgcattggaaaaggagcgagaagaac

SEQ ID NO: 336884 - DNA, 85 bp, Homo sapiens
caaggctgacgataaggagacctgctttgccgaggagggcctggcccagcacaagccagtgctgctgttcttaacccacggggag

SEQ ID NO: 336885 - DNA, 98 bp, Homo sapiens
tgcgtcccctttcccggctgctggcccccgccaggctcccgagcggccgacaacgtctgacatgagccgagtgttctgctcacactgtgggaacaaga

SEQ ID NO: 336886 - DNA, 100 bp, Homo sapiens
ttataaaagcaaacacaggattcaccacagtacttcacatcgtcgttcacatggggctcacattctacttgactgtggtgaagacaatgtctgtaaaccc

SEQ ID NO: 336887 - DNA, 75 bp, Homo sapiens
gcagctgaagccgctgcccctgctacagggatacccacccaccatcccagggtctacaacatccacagccggacc

SEQ ID NO: 336888 - DNA, 140 bp, Homo sapiens
agcacagatttatgtaatgtcaactttactgagaattttccacctcctgacacaacaccactcagtcatcctgtacagttctacagcatgaataggcctgcctctcgccatactcccccaacaatagggggctcgttgcc

SEQ ID NO: 336889 - DNA, 51 bp, Homo sapiens
gagcccttgggccgcgtctcctttgagagactcaccgcactgtgttaaacc

SEQ ID NO: 336890 - DNA, 100 bp, Homo sapiens
gggaagtctccatggtgaagtataggctgaggctacctgtgaacagtacgcagtgaatgttgccggcctctcagccctcaatgaaagaaagctaattgta

SEQ ID NO: 336891 - DNA, 90 bp, Homo sapiens
ccctccagcagcagaccttcaagatagacattgaccccgaggagacgtttaaggaagaaatctctaaacgttttaaatcacatactgacc

SEQ ID NO: 336892 - DNA, 100 bp, Homo sapiens
cagcctcccgagtagctgtgattacagggactttaactgcacttcgaatgtgttaccaaggttatggttaccctttgatgctgttcctggaagaaggagg

SEQ ID NO: 336893 - DNA, 74 bp, Homo sapiens
ctcagaagctggaatatcatcagtttgtgatggacgcctctgaccccacccagctctctgcatcctgtgtgcag

SEQ ID NO: 336894 - DNA, 75 bp, Homo sapiens
gcagtgatggatgcagctcttctgttgataggagagaagcctcatcagtgccaagtctgtgggaagaccttctct

SEQ ID NO: 336895 - DNA, 100 bp, Homo sapiens
gggctatgagacccagtggtgggatgccccgagcattgtgggcctcatcatcttcctcctgtgcaccctcttcatcagagtgtcaatccatatctacaag

SEQ ID NO: 336896 - DNA, 75 bp, Homo sapiens
cgaagctcatcctcacggaggcctccaaggtactggaagatgctcacagagatgccaacctgcaccatgtagctt

SEQ ID NO: 336897 - DNA, 100 bp, Homo sapiens
attgaagccgcctctgtattacttaccagggtctctcattcatcacttttatctgctatgtggcgtcctcagcatctgccttcctcacagcgcctctgct

SEQ ID NO: 336898 - DNA, 98 bp, Homo sapiens
tcttcccgagctgcttcgccccttatgctgccagccgcctgctggctgctgcctgcatttgtatcactggacaggccatggctccacggtcccggcga

SEQ ID NO: 336899 - DNA, 101 bp, Homo sapiens
ctcttcaccaaggagactgcaggctacctcaggggccgtccccaggacactgtccggatcttccctccctgtgaacagagtatctgtcaggcaagagctgc

SEQ ID NO: 336900 - DNA, 122 bp, Homo sapiens
ggtattgtgttggctgcgtgccaggccttggagaacagcacgtccccgctgagtgagttccaggagcgaattgcaaacccaccgggaaaatgagcgaagagacggtccccgaggctgcctcg

SEQ ID NO: 336901 - DNA, 88 bp, Homo sapiens
attcacgcatcaggcgcgggaagcggtttattacccagaactctttgtctgggtcagtcaagaaccatttccaaacaaggacatggag

SEQ ID NO: 336902 - DNA, 100 bp, Homo sapiens
ggaagccctttctcctcggcactgtattctttacctgcttcccaatcccactgatgaggatcagcccatgcatctgtggaaccctccattctgtggatca

SEQ ID NO: 336903 - DNA, 50 bp, Homo sapiens
ctcagcgatgctgacgtgcaaaagcagtatggtttgaagtggtgaacatg

SEQ ID NO: 336904 - DNA, 101 bp, Homo sapiens
ggggcaagatggaggcgctgattttggtgacagcggcatggacatatgccccaggctttcctgctggggtccatccatgagcctgcaggtgccctcatgga

SEQ ID NO: 336905 - DNA, 100 bp, Homo sapiens
acttattagatgaccctaattcagaaaagaagaagaagagggatactcccatgctgccaaaggtattgttgcagcatctggcagtgagactgaggatgag

SEQ ID NO: 336906 - DNA, 75 bp, Homo sapiens
gtaaagattatgacaaatcacaacttgtagagggaaagtgtggagagcctgattcaaaagcattcctatgcacgc

SEQ ID NO: 336907 - DNA, 90 bp, Homo sapiens
caccagggattttgtagttatgcgggccagaatgatggcagccaaatgtatcggcaagcagtgtaaacggaggacttggggaaaaaggac

SEQ ID NO: 336908 - DNA, 114 bp, Homo sapiens
gacaaatggaagtgttatgatgcccttcgaaaaatgatcaactattgaccatataggtcgatggccaggtggtcttcataaactatactgccttgtgatgcctccctagaaatg

SEQ ID NO: 336909 - DNA, 100 bp, Homo sapiens
attagattgtcatggattgtgggtcaagctggaataggtgctggagaatctggtaaaagcaccattgtgaagcagatgaggatcctgcatgttaatgggt

SEQ ID NO: 336910 - DNA, 122 bp, Homo sapiens
gaaggccgggccccgcgagtgccatggcggccgccctgggagcgagcggaggagcaggcgccggagacatgtgcattgccattgcgatttctcttctcatgatcctgatatgtgctatggct

SEQ ID NO: 336911 - DNA, 98 bp, Homo sapiens
ggaaatgtcagctcttccgcagtgattgaagctttgataaatgaaatcttcctaagtatagtttgtctaggttccaaactgcagctgaccccaagaaa

SEQ ID NO: 336912 - DNA, 110 bp, Homo sapiens
agcccacaagagcttactggtgaaggaatgggacaagacccatctttatgcaaagccagcgttacagtaatgttccagacaggggcaagtgtccgagtggtgaatcagct

SEQ ID NO: 336913 - DNA, 100 bp, Homo sapiens
aaaaaaacaggagatcagtgagctagcagcagagaagccttcctggaaaaggagaataaaggcagccccgttgatgactgaaaatgacaaagcatccacc

SEQ ID NO: 336914 - DNA, 100 bp, Homo sapiens
tcacgttgaaacagaatgaagtgcttcctggagctaaggactttgaagaatatcctgaacatagaacgaactttttcttactacttcaggctgtcaattc

SEQ ID NO: 336915 - DNA, 82 bp, Homo sapiens
gtctgtgggctctttgctgggcagctccagaacctgggtatcaacccagcaaacattggcttcagtaccctgactatggagt

SEQ ID NO: 336916 - DNA, 88 bp, Homo sapiens
cgcgtgctgcaacccgcgcccgcttcggagagagaaatgctggggtggctattatcatggaaaactaatttttcccagagaatttcct

SEQ ID NO: 336917 - DNA, 105 bp, Homo sapiens
gcagcctattatgcccagacaagtccccagggaatgccacagcatcctccagcacctcagaaaatggactgactccaaagaaaaaaattcaggtgaattcaaaac

SEQ ID NO: 336918 - DNA, 101 bp, Homo sapiens
ggaacacctcgccaaagcagagaaatagagctgtggctaaaggaagtggaggggccgtgggatgcggagagccgagggctaactcccggacagcggaacag

SEQ ID NO: 336919 - DNA, 100 bp, Homo sapiens
cttccttttgagccaaaccaagaagttcctgtagcaccttcacagtccaggcaaggtgtcatggagaaactccagctgggcccagagattctgcagcggg

SEQ ID NO: 336920 - DNA, 100 bp, Homo sapiens
gccggcagtgctggggccgcgccacttccgcaaacaggtgcagatcctgtctcagaaagaagagtgggagagcaggactcagcaccaacccaggaaaaac

SEQ ID NO: 336921 - DNA, 75 bp, Homo sapiens
tgcaaagccaaaagaaatttcagaaattcaacgtttaaattatgaacagacatttcaacctacgaatgaagaggg

SEQ ID NO: 336922 - DNA, 82 bp, Homo sapiens
gagtgcttggcaactgatgttccacttgacacacttgccgccaagccagacgaactaggtctgaggtcacattgttgtggaa

SEQ ID NO: 336923 - DNA, 83 bp, Homo sapiens
cggactcatacagagattgaaatgttccttagaaaggagcagcaggctgaaggtgatgtggccgccctcaaccgacgcatcca

SEQ ID NO: 336924 - DNA, 120 bp, Homo sapiens
atctatcagcaggctccgggctgaagattgcttctcttctctcctccaaggttgtttttcaccattcagaacattgcctgaagcaggtccaccatgccgttagtaacgaggaacatcgag

SEQ ID NO: 336925 - DNA, 100 bp, Homo sapiens
ggagggcggagctggcgcggcccctagctttctccttctggtgtggggcccgaggaaacattggcaaatttggagcgacagatctatgcttttgagggaa

SEQ ID NO: 336926 - DNA, 97 bp, Homo sapiens
ggcggctggaccacttctctgtcgacggctatgacagttctggcctgtttaaagaagaaaacccgtatgctagatttgaaaacaactaaagcgctcc

SEQ ID NO: 336927 - DNA, 117 bp, Homo sapiens
cctggggcgcccggcggagctgaaccgcggcccccggtggtgggctcagccggtcgagctgcgcgggagcctcaaggaataggttctcctagtgtctatcatgcagttatcgtcatc

SEQ ID NO: 336928 - DNA, 51 bp, Homo sapiens
gtcggagccgcgctaactccggtatttcaggacagccaggagggggcgcac

SEQ ID NO: 336929 - DNA, 82 bp, Homo sapiens
gcagaagttgactgagatcagaggccctgtgatgatcgtgtcagacatatgaagatccatgagaaggaccctaacagtgcca

SEQ ID NO: 336930 - DNA, 75 bp, Homo sapiens
cgagtatggcgccagcccggagcaggttgcagggggggccctcagcctcttggccttgaacgggctgttcatctt

SEQ ID NO: 336931 - DNA, 100 bp, Homo sapiens
acttgtgtcaaaagcgaaatgggcccctggatggatagctactccggaccttacggggacatgcgatttgataatgggctgcattaaaagtaaagaaaac

SEQ ID NO: 336932 - DNA, 100 bp, Homo sapiens
ggagatggccctgagagaagctcactctgaggagtgtgaggaagaggctgtctgtgtcattatgtgtgcgtcggtcaagtataatatccggggtcctgcc

SEQ ID NO: 336933 - DNA, 87 bp, Homo sapiens
ctccacgaggctgccggcttaggacccccagctccgacccgcgaccatgcccaggaagaaggcggcggcggcggcctgggaggagcc

SEQ ID NO: 336934 - DNA, 85 bp, Homo sapiens
caagtttttcacttacaagggactgcgtatcttctaccaaggcttcagggatgacttcttagggggcaggggaggtagtcgccca

SEQ ID NO: 336935 - DNA, 100 bp, Homo sapiens
acccaaacattcggaacactgatgggaaatcagccctggacctggcagatccttcagcaaaagctgtccttacaggtcactttggtggcagttcatggag

SEQ ID NO: 336936 - DNA, 98 bp, Homo sapiens
atgtgatgacaagaaggagagatctctgctgcctgcattgagggaaagaattcagaattatgccccagctttcacaatgttgggttacttaaacgaac

SEQ ID NO: 336937 - DNA, 139 bp, Homo sapiens
tgtcattataccttcacccagcatttcatccctcgtcgaaaggattggattggcatctttagaaatgcagtaatagtggccttgtcttcaaaatcatgggatgtagagactgcaacagaattgcttctgagtaactgag

SEQ ID NO: 336938 - DNA, 78 bp, Homo sapiens
tttcttctggaaaactggaaacaaggtatattttcctggagtacgcgtcccctgcccacgctgtggatgctgtgaaga

SEQ ID NO: 336939 - DNA, 103 bp, Homo sapiens
aaaaccaacgcctggctcggagcagcagcctctgagatgaaggatttgggggcagagcacttggcaggtcatgaaggggtccaacttctcgggttgttgaacg

SEQ ID NO: 336940 - DNA, 100 bp, Homo sapiens
cctggaagacatttatgaaagcccaaatcacctgtacttggtcatgcagctacagcccacctgaggatattgaccataaggactcatatctcattacaag

SEQ ID NO: 336941 - DNA, 111 bp, Homo sapiens
gccaattcagcagctgagctgttgaagcagggggcagatgtgattgatctcactggagatgataaagatgatcttcagagagcaattgccttgagtttggccgaatcaaac

SEQ ID NO: 336942 - DNA, 50 bp, Homo sapiens
tcagggacgtagccatccagaggaaatgcttccagactgcacacttttac

SEQ ID NO: 336943 - DNA, 98 bp, Homo sapiens
atttctatagaatgtttgcgattgctgctttagattatccagggaagtactctgaagaggagagcaagagctcaacatcgggcatcacaggagacatt

SEQ ID NO: 336944 - DNA, 82 bp, Homo sapiens
gacagtcctcgtcagcactgactttcagctatggaatcggaccctgatgcttggtgtgacctgagtaaatttgacctccctg

SEQ ID NO: 336945 - DNA, 100 bp, Homo sapiens
gcaggagtaaggcaggaaaccgacgagaggacctcagctccaagaggaatggcttcttgtgggaaccaaacaaggacatcttcttctctataggattcgg

SEQ ID NO: 336946 - DNA, 96 bp, Homo sapiens
cggtgtggcagctgctctgaaccaggacctggacccggacccaaagtgccatgtctttaatggtgaatttggaagtgaaaagaaaactgctttgca

SEQ ID NO: 336947 - DNA, 83 bp, Homo sapiens
ctcggccgatgaagtgcagaggtttttttctggatctaggggtgtttattcctgctcctatggctcaagggatgagaagtgac

SEQ ID NO: 336948 - DNA, 75 bp, Homo sapiens
gcgacctgggcaccagcaggacccgaggccaggagccaggggcccagaaggggttcaactagatatagcttcaca

SEQ ID NO: 336949 - DNA, 74 bp, Homo sapiens
ggcgcccaagtccagaatccgcgcgcaccgcgcttctggcaagtatgaggcaaggatttcacagaagaacttgg

SEQ ID NO: 336950 - DNA, 74 bp, Homo sapiens
agcacaggcggcgttttctccttcggaacgggagcgtctagttttcggctttgtgagaaaccttaccatcaaac

SEQ ID NO: 336951 - DNA, 98 bp, Homo sapiens
aatcatttgacaaactgctttcccatagaggacctccggctagcctgtttcagccacctcgtcgtcctggccttggaactgttggaaaaccaattcga

SEQ ID NO: 336952 - DNA, 107 bp, Homo sapiens
cgagaaggagtcagtcagagagccttgggccagagttccaggggctctgggagtggctgccagtttccataccttccaccccactgctccccagagagaaatgtgac

SEQ ID NO: 336953 - DNA, 75 bp, Homo sapiens
atagactcatcaaagcttatgaaaaagttggatgtcagttaaggtttccaacatggctagatccatcagaaactg

SEQ ID NO: 336954 - DNA, 100 bp, Homo sapiens
agacaatagaaccagagccggaaccagcctttattgatgaagctgaccggttccctgatgtgttacctgcttctgctactgatccaaactgcagaacttc

SEQ ID NO: 336955 - DNA, 90 bp, Homo sapiens
agacaacactcgatggctggaggcctctgttgtaggcaagatcaacaaagactgacagacttcaaggatgcagctgctactaccggaggt

SEQ ID NO: 336956 - DNA, 100 bp, Homo sapiens
agtctacaaggccagagctttctggaagggggcaaatgagtctgcaggtcttaaacgacaaaaatgtcagcaatgaaaaaaatacagaaaattgcgactt

SEQ ID NO: 336957 - DNA, 100 bp, Homo sapiens
tgattattacaccaaattctgcatggggtggagaaggcagcaaagaacagtctgaacttgatcaagatttggatgatgttgaagaagtagaagaagagga

SEQ ID NO: 336958 - DNA, 136 bp, Homo sapiens
ggaatagtgggcatgacactgcccattgctcgggatctggctcccataggtatccgggtgatgaccattgccccaggaggttcttctgagtacaagatcaacaacaaagtggtccaactacatgagtacagtgagg

SEQ ID NO: 336959 - DNA, 75 bp, Homo sapiens
acctttccaaaggacgcgaccataactctaaaagcagcgtcaccctttacaccagaaagctggcgggcactatgg

SEQ ID NO: 336960 - DNA, 100 bp, Homo sapiens
tagaagaaaaggtgtacttgcaagaaacctcaggacttgagtaacagcaacatgcacttctcagaacttctggatgagttttcccagaacgtcttgggtc

SEQ ID NO: 336961 - DNA, 99 bp, Homo sapiens
taaactgaggacggggaagactcggacgagaaaacaggtcttattgcgggtaaaggaatcggaaatacagtacctgaaacaggagattagctccctcaa

SEQ ID NO: 336962 - DNA, 74 bp, Homo sapiens
cgacaagtactggagaactttaaactaaagctcatgatggagcagtccaagaagtcctccctcatggtggcccg

SEQ ID NO: 336963 - DNA, 80 bp, Homo sapiens
agaaagagtcaacagcagtggcaacaggcattttttactgtctacagaaacttattgtaattcatttttcctcactccag

SEQ ID NO: 336964 - DNA, 83 bp, Homo sapiens
ccaacagcgacttcaactactcctaccccaccaagcaagctgctctgaaaagatttattgctaaacatgggtgcatttttgga

SEQ ID NO: 336965 - DNA, 50 bp, Homo sapiens
tgtcccagctgccactgaagacctctatgatgtgatgccagccacttact

SEQ ID NO: 336966 - DNA, 89 bp, Homo sapiens
agaaagtcatcgatggcaccccctgtgaccagaacggcacggccatctgtgtgtctgggcagtgcaagctgtcaaagctcgaaaaacag

SEQ ID NO: 336967 - DNA, 83 bp, Homo sapiens
cttggactgagtcctgcaggacacagcccttgccagcatccagccatgggggatatgaaaaccccagattttgatgaccttct

SEQ ID NO: 336968 - DNA, 95 bp, Homo sapiens
catgaaacagcagttttggtagaagatgtggtacacactcagttaattaatctgattcagtatttcctgcagaggcggccgtcgatgaagaccct

SEQ ID NO: 336969 - DNA, 75 bp, Homo sapiens
ctctgactcacttctgactttagggaggacatgtatgcccaggactctatagagctactaacaacatctggtatc

SEQ ID NO: 336970 - DNA, 101 bp, Homo sapiens
gacctggaatcgcccaagtccctctactcgcgaggcaatgccaccgtagataagttggaggacttcatcaacaacattaacagtgtcttggagtccttgta

SEQ ID NO: 336971 - DNA, 75 bp, Homo sapiens
ggaggcacaacagaatgatgatgaagaaccactggattggagccaaagccttagtcaaactcatcaaaccaaaga

SEQ ID NO: 336972 - DNA, 100 bp, Homo sapiens
gcccacatgcccgctcacctgcgctgtgatgcctgcagagctgtggcttaccaggttgcagaagaaaaccccagccaagtccccagggaaggccgcatct

SEQ ID NO: 336973 - DNA, 83 bp, Homo sapiens
gccgcgcacttcgtcatgttcttcgcgccctggttcgagaacttgtcttggacaattgcaaatcaaatgatggaaaaattgag

SEQ ID NO: 336974 - DNA, 138 bp, Homo sapiens
tcctccccaccaccaccatctccatcacccaccaacaacaccacaataatccacagccaaggtactccaaagattcaggtttactcacgtcatccagcagagaatggaaagtcaaatttcctgaattgctatgtgtct

SEQ ID NO: 336975 - DNA, 74 bp, Homo sapiens
ctcccttggcgaaggagtctgtttttcaacccaggaagcgattgaacaggagaagcaagcaggcgaatcgtaat

SEQ ID NO: 336976 - DNA, 100 bp, Homo sapiens
cgaactcgtccagagggtcggcagcggcacctacggggacgtctataaggatgtacagttacccagcacgtgtacctcctcctcctcctattgctcgggc

SEQ ID NO: 336977 - DNA, 75 bp, Homo sapiens
ggggagcggcgttggaggccaccgtttccaggttggacgtgataagtatgagcctgcagctgtttcagaacaagg

SEQ ID NO: 336978 - DNA, 100 bp, Homo sapiens
catccataatgaagctgagcttggcgatgatgacgtttttacaggcagctttggaagaagtagaaggtgatgtggcagaattggaactaaaacttgataa

SEQ ID NO: 336979 - DNA, 50 bp, Homo sapiens
atggagttgccggagagacagcccagttaagtgggcagaccaacatccac

SEQ ID NO: 336980 - DNA, 74 bp, Homo sapiens
agagctttattaccagacatgatctttcaggaagctgttttaggttatgtgaaagagatgtttcctcatctcta

SEQ ID NO: 336981 - DNA, 50 bp, Homo sapiens
cttggctgcactgcactcccagtttttggctttcacccccaaccagtgac

SEQ ID NO: 336982 - DNA, 90 bp, Homo sapiens
tctgagaggaaagcgtttattgtagaggagtctagtaaaagccctaaaacgatgaagaaatttcttcataaaaggaagactgagagaaaa

SEQ ID NO: 336983 - DNA, 83 bp, Homo sapiens
gtgactgctcaatggagagaaggaaagtcaatcgtaggaagaacacagtacaggagaaactcccatgtatggaatcccactgt

SEQ ID NO: 336984 - DNA, 74 bp, Homo sapiens
tttgtttctccaaggtttgaaaagcagctggcctgcaagactgcttttcaggaagccttggacgctgcaggtga

SEQ ID NO: 336985 - DNA, 100 bp, Homo sapiens
aaggaaagaaatggaagtctctccttctgcagagcagcttgtccagctgcatcttcctcccgtgaggctggccgagctccacgctgatctgaagatacag

SEQ ID NO: 336986 - DNA, 75 bp, Homo sapiens
cagagcgcctgcgaccccagtcggtgctccggggaggtcacctgacgaggagatttacttgcgacaacaagacaa

SEQ ID NO: 336987 - DNA, 100 bp, Homo sapiens
aggtcttctgtgaggaatctggattgtcacctttgctgcaaaaaattacgggctgcagcgtgtgttgcaagtcttcttggaatcagctgcaggacctgtg

SEQ ID NO: 336988 - DNA, 74 bp, Homo sapiens
gaagcctgggagtggcggtggaggtgtcatggagaaactccagctgggcccagagattctgcagcgggaaaatc

SEQ ID NO: 336989 - DNA, 75 bp, Homo sapiens
cagccctgtgtgacaccaagataagtaacttcgtgccctcgtgaggctggcatgcaggatggcaggacagcccgg

SEQ ID NO: 336990 - DNA, 100 bp, Homo sapiens
gtaaaagtgaaattaaataggaagatcatcagtcaaggaagacccactggagatcccacagtgttttgttcgccccacggaggccaagaaagccgcagat

SEQ ID NO: 336991 - DNA, 90 bp, Homo sapiens
taggacatgatccaggaagagcagtaagggactgagctgctggtccagcccagaatcaaatgcaggttccatctggatatggattgcatc

SEQ ID NO: 336992 - DNA, 75 bp, Homo sapiens
cacgtgcagacatctacaaccttcgatctcctgacgagctaatggaggttggcaggatgctactaccccttcatc

SEQ ID NO: 336993 - DNA, 83 bp, Homo sapiens
ctgcgctcccctaggagtgctgagcccgcggaaccgcagccatggacattggctccctggattatcaagagtttgtagttgac

SEQ ID NO: 336994 - DNA, 100 bp, Homo sapiens
gcagctccactggaagaggatggagaacctcaaggtggtggaggtggatacagcagtcggagaacatctggcagagacaaatacggaccacctgttcgta

SEQ ID NO: 336995 - DNA, 51 bp, Homo sapiens
tgtggtgcagcacagtgagggggctgcgtccagttcctgcaatattattac

SEQ ID NO: 336996 - DNA, 100 bp, Homo sapiens
ggagcacttcctattccactggattgggaaagaccatggcagcctcctttggaaaatctggcaactgtggaagagactgttgttcgtgacaaggctgtgg

SEQ ID NO: 336997 - DNA, 100 bp, Homo sapiens
gcgactgtgactctgctgcaagttccccagatcttgaggcatagcgcgctggctaggactccagtaccgtgaagggaggcagtgagagcagacatctgtg

SEQ ID NO: 336998 - DNA, 96 bp, Homo sapiens
ggattcattatgaacaaagaagtctcccaggttttagctaaagaagatactgaggcagctattcaatcaatattatacaaagaaaattctgtaatt

SEQ ID NO: 336999 - DNA, 100 bp, Homo sapiens
accaagatcgagcccagcgtcaacttcctcaagtcgcccaaagatgcctgtgaggagccaccaacatttgaagctatggagctcattggtaaaccaaaac

SEQ ID NO: 337000 - DNA, 121 bp, Homo sapiens
cttgctgagaaaaataccacctttgatacttttaaggcttctctcgtcaaaaatggtgcagaatttacggtactctgtggatatccccttggacaaaactgtcgtcaataaggatgtcttc

SEQ ID NO: 337001 - DNA, 133 bp, Homo sapiens
gtagcgggagcccggccggagctgggtctggagacgccgtggcagcctgaacggagtgtgcgacggattgggagctatacacagaatgggattttacatatgctggacagaaataagagaatcaagccccggc

SEQ ID NO: 337002 - DNA, 83 bp, Homo sapiens
ccgacctcgacgtcttgcctgtgtcccacttgttcgcggcctatagtcaccttcaggccattcagaggaggaaagagagggga

SEQ ID NO: 337003 - DNA, 75 bp, Homo sapiens
ggctggaacttgccctgtctcctcgcagatgaggtttgcctgcaatgagatttcattctctacatttaaaggaca

SEQ ID NO: 337004 - DNA, 75 bp, Homo sapiens
cacaaaatggcgccctacagcctactggtgactcggctgcagtgtatccaaagtgtgtacatcagtaagatcata

SEQ ID NO: 337005 - DNA, 82 bp, Homo sapiens
gcccgccgtggcgccgcagacctccatcctatgatatcatcaagttgaatcgaaaggaagggaagaagcagaattttccaag

SEQ ID NO: 337006 - DNA, 82 bp, Homo sapiens
gcctgccgttggctatagcaaatgccccagttggtgttggtattaggagatctgcacatcccacaccggtgcaacagtttgc

SEQ ID NO: 337007 - DNA, 83 bp, Homo sapiens
tccagagacaatggccccgatgggatggagcccgaaggcgtcatcgaggcttacagatactttttacactcttacaaaatgtt

SEQ ID NO: 337008 - DNA, 100 bp, Homo sapiens
aaaggactcttctaaaaggatatgtgttgctaatacccatctttactggcatcctaaaggtcctaggcctacttacaagcctccagtctcaaattatcca

SEQ ID NO: 337009 - DNA, 101 bp, Homo sapiens
caaggaaacatcttttgacaagatgtcacctgaaagtggtcacagccgcatctttgaagtctcagggtggacatgatcacagtcaccaacatgcacatggg

SEQ ID NO: 337010 - DNA, 50 bp, Homo sapiens
aagtacattctcaggtggagacctgttggcatggatcctattagctgtgt

SEQ ID NO: 337011 - DNA, 90 bp, Homo sapiens
cttttctatatggattacaatttgatcgctgggaattctccaccttaaagaagtatgaccctcaatttggcgatgccttctggaacagca

SEQ ID NO: 337012 - DNA, 83 bp, Homo sapiens
caagagcgcaggcagtggccacaagagcgaggagaagcgagaaaagatgaaacggaccctgttaccagagagaacttctctat

SEQ ID NO: 337013 - DNA, 100 bp, Homo sapiens
ccggtgctcttgcaactgacgcagtcactgcagcactggtggaacttgaggttcatggaatccgagctggacctaaatgacatcattcaggagatgcacg

SEQ ID NO: 337014 - DNA, 85 bp, Homo sapiens
cgactgaggcacagagtgaaggggaggtgccagcccgcgaatccggccggaggtacatgtcccagagcaagcacacggaggcccg

SEQ ID NO: 337015 - DNA, 91 bp, Homo sapiens
gtaaagtcgagtatctggtgaagtggaaaggatggcccccaaacaaattgtggctactaatttgccccctgaagatcaagatggctctggg

SEQ ID NO: 337016 - DNA, 90 bp, Homo sapiens
tggcggaggctgcgccgatgaacctgactgagctggcacagtgatgtttgagtatggaatgcggcttggcagagaagttcgaactctccg

SEQ ID NO: 337017 - DNA, 83 bp, Homo sapiens
cgggcggcgaccggggcctgggtccacgccgagggcaggacgaacttcaccagacctgcctagagctggaacgttacctccag

SEQ ID NO: 337018 - DNA, 100 bp, Homo sapiens
cttgatctgtgaaagcgggcgttttggaagataccggaagtagagtcacggagaggtcacacagcggcagtgataaagagcacagggatgtggagagatc

SEQ ID NO: 337019 - DNA, 75 bp, Homo sapiens
caaggacaaggccacagagtcggggtcttcacgcttcggaaccaaaaagaagcttcccagagccggggccaggag

SEQ ID NO: 337020 - DNA, 100 bp, Homo sapiens
ctgccagttgaagaactgttgccctctgcccctggcttcgaggaggaggaggagctgctttccccatcatctggaagcatgcttgagagttcaaaccggc

SEQ ID NO: 337021 - DNA, 90 bp, Homo sapiens
tggattttcgtctaaaaataacaagaatgggaggagaaggttcaattttgtggggaaattgcttggaccaagaggaaactccttgaagag

SEQ ID NO: 337022 - DNA, 100 bp, Homo sapiens
gcacttcgcattttggcattgacatttaattttagggtcctttatatagaagggagagtaggtactatttcttgatcatccaaaaaagaagattcgggac

SEQ ID NO: 337023 - DNA, 100 bp, Homo sapiens
tagcactacaagaaatatttgatggtatacaaccaaagcctgttgattgcatactgtagaagatttgatgttcagactggttcttcttacatatactatg

SEQ ID NO: 337024 - DNA, 96 bp, Homo sapiens
tgttcttcatcggtttcaccgcgctcgttatcatgtggcagaagcactatgtgtattctggaggtcgaatggtcacatatgaacatctccgagagg

SEQ ID NO: 337025 - DNA, 74 bp, Homo sapiens
cctggagtcaggtggcggtgcagaaggtcaacgccgcaggcacagagattcagttgtggaaattctttttgaac

SEQ ID NO: 337026 - DNA, 50 bp, Homo sapiens
accacccaccatgcctatccaggtttgtcaagggctatttaatgagttac

SEQ ID NO: 337027 - DNA, 145 bp, Homo sapiens
gggtactgcttgctcctcggcttgcatttgtttctgctgaccgcgggccctgccctgggctggaacgaccctgcaaatactggcccctctttgttctatttttttacatcctttcacctattccatactgcatagcaagaagatt

SEQ ID NO: 337028 - DNA, 100 bp, Homo sapiens
ccaggatcgaggagctcagggccaaacctctaatggagttgattgagaggtctagggacaggaagatggttggcgacgtgaccggggcccaggcctatgc

SEQ ID NO: 337029 - DNA, 75 bp, Homo sapiens
ctggcgccgggtcccgcggggaaagagtgctacctggagggtgaccagacgagcctgtaccacgcagccaagggg

SEQ ID NO: 337030 - DNA, 90 bp, Homo sapiens
cagcctcctgagtagctgggagccatcacgcccagctagccatcttctaattttcattccttcaaagaacaccaccgatagccacaccga

SEQ ID NO: 337031 - DNA, 83 bp, Homo sapiens
attcagagcgcgtatggagtggaaacgcttgtagggtttcaccaggatttccatttaaacagggttaatttggaagaatcttc

SEQ ID NO: 337032 - DNA, 108 bp, Homo sapiens
actttcttatcgccagcaggcggccaatctgcttcaggacatggggcagcgtcttaacgtatcaaagacacagctctccccttctatcaagcgcaagagagaagtcag

SEQ ID NO: 337033 - DNA, 75 bp, Homo sapiens
aactgggcgaagagggtgccaggaggactgacaaatggtagtggtcgatatatctctgcagcacctggagcagaa

SEQ ID NO: 337034 - DNA, 83 bp, Homo sapiens
cagaacagaaaaatgacattgagggacaatgaggaaacctggataattaggtctctaattaacagaagatggcaaagcccagc

SEQ ID NO: 337035 - DNA, 76 bp, Homo sapiens
gtcaacagtggacgctgacaccgtcactgagctggcccagcttggagaccctctggaggctttcccagtgttcaag

SEQ ID NO: 337036 - DNA, 75 bp, Homo sapiens
ccataattgagaagaaacttgagaggttttatgacttacctagtggagcctttatttacagaatgggccaggttt

SEQ ID NO: 337037 - DNA, 100 bp, Homo sapiens
cacgataaatttggattaaggaacagcgagctgtttgacccctttgacctcttcgatgtgcgagactttggaaagtctgaatcaccatcttattctcctc

SEQ ID NO: 337038 - DNA, 100 bp, Homo sapiens
ccgctccagccgcccgcgggccagcgcaccggtcccccagcggcagccgagcccgcccgcgcgccggagccaaaaacctgtatatcatctccgtgaaggg

SEQ ID NO: 337039 - DNA, 95 bp, Homo sapiens
attcatctgacacagagatggaagacatgattgctgaaggcctcagttgcttgtattactgaaactagatgaagacttacatgtcaagcatcctc

SEQ ID NO: 337040 - DNA, 83 bp, Homo sapiens
ggccatgctctggcaaaaacagtactgggatttaatgaatttgtctgaaaaacatgataagataccagaaatctgggaaggcc

SEQ ID NO: 337041 - DNA, 75 bp, Homo sapiens
ggccacaatcttcaatgagtaaacatattcctgactgagcagggggaggaacatttaagctgatggaagtggaag

SEQ ID NO: 337042 - DNA, 89 bp, Homo sapiens
gcaacaccacctggggggagccaaacagaatgtgaggaaattatcaggaaaggaggtgaaacatctgaaatgtatctcattcaacctga

SEQ ID NO: 337043 - DNA, 98 bp, Homo sapiens
tctagctattgccttattttttctcatggatgttcttcttcgagtatttgtagaaggaaatgaccatggttgacacagagatgccattctggcccacc

SEQ ID NO: 337044 - DNA, 100 bp, Homo sapiens
ctacacagtgtcggaccccaggactcaccccaagggctacaccgagtacaaagtaaccgcgcagactcaccccacacagaccgcgtttctctccagtgtc

SEQ ID NO: 337045 - DNA, 75 bp, Homo sapiens
ccagctcgacaaagatggggttgtcctctttaagaagatgtgaagttcatttccaatccgccctccatggtggca

SEQ ID NO: 337046 - DNA, 50 bp, Homo sapiens
gcaaacacgcccatttttccagccgaaagattcttctaacagagaaaatg

SEQ ID NO: 337047 - DNA, 50 bp, Homo sapiens
ggaaaatggagcccttcaccaatggaattgaatgatctggcacgggaccc

SEQ ID NO: 337048 - DNA, 74 bp, Homo sapiens
agatcagaggtagtcggacctttcccgctggcgcgcagcctcagctaggatgagtaagagatacttacagaaag

SEQ ID NO: 337049 - DNA, 90 bp, Homo sapiens
aaaaccagttattgaatatcaagaggaggagttgttgcttctgcagaaagccgtcattacacctgattttgaaaaaaaccactgtgttcc

SEQ ID NO: 337050 - DNA, 100 bp, Homo sapiens
agctgctggctaccaatattctactttctgtctctatgaatgtgactaccctggttacctcatatgcctcattgctacgatttcagagtaccctggtaat

SEQ ID NO: 337051 - DNA, 100 bp, Homo sapiens
ggaaacttgatgcttctgggccaccatttgccagggcctcgctcgaggtctatgttaacaatgaatgggcaaccagtgttggggaaggagggagctttgg

SEQ ID NO: 337052 - DNA, 83 bp, Homo sapiens
caacaagaggacccaggagaaattcgccctcaaaaattcagaaggagctggcggacatcactttagaccctccacctaattgc

SEQ ID NO: 337053 - DNA, 103 bp, Homo sapiens
ctcctcccagtgacgggtctggagtgcgtgggggaccggctgttggcggaggctgggaggcggcagaatgcagccagaggagggcacaggctggctgctggag

SEQ ID NO: 337054 - DNA, 75 bp, Homo sapiens
agatgatgatgacattgacctctttggatctgatgatgaggagtttaagaaaacccctcctaagatcccttataa

SEQ ID NO: 337055 - DNA, 83 bp, Homo sapiens
cagaagccgagttcaacatcctcctggccaccgactcctacaagcattagtgaccagaaggatcccaaggatcgaatggttca

SEQ ID NO: 337056 - DNA, 75 bp, Homo sapiens
ggcgaagctggccgagcaggctgagcgatacgacggtgactctgacatcattagaagcatgccagaacagactgg

SEQ ID NO: 337057 - DNA, 50 bp, Homo sapiens
aaagattattgaagcaagactaaagctaggtcttgactccactaacgggg

SEQ ID NO: 337058 - DNA, 96 bp, Homo sapiens
ccgtcaggcactgaggaggccgagagatgaggccggagcccaccaagttctgggaaagctgagctcaatgtgcagcaatggatgacgacagcctgg

SEQ ID NO: 337059 - DNA, 74 bp, Homo sapiens
ttcttgtttgtggatcgctgtgatcgtcacttgctgaccctctggtgggcagcatcgccacacagtacatgacc

SEQ ID NO: 337060 - DNA, 75 bp, Homo sapiens
ctgttgctctgcatcctcaccagcatttggtgtgttccagtctcatcagattttccatgtcctggtggtggcagc

SEQ ID NO: 337061 - DNA, 100 bp, Homo sapiens
gccaaggaaaaactggagagcttcatcaaaaatagtgatagctttgataaatttggactgagcaacaaatttgaatctgaattcccttcttcattaactg

SEQ ID NO: 337062 - DNA, 112 bp, Homo sapiens
ctggagcctcagttggaagcagccgatccagcctgcggagcctgtggggcagcctttttcacatagctcttggctgtaggattgccccactccaaaaaccagtgtgtggagg

SEQ ID NO: 337063 - DNA, 100 bp, Homo sapiens
gacacttttcttcagaagctggtcgccgccggcagtactatactggcaattgctggagaagattttgcaattgttgcttctgatactcgattgagtgaag

SEQ ID NO: 337064 - DNA, 100 bp, Homo sapiens
aaggggacggcctatgacagcagtgccgactggttctccctgggctgcatgcttttcaaacttctgagaggatatcagttttagagaatgtggcgtggag

SEQ ID NO: 337065 - DNA, 74 bp, Homo sapiens
gagcgacaagccgctggcagccgcggatctcaccgccgctcaggaagttccacctggtgccaagcatcaacacc

SEQ ID NO: 337066 - DNA, 75 bp, Homo sapiens
ggcctggccagagaactctcggatgagatccaagtccagagacgagttgtactgctgtcacaggaaatggacgct

SEQ ID NO: 337067 - DNA, 100 bp, Homo sapiens
ccccaggggagttctctgtgtctgtgaaggctttgttcgcgggggtcacagctctcatggctgcagctagcgtgaccccccctggctccctggagttgct

SEQ ID NO: 337068 - DNA, 50 bp, Homo sapiens
caaggttcgactccagctgcaggagtttgtagtctatcatctggaaaatt

SEQ ID NO: 337069 - DNA, 75 bp, Homo sapiens
cagggcacggcgtggaggaggaaccagaccgcggccagagcgttcaggtctacttccccagcaggacagcatcat

SEQ ID NO: 337070 - DNA, 75 bp, Homo sapiens
tggcctatctgaagattcagaagcgaagcatgaagcggaaggcactattcacctgccccttcaacggggactgcc

SEQ ID NO: 337071 - DNA, 76 bp, Homo sapiens
ggagcttctcagaagacagagggttttcttttgaggacccagatgatgtggtaccagttggccaaagaagagcctg

SEQ ID NO: 337072 - DNA, 74 bp, Homo sapiens
tttaccctcattggcgcttctctcctgcagtccgcctctgggccctgccggttgttgatgagcgtgaatttttt

SEQ ID NO: 337073 - DNA, 76 bp, Homo sapiens
ggaacatggcgttgctggtgcgagtccttgagacagaagaaattctggcagatgtgctcaaggtggaagtcttcag

SEQ ID NO: 337074 - DNA, 50 bp, Homo sapiens
tgttatggatcaatgacaacagctctagaggacaaaatcccagtccttgg

SEQ ID NO: 337075 - DNA, 74 bp, Homo sapiens
ctctgctgaccttgtgccttggattctaacattttcagagaaccttttggaaagaacaagcctacttcaataaa

SEQ ID NO: 337076 - DNA, 100 bp, Homo sapiens
cccagatgtctgacagccctgtgtgacaccaagataagtaacacggcaactctgtaccctggtgtggtttttggcatctgcttcgtattgaattgcttca

SEQ ID NO: 337077 - DNA, 100 bp, Homo sapiens
tgatgtggatgatgccaaagttttattagggtgtggagagaagctcgggaccgcatcgtgggcttccctggccgttaccacgcatgggacatcccccatc

SEQ ID NO: 337078 - DNA, 90 bp, Homo sapiens
caaacactagtgtctcccctgcttcaggggacacccactgtcagagtgaacgacaaaggagctctttgttcaatgcctagccacctattc

SEQ ID NO: 337079 - DNA, 87 bp, Homo sapiens
gtaattaaaggaaatctaaagcatgaacaggcatctaatgttcttagtgacattagtagatggcatagaatttgcttttaaagagcc

SEQ ID NO: 337080 - DNA, 90 bp, Homo sapiens
tttttcaacaagttggagtaagcatgcaatcggttgatactgcctctccaagcccaatggaaacatctggatgtgcccctgcagaagaag

SEQ ID NO: 337081 - DNA, 100 bp, Homo sapiens
tgattacaataaacaggacctttttgaggagttgccatgaggactgtcaggctgcctttaatattggttgggaacaaatctgatctggtggaatatagta

SEQ ID NO: 337082 - DNA, 90 bp, Homo sapiens
ggtgactttcaacggcagaccgtctcctgagcgccccaggtagaatttcaaatctattatcctcccagtccacaacgctgaaccgtggct

SEQ ID NO: 337083 - DNA, 101 bp, Homo sapiens
ccgaggcacggacaacatcaccgtgaggcagggggacacagccatcctcaggtggctgtgaaaaacaatatcgatgtcttctacttcagctgcctcatccc

SEQ ID NO: 337084 - DNA, 83 bp, Homo sapiens
cgcgagtgggagcaccaggatctcgggctcggaacgagactgcacggtaagaatgattgatgttggctgatattggagtgctc

SEQ ID NO: 337085 - DNA, 80 bp, Homo sapiens
ggatccagtgttcaccatcctggccccggaagcaggttcaggagaagtggcacctggtggaggacctgtcgcgactgctg

SEQ ID NO: 337086 - DNA, 90 bp, Homo sapiens
atttgttaaggattccaagtaactcttatttgaaggacagaataacgggctcccagattcacaagccccaccaagaggatcaccccagga

SEQ ID NO: 337087 - DNA, 100 bp, Homo sapiens
tcatgggaaattgtattctccgagtcagattggagcatttgtgttgatgaagatgaaagagactgcaggtcaagtttacccatgggggaactggttccag

SEQ ID NO: 337088 - DNA, 82 bp, Homo sapiens
ccgatttaaagctgagctgcgaggaaaatggcggcgggagatccacatgaagaccatgcccgccgccatgttcaggctcctc

SEQ ID NO: 337089 - DNA, 100 bp, Homo sapiens
gcgtggtgtggccctgttacgacagctgcccgcgggcccagcctgacgccatctcacgcctgctggagctgcaccagtctgctgtcaagtgttcagtggc

SEQ ID NO: 337090 - DNA, 75 bp, Homo sapiens
ccaaatttgaagcagaacgatcaaaagccaagtggcaaacgagtctcgctgtgacaaggacctggatactctcag

SEQ ID NO: 337091 - DNA, 75 bp, Homo sapiens
cagcttgtgcgccgggtggagattctcagtgaaggaaatgaagtccgttgcagtccatgagctgggaaaggaggc

SEQ ID NO: 337092 - DNA, 50 bp, Homo sapiens
gcggagggagccccagacacgcctcctccagctggtgatctcgggtcccg

SEQ ID NO: 337093 - DNA, 80 bp, Homo sapiens
ggggatgatggggccctcaagatctgggaccttcggcagttcaaggttttaaaatcaaagatgggaaaatcggagaaaat

SEQ ID NO: 337094 - DNA, 100 bp, Homo sapiens
caaagcccagataaaccaaaggaattttgaagtcaccactgaggaggaattcaccctgttcgtctatggaattagaaggtgacgaggagggagaagacga

SEQ ID NO: 337095 - DNA, 100 bp, Homo sapiens
ggagacgtacctttaccacatagacaaagggacagccttgtgaagatctttgtgaatacccgacctcgcaagctccagagactacaataattcacttgcc

SEQ ID NO: 337096 - DNA, 75 bp, Homo sapiens
gagccacttctcaccgagatgattcatgaagtggcaggtgtcacagctttagcctgtggaatgatagcagtaggg

SEQ ID NO: 337097 - DNA, 85 bp, Homo sapiens
gcatggaccccgccgtcgtgcaccctgagctcaatggggctgcctatagtttcctcactgcttggaggaagatgagaattctcag

SEQ ID NO: 337098 - DNA, 75 bp, Homo sapiens
cgccaatgtggacggactcactgccctgcaccagtcagaaattggctttggaaaaatggaaacctacatcaaatt

SEQ ID NO: 337099 - DNA, 90 bp, Homo sapiens
cgagggtctcggcctcgcggtgcagaacaccgaaaagctttggaggatttcactcttgataatattctttctcatatttattattttcgc

SEQ ID NO: 337100 - DNA, 90 bp, Homo sapiens
gttgaaagtgaaatgtcatgcctctgaaaatgaagctccgacagttagttaatatgtgcatcaacccagatccagagaagcgaccagacg

SEQ ID NO: 337101 - DNA, 141 bp, Homo sapiens
cccgggcgccgggcctcccagccgacatgtctctagtggcggaagccttcgtctcccagattgcagtcataccctaatgatcccagcaagataatgtcctgtcttctaagatgtgcatcaagcctggtacatactgaaaac

SEQ ID NO: 337102 - DNA, 75 bp, Homo sapiens
taatatttatggagcatatattatggaacacagataacctttttgaatggcacttcacggttagagggcccccag

SEQ ID NO: 337103 - DNA, 78 bp, Homo sapiens
cgacattgacaatgatggctttgaaggtgttgacttcaaaatcaaaactgtagagctaagaggaaagaaaattagatt

SEQ ID NO: 337104 - DNA, 100 bp, Homo sapiens
acggcgagcgcgagcggcgcgagaaatgtcacaccatgtctgaccggaaggcagtgatcaagaacgcagacatgtctgaggacatgcaacaggatgccgt

SEQ ID NO: 337105 - DNA, 75 bp, Homo sapiens
ccagccctcccctcgggatccctcaccccagccttcttcaccgcacaggtttggaaagaaatcccggcctgcaat

SEQ ID NO: 337106 - DNA, 100 bp, Homo sapiens
tagagattgtgaagaagaatttcgatctccgccctggggtcattgtcagagctgtaggtaaaacttgcctactgatcagttacacaaccaatgcatttcc

SEQ ID NO: 337107 - DNA, 90 bp, Homo sapiens
cagctgttcattggaggtgtcactggatggatatccattaccaaaacttgacatgaacttctcattggagaatagagaagagccatgggt

SEQ ID NO: 337108 - DNA, 50 bp, Homo sapiens
acatcttgggggagctctttttggaatccacataaagaagatccctaata

SEQ ID NO: 337109 - DNA, 97 bp, Homo sapiens
ggtccctcagaatatgactctctgcctgaaaatagcgagacagttattcaagcggagaaatgttgctacagcagaagaagaaacagaagaagaagtt

SEQ ID NO: 337110 - DNA, 110 bp, Homo sapiens
ggggccacctgctatgccatgtttgtcggccatgccaccgctttaatccagtctctggattcttcgaggcggcagtatcaagagaagactttgaataatgagatgagtac

SEQ ID NO: 337111 - DNA, 99 bp, Homo sapiens
gcaatcttcaggaaagtaagaggtttttgaatcagagccgacaggcacttgaattgaaaatggaaaaccctactgctggtggtgctgcggtgatgaggc

SEQ ID NO: 337112 - DNA, 50 bp, Homo sapiens
gtggaacctcaggggcccgcgttagctgttgacagtgtcttgaagaggat

SEQ ID NO: 337113 - DNA, 82 bp, Homo sapiens
ggggaggcaagatgatccaccagcggttccatcctacacttggggagtgcatccgccccaacccttttccccctcgtctcct

SEQ ID NO: 337114 - DNA, 82 bp, Homo sapiens
ggaatggggctgatgggcttcatcgtttataaaatccgggctgctgatcccattccttctggtctgatggaagaatgtgtgg

SEQ ID NO: 337115 - DNA, 100 bp, Homo sapiens
tcaatatctgtcttcggtggactccttcggcagtccacccaccgccgccgcctcccagggcaggatagcgtgtgccaatgtcctcagtgacctctatgca

SEQ ID NO: 337116 - DNA, 82 bp, Homo sapiens
tcgaattttagtggacaatctgtgtgatatggagatggtcaacaaagtgaaggggaccatctggaccaagatttggacctag

SEQ ID NO: 337117 - DNA, 100 bp, Homo sapiens
ccggggtcccgccaccaccgcgcgcgggattttttatcaagcagaaatgcatcgaacaacgagaatcaagatcactgagctaaatccccacctgatgtgt

SEQ ID NO: 337118 - DNA, 82 bp, Homo sapiens
acggactacaaccagggcctggtgctgcctatgctgctgatgcaaggaatcccctgggctcccgtccactccactgctgacc

SEQ ID NO: 337119 - DNA, 96 bp, Homo sapiens
tacctgcagaaggtctctggagacatcttcagcagtctcttgcatggcaccaagaatgttaccaattcaagcagtttaagattgccaagacaaaat

SEQ ID NO: 337120 - DNA, 51 bp, Homo sapiens
gagtattgccgcggtggaaatggaggtggatccataaagaacccagccaac

SEQ ID NO: 337121 - DNA, 87 bp, Homo sapiens
gatctccctgacatgcaagaacagggtccagatggcccactgcgtgaccttggttcagctgtccatttcctgtgaccatctcattga

SEQ ID NO: 337122 - DNA, 83 bp, Homo sapiens
cgcggcggcagcagcagtgagagatgagcgggatcgtgtgcagaagaaaaccttcaccaagtgggtcaacaagcacctcatca

SEQ ID NO: 337123 - DNA, 100 bp, Homo sapiens
ggcacagctcagtgaggagaagaactcggctgtacttcgcagccgtgacctgcagctggcggtcctgtcggcggcaagcgagcagcctgcgcaggtggct

SEQ ID NO: 337124 - DNA, 127 bp, Homo sapiens
acatggaggatttgggagataaagctgtgtactgccgttgttggaggtccaaaaaggccgatgctgctaccagctttctgagagcagcaagatcaggtaacttggacaaagctttggatcacctgcg

SEQ ID NO: 337125 - DNA, 83 bp, Homo sapiens
gtcatctggggactaagcaacaggtgtttcaaggaactaattctctgggaaagtgatgaccccatggcttatattcactttac

SEQ ID NO: 337126 - DNA, 100 bp, Homo sapiens
gagagactatgtggctcccacagctaatttggaccaaaaggacaagcagtttgttgccaaggacactcatgaggaccatgatacttccactgagaataca

SEQ ID NO: 337127 - DNA, 101 bp, Homo sapiens
gtgcaggcagccctggtgtgggagcggccagctaggagcgctctgtggtgcctggggctgaacgcggctttctggcatggtagcacgcgcctataatccca

SEQ ID NO: 337128 - DNA, 75 bp, Homo sapiens
cagatacaaacttggattttttccagtctgatccttttgttggcactatcatggtgaacttacttcagattgtgc

SEQ ID NO: 337129 - DNA, 100 bp, Homo sapiens
ctgagaaggacgcgcagtccatctctctcagggaagatcagttttcctgccatccaggctgctccctccttcagcaactcattcccacagatcttccgag

SEQ ID NO: 337130 - DNA, 100 bp, Homo sapiens
cacgattacagggatgagcatttggactttatccagtcacacctgcggaggttctgccttcagtcattgtttgtgctccccaaacctaaagtgatctcct

SEQ ID NO: 337131 - DNA, 90 bp, Homo sapiens
aaaaggagaggcgcttcttccagctacagatgtgcgagatataagagttcggaccgcccagcacacaaggtcagcatgctgctcctctgt

SEQ ID NO: 337132 - DNA, 98 bp, Homo sapiens
gagccagcctgctaggggctgaattctgactcagccatttactaactgtgtgaccttagtcttgaatccagataatagttttgaaatactggttgacc

SEQ ID NO: 337133 - DNA, 51 bp, Homo sapiens
tgtgtttgaaacaaacattcgagatcctctggaccttctccatctacctgg

SEQ ID NO: 337134 - DNA, 51 bp, Homo sapiens
cctgaagggatcccagtggctgaggttgaggtccagttactgcaacatcag

SEQ ID NO: 337135 - DNA, 75 bp, Homo sapiens
gatcttcaacaagaggacccaggagaaattcgccctcaaacgggcaggctctggatctcggcgggatcaggccag

SEQ ID NO: 337136 - DNA, 100 bp, Homo sapiens
aattgcatttttagaacctagagaaatcacactgcctgaggccaaagataagcttgtactcccagagtacctcatccacgctttcttctgtgtcatgttt

SEQ ID NO: 337137 - DNA, 75 bp, Homo sapiens
aaaagaagatatgtatgacgagattattgagttaaagaaggacccccagacgtccaggacgctgacattgatctc

SEQ ID NO: 337138 - DNA, 83 bp, Homo sapiens
tggggccagggaaccctggtcaccgtctcctcagtcaccacgttctgcgcttttccgagtcggacatatgagcagcgtggagc

SEQ ID NO: 337139 - DNA, 100 bp, Homo sapiens
tgcgatagctgcaaggaaggtggagatctcctgtgctgcgaccactgcccggctgccttccacctccagtgctgggctaaactggccagcaccatagcag

SEQ ID NO: 337140 - DNA, 49 bp, Homo sapiens
cagctacttaagcgccacgagaagatacaaactggactctcaggacaaa

SEQ ID NO: 337141 - DNA, 98 bp, Homo sapiens
tgggactttcttcgttgccatgaggaaagaattctccgagaaatcaggacctttgatatttaggaaaactatgtttaactctacagatatcaagttat

SEQ ID NO: 337142 - DNA, 87 bp, Homo sapiens
acatcctctgccacatcttcctgacccgcttcaagaagcctgctgagttcaccacagcggttcctcagtgactatggcctgcagtgg

SEQ ID NO: 337143 - DNA, 98 bp, Homo sapiens
gcctgttctcgggctgtttggcggagtgtgaacatggctacgcctcttcattcccgtccatgccgagcccccgactgcagcattcaaagcccccacgg

SEQ ID NO: 337144 - DNA, 80 bp, Homo sapiens
tcgatcagggcatacatctttcttcgacaaaggggtgagaactctgtctcagtcgacgggaagtgcagtgactccacgct

SEQ ID NO: 337145 - DNA, 100 bp, Homo sapiens
aaattatgaccaagtacctcaccccaaagggtttggaaatcccttgtctccaggttgctgggattgacttcttgctcaattgaaacactcattcaatgga

SEQ ID NO: 337146 - DNA, 96 bp, Homo sapiens
gcatgccctattctgtgggcttccgcgaagcatagaatgtcaagctaaccaggcgtccgctacttcagaagagtgtactgtcgcatggggagtctg

SEQ ID NO: 337147 - DNA, 74 bp, Homo sapiens
ggcatcgtcggcctcaacatgaatggctactttcacgggaaagatgaaactgcggttctccacgaggaggcaag

SEQ ID NO: 337148 - DNA, 60 bp, Homo sapiens
gtcctgacactgtccataaatgtgcagaggtttggactggtctgaagagagcggagagga

SEQ ID NO: 337149 - DNA, 83 bp, Homo sapiens
ctttatcctggtcatcttctatttccaaacagataatcaccagaatgggagtgaatgacttgtggcaaattttggagcctgtt

SEQ ID NO: 337150 - DNA, 100 bp, Homo sapiens
atttaatggtgccaatgatgttggaggatacctgtgctcttccatgtggcctatattttaatcaaatttgcaaattctcctcgccctgatctttgggtct

SEQ ID NO: 337151 - DNA, 100 bp, Homo sapiens
gcgcccggggcgcgcccaccgcgccgcatccatgttcgaacaccattcgcttttcacccaagatgatttgatgtcttataaaactctgatgaaccatgat

SEQ ID NO: 337152 - DNA, 100 bp, Homo sapiens
tcgcagaattaccgcctcttctttaagtttatgcgaattccatgtgtggatgctggattgatttcaccactggtgcagctgctaaatagcaaagaccagg

SEQ ID NO: 337153 - DNA, 90 bp, Homo sapiens
tctggtggtcgtgaaactgcttcccgaggagcattggaagccctttctaaggcacaaaatgatgtgatggaaatgaagatgcagtcagag

SEQ ID NO: 337154 - DNA, 85 bp, Homo sapiens
ggaagatggcgaaggtctcagagctttacgatgtcacttgggaagatccagacatttaatgtggatgcaccatgccagaccgtgg

SEQ ID NO: 337155 - DNA, 82 bp, Homo sapiens
ctaccccctaaagcccctgcggtctctcctctcataggaaatgggtttccaggcctgaggtgcccgccctggccccaggaga

SEQ ID NO: 337156 - DNA, 50 bp, Homo sapiens
cgtcgccaggactcagcgggccgcaggagattgctgcgatgattgacact

SEQ ID NO: 337157 - DNA, 82 bp, Homo sapiens
tttgacgtgatggtgaacggcaaggtgagaagccctaccactgcaactgggacggctgcggctggaagtttgcgcgctcaga

SEQ ID NO: 337158 - DNA, 83 bp, Homo sapiens
gagccccctgaggccccagaactatcttttcggttatacattggctcttcaaagacgttcacctcatcagagaaatccctgac

SEQ ID NO: 337159 - DNA, 90 bp, Homo sapiens
cccggcttctcgagaagacactacagcctcaaggaggaattgaatgatctggcacgggaccctccagcacagtgttcagcaggtcctgtt

SEQ ID NO: 337160 - DNA, 99 bp, Homo sapiens
cctcggagcctcagtttccccatctgcaaactccggaccctggagacgctgtttggaatgtgagatgggcgggcaagattcttgccaagagaattaatg

SEQ ID NO: 337161 - DNA, 101 bp, Homo sapiens
taaatagattagtaactggcatagacaactatgggcaggtactaggttttgacaagcttgcatcatgcgtgagtataagctagtcgttcttggctcaggag

SEQ ID NO: 337162 - DNA, 75 bp, Homo sapiens
tgcccccgggttatgacgacccccaataaaggaaacaaggccttgaagggacaggctggcctgacatggaaggtg

SEQ ID NO: 337163 - DNA, 82 bp, Homo sapiens
gtgaaaatgaagccagaccgaggttttgactggatcatctcgtcaaagttattcacctggctatcaggatttcagtaagtgg

SEQ ID NO: 337164 - DNA, 130 bp, Homo sapiens
ttgcgagacctgcaagatgacactgaacatgaagaactacaagggctacgagaagaagccctactgcaacgcatggagggagcgaggaaccaccggatcgaagacagtcaagtgtagactctcgccaaag

SEQ ID NO: 337165 - DNA, 82 bp, Homo sapiens
cggagtcggggacccaggagtttcctgtgtccagcgctgccggagccgcctgaggcatcacgttgggtggtttccatttaga

SEQ ID NO: 337166 - DNA, 75 bp, Homo sapiens
cgaagacatgacacttacaagatggacagggatgataattgggcctccaagagtcaaaatgcagatcttcgtgaa

SEQ ID NO: 337167 - DNA, 87 bp, Homo sapiens
tacggccacagcagcgtggaggagctcttgggagcaattccacaggcttgaagaccctgcaatgtggtgatgggaaatgagacttgc

SEQ ID NO: 337168 - DNA, 100 bp, Homo sapiens
cacatctctgagcattctggggaaaagaaactacagtcatcacaatggtctggatgccgcttacaaacacgcagatggcaagaagattgatggcaggagg

SEQ ID NO: 337169 - DNA, 75 bp, Homo sapiens
gggaaacctcagcttgatgatgtatctcagaaacagcttcatgagtttgccatcacagagccattagtcactttc

SEQ ID NO: 337170 - DNA, 83 bp, Homo sapiens
aacgttattcagggagaacggctccaagccaagggccatcgtggtggatcctgttcatggaggagaaggcagagcccccccag

SEQ ID NO: 337171 - DNA, 74 bp, Homo sapiens
cctgatagtcgatcaaaaattgtgcttctggtagatgcttcacagcaaactgtgctcatcttcaaactctatca

SEQ ID NO: 337172 - DNA, 78 bp, Homo sapiens
tggagaagggatggaaatacttcaacaaggtatggaagagttaattatgttctggctcgaagaatagaacttttagaa

SEQ ID NO: 337173 - DNA, 75 bp, Homo sapiens
attggactgacttttcttatgctgggatgtgccttagaggattatggtcaacgaaacggaatattccaatgctct

SEQ ID NO: 337174 - DNA, 82 bp, Homo sapiens
tagttgcaggaaaacaagctcagggcttccactgattctacattatgacaggggcaagtgtccgagtggtgaatcagctact

SEQ ID NO: 337175 - DNA, 82 bp, Homo sapiens
gacaagccgctggcagccgcggatctcaccgccgctcaggcacatggattaattgatgtatgttgagtttatggagctgcct

SEQ ID NO: 337176 - DNA, 75 bp, Homo sapiens
gaggctccaagacctcatcaacaattaaggccgtgcataaggctgtgctgaccatcgacgagaaagggactgaag

SEQ ID NO: 337177 - DNA, 95 bp, Homo sapiens
tgtcaacaggggggccaacagggtaccagagccaagaccctcggcctcctcccccgccgccttcctgcagggaggagtctgctactagtcttatc

SEQ ID NO: 337178 - DNA, 96 bp, Homo sapiens
aacagttaatcctcaatttaagcctgatctaacccctagaaacaggatatttggccttgacattaaaggcagagactgtggcaatgaggcagctaa

SEQ ID NO: 337179 - DNA, 83 bp, Homo sapiens
ccggggaggaggaggaggaggaagaggaggagaagctgcagaaccttggcctgaaaatgctacattatatcagcaattgaaag

SEQ ID NO: 337180 - DNA, 51 bp, Homo sapiens
gttgagtcttctccccctattcctaaagaactggcatcaaatactcacaac

SEQ ID NO: 337181 - DNA, 88 bp, Homo sapiens
gatcctatctgttcaattcttatagccattcttatagttgtaagtgccggtggtggtgtgcacattgagccccggtatagacagttcc

SEQ ID NO: 337182 - DNA, 75 bp, Homo sapiens
gttggcggaagcacttggaactcctttataagtgtcagctgtgagggggattttggcaattgcttggagcatggc

SEQ ID NO: 337183 - DNA, 75 bp, Homo sapiens
agagccacttctcaccgagatgattcatgaagtgatggcccgctccctctccccacccccggagctggaagaaag

SEQ ID NO: 337184 - DNA, 100 bp, Homo sapiens
gcaacatgaagactttgtgtggctacatgacactcttattgaaacaacagactatgctgggcttattttcacacaaaagatgttggacaatttctacaat

SEQ ID NO: 337185 - DNA, 100 bp, Homo sapiens
agcaagcttccaggttgatgcctttggaacgtcattcattctcgatgtcgtgctaaatcagccggagcctcaacagaaagctcctttagttcctcctcct

SEQ ID NO: 337186 - DNA, 100 bp, Homo sapiens
cgccgccgcccccgggctcgcggcctgcagcaccctggaggagaagaggttctgctggaacaagctggtgtagatgcaagtgaaagctttgaagatgtag

SEQ ID NO: 337187 - DNA, 82 bp, Homo sapiens
cgcatgtttgctgactacctcgcccacgagagtcggagcccgagcgggaagaagttccgcagcaagccgcagctggcgcgct

SEQ ID NO: 337188 - DNA, 75 bp, Homo sapiens
atcagctacagactttcctgagtcaggagttttttgagaaccctgcttttcgtcccgatgggctgaaactctatc

SEQ ID NO: 337189 - DNA, 90 bp, Homo sapiens
tctccacttcgtttagttgcgctccatggacagatcaacgaacctggacattgaggagctcaagaaaaattggaagctccaccacccacc

SEQ ID NO: 337190 - DNA, 97 bp, Homo sapiens
aggacggctccttatttcactccactcactctgagaggagtgataccaatgaaaaaaggtcagttgattccagtgctaaaagggaaaaacctgtggt

SEQ ID NO: 337191 - DNA, 83 bp, Homo sapiens
atcgagctgggcaagtgcaaggcggaacacgaccagctgctcctcaagtcaaaatgcagatcttcgtgaaaacccttaccggc

SEQ ID NO: 337192 - DNA, 74 bp, Homo sapiens
caggcgtacgaggatgtgctggagcggtacaaaggtgctggagaatctggtaaaagcaccattgtgaagcagat

SEQ ID NO: 337193 - DNA, 101 bp, Homo sapiens
aaggagctaaagcagcgtgcgttcagccctggggtgtaattacttcaagcctccaggatggcaatccagttccgttcgctcttccccttggcattgcctgg

SEQ ID NO: 337194 - DNA, 89 bp, Homo sapiens
cctgaccagcggcggcgacgcgcaagactacgtctactttgagaactcctccagcaacccatacctgatccggagaatcgaggagctca

SEQ ID NO: 337195 - DNA, 51 bp, Homo sapiens
ctgttgttcccggagatgcggcgcgcagcagagtcacctgatatgaaaaag

SEQ ID NO: 337196 - DNA, 76 bp, Homo sapiens
aaaaagaacttcctggagaaactgaagcgggacgttgagactgaacattcttcacgatctgaaaggaaaagaagag

SEQ ID NO: 337197 - DNA, 74 bp, Homo sapiens
cactgcagaactgggttctggactttgggcgtcccattgccatggtgactctgacatcattagaagcatgccag

SEQ ID NO: 337198 - DNA, 75 bp, Homo sapiens
gaacgtctccggaaagagttttctccatttggtacaatcactagtgcaaaggtctggagggtgagcgacctgcga

SEQ ID NO: 337199 - DNA, 96 bp, Homo sapiens
tctgcacctgggcccggccgggcaaggcggaaagaccacagcaagattctttcattcgtctcctcctagcctgggggaccaggctcgaactgaccc

SEQ ID NO: 337200 - DNA, 98 bp, Homo sapiens
gaattacccatttcaaaggtggatacctgaaaggtctcctaaccgctgcagagagtgctttcttccagaggaggagatgttaaagtaacccatcttgc

SEQ ID NO: 337201 - DNA, 100 bp, Homo sapiens
gattcatttagagctgcggaacaggacgccctctgatgctaccggctctctgaccagttccacgacatcctcattcgaaagtttgacaggcagggacggg

SEQ ID NO: 337202 - DNA, 82 bp, Homo sapiens
cccaggtgtaagcgcagaaagcaggcgaacccgcggcgcaataacgtgttctggacttggtgcctctttctgttatatgctt

SEQ ID NO: 337203 - DNA, 83 bp, Homo sapiens
ccagcagccgccatggctctgctccgagactgtgccctgtccacggtgcctcctgcatgtcctgctgccctgagctgtcccga

SEQ ID NO: 337204 - DNA, 75 bp, Homo sapiens
aactggaaggactgatcaagaaacacagctagtgttatagttttgccgctggactcttccctcccttcccccacc

SEQ ID NO: 337205 - DNA, 75 bp, Homo sapiens
cggaaaacctgatcccaaaattattgaaaacactcgaaggtttgaccttgtctgtgtcaatgcgtggatgctgga

SEQ ID NO: 337206 - DNA, 100 bp, Homo sapiens
gagagcacaagccgcagctcggagactcgtccccgggtatagttaataaagtgtcttctagccacattggctgtttagtacatgggtgtttcaatgcctc

SEQ ID NO: 337207 - DNA, 75 bp, Homo sapiens
ggttcggccacctacgtgagatacaagccatccccagaaagctctgctttcccagcacgctgcctcaccaagaaa

SEQ ID NO: 337208 - DNA, 92 bp, Homo sapiens
tgcagggacccggtgacagcgtgagaggttcgcagagtatctcaggagattacatttcagcttgaaaaagggtcggtggaatttaaaagaag

SEQ ID NO: 337209 - DNA, 90 bp, Homo sapiens
gcaagcactaaaccactatgcttaccgagatgcggttttcctcgcagaacgcctttatgcagaagtatgaatgacccatattaaatcgcc

SEQ ID NO: 337210 - DNA, 75 bp, Homo sapiens
agactgtggaacttttaagtggagtggtggatcagaccaaagatggcatctggtccagggaatttcttttttcaa

SEQ ID NO: 337211 - DNA, 90 bp, Homo sapiens
cgcgtctccctcgggagccggcgtgcccacccggacttgtccttctacctcaccacctttggaagaaatgttggctatttggcgatgaga

SEQ ID NO: 337212 - DNA, 100 bp, Homo sapiens
gagattgaggggaccactcaccagtgtgaagcagtattctggaaagtttttctaagactagtgaagaactgaaggagtcctgcatctttttttttttatc

SEQ ID NO: 337213 - DNA, 82 bp, Homo sapiens
aaaaatattatggtctttgtgcacatttacatcaaggctaagtcctatcagccatggaaacaccattgctctcttcttccgg

SEQ ID NO: 337214 - DNA, 96 bp, Homo sapiens
ggcatttacagaaagagtcaacagcagtggcaacagcctccacctcagatatatgacaagcagttggatgaaagagaacacacaattgaagaatgg

SEQ ID NO: 337215 - DNA, 112 bp, Homo sapiens
cctggagtctgcgaaggccgggacccggttccccggcccacagtgggggtgtgcaaacccgagagaactggatgttccatttaagcagacctcttccatagctgtagctgga

SEQ ID NO: 337216 - DNA, 75 bp, Homo sapiens
gctgatgaggttgatgaatttgaaatccaagacctgtcgcgaaatcgcctttcagaaattcctatagaagcatgt

SEQ ID NO: 337217 - DNA, 98 bp, Homo sapiens
atcagttcgaagagcagcattggaaactctgtttacgttattatcaacacaggaccagacgtgggctccgtggaaggcctggcctatcaccgtggctg

SEQ ID NO: 337218 - DNA, 75 bp, Homo sapiens
attgtggatgccgtgatcaagtacaaggacagaacagatacggatgcattatagtgactgtgttccttgtaactt

SEQ ID NO: 337219 - DNA, 100 bp, Homo sapiens
agagaaagatagcctggatccatcttttgtgcatgcgtcgcgccttttggcagaagtttggtgccctggttgtcagatgttggaaagcagtaggacggaa

SEQ ID NO: 337220 - DNA, 82 bp, Homo sapiens
tttgcacctgccgtaatctccaccaatccaataccagccgggcagagctgctggtcactgggtcctacagtgctagccaggg

SEQ ID NO: 337221 - DNA, 74 bp, Homo sapiens
gctgggagaagttctgaacaactatatctgggatacacagaaaaaaacacagtgctctgtgcctatacagtgta

SEQ ID NO: 337222 - DNA, 80 bp, Homo sapiens
tcaaacgacatctcttcttcaaaaatgaccagtgggcttgggaaacgctccgagacaacaccattcgcttttcacccaag

SEQ ID NO: 337223 - DNA, 100 bp, Homo sapiens
gtacatcacccccatggaggccctggcagagcagatttgaccacctggtggccatagagcgtgccggaagagctgctgatggcaattactacaatgcaag

SEQ ID NO: 337224 - DNA, 82 bp, Homo sapiens
gcaggaaccacattatggatctttatgaagaagatgactttatgtgtaagaaggcggcctctaaatcaaaagagaatggaag

SEQ ID NO: 337225 - DNA, 100 bp, Homo sapiens
gttccgtggagaaggccaacaaccccggggtgcgagaggtggtgtgcatgacactcctggaaaacaggtcacatgtgccaatttaacgaacggtggaaag

SEQ ID NO: 337226 - DNA, 100 bp, Homo sapiens
cggaggttcccgcttctgaagcgtgggaggcggaagagactgcagggaaacagtactgggagtaccagttccagcaccagcccagtcaggaggagtgtga

SEQ ID NO: 337227 - DNA, 100 bp, Homo sapiens
ttgaagtacaccgtggtgacattgtatcattggtgtctattctggataagcaggttttgtgaagacatttattctttcttggacctcagatttaccagac

SEQ ID NO: 337228 - DNA, 71 bp, Homo sapiens
tcacaggggataagaagtttcaggattacatcccagtagaccaagaagagttaagagattatgtcaaagct

SEQ ID NO: 337229 - DNA, 83 bp, Homo sapiens
tttcaaagtggtgggatattatagatattcagaagaaggatgctgttaaaagtgtttcctgaggttataggcgggtgtttgag

SEQ ID NO: 337230 - DNA, 100 bp, Homo sapiens
ggctcgagtctacctggatgaaaactacaaatcccaggagcacttcacgtgcacagccagagaacaacacatcacacacaggaaacagttgtgctcatgt

SEQ ID NO: 337231 - DNA, 100 bp, Homo sapiens
ccgccgcccccaacgtccatgcctgaagtctcaagtcaaagtcgtggccctgtgtgctggttctgggagcagcgttctgcagggtgttgaggctgacctt

SEQ ID NO: 337232 - DNA, 100 bp, Homo sapiens
ccttgctgatctgagctcagacctgccaatttaccagagataattgataacaccctgtaacagctgaatgtctttggtggacttgggaaagaggttgcta

SEQ ID NO: 337233 - DNA, 96 bp, Homo sapiens
acacatggaaaactgttgaaattgtccatatagatattgcagatagaagtcaagttgaaccagcagaaacaggtgagcagattgccatcaagcagt

SEQ ID NO: 337234 - DNA, 76 bp, Homo sapiens
tggctacagcttcagaagaccgaagcgttcgtatctggaagttcattgactggctattcagcatcatggaaagccc

SEQ ID NO: 337235 - DNA, 98 bp, Homo sapiens
tacacgccgccgcttgtgctgcagccatgtctcttctcgaagacaaaggtctggcagaggtgtctaaggttgcagagcaagtactgaatgccgtaaat

SEQ ID NO: 337236 - DNA, 50 bp, Homo sapiens
gccaccccagacctgcagaatttcaggatggctaaaggtgaccccaagaa

SEQ ID NO: 337237 - DNA, 75 bp, Homo sapiens
cagcagccccggaccccccgattcaccaacgagccctaggtcaggagacaaacaaccagtcggcctcccccagca

SEQ ID NO: 337238 - DNA, 80 bp, Homo sapiens
aagaaaacgagccagtgatttacaatagagcaaggctggtgtgcagtggtgcgaccacggctcacggcagcctcagccac

SEQ ID NO: 337239 - DNA, 75 bp, Homo sapiens
aagaacttcttcccaaaatgggtaagttctcttctacgctgtatgagactggtggctgtgatatgtcacttgtga

SEQ ID NO: 337240 - DNA, 100 bp, Homo sapiens
accgcgcaaccaaaccgccccctgctccaccgccgcctcctcaggccgctccgcccacagccagcaaggtggtgatgatgtccagcaactctgtgaagca

SEQ ID NO: 337241 - DNA, 95 bp, Homo sapiens
accagaagctgcagaagaagccctggagaatggaccaaaaggtgttagtaaaatggcctttcgccatttaattgagttcacatatacagcaaaat

SEQ ID NO: 337242 - DNA, 76 bp, Homo sapiens
tgtcccttgcaggatggagaagaacattcttacatgctggcaagtggtcaaactctaaaaatcaaaaaacttcatg

SEQ ID NO: 337243 - DNA, 75 bp, Homo sapiens
tactgggctgcccacagtggccagctttcagcccgagctggagctcagcctgaggaagaaaggcctggagtgcct

SEQ ID NO: 337244 - DNA, 95 bp, Homo sapiens
gcggcgcggcggccgggccctcgagacggggacggcatgtgatgtgaatcagctgacatcatcttgacgggagccctgtgaggcggacacttaac

SEQ ID NO: 337245 - DNA, 117 bp, Homo sapiens
ccccacctgcccggtgcccgaggaggcagccaagctcgtggcctgcctctgcgtgcacaatgcagatcttcgtgaagactctgactggtaagaccatcaccctcgaggttgagccca

SEQ ID NO: 337246 - DNA, 100 bp, Homo sapiens
aggctttcctacaactcatgcccagcagcagcaagcaggccagaacacaaagcgtgaatccggaagaaaagttcaatctggaaacatcaatgctgccaag

SEQ ID NO: 337247 - DNA, 100 bp, Homo sapiens
aaaacatctgccatcactgtggcgcttttaatgagcaaagccgtcgagatgacctggagagcctgggctacgtgctcatgtacttcaacctgggctccct

SEQ ID NO: 337248 - DNA, 100 bp, Homo sapiens
gatgaatgaatatctggttttgtctctgctgggcctgtgtgcctggaaaggaattgttttggcctaggatcatccagcttctccaaacaggctggtgtac

SEQ ID NO: 337249 - DNA, 76 bp, Homo sapiens
ctttggtccccagcgcagtgaagtggtgagcctttttgtcactgtcttgctggtggatgccctccttactccccaa

SEQ ID NO: 337250 - DNA, 130 bp, Homo sapiens
agatcatgaatgtggcagttctagtcaaagaacgctttctgttcaagaggcagctgcgtatttaaaaaacatgggcctggaattgatatattcacacctggtaaacctggagaatatgacttggaaggtg

SEQ ID NO: 337251 - DNA, 90 bp, Homo sapiens
cgttgttctcggcgggctgtggggcctccgcgccgcggccgttagtcatgtcggaacaagaggaaagtatggggaaggagccaagcagga

SEQ ID NO: 337252 - DNA, 100 bp, Homo sapiens
cggtggccgaagtgggacgcgccgagccggaggctgcaggatgaattttcccactgtaaaaaaccgagcaagtctggataagtgaggctggctccatgta

SEQ ID NO: 337253 - DNA, 75 bp, Homo sapiens
ggaccacaagatcctcatcgacagtgaagcagccgacacgagtcgttgttcataaaacagcttttgaaagttgag

SEQ ID NO: 337254 - DNA, 100 bp, Homo sapiens
taaaaatacatctcagacggcagctattactacaaaggtgacaatctccaatagacttgtgtcttcaccttgctgcattgtgaccagcacctacggctgg

SEQ ID NO: 337255 - DNA, 96 bp, Homo sapiens
aaggatgcctccacacctaccactacccgtgtgccagcgatgcagaaatgagccgtcagactgctacagcattacctaccggtacctcgaagtgtc

SEQ ID NO: 337256 - DNA, 89 bp, Homo sapiens
ctcaaggcacgaactgagctgatccttgccccaggctgtatcgcatccattgaatactgtgaccgaggacatgtacaccaacgggtctc

SEQ ID NO: 337257 - DNA, 82 bp, Homo sapiens
ttagatgtaaggctacgaaaacttgctggagagaaggaagaactactgtcacagacagttgaatttctgaatgaaaagctgg

SEQ ID NO: 337258 - DNA, 98 bp, Homo sapiens
ggtctgcctcaggtacagaagggcgacctctgtgccatttctttggtggggaacaggtgtaaacgtcctactttggggcaacttgccagagatagaag

SEQ ID NO: 337259 - DNA, 82 bp, Homo sapiens
caagattcaactggcagtttcccacatgggtgtactcgtgttccagtttccagagatgaatgatatgctgagagaaaaggta

SEQ ID NO: 337260 - DNA, 101 bp, Homo sapiens
agagcacccaagatgaagatgctgttagcctttgcagtctcgacataagtgtgctggagaatctggtaaaagcaccattgtgaagcagatgaggatcctgc

SEQ ID NO: 337261 - DNA, 100 bp, Homo sapiens
aaacggattgccagagaattggcagaaggtacatcgagtacatgtgtgacatggtggcggaggagcccatcacaccccacagcaagcccatcctggtgag

SEQ ID NO: 337262 - DNA, 75 bp, Homo sapiens
gttttgcagatcttcaacaagaggacccaggagaaattcgccctcaaaaggaggctgcggaggaggaggaggaag

SEQ ID NO: 337263 - DNA, 97 bp, Homo sapiens
ccggccgcctgtccgtcgatgcaccgaaaaggtgtcgtgaaaactacccctaaaagccaaaatgggaaaggaaaagactcatatcaacattgtcgtc

SEQ ID NO: 337264 - DNA, 88 bp, Homo sapiens
gaccagctcatgggcacggctcgggacggaggtcccaggtgattgaaaagtttgaggccttggacattgagaaggcagagcacatgga

SEQ ID NO: 337265 - DNA, 100 bp, Homo sapiens
cgcggggcaggaggagtacctcggccaagaaaattatgcatgcgttagggaagctctgagagaatggctgtggaaggattttgcctaccattttacagta

SEQ ID NO: 337266 - DNA, 82 bp, Homo sapiens
acaagctcagggcttccactgattctacattatgagagaagaagaaggaggttcctgctgtgccagaaacccttaagaaaaa

SEQ ID NO: 337267 - DNA, 100 bp, Homo sapiens
gtggacaggagcattaccacctcagccaccctgaccactatcatcaccatggaaaaagtgacttgagcagggatggcaccacagatgtgacgcggacaat

SEQ ID NO: 337268 - DNA, 100 bp, Homo sapiens
aatgaagaagaatataaaattgtcatcagcaaatttccctttcaagatccagaccttgaaaaggtgggagagttcagagcacacgctgctgagtggacag

SEQ ID NO: 337269 - DNA, 75 bp, Homo sapiens
aagagaacaagacgtgtgaagactcagatgaggtttatataactttccaagacaaggaagttgtgcaaagcctca

SEQ ID NO: 337270 - DNA, 95 bp, Homo sapiens
agcctcccgagtacctgagattagcccagatatttgaacagtttgtcaagacaagaataaaagaagaatacaaggaaaagaaaagtaaattgctg

SEQ ID NO: 337271 - DNA, 100 bp, Homo sapiens
gaggattttgaggacacttgtggagagctcgaattccagaatgatgaaattgtcacttcactacgcttagcagatgtcctctggaattcccagattcctc

SEQ ID NO: 337272 - DNA, 100 bp, Homo sapiens
ttagagcaggtgtatgatcttttggaggaggaggatgaatttgatagagagaaaatggactacttctgtgcctccactgtcatcctacactcaatctacc

SEQ ID NO: 337273 - DNA, 82 bp, Homo sapiens
cttgctcttactccttttggttgaacaagcagcggaggaggcgatgactcggctggtcaacattctgatcctgtcagtcagg

SEQ ID NO: 337274 - DNA, 75 bp, Homo sapiens
gagggtcatggcggcgatcgagaaagtgcgcaaatgatgaaggtcaccgtgtccaaagggggcgaccgggacagt

SEQ ID NO: 337275 - DNA, 82 bp, Homo sapiens
tgtggggacttccggcgaaagcacccctggaaccttgttgcactggtcagcccaaggccaaccccactgtcactctgttccc

SEQ ID NO: 337276 - DNA, 75 bp, Homo sapiens
atcgccgagcccgacctcgggcgccccgccggtcacctccgcgcggacaccaggaagccccacaagaagctgggc

SEQ ID NO: 337277 - DNA, 75 bp, Homo sapiens
gttcgccttcagccaccatggggaatgggatgaacaaggcggaagcccggctcgctgcaaaacgggcggcccgcg

SEQ ID NO: 337278 - DNA, 73 bp, Homo sapiens
acgaaccttacccggatgatggcatgggatgaccactcccgggtcctgctgaaggcggagaacagccacagcc

SEQ ID NO: 337279 - DNA, 96 bp, Homo sapiens
ttgttgtggatgaagctcacaggttgaaaaaccaaagctccctgctgcataagaccttgtcagaggaaccacgtgaatgttgagggggcgacacac

SEQ ID NO: 337280 - DNA, 100 bp, Homo sapiens
aaacgaactggaagaaatgccatgaacatgcaagaaacatatactgcttacctcattgaaacaaggtcctgcaaccctggttccagtctggcaagcattg

SEQ ID NO: 337281 - DNA, 100 bp, Homo sapiens
tggcagatccttcagcaaaagctgtccttacagggtttcccaaactctcgattgcctcttgcaagcagatgacctgggagcaaatgttatggcagaacga

SEQ ID NO: 337282 - DNA, 90 bp, Homo sapiens
atcttgaaaagctgccagaaagtgacttttttgaacgaaccattctgtgcaacagccttgtgtggagttgtgctgtgacgggtagacctg

SEQ ID NO: 337283 - DNA, 98 bp, Homo sapiens
gctcctccagctaccggcccaaggccatctacctggacatcgatggacgcattcagaagggcgccctgcgtccggcagaggaggcgagcatcccgctc

SEQ ID NO: 337284 - DNA, 74 bp, Homo sapiens
cagcccgaggtcttctgcaaccagcacgacttcagcctggagaggacggcactcttctgggtggaggccgccgg

SEQ ID NO: 337285 - DNA, 100 bp, Homo sapiens
taactgcctccattacactgctgagtcacacacaacgcttgttatgttttcatcacttctctccagaagcaacaattgtgttaaatgaactcaactggac

SEQ ID NO: 337286 - DNA, 101 bp, Homo sapiens
ctggcatattagcgctagccctgcagacagaggtgtgctgacgacctgctacaacagaagtaacccaggtttttctgccttttatgtgccatttgcaaagg

SEQ ID NO: 337287 - DNA, 82 bp, Homo sapiens
gcgctcgccgcgcccggctgccggtcaaaatgcagatcttcgtgaaaacccttaccggcaagaccatcacccttgaggtgga

SEQ ID NO: 337288 - DNA, 50 bp, Homo sapiens
gaagaattgtctgaaagaaaatatgtggagatggggtttcaccatgttgg

SEQ ID NO: 337289 - DNA, 99 bp, Homo sapiens
tgagattgtccaaaacaaagaaacatgtcagcagggcctatggtggttccatgtgtgctaaatgtgttcgtgacagtagagacggggtttcactgtgtt

SEQ ID NO: 337290 - DNA, 100 bp, Homo sapiens
ctccactcgaacagatgtgagcgagaaagccgttgcctccagcaccacttctaatgggtggttctcttcccaaagtggaagccaaattcatcaattatgt

SEQ ID NO: 337291 - DNA, 80 bp, Homo sapiens
gtgtacacaggaaagggccctgacaagaggatgggactgcagttgtggctgccaggttaacacagaaatctgcctcctgg

SEQ ID NO: 337292 - DNA, 90 bp, Homo sapiens
atgatacctttgatccagaacttgcagcaacaataggtcatcatcagatttgaaatatttaaagtggatacaaaactatttcagcaatgc

SEQ ID NO: 337293 - DNA, 80 bp, Homo sapiens
ggaaaggaaaggagccaggcatggctcttcctcaggatggtccagcagtttggggtggattttgagaagaggatcgaggg

SEQ ID NO: 337294 - DNA, 100 bp, Homo sapiens
acagtctggcattgctggaggatacaaacgttgctgctccaagatagccaaaatgtggaagcactgagaatgcaggcactctactatgtgtgtagagagg

SEQ ID NO: 337295 - DNA, 98 bp, Homo sapiens
gccgccctggcctctctcaggaatctctatactcccaacgtgaaggtggtccagcatgacccatgtcggggcggagcagggtattggaacagcctttt

SEQ ID NO: 337296 - DNA, 51 bp, Homo sapiens
tgtcaccggcttccgcatccaagatgaagaatgttcctcctgctgatcaag

SEQ ID NO: 337297 - DNA, 51 bp, Homo sapiens
gcaggacatctgcaatgatgttctggggcctttacaacaactaaacggaca

SEQ ID NO: 337298 - DNA, 51 bp, Homo sapiens
ggaagagatgcgaggatgacaagacataaccagtgcggtgcaatccaagcg

SEQ ID NO: 337299 - DNA, 74 bp, Homo sapiens
atcaaccctctgcatacagtaaagaaccaaccggtgagccctctcctaagagacccaggggaagacccaaaggc

SEQ ID NO: 337300 - DNA, 98 bp, Homo sapiens
gaacaggctaccaagtccgtgctgtttgtgtgtctggtgcaggcctgagtgttccttccagcatgtcggagggggagtcccagacagtacttagcagt

SEQ ID NO: 337301 - DNA, 75 bp, Homo sapiens
ctttacaagacgcacccacacaatacgaggattctctccaccacatagaatctgcagttttgaagaggcaaaggg

SEQ ID NO: 337302 - DNA, 97 bp, Homo sapiens
cacggagctggtcctgagtgactgcatgctcagcgaggaagggtcgacatgttaaaacgggtcagttggcagccatcaaagttatggatgtcactga

SEQ ID NO: 337303 - DNA, 75 bp, Homo sapiens
agcgacgggcggcccaggcgcgcagctgggcgcctccttcctgcaggccagtatcctagaaggaaaacatcacca

SEQ ID NO: 337304 - DNA, 100 bp, Homo sapiens
aaaccaaactgatctctctgggttggcttcaggttttccagggaaattttgacaatgacactcacagaaaaaatgtcatcgaccctcccatctatgcacg

SEQ ID NO: 337305 - DNA, 100 bp, Homo sapiens
ttcatatttggcttcaatgtcatattttgggatatgttcaaggaatgagtgatttactttcccctcttttatatgtgatggaaaatgaagtggatgcctt

SEQ ID NO: 337306 - DNA, 100 bp, Homo sapiens
aaaatttcaggtcttaaatctgcaccggaagcagtactcagaacaagtcatacctaatgctgcaggaaacatttccaaacgtgtatgaagatacatattg

SEQ ID NO: 337307 - DNA, 101 bp, Homo sapiens
ttcgctttcccacccgagagccgcgagcgcccggccgaacccgcgatggaataatgcccagcggcccgccaggtcccgctccaccgggggacggctacgtg

SEQ ID NO: 337308 - DNA, 83 bp, Homo sapiens
ggcgtatttcgtcgagaatttttggacaatgcagatcttcgtgaagactctgactggtaagaccatcaccctcgaggttgagc

SEQ ID NO: 337309 - DNA, 50 bp, Homo sapiens
cggagacccccgccctcaactgagagcagtcattatggcgaaccttggct

SEQ ID NO: 337310 - DNA, 50 bp, Homo sapiens
cggcggccacgccaaggacgggatgtacagttacccagcacgtgtacctc

SEQ ID NO: 337311 - DNA, 89 bp, Homo sapiens
caccaacttgcgcaaaaacaacagacagccctatgctgtcagtgaattagcagcatacggaatggacagccgacctcccatggcaattt

SEQ ID NO: 337312 - DNA, 90 bp, Homo sapiens
gagcgagctgtcagagcccggggacggcgaggccctcatgtaccacacgaaaccaatagagccatggcgactccctctgctgccttcgag

SEQ ID NO: 337313 - DNA, 75 bp, Homo sapiens
attttgataatgtcagtgtggtatctctacaggtacctagtcgatagtcgctggttcaaacagtggaaaaaatat

SEQ ID NO: 337314 - DNA, 98 bp, Homo sapiens
gtgcattctgggtgatgacatgggacttggaaaaacagtacagcaaatgaagaaacacccctgccgccagtgtgacaagtctttcagctcgtcccaca

SEQ ID NO: 337315 - DNA, 98 bp, Homo sapiens
agatttagtaataacatcattagcactttccagaatttatatcgttgccctggggatgacaagattgaggaaattgagcgagagatcatcaagcagga

SEQ ID NO: 337316 - DNA, 75 bp, Homo sapiens
gagcaagccgggcggcctgccccgccggagcagcatcatcaaggaggaaagccaagtatctgtgacttcagcaga

SEQ ID NO: 337317 - DNA, 100 bp, Homo sapiens
ctgccccccacccaccgcgccggcgctcccttgtcacgcctcgggaagcgcgcacctgccaagcagttttccaagagataacttcaccaagatgtccagt

SEQ ID NO: 337318 - DNA, 82 bp, Homo sapiens
aatcaactgagagagatgcttaaaaatcaccagttactttaatgaacctcaagccagtttgaagcaggatgtatgtcagtct

SEQ ID NO: 337319 - DNA, 83 bp, Homo sapiens
accaggctgagactcggggcgccagtccgggcaggggcagcgggagccggccggggcttctttcgccgaagcatccagaagaa

SEQ ID NO: 337320 - DNA, 88 bp, Homo sapiens
agaaatgagcagaaaggagttggggcttgatgaaggcgtggatagcctgaaggcagccattcagctcagaattctgcaaatgcagatt

SEQ ID NO: 337321 - DNA, 51 bp, Homo sapiens
gatcaaggctgaccctgatggtgacggtgctggagaatctggtaaaagcac

SEQ ID NO: 337322 - DNA, 100 bp, Homo sapiens
ctgtcactcaacaggtacgacaaggtgcaagcggtcttctctgtcttctttatggccagtaaaattctccagaagagatttatggcagcctcactcccag

SEQ ID NO: 337323 - DNA, 75 bp, Homo sapiens
actatgtgcgggaccttggctatgtggttgaggttgctgctaaaaccttgcctttttataaggactacttcaatg

SEQ ID NO: 337324 - DNA, 75 bp, Homo sapiens
agaacagctgtggaaagaagttgcaaaacactggcatcttcatgatacagttaagaggaatcttgacagcgccac

SEQ ID NO: 337325 - DNA, 50 bp, Homo sapiens
attagccttcgcggggcaaaatgacgcagggacagagctcatcgggaaat

SEQ ID NO: 337326 - DNA, 100 bp, Homo sapiens
cggtttctcggaaagtagcctcttctgcaagtggggcattcacacaggatcctgatggtgaacatgccaggagagcaatgcaaaaggtgatggctacgac

SEQ ID NO: 337327 - DNA, 100 bp, Homo sapiens
aaaacatctgaagttcatcgccaggactgtgatggtacaggaagggaacgtggaaagcgcatacaggaccctaaacagatgactttagtgcagatttcac

SEQ ID NO: 337328 - DNA, 83 bp, Homo sapiens
catccctgacccatggcgctgaagaggattcagaaacatggaaataaccagcctgcaagaactggcacactgtcgagaacaaa

SEQ ID NO: 337329 - DNA, 50 bp, Homo sapiens
ggagcagttgtctgatgaagagaagaattagaagtgcgtctcaccaacca

SEQ ID NO: 337330 - DNA, 90 bp, Homo sapiens
atgagcagtttgagcagtgcgtccagaatttcaacaagcagctgtttgacaactttaaacgggtcttcaaggtggtagaggaaatgcggg

SEQ ID NO: 337331 - DNA, 90 bp, Homo sapiens
aaaatattctagaaggggaaaagctacttcaagctacccgtacagtgaggacgcccgccagggtgagcagtacatgaacacccggtgccc

SEQ ID NO: 337332 - DNA, 75 bp, Homo sapiens
atggaggaactgcaggagcaagtggcgctggtagatcatgccactaatcgtacccagtttggggagaaaattcac

SEQ ID NO: 337333 - DNA, 50 bp, Homo sapiens
cccccatcccacgatttaaatagggattcagaatccatggctggaagagg

SEQ ID NO: 337334 - DNA, 88 bp, Homo sapiens
ccgaggcctgggacagctaccgcagcatgagcgaaagctacacgctggagaaggagctggcaaacagccctgactgtccccagatgtg

SEQ ID NO: 337335 - DNA, 82 bp, Homo sapiens
cagccatcctcagtgtacccgcagcccagaaccctgaggacctccgcatgtttgccagatcctggtggacctctcaaacccc

SEQ ID NO: 337336 - DNA, 75 bp, Homo sapiens
gtgctgttcctgagtgtcaactatctgggggggacattcccagaactgataaatttcaaacggaagagagtggca

SEQ ID NO: 337337 - DNA, 75 bp, Homo sapiens
tccagaaagacatcctgagaggacttggcagattcctgacattcagacaactgacttgtaactgacttataactg

SEQ ID NO: 337338 - DNA, 101 bp, Homo sapiens
ccgcaccgcggcttaaatgatgtattttgtgatcgcagcgatgaaaggttatcaatactctggctgaccatcatcatcgtgggactgactttggtggaagt

SEQ ID NO: 337339 - DNA, 98 bp, Homo sapiens
ccaaccgcaaccattgacgccatgtcgggttattcgagtgaccgagaccgcggccgggaccgagggtgccgccatgccgccattgccaagtacttcgg

SEQ ID NO: 337340 - DNA, 50 bp, Homo sapiens
cctgccaggatcagcctccgggagtcaccattactttaagtactgcaaaa

SEQ ID NO: 337341 - DNA, 96 bp, Homo sapiens
ccgccgacccgcgccctgctccctctcagcacctgggcggacggaactcattatacaatgacaaatggaggcagcattaacagttctacacattta

SEQ ID NO: 337342 - DNA, 74 bp, Homo sapiens
cgagaatggaccctgatggacttggacatggagctgtccttggacatggcaaccacagagagagcagccctttt

SEQ ID NO: 337343 - DNA, 90 bp, Homo sapiens
atctggcagacctcagctgcctggtgcatgagccatgagcccaagtccccttcgctagggatgctttccaccgcgaccaggaccaccgcc

SEQ ID NO: 337344 - DNA, 90 bp, Homo sapiens
aattgactgttctgtcttggagccaagaatctagaaaattgatgattacccggaatttttgagttcgccagatagagaaatcagccaaca

SEQ ID NO: 337345 - DNA, 95 bp, Homo sapiens
tcagctgcctgggtccccgacgagagccaggtgctggagaatctggtaaaagcaccattgtgaagcagatgaggatcctgcatgttaatgggttt

SEQ ID NO: 337346 - DNA, 87 bp, Homo sapiens
cgattatggacccggccgaggcggtgctgcaagagaaggcactcaagtttatggatgaccagtgtcccagtgaaggaacgagtgaag

SEQ ID NO: 337347 - DNA, 75 bp, Homo sapiens
catgtttccgcggagcggacccagcaatgacgggtctcactctgcctctcaggctgtagtgcagtagcatgatct

SEQ ID NO: 337348 - DNA, 98 bp, Homo sapiens
agacagatcgccggggaggcagcgcgggatcccagcctcaggcgtgcgcggacggtgtgcggatcactggggtgatcctgctggctgttggagtctgg

SEQ ID NO: 337349 - DNA, 83 bp, Homo sapiens
ccttacagccgctcgtcagactccagcagccaagatggtgaagcagatcgagagcaaggtttggaaggcgctttgagtccccg

SEQ ID NO: 337350 - DNA, 75 bp, Homo sapiens
agcaagatcaccgtgacatccgaggtgcctttctccaaaagctttgatgaccatgacccagctgtgatccatgag

SEQ ID NO: 337351 - DNA, 75 bp, Homo sapiens
cagacttggacaacatgtcccaacattacatcccagtcctgtccaaaatgcattgctgtcttcacaagagtcagt

SEQ ID NO: 337352 - DNA, 95 bp, Homo sapiens
gagcgcctgcgaccccagtcggtgctccggggaggtcacctgacgaggaggttgtctgcattcaaaagagcattctattaaagctaccttaattt

SEQ ID NO: 337353 - DNA, 100 bp, Homo sapiens
gcttgctccattgtcgaccagaaggtgtgatgaatgcagactctgctaccattttggctgtttggatcctcctttgaaaaagtctcctaaacagacaggc

SEQ ID NO: 337354 - DNA, 100 bp, Homo sapiens
ccgccgcctgcggcctttgctgcgggcgccggcgctggcggccgtgccgggaggacggaagctcctgttttcttgtcagccgccagctgagggccattcg

SEQ ID NO: 337355 - DNA, 75 bp, Homo sapiens
tgcatcgggagaaaacaagtccaaggatgaatcccagtccctgttacgggtctggaggcggctggtggaaatcca

SEQ ID NO: 337356 - DNA, 80 bp, Homo sapiens
tcttcggtggactccttcggcagtccacccaccgccgccgcctcccaggtggaggtggaggaagcgtccctgggatcgag

SEQ ID NO: 337357 - DNA, 83 bp, Homo sapiens
gttaaaaacatgacagaacgtattccccagttcaaatcagtggttgaagaaattcagcaattctgtggtgttcttggtcacac

SEQ ID NO: 337358 - DNA, 75 bp, Homo sapiens
acatttggagcctggacacgcagtacagcaaggaaatggccagtgatgaactgagggagttgaggaatgccatga

SEQ ID NO: 337359 - DNA, 83 bp, Homo sapiens
tttgaaatcgacacacaaagaatagagttgagcctgtgggacacttcgggcaccgtctgcgtcctgctgtccttccccttcat

SEQ ID NO: 337360 - DNA, 50 bp, Homo sapiens
gaaagggcagtacagactttggcaggaccccagagagatgcccaggcagc

SEQ ID NO: 337361 - DNA, 100 bp, Homo sapiens
ccaggccatgaagagtcctgaccacaatggggaggacaacttcgcccgggacttcatggcccgatgagagaaagggaaagttaaggatgctggagcagaa

SEQ ID NO: 337362 - DNA, 89 bp, Homo sapiens
tgaaggtgctaccgctgacgacacccctggtggatggcgaggatgagagggaccagttactctccacaagaaaattcacacaaccacag

SEQ ID NO: 337363 - DNA, 100 bp, Homo sapiens
caggctggctcccgtctccaggccccaaggagccacacctggaccagaccccaggaaagaggctgaggggatctggcggtggagcgctaggatcagacgc

SEQ ID NO: 337364 - DNA, 95 bp, Homo sapiens
ggcgctttcggcgcgggcccgggccccgagcgcccgaacagcagtggacgtcagctcagcgaggtcttcatccagctgccctcgcgaaaggagct

SEQ ID NO: 337365 - DNA, 95 bp, Homo sapiens
tatggatgatcgagaggatctggtgtaccaggcgaagctggccgagcaggctgagcgatacgacgggatccaggtccggcacgatcaagacccag

SEQ ID NO: 337366 - DNA, 100 bp, Homo sapiens
ggatttttgagctggtggaagtggttggaaatggcacctatggacaagtctataagagtcctacagaatgcacttttgctttcagatagcagccttcacc

SEQ ID NO: 337367 - DNA, 99 bp, Homo sapiens
aaaactttgggcttgcaacttttgttaccaaaggaatcagcttctgcagaaagccgtcattacacctgattttgaaaaaaaccactgtgttccaccata

SEQ ID NO: 337368 - DNA, 100 bp, Homo sapiens
ccctccacgcggaaagaagtaccttcgccggtcaccggctcctgcagggttttgctgttactgctcagtgtagtcacaccttgaataagaaatggaaaac

SEQ ID NO: 337369 - DNA, 50 bp, Homo sapiens
gtagaagtgggacccaaatctacaatgtggaatgcagtagccctctgggc

SEQ ID NO: 337370 - DNA, 100 bp, Homo sapiens
caagaccaaaaaacacaataccaggcatacatttggcagaataaatgaaccagggctctctaaatacgtacagattctgcgataatgtgtggacttttgt

SEQ ID NO: 337371 - DNA, 100 bp, Homo sapiens
aaccttgtagtagatgggactacatcctttggactactcaggagcaaggttggacttctaaggaagagtgcgtaagagacgagttgaaggagatcaccag

SEQ ID NO: 337372 - DNA, 111 bp, Homo sapiens
cgagaaggaaagcaccatgacgtccatccatttcgtggttcacccgctgccgggcaccgaggaccagctcaatgacagagtggttaagaaagtagctcaatacatggctga

SEQ ID NO: 337373 - DNA, 98 bp, Homo sapiens
acgccgtgtccgagggcaccaaggcggtcaccaagtacaccagctcgaaggtatcactgggatacatcagattggatgccaagcgttcctctgccgga

SEQ ID NO: 337374 - DNA, 109 bp, Homo sapiens
tcaattgcattggaaaagctgcgggaactcagctttagtgccctgggcgctgcctatggcacagccaagagcggtaccggcattgcggccatgtctgtcatgcggccgg

SEQ ID NO: 337375 - DNA, 100 bp, Homo sapiens
tgggatccgtatgtccattaaacttcatcaggagttggtaatgcttctcttagaatataatgctgatactactattgttaatgggagtggacagacagca

SEQ ID NO: 337376 - DNA, 74 bp, Homo sapiens
tccgacatgtctatgctggctgaacgtctgtagagttccgtgacttcctgaagatagccctggataagaaccca

SEQ ID NO: 337377 - DNA, 100 bp, Homo sapiens
cttcgctgctcagccagctcctgcgaccgccctgcgcttcgtgcaccggggcggtccgttgccaaagccaggtttactcctggcttgggggcattaggaa

SEQ ID NO: 337378 - DNA, 89 bp, Homo sapiens
gaaagcatctcacagctccgacactattgcgagccatacacaacctggtgtcaggataacaaagccattgacctttgccgattgtgttg

SEQ ID NO: 337379 - DNA, 114 bp, Homo sapiens
gaggctgcggtgtctgctgctattctccgagcttcgcaatgcagcctagggcctaggcccgggccaccatggcgctgcctccaggcccagccgccctccggcacacactgctgc

SEQ ID NO: 337380 - DNA, 75 bp, Homo sapiens
ttctacccaccctcggacccagggcagccgtgcccatttccccagggcatggagagacggggtttcatcatgttg

SEQ ID NO: 337381 - DNA, 101 bp, Homo sapiens
tctgaggtttcctccaaggccctctgaagtgcagcccataatgaaggtcttggcggcaggccaaacgtaccaagaaagtcgggatcgtcggtaaatacggg

SEQ ID NO: 337382 - DNA, 95 bp, Homo sapiens
gtccatcgctgccagggcagaaattgagcaagcagcaagtcggctttcagatcagaatcttttagctgaaaaagtagagcagctgatggaatgga

SEQ ID NO: 337383 - DNA, 101 bp, Homo sapiens
acgccggagaactgtgcccattacttctgcctggactgcattgtcgaatggtccaagggtcggcactcttcaccctcccgagccctgcccgtctcggcccc

SEQ ID NO: 337384 - DNA, 82 bp, Homo sapiens
agctgtcctgaccaagaggaccagactttgttaatgaagacacatgcctcactcctgtcagcagttccaccttttcatggtt

SEQ ID NO: 337385 - DNA, 101 bp, Homo sapiens
gccggaagtcgtcttcatcctgggggatatctttgatgaagggaagtggagcacccctgagataaagtcagacctaaagccaaaaggaaagaagaaccaag

SEQ ID NO: 337386 - DNA, 87 bp, Homo sapiens
tttctgcacgagaccgggctggccatgatctatggtcctgttattgccttggagtttaatggggatggtgctgtagaagtatgtcaa

SEQ ID NO: 337387 - DNA, 51 bp, Homo sapiens
gtttggggagacgtccgccaagcttagaccatgctcagcctccaagcagcc

SEQ ID NO: 337388 - DNA, 75 bp, Homo sapiens
gaaggacgtggtgggaagagcaagaggagcttactcacatagcatattggtatatcaaaatgaaatgcaaggaac

SEQ ID NO: 337389 - DNA, 100 bp, Homo sapiens
gggatgagtatgcggaggacagctctgatgaggaggtcaaaatgcagatcttcgtgaaaacccttaccggcaagaccatcacccttgaggtggagcccag

SEQ ID NO: 337390 - DNA, 90 bp, Homo sapiens
ggctgcaagggccaagcacgctgttccaggaagaaccgggactatggtttgtgccctccttattgcctccgaaatatttttaactgccga

SEQ ID NO: 337391 - DNA, 82 bp, Homo sapiens
tttgccgtgacaacaccgttcccccagccgggctgcggagctggagtttgttcagatcatcatcatcgtggtggtgatgatg

SEQ ID NO: 337392 - DNA, 97 bp, Homo sapiens
tgtgctgggctctggacaggtggtaaagacacttgtggggttgacaggactgaggtgattcgcacctgcataaacccagtgtactcaaaactgttta

SEQ ID NO: 337393 - DNA, 76 bp, Homo sapiens
gaaaacaagtccgacagtgagaatggcttatgcaagcaaagatctggaggagcagttacggtctgtgtccagtgta

SEQ ID NO: 337394 - DNA, 90 bp, Homo sapiens
gtggccctcagaatttaaacttaaggaaagagtgggaaagtgaggggtggaaatgctaacctggtatttatgcttaaaagaaacagtgag

SEQ ID NO: 337395 - DNA, 50 bp, Homo sapiens
ctggacacagaagtatttgtgacaggttatgaagacagtatggagtttcc

SEQ ID NO: 337396 - DNA, 96 bp, Homo sapiens
tgaaaatgaagacgacattcagtttgtcagtcaatttttccagctagtcaaattacgaaagcttggacttagtgataatgaaattcagcggctccc

SEQ ID NO: 337397 - DNA, 100 bp, Homo sapiens
taattgaaaaacagtaaagatggaaaaccagttattgaatatcaagaggaggagttgttggctaggcagctggaagagaaagaccgagtgctaaagaagc

SEQ ID NO: 337398 - DNA, 101 bp, Homo sapiens
taggccggccccacagcggcattgacctacagatggtgaatatctccctgcgagtgttgtctcgacccaatgctcaggagcttcctagcatgtaccagcgc

SEQ ID NO: 337399 - DNA, 100 bp, Homo sapiens
ccctcatccatggaaacccggagggagagtcccgcctgaagaaacctggatctttgctagaaagagagtgccccaatgccatacctgattggaatacact

SEQ ID NO: 337400 - DNA, 97 bp, Homo sapiens
aggcccgcccaccagttcgcccgtccccctgccccgttcacaatttacagatgtagagctaaaacgactgaaggatgctttcaagaggacctgtgga

SEQ ID NO: 337401 - DNA, 100 bp, Homo sapiens
cgatggagccgtccggaggggagcaagagcccggagccgtcagggactttgaacatgtcggggatcgccctcagcagactcgcccaggagaggaaagcat

SEQ ID NO: 337402 - DNA, 83 bp, Homo sapiens
cccgcggcgcgcgcctctcccggaccctgcaggctatttgaactgctgggacctgaaggacttgaacttattgagaaactcct

SEQ ID NO: 337403 - DNA, 98 bp, Homo sapiens
aaagctgctgatggggctgctgaggccaacagagcacttatggcaaggcatctcgagggggtggcaatcaccaaaacaattaccagccatactaaagg

SEQ ID NO: 337404 - DNA, 100 bp, Homo sapiens
ctttgtggagaaagtcgtcttccacttgcacgaaagctttcctaggccaaaaagaggctgacaaacgggctcatcataatgcactggaacgaaaacgtag

SEQ ID NO: 337405 - DNA, 50 bp, Homo sapiens
gctgagggcagccccgtccagggctgacaaacgggctcatcataatgcac

SEQ ID NO: 337406 - DNA, 75 bp, Homo sapiens
ccgacagttgtgttgtgccaatggtggagaagaaaacttcggaggagaaggcagagcccccccaggctatgaatg

SEQ ID NO: 337407 - DNA, 100 bp, Homo sapiens
tctgtctcctgttttctaggtggaaagaatctgatgagccttttaggcctgttcagacttgtgtttgctcaaaccaattcttggtgcaaaggggcatcca

SEQ ID NO: 337408 - DNA, 96 bp, Homo sapiens
cctcggctccctgctgggcgggaccctggtctccgcgtacgggcaagccggtatattcggggcccaggagcaaggaaaagtggccttttgcgtgac

SEQ ID NO: 337409 - DNA, 90 bp, Homo sapiens
cagacctctctgcggccccaagtgttcgtgggacacggccaacacggtgaaggaaaagttcgggaggaagctttatgaatccttactggt

SEQ ID NO: 337410 - DNA, 100 bp, Homo sapiens
aagatggtgttgctgagagtgttaattctgctcctctcctgggcggcggggatgggagcgggcctccccttcctcatcatcgagacaagcaccatcaagc

SEQ ID NO: 337411 - DNA, 75 bp, Homo sapiens
ctcatcatgaccttccagaattacgggcaagcgctgttcaaacccatgaagctcagctgtcgcaggccctggagg

SEQ ID NO: 337412 - DNA, 75 bp, Homo sapiens
aaattaatgacaataatggatagtatgaatgatcaaggattcttacagaagcagagattgatgctcaccttgttg

SEQ ID NO: 337413 - DNA, 96 bp, Homo sapiens
aattgactataacgttgaacagtcctgtatcaaaactgaagatggtttgaaacagcttcacaagtgctacctgggcgatgccttccgctgtgccag

SEQ ID NO: 337414 - DNA, 100 bp, Homo sapiens
cgagagatggtcaggtctggagctcgaccgggccagaatcatgtccctaaggaggaagctggagctccacgaggggaggggccggccatcccaggagaca

SEQ ID NO: 337415 - DNA, 101 bp, Homo sapiens
gaggccattcacagcaaatgtcctgaacagtgtactaatggtcacttgatgtgcgctggctgttttatccacctactagcagatgcccggctgaaggagga

SEQ ID NO: 337416 - DNA, 51 bp, Homo sapiens
tcatctcactagttatgttcaaaaaagtgtgtggaggtcattgcaaaggaa

SEQ ID NO: 337417 - DNA, 87 bp, Homo sapiens
tgcttcatccttgtttaatgactttggtgccctcaacatctctcagagacgaaaggatcatccggacaaaagtacagcagccaccca

SEQ ID NO: 337418 - DNA, 74 bp, Homo sapiens
tgacatttaattttagggtcctttatatagaagggagagtaggctccacataaacacggtttccttgaaggccg

SEQ ID NO: 337419 - DNA, 100 bp, Homo sapiens
taaaactcgctgacttcggccttgcccgcatctatagtttccagatggctctaacctcagtggatattaaaggactcagcaaaaagagaaagatgtattc

SEQ ID NO: 337420 - DNA, 100 bp, Homo sapiens
tttgaaggaaaaaaggaagtgtttggacgacagcgagcgggagaagcggggtcaaggggatatgagactttctactcggaatatcctgagtgttgcgtgg

SEQ ID NO: 337421 - DNA, 82 bp, Homo sapiens
gttaaatacctgtgcatcccagcagcggattcaccatctcaaaacctaattggttccaaacagtaaagccgccagaaaaaac

SEQ ID NO: 337422 - DNA, 75 bp, Homo sapiens
tgcagcccacggcagagaatgcctatgagtacttcaccaagattgccaccaggaacctacaagcagcaattggcg

SEQ ID NO: 337423 - DNA, 82 bp, Homo sapiens
tggatcaaccctgcaggaagcttctcctgacccatgaccttcaggctgggaagaagaaattgtcgagacgaataacatgagg

SEQ ID NO: 337424 - DNA, 100 bp, Homo sapiens
cttctgcggattgttggaatctaccgcccacggatgacagtaaccagcccccgggccggggtgtcctctccatgcatggactgacctatggggtcattcg

SEQ ID NO: 337425 - DNA, 73 bp, Homo sapiens
tttcctgaggcctccccagccacgctttctgtacagcctgcagaactaaactggcagacctttcacttcgtat

SEQ ID NO: 337426 - DNA, 100 bp, Homo sapiens
ccacgacccagatcccagcggaaaggagcgcgcctctttttggcttggggagctgcagcgttcggctttttctcctccgtgacagccagagtaatccaaa

SEQ ID NO: 337427 - DNA, 83 bp, Homo sapiens
agggtaggagtttttgttcagggaccagcggaacgaggctttctgtcgttaatagggacagtggtgattatcctcttaccatg

SEQ ID NO: 337428 - DNA, 75 bp, Homo sapiens
gctccagtactcctgttgccccgtggtggtcctcccagacaccttggtcagctatcacattgaaatgagcttctt

SEQ ID NO: 337429 - DNA, 100 bp, Homo sapiens
gttatgaggacaacagaacttgtgaacaaggatctggatatttattataagactcttgaccagtcccaggaaggtggcgtcagcatctgcagccgcgtcg

SEQ ID NO: 337430 - DNA, 74 bp, Homo sapiens
agaaccccagtttcaacgagacttcatttcattgctccctaaagaggttaaagtattgcacaatcagctggtcc

SEQ ID NO: 337431 - DNA, 75 bp, Homo sapiens
agatcttcacagcacagttcctgggaaggtggagccaccagcctctccctgagcatccaggatgtgaggagtgat

SEQ ID NO: 337432 - DNA, 100 bp, Homo sapiens
ggtacagacctccaccgccacccccgacacaagagacttatggagaatatgcatttattaatacagcaaaagaaatttatgaaaaaattcaagaaggagt

SEQ ID NO: 337433 - DNA, 75 bp, Homo sapiens
cagaaaccgccccagcgatggaagaggatcaggagctggagaggtatctttcagatgaaggcattgaagcttgca

SEQ ID NO: 337434 - DNA, 100 bp, Homo sapiens
tgaagaatgcaatcttaatttgcctgtatgggacccaaggacaaagaaacagccttggtataatagcacgttagcatcaagacgaaaacgacttactgct

SEQ ID NO: 337435 - DNA, 82 bp, Homo sapiens
cgtcggggaggcaagatgatccaccagcggttccatcctacacttgggctgtgaggatatcattgctgagagcatctcatta

SEQ ID NO: 337436 - DNA, 90 bp, Homo sapiens
aggaagaagaggtgaagctcaaggcacaggtggcccgatcccagcaggacattgaaaggaatgtgtttactgtgaaaacaaggaaaaagg

SEQ ID NO: 337437 - DNA, 85 bp, Homo sapiens
cacaggacatgataattttcatctcggattttggaggaattctatgaagagcgagctctgtatctcgaagcaataattcagaacc

SEQ ID NO: 337438 - DNA, 132 bp, Homo sapiens
agctaaactcaatgctgctgtgtgggaagaagatttgtaaagaaaactcttaggctgaaggtgatgtggccgccctcaaccgacgcatccagctcgttgaggaggagttggacagggctcaggaacgactgg

SEQ ID NO: 337439 - DNA, 110 bp, Homo sapiens
ggagctggtcgcagatcctgagacccggacagtggcagtgaaacagctgccactgcagagccccgccatggaagacacgccgttggtgatatcgaagcagaagacggagg

SEQ ID NO: 337440 - DNA, 115 bp, Homo sapiens
ctgccagggacccctgttttcagctacggggatgagattggcctggatgcagctgcccttcctggacagatctccctagagcacgaaatcctgctgcacccgcgctacttcggcc

SEQ ID NO: 337441 - DNA, 90 bp, Homo sapiens
actggtggtcccccgctcccggggtccccggccggccaagcagacacgaatgcagagtttgagtccagatcccaaagcccagtacacaag

SEQ ID NO: 337442 - DNA, 50 bp, Homo sapiens
agcaattgttgtgacttcactaataaaggcaaaggaaggatgaactggag

SEQ ID NO: 337443 - DNA, 75 bp, Homo sapiens
cactcccaccgcctctactacctgggagattgaccccagcctgggcgtggcggagctgcctgacgagttcttcga

SEQ ID NO: 337444 - DNA, 100 bp, Homo sapiens
gaaaagctgcacttgaggcccagaatgcactgcacaatattaaaactttacctgggctccagaagcagctgtctgagctggacgaggacgacctgtgcta

SEQ ID NO: 337445 - DNA, 75 bp, Homo sapiens
ctaaggcgagccggagaccgagcccgaacagcaggctgaaggggatgctaagggagataaagcaaaggtgaagga

SEQ ID NO: 337446 - DNA, 83 bp, Homo sapiens
caacatccaccttctgtggcacgccggagaatgagtccctggaacgccagatgcgtgaaatggaagagaactttgccgttgaa

SEQ ID NO: 337447 - DNA, 99 bp, Homo sapiens
cccgcgtccctgcgaccgccgcggcgaagatgtattctgacaagtccctgtacacccagctgtgcttttaccggtacatttttgatgcggagtgtgcac

SEQ ID NO: 337448 - DNA, 82 bp, Homo sapiens
cccgagctgaatacttgaaggagcaggtcaagcctcctgacaaggtgatccgggcgggccccgcaggaattttatcccctca

SEQ ID NO: 337449 - DNA, 101 bp, Homo sapiens
gaacggggctttccaggagcgggcgctccggtgtttccaccagctcatgaaagacacgactttgaactggaaggggctggctgtgggcaatggactctcct

SEQ ID NO: 337450 - DNA, 60 bp, Homo sapiens
gtgacatgtccagcatgaatcccgaatacttcagcaagtgtcaacattggtcagttagag

SEQ ID NO: 337451 - DNA, 88 bp, Homo sapiens
cgtcgtgaggccagaggctccagtccccgcggacgtcccagtgatcgggaggagtgggaagagcttcagctacaaccaggacgtggtg

SEQ ID NO: 337452 - DNA, 97 bp, Homo sapiens
ctttctccagtggaagtggttggaaagattttagcatcgatattatggaagctatgcctggactcaacaacacgaacttctactcaccaaggctgat

SEQ ID NO: 337453 - DNA, 90 bp, Homo sapiens
gattgccaacagtgtatgctcgaaatcctggatactgcagggacagtgagaagcgccactgctttgatgtcaactataattcaagttaca

SEQ ID NO: 337454 - DNA, 100 bp, Homo sapiens
gcaaggcaaagtcttttgtgctcccctcccccatcaaaggaaaggggaaaatgtctcagtcgaaagatgctattaactgagtacttggatatgaaaaata

SEQ ID NO: 337455 - DNA, 100 bp, Homo sapiens
gtttcatcgtgtcatcaaggatttcatgattcaaggaggtgacatcaccactggagatggcactgggggtcggaagtctatgcgtcagtctacagctgag

SEQ ID NO: 337456 - DNA, 100 bp, Homo sapiens
gctggcgtggataaagatggaaggggtaattgggatacttctggcagcgaactgagtgaaggggaattggaaaagcgcagaagaacccttttggagcaac

SEQ ID NO: 337457 - DNA, 100 bp, Homo sapiens
cccgcctcctgagtatgacagtccggagaggcccacggagttacgtggtgcttctgtaatcattaggtttgtgaccaatacaaccaaagagagcaagcaa

SEQ ID NO: 337458 - DNA, 49 bp, Homo sapiens
ccgctgaggagctgcagtctctgtcaagagagtaaaacttgtctcggca

SEQ ID NO: 337459 - DNA, 75 bp, Homo sapiens
cacatgggtcctggagatggaatacagatcctgaaagatctgcccatggagccctctggcacaaatggaagaaga

SEQ ID NO: 337460 - DNA, 83 bp, Homo sapiens
tgccttattttttctcatggatgttcttcttcgagtatttgtagaaggaatgttgtaccatctttgggtaggcagacttccct

SEQ ID NO: 337461 - DNA, 82 bp, Homo sapiens
gaaacccaattgtgccagcctggtttggtaattgacctcgaggacaaggacaaataccagtttggtaagacaaagatctttt

SEQ ID NO: 337462 - DNA, 100 bp, Homo sapiens
tttgattcttttgaaccaggaatgtttcctcctactcctctttcacctgccaggttcaatgccttgtctttgaagatgctcccaatggggtggaggcggc

SEQ ID NO: 337463 - DNA, 75 bp, Homo sapiens
cagaacctgtctccagtgggctctggcgcctatggctctgtgtggtgcatgtgagggaaccctggcttgttcaac

SEQ ID NO: 337464 - DNA, 83 bp, Homo sapiens
aagcactgacaagcagcacattctcaagagcacacaggtcacagtcgaactgttattggaattgaagagaaaaaaaaccgaac

SEQ ID NO: 337465 - DNA, 75 bp, Homo sapiens
cacatgctttgtgttttttgacatgttcaatgcactaagttccagatcccagggccgagatctggacgataaaat

SEQ ID NO: 337466 - DNA, 73 bp, Homo sapiens
ataagggttcctgctttcacagaattattccagggtttatgtgtcagggagtggtgcatttccaggcagctgt

SEQ ID NO: 337467 - DNA, 99 bp, Homo sapiens
ttctaagctgaataaagctgttttggaactgtcaggtacctcaaagcgtctcagcattagagaggcagatctttgacttccttggtttccagtgggcgc

SEQ ID NO: 337468 - DNA, 99 bp, Homo sapiens
gttacagccagctcaggctccgccttgcaatatgacacactcatcagcctggtggatgctctccgattgcgtttggaagagaaggaaaccatgttgaat

SEQ ID NO: 337469 - DNA, 75 bp, Homo sapiens
gtggaaggtgcgcgagctggtggacaaagcatgcgcctgcttcctctgcgccagaagaaggcccacctgatggag

SEQ ID NO: 337470 - DNA, 50 bp, Homo sapiens
gaagaagcagaagaagtttgaccaggtgtcagcggtgcccactgtgctgg

SEQ ID NO: 337471 - DNA, 95 bp, Homo sapiens
tagtcaactgcgtggaagagaagacaatgcagatcttcgtgaagactctgactggtaagaccatcaccctcgaggttgagcccagtgacaccatc

SEQ ID NO: 337472 - DNA, 98 bp, Homo sapiens
tgtcttttgaaaggtgtactgcaaggaacaaaatgtttgtaaattctccttttaccaaggcattatattgtacttctagcaagtgcaccaacagaaaa

SEQ ID NO: 337473 - DNA, 88 bp, Homo sapiens
tttaggagctctgctcaaagccagacggctgttgagctaatggaccgaactgaaatgccatgccaggcattagtgaggatgctagcca

SEQ ID NO: 337474 - DNA, 122 bp, Homo sapiens
ccaaggtcaacctgctgtattcccgcgaccattcggtggccgagagcctcaactacgtggtttacatgttccaatatgattccacccatggcaaattccatggcaccgtcaaggctgagaac

SEQ ID NO: 337475 - DNA, 75 bp, Homo sapiens
ccaactgtgggaactctttccagcttgtgtctggggcatggtctgcatgggataggagaaactgtccatgtccca

SEQ ID NO: 337476 - DNA, 101 bp, Homo sapiens
gaagacagagggttttcttttgaggaatcctatgaggatggttgtgaggattatcctactctatcagaatatgttcaggattttttgaatcatcttacaga

SEQ ID NO: 337477 - DNA, 75 bp, Homo sapiens
tcctgtacagcctgcagaactgtctgggctcctttcccttcaagacccggaaggaactgcagagttggaaggcag

SEQ ID NO: 337478 - DNA, 50 bp, Homo sapiens
ggaggaacgcgctaaggcaaagcacctggaaatatttgatgatgcgtcac

SEQ ID NO: 337479 - DNA, 74 bp, Homo sapiens
tggttctctccaggacatctaccaagtggaatgcagtagccctctgggcctgggatattgtggttgataactgt

SEQ ID NO: 337480 - DNA, 96 bp, Homo sapiens
gcaggagcagccgcagtagatctcgaagtatctcaaaaagtcgctcccgactacccagaccctgataacttctgttgggagaaatatctggaagaa

SEQ ID NO: 337481 - DNA, 108 bp, Homo sapiens
acaatatattgactactgccacaattccggtgtcatggagaaactccagctgggcccagagattctgcagcgggaaaatccaaggcttatttatgccaggctgagtgg

SEQ ID NO: 337482 - DNA, 100 bp, Homo sapiens
cagacctggtcacagtctaggttctacatcttactggtcgagcaactttaggaacaagatcaccatgattgctgagcctcttgagaagggcctggcagag

SEQ ID NO: 337483 - DNA, 98 bp, Homo sapiens
aggccggctctccatgatgtccttcatcctcaacgccctcacctgatcgaagcaaagctgagatggatttgaaggagctgagcgagtcggtccagcaa

SEQ ID NO: 337484 - DNA, 96 bp, Homo sapiens
attagaactgcagaggttcctctacagcaaggtctctggacctctgactgacactgtgcctgcccaggtccctgtatgcactgccacagtgccctg

SEQ ID NO: 337485 - DNA, 74 bp, Homo sapiens
cgagaaccgtcagtttgagccagatgtgcatgcaagatatgggaaatactaaagcaagactactctatgaagcc

SEQ ID NO: 337486 - DNA, 75 bp, Homo sapiens
tgaatcgcatttttgaccttgaaaatcttgggtgaaagcagccttcacaagagcttacaataaggaagcccacct

SEQ ID NO: 337487 - DNA, 75 bp, Homo sapiens
gcctattggaggaaaacacaccaaggtgaaaggtgtagcagtcactcggcctacacccacagcatcgaccttgtg

SEQ ID NO: 337488 - DNA, 88 bp, Homo sapiens
cacctggggatgaggagcttggatttgaagcagcagttgctgccttggggacattgacaaggtagatgaactgatgactgacatcacg

SEQ ID NO: 337489 - DNA, 100 bp, Homo sapiens
gccgtgctggccgcggcccgcctcagcatctggtacagccgaagccgagactgtctgaagctgggcccacctgctgagggagaagtcgtccaagtcaagt

SEQ ID NO: 337490 - DNA, 75 bp, Homo sapiens
acgtcttccacctggagggcatgactacatctgtcatggtactccaaagattcaggtttactcacgtcatccagc

SEQ ID NO: 337491 - DNA, 80 bp, Homo sapiens
cagattcgcagtggtcgcttcttctccttgttaagtgggcagaccaacatccacctcagcaaaaacttcttcctgacgaa

SEQ ID NO: 337492 - DNA, 82 bp, Homo sapiens
gcagttcttgtttgtggatcgctgtgatcgtcacttggtgagcgagtgctgtgctttcatgggcctcttctttatgaagcaa

SEQ ID NO: 337493 - DNA, 100 bp, Homo sapiens
ctggaacttcatcatcatctacttcacaggaattgccatttgaattgaaagatgttggccatcgtgatcagatggctgcagctagaggaatcctgcagaa

SEQ ID NO: 337494 - DNA, 50 bp, Homo sapiens
gacaaactgacggaaaaggagagagagacaaggagcatccaagatacctg

SEQ ID NO: 337495 - DNA, 100 bp, Homo sapiens
cgacccagtgccgcgcagctgctggaggccagtacagatgacggctttgtatataatttggatgcacgttcagataagccaatttttacacttaatgcac

SEQ ID NO: 337496 - DNA, 75 bp, Homo sapiens
gtggatcagaactgtgttcgcaattcttacgatgtcttctctttgctacggacgcgcggcctcctcagcctcttt

SEQ ID NO: 337497 - DNA, 98 bp, Homo sapiens
gacctgctgacagagcagatggcctggagattcatgacaaaatcatggagagcatatatcattacagactatatgggcatccgaaatgaaagtttcat

SEQ ID NO: 337498 - DNA, 132 bp, Homo sapiens
acgcagcagctccttccgagaaatggagaatcagccccataagaaatacgaactcacggtccacctggaaggccgctgtggtggaaggatgtttgactgcagagatgtggcattcactgtgggcgaaggaga

SEQ ID NO: 337499 - DNA, 100 bp, Homo sapiens
cagtttgaggatgcagatgttgatcactgaaaatgatttatgcaagtttaagctctggtagctgaagaacatctcacagtggacgccagggtctattcct

SEQ ID NO: 337500 - DNA, 80 bp, Homo sapiens
agtacaccgtggtgacattgtatcattggtctgtctgtggaagcccgtaaagagatgactagaaaggctattaagacagt

SEQ ID NO: 337501 - DNA, 74 bp, Homo sapiens
tccggggccgggctcaggagcagagccaaaagaatgcaatggtgtaaagattccagttgatgccagtaaaccta

SEQ ID NO: 337502 - DNA, 82 bp, Homo sapiens
cggaaaggggcccggcgtctgcctcgagactgaagaccgattttgcaagaacgaggctcaaggatgtgagggacacagtatt

SEQ ID NO: 337503 - DNA, 75 bp, Homo sapiens
tccagctccaggccggtccgctgccaggtcctgggaactccaacaagggagcaaatcagagaaatgaacccaaac

SEQ ID NO: 337504 - DNA, 82 bp, Homo sapiens
ctcatcagcaagaagctggagcgctacctgaagaacccagtgacttgattgtaaaaatttacagagcggaatcatatgctgg

SEQ ID NO: 337505 - DNA, 75 bp, Homo sapiens
aaatgattccagaaaataagtatttccaccatatgttcagtgcattcagaacaagcccctgtattttgctgatcg

SEQ ID NO: 337506 - DNA, 82 bp, Homo sapiens
ggacttccattattctttgtgataacagtaactgccataaagcaggagctcagggcaagtggcagtagccagaggatgttgc

SEQ ID NO: 337507 - DNA, 100 bp, Homo sapiens
cttttccgcccgcgccccaggcccttgcagatcgagatttgcgtcctagagtgggaaaaaagcagaggccagggcgccgctcatgatggagcagtccaag

SEQ ID NO: 337508 - DNA, 100 bp, Homo sapiens
gtacgttcagatgtagccatgactggagaaattacactgagaggtcttgttcttccagttttccctgatgaatttcacctccagactttgaatccttttc

SEQ ID NO: 337509 - DNA, 74 bp, Homo sapiens
ctctgggtcctcggtcggtacagtctctgcacctcgcgccccagcagagtgaaccagaggaaatgcctccagaa

SEQ ID NO: 337510 - DNA, 82 bp, Homo sapiens
ctggcttgttcgggctcagcggccgcgaggccgcagctcccgacaatgcagatcttcgtgaagactctgactggtaagacca

SEQ ID NO: 337511 - DNA, 100 bp, Homo sapiens
aacatcgtggccctgtacgacttccaggccacccagaggagaaggccaccccgcctggaggcacaggccatgaggggctctcaggaggtgctgctgatgt

SEQ ID NO: 337512 - DNA, 74 bp, Homo sapiens
tgaggcgggggtcggcccggggctcggagaatgggcaggagtgtgaggaagaggctgtctgtgtcattatgtgt

SEQ ID NO: 337513 - DNA, 100 bp, Homo sapiens
cagaccctggagcctcagttggaagcagccgatccagcctgcggagcctgtggggcagtacaggagagggtgaccttctgtcccacggtccctgacaccg

SEQ ID NO: 337514 - DNA, 127 bp, Homo sapiens
acgagtacagcaatatagaggaattcgcagagggatccaagatcaacgcgagcaagaatcagcaggatgacggtcctcatcaccgggggcatcgtggccacagctgggcgcttcacccagtggtact

SEQ ID NO: 337515 - DNA, 98 bp, Homo sapiens
ttgaattttctaaggtgtcattagatctcttccgttccctgctggcagttcatcagctggatcagccacatggtggccttactggacaaagaccaagc

SEQ ID NO: 337516 - DNA, 75 bp, Homo sapiens
ccggggtgaatgtcgtgctggtgatggcctacgggagcctgctcctggatctcccaggtatcattgaaggtgcca

SEQ ID NO: 337517 - DNA, 90 bp, Homo sapiens
aggaaaggtgccacagcagagacgcgaaggagaggccctagaaccatgtagaggactcaagtcagagaccagatcagggaccccagagac

SEQ ID NO: 337518 - DNA, 75 bp, Homo sapiens
aaccagacaagaaatagtatcattattcaacgcatttggaagcttttgttaggagtgataaacccaaactgttca

SEQ ID NO: 337519 - DNA, 95 bp, Homo sapiens
gggaagttcaggaaacatccaagaaaaatgtccttaaagcaattgagcaggctgatctactgcaggagattttggaaataatcagggttatttta

SEQ ID NO: 337520 - DNA, 100 bp, Homo sapiens
ggaatgacctctaaacagcttaacaactgggccgtgtataggttgtcaaaattcacaaggcaaggtgactttgaaagagagaagaagaaggaggttcctg

SEQ ID NO: 337521 - DNA, 88 bp, Homo sapiens
gcaaagacctggacttctacgacttcgagccgctgcccaccctccccgaggacgagtgaacagcagagaatttcaaaggaccttgcta

SEQ ID NO: 337522 - DNA, 75 bp, Homo sapiens
ggatttccaccagggctggaaaggttacttcaaaatgtgttctaagaacggaagcatctgggctggatggaattt

SEQ ID NO: 337523 - DNA, 80 bp, Homo sapiens
ccgctctcgcttcgtcctacacttgcgcaaatgtctccgggctccacgtgttccccacgtttgtggcgtacgagctcacg

SEQ ID NO: 337524 - DNA, 80 bp, Homo sapiens
tgagagagatgcttaaaaatcaccagttactttaatgagctatgaccagggccagagcactcagatctcagtcagaggag

SEQ ID NO: 337525 - DNA, 100 bp, Homo sapiens
caattttacccaagaccaggaactcctgctgcaaaaatggaacaagttccagcacaagtgagaaccatggagtctggcagtaccgccgccagtgaggagg

SEQ ID NO: 337526 - DNA, 59 bp, Homo sapiens
tagactgaatccacatagagaaagtgatgggactccagggattagagctcgatctgcaa

SEQ ID NO: 337527 - DNA, 100 bp, Homo sapiens
attaaatactggtttcacactccaccaagcatcccattacagatagaagaggttcctccccgggcagaagaaatcaccattccagctgatgtcaccccag

SEQ ID NO: 337528 - DNA, 83 bp, Homo sapiens
ggaatcaaagataaatccaaatactgcatatcagaaacaacagggctcacccacctcattggatctcctttcctccgggcata

SEQ ID NO: 337529 - DNA, 83 bp, Homo sapiens
caaaatcaccagcaagtttcgaggcaaatacctctccattatgcccctcgagcccagaacgcttcctccagcttggcgccaag

SEQ ID NO: 337530 - DNA, 75 bp, Homo sapiens
ctcagtccctctgtgctccaggactccctcaataattgcacagccagaggacaacacatcacacacaagaaacag

SEQ ID NO: 337531 - DNA, 75 bp, Homo sapiens
cagacgacaataagctcttcagggaggaattcaacgatcttaagattgaaagtgatgttcaagaaccaactgaac

SEQ ID NO: 337532 - DNA, 75 bp, Homo sapiens
gccatgttcagcgggcgcatggaagtgctcaccgacagtgaagtgagagggtccaagcctggtaagaatgtccag

SEQ ID NO: 337533 - DNA, 75 bp, Homo sapiens
tcgggagctggctgaagatggctactctggagttgaggtgtcccgacccaggctaagcttgagcatggctgagca

SEQ ID NO: 337534 - DNA, 74 bp, Homo sapiens
tgacgccatgtcgggttattcgagtgaccgagaccgcggccgggaccgaggaacatggtccaagacaattcctg

SEQ ID NO: 337535 - DNA, 74 bp, Homo sapiens
gagaacctgaaggctgcgcaggaggagtatgtcaagcgagccctgatctcacattcttgaaggtggcattgaag

SEQ ID NO: 337536 - DNA, 98 bp, Homo sapiens
tcacatcagcattttctgttgactgtaaaggtgctggtaagatttcttctgaataactgaagtgaagtgatggactccgatttggagagtagtaagac

SEQ ID NO: 337537 - DNA, 90 bp, Homo sapiens
ctacttgggactcctctctcaagagaagctgcaagagcaacatctttcctcaccccaagagacgcctggagacgctcagggcagtccccc

SEQ ID NO: 337538 - DNA, 96 bp, Homo sapiens
agagactccttgggggtcgagcacataacggggttcgggtgtctcgtgtgtgaacatcacaggccatcgaagacggcaatttggaggaaatggaag

SEQ ID NO: 337539 - DNA, 75 bp, Homo sapiens
caagacatttcttcggcattctgcaacagttgaagattcctgtctctggatccaaatcagagggccttctctacg

SEQ ID NO: 337540 - DNA, 99 bp, Homo sapiens
gtttgacacaactgtagagcagctgtatagcatcttcactgtaaaggagccccatggctgggggttatggagtgatgggtgacgatggttctattgatt

SEQ ID NO: 337541 - DNA, 100 bp, Homo sapiens
cagggaagtctataagctttgcaacagaattacagagtatgatgatcaaacagagcatactgaatcagcaggactggctggtggtgcagcagacatcatg

SEQ ID NO: 337542 - DNA, 75 bp, Homo sapiens
ggcagacccggcacgcaggtgggggccggcggggtccgtggccaggaagctcttcgtgggcggtcttgactggag

SEQ ID NO: 337543 - DNA, 96 bp, Homo sapiens
tttccatgtcaacatagtcctgggtctccgtctctccaccgggggcttcatccttccagggaggagaagagggactccagaatggctgaggagaag

SEQ ID NO: 337544 - DNA, 74 bp, Homo sapiens
accagctatcccatgcatgatttctacaggaatggaagttggatacactttgtgacttgtacgagacactgacc

SEQ ID NO: 337545 - DNA, 100 bp, Homo sapiens
attgtctttctccgcggcgaaggtgaagagttgtcccagctcggcccgcgggggagccccgggagccgcacgcaggaaccgaatattgtatctgacgcat

SEQ ID NO: 337546 - DNA, 98 bp, Homo sapiens
gggcacaggcagccacttcgctgcttgcctcatcagcctcacagttccccacaggtatccgctgatcattgacccctctggacaggccacagaattca

SEQ ID NO: 337547 - DNA, 82 bp, Homo sapiens
cagtcggcttgtcctggctcttgccctcatcctggttctggaatcctcagttcaagggcaggagcgatttggcaacatgacc

SEQ ID NO: 337548 - DNA, 97 bp, Homo sapiens
aaagattcagctgacatttgaggctactctccaacaattagaagcaccttataacagtgctggagaatctggtaaaagcaccattgtgaagcagatg

SEQ ID NO: 337549 - DNA, 71 bp, Homo sapiens
tggactccccatcatccaagacgtcatgctagccgaggcccaggcatcctctggtatcacgattccaaaac

SEQ ID NO: 337550 - DNA, 90 bp, Homo sapiens
cccggcgcaccgactggaccgggaaggagcatcccaggacctaccagaatctggtcaaaatgcagatcttcgtgaaaacccttaccggca

SEQ ID NO: 337551 - DNA, 73 bp, Homo sapiens
tggctcttacgcctcttctgccattacgttcccaggaatcaaggatccagagaatcacccgctgatggttttt

SEQ ID NO: 337552 - DNA, 50 bp, Homo sapiens
cagcgacaaatttagagaaacctcggcagttcgaaaagatataatccgca

SEQ ID NO: 337553 - DNA, 90 bp, Homo sapiens
gtcatcagctaatgtctacctcgaatcaaagggaaattttttgggttcaaattccctggtctgagagttctcacttacagaaagcagtcc

SEQ ID NO: 337554 - DNA, 75 bp, Homo sapiens
gggtgacacgctgggggtcggcaccttcggcaaagtgaaggacaccattcgcttttcacccaagatgatttgatg

SEQ ID NO: 337555 - DNA, 119 bp, Homo sapiens
aaaatattcttattgttattttcccaatttttgctatactcctgttctggggacagtttggtattaaaaggccgttgctccagggagaactgcaaatatcttcatccacccccacattt

SEQ ID NO: 337556 - DNA, 49 bp, Homo sapiens
ggagaagtgggcccccccggaccaccagttgtcgacaacagtagcaact

SEQ ID NO: 337557 - DNA, 87 bp, Homo sapiens
tgagtataaaggatgggttttaactacagacccagtctctgccaagatgaagatttgataaagtggaaggcactgtttgaggaagtc

SEQ ID NO: 337558 - DNA, 50 bp, Homo sapiens
aaaaaatcttcttggttctgctacaaatctcagtggttcaatagcatccc

SEQ ID NO: 337559 - DNA, 100 bp, Homo sapiens
tgaagaagataacaatcaagatgaatatgaccctatggaagcagaagaagctgaggatgaagaagatggtagttacttttggtgacgctgtccagttccc

SEQ ID NO: 337560 - DNA, 108 bp, Homo sapiens
acagcttggccggtgcttccaggaaaccattgggtcacagctcggggtgtggttttctctcggttgtgcctatttggccttggaagactatcaaggttcagcaaaggc

SEQ ID NO: 337561 - DNA, 100 bp, Homo sapiens
gctgattctgccaagtgcactgaggaaggaaaatggagcccggagcttcctgtctgtgctccaatgccctgccctaaggaagacactcccaattctgttt

SEQ ID NO: 337562 - DNA, 100 bp, Homo sapiens
agtgtaaaaccatggcccatttgctgagagatggatgttaaaaatcaacaccaggactacagtaaggctgaaatcattgaagtgcttggagtgcagaact

SEQ ID NO: 337563 - DNA, 100 bp, Homo sapiens
gaagcagaagtacccccaccacgcctctgcaatcatgggtcaccaagagaggctgagagaccagtcgtctgtctgtgaaatatggacgaatcagaacgca

SEQ ID NO: 337564 - DNA, 98 bp, Homo sapiens
tttgatcgtcttcctcttcagccatccaggtctcctctgagcctccggcctccataagacccaaaacagatgacacctcttcccagtcccccgcgcct

SEQ ID NO: 337565 - DNA, 82 bp, Homo sapiens
cgtcgccatcttggatccgcgggacaagaaaattcatgcgatccagtttgctgaccagaagcaagaattcaacaaacgtccc

SEQ ID NO: 337566 - DNA, 83 bp, Homo sapiens
ctcttgccctcatcctggttctggaatcctcagttcaaggacttcctgatccatttgctaaggtggtggttgatggatctggg

SEQ ID NO: 337567 - DNA, 101 bp, Homo sapiens
ttcgggtgggagtgacccgattttccagaattgctgagtactcctatgggcatcaaaagaaatcaagcaagaagaaaaaaatcagtaagaatgacatccgc

SEQ ID NO: 337568 - DNA, 100 bp, Homo sapiens
agagaccaccaaacaggctttgtggacaggagagagtggcaagagtacgtttatcaagcagatgagaatcatccatgggtcaggatactctgatgaagat

SEQ ID NO: 337569 - DNA, 98 bp, Homo sapiens
tgaatgtgttactccattgctgaggagtgattgagaacctagatccccgaggaattcagctatcagctctcttcatgagtggagtagacatggccttg

SEQ ID NO: 337570 - DNA, 90 bp, Homo sapiens
gacaggtccaggtgtcagtttgatgcttgtacctccccaagtcatggaccatccaggtgggtctagtttccctgttggacaatccagccc

SEQ ID NO: 337571 - DNA, 100 bp, Homo sapiens
gaaggagcccgattacaaggatatttacctgctcctaccctgatctagtctattatcctcccagtccacaacgctgaaccgtggctggacgaatgtttga

SEQ ID NO: 337572 - DNA, 73 bp, Homo sapiens
aggctaaggactgtatcgactcctttgttactcactgtgttcggaaaattggagaagactatgtgaaagacct

SEQ ID NO: 337573 - DNA, 100 bp, Homo sapiens
gcgacgttcacagaggaacactgccggggcccaaccacaagacgactcaataggaggaagatcatatactcctatgaaaggaggaatctccaatgtatgg

SEQ ID NO: 337574 - DNA, 147 bp, Homo sapiens
cagaggttgggattcgtgtctggctctggaattgctactgctgcctctgtcactcctggtgaccagcattcaaggagcatcagatccatgctgctgctgactcggagccccacagcttggcacaggctctctcagctcaagcctcgg

SEQ ID NO: 337575 - DNA, 100 bp, Homo sapiens
tccaacactacttagctttccaagtgagggccccaaggctgttgcagctcctcgacctgatcggttggtcaatcgcttgaagaatatcactctggatgat

SEQ ID NO: 337576 - DNA, 75 bp, Homo sapiens
actggataacactaagtttagatctcatgagtctgcgctcctcagaccaccggcaggtgaacagcctgatgcaga

SEQ ID NO: 337577 - DNA, 90 bp, Homo sapiens
gaagccttcaaagggaccaagaaaggcactgtctaccttaccccttaccgggtcaggctcgggcagctgctgaagcagcaggagaagatg

SEQ ID NO: 337578 - DNA, 100 bp, Homo sapiens
ccatgcagggcagtgaagaattattttcagtggaaccactaccaccacgaccatcatctgatcagtctagcagggcgttgaagggcaagattaagaagga

SEQ ID NO: 337579 - DNA, 90 bp, Homo sapiens
ggtcaacctgtacagtggcaaaatcatcactacgaaggcagacatttgggtgcggcccctcaatccagagggctccctgttcctctacgg

SEQ ID NO: 337580 - DNA, 75 bp, Homo sapiens
tctgaagagctatggtgaaacaccactgaagcattgccaaggcagctgctcccaaccccagaacctttgctgtct

SEQ ID NO: 337581 - DNA, 75 bp, Homo sapiens
cggggtctgactcccttaaacgttccttgtggagaagcactggtataagcagtgggaggcatacgtgcagggagg

SEQ ID NO: 337582 - DNA, 138 bp, Homo sapiens
gcgaatttgaaagaagaaaaccagatggaacaacgacgttgggacttctccatcctgtggatcccattgtaggaggaaacccagcgtttgctggcagaaccagttcctggcatcaaagccgaaccagatgagagcaac

SEQ ID NO: 337583 - DNA, 100 bp, Homo sapiens
gccatggaacgcacgcccccacatctgctcaaggagatcattctggtggatgacaacagcagtaacggttatcaagttatacccaaccagcagcaaaact

SEQ ID NO: 337584 - DNA, 75 bp, Homo sapiens
attagcgctagccctgcagacagaggtgtgctgacgacctgctacaacagaaacagcaaggccatcgtggacggg

SEQ ID NO: 337585 - DNA, 100 bp, Homo sapiens
cttcctttctcatgttttggctttggggctaggatcttcaggatttattccgcaagactggccaggacgtggatgggaagctgacctaccaggaaatctg

SEQ ID NO: 337586 - DNA, 100 bp, Homo sapiens
tgattggcaacatgttagctttgaagtggatcctaccagtctcttgcatggcaccaagaatgttaccaattcaagcagtttaagattgccaagacaaaat

SEQ ID NO: 337587 - DNA, 100 bp, Homo sapiens
tggcctcatctgttccagggaggtgggattgaccaatggagatcttcgtggatgatgagacgaagttgacgctgcatgggttgcagcagtactacgtgaa

SEQ ID NO: 337588 - DNA, 75 bp, Homo sapiens
aaaattggctggcagagcaacagaaaatgcaggaacaacagatgcaggtgattcgcaaggggtggctcaccatca

SEQ ID NO: 337589 - DNA, 99 bp, Homo sapiens
agcttggatccttgtgggcatgatccataatcggtttcaagatcagatccagactgtgaagacatgaaaagataatagttggaaacctcagcaattttc

SEQ ID NO: 337590 - DNA, 82 bp, Homo sapiens
gaccagacctgcaagctctttgacacacagcagttcttgtcagggatgaggcagatgagctccgtaaagctctgaacaagct

SEQ ID NO: 337591 - DNA, 100 bp, Homo sapiens
tctcgcccatcagcgcggcgctggccgagagccgcggctccgtgtttctggaaagtgacagcagggaacggcaggagcagctgatgggatatcggaagag

SEQ ID NO: 337592 - DNA, 98 bp, Homo sapiens
gaaatcactgaggagtccaaggctctcctggaggaatacaacaagactcttcctgtccacttccaacgaagcggtctataagatctttgatgacagcc

SEQ ID NO: 337593 - DNA, 100 bp, Homo sapiens
gttttgcaaaaaccatcagtgtttgggaatgattctgatgatgatgatgaggtccttttggtgtgaaccatggggtggaacttcactcagatgtgataga

SEQ ID NO: 337594 - DNA, 83 bp, Homo sapiens
agaaggccttgactacggaggggttgccagatggagtcttgcttagtcgcccaagctggagtagtgtggctcgatctcagctc

SEQ ID NO: 337595 - DNA, 51 bp, Homo sapiens
agggtgccgaaccagatctaatcaggagcactttagtgaataaagaacctg

SEQ ID NO: 337596 - DNA, 51 bp, Homo sapiens
acccgtgtacgtgcctgtgcctaaagtttatgctggattgaatattttttt

SEQ ID NO: 337597 - DNA, 73 bp, Homo sapiens
tgcagggagggatacaagttccaggacacagcattgttggttttgccatgtactattttacctatgacccgtg

SEQ ID NO: 337598 - DNA, 101 bp, Homo sapiens
tgtcgtgaagaagcaggaggctaagaaagtggtgaatcccctgtttgagaaaaggcctaagaattttggcattgagattctgaaaagcttcctccttgtaa

SEQ ID NO: 337599 - DNA, 114 bp, Homo sapiens
ccaaattcaaaaaggataaggagatcatagcagagtacgatactcaggtcaaagttaaagccttccatctgaagtatgatgaagttcgtctggatccaaatgttcagaaatggg

SEQ ID NO: 337600 - DNA, 83 bp, Homo sapiens
ctgggcaagctggagcaggtccgcagcctgtctgccatctacctggagaatggatatcaaagtattgcagagtgccttagcag

SEQ ID NO: 337601 - DNA, 100 bp, Homo sapiens
cttccatcaatcatatctcacaggactactgttcgaagatttttggaagaatactgagaacggcataaagtgaagatcgacatttaaaaaatgaggtgaa

SEQ ID NO: 337602 - DNA, 95 bp, Homo sapiens
ctctgtcccgcccgggcagctctgcgaggcagcggctggagagggaaccatggggactgtgcacgcccggcttttcgctgtggcctgcagttttt

SEQ ID NO: 337603 - DNA, 51 bp, Homo sapiens
cccgaggcgaggaggagcgctggcggagattacctggggcaattgatgtta

SEQ ID NO: 337604 - DNA, 75 bp, Homo sapiens
cctggtcttgctcggccgatgaagtgcagaggtttttttctgcttcgtgctctgtctgatgatggagtatctgat

SEQ ID NO: 337605 - DNA, 83 bp, Homo sapiens
agccggtgccgcagctgcgatggccgtggccgtggggagaccgtctcaactcctggtcgactgattgaccacttggaaaatac

SEQ ID NO: 337606 - DNA, 90 bp, Homo sapiens
gccctgtgtgacaccaagataagtaacggcctgcttccgcgaggccaacatcccaacccacttcgggagaagaaccgacaggtgaacgag

SEQ ID NO: 337607 - DNA, 75 bp, Homo sapiens
gggagatcccaggcggtgacagagtggagccatggctagaggaggagaacatttgcctgcactgggcggcgttct

SEQ ID NO: 337608 - DNA, 82 bp, Homo sapiens
tcactccccgcctatggtcaaaaatgctactgtgcacccaggcctggagttgccatggcagagcggcttgggtaaatccacc

SEQ ID NO: 337609 - DNA, 82 bp, Homo sapiens
ccgtgttgctgatcgcctgggtggttgttggcgtgtccctgcagcgaaggatcctgccgcttacaaacacgcagatggcaag

SEQ ID NO: 337610 - DNA, 51 bp, Homo sapiens
gccctgggaagagaagcctagatatctgccgccaagctgagccaccaaaga

SEQ ID NO: 337611 - DNA, 100 bp, Homo sapiens
gcggctccggcgtctccgcagcagatcagggaccggctgctgcaggccatcgacccccagagcaacgtcagcgccaacggcaatgtcctgcgcagcgaga

SEQ ID NO: 337612 - DNA, 83 bp, Homo sapiens
agcaaatgtaacccttaggaagaaggctccctccctcactagtctattatcctcccagtccacaacgctgaaccgtggctgga

SEQ ID NO: 337613 - DNA, 100 bp, Homo sapiens
caccttcagtccttcgagcaaatacctttatcaatgaatgtgtcaacctttctggcatacgaccagcccacaataagttactgtggggtgcatcatgaac

SEQ ID NO: 337614 - DNA, 80 bp, Homo sapiens
aagacagtgcctcacccagctccccggatgaaacaggaatggttagactctccgaactcaaatcgacagttcagaattcc

SEQ ID NO: 337615 - DNA, 49 bp, Homo sapiens
ccttctcctggagacgcaactcaaggttaacgtccctaaaacccgccgg

SEQ ID NO: 337616 - DNA, 82 bp, Homo sapiens
ctgactgcgcacttggaatagtagcaggcggcggcggcggaacgccaggcaggaggatcccttttcccccagaaattactca

SEQ ID NO: 337617 - DNA, 101 bp, Homo sapiens
ctgcgaccgtcgcggaccatgggcgacaaagggacccgggcagctgcaatgactctccgcacggtattattgtcattgcaagcactattggcagctgcaga

SEQ ID NO: 337618 - DNA, 74 bp, Homo sapiens
ctgggagcttgctgcagcttcagctctcctatgtggacgccgagggcaaccctgtgggtgtggtacagatgacc

SEQ ID NO: 337619 - DNA, 100 bp, Homo sapiens
caaacgccgcaccaggtcttgtagcagcgcctcctcgggtcctcactgagcagcgagtcgtcccccgtgtcctctccggccaccaaccacagctcccccg

SEQ ID NO: 337620 - DNA, 97 bp, Homo sapiens
ggagaaatagagtccacttcttgatgggaggcgtgacatctctgtggctgtgggctgctgggagtgggcatctggctctccgtgtcccaaggcaact

SEQ ID NO: 337621 - DNA, 50 bp, Homo sapiens
catcgaagaatgccctctatggctgtaccagtgcaggtcctcactttaat

SEQ ID NO: 337622 - DNA, 100 bp, Homo sapiens
gaccgagaccgtgaccgagagcgtgaccgagagcgcgaatatcgtcatcgttagaaggctattcttggggcaggacattatgtatatgcagatcaaccag

SEQ ID NO: 337623 - DNA, 100 bp, Homo sapiens
ctggagacacctgggagtcgcagcggtggtttgggatgcgggtggagagattcaaccagttagcgtgaaagttggagataaagttcttctcccagaatat

SEQ ID NO: 337624 - DNA, 96 bp, Homo sapiens
gggtgacggtggtggtagtggatgacggagtggaacacaccatccaggacattgcacccaactatttaagtgggcagaccaacatccacctcagca

SEQ ID NO: 337625 - DNA, 100 bp, Homo sapiens
ctgacattgggaagacagtctccagtgcaagtaggatgtttaccaaccctgataatggtgctggctcctcttcctggagggatttcaccacagacaggtg

SEQ ID NO: 337626 - DNA, 90 bp, Homo sapiens
gtgaagatggcggcagccgaggccgcgaactgcatcatggagactttgctgatgggaatgcgccccttatgctctgcccagtacgagaag

SEQ ID NO: 337627 - DNA, 75 bp, Homo sapiens
atggtgggcgccatcaggaacgccgccttcttggcaaagttgccctcaaattggctgtagccacacggatataag

SEQ ID NO: 337628 - DNA, 75 bp, Homo sapiens
ggtcggcggcgcccggatgggcagctgagacagtgatgtgtgttctgaaattgtgaaccatgagtctagtactta

SEQ ID NO: 337629 - DNA, 100 bp, Homo sapiens
gaaatgtgctaagtgctggtggaagtggtgaagtaaaggtttcctcaagcatctgcttcctacatattactacaatttgcacagtatgggaatatcttaa

SEQ ID NO: 337630 - DNA, 100 bp, Homo sapiens
ggctgtttggaaagacccaggagaagccgcccaaagaactgatgaggacggggacttggttgccttttccagtgacgaggaattgacaatggccatgtcc

SEQ ID NO: 337631 - DNA, 51 bp, Homo sapiens
gagggtgctggctgccgcgcggccgagatacttggcatatcgaaattttat

SEQ ID NO: 337632 - DNA, 101 bp, Homo sapiens
gaccgagggactgggagtcgttagtgaggaaaggacttagaagccttacaaatacatctgtgcattcttgcttcagactttacaactgagggccagcccag

SEQ ID NO: 337633 - DNA, 100 bp, Homo sapiens
aggagattatagctctgtatgagaaggacaacacctacttaggtttggtgcacctcgatttggaggaagtagggcagggcccttatctggaaagaagttt

SEQ ID NO: 337634 - DNA, 82 bp, Homo sapiens
ttcctgaacgaagtggccaagaaggagaagcagctgcggaaaatgctagaagaggaagaaccgatgctggaacgtcgttgca

SEQ ID NO: 337635 - DNA, 96 bp, Homo sapiens
tgtgctgtgcagatcctttggattgaggctgctgtgcacaggaatatggtatcccttttactattcagcgactatgtgaattgttaacagatccaa

SEQ ID NO: 337636 - DNA, 100 bp, Homo sapiens
ccgcttcctggagttcacgactctgagtgctgttcacacaaaagatgttggacaatttctacaattttgcttcatcatttgctgtctctcaggcccagat

SEQ ID NO: 337637 - DNA, 100 bp, Homo sapiens
aggacagcgcgtcggctgcggttctctctcgaccccttctgcccggcgcttcggcccgggccgctcaggtgcagattatggtgacaagctgaacatggag

SEQ ID NO: 337638 - DNA, 59 bp, Homo sapiens
tccagtgtaatgattattgacaacagcagcctcccgcgacgatgcccctcaacgttagc

SEQ ID NO: 337639 - DNA, 74 bp, Homo sapiens
cgcggctgggcgttcatctaccacgctttcgtggcttcattatttcaaaaatgttgtgctagtgggatccctac

SEQ ID NO: 337640 - DNA, 100 bp, Homo sapiens
gaatgccaccaagtatggcaacatgacagaggaccatgtgatgcacctgctccagtggaatgcagtagccctctgggcctgggatattgtggttgataac

SEQ ID NO: 337641 - DNA, 74 bp, Homo sapiens
agccactgctctgaccacttcaatcttagatgaggaatggctgaattcattgctcctactactttgtttgtata

SEQ ID NO: 337642 - DNA, 100 bp, Homo sapiens
ggatgacctctactcggggtcgggctcgggctatcatgagcgtcttgttgttcatcgagcactcagtagaggtggcccatggcaaggcgtcctgcaagct

SEQ ID NO: 337643 - DNA, 100 bp, Homo sapiens
cactccttgcccgaggacagagatggcgagcgcccggattggggatgagtatgcggaggacagctctgatgaggagaaacgcttcgttaagggactcagg

SEQ ID NO: 337644 - DNA, 98 bp, Homo sapiens
gtccgcgcgggcgacacgctgcagggcatcgcgctcaagtacggtgtcacggtactccaaagattcaggtttactcacgtcatccagcagagaatgga

SEQ ID NO: 337645 - DNA, 97 bp, Homo sapiens
gcttcatcaaaaatagtgatagctttgataagtcagcttttgccaactgttttcaaatcacatgcatgggggatcttacacacactccttgagatgt

SEQ ID NO: 337646 - DNA, 101 bp, Homo sapiens
ggtggaagaaaatcataccatatcagatgcctcgcagagcaccaggcccaccgtgaaagccacgagactcaaacaacttgctgggaccatcccaaaatgac

SEQ ID NO: 337647 - DNA, 80 bp, Homo sapiens
ctgctaacagaactggaccttttcggattttttatcaagcagaaatgcatcgaacaacgagaatcaagatcactgagcta

SEQ ID NO: 337648 - DNA, 95 bp, Homo sapiens
ttgtgtcttccccggccggtccctcgcctcccggccgagctgacgtgaatggtagtgtctagaaagggtatgtcccttcaagagagaggtgccaa

SEQ ID NO: 337649 - DNA, 74 bp, Homo sapiens
cgggcgcggagagaagccgcaaccagagccgccgccacggtggtttgtgatgaaaatggttccaagggctatgg

SEQ ID NO: 337650 - DNA, 83 bp, Homo sapiens
gatgagtacgataccgaagcgggctgtgtgccccttctccacccagagattacaggctgtgccagccctggaaaaacagttac

SEQ ID NO: 337651 - DNA, 83 bp, Homo sapiens
tttctcacgacgggccgagcctgccactcctgtgggccaaagctgaccaactcccccaccgtcatcgtcatggtgggcctccc

SEQ ID NO: 337652 - DNA, 83 bp, Homo sapiens
gctgcagccgcgaatgccgtagattgccagtagaaagccaacagacggtgcttcctcatcaaattgtgtgactgatatttccc

SEQ ID NO: 337653 - DNA, 75 bp, Homo sapiens
agctatgtttagcatcttctgtcatgagaagtggcgatcaaaattgatccaacctcatggggaccaagtttacag

SEQ ID NO: 337654 - DNA, 90 bp, Homo sapiens
ctttgttattggagaaacatgcagattatatcgcatcctatggctcaaagaaagatgattatgtctcgtcatggggaggttatgtgttcc

SEQ ID NO: 337655 - DNA, 82 bp, Homo sapiens
accaacattcccaacagccaccaccaccaccagatgttcaaatctgaacatcaatgatgtactagggaactactcattgact

SEQ ID NO: 337656 - DNA, 75 bp, Homo sapiens
ccactggattgggaaagaccatggcaggtggtttttccccatcatcggccacatgggcatctgcacatccacagg

SEQ ID NO: 337657 - DNA, 75 bp, Homo sapiens
cggaaaccgaaggggagccatggcggctgacagtcgggaggagaaaggaatgaattcttccaaaacaaaactaga

SEQ ID NO: 337658 - DNA, 83 bp, Homo sapiens
ggagccttccattatgggaataggaccaattccagccataaagcaagctgtatggggaggatgtcaggcaggaccagcagcag

SEQ ID NO: 337659 - DNA, 96 bp, Homo sapiens
catgtggatactggctctctccttgttccagagcttcgcgaatgacatattactgatgccacacttgccattgtgaaaggagagacagttccactt

SEQ ID NO: 337660 - DNA, 50 bp, Homo sapiens
agtgccagagtccatgacaattaaaactgaggcttcttgaagagcttgaa

SEQ ID NO: 337661 - DNA, 73 bp, Homo sapiens
cccgtgcccccaccggctcagaaccaaaaccaggtgcgcgtggaattcatggacgacacgagccgatccatca

SEQ ID NO: 337662 - DNA, 75 bp, Homo sapiens
tacctgcctccttcagcccactagtagtgcgctggtaaatgctacggaatgggatgaaaactttcggaagagaaa

SEQ ID NO: 337663 - DNA, 75 bp, Homo sapiens
cgatttctcaatctctggcttaaattagtgccaaatctgattccagttttgatgttcaaattgggaagaccactg

SEQ ID NO: 337664 - DNA, 80 bp, Homo sapiens
atcctgtcggagttgtagccatgccctagctatgaagacggccaagtgggagatgcaaatattaatacacaagaaggagg

SEQ ID NO: 337665 - DNA, 78 bp, Homo sapiens
tcttctcccctgattcaagactcctctgctttggactgaagagatttacaaacgaggaccacctggcagttcataaac

SEQ ID NO: 337666 - DNA, 90 bp, Homo sapiens
tggtgcgcctgcccgggaacatcctcctggactcaatcatggcttgtatcatgtttgagaccttcaacaccccagccatgtacgttgcta

SEQ ID NO: 337667 - DNA, 101 bp, Homo sapiens
gccgcccgcagcctgccgcccgccgcagggcgctgacggtcccgcacgtctgccgctgccaccggcgcgcccgagaaaacggacgatgtattactaagctg

SEQ ID NO: 337668 - DNA, 101 bp, Homo sapiens
cagcggccggggcgcaggcgcccgtgcggaatggcaggacattgccgagaatggctgcgcccccaccccagaagagcagctgccaaagactgcaccgtccc

SEQ ID NO: 337669 - DNA, 83 bp, Homo sapiens
cttcgatgttcttctaatactcctcctctaacatgtcagcgttattgtaatgcaagggttggtgccatctacatccgtcgccg

SEQ ID NO: 337670 - DNA, 75 bp, Homo sapiens
caggatttagaggaccactagttggaccccatcctcgtgctggaggaacagggttgtggtctctccatgctgccc

SEQ ID NO: 337671 - DNA, 100 bp, Homo sapiens
ggttgtgacccctacggagccccagcttgcccacgcaccccactcggcgtcgcgcggcgtgccctgcttgtcacagttaatgaaggagttcccccttctg

SEQ ID NO: 337672 - DNA, 98 bp, Homo sapiens
ggagatgcaggagaaaatacggcattgctagatccagacatttaatgtggatgcaccatgccagaccgtggaagatttaacgaatggggttgtgatgg

SEQ ID NO: 337673 - DNA, 100 bp, Homo sapiens
gccatttcaggcgggctcacggaactatgagctgagtttccaaggtcctgcatgccagtaaaactactcatgtcagctgttctgcaggatcccatgagaa

SEQ ID NO: 337674 - DNA, 89 bp, Homo sapiens
cgtgaccgagagcgcgaatatcgtcatcgttagaagccaggaagaaagctcaggcccattagtgatgactctgaaagcattgaagaaag

SEQ ID NO: 337675 - DNA, 100 bp, Homo sapiens
cagtgtccctcgggctgacaagaaccacttcccaagacccacagtgcctggagaggacatggggaagggttggagcccaggaagcaaaccagcactgcac

SEQ ID NO: 337676 - DNA, 98 bp, Homo sapiens
ttcaatggctgaaacacagtcgaaaagaatactgtgaattatgcaagcacagatttgcttttacaccaagtatgtcgagagtaccaacgtggcaattg

SEQ ID NO: 337677 - DNA, 75 bp, Homo sapiens
tcttcctcctccgccgttgacagcccctggcgaagcggtgctgcctccagcccagagatgccgccaagatgcccg

SEQ ID NO: 337678 - DNA, 83 bp, Homo sapiens
ccagcctgccctgccacacagtgtgcctgcaacctgtccggggatcccagggaggtcagaaaaagagtgcacgccagtatcac

SEQ ID NO: 337679 - DNA, 75 bp, Homo sapiens
caaaagctgacactctcaccctgaaggaacgggagcggctgaagaaaaggatttctctatgaatcatcatcaaga

SEQ ID NO: 337680 - DNA, 85 bp, Homo sapiens
ccattgacgccatgtcgggttattcgagtgaccgagaccgcggccgggaccgagggtgaccctggcaaagatgagagtgcacatt

SEQ ID NO: 337681 - DNA, 83 bp, Homo sapiens
gccgacaagatacctctcgcatgtccacctcacagtaatttctatgcagcccccgacccagagccgagctccacttctgctcc

SEQ ID NO: 337682 - DNA, 50 bp, Homo sapiens
gcatctgttgtcgcaggtatattgcaaatcctgaaggaacccaaagtggc

SEQ ID NO: 337683 - DNA, 96 bp, Homo sapiens
caggcaagaaaggtccccctggagaggatggagccaaagggagcgtggccgccatggcatcagatgaaggcaaactttttgttggagggctgagtt

SEQ ID NO: 337684 - DNA, 97 bp, Homo sapiens
cgcctgcctgctccgccccagacctgtcggcgaaagggaatcccgttctgcttccagaagtggaagtgctcacggatcggggaaatctgcaaggcat

SEQ ID NO: 337685 - DNA, 95 bp, Homo sapiens
cccgcggctgggcgttcatctaccacgctttcgtgtgacagtggatagtggaaacaggagatcgtggatcctccttcaaaaatggaggatggaaa

SEQ ID NO: 337686 - DNA, 90 bp, Homo sapiens
gatttacctcctcatctggctcttcatttgtggtacttttaatgcaccagtaatgagctcagagttctacagagtcaccactgaacaata

SEQ ID NO: 337687 - DNA, 75 bp, Homo sapiens
gtcgtgggcggggtggcccacgggcggccctacctccaggaagctatgaagcagataacccagctcctaccagag

SEQ ID NO: 337688 - DNA, 90 bp, Homo sapiens
ccaggccaagagggatccttcacccgtgtctgccacacccactcgcccgggtctatggccacggtcggagagtggtcctgtgtgcgctgc

SEQ ID NO: 337689 - DNA, 90 bp, Homo sapiens
ccccctcctgaaagaggctccttgaaggaaaaggccaaagttgttgagcccctggactatgagaatgttattgcccaaagaaaaacccag

SEQ ID NO: 337690 - DNA, 100 bp, Homo sapiens
cggaagagcgctcccaggagaaacaattacatggacacagaacagtatgaagaagcagtacgagactatgaaaaagtataccagacagagaaaacaaaag

SEQ ID NO: 337691 - DNA, 100 bp, Homo sapiens
ggaagaggtctcacgaggctgtcatcaccgccatgcccaagaataaagggcggcgactggcggcgcgatggacctgaccgggctcctgctggacgaagaa

SEQ ID NO: 337692 - DNA, 88 bp, Homo sapiens
caggacaactggatcagtttcattaaaaaggattatatctgtccaagatgcgagtctggttttatcgaggagcttccggaagagacca

SEQ ID NO: 337693 - DNA, 50 bp, Homo sapiens
gagcagaggaaccacacgctgatcatgggagcatcgagtacagctgtccg

SEQ ID NO: 337694 - DNA, 100 bp, Homo sapiens
tcgccatgtcggggatgatgatagcatcttatgtagtggtctccagcctcatcagctgctggttttctcccagaatggtgaggttctggagaattgatga

SEQ ID NO: 337695 - DNA, 83 bp, Homo sapiens
ctaaacaaatacaggttcttcaagtgctttggcaaagttaagtgaaaaaaagcaagcctttaatgcctataaagtccagacag

SEQ ID NO: 337696 - DNA, 75 bp, Homo sapiens
gcagcgcagtaccaccttccagagatcgccacgatcatgtctctcgaagactttgagcagcgcttgaatcaggcc

SEQ ID NO: 337697 - DNA, 100 bp, Homo sapiens
caggatctgattatcagtacgtaggcaaggactgaaccatcaagacacctgaaaccttatcatgagcgaatgctgaggaagagattccgggaggatcccg

SEQ ID NO: 337698 - DNA, 71 bp, Homo sapiens
gcagcagtctgggaatgccaacacagaaaccttgccatcaggtgttgtatatgtcatatcagctcccatgt

SEQ ID NO: 337699 - DNA, 95 bp, Homo sapiens
ggatcaaagagcaaacagattcagtggcctgcattgtgctaccttgccctggccaaaggaggcttatctgatgaccatgtcctcatcctgcctat

SEQ ID NO: 337700 - DNA, 100 bp, Homo sapiens
atgcacgagccaggaactgcgcagcctcttcgagcgccgcggacgcgtcatcgagtgtgacgtggtgaaagccactgaggcggctcccagctgcgttggc

SEQ ID NO: 337701 - DNA, 96 bp, Homo sapiens
gtctgggatcagtgctaaaagtcttcgagggagagattctacccgcaaacaggatgcttcagagaagtactaccaacaagaagatgtggggtgaac

SEQ ID NO: 337702 - DNA, 89 bp, Homo sapiens
cggcccggcccgcagcgtggggccccgagcgcggactggagtccagagttgccaccagatgggatattcaaaaatacgccagagaggcc

SEQ ID NO: 337703 - DNA, 74 bp, Homo sapiens
gaatgtggagcttgggatcaggatccacagaccagcatggctgccactgctgctgtgagtcccagtgactacct

SEQ ID NO: 337704 - DNA, 62 bp, Homo sapiens
gaccattcccatcagtgagcattacaggaaagaagattctatatgatatacttgcctttgcc

SEQ ID NO: 337705 - DNA, 120 bp, Homo sapiens
tccttagatgactctgagattgaagacagccttacagaagctttggagcaaattaagataattagctcatcttcaaatagcattgaagaacttgatggtgtccttacatccatattcaaa

SEQ ID NO: 337706 - DNA, 98 bp, Homo sapiens
ctccgatgcagctcgctccctgccggatgggtcatgggattctaaacatgaggcagtatgtaaagaattcttgaaccgattctacaagtcactgatag

SEQ ID NO: 337707 - DNA, 100 bp, Homo sapiens
aggtcctactccaggggcgctcaggttgtggggatgttccatccctccgttcagttgtgaagacctctgctctgccctcagctgcaaccagagcctcgtc

SEQ ID NO: 337708 - DNA, 82 bp, Homo sapiens
gactcatggaggctgagcatttattcagcttcagctttagctgcagctgcctctgttcagccacttgcaacacaatgtttcc

SEQ ID NO: 337709 - DNA, 82 bp, Homo sapiens
cctgcacagccgcggcggcagcagcagtgagagacttcccagactcccggccagccatcgaggacctcaagtactgcctgga

SEQ ID NO: 337710 - DNA, 75 bp, Homo sapiens
atagctgttgatggctcaggaactaaaattctggggagcaggtcctggtggatgtggagaccaagagcaataagg

SEQ ID NO: 337711 - DNA, 99 bp, Homo sapiens
gacagaaataacccagagccctggaacaaactgggtcccaatgatcaatacaagtttggtgccctggttgtcagatgttggaaagcagtaggacggaac

SEQ ID NO: 337712 - DNA, 100 bp, Homo sapiens
ctgtcttcagccattttcaaaaccttgttctataatactttgtgctgggcaagagggatctaaggaggaaatgagtctcaaccagacagccaggaagacc

SEQ ID NO: 337713 - DNA, 100 bp, Homo sapiens
ggacacgggaatatatccgaagcctgaagatggttccaagtattccctatctagatatacatcaggggatgtgagagtgtgggacacccgcacctgggac

SEQ ID NO: 337714 - DNA, 115 bp, Homo sapiens
gccattcaaactcctccccacgacactctgaagcagcgacggcacagcgggaagaatggttggcgtgcagtggtgtgatctcagctcattgcaacctctgcctcccggactcaag

SEQ ID NO: 337715 - DNA, 106 bp, Homo sapiens
gaagcacttggcgcctcggggaggggaccgcgcccgcctcatttgcgccttgcagcactgctggaccaggctgaagccgacgtagcttctctgaacagacgcatcc

SEQ ID NO: 337716 - DNA, 100 bp, Homo sapiens
cccgccctggccgctcgccgcccgcccgcccgacggagacgcctcccctggtgaagacacaaactgtcaccatctcagataatgccaatgctgtgaaaag

SEQ ID NO: 337717 - DNA, 100 bp, Homo sapiens
ctatttccgcgttcctggcgcgccgttgtcccggcaacgcgcggcggctcagcggcctggcagaggtgctggagaatctggtaaaagcaccattgtgaag

SEQ ID NO: 337718 - DNA, 82 bp, Homo sapiens
ctggaccagctcatgggcacggctcgggacgagtgaagacatttccacctggacacctgaccatgtgcctgccctgagcagc

SEQ ID NO: 337719 - DNA, 101 bp, Homo sapiens
cagccgccacctacccagtgaccatgatagaggatgaggaagatgaggaaatggtggaatctaaagttggccaggactcagaactggaaaatcaggacaaa

SEQ ID NO: 337720 - DNA, 100 bp, Homo sapiens
ccgtggagtcggctgagggaaaagcgaggcaaggcaggcgggtgcgtatagcagcaaaattcatcattcatgcccctcctggagaatttaatgaggtttt

SEQ ID NO: 337721 - DNA, 83 bp, Homo sapiens
ggctattcaaggtatttcagagaaggaaaaggctggtgctgaccttaaggaaagagccaaaatgagttccagtgaagttggtc

SEQ ID NO: 337722 - DNA, 100 bp, Homo sapiens
tgaaaatgaaatttcttcagactgcaatcatgtaaaataccatgaagattttgaaaaaacaaaggggagaggctttactcccgtcgtggacgatcctgtg

SEQ ID NO: 337723 - DNA, 75 bp, Homo sapiens
caacctagtgggtgtaatacatcatgaactgcaggcctcatattcctgaagcccaacctggagatgctggacttc

SEQ ID NO: 337724 - DNA, 97 bp, Homo sapiens
tgccctttccaaaccagacccctgtgtcatcctcaagatgcagtctcatgggcagtggtttgaggttgcacagagcattgaggatcaccatcaggaa

SEQ ID NO: 337725 - DNA, 75 bp, Homo sapiens
gcccgtccccctgccccgttcacaatttgtatcacggactgattcaccgagcccaaccgtactcaactcacatat

SEQ ID NO: 337726 - DNA, 98 bp, Homo sapiens
gtccccccaagtctcctgaagaggaaggagcggtgtcctcttaagaaaatggattactacagcatcccatttcccacacccactactccgctgactgg

SEQ ID NO: 337727 - DNA, 82 bp, Homo sapiens
gtgtccagaacgtgccatggagacgcttaacggaccaggagctgcattatctattctagacaaatttcttgaagaatcctcc

SEQ ID NO: 337728 - DNA, 97 bp, Homo sapiens
ttttgatctgccgtgatcaatatcaggaaaggccccatcttcccttcacacctgggcaactacactttccaatgcagtgtcttccctggcaagcact

SEQ ID NO: 337729 - DNA, 82 bp, Homo sapiens
aagcaaaggctgctctgaagcgcacgacctccgactactttctccttcaagtgcctttactttcccgaattctgccttccga

SEQ ID NO: 337730 - DNA, 100 bp, Homo sapiens
ggtgtgtggctgcacaggagtcttgctgatgatgttgatgcctaagaagaaccggattgccatttatgaactcctttttaaggagggagtcatggtggcc

SEQ ID NO: 337731 - DNA, 75 bp, Homo sapiens
aaaacatcagcaaatggcttagaaacatagatgaggatggagtccacagagaagtgtgaagccatcatcacccac

SEQ ID NO: 337732 - DNA, 100 bp, Homo sapiens
ctccggaactaaacggggtgaggtcacattcggttatctctaacgttggaaaacgtgtatgctgatggtagcatatgtttagatatccttcagaatcgat

SEQ ID NO: 337733 - DNA, 100 bp, Homo sapiens
tgtaaatgttgagcctttttggcctggcttgtttgcaaagcaagtcatgagatttgcggaagtgactcaagaagttgaagtagcaagacctgtagacaag

SEQ ID NO: 337734 - DNA, 90 bp, Homo sapiens
ccgcaatggacaagctgaagaaggtgctgagcgggcaggacacggaggaccggagcggcctgtccgaggaaaggacttagaagccttaca

SEQ ID NO: 337735 - DNA, 90 bp, Homo sapiens
cgtcgcgccccgccgcctgccgagcctttgatgtccccaagaggacaagtaaatttttgtgaaacattgcagatgttagatggatttggg

SEQ ID NO: 337736 - DNA, 75 bp, Homo sapiens
ggaatatacgttgtgaaggaatgaccctaggagagctgctgaagtaaaaggcgtcaatttctatggccccaagag

SEQ ID NO: 337737 - DNA, 50 bp, Homo sapiens
cagccaaaacagttcattcatattcagcataacaggaggcgcagggttcg

SEQ ID NO: 337738 - DNA, 90 bp, Homo sapiens
caaggttccttccactgaagcagaagccctggcatctaatcctgataacttaagtgactctctcttttccggtgatgaagaaaatgctgg

SEQ ID NO: 337739 - DNA, 89 bp, Homo sapiens
acctaagttttaaacagaaggtgaacctctgaggaacctgatgaaatgcctggtctaacaggaggatgcagagaaagttatgaagagag

SEQ ID NO: 337740 - DNA, 132 bp, Homo sapiens
gcggggatggcgtcccccgggggcccgtactgcacatcgtggtggtcggatttcaccacaagaagggctgccagcaatcaaagccttagatgggagatctcaagtttcaacaccacgttttggcaaaacgtt

SEQ ID NO: 337741 - DNA, 51 bp, Homo sapiens
cctaactgaacttagtggtggtcagagattggacgactgattattggacag

SEQ ID NO: 337742 - DNA, 101 bp, Homo sapiens
catttgacttggaagcaatgtttgaacaaactcgaagaacagctgtggaaagaagttgcaaaacactggggagtcgtcgcatggtggatgtcatggacgtg

SEQ ID NO: 337743 - DNA, 83 bp, Homo sapiens
ctccgagctggggttggacgctgccagtttgcacagcagcagaaaatgaaactgaagccgtggtcacgtgacaggacatgtag

SEQ ID NO: 337744 - DNA, 104 bp, Homo sapiens
gttattggcaggctgccatgacaaccaggcaatgctggatagataccgaattcttatcacaaaggacacagtgcgtaaggtacctccttggaagcagagaccag

SEQ ID NO: 337745 - DNA, 75 bp, Homo sapiens
tatttctccatcgatgaggagctggtctatgaaaagataacaaagccattgacctttgccgattgtgttggggac

SEQ ID NO: 337746 - DNA, 100 bp, Homo sapiens
agacggcaacgcgcttatcagcgctatgagaaaatgccgggtctaagttgtagattttatcaacacaaatttcctgaggtggaagatgtagtgatggtga

SEQ ID NO: 337747 - DNA, 90 bp, Homo sapiens
ctctctatgatatgctaagaaagaatcttgtcactttagccactgctactacaggtattctgcaagtactgtagatgttatagaaatgat

SEQ ID NO: 337748 - DNA, 74 bp, Homo sapiens
gccgtgttccgtgtgggaagcgtgttgcaagaaggctgcagaagtgtcagctccaggtccacgatgcggaggcc

SEQ ID NO: 337749 - DNA, 75 bp, Homo sapiens
cagaaggaaaaaggaaaaagtcatcttctgatttatcggagacgaaatctcacaaaactgtcccttatcttcagt

SEQ ID NO: 337750 - DNA, 82 bp, Homo sapiens
ccactttcgccagcccgtgccgcgagcgcggcctgcaggagcaaccatgtccaagggacctgcagttggtattgatcttggc

SEQ ID NO: 337751 - DNA, 75 bp, Homo sapiens
tacgggaagaacttcttcagaattagaaaggagctgcttcccaataaggaaacactctcaggtgtccggcatcca

SEQ ID NO: 337752 - DNA, 75 bp, Homo sapiens
gtgttcgcggtcggccgccaccaggtcaccctggaagagtcgctggccgaagagttgtctgctggttctcagctt

SEQ ID NO: 337753 - DNA, 100 bp, Homo sapiens
gcattgaactacaatcagtttctaatccagttcacagaaaggtaaaggttgacttaattgaactctctgaaaaatgctgtagtgactttgatttgcactc

SEQ ID NO: 337754 - DNA, 100 bp, Homo sapiens
ggtctggagtgcgtgggggaccggctgttggcggctgatggtgagaccattctaaaaggcctccagtccattttccaggagcaggggatggcggagtcgg

SEQ ID NO: 337755 - DNA, 101 bp, Homo sapiens
ccgtcttcgtgggcctgtcctgcttcggctccgtcaatgggtccctgttcacatcctccaggccacggcagagacaacgtgtgtaccccaagtgcacatgg

SEQ ID NO: 337756 - DNA, 75 bp, Homo sapiens
ggcctccccagccacgtggaactgttgtacgtggacactataaaggtcagcaaattggcaaagtagtccaggttt

SEQ ID NO: 337757 - DNA, 103 bp, Homo sapiens
atgaccgtggagttcgaggagtgcgtcaaggactccccgcgcttcagggtggtgaaggaggagatctttgatgacaatgccaagcttccctgcttcaacggcc

SEQ ID NO: 337758 - DNA, 75 bp, Homo sapiens
gaggacaagaccatcgagctcatggttactcctggatggagcacctctgatagcaatccacaaagccaggtatta

SEQ ID NO: 337759 - DNA, 80 bp, Homo sapiens
gctgctgagctacccgagcggcggcggcggcagcagcggcagcggcaagcaccgaaatctggcattttttaaagtttgcg

SEQ ID NO: 337760 - DNA, 82 bp, Homo sapiens
tctgcagtgtcttccacaacctggcaccgaacaagatttgtgatgaaatggagcctggaacaaactcttttcgggtagaatt

SEQ ID NO: 337761 - DNA, 78 bp, Homo sapiens
tctgtaccgggcgatgctgagagagagcaagcgtttcagcgcctacaattacagttatttgctggtataaaggatgga

SEQ ID NO: 337762 - DNA, 51 bp, Homo sapiens
cttctgagcctgggaagaagaggtgtctcaatgagatcttggagtcagcag

SEQ ID NO: 337763 - DNA, 50 bp, Homo sapiens
aagaagtcattccttttttgaagcacaataaggactctaaatggtgtcag

SEQ ID NO: 337764 - DNA, 51 bp, Homo sapiens
gccaaatacatcagcttgtaggagacagagatactaggggcaaacgagaca

SEQ ID NO: 337765 - DNA, 82 bp, Homo sapiens
agctgtgctcgcgctactctctctttctggcctggaggctatccagcatggcagaaacggtggacacaagcgaaatggtcaa

SEQ ID NO: 337766 - DNA, 75 bp, Homo sapiens
tgggccttggcaagcggcccttcgacttctaggccactgggaagaagcagcccatgatcttgcccttgcctgtaa

SEQ ID NO: 337767 - DNA, 83 bp, Homo sapiens
cccgcctccagcaggacaatattcgcacccggctgaagatcagtcgcatcgaatacattcattcaaagaacttcatccaccgg

SEQ ID NO: 337768 - DNA, 101 bp, Homo sapiens
gacaaagttgaaaacaaagtgctggctcgggttatgtatgattttgctgctgaacctggaaataatgaactgacggttaatgaaggagaaatcatcacaat

SEQ ID NO: 337769 - DNA, 100 bp, Homo sapiens
tggtcttgttattggtggtctataccctgttttcttggctatacctgtaaatggtggtctagcagccagggtctcctatggacagaagtgcgggcaagga

SEQ ID NO: 337770 - DNA, 100 bp, Homo sapiens
catccctcgtcgaaaggattggattggcatctttagagtggtgttcccactgatgaagagcaggcgactgggttggagagggagatcatgctggctgcaa

SEQ ID NO: 337771 - DNA, 75 bp, Homo sapiens
cagaaagatggatttttgcatgagacgcttctggacagttacagaatgtctgaaggggacagtgtgggagaatcc

SEQ ID NO: 337772 - DNA, 75 bp, Homo sapiens
ccgaggatctggagaggcagattggtatggccgaggctgaggcagctgagcctccacccagaccgaaaaccccag

SEQ ID NO: 337773 - DNA, 75 bp, Homo sapiens
ctgaagaatttaatgatgaaactaatgtgaggctgaaacacttttccaggaaatctgccccaatgaagatttctg

SEQ ID NO: 337774 - DNA, 75 bp, Homo sapiens
aaatgacgaaggggcttcttccagagccaaggaggaagggttgtccgggcacttctggatccagctgtgtgatag

SEQ ID NO: 337775 - DNA, 100 bp, Homo sapiens
gtggtgacagcctctgggtcctcggtcggtacagtctctgcacctcgcgccccagcaggatctcatagatcagaacatactggagcctgtaacccgtgca

SEQ ID NO: 337776 - DNA, 100 bp, Homo sapiens
agcctcctgagtagctggtattacagagctaaatctgcttcgtaatgttgatgctaacaacactgagaatagcactactgtgaagaattctagtttgttg

SEQ ID NO: 337777 - DNA, 50 bp, Homo sapiens
gcaaggctgagggacgagaacgagaatcgagagctccagatcatgagaaa

SEQ ID NO: 337778 - DNA, 89 bp, Homo sapiens
gccatggcataaggaactctatcccaggaatacagctttgcattaggcatgtggagaccccaaggcaaaaccatcctatcttatcgaca

SEQ ID NO: 337779 - DNA, 91 bp, Homo sapiens
gaagaggtcccattaccccactctttccgccctaatggaggtctccagtttagatgcgagccacccctctggctgctcctgcgggttccct

SEQ ID NO: 337780 - DNA, 90 bp, Homo sapiens
caaatactactacatcccgcagtacaagaactggagagagttttgggactggaattaaataaagacagagatgttgaaagaatccacggc

SEQ ID NO: 337781 - DNA, 101 bp, Homo sapiens
ggctgatcaagtctcctgcagaaattgaacgaatgcagattgctgggaagctgacatcacaggacatcaatagcctcaacaaacaaattgctcagctccag

SEQ ID NO: 337782 - DNA, 100 bp, Homo sapiens
agcagcatgtgacaccgaccaggtgtcatggagaaactccagctgggcccagagattctgcagcgggaaaatccaaggcttatttatgccaggctgagtg

SEQ ID NO: 337783 - DNA, 100 bp, Homo sapiens
tgggggtcgtccgatcctgcagatctgctgatttgggtcctactttaatgacaagacctggacaaccagcacttaccagagtgcccccacctattcttcc

SEQ ID NO: 337784 - DNA, 100 bp, Homo sapiens
aagctctacccactgccctcggcccgcggcgcagtgagcctgcaggccgacctcactcgtggcacacaactaaatctggggagaagcaacccgatgccag

SEQ ID NO: 337785 - DNA, 100 bp, Homo sapiens
cgcacgtctgctcggagatcatttgggagatccaagagattcagtatcactcgctcccttgatgatcttgagcttgtgctgcattgcacctgtcctcgcg

SEQ ID NO: 337786 - DNA, 100 bp, Homo sapiens
gctattagagattgtgaagaagaatttcgatctccgccctggggtcattgtcagccaggcccagacatgtccgtccttgtaagttaaaagcttccatggg

SEQ ID NO: 337787 - DNA, 100 bp, Homo sapiens
ctacctatagaagggccgagcacagcaatgcaaacacagcagcagattgctgtccagggacagcaagtggcacagactgctgaagggcagaccatcgtct

SEQ ID NO: 337788 - DNA, 83 bp, Homo sapiens
cggagctgggcgcggattcgccgaggcaccgaggcactcagaggaggggcagaaccccttcgagctggccttctccctagacc

SEQ ID NO: 337789 - DNA, 90 bp, Homo sapiens
tcagaggccacctcagagagagtgttgaacagcgactgggaaactgccactagaaaaagatgactgtccaactaaaacctgcatacacag

SEQ ID NO: 337790 - DNA, 75 bp, Homo sapiens
gtgagagccggacgggcactgggcgactctgtgcctcgctgaggaatctccggcctgtgaaactgtgaggggatt

SEQ ID NO: 337791 - DNA, 100 bp, Homo sapiens
tcctggaggtgttccacccgacgcatgagtggcaggcccttcagccagcgagtaaccagctcataaatcacatcgaacagtttttggatactaatgaaac

SEQ ID NO: 337792 - DNA, 98 bp, Homo sapiens
cccgatccgccagcaccacctgaggatccagaaaccgccccagcgatggaagaggatcaggagctggagagatttctacctggacaaggactggtact

SEQ ID NO: 337793 - DNA, 75 bp, Homo sapiens
aaaaaatatggacctcttaaaattgtggtgttacagggtcttgattatttacataccaagtgccgtatcatccac

SEQ ID NO: 337794 - DNA, 100 bp, Homo sapiens
accgccactgccggagccatctcggagctcacggagagccgcctgaggagcggcacagctccaaaaggaattcttcatttgtctcctgatgtttatcaag

SEQ ID NO: 337795 - DNA, 83 bp, Homo sapiens
ctcatgcccagtccacctcgtgctcctgcagaacctgctgacctgtggaggcataatcaccagcaacacccgggacaataata

SEQ ID NO: 337796 - DNA, 101 bp, Homo sapiens
cagtctctggacaagatgaccacactccaggaatgccagtgcatcttttgcacagcttacgaggatgtcgtccaggaaagattgtgcagatgactgaagca

SEQ ID NO: 337797 - DNA, 76 bp, Homo sapiens
ctgcaaggagcatcccggctggagcagagccagagcagagcatgatcacattcctgccgctgctgctggggctcag

SEQ ID NO: 337798 - DNA, 100 bp, Homo sapiens
cctacggcaccagtggcctggacaacagacctctgtttggggagacgtccgccaaggcctatatgaacccaatagcaatggcgagatcaaggggtccaat

SEQ ID NO: 337799 - DNA, 75 bp, Homo sapiens
tcttggccgtaatgtttctattccagtctcatcagattttccatgtcctggtggtggcagcagcctttgtccact

SEQ ID NO: 337800 - DNA, 100 bp, Homo sapiens
tgatgtattttgtgatcgcagcgatgaaaggttgtgaactaaaggccgacaaagattatcactttaaggtggataatgatgaaaatgagcaccagttatc

SEQ ID NO: 337801 - DNA, 75 bp, Homo sapiens
aacagctggagagaacagttcattgaagctatcactgtcagtgctggtgctatacttggtagatcagaaactcag

SEQ ID NO: 337802 - DNA, 75 bp, Homo sapiens
ttcttctgatttctgccattgggggcatcattcagaagatagtggacagtcacaaagtaaagcatgtggcctgct

SEQ ID NO: 337803 - DNA, 100 bp, Homo sapiens
gcaggagggagaggggcattctcaactctgcctggacaggctgcagctggaggctattcataagggtaattgggatacttctggcagcgaactgagtgaa

SEQ ID NO: 337804 - DNA, 88 bp, Homo sapiens
tgaaaggcactttattatgcaggtggtctgtgaagccacacagtgtccagatacgagggacacatgacggaagtgtgtatttttgggc

SEQ ID NO: 337805 - DNA, 74 bp, Homo sapiens
gaggagtgcggaacccgcgggagttgccgaggtactgtctgaatgccgcctgctcgcctacatatcccaggtgc

SEQ ID NO: 337806 - DNA, 75 bp, Homo sapiens
gaaatcgccaatgccaactcccgtaccggtggcctcgtggtttgacaacatgagtgacacagagctccacgacct

SEQ ID NO: 337807 - DNA, 50 bp, Homo sapiens
cgacagccttgctgactatttcaagaagaccctacagcttggggcctggg

SEQ ID NO: 337808 - DNA, 95 bp, Homo sapiens
cagataccatctcaaagggtaatcttccaggtggtttgtgatgaaaatggttccaagggctatggatttgtacactttgagacgcaggaagcagc

SEQ ID NO: 337809 - DNA, 100 bp, Homo sapiens
aaaaaggacacaagtgcgaatgttaaatcagctggagaaggagaagtggagaagaaatcagtcagccgcagtcttagagtttgaaagagtctatcttgat

SEQ ID NO: 337810 - DNA, 98 bp, Homo sapiens
tggtctctagcagcctgaatccaggtgtaatggataggtaacagagaagacctcgtcccttcctagtcagggcatcagcatgactgagtgcttcctgc

SEQ ID NO: 337811 - DNA, 89 bp, Homo sapiens
cattgtgagctccgtattctctgaagcctggaaacgaggcactcagttggaagagtccagcaaggagggatttgttcgtgttgaccgag

SEQ ID NO: 337812 - DNA, 83 bp, Homo sapiens
cgacgtcttgcctgtgtcccacttgttcgcggcctataggaaatctggcattttttaaagtttgcgccccacaaagaggaaat

SEQ ID NO: 337813 - DNA, 100 bp, Homo sapiens
caaggtccggctgcctaagctgtatctgaaacaccaaatggacctggtggccaccctcagccagctgggtcaaggtgaagatgttcttaaagggtcccag

SEQ ID NO: 337814 - DNA, 90 bp, Homo sapiens
ttaggaagtggtatcatgagagatatagcccacttagaaatcacagcagtgacatcagtgtctggcccaggtgagcacctccgaaatgcc

SEQ ID NO: 337815 - DNA, 75 bp, Homo sapiens
cagcggtcttcctgggcacggtcaacgggaggcttctcaagattgggctaatggatactacagacaacagagaaa

SEQ ID NO: 337816 - DNA, 87 bp, Homo sapiens
ccgtgaagagccttcaggcgctgggcgagacctgtactccggctggttggcagcagcccttggtaccaacctgcaggtccagttctg

SEQ ID NO: 337817 - DNA, 100 bp, Homo sapiens
cggcggcggccgagcccttcctcaactcagcgatgacatccctttccgagtcaactggcccggcaccgagttctctctgtttgtgaagtgtggatatgca

SEQ ID NO: 337818 - DNA, 73 bp, Homo sapiens
tgtctacttcgaagactggcaagcacggccacgccaagggtattatcatctaccgagccgcctacttcggtat

SEQ ID NO: 337819 - DNA, 75 bp, Homo sapiens
aagccctcttgtagggccagagaggaaaaaatcttcaactattccaagtgcatccagggcattgtggatgcctac

SEQ ID NO: 337820 - DNA, 82 bp, Homo sapiens
agcagtggaagtcccacagaagctacagctgccaggtagcggaattggtactggtccaggagttatccaggatagattttca

SEQ ID NO: 337821 - DNA, 96 bp, Homo sapiens
agtatgcagaccttgaaaagcggcacgacaacattaaaccatcagatgagatgatgctgaataatcccctatttgctggaaatcctcagcttcaag

SEQ ID NO: 337822 - DNA, 100 bp, Homo sapiens
gctaacgatgctgcaggaaaccttgaacctgccaccagtggccagtgagactgtcgaccgcctggttttagagagaaatgattctggggaccattctgac

SEQ ID NO: 337823 - DNA, 75 bp, Homo sapiens
catcgtgatgaaggcagagagcagagacatcccgatctggggaaggaacttaggctgcggaactatgtcccggag

SEQ ID NO: 337824 - DNA, 100 bp, Homo sapiens
tttcaggttcagtgacatcagaaaatgtgtccagagattacaaggctgtgcagggtcggtctatcacccaacaagaccgagatctccgagttgatttagg

SEQ ID NO: 337825 - DNA, 95 bp, Homo sapiens
cttcggtggactccttcggcagtccacccaccgccgccgcctcccagggtgagaactctgtctcagtcgacgggaagtgcagtgactccacgcta

SEQ ID NO: 337826 - DNA, 100 bp, Homo sapiens
ccattgctgtttactggatacctggctccctgactggcagtcctcacctttccgagctgtctgtgaactcgcaggggggagtggcccctgccaacgtgac

SEQ ID NO: 337827 - DNA, 115 bp, Homo sapiens
atgaatcctgcggcagaagccgagttcaacatcctcctggccaccgactcctacaaggatttttagactctgaggagcagttggagctaatccacattatggaaatggaaaccac

SEQ ID NO: 337828 - DNA, 75 bp, Homo sapiens
cccagcctgacaaccttggaacagaacaagaggacaggaggtgtcgttccagaagatggcagtgaacgtatactc

SEQ ID NO: 337829 - DNA, 83 bp, Homo sapiens
gagtggtttttcggatcatgtctggtggctccgcggattataacagacctgcctagagctggaacgttacctccagagcgagc

SEQ ID NO: 337830 - DNA, 75 bp, Homo sapiens
atcatgcccaaggacgaggacatcctccagctggctgtgaacaaccggtccatccaactccccaccaccgtgcgg

SEQ ID NO: 337831 - DNA, 100 bp, Homo sapiens
gggagtcagcatgccgcgtggctgggccgcccccttgctcctgctgctgctccagggagaggcatttcatccttcatgaagccattcaggattttgaatt

SEQ ID NO: 337832 - DNA, 96 bp, Homo sapiens
catggaacaacagcattatgtcgaccaaacttcagtgacttctgacagctctctccatggaaggaggcggcggccgcgatgagccttcagcctgcc

SEQ ID NO: 337833 - DNA, 76 bp, Homo sapiens
ctttcgccagcccgtgccgcgagcgcggcctgcaggagtgttatagttttgccgctggactcttccctcccttccc

SEQ ID NO: 337834 - DNA, 75 bp, Homo sapiens
gagtgggaacatgacgcaggtgcaggtgtctcttctcgccctggcggggaaggtttttcgttggaatatacgttg

SEQ ID NO: 337835 - DNA, 74 bp, Homo sapiens
cggccctctcggcgtccgccagcgatggcacaggcatagaatgtcaagctaaccaggcgtccgctacttcagaa

SEQ ID NO: 337836 - DNA, 100 bp, Homo sapiens
ctgtccgggggcctggctaaggaaaccctattacctccaggtataagtgtgctagcggagtgtctagattgtcctgaattgaaagcaactgcagatgact

SEQ ID NO: 337837 - DNA, 90 bp, Homo sapiens
tgtctggctcctttctctacacaggagataagaccatcatcatgtggaaactgaccagggatgagaccaactatggaattccacagcgtg

SEQ ID NO: 337838 - DNA, 100 bp, Homo sapiens
gtataagatcccagaattcagcaacgatgttaatggggaggccaaagagacacagcccatttttttagcactgtgacttctgccgtgttcaccgtgggag

SEQ ID NO: 337839 - DNA, 89 bp, Homo sapiens
catacctgctgcctgtggcatttattactttgaagtgaagattgtcagcaaaggaagagatggcttgctgatgaccgtatggcactggt

SEQ ID NO: 337840 - DNA, 100 bp, Homo sapiens
gctggttgtgcgaaccccgggcagcccgggaaatctccaagtcagaaagccggagcagacagtcctcattgacaactgtcggcagcagtgcacgtgccat

SEQ ID NO: 337841 - DNA, 87 bp, Homo sapiens
tttgtataggaaagtgatgttagagaactacagaaacctggtcttcttgggaagtgtttggattgtgagctatttcagaactgttct

SEQ ID NO: 337842 - DNA, 82 bp, Homo sapiens
atggacagagccatccctgacacccggcatgaccagttttcaaatggaacattttgatgcatcacttagtacctatttcaag

SEQ ID NO: 337843 - DNA, 88 bp, Homo sapiens
cgaagtgcgcaaacttgacactcaccctgaccggattctcaaagttggattggtggaaacaatgaaccattgacaggctttacatggc

SEQ ID NO: 337844 - DNA, 100 bp, Homo sapiens
aggctgcggcgcgcagagcgaggctgcgggaccccaggatgggggacaggaggctgcggggcctcagttcctggtccagaactttacacagaaaaggtgc

SEQ ID NO: 337845 - DNA, 95 bp, Homo sapiens
gaagagtcttcggcatcgggcgacagcaggtcacagtggacgaggtgttggcggaagggcctctgaaaaatggaaccaaattctctgaggactaa

SEQ ID NO: 337846 - DNA, 101 bp, Homo sapiens
gacaccgacatggaacagggactcactggggcccttcctgttctccaagttccttcccttcccctgaaggacagccaggagctgacagcttcacttctctc

SEQ ID NO: 337847 - DNA, 102 bp, Homo sapiens
gctatgaacgattaaaagaagaactcgcaaaagctcagagggatgtggggcaatcaagttggggatgaaggagcaaaagccttcgcagaggctctgcggaac

SEQ ID NO: 337848 - DNA, 101 bp, Homo sapiens
gcggtatttgtgagaggagtcggcgtttgaagaggtggaactcctagggcttttttgagagtgacacgatgaggcgagtggtacgacagagcaagtttcgg

SEQ ID NO: 337849 - DNA, 90 bp, Homo sapiens
gcagattggagctctgcagtaaccacagaaatgagccgtcagactgctacagcattacctaccggtacctcgaagtgtccaccatcccag

SEQ ID NO: 337850 - DNA, 100 bp, Homo sapiens
gcggttggggccactgcgaggccgttttagatgttttactgtgcctggctaactatagtcgagggggtgatggtcctatgtgtcgcccagtaattctgtt

SEQ ID NO: 337851 - DNA, 82 bp, Homo sapiens
gccgcgactgggaggagcgccggaacgccgaggcccagctcctttagcggcagagttttccgagtgaccttcttgatgctgg

SEQ ID NO: 337852 - DNA, 100 bp, Homo sapiens
cggcgcagcggcggcagcggagagcgagagaggggagcagtgatgagccctcctcttcagctaggaaaatgacggtgttcagaaagttaaaacttcttcg

SEQ ID NO: 337853 - DNA, 76 bp, Homo sapiens
tcttcattcattaagcagtgcagaaacacagtgggtgagtgtgaagcgtctgccatgctgccactggagtgccagt

SEQ ID NO: 337854 - DNA, 75 bp, Homo sapiens
ccggggccggccctctcccgagctcagagagtaaatcgatgtgcattttgtaagcactttggagccactatcaaa

SEQ ID NO: 337855 - DNA, 89 bp, Homo sapiens
gaaaaccacactgagagttgcattaaaaaccagcatctaatgatgtaactggcctaagagagtctgaagaaaaactaaagcaacaacag

SEQ ID NO: 337856 - DNA, 75 bp, Homo sapiens
gatttgatgaaagtacttcagggagtcaacggtgaggtttgccagaacccaataaagatgccatcttccaaggcc

SEQ ID NO: 337857 - DNA, 75 bp, Homo sapiens
agaaccatcattccgtccagcaatcccaccactggtcatctacccaaagaatggaatgactcctctaatgcatgc

SEQ ID NO: 337858 - DNA, 103 bp, Homo sapiens
aagtccagctgtgagcagagtgttctgttcttcacttccagcaagccaggagtgtgctgaaaaacaaggccaaattgaacgagtcattaaggaaaaaaaagca

SEQ ID NO: 337859 - DNA, 83 bp, Homo sapiens
gacggcttggacgaagatggggagaaggaagcgagactcatacgcaacctcaatggaacaagatcactcaaggtgaaggataa

SEQ ID NO: 337860 - DNA, 51 bp, Homo sapiens
gtgaaatatctgaatctacccccgtggaagacttcatagacctcacgttgt

SEQ ID NO: 337861 - DNA, 82 bp, Homo sapiens
ccaccagaggagttcagcaagagaagggatttaagatgagattgtggggaacctgggtgaaggcacctttggcaaggtggtg

SEQ ID NO: 337862 - DNA, 98 bp, Homo sapiens
gtaaaacctggaacagcagcatcattgtcaaagatgccgcatcctcgaaggtaccactcctcagagcgaggcagccgggggagttaccgtgaacacta

SEQ ID NO: 337863 - DNA, 100 bp, Homo sapiens
gctatgtacgccctcttcctcctggccagcctcctgggcgcgggagctcaacaggacctgtcgggccatgcagcagcgcatcgtggagctcatctcccgc

SEQ ID NO: 337864 - DNA, 100 bp, Homo sapiens
atacagcaaggagggctcttgcaaggattcaaggttcagtcacctgtggactctgccacaatgtccccagtagagaggacagcagcctgggttctgaaca

SEQ ID NO: 337865 - DNA, 100 bp, Homo sapiens
agggcagccaggggccaagggcgacagaggtttgcctggcagagatggtgttgcaggagtgccagcaatgcggaatatcaatcccagcacagcaaattct

SEQ ID NO: 337866 - DNA, 75 bp, Homo sapiens
ggggagcggagccatggcctccggtcatgatgatgggcagcgcccgagtggcggagctgctgctgctccacggcg

SEQ ID NO: 337867 - DNA, 101 bp, Homo sapiens
tacgaacagcgggcggtgttcccggctccgtggggccgtcttcccggcgagtccgcgacggtcgccgcccacggcgagatggagtctcgctctgttgccca

SEQ ID NO: 337868 - DNA, 100 bp, Homo sapiens
accggagagcgaggacgacgtggaggcggagtggcgcccggcgaggtagcgccaggcgagagatgatttacacaatgaagaaagtacatgcactttgggc

SEQ ID NO: 337869 - DNA, 98 bp, Homo sapiens
cgggaaagggtcagaggcttcctaacgcagactcgagtgcgaagcgcgcagtcgccgggttccagcaacagatagaaatgctttaagttcactctggg

SEQ ID NO: 337870 - DNA, 82 bp, Homo sapiens
agcccgcccgaccccgtcccgaccctggccgccccgagcggagcctggaggcagctggctgccagcctctgggaggacgttg

SEQ ID NO: 337871 - DNA, 51 bp, Homo sapiens
cgcgcccctcggacggccacgagactcgggctgcaaggtgtgactgttgta

SEQ ID NO: 337872 - DNA, 100 bp, Homo sapiens
ctggtcctgctcggggctctgttcccagatatttagcttcctgtggtatactgatgagcagaactcttccactacatacctcaattttgcctaaggagat

SEQ ID NO: 337873 - DNA, 82 bp, Homo sapiens
gttgccggctcccctctcaggacaacccagatgtgcaacaaagtgcgatgacctgcctagagctggaacgttacctccagag

SEQ ID NO: 337874 - DNA, 90 bp, Homo sapiens
gattttgagcgtcgcagagaacttagaaggcaaaagagggaggagatgcgactcgaagcagaaaggtattcacttacaagcagagcacaa

SEQ ID NO: 337875 - DNA, 100 bp, Homo sapiens
gaaaatgtgcatatttcaggagtgtcaactgatggaatggggcgagtccttgctcaagatgtatatgcaaaagacaatttaccccccttcccagcatcag

SEQ ID NO: 337876 - DNA, 100 bp, Homo sapiens
gcctttcaatgtgacacaaggaaagtattctacagaattcaaagaagctttttcactatttgacaaagatggtgatggaactataacaacaaaggaattg

SEQ ID NO: 337877 - DNA, 75 bp, Homo sapiens
cagaaagagattgggtacttaatggccctggagacgatggatacagggaagccatttcttcatgcttttttcatc

SEQ ID NO: 337878 - DNA, 100 bp, Homo sapiens
ttcgtcaagctgctgaggcacatcctccagtgggaaggggtaccggcaagagattttcaccatggagcagctgagctcagcaaacacccgcttcgccttg

SEQ ID NO: 337879 - DNA, 50 bp, Homo sapiens
acccaagcaaaacttcagatgcatgatggaatggggagaagatattaaag

SEQ ID NO: 337880 - DNA, 75 bp, Homo sapiens
ttggcatcgatctctccatcccttccgaggcccgacttcggtcctcttcctgatggatgggaacaagccatgact

SEQ ID NO: 337881 - DNA, 82 bp, Homo sapiens
aagggatcaagatcagctccaggcctgggaaagtgaaggcgatcattatttcgaagttctagtattctggatcaccgtgaag

SEQ ID NO: 337882 - DNA, 98 bp, Homo sapiens
gaggctcaaccagctgctcctgcccctgctgcagaatatctctgaagatgtgattttttctgtgatgtgttataaagatgaggatgaagagctgtggc

SEQ ID NO: 337883 - DNA, 96 bp, Homo sapiens
gtggatgaggcccaggctgatgggaaggagcacccaggagctgaaggtgctggagaatctggtaaaagcaccattgtgaagcagatgaggatcctg

SEQ ID NO: 337884 - DNA, 75 bp, Homo sapiens
ccctgtgccagcagggagacacatgtttgtctttcagagtgagcctcgcagctggtccctgctagagcagctggg

SEQ ID NO: 337885 - DNA, 90 bp, Homo sapiens
ccgcagggcgatggacggccgaaccccgcgcccgcaggacgccccagccaggcttctggctgtgatgggtcggagattcctgatgaagtg

SEQ ID NO: 337886 - DNA, 116 bp, Homo sapiens
gctgggaagaagcatatacttttgaaggtgcaagatactatataaagtacctagtcgatagtcgctggttcaaacagtggaaaaaatatgttggctttgacagttgggacaaatac

SEQ ID NO: 337887 - DNA, 100 bp, Homo sapiens
ttatgtccaaagccatcttgccatgcgcagcctgagaatggagccaatgactgagggtggcagagcagaaagatgggtctcgctctgtcacccagactgg

SEQ ID NO: 337888 - DNA, 100 bp, Homo sapiens
aatctatgatgctgatggtgatggagattttgatgtggatgatgccaaagttttattaggtgctgcgacaagagactttggacaaaaattgacttgagta

SEQ ID NO: 337889 - DNA, 100 bp, Homo sapiens
caacatgaacaactacaaaggctatgaaaagaagccctattgtaatgcgaaacttggatttaactggccagaagcaggtattcaaagcagagaacaatcc

SEQ ID NO: 337890 - DNA, 110 bp, Homo sapiens
gtcctgtgtatggtggtggcaggggccatcgctgccgtctttcacacactgataggttgatctcctatcaagagtttttggcatttgaatctgttttatgtgctccagat

SEQ ID NO: 337891 - DNA, 101 bp, Homo sapiens
ccatcaccacttcctcctctcgaatgcagcagccacagatctctgtctacagtggttcagaccgacatgctgtacaggtgcaggcctggggtagtctcctg

SEQ ID NO: 337892 - DNA, 101 bp, Homo sapiens
gctgccgggcgctggtcgtcagcgccgaggctgggctgaggcgccgcggtaccatgaggcgccggtactccaaagattcaggtttactcacgtcatccagc

SEQ ID NO: 337893 - DNA, 98 bp, Homo sapiens
gggcagtctgcggcggtgttctggtgcacccccagtgggtcctcacagctgcccactgcatcaggaacaattaccagctctggctgggtcgccacaac

SEQ ID NO: 337894 - DNA, 83 bp, Homo sapiens
ctttgtggtgcgggacgcaccctggaccgccagcagcagtgagaaggatgaatttcatcctttcatcgaagcacttctgcccc

SEQ ID NO: 337895 - DNA, 99 bp, Homo sapiens
ggagtgtatgaccacaaacagccatcaagcccacacatcttgctgacttcactcaagtgcaaaccattcagtattcaaacagtgaagacaaggacagaa

SEQ ID NO: 337896 - DNA, 101 bp, Homo sapiens
tggccactgtggccttctgcgacgcgcagtccacgcaggagatccatgagaagggtctctcattcatcacttttatctgctatgtggcgtcctcagcatct

SEQ ID NO: 337897 - DNA, 101 bp, Homo sapiens
gtacaggtttcgagatttgctgctaggggaccaaggatggcaaaacgacgacaggagggtgcatctgcccggaagactcagactcctgcagcccagccagt

SEQ ID NO: 337898 - DNA, 100 bp, Homo sapiens
ccagattcaacccgtgtacgtgcctgtgcctaaagttacaggaggttccagtggcatcgggaagtgcattgctatcgagtgctataaacaaggagctttt

SEQ ID NO: 337899 - DNA, 81 bp, Homo sapiens
aacgaggcaaggagctaaagcagcgtgcgttcagccctgggtctgcgctcctcagaccaccggcaggtgaacagcctgatg

SEQ ID NO: 337900 - DNA, 98 bp, Homo sapiens
atctgatgcagaattaccgctgttgggcacacaagccatgccccctcttttctctttgggataccaccagtgccgctggaactatgaagatgagcagg

SEQ ID NO: 337901 - DNA, 100 bp, Homo sapiens
ccctgagggagaggagaaagtggaaaaggcagaggtgaaggagagaacagaggaacctatggagacagagcccaaaggctggagtgcaatggtgtgatct

SEQ ID NO: 337902 - DNA, 90 bp, Homo sapiens
gtgaacatcgaatcatggaatcccttgcatggctctcagcagtaacagagaagaattttgaaacaaaagattttcgagcctctctagaaa

SEQ ID NO: 337903 - DNA, 75 bp, Homo sapiens
agacaactataaacgagtgactgggacaagtggactccagaaggaagacgcttggtcactggagcttctagtggg

SEQ ID NO: 337904 - DNA, 83 bp, Homo sapiens
tggcggcgctgcgaggccagagcctagggctagcggccatggtgagacatggaatccattaaaattgcattatcagttaagaa

SEQ ID NO: 337905 - DNA, 98 bp, Homo sapiens
tgagagaaatgcttacacacagaaatggtgactctgacatcattagaagcatgccagaacagactggtgaaaagtaaaccttttcacctacaaaattt

SEQ ID NO: 337906 - DNA, 88 bp, Homo sapiens
gaagaaaagaaaggaatccgtaaagacccatttctctatgaggtgattttctatgatagcgactggaaccccactgtggaccagcagg

SEQ ID NO: 337907 - DNA, 151 bp, Homo sapiens
agcgatgacaagaagaaggaaaaagatgtgcagtttgaacacggctaccggctcggcttcacagatgtcaacaagtgcctcccttcaggagccgaggacatcatgtctggtggccccactttggaggctgctgaatttgatgacttgattg

SEQ ID NO: 337908 - DNA, 82 bp, Homo sapiens
cgtcgacatgagtgatgtggaggaaaacaacttcgagggcagagtgaggtttatacatggggcgacaatgatgagggacaac

SEQ ID NO: 337909 - DNA, 88 bp, Homo sapiens
tacagcaagaaagaccatcaagtttaccaatcctgtttgaccaaactcagagatcaattaaggcacagcttcagaactttgttaaaga

SEQ ID NO: 337910 - DNA, 74 bp, Homo sapiens
aggaggggaggagggccactgggctcccagcagcccaggttcaggatttaagtgccctgtatgctcaaaatttg

SEQ ID NO: 337911 - DNA, 95 bp, Homo sapiens
gaggcaaggagctaaagcagcgtgcgttcagccctgggacctgatggccaaaagaaaggaagaaaatttttcctctcctaaaaatgccaaaaggc

SEQ ID NO: 337912 - DNA, 82 bp, Homo sapiens
gctgaagcgactgagtccgcgatggagttgggccggtgcacaaacagcgtggtcaagtatgagctgatgcgcccctccaaca

SEQ ID NO: 337913 - DNA, 75 bp, Homo sapiens
cttctcaaccttgtgggatgtgaaaactctgttactgaagattcatgttacatgtaaagctgtcctcatttgtga

SEQ ID NO: 337914 - DNA, 95 bp, Homo sapiens
gatgtgggaggattgcattcagtctagttcctggttgccggctgaaataacctgacatttctcttgggaagttgtgcatctgacaggaatatagt

SEQ ID NO: 337915 - DNA, 100 bp, Homo sapiens
atgagcggaagcttcgaggcatgatggtcgactacaagaagagggcggagcggagacgggagtattatgaaaagatcgacgtggcccagtggaacatcgg

SEQ ID NO: 337916 - DNA, 98 bp, Homo sapiens
ggagacacattttatgttgtgtcatttcgaaggattcgggaactggagcctctcctctgtcacagtgacaatccatctcagctcatctggacatcatc

SEQ ID NO: 337917 - DNA, 75 bp, Homo sapiens
gatctcctgtgctgcgaccactgcccggctgccttccacctccagtgctgagcatggatcattttgatgacattg

SEQ ID NO: 337918 - DNA, 100 bp, Homo sapiens
ttttctcatggatgttcttcttcgagtatttgtagaaggtgatatggagaatgcagaaaacattctcacagtgatgagagatgccggaattgagcctggt

SEQ ID NO: 337919 - DNA, 96 bp, Homo sapiens
ctgctgcccgcgtccgaggctcgcgggcggcgggcccggcacccgacagctacaaagtgcaagataagaaaaatgcctccagccgccctgcctctg

SEQ ID NO: 337920 - DNA, 50 bp, Homo sapiens
caaaggcctgcagtgcgcgcgacagtcattttgtttactcattcagccct

SEQ ID NO: 337921 - DNA, 100 bp, Homo sapiens
tcggcggccaagcccccgaccgggatttaagtgccctgtatgctcaaaatttgtatcctcagatgaaatggatttgcatcttgtaatgtgtttaacaaag

SEQ ID NO: 337922 - DNA, 97 bp, Homo sapiens
tagagaaatggcgtgtgaagaggtgagaataatgtttgaggtacaggacttgaaatacgcgaccttggccacagtgtcgcgctgcggcatggtctgg

SEQ ID NO: 337923 - DNA, 74 bp, Homo sapiens
ttctggagtactcttattttgaaaaggaagatgagaatgtgcctactgctcctgatcctccaagtcaacattta

SEQ ID NO: 337924 - DNA, 83 bp, Homo sapiens
cttttgtctgcccctattgtaagtgcagatggaacacaacaggccactgcagaacaaattagacttgcacagatgatttcgga

SEQ ID NO: 337925 - DNA, 75 bp, Homo sapiens
tagctgaggaggtcaatttaaatggttctggcaaactgctcaaggctgaagccgacgtagcttctctgaacagac

SEQ ID NO: 337926 - DNA, 120 bp, Homo sapiens
ggcttttgaagaagagaaatgggatgagatttcaattggctctttgcgtttccaggttttgaaactaacatgaacataagtagccgagatgaccctagtacgtcagaaattacttccgag

SEQ ID NO: 337927 - DNA, 74 bp, Homo sapiens
gagcatgttctcttagtcagcatccttcaccacacagttggaatcgaggaggaaaaggcttctcttttacatcg

SEQ ID NO: 337928 - DNA, 82 bp, Homo sapiens
agccaaggtggtgagggcagctgttcctaaacagcgcaaaggcagcaaggatgtctccaagaagaatgagcgcagcgccctg

SEQ ID NO: 337929 - DNA, 83 bp, Homo sapiens
ctcagttggaagcagccgatccagcctgcggagcctgtggggcagaacgagaggagctgaaggccttgagctgcctgcgctgt

SEQ ID NO: 337930 - DNA, 105 bp, Homo sapiens
cgccaccgctgcccgcctgccgccgcccgcctccgcctgccttctgccgccggccggcgcgtcgtccccacagcacctgtggaatcctctcaagaggaacagtca

SEQ ID NO: 337931 - DNA, 100 bp, Homo sapiens
gcctggtgtgtcatcatcgccacgctggtgtgcaggaagaggagcaggacttggatggtgagaaggggccatcatcggaagggcctgaggaggaggacgg

SEQ ID NO: 337932 - DNA, 96 bp, Homo sapiens
tctccaagatgcagttttttgatgctgaggagctcctggtcgatgaagaggatgatgtttttggtgaagccctaccacttatgtcttggatgaaga

SEQ ID NO: 337933 - DNA, 98 bp, Homo sapiens
gctgtggtcacagctgaggaggtgctgcggacccccaaacaggagaggagttcattacttcggaagtggtacaatttaatgatacaaaataaggatga

SEQ ID NO: 337934 - DNA, 90 bp, Homo sapiens
gttcaaacgcggccgcttccgactcagcctcttcagcgacctgcccgagcgtctgcttctgcgctttgcctgggagaggccctggtggcc

SEQ ID NO: 337935 - DNA, 82 bp, Homo sapiens
tcatcagtatttgcctcctgtgtcccaaccggcctgagtcaacacccagtcagcttgaagagtttcaaatggaccctaccac

SEQ ID NO: 337936 - DNA, 80 bp, Homo sapiens
agactcgcaacaagatcccctatgagagtcccatcttcagcagagccttatgccagcctggaccatcttggaggcagtgt

SEQ ID NO: 337937 - DNA, 100 bp, Homo sapiens
acatggatgcttgttggatgaattaatgaaccttgacccacaccaagatttatgtgatcagtttggctgaaccccgtctgcccctgcagctggatgatgc

SEQ ID NO: 337938 - DNA, 100 bp, Homo sapiens
agatgggggccgtcctgaggagcctcctggcctgcagcttctgtgtgctcctgagagacatatgtagagtgtgtcggtcagaaggaacacctgagaaacc

SEQ ID NO: 337939 - DNA, 87 bp, Homo sapiens
ggaaaagagccgagtggactaagattcaacaaactatttttgaatgaagatggccctggccaacgtcaacattgggagcctcatctg

SEQ ID NO: 337940 - DNA, 100 bp, Homo sapiens
gaagagaagtcaagggaattcattggcaacttcctagaactgtttggacctgatggagcatggtctgcagatctccaggggagcccaccagcctagtcaa

SEQ ID NO: 337941 - DNA, 88 bp, Homo sapiens
ctgcttttgatgtctgacaacgtggatcgttgttttgaaacgcaattaagttggaatatgcaaggttggttaagttggcccaagaaga

SEQ ID NO: 337942 - DNA, 75 bp, Homo sapiens
agcaagaggagcagtccagcggcatgaccattttcttcagcctccttgtcctagatccatgttcactagcggcct

SEQ ID NO: 337943 - DNA, 82 bp, Homo sapiens
ctggaagtgtagattctatagctgttgatggctcaggaactaaatctgaagatgatgagaaactgaaaaagaggaaggagcg

SEQ ID NO: 337944 - DNA, 97 bp, Homo sapiens
gcaaagctggttttgctggggacgacgctccccgagccgtgtttccttccatcgtcgggcgccccagacaccagtgggctcgggatgagtttgaagg

SEQ ID NO: 337945 - DNA, 83 bp, Homo sapiens
gctgcgcggggccgaggccgcctccgagcgccagggtttctatcttactaaaggatatttcagaaaatctatattcactgagg

SEQ ID NO: 337946 - DNA, 50 bp, Homo sapiens
ctcttcctcccttcgctcgcaccatgaaagcgtggatacccatcaacgaa

SEQ ID NO: 337947 - DNA, 83 bp, Homo sapiens
ctgttttcgtgatcttcagaccccaggttctttgagcactacaaacaccactggtttcccgaaaagccgtccaagggctccgg

SEQ ID NO: 337948 - DNA, 100 bp, Homo sapiens
acggcaggatcgggattgagaggctgaaaaaggcccctcagcagaaggcagaacagaaccgagttcctttagaatgctggtttttgtgtggagtgaggaa

SEQ ID NO: 337949 - DNA, 89 bp, Homo sapiens
tgttttggctttggggctaggtcctcactaggctcatcgacttcttcattccagtccatgggttcttatggacctttcggcaggatgcc

SEQ ID NO: 337950 - DNA, 82 bp, Homo sapiens
agcaaagtacagcgcttctgggagtccaactcggctgcccacaaggagcaccgaacaagatttgtgatgaaatggagcctgg

SEQ ID NO: 337951 - DNA, 74 bp, Homo sapiens
gtcaactaaaagcattgtttctagaacatgagtttgccagggtttggatacctgatccagaggaagtctggaag

SEQ ID NO: 337952 - DNA, 128 bp, Homo sapiens
gaggaccttccacgtctgacgtgtgatctcgagagacctgcgtacattcggggtgccagaaggaaagcatagggaaatcctcattgacgattcaatttgttgaaggccaatttgtggactcctacgat

SEQ ID NO: 337953 - DNA, 74 bp, Homo sapiens
gccctgaacgaggaggccgagaggaaagggacctattcaggcctgttctgtgtggtcatcaatccttacaagaa

SEQ ID NO: 337954 - DNA, 74 bp, Homo sapiens
catgcgcctgagctgcgggagctcgccccgggacccccacgcttttccagaagcctgttaaaagcaaggtctcc

SEQ ID NO: 337955 - DNA, 83 bp, Homo sapiens
tcggaactcgggcatcatggcctcaggtggtgtataaggaggccgagaagagcccacagctgggactgggctgcctctccttc

SEQ ID NO: 337956 - DNA, 100 bp, Homo sapiens
aggcaaggattccggagagaggatcaggtgttttcaggttaaccgtcaggaggctattctgcagaccatcctgttattaaggtcttctggagagttgtgg

SEQ ID NO: 337957 - DNA, 74 bp, Homo sapiens
ctagaagagccgttgccttcaacaagcagtgaagaagaagatccccttgcggacgaaggggaggaccaggctgg

SEQ ID NO: 337958 - DNA, 100 bp, Homo sapiens
ggaaggcactgcagctcgagtgaagaggaattcagaaaagcagctcagcaacaggaagaacaagaagaaaaggaggaagaggatgatgaacaaacactcc

SEQ ID NO: 337959 - DNA, 100 bp, Homo sapiens
caggccggcgcttctcctcctgatgcttttgcagaccgcggtcctgcaggggcgcttgctgcgtgacaaccaaagccaagcaactgaaggattcagtgac

SEQ ID NO: 337960 - DNA, 100 bp, Homo sapiens
gcgtcgcggccctgggcgggcgccgcgagccggaatgatatggaacctagcaaagctgttccactgaatgcatctaagcaagatggacctatgccaaaac

SEQ ID NO: 337961 - DNA, 98 bp, Homo sapiens
ctgtttcagagcgtttgggtcctctgaggccccttgaccaggtggtccagtgcttgctggggatggagaaggaacatgaagtagaagtcaatggcacc

SEQ ID NO: 337962 - DNA, 83 bp, Homo sapiens
aaaagctccacagagctgctgcggcagttagcggactgatagaaggttctgctcagtaccgggaaaggctagaaatggcagag

SEQ ID NO: 337963 - DNA, 98 bp, Homo sapiens
gaccggagccttcagcggggggagctcggagccctcccagcctgctgtccagcaggctcttcgtcagattgggcagaggacgataagcactgcttccc

SEQ ID NO: 337964 - DNA, 100 bp, Homo sapiens
gaaaggttaaaggatcaagcagatggaaaatacgtcttagttgctgggtgccaggattgctgagtattcccagttgtatgaccagattgtattcagagag

SEQ ID NO: 337965 - DNA, 137 bp, Homo sapiens
ctgcgccgcggctacgtgcgcgtccagtggtacccggagggcgtcaagcagcatgtgaaggagaccaaggaagaaatgagctccatgcctgatgatgtctttgagtcccccccactctctgccagctacttccgagg

SEQ ID NO: 337966 - DNA, 75 bp, Homo sapiens
ctcgaaggcccgcggcgccccgtgctgcagacgacaggatctgctcgccacccttcatggagctcacgagcctgt

SEQ ID NO: 337967 - DNA, 98 bp, Homo sapiens
tctactagtacgactggcgggttgacctcagtctcctggagcttccagccagagggggccgacactactgtgtcggtctcctgcaagcgcaaaatctt

SEQ ID NO: 337968 - DNA, 100 bp, Homo sapiens
tctgtttacttgaaccagtgagaagatggccgagcaagcaaggataagtgtatgctccagaatgtttaatgcaatctaaattttatattgcctctgacgt

SEQ ID NO: 337969 - DNA, 100 bp, Homo sapiens
gattactgatggattcttctcagatccaggtccagagagcatcgcagacatcgatctcgctccatgtcacgtgaacgcaagaggagaactcgatccaaat

SEQ ID NO: 337970 - DNA, 74 bp, Homo sapiens
ctgtggctgtgtaagatctgcagtgagcaaagagagccaaagaagcctaaagccccagacaatccatttcatgg

SEQ ID NO: 337971 - DNA, 98 bp, Homo sapiens
gcatgggcaaaacttgatgtggttcaaaccttgtactactcagctgatcacaagctgcttgatgggaacctactagatggacaggctgaggtgtttgg

SEQ ID NO: 337972 - DNA, 74 bp, Homo sapiens
tgaaggaggaggacaaagagcccctcatcgagctcttcgtcaagatggcctgatatgaaggagtcacgcctccc

SEQ ID NO: 337973 - DNA, 83 bp, Homo sapiens
ccgcgcctctcttcgcctcgcctcgggacccgcggtccccgctcttgctggattttttatcaagcagaaatgcatcgaacaac

SEQ ID NO: 337974 - DNA, 74 bp, Homo sapiens
tgtggtgcacccagaggccggggaccttgccaaccctcccaagaagttcagagtactaaggctcgtacgtctgc

SEQ ID NO: 337975 - DNA, 95 bp, Homo sapiens
agaacacttgatagaaaagtacatgttactccctaatcaagtgtgggatagtataatccagcaggcaaccaaagacttggatgttgtgggtgatg

SEQ ID NO: 337976 - DNA, 97 bp, Homo sapiens
tgaccccaggctggaaaagctgtggcacaagacacacaggctgaaggagagtgtagctcccgtgctgagcgtgctgactgaatgtgcccggatgcac

SEQ ID NO: 337977 - DNA, 75 bp, Homo sapiens
gcttggagtagtaaaagttccaacaaaagagctgctgatcaagagatctgcaacatttcattgaattggatgaaa

SEQ ID NO: 337978 - DNA, 100 bp, Homo sapiens
ggacaatgtcagagcccagctttcccagaaagcacgtagacagactatgctcttttctgccacccaaactcgaaaagttgaagacctggcaaggatttct

SEQ ID NO: 337979 - DNA, 100 bp, Homo sapiens
aatgccattgtcgcccatgttctcttgcaccatcatgactccaagcggaggagatccgatgaatttaggcctcaaaattaccaccagcaggatttccgac

SEQ ID NO: 337980 - DNA, 100 bp, Homo sapiens
aactgctccacagattatttagaggaaatggctagtgatgagctgaaagagatgcggaaaaacttgaccaaagaagccatcagagagcatcagatggcca

SEQ ID NO: 337981 - DNA, 96 bp, Homo sapiens
ctgatagacatgggggcctcaaacgtggagatcaactcctctctgttaatggagtgcctctactcaatagtccccccagctttgtgtgctggtctc

SEQ ID NO: 337982 - DNA, 100 bp, Homo sapiens
gagccctgcccagctgtactccccagacacccacccaacccgagggtttactagcattgggcatcagtaagtctgttcaaacaccagatccttctcatcc

SEQ ID NO: 337983 - DNA, 100 bp, Homo sapiens
agctgacatatgaaggactcattgatgaaatttatggcattcagaacagagcttactccacgggaacagcctctagataatctgagttgttgaaaatacg

SEQ ID NO: 337984 - DNA, 136 bp, Homo sapiens
cggaccccggcgccgcggcgacctcggaggaaccggctccttgcgtcccgcctccctgggagctccgcacggattcagaatggacagtttagaagaacctcagaaaaaagtctttaaggctcgaaaaacgatgaga

SEQ ID NO: 337985 - DNA, 101 bp, Homo sapiens
gagcagccctggtgtcacctatcagtaaaagagttacactgttagaccttatgatagccaagataacgagtgatgagccactcaccaaggatgacatccct

SEQ ID NO: 337986 - DNA, 90 bp, Homo sapiens
tacatccgaaagtgtctggagaagctggacactgacatttcactcattcgctattttgtcactgagggacatgaattttataatccccag

SEQ ID NO: 337987 - DNA, 50 bp, Homo sapiens
tgggatccagctgttagtcggaactgtaagagtaaatgggtccagtaatt

SEQ ID NO: 337988 - DNA, 98 bp, Homo sapiens
cctcgcccccaacaaggacaagtgaagctcaccatggctcaacttactcagttaacacagggccaccaaattctgcccagctggttgtagagacgtag

SEQ ID NO: 337989 - DNA, 83 bp, Homo sapiens
ggttttcaggaccaaaattgtggaaaagtcactctggaactgtggctgcaccatctgtcttcatcttcccgccatctgatgag

SEQ ID NO: 337990 - DNA, 100 bp, Homo sapiens
actgaagtatccagcgctcattgggaatttagttaagctctcagagaaggggaaaccttatgttgacatccaaggtttgactgcctctaccatggaaatt

SEQ ID NO: 337991 - DNA, 50 bp, Homo sapiens
cgcccgtccacacccgccgccagctgtttgcagacaaggtcccaaagaca

SEQ ID NO: 337992 - DNA, 50 bp, Homo sapiens
aagccacaggttttccagtcgcactgcgttattgccagtttccgaggaac

SEQ ID NO: 337993 - DNA, 82 bp, Homo sapiens
ggagcttaagaatattcctatgaccctggaattactgcagggaataccttggcaagcagctccagtccgagcagccccagac

SEQ ID NO: 337994 - DNA, 100 bp, Homo sapiens
gattcagccagcacactcctcgcgagcaaggccccttcacagatgtagtcactacaaatcttaaattgcgaaatccatcggatagaaaagtgtgtttcaa

SEQ ID NO: 337995 - DNA, 83 bp, Homo sapiens
ccgggagtcgctgggtgcgtggggctgcctcgccgcgtctcgccacgcatgtcagtgaaaaaaccagtgaatcgccttccaaa

SEQ ID NO: 337996 - DNA, 97 bp, Homo sapiens
ggcaaacatggcggtggactcggcgatggagctgttatttttagatacttttaaacacccgagcgctgaggaggtaatacagattttcattgaagac

SEQ ID NO: 337997 - DNA, 95 bp, Homo sapiens
ctgcagccgagatgccgggggagcggggccttccacaccccctccgtgggtgtgtggtgcacttagaactacctcccagctccaacatagtgcaa

SEQ ID NO: 337998 - DNA, 83 bp, Homo sapiens
ccccgtcccgaccctggccgccccgagcggagcctggagtgctgctcacggccgtgaactgctacagcgtgaaggccgccacc

SEQ ID NO: 337999 - DNA, 75 bp, Homo sapiens
cttcctgtacagcctgcaaaactgaactaccctgccctgacagaggctggggatgaaggaggaagagacagccgg

SEQ ID NO: 338000 - DNA, 100 bp, Homo sapiens
gcatctgacaaacactgtattcgttgacagagctttgatagtcgtaccatatgcagaaggaataagacgagttggaagaagacctgatcaacaacttcag

SEQ ID NO: 338001 - DNA, 50 bp, Homo sapiens
taaacttgatatggtggaggacacagaagctctaagcgaaagacatgagg

SEQ ID NO: 338002 - DNA, 75 bp, Homo sapiens
ccgcgttggcctcgccgcccctgctcgggggagacaggtgtggacatgagtggctgggatgcagtgccgtagcag

SEQ ID NO: 338003 - DNA, 100 bp, Homo sapiens
agcctctaggaagcgctagacacatgaatgggaaaaggacagcacaggatgccctccaaggatgagctggtccagagatacaacaggatgaataccatcc

SEQ ID NO: 338004 - DNA, 75 bp, Homo sapiens
cgacttcaaattgggtatcgtgcggctcggccgggtggccgggaaggatggccggctcctgccagagttcaacat

SEQ ID NO: 338005 - DNA, 129 bp, Homo sapiens
aagaagctgaaggaaatcttgctgcaggtggaggacgagcgcaagatggccgagcagtacaaggagcaggcagaggataaaggaggaagagaaaagggcagcagaggagaggcagaggataaaagagga

SEQ ID NO: 338006 - DNA, 90 bp, Homo sapiens
gaactcaacatcacagctcaactccaggagggagaggaggtgtctgcaaggatagttcaagtagtcactgctgaggctgtagcagtcctg

SEQ ID NO: 338007 - DNA, 93 bp, Homo sapiens
cggccgagcgggcggcttcctggcctgggcgctccggtggcggcggagggccaattcctgtccccccagcagcatggcatcgtgtgctgaacc

SEQ ID NO: 338008 - DNA, 89 bp, Homo sapiens
tcgggtgtattttggttgaaatgcacactggagaacctctgttcagtggtgccaatgagaaatgcactcggtgatggaaagagagccac

SEQ ID NO: 338009 - DNA, 80 bp, Homo sapiens
ggacccaggagtttcctgtgtccagcgctgccggagccgcctgaggcagaagctcctcctggggtagagacagatcttat

SEQ ID NO: 338010 - DNA, 90 bp, Homo sapiens
agaggacgccggaacaccctggaagccgagaaatggtacaccaggggttggaaaaaccacactaggcaaagaacttgcgtcaaaatcagg

SEQ ID NO: 338011 - DNA, 100 bp, Homo sapiens
cagaaacacaaagcagcccaaccaaaggatgatgctgaataatcccctatttgctggaaatcctcagcttcaagaacaaatgagacaacagctcccaact

SEQ ID NO: 338012 - DNA, 75 bp, Homo sapiens
tgtacctgttaccactttcaaaaagacaaagcatggaggacacaagaatgggaggaaaggcggactctcaggaac

SEQ ID NO: 338013 - DNA, 75 bp, Homo sapiens
ccccctcggaaaatggttcccactgccgggcgaggcgcagtcatgcaggaaaacctcagatttgcttcatcagga

SEQ ID NO: 338014 - DNA, 75 bp, Homo sapiens
ccctggacacagcaatatctctgggctttcacagtccacattcttgagtctgatgacctccacggccagcgaggc

SEQ ID NO: 338015 - DNA, 75 bp, Homo sapiens
ctcagactgtggaacttccgtgccccccaccctcaccaagctcactaccctgggaaatcttacaccttcaagcac

SEQ ID NO: 338016 - DNA, 73 bp, Homo sapiens
aaagcgaaattggtcattctcgctaacaactgcccagctttgagatcccagatgcagtgactggttactacct

SEQ ID NO: 338017 - DNA, 75 bp, Homo sapiens
cgttccgggggtgaagcctcctgcgccggccttgcctcggaacccagcgggtgccgcttctccacccgaggcttc

SEQ ID NO: 338018 - DNA, 97 bp, Homo sapiens
cacagcctcctgtcctcaggaacacgtgccagccgccctaaccctggacccgggcacagcccaccagcgcctgatcctgtcggacgactgcaccatt

SEQ ID NO: 338019 - DNA, 75 bp, Homo sapiens
acggctgtcaagctggcgcgccagagcggcatcgagactgaggctgatgtgaatccaaaggcctatccccttgcc

SEQ ID NO: 338020 - DNA, 96 bp, Homo sapiens
ccccatgttctgcagcgtggcttcctttggtgccagctctttgtctaggtagcctttccagtaaatatatgactcagggaaaagcctcagcgaaga

SEQ ID NO: 338021 - DNA, 80 bp, Homo sapiens
ctgcagccatgaagccaaccgtcccgaggctttatcctgtggataaacgcagagtgaacgagtttggggagtcctacgag

SEQ ID NO: 338022 - DNA, 75 bp, Homo sapiens
gtcaaatctgaatcgacagtttcttttccggccctgggatgtcacgttccaagatgagatgggattctccaacat

SEQ ID NO: 338023 - DNA, 82 bp, Homo sapiens
catgggtggtggtcgcgctgtgctccacaagagtgagccatggagctacgtgtggggaacaagtaccgcctgggacggaaga

SEQ ID NO: 338024 - DNA, 75 bp, Homo sapiens
tgtgaccccagcgtgggtgaagataggatcaagatggccatgtggcaggctttggtgtcatccccagcactcctc

SEQ ID NO: 338025 - DNA, 50 bp, Homo sapiens
aacaaggcaaatatggttttgcttagctcttgtcatgcagtgctttcaac

SEQ ID NO: 338026 - DNA, 100 bp, Homo sapiens
ctggcttctgcccgacctcacccgaatagccaggtctggctgggtcggcacaacctgtttgagcctgaagacacaggccagagggtccctgtcagccaca

SEQ ID NO: 338027 - DNA, 113 bp, Homo sapiens
tgggttctctgaagatgattacacggcattaatctcccaaaatattctagaaggggaaaagctacttcaaggagaaggaagccaacatccttttggagccatgaatattgtcc

SEQ ID NO: 338028 - DNA, 90 bp, Homo sapiens
tggccgccaggggcagataatctataactgcaatcatcctcttccagtggtagcgtgtttgggtctggaaacactggaagagggggaggt

SEQ ID NO: 338029 - DNA, 75 bp, Homo sapiens
ctgaaatctggagtgaagaacgccgccatccagccaccattccaagctgcatatctatgtgagactgaattttcc

SEQ ID NO: 338030 - DNA, 97 bp, Homo sapiens
aaggaaacaactgaagcaaggaatgccttaattgaacaaggaactcctttgaaaaaagatggtgaagaatgtactaacgaaggcaaaggaatagctg

SEQ ID NO: 338031 - DNA, 100 bp, Homo sapiens
atgcttgtatggtctccatatcacagtatcccagatgccaaatcaaaccagtccagctacgggggcccagccagccagcagctgagtgggggttacggag

SEQ ID NO: 338032 - DNA, 101 bp, Homo sapiens
tggccttgtggagacaacgccttaacccaaggaagtgactcaaactgtgagaacttcagtaccttgcagaagccggctggacagctgaaggaagagtggta

SEQ ID NO: 338033 - DNA, 75 bp, Homo sapiens
acaatggcatttacagaaagagtcaacagcagtggcaacagggtactatttttctgcctggaaataaagtttctg

SEQ ID NO: 338034 - DNA, 87 bp, Homo sapiens
tgacgtccatccatttcgtggttcacccgctgccgggcaccgaggaccagctcaatgacaggcatctccttggaaacaatgccatct

SEQ ID NO: 338035 - DNA, 82 bp, Homo sapiens
ggagaatggagtcttccatcaatcatatctcacaggcaagaaaattggatgtatattttgaatatgaagaaaaaataatgag

SEQ ID NO: 338036 - DNA, 97 bp, Homo sapiens
cacacaaagaatgtttgggaagagtagacaattgtggcagagttaattctggtggtttcccaggcagctgcagacttgaaacagttctgtctgcaga

SEQ ID NO: 338037 - DNA, 75 bp, Homo sapiens
ttggatatggaagaggccattcaaaagagcaatggtggaacaaagcggcaaaagatatcccatcaaaattatata

SEQ ID NO: 338038 - DNA, 75 bp, Homo sapiens
cttctcatactttgttagaaaagccaccagatctttaatctcatgaagtacgacagctacagccgcttcttaaag

SEQ ID NO: 338039 - DNA, 99 bp, Homo sapiens
acctgaacgtctatgtgccgacggaggatgatggcagtggcagcaccatgatgcaaaccaagaccttctcctcttcctcctcatccaagaagatgggca

SEQ ID NO: 338040 - DNA, 74 bp, Homo sapiens
ggccggagcccaccaagttctgggaaggaatgacgttggccggagctcctatggcgccatgcaggtgaagcagg

SEQ ID NO: 338041 - DNA, 100 bp, Homo sapiens
gggccgcggctccggcatggccgggatcattaagaagcagatcctgaaacacctgtcccggcccgaggtatgaagaagcaaatcattgacgacttcatca

SEQ ID NO: 338042 - DNA, 83 bp, Homo sapiens
gttagacagtgaatgtggaaaggagattgacagtcacaattttgtaataagcattttgaaagcgaagcagaagccgtagaatc

SEQ ID NO: 338043 - DNA, 101 bp, Homo sapiens
gagggtctggaggagccttctcaagaacagaggggtttgccaacttgttaataagatggaggagaatactggcaaggttaagcctttcaaccgaaatgacg

SEQ ID NO: 338044 - DNA, 51 bp, Homo sapiens
caacagtggtgctgtggaatgcccagccgcacaattccaccttcctttgtg

SEQ ID NO: 338045 - DNA, 125 bp, Homo sapiens
gctggccacttgcttgggatcctttatcctggtcatcttctatttccaaagtactccaaagattcaggtttactcacgtcatccagcagagaatggaaagtcaaatttcctgaattgctatgtgt

SEQ ID NO: 338046 - DNA, 83 bp, Homo sapiens
cagccgcggagcagtagccgccgtgggagggagccatgaagcattacgaggtgtgttccagagaacaagccttcagacatttg

SEQ ID NO: 338047 - DNA, 75 bp, Homo sapiens
cgcccatcgagcgggtcaagctgctgctgcagggcaacaaaccatggatttctcttccccgaggaaagggtatcc

SEQ ID NO: 338048 - DNA, 99 bp, Homo sapiens
cttatgctaaagcactgagaatgtctctcctctcaggttatatgacccctggactaaccccagccaattcccaggcctcaaaagccactcccaagctag

SEQ ID NO: 338049 - DNA, 82 bp, Homo sapiens
ccgggacccccacgccgccgccagccctgggcgctgcctatggcacagccaagagcggtaccggcattgcggccatgtctgt

SEQ ID NO: 338050 - DNA, 122 bp, Homo sapiens
cagctgccgaagtcagttccttgtggagccggagctgggcgcggattcgccgaggcaccgaggcactcagaggagtgcagagcagagcgggcggaggaccccgggcgcgggcgcggacggca

SEQ ID NO: 338051 - DNA, 96 bp, Homo sapiens
ggcgccgccctggccaccgcgcgcgcctcgccccggcaggatcaaaggtccatcatcaaaacaccaaagactcaagacacagaagatgatgaggga

SEQ ID NO: 338052 - DNA, 100 bp, Homo sapiens
tatcgctacttcaaagggtactttttagaaccaaagagatggagtttcgctcttgttgcccaggctggagtgcaatggcatgacctccgctcactgcaac

SEQ ID NO: 338053 - DNA, 75 bp, Homo sapiens
catccaggagagaatgctgacagtcctgcagctcttttggtacaccagaaggccagaatggaacgacttcaaaga

SEQ ID NO: 338054 - DNA, 100 bp, Homo sapiens
ccaggccctcaggctcctctgccttctgcttgggcttcagggctgcctggctgcaggatgccaggccaaggtggagcaagcggtggagacagagccggag

SEQ ID NO: 338055 - DNA, 84 bp, Homo sapiens
gcggaggaaggtgaagtaggaccgaattcctgtgccgaagaggcctgcagtgggagagcaggcttccccgggcgctgcctggac

SEQ ID NO: 338056 - DNA, 82 bp, Homo sapiens
caacagcgaggtggacgagaaagtggatggataaggtgggggatgccctggaggaagtgctcagcaaagccctgagtcagcg

SEQ ID NO: 338057 - DNA, 50 bp, Homo sapiens
ccaggtgtccatccccgtgctgagcagaatctggtagcccagagaccaag

SEQ ID NO: 338058 - DNA, 101 bp, Homo sapiens
tgggatgtgccttagaggattatgggacccagatgatgtggtaccagttggccaaagaagagcctggtgttggtgcatgtgctttggactagcatttatgc

SEQ ID NO: 338059 - DNA, 75 bp, Homo sapiens
actggctgcttggggagattgagtccaagttcaaccaagccattggagaagagaagtttacctttattgagaaat

SEQ ID NO: 338060 - DNA, 98 bp, Homo sapiens
aaacaccgcaacccagatggcccaggattccggagtttgaatccacctttgacaattgtccgaaagacgtttgaatcaacagaaaacccagatgactt

SEQ ID NO: 338061 - DNA, 100 bp, Homo sapiens
accgcggggcgctcatctggctctgctacgacgcgctggtgcacttcgcgctgaacagcaatttcccagcagaggtgaaggacctgactaagcgtataag

SEQ ID NO: 338062 - DNA, 100 bp, Homo sapiens
aatcacagcaacagactctcctgcagaccttcccaggaagccagagccacacacaccatcatggtcctgtaatcagttcaagaagttccctcagatgacc

SEQ ID NO: 338063 - DNA, 102 bp, Homo sapiens
tggagcctcagttggaagcagccgatccagcctgcggagcctgtggggcaggctccctggggaagggaatgcagggttgctggggctgggcccagaagcagc

SEQ ID NO: 338064 - DNA, 100 bp, Homo sapiens
gatgctacagtttgaatcacaaagaatttcacattatgaggctggaagtgatggagagagtattggaaactgtcccttttgccaacgccttttcatgatc

SEQ ID NO: 338065 - DNA, 98 bp, Homo sapiens
cgctccttcctgcgtgagttccacaaggcgggagtcatggatgtagatgctgaaagagagaagataacacaggagatcaaggagctggaaaggatttt

SEQ ID NO: 338066 - DNA, 98 bp, Homo sapiens
agagcctggagtctgcgaaggccgggacccggttccccggcccacagtgggggtgtgcaaacccgagagaactgggcatcctgtacacgtcaaagaag

SEQ ID NO: 338067 - DNA, 100 bp, Homo sapiens
catctggggcgtcgtgcgcaaaggcctgcagtgcgcgcacaatgcagatcttcgtgaagactctgactggtaagaccatcaccctcgaggttgagcccag

SEQ ID NO: 338068 - DNA, 74 bp, Homo sapiens
caaggtcaaaggctatgacaacctctttgctatggcctgtagtggtggagacacgcccagtggatgatcctact

SEQ ID NO: 338069 - DNA, 120 bp, Homo sapiens
aacacaatgagaggaagagtcaactttgatgactatactggcaatttgaatcaacccatagaagtgacagcgctgtattcatttgaaggacagcagcctggggatttgaattttcaagct

SEQ ID NO: 338070 - DNA, 50 bp, Homo sapiens
gcagcccgaggacaagcggctatttgtagccaaaccgtgcgccatagccc

SEQ ID NO: 338071 - DNA, 101 bp, Homo sapiens
cgggccgcgccgcgcctcagctctggtctggctctgggagaggagtggacagcagctggttgagatacatccccatctggagacaggactgccactgacag

SEQ ID NO: 338072 - DNA, 85 bp, Homo sapiens
caggacgaggtgtcggcgcgggagcagcacttccacagccaagtgcgggagtccacgatgggggactcaaggagatttcaccacc

SEQ ID NO: 338073 - DNA, 98 bp, Homo sapiens
ctcattgaagctatgcagtatttctttggcatcactgcagctagtaatttgccttctggattgatgtacagttacccagcacgtgtacctcctcctcc

SEQ ID NO: 338074 - DNA, 74 bp, Homo sapiens
agaagaagacaagcgggcagaaggctggtgacaaggactccctggaggaaaagcggaagcggcagcggtctgaa

SEQ ID NO: 338075 - DNA, 75 bp, Homo sapiens
aactgctaaggtccacaacgtcggtgttacagcacatgaaggccgtgcaggcagatcaggagcgggagaggcagc

SEQ ID NO: 338076 - DNA, 74 bp, Homo sapiens
aacaaggaggcaacccaggaggcttttatgaagcgggccatggtgcacagggaagtcatccctacacatactgt

SEQ ID NO: 338077 - DNA, 83 bp, Homo sapiens
cgtagacaccagctccgaaatcaccaccaaggtgtgagatcaaccatgagttccgttgcagttttgacccaagagagttttgc

SEQ ID NO: 338078 - DNA, 100 bp, Homo sapiens
agtggatattctggatctgaaagaaacccttaggctgagaatactttctgaggacatagagatctgaacagaattaagacgaacgagctttcacaattgc

SEQ ID NO: 338079 - DNA, 131 bp, Homo sapiens
accagttcccgcaagcccagacaatgccggtggaggaatttgtggctggctggatctctgacatggctccttactatgaagccttgtgcaaatccctcgactggcagatagacgtggacctactcaataaa

SEQ ID NO: 338080 - DNA, 100 bp, Homo sapiens
ctcgggccggcggacagtgagggcgcgctatgttagatactaaagaaggcttccccacaacccatatgcatctgctttgactggtggtttctatcatcct

SEQ ID NO: 338081 - DNA, 82 bp, Homo sapiens
tgtcctcctgttgcctgcaggccagatagcctgggctggaagctcttctacgtcacaggctgcctgtttgtggctgtgcaga

SEQ ID NO: 338082 - DNA, 101 bp, Homo sapiens
agccgtagacaccagctccgaaatcaccaccaagtattaaaggtggaagaaggtccatatctttttctgtgggtgcttcaagtgttgttggaagtggaggc

SEQ ID NO: 338083 - DNA, 83 bp, Homo sapiens
agagcctggagagcatgccccggccccctgagcagttaagtgggcagaccaacatccacctcagcaaaaacttcttcctgacg

SEQ ID NO: 338084 - DNA, 146 bp, Homo sapiens
ttgtgtcctgagatcaaatggcacttcattggccacctacagaaacaaaatgtcaacaaattgatgggaactgtggctgcaccatctgtcttcatcttcccgccatctgatgagcagttgaaatctggaactgcctctgttgtgtg

SEQ ID NO: 338085 - DNA, 97 bp, Homo sapiens
ctgttttgccggaggagcccctcaggccagtcgtccttgtctactccactaccaaatgttgaagttcttcaagaatcagtcctttggaggtgatgtc

SEQ ID NO: 338086 - DNA, 82 bp, Homo sapiens
gtcccgaccctggccgccccgagcggagcctggaggcccactgctcagtggagcgtggaggacgaggaggaggccgtccacg

SEQ ID NO: 338087 - DNA, 98 bp, Homo sapiens
ttactatagaaaatattcatcaacctagagctgccaagaagcattcttcatctaaagataaggtctgtgtgaaaatgtgtgaccctgccaaaggagca

SEQ ID NO: 338088 - DNA, 112 bp, Homo sapiens
gaattctccaacaatggaggccagtggctggtctcaggtactaggttttgacaagcttgcatcatgcgtgagtataagctagtcgttcttggctcaggaggcgttggaaagt

SEQ ID NO: 338089 - DNA, 90 bp, Homo sapiens
acacgggcctccgaagagctgccgcgacgcccggcccgcagggcaggttgaatgatcctaaaatgtctgaaacggagcgccagtccatgg

SEQ ID NO: 338090 - DNA, 100 bp, Homo sapiens
ctggtggactggctgctggctcaggtttggtgcacctcgatttggaggaagtagggcagggcccttatctggaaagaagtttggaaaccctggggagaaa

SEQ ID NO: 338091 - DNA, 100 bp, Homo sapiens
cttcttcgagtatttgtagaagggcgctgtaccatggaaagttcatcgacacgggcttcaccctccctttctacaagcggatgctcaataagagaccaac

SEQ ID NO: 338092 - DNA, 75 bp, Homo sapiens
aattccttttcgaccttcaatccagttccaaggactccacggggtaatagcctgcagctggtgttttgagaagcc

SEQ ID NO: 338093 - DNA, 83 bp, Homo sapiens
ccagctgcccgcacgccccgaccttccatctgtggacgaatgtggaacctcgctctgtggctgtgttcccttggcactcctta

SEQ ID NO: 338094 - DNA, 106 bp, Homo sapiens
aaacttttatctcatctggcttggcgcctgaggttctcccattaggtgcaatggatgagcttcatagtctggatccaagaaggcaagagttattggaagctagatt

SEQ ID NO: 338095 - DNA, 101 bp, Homo sapiens
gcagggagcattgcagcagccactggctttgtcaaaaaggaccagttgggcaagagagacaagagagacacctccaacttcgacaaagagttcaccagaca

SEQ ID NO: 338096 - DNA, 97 bp, Homo sapiens
taccgatgaggcggcggcgggccggccctgggctggggtcgccgcccctgcactcagatgatcatgacgcagtcctgaggtttaatggggcacccac

SEQ ID NO: 338097 - DNA, 73 bp, Homo sapiens
atcgttaaagtctctcttcaccctgccgtcatgtctaagtcagaggtgcccagtcccctggaaggcagtgaag

SEQ ID NO: 338098 - DNA, 100 bp, Homo sapiens
gaaaaatcgagcagaaagaatgtctttcaggtacatcaggaacgtctctatcaagaatacaatttcagcaaggctgagggccatctgaaacagatggaga

SEQ ID NO: 338099 - DNA, 100 bp, Homo sapiens
tctgtgcagtggcacctgcgcgaagctggccaaagcctgcccagacggctcacctgtgcgggatggaacaaaaggtgctcctgacctctgataaagctgc

SEQ ID NO: 338100 - DNA, 97 bp, Homo sapiens
tcctcctccactgccactacagggaagtgcatcacatgtcagggaaaagagtgcaaattcggaaagcacctcaagctgtttcagatacagttcctga

SEQ ID NO: 338101 - DNA, 100 bp, Homo sapiens
gacgacgaggaagaggaggtttctgaggttctaagctggtctatgtccatcaccttcttggagaaggagcctttgcccaggtgtacgaagctacccaggg

SEQ ID NO: 338102 - DNA, 98 bp, Homo sapiens
ctggcccaccattcccattgctccagatatgagaggacaggtgttggaaatcaatagctcttctagcctttgcattgtttaaatataatagtgtcatt

SEQ ID NO: 338103 - DNA, 83 bp, Homo sapiens
cgtcgtgatccagaagtccagagctgaggactgcctgtttgcagcggacaaggcaaaatctcagcaagttcggacctctagta

SEQ ID NO: 338104 - DNA, 90 bp, Homo sapiens
tgattttcctgcatggattgggagatactgggggaatctctccctaggtcaggttggagtgcagtgctgcaatcacggcttactgcagcc

SEQ ID NO: 338105 - DNA, 100 bp, Homo sapiens
caaaaactgatgaccaagagaatgtgtcagccgatgcaccgagtccagcccaggaaaatggagaggtgtgatgaatgcagactctgctaccattttggct

SEQ ID NO: 338106 - DNA, 100 bp, Homo sapiens
cccaccccaaccccggccgctggccctctgctcaatgtacttctccagttcctacccttcctcaagtggggaactcaggagaccaagcaggggcaactgt

SEQ ID NO: 338107 - DNA, 75 bp, Homo sapiens
gagtgcttctttcttggagctgaccatggatctgtgccagttcagaagcaggcgagcctcttccctgatgaaaaa

SEQ ID NO: 338108 - DNA, 83 bp, Homo sapiens
ccgccggcccgcgggtctacttcctcaaagcaaattgtggctactaatttgccccctgaagatcaagatggctctggggatga

SEQ ID NO: 338109 - DNA, 100 bp, Homo sapiens
tgcgagtggagtgtccgctgtgcccgggcctgcaccatgagcgtcccggccttcatcgacatcagtgaagaagatcagaaactaattctgaagcaagccc

SEQ ID NO: 338110 - DNA, 75 bp, Homo sapiens
ggcggtgctgccgcgcgagctctacccagtcgagtgctgattcctaaagaaaagcccccaatcacggttgtgggt

SEQ ID NO: 338111 - DNA, 75 bp, Homo sapiens
atctagaggcataattaggataataaatcctataacaatgcagtgtataaagagggcctgaaggtgcaggagaac

SEQ ID NO: 338112 - DNA, 50 bp, Homo sapiens
caggactgtgcaggggactctgtcacagaaggtgaaattgttgaagtgga

SEQ ID NO: 338113 - DNA, 100 bp, Homo sapiens
cggctctgtaggaaggaacttggttccccctccctcagcttccgccccaaaaggcgtcctgcctctgcggctctgccccctgcatcctgtgcagctgctg

SEQ ID NO: 338114 - DNA, 100 bp, Homo sapiens
cagggaccaggcggaggcgtcgcgggagcctttggggcaccacagagatgcgggtgtcttctctttagggatggtgaggttggaaaaaggctcctgtaac

SEQ ID NO: 338115 - DNA, 89 bp, Homo sapiens
tattaacatttattaacgatcaataaacttgatcgcattatggccagcactattaaggcctcgaaaaagcccaagacagcagaagcaga

SEQ ID NO: 338116 - DNA, 101 bp, Homo sapiens
agcctggcgggagaaggaggaggagcagcaggcctccgggcccggcgccgccgcccgcagtggaggccatagtggagtttgactaccaggcccagcacgat

SEQ ID NO: 338117 - DNA, 75 bp, Homo sapiens
cctatgaccctggaattactgcagtcattaacagctgaagagaagacgattacagaaaagcaccttgaattatgc

SEQ ID NO: 338118 - DNA, 75 bp, Homo sapiens
tttcagggacccctccatccactcggtgaatgttttccagggacacacggacaaaatgatgcttcaacacccagg

SEQ ID NO: 338119 - DNA, 100 bp, Homo sapiens
ttgtggagaagctgcaggcgcgcctggccgcgaacccggaccctaagaagtcatccgtccttggctcaggatttggagagcttgcaccaccaaaaatggc

SEQ ID NO: 338120 - DNA, 58 bp, Homo sapiens
ggcttttgcttccaaatacaagctgtataggaccgtagcatcctgagacattttgaat

SEQ ID NO: 338121 - DNA, 100 bp, Homo sapiens
caggggctgttgtggtggccaggatcatgcgaggaggcgcagcagacaggagcgagctatcagcttcccagtttgcacaattcatcaagaaattatgcgg

SEQ ID NO: 338122 - DNA, 113 bp, Homo sapiens
gtgtccctgtgtgatgcttttgatatctggggccaagggacaatggtcaccgtctcttcagatataaaggtaaatgctatctaagccacagtaaccttgagatactgtgggcc

SEQ ID NO: 338123 - DNA, 100 bp, Homo sapiens
tcccagccttcagaaattgccggtctgggagttgggggcaaggagaagatcctgctatccgtggtcctgaaccagttatgtgtgttgcatgagaaaacgc

SEQ ID NO: 338124 - DNA, 50 bp, Homo sapiens
tggcaacatggacatcaagctggcagggagaagaaatgggtgaccgttgg

SEQ ID NO: 338125 - DNA, 75 bp, Homo sapiens
cgaagacttgaaggtagacaaagtaattcagggccaaaagagaaacattggctactttgacaaccttaaagcgga

SEQ ID NO: 338126 - DNA, 80 bp, Homo sapiens
gcttcgtcaccccagaccttgccagagacctggcaaatgacatcatgacactgggactggtgattgcagctggaagtgcc

SEQ ID NO: 338127 - DNA, 75 bp, Homo sapiens
caccatcgtcatcgtggcccactacgacgcctttggagtggcccccgtcagcaatctgaagatggtcttacggag

SEQ ID NO: 338128 - DNA, 74 bp, Homo sapiens
ggaccctgctgaatagctggggctacaggcgtgtgtcactgcgcccaggactacaaagctgatgaagacccagc

SEQ ID NO: 338129 - DNA, 100 bp, Homo sapiens
cgagtgacacgttgaattcgccataatcaaggaaaccttttccgggtggggatctctgaaattactcagaacatcgatatattgaactcttcttgaattc

SEQ ID NO: 338130 - DNA, 82 bp, Homo sapiens
tcagttgcaacaggactgtgacctgagctgtcagatcaccattcccaaagaacttacccagattgaggatccaagagaacag

SEQ ID NO: 338131 - DNA, 100 bp, Homo sapiens
ggcgtcgaccacagtattccaaccctcctgtgcagggagaagtgatggaggttgatgacaacaagaaactaggagaatgggtaggcctttgtaaaattga

SEQ ID NO: 338132 - DNA, 100 bp, Homo sapiens
tcccaaggagatctggcttctagtagatcacctattcaaatacgcctgtcaccaggacgatgttcaactttggctctcctatgtggctttttgtaagaag

SEQ ID NO: 338133 - DNA, 90 bp, Homo sapiens
ggcgtgcgagagactcacgggacgcgacgcgccccgcctcccccgtccggtccctctctccacgtttctgtaacctaacagctatgtttg

SEQ ID NO: 338134 - DNA, 90 bp, Homo sapiens
cagccaaaaactttaaacttagaagaacattgcaagacataatgaagcctacacctggaccaaccccacctgctgcgtccacaacgtcat

SEQ ID NO: 338135 - DNA, 75 bp, Homo sapiens
ggaagccacgtgcagacatctacaaccttcgatctcctgacgattgagagcgtggagttaagaggagaatcagct

SEQ ID NO: 338136 - DNA, 74 bp, Homo sapiens
cggttcttctccagcgccctggcctccctcaccttggacacctcgcttggcctcaggcccagagccagcacgag

SEQ ID NO: 338137 - DNA, 50 bp, Homo sapiens
tttggatccatttggcttttccaggttggcaaggccacaggcttcctcaa

SEQ ID NO: 338138 - DNA, 101 bp, Homo sapiens
aagccctgcatggtggtgtggcttgtggatccctcacagaggttggacgtgataagtatgagcctgcagctgtttcagaacaaggtgataaaaagggcaaa

SEQ ID NO: 338139 - DNA, 50 bp, Homo sapiens
cccgagctatagagaaaggagatgagccactcatctctgcccagctgctg

SEQ ID NO: 338140 - DNA, 75 bp, Homo sapiens
cacaaacccactggacaccttcgtcccctttgatccctgtgtgctgaagaggaagctattttgccagccacttca

SEQ ID NO: 338141 - DNA, 75 bp, Homo sapiens
cttttggccaggggaccaagctggagatcaaacgtcatggaggaggctggggttattctgcccattcagtagaag

SEQ ID NO: 338142 - DNA, 75 bp, Homo sapiens
gccgaacgggcgaggttgggctgccgtgctgctcggcggcgctgagggtgaagtgatgaacctcctgatgttcct

SEQ ID NO: 338143 - DNA, 75 bp, Homo sapiens
cgccgccatccgggaggcccagggaagactgtattggtgatcacgtaccgagaacccccaaatcctgagtatcag

SEQ ID NO: 338144 - DNA, 100 bp, Homo sapiens
caaaagaaaggcaagagaatacttactagttaaagcagttccgccgagcatcctggggcctccaagcctccgataagctcctccagtatgacatcacgca

SEQ ID NO: 338145 - DNA, 83 bp, Homo sapiens
cgtccgttctctcaggctcccgttcagactgtgccctgtccacggtgcctcctgcatgtcctgctgccctgagctgtcccgag

SEQ ID NO: 338146 - DNA, 100 bp, Homo sapiens
cccggagtggggtgtcggcgcctcattcgggtggagctgagccggagacagagctgaagaagcaggtggagagtgccgagctgaagaaccagcggctcaa

SEQ ID NO: 338147 - DNA, 82 bp, Homo sapiens
gtgggcggcggcaacggggcactgacctgggtgcaaaatgatgcttcaacacccaggccaggtctctgcctcggaagtgagt

SEQ ID NO: 338148 - DNA, 102 bp, Homo sapiens
taacaatttttgatagttctgacctttcctttgcaattcagtgcagtaggatactgaaactgacattatttggtttggtaactgatttgaagggccattttg

SEQ ID NO: 338149 - DNA, 110 bp, Homo sapiens
gatccaaagaagtagccttagtaataaccctcttttccagtataagtatttggctcttaatatgcattatgtagttcctcctaagatatatgacatctcaaatgatatga

SEQ ID NO: 338150 - DNA, 98 bp, Homo sapiens
tcgcgctactctctctttctggcctggaggctatccagcaactgccattggatgtccagaatcccctgtagttgataatgttgggaataagctctgca

SEQ ID NO: 338151 - DNA, 75 bp, Homo sapiens
gcgagtttccgatttaaagctgagctgcgaggaaaatggcggcgggaggaagtgggaaaactcttgcctttgcca

SEQ ID NO: 338152 - DNA, 100 bp, Homo sapiens
aggagctgaagccctttgtgactgcaatctcgagatttaatccagagactgacttcactatagaacccacagttgtatcaatggttggggaaagatagtg

SEQ ID NO: 338153 - DNA, 82 bp, Homo sapiens
agaagagccaaggaataaacatgcaatgaacccaaaagggtgtttatacgggagctgatctccaatgccagcgatgccttgg

SEQ ID NO: 338154 - DNA, 75 bp, Homo sapiens
aataactgtcgcccgcttccctcagcgtgaggactcagaagctgctatcgaaaaacccaaagaatccttatgagg

SEQ ID NO: 338155 - DNA, 50 bp, Homo sapiens
ggccaagatccaggataaggaaggggttccaatttcatctgctgttgcag

SEQ ID NO: 338156 - DNA, 82 bp, Homo sapiens
gccgcctctcgcaatattgcaatataggggaaaagcagtgtaaacaggaacatcgataagtagtgtaaaaacttgcacaatg

SEQ ID NO: 338157 - DNA, 98 bp, Homo sapiens
tttgccatcttgacggtgttccagtgcatcaccatggagggctggactgacatcctctataatgtgccctacgagacgctgaacaaacgctttcgcgc

SEQ ID NO: 338158 - DNA, 75 bp, Homo sapiens
ctccccgccgctcccgggggccgtgacgtctgaacaggaattaagaataactcaaagtgaatttgatcgtcaagc

SEQ ID NO: 338159 - DNA, 100 bp, Homo sapiens
attgcagccagcatcaacccagccacagggaatgacagaggaagaggaagacaaacttctggcactgaaagacttcatgatgaaatctaataaagcaaag

SEQ ID NO: 338160 - DNA, 75 bp, Homo sapiens
acaaccacaaggcagacatcagctcctggttcaacgaggccattgacttcatagtctgcccagtcaagcccgtcc

SEQ ID NO: 338161 - DNA, 100 bp, Homo sapiens
gcacgagctggagggagaatttcaagaactgcagcaacttctcctggagcgcttcctcaaccgggcagccgtggcattccagaacctcttcatggcagtc

SEQ ID NO: 338162 - DNA, 82 bp, Homo sapiens
cgacctgggcaccagcaggacccgaggccaggagccaggggcccagaaggagcatcagatccatgctgctgctgactcggag

SEQ ID NO: 338163 - DNA, 95 bp, Homo sapiens
gtggcacgcagcctggggactctgcctcgtgccgctgagcctggcgcagatcgaatacataaaccagtccgttcccaaaaggcccgctggctctg

SEQ ID NO: 338164 - DNA, 82 bp, Homo sapiens
cacaggttgaagcagcccgaagactgcctggatgaactgagctgttccaaaaacataaacttagtgttgatgaagacttttg

SEQ ID NO: 338165 - DNA, 100 bp, Homo sapiens
gggaatcgcaaggctcttccctgaccattttctactgtccctgcgcgagggatgccattattacttgcaatcctgaggaattcatagttgaggcgctgca

SEQ ID NO: 338166 - DNA, 101 bp, Homo sapiens
gaaaccctcgaatacattgaagccaactatgggagttctgggaaatcgttcattcatttacagatgaacagaaaagactcttcttgcagtttacaacgggc

SEQ ID NO: 338167 - DNA, 98 bp, Homo sapiens
gctgagtggttgtgtggtcgcgtctcggaaaccggtagcgcttgcagcatgctctagccggcccggtccttggactgaaagaatgcaccaggggctcg

SEQ ID NO: 338168 - DNA, 101 bp, Homo sapiens
ccgggaactccccatcgcgttttgccagcgataatacgcctcagagaagaggacgttgtcacagataaagagccaggctcaccagctcctgacgcatgcat

SEQ ID NO: 338169 - DNA, 83 bp, Homo sapiens
tgccaaggaactgggatttcaacctgaaagtggaggctgcgaaaataggatctaccgctaccagtctcatgactatgccttca

SEQ ID NO: 338170 - DNA, 97 bp, Homo sapiens
ctctcaccacaacatttcaaagggaatacattgccagaacttggaatactctactggacaaacatttcctccaagatttgagttctgtgaacctgca

SEQ ID NO: 338171 - DNA, 99 bp, Homo sapiens
agtttgaatgaaagctctacaagatggcggcggtcggggccgaggcgcgaggagtgtgacaaaattaggcaagaacgagatgaagccgttaaaaaactg

SEQ ID NO: 338172 - DNA, 50 bp, Homo sapiens
agtggcatctgtgacaacttgcttccgattacacctcaacaagaaggcaa

SEQ ID NO: 338173 - DNA, 90 bp, Homo sapiens
ttatgtgcacctgtgccagcatctttctcaggaattgaatgatctggcacgggaccctccagcacagtgttcagcaggtcctgttggaga

SEQ ID NO: 338174 - DNA, 100 bp, Homo sapiens
tggggatggcgcatcacacaccaaagttcttccctgtggaacagtagagacctagtctgccttctttcacaagataatccttcaattatttgaaggtgat

SEQ ID NO: 338175 - DNA, 75 bp, Homo sapiens
ccgggtgtagagggcggtcgcggcgggcagtggcggcaggtgaagtgatctgtgaacctcccaacaacaaactgg

SEQ ID NO: 338176 - DNA, 101 bp, Homo sapiens
cttcatcaaaaatagtgatagctttgataaggaacacaacagtagatgagttaatgatgagactcatggctgcaatggagatcttcacagcccaacaacag

SEQ ID NO: 338177 - DNA, 100 bp, Homo sapiens
tcatgaagcatctgaaaaagctgtggaaggctctggataaggaccagtacctgcccaggaaactggtgctggatccgggactccctggtcagctacatca

SEQ ID NO: 338178 - DNA, 100 bp, Homo sapiens
gggagatcctgaggggcttcaaactgagtgggaatagctttgcgaaaaatgggcgcaatggccaagccagattgtatcatcacttgtgatggtaaaaacc

SEQ ID NO: 338179 - DNA, 51 bp, Homo sapiens
gggtcttcctcctccgccgttgacagaattcaattcgtcataatctgtccc

SEQ ID NO: 338180 - DNA, 120 bp, Homo sapiens
gaaaaagcaagctgaagacatcaagaagatcttcgagttcaaagagaccctcggaacatctcctgggaggcccccgtggagaagaagactgagtgtatccagaaagggaagaacaaccag

SEQ ID NO: 338181 - DNA, 89 bp, Homo sapiens
tgaaattaatcaacgattcttgaagttgaagaaaagagtcaagggtccagagaaggaggagaagttgagacaggcggtcaagcaggtgc

SEQ ID NO: 338182 - DNA, 82 bp, Homo sapiens
ccaggcgaagctggccgagcaggctgagcgatacgacgggggatatgagactttctactcggaatatcctgagtgttgcgtg

SEQ ID NO: 338183 - DNA, 101 bp, Homo sapiens
tgcagacagcaatggtgagatgagtcccgcagagctgctgcacttccagcagcaacagcttggatttacactgggcaacgtggttggaatgtatctggctc

SEQ ID NO: 338184 - DNA, 100 bp, Homo sapiens
gctggagccacaaaatgaaatgacatttcaacgagtttgtcatcatgtgagagagaataggttcaggttcttcggaatgctggagaagaagtgactctaa

SEQ ID NO: 338185 - DNA, 74 bp, Homo sapiens
gaactgaagaagcttgggctcacttccacaaatcggacaaggcaaaatctcagcaagttcggacctctagtaca

SEQ ID NO: 338186 - DNA, 82 bp, Homo sapiens
ccaggaatcaaaagtgaagaaactctgcaagcccttaggtgcatgaatacctcagaagtaaactctgttcactgtatgaaaa

SEQ ID NO: 338187 - DNA, 90 bp, Homo sapiens
ggagaccctcacggagctgggcgacgagctgaccctgggagacatcgacgttacagaatgtctgaaggggacagtgtgggagaatccgtc

SEQ ID NO: 338188 - DNA, 74 bp, Homo sapiens
gtcagttggcagccatcaaagttatggatgtcactgagatctcgatttattaatgatgcataccaggaagtact

SEQ ID NO: 338189 - DNA, 75 bp, Homo sapiens
ggcaagagtaacagcagcgccgtcccgtccgacagccaggcccgggagaagtctctaattaacagaagatggcaa

SEQ ID NO: 338190 - DNA, 98 bp, Homo sapiens
gtgaatgagaaaaatggagaaaacaagacaagcccattcattcatttgagcatagcaaatcctgaggtgcagaggcaattcccggaggactacagtga

SEQ ID NO: 338191 - DNA, 83 bp, Homo sapiens
caggtggtcaactgcagccgtgtattcagccttagatgtggtggtacagtgggagctattctgacatgtccactggaagttgt

SEQ ID NO: 338192 - DNA, 100 bp, Homo sapiens
atgaccacgccggtgatcatagccatccagaccttctgctaccagaaaaccttctccaccagaatccagctcacgctggctgttaatgccagtgaaaaaa

SEQ ID NO: 338193 - DNA, 76 bp, Homo sapiens
attaggtcacagcagaagcagccaaaatggatccccagtggattaaactgcaaatatctcatgaagctgctgcctg

SEQ ID NO: 338194 - DNA, 96 bp, Homo sapiens
caggtactgacagatccgtagggaggacaccgtgacttcccggacgctgggaaatgtcaggatggctaaaggtgaccccaagaaaccaaagggcaa

SEQ ID NO: 338195 - DNA, 101 bp, Homo sapiens
gaggggcctttgtccgtgttcggtgaccgcagcactggggaaacgatccgctcccaaaacgggacttgtcttacaataatataagagaccttccaagtttt

SEQ ID NO: 338196 - DNA, 98 bp, Homo sapiens
tcctgacgaaattgaaattacctccgagggaaacaagaaaacatcaaagaggtctagcaaaggtagtctgggttggaggaggcagagccatgaccaag

SEQ ID NO: 338197 - DNA, 95 bp, Homo sapiens
ggacaatgtgatgaagaaacttgcaaaagtatctcatatgaccagtgattttgtggaagtataatactttgtcattatgagatgtcgtctctcgg

SEQ ID NO: 338198 - DNA, 95 bp, Homo sapiens
gactaatagctggcaaatttctgttccatcagcgtttgtttgaatcggaagactttttgatggtacagagcccattgttttggacagtctcaaac

SEQ ID NO: 338199 - DNA, 51 bp, Homo sapiens
ctggcacactttttggagcacacacccagaggcctccattcaggctgtttt

SEQ ID NO: 338200 - DNA, 100 bp, Homo sapiens
ggattatgttataatgtggaacctggatgaatgtagagagaaagtacttcaagacttaattcagtgcacaaatgagatgaatgtgaacatcccacagttg

SEQ ID NO: 338201 - DNA, 49 bp, Homo sapiens
tctgcttcttcaagcatgagcccagattttaagagtaatcttcacaaag

SEQ ID NO: 338202 - DNA, 100 bp, Homo sapiens
gggagatgggcctactcgcccgccaccctgcgctgccgccgctctgaggagttaaaggaagttgaagatttgtccaggagcagatagctgaagagagaga

SEQ ID NO: 338203 - DNA, 96 bp, Homo sapiens
cctttgggttgtactcatagattgtgtaggcgttggtcttctgatagcaactttaatgtggaaggatgataaagactatgctttaaaacaaataga

SEQ ID NO: 338204 - DNA, 75 bp, Homo sapiens
ggcggaggatgagcctgcagagcgcgcagtacctccgttggatgaaaaatctgacaaacagtatgctgaaaatta

SEQ ID NO: 338205 - DNA, 75 bp, Homo sapiens
ctcatcagagggaagatctttttcctcaattgtctgcgctcctcagaccaccggcaggtgaacagcctgatgcag

SEQ ID NO: 338206 - DNA, 100 bp, Homo sapiens
ccaaaatgaggagtacagtgtctgtgcgtgaaggccagggagttgtgctgctctgcggccccccaccacactctggagaataactgaagtgaagtgatgg

SEQ ID NO: 338207 - DNA, 74 bp, Homo sapiens
caccattggctgggaaggaaaaacagaatcagctgttccctgcgaaaggttcagaggacagttttggagaagga

SEQ ID NO: 338208 - DNA, 101 bp, Homo sapiens
aggtcaaatgttgggacttgggaatcccagcttttcagatccatttacaggtagagatggattcctggaaatacctcctcaaggccagtgtagagccctca

SEQ ID NO: 338209 - DNA, 75 bp, Homo sapiens
cagaatggtcagaagtatcagaggaagcactgccagtgaaagatgtagaagataaacctgaacaacaaaccagaa

SEQ ID NO: 338210 - DNA, 97 bp, Homo sapiens
cacagagccggtggtggagccgccgagctctttgaggagttgcaggagctgctgacccatgacaccaaggaccagagcccctcacgggcaccagggc

SEQ ID NO: 338211 - DNA, 50 bp, Homo sapiens
agaagatcatcgagcatttcaaacgccctccagaatacccatcatatagc

SEQ ID NO: 338212 - DNA, 100 bp, Homo sapiens
gggcggctgagacaaaggcgacgtgttttagagcactttgctgcaagggaccaccacctgcacgaccagaatatgacctggtttgcataggcctcacagg

SEQ ID NO: 338213 - DNA, 100 bp, Homo sapiens
gaaaaggccataatgggacaatagagtttaccagcttggatgcccacaagggagtagccactgttccatccctgacccatctttgtcgtttggaaattcg

SEQ ID NO: 338214 - DNA, 95 bp, Homo sapiens
tgtgtctcaaatcaaccacaagctggaggtcatggaaaatggaagatttgcaaaatacaaatattttacccatgtcatgatcaataagacagata

SEQ ID NO: 338215 - DNA, 51 bp, Homo sapiens
ttgcctgcacgctggctaaaacgccactttggagatttgttaatgatacca

SEQ ID NO: 338216 - DNA, 100 bp, Homo sapiens
aaagtctgctcaaatctcctgctgtgaaccagcagaatttttgaacagcttacaaaacactacacagcaaaataatgatctgctagactgctaacccgag

SEQ ID NO: 338217 - DNA, 100 bp, Homo sapiens
ggctttgtccttctcaccgtgggagctctcctcatgctgacagggttgatggtgcatgttgataaaagaattactctggcagctttcaaacaacatttag

SEQ ID NO: 338218 - DNA, 98 bp, Homo sapiens
tctgtttaggaagtggtatcatgagagatatagcccacttagaaatcacaactcctcgtgaagtggcccagcaggctgtggatgcggatgtgcatgct

SEQ ID NO: 338219 - DNA, 100 bp, Homo sapiens
cacgccagccgcaccatgccgctcctaagcctgcacagccgcggcggcagcagcagtgagagtccctgaagaggaaggagaaggaatatgagcatgaaat

SEQ ID NO: 338220 - DNA, 75 bp, Homo sapiens
tggtatacacctccttctcccaagagctgcagagagacaaggcggcggcggctgctgtgctgggtgcagtgagga

SEQ ID NO: 338221 - DNA, 98 bp, Homo sapiens
ggaacatgcagagtctgcacaaggaaaatgggaagtccctctgcctaaagtacgtgcccagggagaaacagaagtattaaaagttattcgaacaggaa

SEQ ID NO: 338222 - DNA, 74 bp, Homo sapiens
aagcttagagcgtctggccaagaatcagaggaagtggggaactctaatgatccaggacaaagaagttaccctgg

SEQ ID NO: 338223 - DNA, 83 bp, Homo sapiens
ggactccggcgcagcggcaagtcctccatccagaaggaagatgttaccgagtacttcagtgaattccttagtgcaggggaacg

SEQ ID NO: 338224 - DNA, 83 bp, Homo sapiens
cagaaagagattgggtacttaatgattgaaagtatccagctgatgatggacagtgaaactggtcgatccaagggatatggatt

SEQ ID NO: 338225 - DNA, 100 bp, Homo sapiens
tgcaattaccaaggcagatctcctggctgatcacacggaagttatagtaaagagcatactccaagatatttggagttcttacaacatggcagacattgac

SEQ ID NO: 338226 - DNA, 73 bp, Homo sapiens
aacatttagctgggatgaaagacagcaaggtgttggtgaaaatttgactgacccatctgtgataaaagcagaa

SEQ ID NO: 338227 - DNA, 75 bp, Homo sapiens
caaggacatcaagaagatcttggacagcgtgggattcaaagaagcacacaggctacgtcggcttaaagaatcagg

SEQ ID NO: 338228 - DNA, 90 bp, Homo sapiens
gatgtcaaaggaaaattttgtgaggaccactgtatactacagcactctaaccgatgctgagctttttataccaccaaagatcaacagaag

SEQ ID NO: 338229 - DNA, 118 bp, Homo sapiens
gacgtttgcccagatccatgagatgcaggaccttggggacaagctgcgcatgatcgtcatgggacacagaagcctctcattttgaaaagacatgtttttcttcaagcaacaaaggtgg

SEQ ID NO: 338230 - DNA, 82 bp, Homo sapiens
cacttccacagccaagtgcgggagtccacgcaaaatgatgcttcaacacccaggccaggtctctgcctcggaagtgagtgct

SEQ ID NO: 338231 - DNA, 49 bp, Homo sapiens
agtatggtagccacacccccagtggatatcaaagtattgcagagtgcct

SEQ ID NO: 338232 - DNA, 51 bp, Homo sapiens
cccaggagtacgaggtctccagcagataccacgaggaacccgaggcccggc

SEQ ID NO: 338233 - DNA, 100 bp, Homo sapiens
tgcctgctggggaaagggggtactcctgagctcctgacagcccagcttcagggatcatagacggtatttctatgtaaacgaacagtcgggcgagtctcag

SEQ ID NO: 338234 - DNA, 90 bp, Homo sapiens
aacagagtgaaggatttggttcacagagaagcagacgagttcactagacaagaaataagcgggttttgaaaacaaaaaaaagaaggagtg

SEQ ID NO: 338235 - DNA, 100 bp, Homo sapiens
cagcagacagcctcagccgaggagcagctgaggcttgtggtcaatgctgtcagcagttacatccttgctaagccccactccggctacagctcttgctgtc

SEQ ID NO: 338236 - DNA, 106 bp, Homo sapiens
ggggttcagcgctcgggtgaggagctggtggcgtcggcaggttcgaggcgattcgagaggctgtggccaggccagctgggctcggggagcgccagcctgagaggag

SEQ ID NO: 338237 - DNA, 101 bp, Homo sapiens
ttttgaagtcatttcacatcgaagccatgatttaaatatcggcgttaagcataagcttaaatcgtctcagaaggacaaggtccgccagtttatggcgtgca

SEQ ID NO: 338238 - DNA, 75 bp, Homo sapiens
ggcagaaggtgatacaggtggttcagtcagccattgccgaaatctaaaaaaacttgtagcaaaggcagtaaaaag

SEQ ID NO: 338239 - DNA, 82 bp, Homo sapiens
cacagagacagatcaaagcagctcgtgtacaaagataatcaatgctgattcggaggacccaaaatacattatcaacgtaaag

SEQ ID NO: 338240 - DNA, 124 bp, Homo sapiens
tggcacgggaccctccagcacagtgttcagcaggtcctgttggagatgataagtgaagacatttccacctggacacctgaccatgtgcctgccctgagcagcgaggcccaccaggcatctctgt

SEQ ID NO: 338241 - DNA, 74 bp, Homo sapiens
cggcgcaaccagccttctagggcggcggagattggcggcagtaagcacacaatgaatgatcacctgcatgtcgg

SEQ ID NO: 338242 - DNA, 100 bp, Homo sapiens
ccgaggagttccgcccctttctggcaaagatgagggggattcttaaggtggcgacatgtctaagaatgtgagccagtcacagatggcaaaattgaaccaa

SEQ ID NO: 338243 - DNA, 87 bp, Homo sapiens
agaggagcatgaatggagcaaaatggcggatcatgtgcagacaagttggatggcttgaggactggtactaaaaggaaacgtgactgg

SEQ ID NO: 338244 - DNA, 82 bp, Homo sapiens
cgcacgatgattgaccccacttccaaggaagaccccaagttcaaggaactggtcaagggggcagtacccaaaggaaacgcta

SEQ ID NO: 338245 - DNA, 100 bp, Homo sapiens
gaacgaggcaaggagctaaagcagcgtgcgttcagccctggggtgcaaggaaccatcttcccagctcccaatttcaatcccataatggatgcccaaatgc

SEQ ID NO: 338246 - DNA, 75 bp, Homo sapiens
gtccgccgccaacgcgcaggtgctagcggccccttcgccctgcagatccagacatttaatgtggatgcaccatgc

SEQ ID NO: 338247 - DNA, 82 bp, Homo sapiens
cccacatgcccgctcacctgcgctgtgatgcctgcagagctgtggcttaccaggacacacacctcctctacgtactggcagc

SEQ ID NO: 338248 - DNA, 50 bp, Homo sapiens
ccgcgaccagggccgcaggaagacgcagatgtacagttacccagcacgtg

SEQ ID NO: 338249 - DNA, 100 bp, Homo sapiens
actgttggtgcatgctacaaaaagagtctctggctgatgaacttgctcttgtggatgttttggaagataagcttaaaggagaaatgatggatctgcagca

SEQ ID NO: 338250 - DNA, 80 bp, Homo sapiens
ggagccccagggcagccgccccgccgagtcgcaggtactccaaagattcaggtttactcacgtcatccagcagagaatgg

SEQ ID NO: 338251 - DNA, 75 bp, Homo sapiens
cgaaatgtgctgcctctgttggaattggtactattttgaagcgctggaagaagaactggtttgatctgtggtcgg

SEQ ID NO: 338252 - DNA, 73 bp, Homo sapiens
gggcctcaacaagcaaggctacaaatgcaggccacagctgaaggtttaacaagaaaaaatatgtcagatgtca

SEQ ID NO: 338253 - DNA, 75 bp, Homo sapiens
ttcagctggaggaaatttcccgggctcagcttgtgctggagagatttaccagcatgagaattaagaaggagaagg

SEQ ID NO: 338254 - DNA, 127 bp, Homo sapiens
ctccgtcgcagactacggacctgtctgggtctcagccgccaaagaccccgtccggtagtgatgtcttggttcgtgtccccactgctttctggaattatgtctggaattttattcttcctggttcgtg

SEQ ID NO: 338255 - DNA, 100 bp, Homo sapiens
cctgagcgggcgccggagggaaggggaagcggcggcctatggcgttggcctccttgtgacattcgtggcactggccctgatgcagcgtggccagcccgct

SEQ ID NO: 338256 - DNA, 98 bp, Homo sapiens
agctcatgcaagatggagggttggaaaagccaaaaccgcggccagaaggagggatttgttcgtgttgaccgagattatgtgctgaagtctgcagagct

SEQ ID NO: 338257 - DNA, 75 bp, Homo sapiens
gcttcgcgtgttccaagaactgcctgtgcgccctcaacctgctttacacctcactatgaacaagaccgtagtgca

SEQ ID NO: 338258 - DNA, 98 bp, Homo sapiens
aggcgtccatgccagataacacagttgtggaagatatcaataagcgcagagagccgctccccagcctggaggctgtgtatctcatcactccatccgag

SEQ ID NO: 338259 - DNA, 98 bp, Homo sapiens
ccacctcaccaagaagctactggacctcgttcagcagtcatgtaactataagcagcttcggaaaggagccaatgaggaaaataagacctactcatctg

SEQ ID NO: 338260 - DNA, 75 bp, Homo sapiens
gacaacctgcagcctcctggcaccaaaggagacaaggatgatgatgacgatgatgatgcagatgagaaaatgcag

SEQ ID NO: 338261 - DNA, 50 bp, Homo sapiens
tgaggcctccccagctatgctgaactagtcttgctcttgtcacccaggct

SEQ ID NO: 338262 - DNA, 100 bp, Homo sapiens
gctggacagcagctcaggagggctggctgcctggaggggatgatgccgacacaggaggcgctgctggctgatatcaagccaatgagagatcaaattgtca

SEQ ID NO: 338263 - DNA, 50 bp, Homo sapiens
ggcatggctatctacaatgtggcaccctgcctgcctggcgctggaggccc

SEQ ID NO: 338264 - DNA, 100 bp, Homo sapiens
tccgtgggtgtggcggagcgcgcggtgcatgtaagactttgaccccgacgcaggcttcagtgattgccgcggatcagaagcctgagcactttggctcgag

SEQ ID NO: 338265 - DNA, 75 bp, Homo sapiens
gttcttagttttctgccaaagatgccctggagcattactgaaaagatactgatggaacgtcgaattagaccatgg

SEQ ID NO: 338266 - DNA, 122 bp, Homo sapiens
cggacactttgttattggagaaacatgcagattatatcgcatcctatggctcaaagaaagatgattatcttctcaataggtttggcatggacaagatctatgaaggccaagtggaggtgact

SEQ ID NO: 338267 - DNA, 100 bp, Homo sapiens
aggaacccaggccctgcaccacccactctgccccgaggcctggccaggcgacttcagaatgcccacactggcctcgacctgactgtgccccagcaccagg

SEQ ID NO: 338268 - DNA, 100 bp, Homo sapiens
agaaaatacaaatcacacgcataatggatgaaaggaaccgacaggctcagaatcattcatgctaagaaaacaggcaaaagagacacttcaggtggcattg

SEQ ID NO: 338269 - DNA, 74 bp, Homo sapiens
ggttgttttttcctgtatgaagcggttggcaccactgaagtgaccgaatgagaaccttcgagatctgcggtctg

SEQ ID NO: 338270 - DNA, 74 bp, Homo sapiens
aaccggaggaatttccgtgcctggccccatggtgaggcgaaaggccttgcaagaagagatcgatcgcgagtcag

SEQ ID NO: 338271 - DNA, 100 bp, Homo sapiens
ccttgtacctcctgcaacccagaaccctggctgaccactttgaaggaggatgctccagcagatgaccgtggaaaaagtacagggtattagcagattggaa

SEQ ID NO: 338272 - DNA, 75 bp, Homo sapiens
cacaagggaggcgacagagacagcagcagtcctattttgtaacggattatgatccaaccattgaagattcttaca

SEQ ID NO: 338273 - DNA, 82 bp, Homo sapiens
gtggcttacagacgctgccagcatcgccgccgccaggtggtggtgcccacccgcgtggggcagggctatgtatacgaggccg

SEQ ID NO: 338274 - DNA, 100 bp, Homo sapiens
caggaatgtcaaaataaaaactggagaatggttctatgaggaacgagccaagaaatttccaactggaggaacattttagtggacaaaccaaatgaccaat

SEQ ID NO: 338275 - DNA, 100 bp, Homo sapiens
aatgtgagcaggcgctggctgctgagcccaaggccaaggaccccttcgctcacctgcccaagagcccgagatgatcggccactacctgggcgagttctcc

SEQ ID NO: 338276 - DNA, 100 bp, Homo sapiens
ccagctcttcagcattgtccgccaggcctgtgtccggagcctgagctgtgagacctctgtgagtgaaagccttcagagggaagctgctaagaagcaggcc

SEQ ID NO: 338277 - DNA, 97 bp, Homo sapiens
catgaacccttccctatgtccaaaaacgtttttcctgataactggaaagttcctcaagatggagactttgactttatggagtctcaccctgtcacca

SEQ ID NO: 338278 - DNA, 100 bp, Homo sapiens
ttcgtcctctgcagtcaagacgctgggcgcgtcgaggactggggtggcaaccaactatatctgaggaccagagccattttggggcaccagagcttgtgac

SEQ ID NO: 338279 - DNA, 82 bp, Homo sapiens
ctccttcggcagtccacccaccgccgccgcctcccagctgctattaacttagcaaagctgaaacttttcagacattattacg

SEQ ID NO: 338280 - DNA, 74 bp, Homo sapiens
tgaccaagcacagagtcaccagtttccatatgtaatgcaagggagccctctggcacaaatggaagaagaaagaa

SEQ ID NO: 338281 - DNA, 143 bp, Homo sapiens
ggcttgtggtgcggcctcaccatacaggaacagggcagacgttagcgtgagtgatcactctcaatcccggtttttggctttcacccccaaccagtgaccaaagacttgaccactcaaagtccagctccccagaacactgctcg

SEQ ID NO: 338282 - DNA, 49 bp, Homo sapiens
ctgctatgaagtggcgctcctgagattcctggtgtttctgcggtaccag

SEQ ID NO: 338283 - DNA, 100 bp, Homo sapiens
caggagggaattcagcctcagtgatgtccatgagattgaagccttcagctgactgtggcccttttcgaggtctgcctctcttcattcactccatctacag

SEQ ID NO: 338284 - DNA, 97 bp, Homo sapiens
ttggtaaagaacgatcgtccagtggaggttcaaaccttgtactactcagctgatcacaagctgcttgatgggaacctactagatggacaggctgagg

SEQ ID NO: 338285 - DNA, 76 bp, Homo sapiens
ggacagagactaccacgtggagtgttaccactgcgaggtcttgtccaataagcatgtggctcctgatcatcttttg

SEQ ID NO: 338286 - DNA, 82 bp, Homo sapiens
tcttgttgcgggcaccgcagtcgccgtgaagatggcgtctaccagccggtcttgatttcccagttaaagatgttcttcaccc

SEQ ID NO: 338287 - DNA, 96 bp, Homo sapiens
cagcagcgtggcctccgccaccgtgcacatccgaatgggaccctgatgctcccataagacagaaaatgccccttgatgatctggatagagaagatg

SEQ ID NO: 338288 - DNA, 75 bp, Homo sapiens
ttcttcttcgagtatttgtagaagggtcaaagttcctgtcttattaattaagcattttcttggaggtagaatgtt

SEQ ID NO: 338289 - DNA, 76 bp, Homo sapiens
ccatctggaggaggcgttgccgtgaggaaatgatggaagaattgcatagcctggacccacgacggcaggaattatt

SEQ ID NO: 338290 - DNA, 88 bp, Homo sapiens
tgaagagcaaaagcacagaaatggactatcaaatggaatcccagtcagaagttccagcctgccactgttctctgatgccatgccagca

SEQ ID NO: 338291 - DNA, 100 bp, Homo sapiens
aaagatggatttttgcatgagacgcttctggacaggtatgttgagtctaaaaaggacagagtcacagtagtcttcagcacagtgtttaaggatgacgacg

SEQ ID NO: 338292 - DNA, 51 bp, Homo sapiens
gaagactaaagcatctgtcagaaaaccctaccacttatgtcttggatgaag

SEQ ID NO: 338293 - DNA, 97 bp, Homo sapiens
gtcaaaggagcaattgctggtcctgagcctgagagatctaaaattgcagtgtttgataaaatgtggacctacatgcggagtgcggagccctctgtgt

SEQ ID NO: 338294 - DNA, 100 bp, Homo sapiens
ggattctgcatgttatgtgatttgttctgttcatcgagagggctcccaaacatctgcagctgatttgaaattaaaaataaagcatatgatggctttcatt

SEQ ID NO: 338295 - DNA, 103 bp, Homo sapiens
aatcccagcactttgggaagctgagaaaagaatggtttgtcattcattgaaacttcggccctagactctacaaatgtagaagctgcttttcagacaattttaa

SEQ ID NO: 338296 - DNA, 100 bp, Homo sapiens
gaaaagatccctggaatatgaagagacacagtatggtagccacacccccagattgcccaaggactccagatactccaaataatgaccctcgttgttctac

SEQ ID NO: 338297 - DNA, 100 bp, Homo sapiens
gaacacgctgcctcagggagcccgcgaccgcgccttctcctccgccggtcccatacggtgaaaggtgtagcagtcactcggcctacacccacagcatcga

SEQ ID NO: 338298 - DNA, 74 bp, Homo sapiens
ctcgaccgccagaaacttccttctcctgactcaggccacagtcttctgtgtgagccaggactgtctccagtttg

SEQ ID NO: 338299 - DNA, 74 bp, Homo sapiens
agagaactatcttgaaacatttatttccagtccaaagaaactgatgctgcagagaaattacggatagcaaagaa

SEQ ID NO: 338300 - DNA, 75 bp, Homo sapiens
cgtgagaatagagaccaccgagcgctgataaagcagtttgtgtccgacgtggcctggggggagctggactacctg

SEQ ID NO: 338301 - DNA, 75 bp, Homo sapiens
caagaacagcccaatctcctttctgggcaaacgttccaaggccttggacaagattcgctatgagagcctgacaga

SEQ ID NO: 338302 - DNA, 83 bp, Homo sapiens
gaaactcacatgagacaaatgcgctcagcttcaattggttgtccgagcggaactgcattgagattgttaataaattgattgct

SEQ ID NO: 338303 - DNA, 97 bp, Homo sapiens
cgggcgagcggtggtttggacgccggcggagacgcgggcgaggtgagaagccctaccactgcaactgggacggctgcggctggaagtttgcgcgctc

SEQ ID NO: 338304 - DNA, 88 bp, Homo sapiens
aggctgtcagtaaacaacaagtcttctccgtgcagaagggactcaatgacacaatgagctgaagggcctgtcacgtcagaagtgccct

SEQ ID NO: 338305 - DNA, 126 bp, Homo sapiens
gctccctgtatgcatggtgtggggttggtgtgattagcttcgcagtctggaaagctttaggagttcacagtgtgagtgatttcacgtggagccatgatggaactcaagcacttatttcctatcgag

SEQ ID NO: 338306 - DNA, 74 bp, Homo sapiens
cataactgatgatgtgcgggttcaggaggtacccaaactgaaggtgtgaccagccacgtggatgatgaataccg

SEQ ID NO: 338307 - DNA, 82 bp, Homo sapiens
agaagggccaggagaggagcactttgaggacatggcctccgacgaggacatgggaacgcccttttgcttgtgactggcaggg

SEQ ID NO: 338308 - DNA, 100 bp, Homo sapiens
aaacaatcggaaaccacgcgtcctactacaaagatgctctgcggtttttgggctgtgttgacatcaaggatctaccaggcagggaaacatgaagccattg

SEQ ID NO: 338309 - DNA, 50 bp, Homo sapiens
cgtcattgcagaaaccattaagggacagggtcttgctgtgtcacccaggc

SEQ ID NO: 338310 - DNA, 100 bp, Homo sapiens
agcggtaccgttacgcggagctctcggaggaggacctgaagcagctgattgggaaaatgaggtacgttagtgttcgcgattttaaaggcaaagtgctaat

SEQ ID NO: 338311 - DNA, 110 bp, Homo sapiens
tggaattcgtgaaacttgtccgtgccaaatttcctgaacacaccattatgagagtcccacgaactggctgggtatacagaaatgtccagaggccggagagcgtttcagat

SEQ ID NO: 338312 - DNA, 82 bp, Homo sapiens
aacccaccagaaggaaccaattccggacacataacaagcagcagtgaggacaccaaaggactcagtggcatttgaggatgtg

SEQ ID NO: 338313 - DNA, 100 bp, Homo sapiens
caagctcaaactaatggcacgctatgggcggctggcggaccctgctgtcactgactttccagggagacgtacgaggaggaccgggagtacgagagccagg

SEQ ID NO: 338314 - DNA, 98 bp, Homo sapiens
ccacttaatagtgagtcttccaaccagagcttgtgtagcgtcagatccttgagtgataaaggagtagaggcaatctgaaagcaaatcctgtttagatg

SEQ ID NO: 338315 - DNA, 75 bp, Homo sapiens
ggtgaacgtggaaatagcgcttctgaaaaatgggagccctggtacctgacagtgtaaagaaggagctcctacaaa

SEQ ID NO: 338316 - DNA, 82 bp, Homo sapiens
aggtctctgtcgagcagcggacgccggtctctgttccgcaggatggtggcctgtggattaaaccacactttggcagtgtcag

SEQ ID NO: 338317 - DNA, 100 bp, Homo sapiens
cccagccaggcgtggaggaagaggcattgaggactttccttacctgtttttccagctcacccactgccagcagaggtcttcaaagcttcacctttctcca

SEQ ID NO: 338318 - DNA, 98 bp, Homo sapiens
aaaaaagtcaccgccgctagggtcgccgttgcatcggtgcagggcaagtacgaggatgtcgtccaggaaagattgtgcagatgactgaagcagaagtt

SEQ ID NO: 338319 - DNA, 100 bp, Homo sapiens
ctggagtggccttcaacccatcagcgccccagagtcacctctactttcctgctaccgctgcctgtgagctgaaggggctgaaccatacactcctttttct

SEQ ID NO: 338320 - DNA, 83 bp, Homo sapiens
ggtggaacgaggacgcggactgcgaaggcaggcagccttaagtgccttgaaacaattttctgaacaaggactggatccaatcg

SEQ ID NO: 338321 - DNA, 75 bp, Homo sapiens
tgctggcccaggccaagatggagaaggcagccaatgccaggaaccatgttgactatagtcaatggggccaatgga

SEQ ID NO: 338322 - DNA, 100 bp, Homo sapiens
ctggaggccaaaatctgtcatcaaattgagaggtctcttcattattgatgacaaaggaatcctaagacaaattactctgaatgatcttcctgtgggtaga

SEQ ID NO: 338323 - DNA, 96 bp, Homo sapiens
accaggccggcaggctgagaaaagcgagaccgcgtgcgaggaccggggagtgaatgcccaaaccaagaacggtgccacgcccctgtacctggcgtg

SEQ ID NO: 338324 - DNA, 100 bp, Homo sapiens
taaaggcaagaagatgaggaagaaggaagcggagcaggtgctgcagaagtttgttcaaaacaagtggctgattgagatggagttttgctctgttgcccag

SEQ ID NO: 338325 - DNA, 51 bp, Homo sapiens
gacatgtctaattatgatgaagaaggtaagaatgattgatgttggctgata

SEQ ID NO: 338326 - DNA, 98 bp, Homo sapiens
ctgggctgcagccatggaagaacagaggtgagttcttcatgcctgggctggttgatacacacatccatgcctctcagtattcctttgctggaagtagc

SEQ ID NO: 338327 - DNA, 74 bp, Homo sapiens
ggcagcgatcaagcaggcagcgggctttgccagcaaaaccgaaacagattgctcatttagaaagtggatgtgtg

SEQ ID NO: 338328 - DNA, 99 bp, Homo sapiens
ggttcacataaagaaaggcgagctgacccaggaggagaaggagctactggaagtcatcgggaaagcatgtaaaagtcacatctgaggctctgggtcatg

SEQ ID NO: 338329 - DNA, 73 bp, Homo sapiens
cggaccagccatttcggtgtagaagtggcagcacggcagtttgtgaagtgtggatatgcaggctctaactttc

SEQ ID NO: 338330 - DNA, 51 bp, Homo sapiens
aaattttgtgatcagatgatgcatcatggcagaacaggatgtggaaaacga

SEQ ID NO: 338331 - DNA, 101 bp, Homo sapiens
tgaccctcgtcacccccgagaaggccatcaagctggcagccaacgacttcttccgacatcagctctctaaggacggggagtaccctgacttctaccggaag

SEQ ID NO: 338332 - DNA, 88 bp, Homo sapiens
aatgagcatccagtggaaaacacgccagcttcaaagcaagtcccggacatgatggcacatggaatgacaatcagctacaagaaatggc

SEQ ID NO: 338333 - DNA, 100 bp, Homo sapiens
gtgcagagcagcacctccatcaggtacaacctcgaggagctctaccagacactcgcctatggggacatgaaccacgagtggatcggcaacgagtggctcc

SEQ ID NO: 338334 - DNA, 73 bp, Homo sapiens
tgacgctggagaacctggcacttatgtcctccctggggctggatacagtgaactggaggaatagcggggagaa

SEQ ID NO: 338335 - DNA, 49 bp, Homo sapiens
aagggctacattgaggtgatgaggtgcagcttcaagcttaggaccaccc

SEQ ID NO: 338336 - DNA, 74 bp, Homo sapiens
cctgcggctccgtcagggaagcgatgctgtgggagaggtactatgtgggcgacaccatggacgttctgtttgag

SEQ ID NO: 338337 - DNA, 100 bp, Homo sapiens
agaccaacccttgagggaagagaattatctctaagttagttgaatccatggacatgaaacccacagatatagagggttggcccggtgcagtggctcacgc

SEQ ID NO: 338338 - DNA, 100 bp, Homo sapiens
tgctggcgagacctcacctgcatggacttccactatgagcaagagtgagccatggagctacgtgtggggaacaagtaccgcctgggacggaagatcggga

SEQ ID NO: 338339 - DNA, 90 bp, Homo sapiens
gtcaagaatccttttggcttagagatcactaatccatcttcagcttcaattacaagagggcatcctggctgtttcacccgtggacttgaa

SEQ ID NO: 338340 - DNA, 75 bp, Homo sapiens
cgagaaggagaccgcattatccaggagatgcagaaactaccagaggccgttcagctaattgagaaggccagcatg

SEQ ID NO: 338341 - DNA, 100 bp, Homo sapiens
cccgctgcagccgagatgccgggggagcggggccttccacaccccctccgtgggtgtgtgactcattctgatgaaggaaagagcgtccctgtgcagctgc

SEQ ID NO: 338342 - DNA, 75 bp, Homo sapiens
agggcacgatggcggactgggctcggggcccccgacagctgctctcgggagccgcctcccgacacccgagccccg

SEQ ID NO: 338343 - DNA, 82 bp, Homo sapiens
aggcagagccacagaagcaggtgcagccacaggatcaagagaaatatggattattaaatgtaacaaaaattgctgaaaatgg

SEQ ID NO: 338344 - DNA, 76 bp, Homo sapiens
ggctgctgagtggtgacagtagcccagcccgccggccaggtaaaaaagctccagttttatttaataaagaaatgat

SEQ ID NO: 338345 - DNA, 100 bp, Homo sapiens
gacgtctccagccaaattcaaaaaggataaggagatcatagcagagtacgatactcaggtcaaagttagcagcccaagtcctagaagacaagggtgttgg

SEQ ID NO: 338346 - DNA, 100 bp, Homo sapiens
aaacatctagagaagacatgttttctgagaaacaggacatacctttcgtagagctagccatccaagaaaacaccatgaaagataacgatatcaagagact

SEQ ID NO: 338347 - DNA, 78 bp, Homo sapiens
aaagcctctgggagcagaagggaggctccaagacctcatcaacaattaagtatgatgcaatcagaatcaatcagcttt

SEQ ID NO: 338348 - DNA, 50 bp, Homo sapiens
gagacaatgaaaatcttgtcagcatgtaaaagtcacatctgaggctctgg

SEQ ID NO: 338349 - DNA, 83 bp, Homo sapiens
ttttattaaggctgttcatgtgaaaggtgactggctactagggaaataaatgaatgtggaattgaggatggaacaaagaattc

SEQ ID NO: 338350 - DNA, 75 bp, Homo sapiens
gtggagttcgggaaccagctggagacaatgcagatcttcgtgaagactctgactggtaagaccatcaccctcgag

SEQ ID NO: 338351 - DNA, 75 bp, Homo sapiens
caggaagcaaggactgcctctcatgaatcaaattattagctgggcaacattagatcgagctgggagcattagtac

SEQ ID NO: 338352 - DNA, 75 bp, Homo sapiens
aattgccttctcatgaactcagtcactgtggaggaagggaagtcaaagtgaattgggcaacaacccctagcagtc

SEQ ID NO: 338353 - DNA, 98 bp, Homo sapiens
cagaagaaggggaactcctgctgcccactcaggcatggaagaggagatggttcgtgttacgcagtggccgtttaactggagatccagatgttttggaa

SEQ ID NO: 338354 - DNA, 83 bp, Homo sapiens
tcagtatcttgccacagaaaccatacaattggcactacgagatgcacttttgaaaaagagaaaaagaatgaagtaacttcctg

SEQ ID NO: 338355 - DNA, 83 bp, Homo sapiens
ccggagggcgcgggaatggagctcggaggcggcgaggagcgcctgcctgaggagagcagatagtcactgccaatccttggaac

SEQ ID NO: 338356 - DNA, 101 bp, Homo sapiens
gatttacctgggtgagacagcttgagccccatcgtggattccaagacatccctgctgagagagccaaggtctgtccacgttctctgtgggttcattgccgg

SEQ ID NO: 338357 - DNA, 100 bp, Homo sapiens
agtgtgggaatatgaatcctacaggtattgaagcccctgggtgataatttgatggaggaaaacataaggcagtctgtaacaaactctatcaaagcaggcc

SEQ ID NO: 338358 - DNA, 98 bp, Homo sapiens
ttcccctcccccggcgccctctggggctccgagcccggcgggaccatgttcaccagcaccggctccagtgggctctgaagatgaagtcctcagtacat

SEQ ID NO: 338359 - DNA, 100 bp, Homo sapiens
aagatttagagaagggacaaagaaaagatttaggacgacatagaggtgtgtgtaactggtgtgtgcaccgtttcgaccatcactgtgtttgggtgaacaa

SEQ ID NO: 338360 - DNA, 97 bp, Homo sapiens
tcacaaagaggagcggagggctgggggccaaccccacagcgaaggccggctttcaacagacctcacatctttcttcttatgaaattataactccttg

SEQ ID NO: 338361 - DNA, 82 bp, Homo sapiens
ctcacaatgaggctccctgctcagctcctggggctgctaatgctctgggtctctgtgccctgtgggacatcgagaccggcca

SEQ ID NO: 338362 - DNA, 100 bp, Homo sapiens
ctatagatctcctcaaagagatatacacgaaccttggtccaagactacaagtcaatcaggtggtgtgtaagaagtaccggggattcaccatccccgaggc

SEQ ID NO: 338363 - DNA, 100 bp, Homo sapiens
agtccgttcttgtgggtgctgctgttctgggtgcctgtgcctcaggggatttcgcttctgtacaggtgctccatatgtttgagatccattttgtcctgct

SEQ ID NO: 338364 - DNA, 74 bp, Homo sapiens
atgaaagacgtccgtggaggatatgctttactaatatgctgaagaacaaacagccgacgccagtgaatattcgg

SEQ ID NO: 338365 - DNA, 98 bp, Homo sapiens
tgctgccgccatacgcgctctccctgtttaggtctggagataagcaaacaacgcctcctttctggaaactactccttcatcccagacgccatgactgc

SEQ ID NO: 338366 - DNA, 100 bp, Homo sapiens
gcaggtgatggcggcgctggtcgtatccggggcagcggagcagggcggccgagacggccctggcagagctttgtgacaacaaactgtgctctgcagtttt

SEQ ID NO: 338367 - DNA, 90 bp, Homo sapiens
gattaggcttcgccggctacgattgcggatgccgaggaatgtgacagggctgggagtgtggccacctgccaggccgtcatgcgtgccgtg

SEQ ID NO: 338368 - DNA, 74 bp, Homo sapiens
aagcctaactcaagccattggcacacaggttcctcatgccatgcacctgctgtcacccagcatgcaccctattt

SEQ ID NO: 338369 - DNA, 76 bp, Homo sapiens
cccctttgacctcttcgatgtgcgagactttggaaagctgtcaaagctcgaaaaacagcagcagaggaaagaaaag

SEQ ID NO: 338370 - DNA, 100 bp, Homo sapiens
cctggattacatcaatgtggtcccgacggctggccccctggccaacagagcacttatggcaaggcatctcgagggggtggcaatcaccaaaacaattacc

SEQ ID NO: 338371 - DNA, 97 bp, Homo sapiens
tgtccttgtgcattcgtctgtggaaacctacacccctccagaccagcatgttttggaaatttgatcttcactcatcatcccacatagacacacttct

SEQ ID NO: 338372 - DNA, 75 bp, Homo sapiens
ctgaggaatcggcaaactccctggtctctgttggtgtagaagccaaaatcaggtaatactgcattgcatgattgt

SEQ ID NO: 338373 - DNA, 92 bp, Homo sapiens
cgccgcctggcaggccctgcgcaccaggaaagaccacagcaagattctttcattcgtctcctcctagcctgggggaccaggctcgaactgac

SEQ ID NO: 338374 - DNA, 100 bp, Homo sapiens
tgccctgggttctgcccgcacggacccccatgaggtggtccaggccacgctggtggtcctggccttggccatggtgcccatcctgctgcttggcacaccc

SEQ ID NO: 338375 - DNA, 85 bp, Homo sapiens
cactgaccagctctcagttgcacttctcaaagggtgatacaattctggagactggagaagtaattccaccaatgaaagaatttcc

SEQ ID NO: 338376 - DNA, 80 bp, Homo sapiens
aatgttaaacaatttagtcaagtactgccaaatctgtcgaaagggagataatgaagaactgcttcttctttgtgatggct

SEQ ID NO: 338377 - DNA, 98 bp, Homo sapiens
gtctccggccggcggcggcggcggcggcggcggcggcgcagatgcagacagacatgctgaactatctggaagtccactgaaaagcaaaagcactagga

SEQ ID NO: 338378 - DNA, 100 bp, Homo sapiens
caacatccagaaaaaagcgatgactgtgaaggagttcaggcagctggccaacagtggcaagctccctacacaccttttctcactgaattgatgtaccaga

SEQ ID NO: 338379 - DNA, 76 bp, Homo sapiens
gcaaaaacaagagtccctctaaagcagctcaaaaggttcaaaccttgtactactcagctgatcacaagctgcttga

SEQ ID NO: 338380 - DNA, 49 bp, Homo sapiens
gcccaggttgacctttctgcgggagatcctgggaagactctgcctgaag

SEQ ID NO: 338381 - DNA, 98 bp, Homo sapiens
gcacaaaaagacacttatactatgaaagagcttatggtgctgctatctggagtaatagctttcatggtgaacttatcaatttattggatcattgggaa

SEQ ID NO: 338382 - DNA, 95 bp, Homo sapiens
cagctacgccaaatctctactacacggccgatgttacgacaggactcatggggaccttgtaagtggcctctatcagcatatcctgctatccctgc

SEQ ID NO: 338383 - DNA, 96 bp, Homo sapiens
tgaacccagaggtcgtggaggtggccgtggaggcagaggtggcatgggcactgctccgtgtggagatggcgccctctttgacaagtcctgcagcga

SEQ ID NO: 338384 - DNA, 46 bp, Homo sapiens
ccaagcccgctgagcaggatgaggtcaccttcaggccattcagagg

SEQ ID NO: 338385 - DNA, 100 bp, Homo sapiens
tgcctggttacagctgtttccacgtgcggtgctcgtcgggagtgatcacctaccctacagagtttattaaccacttaacctctcagaactgaacaaagac

SEQ ID NO: 338386 - DNA, 82 bp, Homo sapiens
aggcaatttccctgagaaccgtttacttccagaagattggtggagcttgatctgaagatcaacaacccctccccgtcgtaaa

SEQ ID NO: 338387 - DNA, 75 bp, Homo sapiens
cctgtatctaaaaaagcaggaggcaagaaaggggcccggaaatccaaggttgccaacttggcctgttccatctca

SEQ ID NO: 338388 - DNA, 95 bp, Homo sapiens
ggcggcgctggaggagcgaggcagctgtactaggactgggaacggacaccattcgcttttcacccaagatgatttgatgtcttataaaactctga

SEQ ID NO: 338389 - DNA, 90 bp, Homo sapiens
gcccggtgtctgtgagcccctgtcagccagactcaggagcctgccaggtggcaaaaaggttcgattgagtgaaacagacttcaaagttat

SEQ ID NO: 338390 - DNA, 88 bp, Homo sapiens
cagttggagaaaatcggcagctgagacggccttggccgatcttgcaggagagagagttactgcctgtgaagaaatttgaaagtgagat

SEQ ID NO: 338391 - DNA, 50 bp, Homo sapiens
ctgactttcagctatggaatcgattcttcaaacacctaaatgaaagtgat

SEQ ID NO: 338392 - DNA, 75 bp, Homo sapiens
acctggtgcagggcctgattgaggactgccagctggcgctgcagctaaagctgttgatggatacgtgaagccaca

SEQ ID NO: 338393 - DNA, 98 bp, Homo sapiens
cgtattctcagagtaaaagttgtttctggaattgatctcgccaaaaaggacatctttggagccagagtgctccaagctcccgaagccgaagtctcact

SEQ ID NO: 338394 - DNA, 82 bp, Homo sapiens
agaggggctgcggccggagcgggcggctgagacaaaggcgacgggaaatcctcattgacgattcaatttgttgaaggccaat

SEQ ID NO: 338395 - DNA, 124 bp, Homo sapiens
ttggaaaaccagatccagaaactggaggagtcccgctcgaagctagagccctgaggatgatgacaggaaggtccgaaggagagaaaaaaaccgagttgctgctcagagaagtcggaagaagcag

SEQ ID NO: 338396 - DNA, 100 bp, Homo sapiens
tgggaatgtacacgataattaaagagtaaagttgtgctcaacggtggtgctggctagagtgtatacgtttggacccaagcttaacttttccaatgtggaa

SEQ ID NO: 338397 - DNA, 83 bp, Homo sapiens
ggagatggaaaaggagttcgagcagatcgacaagtccgggagctgggcggccatttaccagatcatcacgaagtatgtatatg

SEQ ID NO: 338398 - DNA, 100 bp, Homo sapiens
ctgcaagatcgaggctgtcctctggtgagaaggtggtgaggcttcccgtcatattccagctgtgagttctttggaattgtgaacattcttttgaaatatg

SEQ ID NO: 338399 - DNA, 131 bp, Homo sapiens
cgtctgcaccttccggaacagcgccgaggccttcaagtgcatgatgtgcgatgtgcggaagggcacctccacccggatctcgctctgttgtgcagactgaagtgcagtggtgtgatttcagctaactgcag

SEQ ID NO: 338400 - DNA, 75 bp, Homo sapiens
tgggtgactcagagagggaagagattcagccagcacactcctcgcgagcaagattttgaagccagcttcataagg

SEQ ID NO: 338401 - DNA, 74 bp, Homo sapiens
gaacccccagaaacaggcccggacctcctcctctaccacccccaatcgaaaggacgcaaagtaccacatgcagc

SEQ ID NO: 338402 - DNA, 82 bp, Homo sapiens
ccttccatcgtcgggcgccccagacaccaggctcttccttctgcccagctccgtcccacccagcagcccgcagagaaaggag

SEQ ID NO: 338403 - DNA, 90 bp, Homo sapiens
caccagcctcacatcaacttccagtgagagtgacacaggtcaggaagcagaatattccttatatggcatttaaggaaatctgtttctctt

SEQ ID NO: 338404 - DNA, 100 bp, Homo sapiens
gtagagtcgctggagcgggcggagctgtgcgagagcctcctcacttggcaattctgtggtgttcttggtcacacatttatggagtttctgaagggcagtg

SEQ ID NO: 338405 - DNA, 98 bp, Homo sapiens
tggacccgaagaaggacgtgctgacccgcctgaagcacctgcgggcgctgctgggaagcgagcagctgcaaagcatctaatagaacgctactaccacc

SEQ ID NO: 338406 - DNA, 100 bp, Homo sapiens
aattcaccatctccatgaggagtggctcatcaaaggcagccttttccccatggcagcccctgttctgaatttcgctaaggagtttgtgatcagtgatcgg

SEQ ID NO: 338407 - DNA, 99 bp, Homo sapiens
gtgagaaacagtttgaccattttggacattttaaagaacatcttcgaaaacatacaggacgactgggtttggattcagaagaggattattatacaccac

SEQ ID NO: 338408 - DNA, 90 bp, Homo sapiens
gaacgatgaccaacgcccttcgcaaggcccctcagcacacagctgtcggcttcaaacagacggattatatcagcctcttccccctggacg

SEQ ID NO: 338409 - DNA, 75 bp, Homo sapiens
atgcgctcaaaggcaaaaaggtctcggaagggtgctgacctggaccgggagaagaaggctgccgagtgcaaggtg

SEQ ID NO: 338410 - DNA, 82 bp, Homo sapiens
ctccagcaatgattacttcagaattaccagtgttacaattcctgaatttgacaacttgtacctggatatgaatggaattata

SEQ ID NO: 338411 - DNA, 100 bp, Homo sapiens
cggggaccgagcgcgctcgctccggcgccggcctcgcctcctcgcagcagcgccatgatctcacattcttgaaggtggcattgaagagcactaagatcgg

SEQ ID NO: 338412 - DNA, 100 bp, Homo sapiens
gatgaacttcataagaagttgcatcaggtggtggagacatcccatgaggatctgcccgcttcccaggaaaggtccgaggctgaagggtatgtgattggca

SEQ ID NO: 338413 - DNA, 74 bp, Homo sapiens
agcgcattctcttctccatcgtccatgacaagtcaggccaaaaagcaaatggatttccacctgacaaatcttcg

SEQ ID NO: 338414 - DNA, 75 bp, Homo sapiens
tgactcttgggtccgaaggggacggacgtcctcccacgtaccatttagaagaacccttaggagaaatcttgagag

SEQ ID NO: 338415 - DNA, 83 bp, Homo sapiens
gaagaaactcaactggtgtcgagaagtccggaagcttgtggcgctgaaaacgaacggaacgtcaaggtcgtgggaaataaaag

SEQ ID NO: 338416 - DNA, 100 bp, Homo sapiens
cgcggaaggagctggagacggtcgtagctgcggtcgcgccgagaaagacaatacaatggtgggtgaagagaagatgtctctaagaaaccggctgtcaaag

SEQ ID NO: 338417 - DNA, 100 bp, Homo sapiens
cccgagtcgaagcgggaagatggctgcagacaagcctgcagaatgccagaggattcaacatgagcatacctatgcctgggcatccagtgaacttctccag

SEQ ID NO: 338418 - DNA, 75 bp, Homo sapiens
cagaaagctcatattcctccatctctgaagcaacaggatctgaggctcttctgaaaatggattgccaagagttag

SEQ ID NO: 338419 - DNA, 100 bp, Homo sapiens
gatcgtcgccacctggatgctggaggccctacatcattcgaggaatggcgcccccgacgacgccctgcagcaccgacgtgtgtgacagcgactacagcgc

SEQ ID NO: 338420 - DNA, 101 bp, Homo sapiens
caagtactaccggccaactgaagtgagccgagactgtctgaagctgggcccacctgctgagggagaagtcgtccaagtcaagtggcccgatggcaaactct

SEQ ID NO: 338421 - DNA, 100 bp, Homo sapiens
ccgccgtgggagggagccatgaagcattacgagaaccagaagtcctgacacctgatttcccatcactagcaattttcctgattcacccacccaggagaca

SEQ ID NO: 338422 - DNA, 98 bp, Homo sapiens
cgaagagctgccgcgacgcccggcccgcagggcagaagcgcatactgtgctgcctccgtagcctcgctgaccaacatcatcactccagacctctttga

SEQ ID NO: 338423 - DNA, 90 bp, Homo sapiens
ccaaccatttttgatttttgtacccatataaagtctatggaacacgatgaacctattctgaagcacttgaaagatattaaagtgaagttc

SEQ ID NO: 338424 - DNA, 82 bp, Homo sapiens
ggtcatcttctatttccaaaccacaacacatgcgtgtatcttgcttgggctatcttccctgctctgccacgccgggtctgga

SEQ ID NO: 338425 - DNA, 100 bp, Homo sapiens
cctgccagagccaaggccaagctctccaagttcagcatccccaagcagggggagctcccctactttatgaatgagctcactctgacggaacttgacatgg

SEQ ID NO: 338426 - DNA, 74 bp, Homo sapiens
ggcagagcgtgtggcatctccacctcaagggatgtgtttcacatggtagttgaagtaccacgctggtctaatgc

SEQ ID NO: 338427 - DNA, 97 bp, Homo sapiens
acacaaaacggcactcacgtggcatcagtccccactgcggtccacggccaggtgaacaatggtgtcatggagaaactccagctgggcccagagattc

SEQ ID NO: 338428 - DNA, 50 bp, Homo sapiens
gaagagggaagacacgcggaaacagcaagcacctcaaatttgccatgctg

SEQ ID NO: 338429 - DNA, 75 bp, Homo sapiens
tctgctgcatagtttcggtcatctaaaggaggttttaaacagtataacagtaacggcacagccaacaagatgaac

SEQ ID NO: 338430 - DNA, 135 bp, Homo sapiens
ggcagagccgtgcatggggctgctccccaggacctgagcaggaacctggagttttcaggtaagcggaagggtacagccaatgcccgaatgccagagaaggtcacatggatgaggagaatgaggattttgcgccgg

SEQ ID NO: 338431 - DNA, 100 bp, Homo sapiens
gaatccgcaagtttatgtgtctcagtctgcagcaggtgaaaagccatacaagtgtacctgggaaggctgcgactggaggttcgcgcgatcggatgagctg

SEQ ID NO: 338432 - DNA, 90 bp, Homo sapiens
gacttcgtcctcatgttgctggacacgctttttggggaactggtgtggaggtgacagaactgaagggcctggccaaccatgtggttgtgg

SEQ ID NO: 338433 - DNA, 75 bp, Homo sapiens
agactatgaatctctgttccaaatgctttgctgcatgggtaggttctctctccatggggatgattttcttttgct

SEQ ID NO: 338434 - DNA, 75 bp, Homo sapiens
gttctggatatcctgacagagcaaagaagccctgcagtccatttgatgtagacaagccatctagtatgcaaaagc

SEQ ID NO: 338435 - DNA, 95 bp, Homo sapiens
gggagtgcaagcttagagcgtctggccaagaatcagaggaagtggaagacttgcactatctgccagatgctgcttcctaaccagtgcagttatgc

SEQ ID NO: 338436 - DNA, 97 bp, Homo sapiens
aaggattcagagaaagagaactctttgttaaagaagagaataagatttttggaagaaaaggcacatagcagtatttccctgcaagataaaaatcctc

SEQ ID NO: 338437 - DNA, 96 bp, Homo sapiens
ttagtgtccagtgcgaaaaccaaagtggtggtcaccatggagcattctgcaaaggtcctgcatgccagtaaaactactcatgtcagctgttctgca

SEQ ID NO: 338438 - DNA, 83 bp, Homo sapiens
ggctgctattgtatatcacactaaagtttttcagctggtggaatagctacaataaggcaatcagctacctagccacagtgccc

SEQ ID NO: 338439 - DNA, 100 bp, Homo sapiens
cctcgtcagcactgactttcagctatggaatcggagaaccagcagaaatccaccaatgtagtctatcaggcccaccatgtgagcaggaataagagagggc

SEQ ID NO: 338440 - DNA, 83 bp, Homo sapiens
acctatgaggccagcaagcggaggtgctgggagcgagttggctgatgatatcatcaagttgaatcgaaaggaagggaagaagc

SEQ ID NO: 338441 - DNA, 101 bp, Homo sapiens
accttttggtgtttgatgagtgtcatcttgcaatcctagaccacccctatcgagaaattatgaagcatgattctggaacagagtgcacaccaggagaatct

SEQ ID NO: 338442 - DNA, 100 bp, Homo sapiens
aggcgtgggcgacccggtgtgtggcgcgcccagagccccgcgtttcagccctagggaagaggctgggaggcggcagaatgcagccagaggagggcacagg

SEQ ID NO: 338443 - DNA, 75 bp, Homo sapiens
aggaagcagctggccgaatgtcaaaagcaccttggacaaattgaaaaatgaaatccacgatgggatgaacctgga

SEQ ID NO: 338444 - DNA, 101 bp, Homo sapiens
cgagggagtcgccattttggatggtgaaccctgaagtcggtgtctgctgcgttcacggcaggattcggttagtgtgttccatgggaaccggtacaagcaga

SEQ ID NO: 338445 - DNA, 75 bp, Homo sapiens
aaacacaaagcagcccaaccaaaggatttgctgttgctgagtctgattgtaatttagcagttgccttgaatagaa

SEQ ID NO: 338446 - DNA, 98 bp, Homo sapiens
tgcccatctgcagcaccttcggcatctgcccctgccatgaccactgtggagaacaaatccaagattagcacagatggagtcttgctctgttgccaggc

SEQ ID NO: 338447 - DNA, 75 bp, Homo sapiens
ccagatctttattacgagtactacccgcacgtgtaccctgggcgcaggggagtggagtcaacatatcaatggagc

SEQ ID NO: 338448 - DNA, 98 bp, Homo sapiens
gagaaatccaattcagctttttgtgctgccagcaagaaatgatcagtagcaccagtgtttatggtcttcatcctccaggtccacctttagcaagacct

SEQ ID NO: 338449 - DNA, 74 bp, Homo sapiens
tcctatcgacccagctggatcgtgtaaccagtctatgggaagtgagttctttatagctccaagctctacagatt

SEQ ID NO: 338450 - DNA, 50 bp, Homo sapiens
gcagctctcacagatgtgaatacactatgaaaacaaagttgcagtacgtg

SEQ ID NO: 338451 - DNA, 75 bp, Homo sapiens
ttggcagtggtctgtatgatgaagcaatacggcatttttcaacaatgcttcagcaggctaatcctagtgttttgg

SEQ ID NO: 338452 - DNA, 100 bp, Homo sapiens
tccctggctgctggtttttcaagctgcctcacaagatgcctgaagggaacagcactgtctacatccctgaggaccccaccttcaagccctcaggaccctc

SEQ ID NO: 338453 - DNA, 100 bp, Homo sapiens
agccacagccacgatgatcgcgggctcccttctcctgtaacagtgtatcatgtatgccactgattccaggggacactcccctgctttcctccaacctcag

SEQ ID NO: 338454 - DNA, 97 bp, Homo sapiens
cagccttgggcctcgcgccggctatggccgtgccctggggctgagccctcagtgtactaatggtcacttgatgtgcgctggctgttttatccaccta

SEQ ID NO: 338455 - DNA, 102 bp, Homo sapiens
gtttatataactcaagttgtttggctaaattcttcaggaacattttagtggacaaaccaaatgaccaatcttcaagatggtcttcagagagcaactatcctc

SEQ ID NO: 338456 - DNA, 90 bp, Homo sapiens
ttgcctggacaggaggaaccctgccagaagcctgtcttagatgttcatgcagaactagacagaattacacgaaaaccagttacagtttct

SEQ ID NO: 338457 - DNA, 76 bp, Homo sapiens
cccagagaaagtcctcgctcgtcaccagcaagcttgcgggctatgacagagactccactttcaatgtgtttgtggg

SEQ ID NO: 338458 - DNA, 90 bp, Homo sapiens
cggggagtcagttcctccccgggcccctgagccatgcccatcgcagccgccccgaaggagccagatccttgccagcacattacagaatat

SEQ ID NO: 338459 - DNA, 87 bp, Homo sapiens
ctgtggtggccccgagcgcgagtgtgtaggtgacaggacagcggccaggcccgcccctcccctcggagccaagccgccatggcctac

SEQ ID NO: 338460 - DNA, 73 bp, Homo sapiens
gaagatcgtgctgctcatggcctattcgggcaagggctaccacggcatgcagtgcatcccctcggcaattgtg

SEQ ID NO: 338461 - DNA, 83 bp, Homo sapiens
ctgacaatgaatacccatcccgggtggcctttaccttgctggagaaggcatgttatttgaaagcaattgagacgcaaccgaac

SEQ ID NO: 338462 - DNA, 90 bp, Homo sapiens
ggaacccaacagagatctcttctgttctccactgctagctgactgcctgcatccacgggtctgcggcgatgctctaccccatgtactggc

SEQ ID NO: 338463 - DNA, 80 bp, Homo sapiens
atcatcattgtttgtggcattccagttaagagcacaacattttcaagaaaattcaagggaggaatgatcaattggaatcg

SEQ ID NO: 338464 - DNA, 87 bp, Homo sapiens
cgggttcgtggtgagaagccgtcaaggaaacccagcgtttgctggcagaaccagttcctggcatcaaagccgaaccagatgagagca

SEQ ID NO: 338465 - DNA, 100 bp, Homo sapiens
ttccctcgccctaatcccccaacgaggaaggaaggagcagttggttcaatctctgggaattcctcctgatcagcagagactgatctttgctggcaagcag

SEQ ID NO: 338466 - DNA, 82 bp, Homo sapiens
aggacggcgaggcgctcaacggcgagccagagctggacctcaccagcaagatttggagcaagaggtggtggtggccttcccc

SEQ ID NO: 338467 - DNA, 98 bp, Homo sapiens
gggcctgcaggtctctgtcgagcagcggacgccggtctctgttccgcaggatggattactacagcatcccatttcccacacccactactccgctgact

SEQ ID NO: 338468 - DNA, 100 bp, Homo sapiens
gccgagttggatttcggagagggcgagggccaccacctgcagcacatcagcgaccgcgagatgcccgaagattgctgctaaaattgattcaattcctcac

SEQ ID NO: 338469 - DNA, 100 bp, Homo sapiens
atcctgagttccgtgtgcagttccaggacatgtgtgcaaccattggcgtggatccgctggcctcctcaaaataaattcgctgctctggacaatgaagagg

SEQ ID NO: 338470 - DNA, 100 bp, Homo sapiens
atttaatcaaacaaaattgtgagctttttgagcagcttggagagtacaaattccagaatgcggcacagtcgtagtgccaactctggactctgttttgtat

SEQ ID NO: 338471 - DNA, 88 bp, Homo sapiens
atcggcggcggcttccgtcacctccgctcccccgatcctattcccagtcgtggatcgcttacacctgagacgaactacagaacagcac

SEQ ID NO: 338472 - DNA, 88 bp, Homo sapiens
aatggggaacagttcagctctttgattagctggaagtcgagtgtgctactcaactcaggagatttggagacaaactgaacttccggca

SEQ ID NO: 338473 - DNA, 100 bp, Homo sapiens
ttcacggagctctggagaaacatgaagttcgggactatcttctgatggctgatcactgggaaactgcacctcgtcacatgatgcgtctagatattcgttc

SEQ ID NO: 338474 - DNA, 100 bp, Homo sapiens
ctgatgaggaacaagccattagcaggagtcgatagcagcagttggtgacgagatggcactcagaaacggcgttgacgtaatttaggacgtggaatcataa

SEQ ID NO: 338475 - DNA, 100 bp, Homo sapiens
ctcggtcgtgcagcggcggcgagcgctcgcgagcggctgcgggacgcgaggtttccggatcgtcagtatttaaacagatcacatcatgcgtgagtacaag

SEQ ID NO: 338476 - DNA, 75 bp, Homo sapiens
gacgctatgctggaagaatttaagaaaggaacgtccttgtgaagacctttatctgagccactgtacttcgttatc

SEQ ID NO: 338477 - DNA, 75 bp, Homo sapiens
ggcccgcgccgcatggaggccggctgaggagcgccgctgcctcgcctcgcaaggtgattgagcactgcagtaact

SEQ ID NO: 338478 - DNA, 100 bp, Homo sapiens
aagatggtggcgcgcaggaggaagtgcgccgcgcgggacccggaggaccgtatccccagcccactgggctacgcagtgctgattcctaaagaaaagcccc

SEQ ID NO: 338479 - DNA, 75 bp, Homo sapiens
acagacaactccaccaattgtacagaccaaagagaaccctgtacagtaagaaatatggtgtggacctcatcagat

SEQ ID NO: 338480 - DNA, 83 bp, Homo sapiens
tgagtacctgaaccggcacctgcacacctggatccaggataacggaggctgggatatgggtctgcaggatggagttcttccgg

SEQ ID NO: 338481 - DNA, 50 bp, Homo sapiens
cgggaggagcctgttcccctgagactttttaaaactgtggacttaaatgt

SEQ ID NO: 338482 - DNA, 75 bp, Homo sapiens
agctcagcagggaaccctgcagttatagggatggcccaggtaatcctcttagacataattatgaaggtactttaa

SEQ ID NO: 338483 - DNA, 75 bp, Homo sapiens
ctcccacaggaagtgtcacacagcagtcaagtatgtcccaaacgtctcttgataactatggacagcaagaacttg

SEQ ID NO: 338484 - DNA, 75 bp, Homo sapiens
aaaataaagtccctttgctcgggctccagtggtccagaatcttttactgtctaccactacaatggattgaagcag

SEQ ID NO: 338485 - DNA, 51 bp, Homo sapiens
aggaggccttccagctgtttgaccgaacagtgaagttattgccagtggact

SEQ ID NO: 338486 - DNA, 83 bp, Homo sapiens
tatcatttgaagacgttccttgaggaggtttgaaaaaaccctcaaactgacacaagacctacagagaaaaccctttgccaaat

SEQ ID NO: 338487 - DNA, 100 bp, Homo sapiens
agtcagagcgcgagaagctgccgcccatcgtatcggcgggcgccggcgcgaccgcgctgcgcaaaccatgcaggatgatttactgatggacaaaagcaaa

SEQ ID NO: 338488 - DNA, 51 bp, Homo sapiens
tcaatcagtggtgcaatgtggtggaaccactcgttttgactattattttat

SEQ ID NO: 338489 - DNA, 100 bp, Homo sapiens
cgcaatgatgagaggatgtggtggtctactctgatgtcaatcttgagggctaggcagctggctaagagtcttgggcaggctggtgaaattgagcctgaaa

SEQ ID NO: 338490 - DNA, 100 bp, Homo sapiens
cgccgggttctttacctccgagccaggccgccgcaaagcaggtatttgttactgaaaacacaccagctgtctctggatgcttttctggttgccttgaagt

SEQ ID NO: 338491 - DNA, 98 bp, Homo sapiens
tctgcgtcaggtcacccagcagagatcagcaatccttggctcactgaggaggtttggagtggaaacaaaatgtcagtcagtgtgcatgagaaccgcaa

SEQ ID NO: 338492 - DNA, 100 bp, Homo sapiens
catggggctgtttggaaagacccaggagaagccgcccaaagaactgatttggagcaagaggtggtggtggccttcccccgaagaaatttggtaatcctgg

SEQ ID NO: 338493 - DNA, 74 bp, Homo sapiens
cgggggctcagagatccaagtgcgcgccctggcgggtccggaccaaggggtgacagtccaaagattgacttggc

SEQ ID NO: 338494 - DNA, 50 bp, Homo sapiens
gactatttcaccttcaaacaggaatggatctaccgaacagaaagggacaa

SEQ ID NO: 338495 - DNA, 83 bp, Homo sapiens
ctggagctgacagcgcgcacttcacccgcagttgatgatatcatcaagttgaatcgaaaggaagggaagaagcagaattttcc

SEQ ID NO: 338496 - DNA, 82 bp, Homo sapiens
gtttggatgcatctgctcagactacttctcatgaactcaccattccaaacgatccaacttctctttgcctgaaaaatgcgac

SEQ ID NO: 338497 - DNA, 75 bp, Homo sapiens
acggagcactgcaggcgccgggtctcggcgcggaagatggccggcggcgtggacggccccatcgggatcccgttc

SEQ ID NO: 338498 - DNA, 98 bp, Homo sapiens
tacgacttggcgaatcaggaccatatggttagctgctgaatcaaagcttcaaacagaagttaaagaaggaaaagaaacttcaagcaaattggaaaaag

SEQ ID NO: 338499 - DNA, 115 bp, Homo sapiens
ctttccagcccgtggtccttctccatattcgagtgccaacaatatgcccaagcaggtggaagtgcgaatgcacgacagtcatcttggctcagaggaacccaagcaccggcacctg

SEQ ID NO: 338500 - DNA, 90 bp, Homo sapiens
agaagatgtgccgccgctgccaacgtcgagcggcgacggctgcaaagaagtttgtcatcctgatattggtggcaagatcataatgtgtcc

SEQ ID NO: 338501 - DNA, 100 bp, Homo sapiens
cgggaagtgaggagagcccccattggaccagtgtttgcttagccttggtcatctataatttcctgagcctgtgctatgagtacctaggaggagaaagttc

SEQ ID NO: 338502 - DNA, 90 bp, Homo sapiens
ggaagcgccaggacaatggggacccgggacgacgagtacgactacctattcaaaggacacagcttgggctatggctttgtgaactacgtg

SEQ ID NO: 338503 - DNA, 75 bp, Homo sapiens
ctcgattaacagaagaactttcagcccttcaaatggatgaaagatatgatcatctggatcctactgaaatggaaa

SEQ ID NO: 338504 - DNA, 100 bp, Homo sapiens
tgcagagctagttcctctccagctcagccgcgtagccatgtgacatgcctgctcctactctgccttccatcatgaataaaagcttcttgaggcctcacca

SEQ ID NO: 338505 - DNA, 82 bp, Homo sapiens
cacagccccccacagcagaaccccagctctacccacggttttaaaatcaaagatgggaaaatcggagaaaattgcccttccc

SEQ ID NO: 338506 - DNA, 90 bp, Homo sapiens
agtgtgcttgcttggagatcaggacgcaaaggtgctggagaatctggtaaaagcaccattgtgaagcagatgaggatcctgcatgttaat

SEQ ID NO: 338507 - DNA, 75 bp, Homo sapiens
ctttgcttaataaagatacaagtttgcagaagaaattccaacagaatgggtttcctgaaacggatttgcaggaat

SEQ ID NO: 338508 - DNA, 90 bp, Homo sapiens
agaagagcttctcctcatcaactggggatgattacagttcttcctaaaaaagagccccccaagatgaacccagtggtggagccactgtcc

SEQ ID NO: 338509 - DNA, 75 bp, Homo sapiens
tgtagaaataagaagaagcaactgtacaaaccatgtttttggattcaaagcataaaaaccattacaagatataca

SEQ ID NO: 338510 - DNA, 80 bp, Homo sapiens
tgggacctattgttcagttacaagagaaactttatgtgcctgtaaaagaatacccagatcttttgtctggtcctctgagc

SEQ ID NO: 338511 - DNA, 75 bp, Homo sapiens
aaagacccaggagaagccgcccaaagaactggctgacaaacgggctcatcataatgcactggaacgaaaacgtag

SEQ ID NO: 338512 - DNA, 98 bp, Homo sapiens
tgaactgcacgataaaggaactcaggcgcctcttcttagttgatgatttagttgattctctgaaggagtccttcaataatgttaaacagtggctgcag

SEQ ID NO: 338513 - DNA, 100 bp, Homo sapiens
gcccgaccccgacccggcccggtcaggccccatactcagggacctcaggatggaaaccagcagcctgcaccgcccgagaaggtcggctgggtccggaaat

SEQ ID NO: 338514 - DNA, 76 bp, Homo sapiens
gatggacgagggatgcggagagaccatatatgtcattgggcagggatcagcacctgtctctgaaagccaaaagggc

SEQ ID NO: 338515 - DNA, 100 bp, Homo sapiens
ctggagaggtgaggtggcggcgtgggcagcgattgcgtggtcagtgattgcgaggtgatcaagtagtctggactggttactatggcttagtgtataacct

SEQ ID NO: 338516 - DNA, 83 bp, Homo sapiens
agcgagctgagtggttgtgtggtcgcgtctcggaaaccggtagcgcttgcagcatgatcgtctggggaatatttttcatctta

SEQ ID NO: 338517 - DNA, 99 bp, Homo sapiens
ccgggatcgtgaccgagaccgtgaccgagagcgtgaccgagagcgcgaatatcgtcatcgttagaagttgccgaggtactgtctgaatgccgcctgctc

SEQ ID NO: 338518 - DNA, 100 bp, Homo sapiens
atggaggaagtgctcctgctgggcctcaaggaccgcgagaatggaatcactagttccccttgtacagagtttgaaaaaacggatggaagtaccagactat

SEQ ID NO: 338519 - DNA, 83 bp, Homo sapiens
ggtgacagtgacaccactgaggatgttgagccccatatgggggttggcaggcagcagagaggcccctttcaaggtgttcgggt

SEQ ID NO: 338520 - DNA, 51 bp, Homo sapiens
tgagcaggctacagtccactccagcatggacacagaatttccaggtgttgt

SEQ ID NO: 338521 - DNA, 100 bp, Homo sapiens
gtgaagggccccgtaaattggaaggatgcacaagttccaaggttacgtttcagcgacagaaggctagagagaggcagcagaaattgcttgcggagtttgc

SEQ ID NO: 338522 - DNA, 156 bp, Homo sapiens
gatttaacagtcacgggctttcagtggtggaacacaggttacgggccagacagcagaagcaggccaagctcacagaagggtttgaaattcctgatatagatgctgaaaagttaatgtgtccacaagaaattgtagattacattgcagataagaagg

SEQ ID NO: 338523 - DNA, 76 bp, Homo sapiens
ttggctgtcgaggtggagaaccagggtgtgttccagccactcccagtttccaggaatatggatctactggaacagc

SEQ ID NO: 338524 - DNA, 87 bp, Homo sapiens
cacggtccagcggtcacctacccccagcaccacctccagcccctgcgcctcgcctgaactgacatcaactcccaatttcgtggttga

SEQ ID NO: 338525 - DNA, 100 bp, Homo sapiens
agagcgctctcatcgccctcgactcggaaaaggaagacaaaggcgctttggctaagctggtggaagctatcaggaccaattacaatgacagatacgatga

SEQ ID NO: 338526 - DNA, 100 bp, Homo sapiens
atgctttggcaaaacttcggaaaaccatcataaacgagagccttaatttcaagatgctgtctttgcaggtgccatgcctacaatggcaagcatcaagctg

SEQ ID NO: 338527 - DNA, 75 bp, Homo sapiens
cccagatgtctgacagccctgtgtgacaccaagataagtaacggtttggaatcacttgctaggagtcttgtctct

SEQ ID NO: 338528 - DNA, 75 bp, Homo sapiens
caccaggccgccgggggcctgctgcgcccgggtgatcaatgttgatgggacgaagaggcggaccctcctggagga

SEQ ID NO: 338529 - DNA, 100 bp, Homo sapiens
ggggattacaaagcctgaagaccccggagcccctttagccatgtggatacctacggagcacgagaaatacggcgtggaaaaaagagtttgatgtggatac

SEQ ID NO: 338530 - DNA, 90 bp, Homo sapiens
atcagtttggagttacatggcgatagaagaagtcagagatgccatggaaaatgaaatgagaacccagcttcgccgacaggcagctgccca

SEQ ID NO: 338531 - DNA, 75 bp, Homo sapiens
agagtgtgaacatcatgcataggccttcgaggaagaggcccacctccttcatgggcctctgagcctgaacgccca

SEQ ID NO: 338532 - DNA, 75 bp, Homo sapiens
ttggctagtgcaagccttgtttattttcctcaccactgaatctacagctttcatacagagatgaccagaagatgg

SEQ ID NO: 338533 - DNA, 100 bp, Homo sapiens
tttcatcaacaaggaattgattctcttctcaaactcagacaatgaaagatctataccatctcttgttgatggttgaagctccattcataccaaagtttag

SEQ ID NO: 338534 - DNA, 51 bp, Homo sapiens
agagtgagcgagcggacccgcgatgggggtattccctcagcggatactaca

SEQ ID NO: 338535 - DNA, 98 bp, Homo sapiens
ggcccggagcccccagcgcagcggccgcggaatgggccttgacgaaggagaagtcggtgaagcacatggatttgtgccttactgtggtggaccgggca

SEQ ID NO: 338536 - DNA, 83 bp, Homo sapiens
tcgacgaacactacgagtaccgattcccaacttcttctggagcctggggatcggtcacactggtgcgtggtggcatactggga

SEQ ID NO: 338537 - DNA, 98 bp, Homo sapiens
attccaaccctcctgtgcagggagaagtgatggaggaaaacgtccctttggtgtttcattgctgtacattggctgggataagcactatggctttcagc

SEQ ID NO: 338538 - DNA, 74 bp, Homo sapiens
atgaaccaaatcatcaggaaatactacgagactgtctcagcccatccctacaatccctgactccacctcttctg

SEQ ID NO: 338539 - DNA, 75 bp, Homo sapiens
cgagttgctgttgccgggtgatagttggagcggagactgttgtagatgagcatgagagtgtggagcagagtcggc

SEQ ID NO: 338540 - DNA, 98 bp, Homo sapiens
catgttaatgttagctggtgctttgtgtgctcagaaggtctgaatttcctgctgctgttcacaaagatgctttttatctttaactttttgttttcccc

SEQ ID NO: 338541 - DNA, 100 bp, Homo sapiens
gttatgcaatggggaaaaacgaactccgtccactaacaaaagatggctacgagggtaacatgttcggtctggccgtgggcctgggcttcggggcactggc

SEQ ID NO: 338542 - DNA, 75 bp, Homo sapiens
ggagaagttccaacgtgtcctacaaatactcaaaggtggctccggaagcagttttactcagtggatcggaatcgt

SEQ ID NO: 338543 - DNA, 75 bp, Homo sapiens
ggaggaggaggaggaggcgaggaggagagactgtgaaagcccagcctccgtggttcttaatgcctcaggaggact

SEQ ID NO: 338544 - DNA, 98 bp, Homo sapiens
gtcagtgccctattccttcacatgtaattcagaaattagggacaggagatgcagaaactaccagaggccgttcagctaattgagaaggccagcatgat

SEQ ID NO: 338545 - DNA, 101 bp, Homo sapiens
tgagtggcggcagcctctacatcgagatcccgggcggcgcgctgcccgaggggagcaaggacagtgatgatcaggagaaacagtccaagaagaaacctcgc

SEQ ID NO: 338546 - DNA, 90 bp, Homo sapiens
gccgtcaccgccgcggctccggccctggccccgatggctctgtgcaacggagactccaagtactatactggcaattgctggagaagattt

SEQ ID NO: 338547 - DNA, 50 bp, Homo sapiens
ccgtgacttcccggacgctgggaaatggtttggtgcacctcgatttggag

SEQ ID NO: 338548 - DNA, 50 bp, Homo sapiens
ggcctggaggacaccaacatgggaaaggaaaacctcttcagcgcaaggtg

SEQ ID NO: 338549 - DNA, 74 bp, Homo sapiens
aactgcttgatcttcaggccaaaatgctctgtgtccagaatagtccccaggaggcacggaacatgttacttcag

SEQ ID NO: 338550 - DNA, 50 bp, Homo sapiens
gctggagggcaaggcgggaacacgcccgtgggagtcagcatgccgcgtgg

SEQ ID NO: 338551 - DNA, 92 bp, Homo sapiens
gtgccagctgctagaaaacagggaagatattagccaatatggaattgccaggttcttcactgaatatccctagagcgtccaagatttttggt

SEQ ID NO: 338552 - DNA, 100 bp, Homo sapiens
gtgagaagcaggatgagttcaagcgtcttgctgaaaactcggcttccagcgatgatctcttggtggcagaggcggttccggcggcaagacgtaaggaatg

SEQ ID NO: 338553 - DNA, 98 bp, Homo sapiens
atgtgcggcgtccgctgtataaggtctccgtgaggccgggtgacgctccagaatgggagacaagccaatttgggagcagattggatccagcttcattc

SEQ ID NO: 338554 - DNA, 75 bp, Homo sapiens
atggaggacgagatgcccaagactctccaaaactggacaagccaaggcatctgtagccaaagtaaacaaatctac

SEQ ID NO: 338555 - DNA, 100 bp, Homo sapiens
ctttatgaccatattaatgcagatgaggcgttctttgttaatgaaggagttcccccttctgagtatgttcaatatccatgaaaaccttttagaagccctt

SEQ ID NO: 338556 - DNA, 75 bp, Homo sapiens
ttggagaggccgagggtttgatgaaggtggaggcagcgcggctctcaggtcacagggattatggacccagaacag

SEQ ID NO: 338557 - DNA, 74 bp, Homo sapiens
accacttctgtggctgctaccccactcctgggccgtccctgaaggccctcgggaccaaggatcacgtcatgact

SEQ ID NO: 338558 - DNA, 100 bp, Homo sapiens
gtggcgtgcaggactcgggtggctctgaggtcgcctggggaccccagaagcacgagggccgggaggaggatcagcggttgatcaacttggtaggggagag

SEQ ID NO: 338559 - DNA, 89 bp, Homo sapiens
ccacgcaccccactcggcgtcgcgcggcgtgccctgcttgtcacaggcccagcagcaaagaaacctggataacatcgtcttgcaacaac

SEQ ID NO: 338560 - DNA, 50 bp, Homo sapiens
cggcgcgcgagctggagcactcgcatctgctacaacatcctggttctgtg

SEQ ID NO: 338561 - DNA, 99 bp, Homo sapiens
gcggagtggagctcagccaggggcagccggctctggtgctcccagaagaggcgcagttgtgtagcagttgagtaatgctggttagctgttaaggtggcg

SEQ ID NO: 338562 - DNA, 85 bp, Homo sapiens
ttgctgctaggggaccaaggatggcaaaacgacgacagatgcctgtgaggagccaccaacatttgaagctatggagctcattggt

SEQ ID NO: 338563 - DNA, 75 bp, Homo sapiens
catacctgtgtgaaagcaaccttccacgcaatctataagatggtttcctctgtaatgaaaatgcctgaagatgag

SEQ ID NO: 338564 - DNA, 83 bp, Homo sapiens
agctccggctggaggccggactcaaccgcgtaaaatgaacacctacctcttcatgatgcaagcccaaggcattctgatccggg

SEQ ID NO: 338565 - DNA, 82 bp, Homo sapiens
tgcagcgctctcgtcttctgcggctctcggtgccctctccttttcgtttccggaaacatgaacccagcgggtgccgcttctc

SEQ ID NO: 338566 - DNA, 90 bp, Homo sapiens
actgcaagcattctgtggtctgcccggccagctctcgcttctgcaagaccacgaacacagatgtggacgaatgtcgccgcgtgcccccgc

SEQ ID NO: 338567 - DNA, 98 bp, Homo sapiens
ccatcatggtcgtcatcgtcgtcgtcatcatcatcatcatcgccagagcggccacttgggattctgaggatacaacttcagtattaaaggaggaacat

SEQ ID NO: 338568 - DNA, 82 bp, Homo sapiens
gtcgcgtgtctaggtgagtcgcggtgggtcctcgcttgcagttcagcgaccacggatcccatgacagattctgttgtcacgt

SEQ ID NO: 338569 - DNA, 155 bp, Homo sapiens
cagtttggcagctctgtcctgggccagtacatctctgacttcagcgtccgggcactcgtggacttgcagtacatcaagctgattgctgtgtttgaagaacaagaaccactccacaagattgagagccccagtggaaaccctgcagatcggcagag

SEQ ID NO: 338570 - DNA, 100 bp, Homo sapiens
aaccaaacactgccggttgatttctttgctcacctgcggtatgggttactgggtacatcaggaacgtctctatcaagaatacaatttcagcaaggctgag

SEQ ID NO: 338571 - DNA, 96 bp, Homo sapiens
ggagccccaatctcaggaccgggaattccaggccggttcaccaaggaggcagggacccttgcctactatgagattggcacttctctgtttgatgaa

SEQ ID NO: 338572 - DNA, 75 bp, Homo sapiens
agacgaggcaaagcacccagctttcttcactcttccgccaggcccagacatgtccgtccttgtaagttaaaagct

SEQ ID NO: 338573 - DNA, 100 bp, Homo sapiens
taaagtcacccggcggccaaaggccagtgactaccaacgtttggaccagaagaaccgcatgcacgagtctctcatgctcttcgactccatctgtaacaac

SEQ ID NO: 338574 - DNA, 80 bp, Homo sapiens
cacgaccttcctgcccttcacgctccaggagctagggtgagaactctgtctcagtcgacgggaagtgcagtgactccacg

SEQ ID NO: 338575 - DNA, 82 bp, Homo sapiens
gatcatgtctgcgagccaggattcccggtggtacagaagttggtcctgccctttgggcgactgaactacctgcccctggaac

SEQ ID NO: 338576 - DNA, 113 bp, Homo sapiens
tagatgatccaagtcaccaagaaattactgtctcaagtgatacggagattacctggggcaattgatgttatcggtcagactataactatcagccgagtagaaggcaggcgacg

SEQ ID NO: 338577 - DNA, 83 bp, Homo sapiens
tggggccagggaaccctggtcaccgtctcctcaggggatgccaagggagcagagatgcctgcagcccgtgggagcaagtcctg

SEQ ID NO: 338578 - DNA, 82 bp, Homo sapiens
tctatagccagattcaggaacagcgcatcatgaaagaagctcgtcgacgaaattctaccagttctctgttgggaatcagcga

SEQ ID NO: 338579 - DNA, 101 bp, Homo sapiens
gcagcacgtgttcctggtttcaggttcgagaacttgtcttggacaattgcaaatcaaatgatggaaaaattgagggcttaacagctgaatttgtgaactta

SEQ ID NO: 338580 - DNA, 75 bp, Homo sapiens
cagcaggagcaaaatcaactctgagctggagaaagagctttcccggaggcccaagaaggtctgcatcgtgaaggt

SEQ ID NO: 338581 - DNA, 83 bp, Homo sapiens
gccccagctcctgtctggtctgtgagatgtcctcactgtttcaggaggtgaaaggtgtagcagtcactcggcctacacccaca

SEQ ID NO: 338582 - DNA, 76 bp, Homo sapiens
gggcaaatccaatgttccaaaacccaggttacacgcatggggagatactctggaggaagcatttgagcaatgtgca

SEQ ID NO: 338583 - DNA, 95 bp, Homo sapiens
ctgaagtcggtgtctgctgcgttcacggcaggattcggttagagagagtctacaaggagattgaacaggtggttggcccacatcgccctccagcg

SEQ ID NO: 338584 - DNA, 98 bp, Homo sapiens
ggcgggggtgctgcagaggacacgaggcggcgggctggagacatggaccgcggcgagcaagaatggacagacctcaggggaagaagctggacttcagc

SEQ ID NO: 338585 - DNA, 98 bp, Homo sapiens
tgaggatggtgggcaggaggccggctgcgggggaggaggaactcccagattgcagggtatgtgagccagcccatggtggacgtgtcaatccttcagag

SEQ ID NO: 338586 - DNA, 87 bp, Homo sapiens
tacagggacgtgatgctggagaattataggaacctggtctccctggtgctcaagtaaagctctttgtgacagggcttttcagcttaa

SEQ ID NO: 338587 - DNA, 82 bp, Homo sapiens
agaagccgagtttcccacctccacgaggacagccaggtggcgaggatttccacatgaaaaatagaatcctgtgcatctcgat

SEQ ID NO: 338588 - DNA, 74 bp, Homo sapiens
cagcacttccacagccaagtgcgggagtccacgaagaaagatctgtcagatcctttcaatgacgaagaaaagga

SEQ ID NO: 338589 - DNA, 75 bp, Homo sapiens
ctcatccccgccctgtgggagaagcacagtccacagagacgagttgtactgctgtcacaggaaatggacgctgga

SEQ ID NO: 338590 - DNA, 100 bp, Homo sapiens
ctctgaaggccgccagcccagccccagccccagccctacagaggtgtcacgtcttgaaattttaaatgtcctcagtgactctctacctctggcagatgat

SEQ ID NO: 338591 - DNA, 82 bp, Homo sapiens
attttgggactcgcctttgccctggcaaacactggaatcctactttttctgaatactctgaagatagtaactccgagccaaa

SEQ ID NO: 338592 - DNA, 75 bp, Homo sapiens
tctggtgtaatacaagatgctttaaagaagctggtgcaggcctttacccatgctcctgcaacattagaagcagac

SEQ ID NO: 338593 - DNA, 90 bp, Homo sapiens
ggccagttgggagagcgtctgtagcttccttggtgctggagaatctggtaaaagcaccattgtgaagcagatgaggatcctgcatgttaa

SEQ ID NO: 338594 - DNA, 75 bp, Homo sapiens
gggcgtctttcagagcattacggatgctgaaatttctggaaaagacaatggaaatcaggggcaggaagagaacag

SEQ ID NO: 338595 - DNA, 104 bp, Homo sapiens
atttccaaagttgaagaagtcttgaatgactggaaactgattggaaactctttgggaaagccactcgaaaagttgttgacctcctgtactggagagacattaag

SEQ ID NO: 338596 - DNA, 90 bp, Homo sapiens
tcaggagccatagtacctacagcagcactccagtttcagaagaggagccccgccgaggcatgagggccgtgctccccccagaggaaggga

SEQ ID NO: 338597 - DNA, 82 bp, Homo sapiens
ggagggtcttcctgaaacccgcagaggaaaattcaggcaacgcctcgcgttgctctattaccaggttttaaacttcgccatg

SEQ ID NO: 338598 - DNA, 100 bp, Homo sapiens
ctccaatgcaatgctgtttgccctgaacatcatgaattcccaagaaggaggtaaagtcagtgataaatcttttgtttgctgcatatactggagatgtgtc

SEQ ID NO: 338599 - DNA, 100 bp, Homo sapiens
agattgtccgctcgagcctgaaggaccctgagaaagtgttctaagaacggaagcatctgggctggatggaatttagcatcaagcagagtcccctttctgt

SEQ ID NO: 338600 - DNA, 98 bp, Homo sapiens
agccgctcagccaccggggcctgccgcgcctgtcctggatcgacaccctctacagcagttgttcctggtcattgagtacgtcaacggcggggacctga

SEQ ID NO: 338601 - DNA, 100 bp, Homo sapiens
ttagtggaattgctcactttttggaaaaattggcattttcgggtcccgggattcttgagctgtgcccagctgacgagcttttgaagatggcacaataacc

SEQ ID NO: 338602 - DNA, 88 bp, Homo sapiens
gaatgatcaggatacttgggactacacaaaccccaatctcagtggacaaggttcatctttgtcatgcctcctgtggaggcacctcccc

SEQ ID NO: 338603 - DNA, 82 bp, Homo sapiens
tctgctacggcggcgcagaaatgaggcagaagcggaaaggcaactttgtccctaacaaaatgtggaagggattagtcaagag

SEQ ID NO: 338604 - DNA, 100 bp, Homo sapiens
gttatcactggccggaaccgctccttggaaggtcgctgggaggtggcattcaaaggcaagatgatgatgaatgaagtcctggcagcttcctgtgtcccag

SEQ ID NO: 338605 - DNA, 74 bp, Homo sapiens
ctcgaattagcaaaggaaacttttgccattcattctactattcatctgttgaagctgggcagccctccaccaca

SEQ ID NO: 338606 - DNA, 90 bp, Homo sapiens
tcagatgctgctgcttgacaatccacacaaaggaaagagaagaaggcgccgcccttgctggagggggcccccttgcgactgaagccccgg

SEQ ID NO: 338607 - DNA, 100 bp, Homo sapiens
tctcagaggacgccttcaacaccaccttcatctccaccatcggatcttttgccagaaatgagggcatactggcctgacgtaattcactcgtttcccaatc

SEQ ID NO: 338608 - DNA, 75 bp, Homo sapiens
ccgaggctggagggggagaacacccagcggggatctgatgagcttctttcttctggcatcattaacggacctttt

SEQ ID NO: 338609 - DNA, 75 bp, Homo sapiens
agaagaccagaagtggatggagagagttaaagttcctcgtaattttcgcttgttggaagaacttgaagaaggaca

SEQ ID NO: 338610 - DNA, 98 bp, Homo sapiens
cctgcctgcttctgcatcgacagatagccgtcttcagcttgagccccatcactaggaattgcacgtaggtgaaaaccagattgaaatgttagaggcag

SEQ ID NO: 338611 - DNA, 100 bp, Homo sapiens
ctgcaacctacggggtgtacttgggaacgaggggtgaagcggcccaggtgaggttcacggaggagaaatttggccaggctgagaagactgagcttgatgc

SEQ ID NO: 338612 - DNA, 82 bp, Homo sapiens
ctggggccagggaaccctggtcaccgtctcctcagttgagaagctgatgtctcctcgacttccaactggaaccttgaacccc

SEQ ID NO: 338613 - DNA, 75 bp, Homo sapiens
cgggacctcggcccgttcctccggacccgagaggccgccgcacgggtgtccatgaaactgggaggcgaccgtgtt

SEQ ID NO: 338614 - DNA, 100 bp, Homo sapiens
gatgacttaatagatactttaggaggacctgaagaaactgaagaagaaaatacaacgtatactggaccagaagtttcatttatacatgaaagcatccatg

SEQ ID NO: 338615 - DNA, 89 bp, Homo sapiens
gaatacatgatttaaacaagagatttccacagaagacaacgctcctcgacttagatgccttggcaagacatttggctgactgtattcga

SEQ ID NO: 338616 - DNA, 100 bp, Homo sapiens
ctgcgcattgggaggccgaagggtccccgggacccgcctgctgagtggacccgggttgaacttcaaagggcagaggggaaactgtcccttggcctctacc

SEQ ID NO: 338617 - DNA, 100 bp, Homo sapiens
actgggcaaaccccgcttccagcaggtttctgctgatgtactccacggttctgtgcagctattacaattcagccctgacgacagcagtggttggagccat

SEQ ID NO: 338618 - DNA, 100 bp, Homo sapiens
tggcgtcggaaagcgacaccgaggaattctatgatgcccctgaagatgtgcacctagggggcggctaccccgtggggtgacagagctgaatgaacctctc

SEQ ID NO: 338619 - DNA, 90 bp, Homo sapiens
ggctttcaaagataattcgcagtgatgtgaaactggcctcccaagccctgataaaaaagagtagttgaacagctacggaagaacctgata

SEQ ID NO: 338620 - DNA, 75 bp, Homo sapiens
ccaggaaccaattcctgatgatcaaaaggtcacgagacatgtgtagaactgcttttagaacaggaagttttccag

SEQ ID NO: 338621 - DNA, 83 bp, Homo sapiens
cgtgcaactgcaaacgctctttgttccagagcatggagatcaacaatgcagatcttcgtgaagactctgactggtaagaccat

SEQ ID NO: 338622 - DNA, 75 bp, Homo sapiens
ccaaggaccccttcgctcacctgcccaagagaatgaacaggcatttgaagaagttttccagaatgccaacttccg

SEQ ID NO: 338623 - DNA, 100 bp, Homo sapiens
gaggaagctaccaagatttgggctgagctgacaggaccagacgatggcttttacttgtcattgcaagcatcaacttctaactcatctcgccaggagaggc

SEQ ID NO: 338624 - DNA, 100 bp, Homo sapiens
acccccatggaaactggaatagcagagactccggaggggcgtcggaccagccggcgcaagcgggcgaagtgtgttggcatgcatcagcccagaagcagtg

SEQ ID NO: 338625 - DNA, 51 bp, Homo sapiens
tgctttcccctctgagcttcatcaagccagctggaccctggaggaactgag

SEQ ID NO: 338626 - DNA, 90 bp, Homo sapiens
ccataatagaatgtctacattcctattgaaaaggaagatcaggccaaccccaaagaagaagtgaccaaggaggagtttaaactgaatgaa

SEQ ID NO: 338627 - DNA, 75 bp, Homo sapiens
cacggaggcaccatgaagaagtcttactcagatcctgacattgatgctgccagtgccatgatgcttttgaatact

SEQ ID NO: 338628 - DNA, 75 bp, Homo sapiens
atccaaactcttgccctttgagggaccagtatttgattttcatcaagcagctgatggtatccaggaacaacagag

SEQ ID NO: 338629 - DNA, 95 bp, Homo sapiens
atcaccaaactggaggatgcctatgtattccctggggatggcgcatcacacaccaaagactgaaccggccgctgacactctcggagaagattgtg

SEQ ID NO: 338630 - DNA, 109 bp, Homo sapiens
agcagtcaactcaaatgcaagtccaagaggaggaggaggcggaggtccaagcggaaaggtgctggagaatctggtaaaagcaccattgtgaagcagatgaggatcctgc

SEQ ID NO: 338631 - DNA, 100 bp, Homo sapiens
ggcgcgagggcgcggagttccaggtcgagcagttaggccgcgagcgactgcggcgccgagccgatgccatggacaatattaccaggcagaaccaattcta

SEQ ID NO: 338632 - DNA, 100 bp, Homo sapiens
gttaaagagaggatagaaattgaacagaactatgcgaaacaattgagctggtgtcgaggacaagagaaccacaagccgtggccagtctgctgagagacca

SEQ ID NO: 338633 - DNA, 100 bp, Homo sapiens
gtttgaattcaccagcttggtattttcagtctccttcccaccacaactatctgtaagagagatactgtggatggtagggaagaaaagtctgcttctgatt

SEQ ID NO: 338634 - DNA, 98 bp, Homo sapiens
gagctgagaggagctgctgctcggaccagcgcggaatccatgggaaagagctatgatgggagagcttatgtcatcactggcatgtggaaccccaatgc

SEQ ID NO: 338635 - DNA, 100 bp, Homo sapiens
ttcctgcttgtgagaaatccaattcagctttttgtgctgccagcaagaaatgatcagtagcaccagtgtttatggtatctctgcattagccagattggac

SEQ ID NO: 338636 - DNA, 100 bp, Homo sapiens
atttgcttttgtaacttttgatgatcatgatacagttgataaaattgttgctgttgacagtgtcttgaagaggatgacaataattggtgtaattttatcc

SEQ ID NO: 338637 - DNA, 98 bp, Homo sapiens
cccggctctcgtcagcctcccgccggccgtctccttaacaccgaacaccggcgtctctggccgagcctctttttgtggaaaacgacagcagcagcagt

SEQ ID NO: 338638 - DNA, 74 bp, Homo sapiens
ataaagatcatccttgatcttatatctgagatccgccgtcactggggtggcaatgtcctgggtcctaagtctgt

SEQ ID NO: 338639 - DNA, 90 bp, Homo sapiens
gttccagcggttcttttataccaagtccttcgtgaagcactccatggagggggcagaccgggccgttccagtgctgatcattggcattct

SEQ ID NO: 338640 - DNA, 100 bp, Homo sapiens
tgaaggggataacttctatgtgattgatcaaggagagacggattctctgctggatgaaccgaatcctaacagtccagccaatagccaggcagcacagctt

SEQ ID NO: 338641 - DNA, 100 bp, Homo sapiens
cccttcgatcacgccgagagcacgtacggcctctaccgggtggctatggcggttccagcagcagcagtagctatggcagtggcagaagattttaattagg

SEQ ID NO: 338642 - DNA, 98 bp, Homo sapiens
ggacagcggccccctggagggggcagtcccgggagaacctgcggcggccggagcgatggagaacttaatgttctggatgatattttaactgaagtacc

SEQ ID NO: 338643 - DNA, 75 bp, Homo sapiens
ctctttgacttcttcaacagcaggcctaacctccatgtgcaggtcgccccacggctgaattctcggtgataaagg

SEQ ID NO: 338644 - DNA, 100 bp, Homo sapiens
ggctgaaccctccttctcaatcttggaacagcacccccttctttaaggctggactctgtgaagctgagcaggagcagatgcggaagatcctctaccagaa

SEQ ID NO: 338645 - DNA, 90 bp, Homo sapiens
ctggtgggaaagacagcctgtggggtattccataaaacctaccaactcatggattcccaagatgtgagctttttacataatgaaagaacc

SEQ ID NO: 338646 - DNA, 48 bp, Homo sapiens
tcccagaaagtccaagctcgtggtatgcaaccactcatgtattcggtt

SEQ ID NO: 338647 - DNA, 75 bp, Homo sapiens
gcaaaggagtcagggatggctcttcctcaggttatgatgtgattgctcaagcccaatctgggactgggaaaacgg

SEQ ID NO: 338648 - DNA, 83 bp, Homo sapiens
cacagctcggcgctccttcccgctccctcacacaccggcctcagcccgcaccgcttcctgcctgacacagctcacttcaagaa

SEQ ID NO: 338649 - DNA, 75 bp, Homo sapiens
gccaagctatcttctcgctagcagagtttatgtggccgaggcagacaagtggaattaggccttgctgcaggggac

SEQ ID NO: 338650 - DNA, 101 bp, Homo sapiens
cctcattctcatcaaaggctccttccggattctcaagctgattgtcaggagtacaaggcgagtggataattccaacacaagactggcagtccaaattgaaa

SEQ ID NO: 338651 - DNA, 50 bp, Homo sapiens
tctctgtgcactgataataaccctgcagaaatcagagcctcattccctta

SEQ ID NO: 338652 - DNA, 100 bp, Homo sapiens
ggaaccagctcttctgtccagagagcaggagattctacagtggttggaacgagtaggcttcgtgacttatatgacaaatttgaggaggagttggggagca

SEQ ID NO: 338653 - DNA, 128 bp, Homo sapiens
aatgatagaatgaagaccacaataaaagagacctctacttagctcagcaattcttaccttgtgaaattgcactactgatgaatcgtcctcgtgctgccacagttgttgctcgtggccccttgaagtgc

SEQ ID NO: 338654 - DNA, 100 bp, Homo sapiens
tttgagaaagtctctacagaccttgattgcgcagtctctttgtggagaggacttgatcattaaaggaatcagcgttcatatatccaatgccgaacctaag

SEQ ID NO: 338655 - DNA, 100 bp, Homo sapiens
aacgaaagtgaacaggagccgctcttaggcgacacacctggaagcaggtgaccagtatgcactgaagatgaggtttgtggaccatgtgtttgatgaacaa

SEQ ID NO: 338656 - DNA, 100 bp, Homo sapiens
cagtgccatccattgaatgggttgaacttttcacagggaacagtgttgataaagactgctgaagaattgatgaattttagtaagggagaagaaaacctca

SEQ ID NO: 338657 - DNA, 90 bp, Homo sapiens
gatgaaaacgactttggttggcatcatcaaggaagagagaagggcacagttacctaagtatcaacgtaatcttcctcggccaggacaggc

SEQ ID NO: 338658 - DNA, 100 bp, Homo sapiens
ggaaattggggtgccaccagacggagacagcttggactaccagatttggaggccaatcactgccaccttttatttccctgtgggtccaggaactggattt

SEQ ID NO: 338659 - DNA, 75 bp, Homo sapiens
ggtggcctaccaggaggccaggggtgtcgccatggaaccaccaaactgttttccacagaggctgcatcaattgac

SEQ ID NO: 338660 - DNA, 102 bp, Homo sapiens
ttaagttggagcagggagaggagctgtggataacgggaggtgaatttccatgtcaacatagtcctggtgctgttgcacgtgctgtttgagcacgcggtcggc

SEQ ID NO: 338661 - DNA, 112 bp, Homo sapiens
ggaccatggggccttccctcaggccctgcggaggtggctgggatccgcagggctcccctccttcaggaacaaactggcgatggaatatgagaggagccctctggaaagaaaa

SEQ ID NO: 338662 - DNA, 82 bp, Homo sapiens
ggctgagtgtcttgtcatgctagcactgcattaagtgatgcatacagggtgtccatcgcgcttccttcactgccttgatcat

SEQ ID NO: 338663 - DNA, 100 bp, Homo sapiens
gagagccggatccagagggaggcccacttcctgctggaagcactcaggaagacccaaggaaagaccacagcaagattctttcattcgtctcctcctagcc

SEQ ID NO: 338664 - DNA, 75 bp, Homo sapiens
cttgaaaaagctgccctgagacggtgtcccgccgaaaggtgtctgtgacctttgaggatgtggctgtgacattca

SEQ ID NO: 338665 - DNA, 90 bp, Homo sapiens
aattgatgtgtctgacgtcatcaggcttgttcaagacacaccggaggcgacggccatggccacaggctagcttgtcactttctgcaaagg

SEQ ID NO: 338666 - DNA, 100 bp, Homo sapiens
agagagaaagagtggatttcagcctgcacggatggtcttgaaacacaaatggtttttggaagtctgcggtcttgcagttcttcagactgctttaataaag

SEQ ID NO: 338667 - DNA, 89 bp, Homo sapiens
taaaggcccagatgataggaatcccatctcatttagataatcacagctggcttatcaatattgctgtttgatgcgatcctgaccagtgc

SEQ ID NO: 338668 - DNA, 51 bp, Homo sapiens
agactcctcttgccacgcatcagtctgaagtgaacagagtatctgtcaggc

SEQ ID NO: 338669 - DNA, 83 bp, Homo sapiens
caaccattgacgccatgtcgggttattcgagtgaccgagaccgcggccgggaccgaggccgactgactgctgcagaccaccgc

SEQ ID NO: 338670 - DNA, 89 bp, Homo sapiens
tttttcctgtatgaagcggttggcaccactgaagtgaccgaatgagcttctcaataggtttggcatggacaagatctatgaaggccaag

SEQ ID NO: 338671 - DNA, 100 bp, Homo sapiens
ttcgcgcagtgcctggggtactacggctacagcaagacaagttggatggcttgaggactggtactaaaaggaaacgtgactgggaggccattgccagcag

SEQ ID NO: 338672 - DNA, 50 bp, Homo sapiens
tgcggggccattcgtaggatgggtatcactggtccttctggcccgattgg

SEQ ID NO: 338673 - DNA, 75 bp, Homo sapiens
acaagctggaggagctgtggaaggcagcggaggaggagaaagagatggacctcccggactcggcctcgagggtct

SEQ ID NO: 338674 - DNA, 100 bp, Homo sapiens
ctgccccgcgctcggtcccctggcggctccagccgcgggtcaccctccgtcagaaggtggaagcaggagcacctgtcacagctccctggaatcgacaccc

SEQ ID NO: 338675 - DNA, 101 bp, Homo sapiens
aaatgccaacgccgtgtctgaaggtatcctgtggtctgaggccatcttcctcgaggcaaggccccagaggaggaccaagagcgtggatgccctgaagaagt

SEQ ID NO: 338676 - DNA, 73 bp, Homo sapiens
aggaaaatcatattatagatggagtaaaggaacggagctttgactgtaagatctgtgggaagagcttcaagag

SEQ ID NO: 338677 - DNA, 75 bp, Homo sapiens
cccaggggccgaagcccacccagggagttgatggttacagaatacctatatgctaataaaatggctttccgatac

SEQ ID NO: 338678 - DNA, 58 bp, Homo sapiens
cgccgcttcatcgagctgcctttacaggacgaaaggcatctccttggaaacaatgcca

SEQ ID NO: 338679 - DNA, 100 bp, Homo sapiens
tctcggtgacagccgagggcggcctgagcccggcgcaggtgaccggcgcgcgggagcgctacggccccaacgatgatcaagcggtgctgattcacgagag

SEQ ID NO: 338680 - DNA, 100 bp, Homo sapiens
attcccgccgtgcaacgcggagtggagctcagccaggggcagccggctctggtgctcccagaagagctccaaatgagaagatgaagcaagtgttaaagaa

SEQ ID NO: 338681 - DNA, 50 bp, Homo sapiens
cagctgcagtctgacgagaggggccaagtcctgtatctgccatgtctgtg

SEQ ID NO: 338682 - DNA, 101 bp, Homo sapiens
caagatggcggacgagaaggacagggaagggccgttgctccagggagaactgcaaatatcttcatccacccccacatttaaaaacgcagttggagataaat

SEQ ID NO: 338683 - DNA, 100 bp, Homo sapiens
tgctgccctgcgcgctgctggctggccaccagcccctcgggttccaagatgcagctactggagacagagttctcacacaccgtgggcgagctcatcgagg

SEQ ID NO: 338684 - DNA, 87 bp, Homo sapiens
aggaactacaaccagggagtcgtggggctggtccgggagttcgtggcccagaacaataccgtgcaaatcaagcatgtgatccagacc

SEQ ID NO: 338685 - DNA, 96 bp, Homo sapiens
actgactaaagcagatattgaacaacttccttcttatcggttcaatcctaacaaccaccagtcagaacagactttattttctcctcaaaaagtgaa

SEQ ID NO: 338686 - DNA, 50 bp, Homo sapiens
ctttgatgcgacctcaggaaggagatgagatcatatctgaagatattagt

SEQ ID NO: 338687 - DNA, 100 bp, Homo sapiens
caggcttactgaatatcctcttataattaatgcaataaaacgcttccatctttatccagagtcaggtcaattcagtgaagatatgatacccacagtgggc

SEQ ID NO: 338688 - DNA, 135 bp, Homo sapiens
ctcgggacccgggaagctatccctgccctcgggggctcgagcctggagtggggcttgcaggatggatagaatgacagaagatgctcttcgcttgaatctgttgaagcggagcttggacccagcagatgagcgaga

SEQ ID NO: 338689 - DNA, 75 bp, Homo sapiens
gctacagtccccatttatgcaacaggagtccttacgtgttatattcaggtctataagggagaattccaactacct

SEQ ID NO: 338690 - DNA, 100 bp, Homo sapiens
ggtgtaggagaagaaatccgcagaagcttattaaagttaagctctccacacaaggagatgcaagtcaggtgattgggcctcttactgaaggacagagaag

SEQ ID NO: 338691 - DNA, 74 bp, Homo sapiens
cgggaacagaaagaaaagtccgaaagagctgatccaaaaagttggcagctcttgcagaagccttaaaggaagtc

SEQ ID NO: 338692 - DNA, 145 bp, Homo sapiens
aggggtctcggaaaccatgggttattgcagtggcaggtgcacgcttatctttatctgtggcatgcaactggctggaatgaggctgtgaggctccagcagccgttttgtgccacgaggcagtagaaacctgggttcctgatgactg

SEQ ID NO: 338693 - DNA, 90 bp, Homo sapiens
gtggtgattccctgcggtgtgcaagtccgactggaacaggataatttcactggatacagaatcaaatagttccctcctctctcttcttgc

SEQ ID NO: 338694 - DNA, 110 bp, Homo sapiens
agggagatgattattagttgcgttgagtcatcaggcaaaagcacgtgcccccggagctgtgggagcccttctataccgaccagtacgcgcaggagcatgtgaagcccccg

SEQ ID NO: 338695 - DNA, 98 bp, Homo sapiens
aaccacagctctgggaactgggaaaagtgcttcggaaggctgggaaagctatttttgatacaccagatgaggatccaaattacaatccactacctgag

SEQ ID NO: 338696 - DNA, 98 bp, Homo sapiens
gcagaatgcagagattttgttttgaattgtgaaatacttccacctcttttagaggtgtgtccgcagccggccaggtggtatccctgaaggtgtggctg

SEQ ID NO: 338697 - DNA, 82 bp, Homo sapiens
tgtgtcctgttccgcttctccgaggacgccttcaactccacttttatctccaccataggtgctgactgggttacttttttaa

SEQ ID NO: 338698 - DNA, 92 bp, Homo sapiens
gaagactatcagccactaatgaagttgggaactcagaccgtaccttgcaacaaggatgacacgtacacagagagctacatcagcaccatcgg

SEQ ID NO: 338699 - DNA, 100 bp, Homo sapiens
aacatctaacctcttcggacgtacaaggctcctgcctatgtcatcctttcccctggcatggtgtcttctgcggaggtgcgcatcgggcccatgagactga

SEQ ID NO: 338700 - DNA, 80 bp, Homo sapiens
tgaaagcagagaccatggagcttcttgtgcctacaccaactaatgttacaattgaatcctataacatgaaccctatcgta

SEQ ID NO: 338701 - DNA, 98 bp, Homo sapiens
aagagaagagggtggctaatgattaaggaaacatgccctgaactgtcacagaatgaaaccagcgctcttcagcgtcctgtgtgagatcaaagagaaaa

SEQ ID NO: 338702 - DNA, 82 bp, Homo sapiens
gagttggagaaacctactcaacaccagaacaagttgaaatcatcgcagaaggataaagttcgtcagtttatgatcttcacac

SEQ ID NO: 338703 - DNA, 74 bp, Homo sapiens
ccaaaaaatcccaccagacatggacctttgctctcacttgtaagggtagcatcacgcccacagactacaccctc

SEQ ID NO: 338704 - DNA, 90 bp, Homo sapiens
tggaccccgcgagcaccagagtcggcgtaactatcgcctgacagggatctgcccaataacatgattcatcaggtgccaattaaatccctc

SEQ ID NO: 338705 - DNA, 149 bp, Homo sapiens
ggcctgtggccgctgcacatcgtcctgtggacgcgtatcgccagcacgatcccaccgcacgttcagaagtcggcatatagcactttctacattgtgggtttaatattatcaatgcagataccttttgtgggattccagccaatcagaac

SEQ ID NO: 338706 - DNA, 98 bp, Homo sapiens
gacagccgcatcttccttgtcagcgtggaaggctgtttcctctgcgagaaccaggagtgaactggcatgccaagcccctcacgctcagggaggtcgag

SEQ ID NO: 338707 - DNA, 75 bp, Homo sapiens
ggtgtctcttctcgccctggcggggaagggcgtgatggtgggcatgggtcagaaggattcctatgtgggcgacga

SEQ ID NO: 338708 - DNA, 75 bp, Homo sapiens
cggacttccccgttagaactcgcgtttccacttcagagatctgatcaacaacccctccccgtcgtaaacgctgag

SEQ ID NO: 338709 - DNA, 75 bp, Homo sapiens
gaacgaacatcttctggacctttgtccagtttggacatcacatttcacagtcagaaggacagcgaactaaagaag

SEQ ID NO: 338710 - DNA, 100 bp, Homo sapiens
cttcaccttttccttactcatgagccagggccgttgctccagggagaactgcaaatatcttcatccacccccacatttaaaaacgcagttggagataaat

SEQ ID NO: 338711 - DNA, 75 bp, Homo sapiens
caggctgcggcagacggcgacagtggcggcggcgccatggcagggcttgcaggcagtgctttcctcagtgctatt

SEQ ID NO: 338712 - DNA, 75 bp, Homo sapiens
gggggtggacgcccgggccgggctgcgcccgcttcttgcagggtggctttgtccactatggtgaagtgaccaatg

SEQ ID NO: 338713 - DNA, 100 bp, Homo sapiens
ccgagagcgtgaccgagagcgcgaatatcgtcatcgttagaagcttcgcagaatcaagaacggctatgtgcgtttaaagatccgtatcagcaagaccttg

SEQ ID NO: 338714 - DNA, 100 bp, Homo sapiens
ttcgtgggagggctcaactttaacaccgacgagcaggcactggaagaccacttcagcagtttcggacctatctctgaggattatgtttgagaccttcaac

SEQ ID NO: 338715 - DNA, 75 bp, Homo sapiens
agtatgataatgagaaaaaatgggaactgatttgtgatcagagcacaaagttatcattgttgggctggataatgc

SEQ ID NO: 338716 - DNA, 88 bp, Homo sapiens
agaagctctttgcgccgggaaccgataaaggagtctcaggagcaggggctgcggcagaggctgctggacgagcagttcgcagtgttgc

SEQ ID NO: 338717 - DNA, 82 bp, Homo sapiens
aagaaactagagcaaataaccgttttgaaattgtgtgtcaaggatgccacaatgccatcgacccagaagtgcagcgggtgac

SEQ ID NO: 338718 - DNA, 90 bp, Homo sapiens
gcctacgtggggatgagtgacggaaacccagagctcctgtcaaccagccaggactctgaagaacggcagcttgagggcaatgaccccttg

SEQ ID NO: 338719 - DNA, 82 bp, Homo sapiens
gccagtagcttggatccttgtgggcatgatccataatcggtttcaaggtgtggtgctggaggctgtggcatggctagcagga

SEQ ID NO: 338720 - DNA, 74 bp, Homo sapiens
attcaggatttcttaaaggatagccaattgcagtttgaggctaaattgatgacttggatgccattgtacctgca

SEQ ID NO: 338721 - DNA, 90 bp, Homo sapiens
gcctcaacttcgtctggagaaaagtggtgacttattggtgcagtcagcctcagtttccaaagccggaaaaggatcctctagtagccacgg

SEQ ID NO: 338722 - DNA, 50 bp, Homo sapiens
agggcttcacagaagaggtgacagaacccttaggagaaatcttgagagtg

SEQ ID NO: 338723 - DNA, 75 bp, Homo sapiens
cagtcacttagtcgtcagatcgcccgtcctggtatcacagtgcttctgttcagatggagtctcgctctgttaccc

SEQ ID NO: 338724 - DNA, 80 bp, Homo sapiens
gctgctcccagctctactccttctctgcctctcaggaccgggactttgtagccaagcagaaggaggacctggagctggcc

SEQ ID NO: 338725 - DNA, 82 bp, Homo sapiens
gggctcacggacatcaacgaggcctacgtggagacgctgaaggctttatcctgtggataaacgcagagtgaacgagtttggg

SEQ ID NO: 338726 - DNA, 100 bp, Homo sapiens
ggacactctctgaggacatctctgcaaaggccccagcggcccaggacttgtcagtcacatctgtaacctgctcactgaaactgccacactgtgcttggat

SEQ ID NO: 338727 - DNA, 100 bp, Homo sapiens
aacatccagccgtccccagctcacgagatcagcaaggacaactcctgcaaagaaaactgtacttgttcctcctgcttgctccgggcccccaccataagtg

SEQ ID NO: 338728 - DNA, 83 bp, Homo sapiens
ttgagattcggagttaaaacaggatagaatttttgcggcatttgaagagctttttccagattatgtttaaaattgaaaccaag

SEQ ID NO: 338729 - DNA, 83 bp, Homo sapiens
caccaagtgagaggccaaccaggagcagatctcgtgataaatgaagtgatgtggtgggaccatggagtgtattactgcaccat

SEQ ID NO: 338730 - DNA, 80 bp, Homo sapiens
tgcgtcaccgccgcccccccagacaagatggacaccgcggaggaaggtcagcccaaggccaaccccactgtcactctgtt

SEQ ID NO: 338731 - DNA, 82 bp, Homo sapiens
ataaaaatggatttttgcagtacgatggatgctgggcagttttatgctaaatataaagaaacaagattgaaggaaaaggaag

SEQ ID NO: 338732 - DNA, 90 bp, Homo sapiens
agagttacaatactacgtcggacagagttttgccaatggggaatgcatctttccagactgagtgtcgaagaaacaagtttaatcaaaatc

SEQ ID NO: 338733 - DNA, 130 bp, Homo sapiens
gtcagtcttctgggagcaagcctgcagcccggctcacctggagaaagggtgaccaagaactccacggagtgcccgtgcgcagcggagatgccaccttccccaaagctatggacaacgtgacggtccggca

SEQ ID NO: 338734 - DNA, 100 bp, Homo sapiens
agcggctgcagcgctctcgtcttctgcggctctcggtgccctctccttttcgtttccggaaacatgggagaagaaatgggtgaccgttggtgacacatcc

SEQ ID NO: 338735 - DNA, 131 bp, Homo sapiens
atgggtcaaccaagaacgtcaaacactccaacgattgagagcatttaaagatgaatgaatctgaagtctgctgcagtaaaacacagaaggctttaaaatgttttcttgcataaaattcaaaacttttaagt

SEQ ID NO: 338736 - DNA, 98 bp, Homo sapiens
aggaggtcatgaaggacctgagcctgacgcgggccgcgcgggacctgaaggagaagaaggagaaggtggaggagaaggcaagccggaaagagcgaaag

SEQ ID NO: 338737 - DNA, 101 bp, Homo sapiens
gctaagacttcgcgacacccttgaagctgagaaatgccttctttgaatcctggggggagccagtcatctgatgtggtgcttttgaaccactggaaagtgag

SEQ ID NO: 338738 - DNA, 85 bp, Homo sapiens
gattcgcagtggtcgcttcttctccttggtagtagattccatggatgcattagataaagttgtccaggaaagagaagatgcccta

SEQ ID NO: 338739 - DNA, 87 bp, Homo sapiens
gcttgtggcgggaacagcctggtgctccacagtcccttccagaaccagtggcatcagcacattccagcagtgcagagtcagaaagca

SEQ ID NO: 338740 - DNA, 100 bp, Homo sapiens
ggagaaagtgcccaaacttcacagcattagggacaggaatggaacacacttggatgcagctttcagattgcatcttctctgtctaaagagctctgtgccc

SEQ ID NO: 338741 - DNA, 83 bp, Homo sapiens
agttccttgtggagccggagctgggcgcggattcgccgaggcaccgaggcactcagaggagcatcacaggacatggccccctc

SEQ ID NO: 338742 - DNA, 74 bp, Homo sapiens
tcggcctcggagcaacgagcgcagcgccggtgaccctggcaaagatgagagtgcacatttcgtcctgcctgaag

SEQ ID NO: 338743 - DNA, 98 bp, Homo sapiens
gaagaatgaagctgagaccacatccatggtttctatgcccctctatgcagtcatgtatcctgtgtttaatgagttcctgcgatgataacatcctatcc

SEQ ID NO: 338744 - DNA, 75 bp, Homo sapiens
cttcacagcacagttcctgggaaggtggagccaccagcctctccttggaagcagtgcatcgagctggagcagcag

SEQ ID NO: 338745 - DNA, 100 bp, Homo sapiens
ttggagcccctgctttccactggaactatccaagatcacgatgccagttatatttaatgagcctctgagcttcctacagcgcctaactgaatacatggag

SEQ ID NO: 338746 - DNA, 100 bp, Homo sapiens
gagggcctgggagcttgctgcagcttcagctgtgagccgtgagctttgaggcggtgggatgtgtcagcagaatgtctcctgcccccgagagcgaccccga

SEQ ID NO: 338747 - DNA, 100 bp, Homo sapiens
cacatggaggctcagcgggccgaggagttacagaatgtctgaaggggacagtgtgggagaatccgtccatgggaaaccttcggtggtgtacagatttttc

SEQ ID NO: 338748 - DNA, 74 bp, Homo sapiens
gcggaaaccacatccccgaaagggtaacccttctgttatttaaagatgtaaaaaatgcgggagacttgagaaga

SEQ ID NO: 338749 - DNA, 100 bp, Homo sapiens
ctgggattggaactgtgtttgggagcctcatcattggttatgccaggaccgtataatagacgctggccccaaaggaaactactctcgatttatgaatcac

SEQ ID NO: 338750 - DNA, 100 bp, Homo sapiens
cagagggacacgctggtgcatctgtttgccggaggaaattgtatgctgctatgcatgaacctgatggagtggccggagtcagtgcaattagaaaggcaga

SEQ ID NO: 338751 - DNA, 101 bp, Homo sapiens
gcggcgagtttccgatttaaagctgagctgcgaggaaaatggcggcgggagcacaacatgcctttctggcggatatcctgccacgcagacctggaggcact

SEQ ID NO: 338752 - DNA, 100 bp, Homo sapiens
tcgtttgtttctccaaggtttgaaaagcagctggcctgcaagacaggatcttgctacattgcccaggctggcctcgaactcctggcttcaagtgatcttc

SEQ ID NO: 338753 - DNA, 82 bp, Homo sapiens
atcctgccgtccttctccactttcgccagcccgtgccgcgagcgcggcctgcaggagccatccagtccaatggatcagatgg

SEQ ID NO: 338754 - DNA, 82 bp, Homo sapiens
ccgtccgtccgccgccaccacccactccggacacagggatacccacccaccatcccagggtctacaacatccacagccggac

SEQ ID NO: 338755 - DNA, 75 bp, Homo sapiens
agtctctctttccggattctgcctccctccgctaacctccggctagacaaatggccgccgttctcctaagacgtc

SEQ ID NO: 338756 - DNA, 75 bp, Homo sapiens
cattgggggcagctcagcagagccaggggtccccagccccaccccagccccaaaggaggctgttcgagagggacg

SEQ ID NO: 338757 - DNA, 51 bp, Homo sapiens
tcttctccggcattgccatcatgctcaccccacggatcctggaagcccacc

SEQ ID NO: 338758 - DNA, 90 bp, Homo sapiens
acggtttcatgccgacttcattcataagcacgtgaaaggctcacgttgcctttccccatcttcctggttctgctccttcgtggcctagtc

SEQ ID NO: 338759 - DNA, 100 bp, Homo sapiens
tccattagttatagtcaagagtctggagcagcagggtttctcctcttcaaaaatctgaagttgttgagatggttaagaaacaagtcaaagtcgtaacgct

SEQ ID NO: 338760 - DNA, 82 bp, Homo sapiens
cgcttcctggatgagaagagcggcagtttcgtgagcgacctcagcaggatgaaacaggcgcctatttaatcgacagagaccc

SEQ ID NO: 338761 - DNA, 51 bp, Homo sapiens
ctccagccccagccccaagggcagagcttcagaatggagccatctgccacc

SEQ ID NO: 338762 - DNA, 75 bp, Homo sapiens
tgttagaaacagtagtggagaatcaagacttaattcagtgcacaaatgagatgaatgtgaacatcccacagttgg

SEQ ID NO: 338763 - DNA, 75 bp, Homo sapiens
cttccgttctccagcgctgggcaccgcggccggagctgtgggctgtgctactatatcggggccacagatgatgca

SEQ ID NO: 338764 - DNA, 73 bp, Homo sapiens
gcgaatatcgtcatcgttagaaggattgtcagtggcttcgccccgaggagagctgactgccctgggctgctgc

SEQ ID NO: 338765 - DNA, 51 bp, Homo sapiens
gcgtcaatcagagcgtcctgtgcggtggtctcatggattataaccatttgg

SEQ ID NO: 338766 - DNA, 98 bp, Homo sapiens
ttacatttatctggcatggatgtgactattgttaagttggcactctatgtgctttcattcctggaacccaaagacctgctacaagcagctcagacatg

SEQ ID NO: 338767 - DNA, 76 bp, Homo sapiens
accgctgacgacacccctggtggatggcgaggatgagagaatgacagggagagagtttttctctcgtttcccagaa

SEQ ID NO: 338768 - DNA, 83 bp, Homo sapiens
ggtggaattatgccctgttggttccaatgctgggattggctgcttttcagatgtggtatggtgtattcctgtgggcactggtg

SEQ ID NO: 338769 - DNA, 98 bp, Homo sapiens
atgctggaacatgcagagtctgcacaaaacaactctgctcatggtgattacatgcaaaataacgagagcagcttaatagagcaagctccaatacctca

SEQ ID NO: 338770 - DNA, 100 bp, Homo sapiens
cacgactttttgtaaagaaaacaatagtagtgggcaatgtgtccaagaatcccgttctgcttccagaagtggaagtgctcacggatcggggaaatctgca

SEQ ID NO: 338771 - DNA, 75 bp, Homo sapiens
gcaagaagggccctacggccgcccaggccaaatccaagcagcagggttaggcttgctgaggggcaggcacaggag

SEQ ID NO: 338772 - DNA, 100 bp, Homo sapiens
gagccacgtgcatgaaccaaacccacttcgttcaagacaggtgtttaagcgagaacagtcgtgaagccctggcagaggcagccttggagagccccaggcc

SEQ ID NO: 338773 - DNA, 75 bp, Homo sapiens
cgactgtttgagcccggaagcgcagaagctggtggtggtgaagtttattaagaaggagaaggtcttggaggattg

SEQ ID NO: 338774 - DNA, 74 bp, Homo sapiens
gcagaagcacaagccaaactgaatcttgccctgtcgctcaagctggggtgcagcggtgtgatcttggctcactg

SEQ ID NO: 338775 - DNA, 100 bp, Homo sapiens
cttggaaaaaatctgaaagtgataaaataatatgggaaaaacatcaaattcttgaccaatctaggtgagagggtccaagcctggtaagaatgtccagctt

SEQ ID NO: 338776 - DNA, 76 bp, Homo sapiens
cgaaggggaaggcgcctgaagaggacgaaggatgcactgcgcaactctggtggcgatgggctggggcagatgtcct

SEQ ID NO: 338777 - DNA, 75 bp, Homo sapiens
ccgccgccactgtgacttgcagtcatcatccattaccacaaaattagtcctacaggtgctcatataattgcccag

SEQ ID NO: 338778 - DNA, 83 bp, Homo sapiens
taaggatccctaacaggtttttgagaggtcggccacacacccggagcaccgtcatcacagcggtcaagttccttatctcggac

SEQ ID NO: 338779 - DNA, 83 bp, Homo sapiens
ggcaagtattgctgtgggtgctgggacttcccgtccgcggcgtggagggtcacccaacctgcctgcagtttaccctgaacatg

SEQ ID NO: 338780 - DNA, 74 bp, Homo sapiens
catggcccacctcatcagccctctgccctcccccacgggaaccatcaggtactctgtggatatccccttggaca

SEQ ID NO: 338781 - DNA, 100 bp, Homo sapiens
ctggctgtacagctcctcaagtgcaacaagtcccacttccgaaaccacaagtttgccgatccaacatggcagcagccttcggaggcttcctctacttctt

SEQ ID NO: 338782 - DNA, 96 bp, Homo sapiens
caccatgccgtcggagaagaccttcaagcagcgccgcaccttcgggaacggcaggagcagctgatgggatatcggaagagagggccgaagcccaaa

SEQ ID NO: 338783 - DNA, 75 bp, Homo sapiens
gtcagcatgcagcgcatatcatcagcgagctgattcttacagcccaggatgaaactgattccaagacagcctccc

SEQ ID NO: 338784 - DNA, 75 bp, Homo sapiens
cccgcatcgtggagaacctgcagtcctttaacgagatcactgctatggcagcctggcatcctcgctacaacctca

SEQ ID NO: 338785 - DNA, 82 bp, Homo sapiens
cacagcctcaaagaacaagaggaaaaaagagatcggggtccaaaatcatgataagctaccagagattcactgactgctataa

SEQ ID NO: 338786 - DNA, 100 bp, Homo sapiens
ctcagatgttcaggagatggagagagggctgctcagtcttttgaatgatttccactctggaaaacttcaagcatttgatattgatgatgttaagaagttc

SEQ ID NO: 338787 - DNA, 98 bp, Homo sapiens
tacattaagaaacactttagtgcaacgttagcctacacaggagctctacggtgactttgaagacttggaaacaggggacgtgcacaagggaaaatcag

SEQ ID NO: 338788 - DNA, 90 bp, Homo sapiens
ctgggccatgagagggaaggaaacaagccagacaagttggatggcttgaggactggtactaaaaggaaacgtgactgggaggccattgcc

SEQ ID NO: 338789 - DNA, 100 bp, Homo sapiens
gagcacctggagaggggccgcggaaacctggagtggaaggatgtggatgagtgccaagaatatggtcccgagatttgtggagcccagcgttgtgagaaca

SEQ ID NO: 338790 - DNA, 74 bp, Homo sapiens
caacaatggaacactttcatcagttttactgctgatttacttctcctatcaagtagtgagccacatggtctctg

SEQ ID NO: 338791 - DNA, 90 bp, Homo sapiens
ctccgttgactaccgtggagagatcataatttggggttcaagattccaggtcccttcaccgatgttgtcaccaccaacctaaagcttggc

SEQ ID NO: 338792 - DNA, 74 bp, Homo sapiens
caaaggctccaccttccacagggtgatcccttccttcatgtgccagccaggagtaaatagtatggatgtagcag

SEQ ID NO: 338793 - DNA, 100 bp, Homo sapiens
catgccagctttgtcaacgggatctgggagtgacactgtttaaggaagaaatctctaaacgttttaaatcacatactgaccaacttgtgttgatatttgc

SEQ ID NO: 338794 - DNA, 100 bp, Homo sapiens
ggggatgtcagaatctggctcggaggaatctcagtagggacaacaggcaggagaattatgggagcgcatttccccaggaatcctcactatggatgggctc

SEQ ID NO: 338795 - DNA, 100 bp, Homo sapiens
ggcagcaccacttcgaccagcttcatcctcagacagaatgctatgaacctacctcctgacaaagccaggttactgcggcagtatgataatgagaaaaaat

SEQ ID NO: 338796 - DNA, 101 bp, Homo sapiens
cgggcggcatcggctgcgagctcctcaagaatctcgtgctcaccggtttctcccacatcgacctgcactattcctgatcagagaactccagttgcttcaac

SEQ ID NO: 338797 - DNA, 43 bp, Homo sapiens
cgagcgcgagcggcgcgagaaaatggaaatcatattatgtaga

SEQ ID NO: 338798 - DNA, 75 bp, Homo sapiens
gctccctgtctgggaccttctccctgcctggacccctactattgcaacaagagccagtcttggtgctctgtgttc

SEQ ID NO: 338799 - DNA, 82 bp, Homo sapiens
agatgtcggatttcgacagtaacccgtttgccgacccggatctcaacaatcccttcaagaattcaattcgtcataatctgtc

SEQ ID NO: 338800 - DNA, 100 bp, Homo sapiens
gctcagattgcaacaggctgaagaaagcataagatattctcgtcagcatcacagtattcagatgatggactagaggcttttaccagatttcttaaaactg

SEQ ID NO: 338801 - DNA, 88 bp, Homo sapiens
atggagtccattgccttacctgtgcaataatgcttcttaataccgatctacatggccacatgcgtttagcccagcccctgctggtaac

SEQ ID NO: 338802 - DNA, 100 bp, Homo sapiens
gctggaaattcctgacgttcattgatctgatttcctttgacctcgctgagtacactgcggacgttgacggagttggcactctacgacttctagatgcagt

SEQ ID NO: 338803 - DNA, 100 bp, Homo sapiens
tgccggggaggccagagcgtggagcgctgcgcggcgcggcggccgggccctcgagacggggacgggagtggacatccgccataacaaggaccgaaaggtt

SEQ ID NO: 338804 - DNA, 88 bp, Homo sapiens
tcattatgatattgtgtatcccataaagtataaagaaagctctgctatgtgtcagtgaggagatgttaaagtaacccatcttgcagga

SEQ ID NO: 338805 - DNA, 75 bp, Homo sapiens
ggtggagtgtaggtcatatcgccgcggtcactgattctactaccatctgtcagcgtggattgattgaggagactg

SEQ ID NO: 338806 - DNA, 83 bp, Homo sapiens
ccggaagcggatcgggtggagtgaaggtcacgtcgccatggtgctcttacagcctgttccaagtgtggcttaatccgtctcca

SEQ ID NO: 338807 - DNA, 121 bp, Homo sapiens
gaagagccatggaaacaggaggaagaattcccaagccaaagctttccagcaaactgccctatgatgtgacccctgagcaggcgctagctcatgaagaagtgaagacacggctagacagctc

SEQ ID NO: 338808 - DNA, 96 bp, Homo sapiens
tggcttgtatcaacactgttactttcgtacattgtaaacaaatccgagctatgctgggccagttcagccaggcagaagccttattaatgaaagctg

SEQ ID NO: 338809 - DNA, 75 bp, Homo sapiens
ctgaaatcattgaagtgcttggagtgcagaactgaaagagacaaatgctgtgcttcatgaagttaaaagagaggg

SEQ ID NO: 338810 - DNA, 75 bp, Homo sapiens
atataggcctcggtctagcacaaagtctaaggggtggcagagctgaagcaggagctgaagttgcgatcactgcct

SEQ ID NO: 338811 - DNA, 100 bp, Homo sapiens
gattaatcaatgtcaactgacagcaaaccaagatggagtatgagtggaaacctgacgagcaagggcttcagcaaatcctgcagctgttgaaggagtccca

SEQ ID NO: 338812 - DNA, 98 bp, Homo sapiens
tgcccggtttggcactgctcctgctggccgcctggacggctcgggcgctggagacctgtgcaacagacctgcagaccaaagctgaccgattggcacag

SEQ ID NO: 338813 - DNA, 75 bp, Homo sapiens
cccctctgagactggagtgagagggtcttctggccctgggaggagcggggacactgaggacctctctccaaattg

SEQ ID NO: 338814 - DNA, 92 bp, Homo sapiens
tggagacatgaccaacaggaagttccgccatgacaaaagggtttacttgggggtgtccgcaatgttgccagtgtctgtctgcagattggcta

SEQ ID NO: 338815 - DNA, 83 bp, Homo sapiens
actgtctggggagctctccgagtgccttgctttccatgacatttcccctcaagcaccaacacattttctggtgatacccaaga

SEQ ID NO: 338816 - DNA, 75 bp, Homo sapiens
ctggaaaccatgcctttcccctaaaagtgccctgctgctgaggccgcgccctccccgccctgaggtgggggccca

SEQ ID NO: 338817 - DNA, 96 bp, Homo sapiens
aacgccctgctgcggcggctggtccgcattggggtgctggctgctgtctacaaggctctgagtgaccaccacatctacctggaaggcaccttgctg

SEQ ID NO: 338818 - DNA, 98 bp, Homo sapiens
ttactcgggagctggctgaagatggctactctggagttgagcagaagaaggaggaggagtcggcgggcggcaccaagggcagcagcaagaaggcgtcg

SEQ ID NO: 338819 - DNA, 74 bp, Homo sapiens
cctgcaacacgtgcccctacgtgcacaacatcacccgcaaggcttcgcaaggcatggtgggtcagctggcggca

SEQ ID NO: 338820 - DNA, 87 bp, Homo sapiens
atcctcacattcaagctgataggctgcgctaccggaatgtcatccagcgagtgattagttgttgacctcctgtactggagagacatt

SEQ ID NO: 338821 - DNA, 78 bp, Homo sapiens
ctaccgcaactctcagttcgagagtaaagtggctgcttcaacccccaactccactgctggtgcagccatgaactcctt

SEQ ID NO: 338822 - DNA, 100 bp, Homo sapiens
tataaactcaacccgaacacatttgtttgacaggtgttgtgtaacggaccaggaacatgtgttcctatctgtgtatctgcccttctccttgggatactag

SEQ ID NO: 338823 - DNA, 98 bp, Homo sapiens
ggggccctggggctggaaattgcgctggaccgtcgccttgctcctcgccgcggcggggactgcagaacgacaccgtaactatccgcactagaaagttc

SEQ ID NO: 338824 - DNA, 98 bp, Homo sapiens
gcctgcctcagcctccaaagtagctgagactacagatctattaatgagatgaagcggttggaagaaatgtcaaatatgtttcagagctctggagtcca

SEQ ID NO: 338825 - DNA, 90 bp, Homo sapiens
ctgcgataacctgcatctctgcaaactcaacttgctgggccggtgcaactattcgcagtccgagcgagatggagtttcactgtgtcagcc

SEQ ID NO: 338826 - DNA, 74 bp, Homo sapiens
ctcgacccaaccggcggccttgagcgctgagcaagcaaaggatttggtcgtattgggcgcctggtcaccagggc

SEQ ID NO: 338827 - DNA, 82 bp, Homo sapiens
agaagccgagttcaacatcctcctggccaccgactcctacaagatggtcatcatgggccagtgctactacaacgagaccatc

SEQ ID NO: 338828 - DNA, 100 bp, Homo sapiens
gtttaaacagaaatcaccttcagctgtttcctgagttgctgtttcttgggactgcgaagctatacaggctattgtggtggtgccatgcagcaagaatcag

SEQ ID NO: 338829 - DNA, 99 bp, Homo sapiens
agcaacgcgagtgggagcaccaggatctcgggctcggaacgagactgcacggaggatttgttggtattgaggaaaacggtgaaatcctttttggctgtt

SEQ ID NO: 338830 - DNA, 100 bp, Homo sapiens
atccgctgctcgcacgggagccagctgggtgcttgatgtagttttagagaccaatctggcaacaatccgggttctggaagcaatacagaagaagctttcc

SEQ ID NO: 338831 - DNA, 51 bp, Homo sapiens
atgcgctcgggctggaccagcaggtaagaatgattgatgttggctgatatt

SEQ ID NO: 338832 - DNA, 100 bp, Homo sapiens
ctgggattggagattccacccaaacttgctggtcactgggagccctgggcgctgcctatggcacagccaagagcggtaccggcattgcggccatgtctgt

SEQ ID NO: 338833 - DNA, 74 bp, Homo sapiens
gaataagcctggaagaaaaagatacaacgaactagcacaacgagggtttatggctacaaatgatttgatgacgg

SEQ ID NO: 338834 - DNA, 75 bp, Homo sapiens
ggcttcttttttgcttcattgcaagatgatgcactgtaagtacaaatggatcctaggtgaagaaccggtggagaa

SEQ ID NO: 338835 - DNA, 82 bp, Homo sapiens
gtccggcttcggagcgggagtgttcgttgtgccagcgactaaaaagagaaggaagaggcccagcagaagggactcgctgagc

SEQ ID NO: 338836 - DNA, 100 bp, Homo sapiens
ctgggccgagtgggtgtctggtgccggcgtttgggctacggttgttgttggcgactgtgcttcaagcgcccgtgatgctgatgagcgagagaagtggatc

SEQ ID NO: 338837 - DNA, 75 bp, Homo sapiens
gaagcaacttgcccagctatgagagacagagccaggatttgaaaccagagtatgctcaggtaatcaaaatgttgg

SEQ ID NO: 338838 - DNA, 73 bp, Homo sapiens
atggcggatctggaggagcagttgtctgatgaagagaagagacggagtttcgtcatgttggccaggcccattt

SEQ ID NO: 338839 - DNA, 90 bp, Homo sapiens
ggcctttgtccgtgttcggtgaccgcagcactggggaaacgatccgctcccaaaacggaagagagaagggcacagttacctaagtatcaa

SEQ ID NO: 338840 - DNA, 98 bp, Homo sapiens
gcggggcagcaacagtcgcaggagatgatggaggctctcaggagaagtgattttgcaaattgccaacgaacctgttctgccctttaatgcacttgata

SEQ ID NO: 338841 - DNA, 101 bp, Homo sapiens
gtgtgctctgagggagggtccgagccagccgctgttttgccggaggagcccctcaggcccttttctgggagaagaggctacaaggacttagtgcatcagat

SEQ ID NO: 338842 - DNA, 100 bp, Homo sapiens
atgctaattcacccaagaggccttcccagctcttctcacagaaggaagataaactccacatatttcttgatgggtcgttcccctatgactctgtcccttg

SEQ ID NO: 338843 - DNA, 83 bp, Homo sapiens
gtttcgacagcgaacatgtcgcggcctgtcaggagccttcacgtaaatgggtccagtcatgcctcccagtaagaagccagaaa

SEQ ID NO: 338844 - DNA, 97 bp, Homo sapiens
ctgcgaacacacaagctcctctcctcaggatctttccaattaaagatgtacccctggagactgatgaccttaccacttggctctatcagcggtttgt

SEQ ID NO: 338845 - DNA, 75 bp, Homo sapiens
tcttccttcctaatgtatgctttctgggttggaataagcattggaggtggagttttgctcttgtcgcccaggctg

SEQ ID NO: 338846 - DNA, 82 bp, Homo sapiens
gtggatcgctgtgatcgtcacttggtggcggcgggaaggccaaggtctctggcagacccagcagccgaaaagccaagtcccc

SEQ ID NO: 338847 - DNA, 75 bp, Homo sapiens
gtcccacctgccggttcttcatgaaaggtaagaatgattgatgttggctgatattggagtgctcattcacatgaa

SEQ ID NO: 338848 - DNA, 98 bp, Homo sapiens
aggattcaccacagtacttcacatcgtcgttcacatggggattgtcaccagacctgcaatctatggagcagattcggagaattatgagacctactgat

SEQ ID NO: 338849 - DNA, 82 bp, Homo sapiens
taaagcacgaacaggaatacatggaagtccgggagagaatacacagagccagcacagatgaggagagcatcctgactctgtt

SEQ ID NO: 338850 - DNA, 131 bp, Homo sapiens
aactggaagatctgagatctaaagctaaaattgcctttggacagtctatggatctacattataccaataacgagcttattcagctgattctgaatcatcttacactaccagacctgtgtagattagcacag

SEQ ID NO: 338851 - DNA, 83 bp, Homo sapiens
caagcattggtgcacgatgtactggaattacatgaatgacagtcttcgaaccaatgtgtttgttcgatttcaaccagagacta

SEQ ID NO: 338852 - DNA, 50 bp, Homo sapiens
gcagagaccctgggagtgtctgggctgttttggagtcagcggaagatcac

SEQ ID NO: 338853 - DNA, 82 bp, Homo sapiens
aaacttgggaataaaaagtattgtaacagctgaagtgtcttcaatgcctgctttgagaaagatcagtctaaagaaaaggaga

SEQ ID NO: 338854 - DNA, 51 bp, Homo sapiens
tgtcacacagacaggtggacataaagactacacttgctgctttgaaggatg

SEQ ID NO: 338855 - DNA, 90 bp, Homo sapiens
cggcggccgaaagcggagagatgctgggcgtggcggccgggatgacccacagtttgcagaaaaaacttcagcatgtgccaggaacacaac

SEQ ID NO: 338856 - DNA, 93 bp, Homo sapiens
cagtatttcctggacttagctttgtcatgcaaagctgtcatttgctgtcgattatcttagaagacctaggactccaaaaatgtttcccctgaa

SEQ ID NO: 338857 - DNA, 90 bp, Homo sapiens
ctctgttttgtctgtgtgcacagaggaatcatcacctccaaatactggtcccacggacttctgcacggacctggccgtctccagtgccaa

SEQ ID NO: 338858 - DNA, 87 bp, Homo sapiens
cctggtacatcgccgagttctgatggaatccgacgtggtaggcccagagcagatactgtccgcgatttaataaatgaaggagagcat

SEQ ID NO: 338859 - DNA, 74 bp, Homo sapiens
atggtatatgaagatgtcgtccaaatagtatcaggattccaagcatcagaagagctaacaattgctggaatgac

SEQ ID NO: 338860 - DNA, 51 bp, Homo sapiens
gagcaatcgccgggacagctgcaagtggtcccaggctgcacccatggcaga

SEQ ID NO: 338861 - DNA, 90 bp, Homo sapiens
ctccaccccagtctggtcacttcagcggccaccctgccctccaaaggttcattctgagccagatgaccaggatgccccagatgagcatga

SEQ ID NO: 338862 - DNA, 100 bp, Homo sapiens
agatgtggtggcttccgtttgttggtggaggaggtggcaggcctcggcggcctgtctggccctgagggagtcccctttctgaagctgtggtgcttggacg

SEQ ID NO: 338863 - DNA, 75 bp, Homo sapiens
tgggtatgaataatgactttcctccaagagcacattgcctggtaagatgggtgtgctgatctgcaaaccctggac

SEQ ID NO: 338864 - DNA, 75 bp, Homo sapiens
agcggtgtcctgcgcgtcttcggaaagtatgctgaggccttggattaccaccgtcaggcactggtgttgattcct

SEQ ID NO: 338865 - DNA, 49 bp, Homo sapiens
cgttggaataccggctctcagcggctgaccccttccttctcctcaatca

SEQ ID NO: 338866 - DNA, 75 bp, Homo sapiens
gtcagcctcactcaagaatggagctggtggctgcatccccagtgacgtttggagaacatttataaagagttgtct

SEQ ID NO: 338867 - DNA, 90 bp, Homo sapiens
ggatttctccgcctcagcccaacggggagagtttatgtggccgaggcagacaagtggaattaggccttgctgcaggggacttcatttcct

SEQ ID NO: 338868 - DNA, 90 bp, Homo sapiens
gctaaaacatcaatgaatgtaaatgaaatattcatggcaataggtgctggagaatctggtaaaagcaccattgtgaagcagatgaggatc

SEQ ID NO: 338869 - DNA, 82 bp, Homo sapiens
gcgggccttcgagcagctcatgaccgacctcaccctgtcgcgggttactgatggatccgtcctaaatgccatccatctcaag

SEQ ID NO: 338870 - DNA, 100 bp, Homo sapiens
gaaggtctctggagacatcttcagcagctggcctgctgctgtgggtctgcaggctgctctctctgctgtgattgctgccccaggattcggcagtccctca

SEQ ID NO: 338871 - DNA, 75 bp, Homo sapiens
aaaacactctcttcttcagacacagctctgggagacgtggaggcctctgaagctgaagaccacttcttcaaccca

SEQ ID NO: 338872 - DNA, 96 bp, Homo sapiens
agccgccccccgagcccgccttctccgaggcgcagaagtggattgagcaataggcgaatatgaagaccttagagcagagaaccagaaaacaaagga

SEQ ID NO: 338873 - DNA, 50 bp, Homo sapiens
aagatgcgcctctgcgatttgcagctgtcaccactgactaaagaagagaa

SEQ ID NO: 338874 - DNA, 97 bp, Homo sapiens
gaaagagaagggaatgctaagaactgctgggaggatgacagtggatctccttacgtagcagccaaaataaatgaagcaaaagacttgctagaaacaa

SEQ ID NO: 338875 - DNA, 141 bp, Homo sapiens
gccgcctggccctgcctgcctcctgcgccgcgcagccctcgcgagcgccccggatggcgctttacccctaggaccgatgacagtcgtctagaggagctcaaagccactctgcccagcccagacaagctccctggattcaag

SEQ ID NO: 338876 - DNA, 82 bp, Homo sapiens
gatgggctaccaggtctggagcagtgcagttgtgaaatccagaacacatattacataatggagccgggagacagactagggc

SEQ ID NO: 338877 - DNA, 100 bp, Homo sapiens
gggtatccaagggttgtatcgaggctataaaagcacagttttaagagagatcgtcagtatttaaacagatcacatcatgcgtgagtacaagctagtggtc

SEQ ID NO: 338878 - DNA, 96 bp, Homo sapiens
cggcagcggctccttcggagacatctatctcggagcttactccacgggaacagcctctagataatctgagttgttgaaaatacgaagcctgttact

SEQ ID NO: 338879 - DNA, 100 bp, Homo sapiens
tgtaccagtacacggcccacgttgccagaataactgaagtgaagtgatggactccgatttggagagtagtaagacgtgaaaggaatacacttgtgtttaa

SEQ ID NO: 338880 - DNA, 100 bp, Homo sapiens
aagcgactgagtccgcgatggagtcactcagcctctgaagaagcttcgggttcagactcaggcagtcagtcggaaagtgagcagggaagtgatccaggaa

SEQ ID NO: 338881 - DNA, 90 bp, Homo sapiens
agacagtatggctcagcagactcctgtaggtaatgctgctgtatcctcagttgactcattcactcagtattcctgcagctgcgctagact

SEQ ID NO: 338882 - DNA, 100 bp, Homo sapiens
aaaatggagaaattgctgctatcatccatcctaatctgcagtttggaaattttagcattcaggtgccaggaatgcagatgggacagccagtgccagaaac

SEQ ID NO: 338883 - DNA, 75 bp, Homo sapiens
gtgcactcataggctcgtctggtgctatcctgtcatacatcatgtgtgtgatagaagcagatttgggatatcctg

SEQ ID NO: 338884 - DNA, 146 bp, Homo sapiens
cctcctccctaaactccaatgatgtctttctgctgcgaactcaggcagagcactacctgtggtatggcaagggtctggaacagaatctgacagtgatgaatcagtaccagagcttgaagaacaggattccacccaggcaaccacac

SEQ ID NO: 338885 - DNA, 75 bp, Homo sapiens
ctgagacggtgtcccgccgaaagggaggttcccctgaaggatgctaaggaatacgctgaatccataggtgccatc

SEQ ID NO: 338886 - DNA, 82 bp, Homo sapiens
aaggaaggcgtccgttggccttcgtacccgtcttgattgagtttggtgccctggttgtcagatgttggaaagcagtaggacg

SEQ ID NO: 338887 - DNA, 100 bp, Homo sapiens
gcagaaggagcagacttacgcactgtggatccagagacacaggcacgactagaagcattgctagaagcagcaggaatcttttgggtgagttgtgaggctg

SEQ ID NO: 338888 - DNA, 52 bp, Homo sapiens
gccctcaaggccatgatcaaaacctttcagaaaaccaacgccaagatccctc

SEQ ID NO: 338889 - DNA, 98 bp, Homo sapiens
gcggatgccaagcagtgctcgaagattgggaggggttgtggaaaccagaacttcgcctggagaacagagtgcaaccagtgtaaggccccaaagcctga

SEQ ID NO: 338890 - DNA, 97 bp, Homo sapiens
agatggttattgatgttcaaacagggcctgccttaagtgtgaaagtaatgactgatgaaagtggaaaatccaaaggatttggatttgtaagctttga

SEQ ID NO: 338891 - DNA, 75 bp, Homo sapiens
aaatttaatggtgccttgaccatggcagttggaacaaccacagggcagaaccaaaaacttttgctagaaaatcag

SEQ ID NO: 338892 - DNA, 100 bp, Homo sapiens
ttcaatcggatcggtggagtgcagcaggacactatcctggccgagggccttcacttcaggaaattctgaaacagccacacctacaaatgtagacttgcct

SEQ ID NO: 338893 - DNA, 76 bp, Homo sapiens
gaggtcgcgccgagggcggcgggctgccgcgcaagggtggcgcgcgcgcgctacctgaacgacctggagcgtattg

SEQ ID NO: 338894 - DNA, 88 bp, Homo sapiens
cgggctccagactcgccgtggtcaagttcaccatgagaggaccgtagctttatgggatctgcgtaacttaaaattaaaactccatacc

SEQ ID NO: 338895 - DNA, 96 bp, Homo sapiens
gagctgaggaaccagatatcttgaaaagctgccagaaagttcagagcctagactgggagacctttgagcagtattgtgcctggcagctctttctgg

SEQ ID NO: 338896 - DNA, 97 bp, Homo sapiens
ggagcatgaatggagcaaaatggcggatcatgtgcaggatggaggatgaagctgtcctggacagaggggcttccttcctcaagcatgtgtgtgatga

SEQ ID NO: 338897 - DNA, 88 bp, Homo sapiens
atgccgaagggaatccatttgatcattttagtgctggagaatctgtgtgtggattctcatgccatataacttgtgtaaacaaagctcc

SEQ ID NO: 338898 - DNA, 82 bp, Homo sapiens
agacgcagccgtagacaccagctccgaaatcaccaccaaggttctgcggggagtgtctccagccctgcctgcaggtgccatc

SEQ ID NO: 338899 - DNA, 114 bp, Homo sapiens
gactctagtaacccgcgaaatgatgggatagcgttgcaaatccttaaaagagtcttaacgatgacattaaagtatcagtaaatgattttatcatcaaggcagcagctgttaccc

SEQ ID NO: 338900 - DNA, 50 bp, Homo sapiens
gaactggaacagaggaacattttgaaacatgtcaagccctccaacatcct

SEQ ID NO: 338901 - DNA, 100 bp, Homo sapiens
ttccgaggccaggagcttgcctttccgattgtggacaaagccctagaagagccaaagtatagctcactgtatgctcagctatgtctgcgattggcagaag

SEQ ID NO: 338902 - DNA, 100 bp, Homo sapiens
aacttacaagattgttaccgactctatcagggtataaatcaactacctaatgttatacaggctctggaaaaacatgaagataggagcatgctgctatgtg

SEQ ID NO: 338903 - DNA, 100 bp, Homo sapiens
ggatccgggagaagcacccacaaaactagcatcctcctggaggagctcgggatgaatttttagatgtgatctactggttccgacagatcattgctgtggt

SEQ ID NO: 338904 - DNA, 113 bp, Homo sapiens
ctcaaggtgaccctgacgtcccagaatgccttaaagtttgggacagaatgtttggaatggttttggaaaaaattattattcctgaaattcagaaggtatctggaaatgtagag

SEQ ID NO: 338905 - DNA, 75 bp, Homo sapiens
tgaagtggcaggaggaggaggaggggctccggctggtctgtggtgaggagtcgatggatggagatgaaaaggaac

SEQ ID NO: 338906 - DNA, 82 bp, Homo sapiens
ttacatgaaaaatcaaaatggtacatttaagaatttccagatgatgttaatccagtgaccaaagaaaaaggtggacccaggg

SEQ ID NO: 338907 - DNA, 87 bp, Homo sapiens
tcaccccaagctccagaagtccaggctgagccaaaccaagcttcaagttaatgtgacagtgatgataacatgggtgccaaaaatact

SEQ ID NO: 338908 - DNA, 75 bp, Homo sapiens
ggtggagccaaaatgctattgccctgtcttcatcaacatttaatcagtgtggatgaggtcaccattgtcaacatt

SEQ ID NO: 338909 - DNA, 98 bp, Homo sapiens
acggcagtgctgaggcggaacaggccgggcaccaaggcgcaggttgtgaactaaaggccgacaaagattatcactttaaggtggataatgatgaaaat

SEQ ID NO: 338910 - DNA, 72 bp, Homo sapiens
ctggaaactgattggaaactctttgggaaagccactcgaaaagatgtccagattctactcgacctgaaactg

SEQ ID NO: 338911 - DNA, 98 bp, Homo sapiens
ttctaccgcggccaggtcaactcacaggaggattacaaggccgtcgtcagcttatgcggaggcctgcatcagaggctccttgaaatgctagatacaga

SEQ ID NO: 338912 - DNA, 90 bp, Homo sapiens
acaagagccactgtgcccagccctgttttctccaggattcactcatgtttcgtgtgtaaagagagcaagacagatgttaagcgctgtgtg

SEQ ID NO: 338913 - DNA, 82 bp, Homo sapiens
agtcgaatatcatgctggtggctctacccagaattcaattaaagtggctcagctgtatgcaggagctattcttgaagtttgt

SEQ ID NO: 338914 - DNA, 74 bp, Homo sapiens
ctcccgagtatctggaactacagccttcttagattcttcaaccttgcagctgttttttgacctgtatcattcca

SEQ ID NO: 338915 - DNA, 100 bp, Homo sapiens
gaaagcatttaaccagcatggctacttcatattttggaaagcagtttttaagacaagtagacatagctgacattgagaatgaagagaaccgctactgtct

SEQ ID NO: 338916 - DNA, 100 bp, Homo sapiens
tgtccgcggttcctcctcctgtcgctgcccgtgtgattactgagactcagctgggcagatgctcaaactcaaatccaaaacattgctgcatcttttgacc

SEQ ID NO: 338917 - DNA, 100 bp, Homo sapiens
tccccgcagcatggaggacgatgcaccagtgatctacgggctggagttccagatcctggccaatttggagcaaggcttagcagaagacggcggcatgagc

SEQ ID NO: 338918 - DNA, 83 bp, Homo sapiens
tgggaatctggagatgatccatgggtagaacatgccaagtggtttccaaggactagaaggctgggaaaaaaggcttattatat

SEQ ID NO: 338919 - DNA, 75 bp, Homo sapiens
aaaggtgtcaagaagctcagaatgagccagattacattaatggatatacctgtgtttaaagctatccagccggag

SEQ ID NO: 338920 - DNA, 75 bp, Homo sapiens
gcctcatttgcgccttgcagcactgctggaccagaaatgttcccactgccaggaggcaggcgccaccttgggctg

SEQ ID NO: 338921 - DNA, 75 bp, Homo sapiens
tgctgccagggtccctgaagagggaagacacgcggaaacaggttagcatggcctcattgaaagaactagatcaaa

SEQ ID NO: 338922 - DNA, 82 bp, Homo sapiens
cctggctgctcactgcctccttctctgcccagcagcacaagggcagtttgcagtccaatggatgggaccccaatgaaatgtt

SEQ ID NO: 338923 - DNA, 109 bp, Homo sapiens
gtgcagaactgagcccaggccacagtaccctattcacgctctgtgcttgtgccaaggaaaatatgttgtgttcttcttttaccctcttgacttcacctttgtgtgcccc

SEQ ID NO: 338924 - DNA, 50 bp, Homo sapiens
tagaagatgatcaaatggcccaggtagttagaaacaaacctgtggcaagg

SEQ ID NO: 338925 - DNA, 98 bp, Homo sapiens
aagcgagagcctgaagagttggaccagttgtacctggatgacgaacccttaggagaaatcttgagagtggacagcaattgtgaagatcgccagagagt

SEQ ID NO: 338926 - DNA, 75 bp, Homo sapiens
ttcaaatacaagattgattgctgctgctacttctgtatctgagatctgtatctgtggacctgaatgttgatccct

SEQ ID NO: 338927 - DNA, 100 bp, Homo sapiens
cggcgccgctctccgagctcgatccgctgctcgcacgggagccagctgggtggaccaacttggaggccttgcagaagaagctggaggagctagagcttga

SEQ ID NO: 338928 - DNA, 83 bp, Homo sapiens
cgggctctgaggatgagctggaggaggggtttggtgccctggttgtcagatgttggaaagcagtaggacggaacatactcttc

SEQ ID NO: 338929 - DNA, 98 bp, Homo sapiens
accaagatagaacagcccttcagaaagtgaagaagtctgtaaaagcaatatataattctggtcaaggcaatccagcatccagcagatgagaagttgca

SEQ ID NO: 338930 - DNA, 80 bp, Homo sapiens
ctttggtttgtctaccagtttttgtctccagagacccatggtttgaagaaaagcagcagcaatttgagaatctggatcag

SEQ ID NO: 338931 - DNA, 100 bp, Homo sapiens
ctcaggagtcatttctgttccgcacaggcctgctgaactgggtgctttatatagggtagagtacagagagatggatgaaagcttggccaacctctcagaa

SEQ ID NO: 338932 - DNA, 90 bp, Homo sapiens
cagcctcccaagtatctgggaccacagatgccttattggaggaactggaacgctccacccttcaggacagtgatgaatattccaacccag

SEQ ID NO: 338933 - DNA, 74 bp, Homo sapiens
tcatgtatggtgtgaccagcatgtacttttcagctgtaatgagctcccccatccaggaatccactgctcccgag

SEQ ID NO: 338934 - DNA, 99 bp, Homo sapiens
ctcgagccagcccgccagcatgccccagtccaaaggttgaaggtcgaggagctggaaggcgagcggagtcggctggaggaggaaaagaggatgctggag

SEQ ID NO: 338935 - DNA, 97 bp, Homo sapiens
ccgcgcacaggccggtggaatgggtccaggccgtggtcagccgcttcgacgagcaggtgtcatggagaaactccagctgggcccagagattctgcag

SEQ ID NO: 338936 - DNA, 100 bp, Homo sapiens
gccatcgcagcacatgtgtgtggccgcctcggacaagagacccaggttttcagatctaggatttgaagtgaaatgctttaatgatcttaaagcagaagaa

SEQ ID NO: 338937 - DNA, 90 bp, Homo sapiens
tgtgaagctcaccgagacggcgatccgggcgctcgagacttaccagagccacaagatgatgataattccgaagaaggcttccacactatt

SEQ ID NO: 338938 - DNA, 100 bp, Homo sapiens
cgcggagatctctctcatctcgctcggctgcgggaaatcgggctgaagcgactgagtccgcgatggaggtaatattaacggctgctatttgaactattac

SEQ ID NO: 338939 - DNA, 91 bp, Homo sapiens
caccatgcatctcctcggcccctggctcctgctcctgggacaatctctatgggaagcagaaggcaaggaccccggtcattttaggtagaaa

SEQ ID NO: 338940 - DNA, 100 bp, Homo sapiens
cctgccaattcaacaatcaaaaagaaagctgctgttatcatcatggctgtagaggaacaggagtacagctgtgtagtaaagatgccttctggtgaatttg

SEQ ID NO: 338941 - DNA, 75 bp, Homo sapiens
aaagtttcttcgatgggatttggaaaggatgtcagaggatgacgctgtcagtatagaaagtggtacaaacactga

SEQ ID NO: 338942 - DNA, 75 bp, Homo sapiens
agaagatgtacggcaagcagaagatctattttgcggatcaggttgcctaagtactcttgccagttcattgagatg

SEQ ID NO: 338943 - DNA, 100 bp, Homo sapiens
tattaccatatggcccatggaaaagattttgcatctagaggaattgaaaggggccgaaggccagagaccaggatttggctacggaggcagagcgtccgac

SEQ ID NO: 338944 - DNA, 100 bp, Homo sapiens
gccaggaccacctggaagcctagaaatgacaagttggatggcttgaggactggtactaaaaggaaacgtgactgggaggccattgccagcagaatggagg

SEQ ID NO: 338945 - DNA, 157 bp, Homo sapiens
ccgtctgttccacattgctgcatttgttctgcctgacttggaccctggaaaacctggccctcttcaatttctgacaaaagaatggtagctgagtggaggttgtctcgaggtgttgaagaacagacacaagctttctttgaaggctttaatgaaattc

SEQ ID NO: 338946 - DNA, 51 bp, Homo sapiens
ctccagccagcagtgtatctcctgcaaaatccaaaggactgcatgacacac

SEQ ID NO: 338947 - DNA, 100 bp, Homo sapiens
aacgtagggatgcctattgccatgcttttacacactgatggagagcatgaacggccaggaggtcattaaaacaccaatgaccagccagaagacatttgaa

SEQ ID NO: 338948 - DNA, 83 bp, Homo sapiens
cgctcatctgccgcgggctggactacttcagcagcctgtggataacgaaggaggcccaacttcattcaataaggagcctgacg

SEQ ID NO: 338949 - DNA, 75 bp, Homo sapiens
gagaaccgaggaacgaagaaacagacattcaacatgattgcatttgaagtgtggttacagaggaggctacatgga

SEQ ID NO: 338950 - DNA, 82 bp, Homo sapiens
agatcatcgagcatttcaaacggctcctgtgacgtttgatgacatcactgtgtacttactccaggaggaatgggtgctgctg

SEQ ID NO: 338951 - DNA, 75 bp, Homo sapiens
ccacctctttctttgtgggccggatgggtccttgagtagcagattttgaagcagtgggaagaatattctgtcttg

SEQ ID NO: 338952 - DNA, 90 bp, Homo sapiens
attgccttattttttctcatggatgttcttcttcgagtatttgtagaagggatcagttcttaagagcagccccggtaactggaggaatgg

SEQ ID NO: 338953 - DNA, 87 bp, Homo sapiens
aagagattgggaaggtggcggcggcggtgcctgtcatcatcttcctcttctccgcggtcctccgggcactgttccgcaaatctgacc

SEQ ID NO: 338954 - DNA, 75 bp, Homo sapiens
tggtgcgaatacaggagacgtgtggagcagaaaaagtcctacctggagcgaagcgttaaggaagctgaggacaac

SEQ ID NO: 338955 - DNA, 100 bp, Homo sapiens
agaggagatccggatgctcatccataaaactgaagatgtgaatactctgtgtgccggtccaacaaaagcccttgggtctgtttgacttgttcaagtgtcc

SEQ ID NO: 338956 - DNA, 75 bp, Homo sapiens
tcatggacccgggctccctgccgcccctcgactctgaagactgctccttcccgatgagccagcgcagcttccccg

SEQ ID NO: 338957 - DNA, 100 bp, Homo sapiens
acggagaccagacctactgcagccacgcgggcgagcggctgtgtggatgtcggcgaagccgcgggcgaggctactgcagcactggggtgtcagttgttgg

SEQ ID NO: 338958 - DNA, 97 bp, Homo sapiens
ctgcctaagaacaagaaccaggagggcaccgggcaccggctgctgaacacccctgagccccttccagtgctgcctgaggtgccctctacctgtgcct

SEQ ID NO: 338959 - DNA, 90 bp, Homo sapiens
gcttcatggagtcgtcttagatgttgattcagctcttgcagaccaatttgaagataaaactacatctgtattggaacgcctgaagatttt

SEQ ID NO: 338960 - DNA, 50 bp, Homo sapiens
ctgcacaggagtcttgctgatgtagctgctgctggtggtgacaatgtcaa

SEQ ID NO: 338961 - DNA, 78 bp, Homo sapiens
tgtcatcaggtcaagcaacacctacatcacctattaaaaagttacttcatgtgaaaacaaagatggttggaagagcat

SEQ ID NO: 338962 - DNA, 116 bp, Homo sapiens
tggaagacattcagcatgacctcacatacaacctccgagaaggtcatgagagtgattttctgccactgccttctacaaagcacaacctgtaattcagttcatgtgtgaagttcttg

SEQ ID NO: 338963 - DNA, 101 bp, Homo sapiens
ggctgactgagagcgtctgcttgcaaatgcagccctgaggatttggctactgcatataacaacagggggcaaatcaagtacttcagggttgatttttatga

SEQ ID NO: 338964 - DNA, 97 bp, Homo sapiens
gggcttgagagctgggttctattttccctcctcaaactgactttgcagccacggagagcttgacaaaagtaagctgaagccaggaacaagagttgct

SEQ ID NO: 338965 - DNA, 75 bp, Homo sapiens
gcggccgccgccttcctgcagcagaggaactcctataaccaccaccaggaaaaatgccagctgtgggacaaggag

SEQ ID NO: 338966 - DNA, 98 bp, Homo sapiens
tcaaggctgcctataatcaagtaaaaacaatagctcaaggaaacctttccaacacagatgtccaagctgccaagaaaagaagatatgcttcttaaaca

SEQ ID NO: 338967 - DNA, 83 bp, Homo sapiens
cgacaagccgctggcagccgcggatctcaccgccgctcaggctggaagacccctctgtgttcccagctgtgatcgtggagcag

SEQ ID NO: 338968 - DNA, 98 bp, Homo sapiens
cattttgcaaatcttgaatttgctaatgccacacctctctcaactctctcccttaagcactgggatcaggcttctccagggaaagtgaccgaggcagt

SEQ ID NO: 338969 - DNA, 88 bp, Homo sapiens
gctcccctaggagtgctgagcccgcggaaccgcagccatgagccccccaagatgaacccagtggtggagccactgtcctggatgctgg

SEQ ID NO: 338970 - DNA, 97 bp, Homo sapiens
gcccgttccaggtcctgaaaaagaaaatgtcaggactgtggtgaggacagtaactctctccaccaaacaagtgccggtggtggtgtgcacattgagc

SEQ ID NO: 338971 - DNA, 75 bp, Homo sapiens
ggacagtgcagggaagcaactgcagagataacaacgaacttgatgcaagtgataggtttgccaaggtcagacctc

SEQ ID NO: 338972 - DNA, 75 bp, Homo sapiens
ggcctgagctgccgcctcctccgccgcccgaaaacccggagtgccccgcacagatatggaatgtgcagatgtccc

SEQ ID NO: 338973 - DNA, 83 bp, Homo sapiens
gtcccccagggcctcggcggccgctctgcctgcgcgctgctcctgctctgctacctgcaaaagactgttgaagtagagagcat

SEQ ID NO: 338974 - DNA, 100 bp, Homo sapiens
gggacggagcggccggggcctggggctgcctgccgggcggccgggcgcggcgagcccagactagctttatcgtcatctgggaaattgttaaaaatgcaaa

SEQ ID NO: 338975 - DNA, 100 bp, Homo sapiens
tggataatctgtcatcagaagaaattcaacagagagctcaccagattactgatgagaaaagaatggtttgtcattcattgaaacttcggccctagactct

SEQ ID NO: 338976 - DNA, 75 bp, Homo sapiens
taaatttggagctccacagaaggatgttaaggccatgctatgatagtggaagcttatccaaaataatagatccag

SEQ ID NO: 338977 - DNA, 80 bp, Homo sapiens
atgaggagatcacaccccgacggcagtccatgacggtgaagaagggagaggaggatacgaagcgttttcggcttcctgcc

SEQ ID NO: 338978 - DNA, 80 bp, Homo sapiens
ccgaggaggaagtggcggcggcggcggcggacaatgcagatcttcgtgaagactctgactggtaagaccatcaccctcga

SEQ ID NO: 338979 - DNA, 128 bp, Homo sapiens
ccgggagcgccgagcgtcgccgccgccgccgccatgaacaactcgggcgccgacgagatcggaaggaagaggcccagcagaagggactcgctgagccaccccccgccccactccatgttggctgtgct

SEQ ID NO: 338980 - DNA, 95 bp, Homo sapiens
ccatcaagatcgccctgcgctgatgatcaagcggtgctgattcacgagagtggaagcctccagagcttggggctttctggctgctcttcattgac

SEQ ID NO: 338981 - DNA, 76 bp, Homo sapiens
tgcagttgtctgccttgggtttcctctgcttactgtggatggccccagaggggcgtccgagctgggccacagcctg

SEQ ID NO: 338982 - DNA, 80 bp, Homo sapiens
gtacaaggccctagaggcagcccatgggcctgggcaggccaaccaggagtccttcaataatgttaaacagtggctgcagg

SEQ ID NO: 338983 - DNA, 75 bp, Homo sapiens
tggataccaaggaagagaagaaggaacggaaacaaagttattttgctcgatctccagcaccctgccggtggcact

SEQ ID NO: 338984 - DNA, 75 bp, Homo sapiens
ggaagctcaagtatatcaagcattcaaattgctcacagctgatcctaagggtcctatcggtggtgctaatagaga

SEQ ID NO: 338985 - DNA, 83 bp, Homo sapiens
catggcttggagcacttcctattccactggattgggaaagaccatggcagcacagactggccactcagctctcctagcccaat

SEQ ID NO: 338986 - DNA, 98 bp, Homo sapiens
cgaataccccaacccccacccatcgcccacccgaggacgtccccccagccggagtcgggcatcaagcgactgaatatgaagacaaggctggaagacct

SEQ ID NO: 338987 - DNA, 96 bp, Homo sapiens
gtctttctcagcaccttggcgaagccttgggtttctttcttaaaggactgatttttagaactccacatttgagggagttcctaggctcaaattaca

SEQ ID NO: 338988 - DNA, 74 bp, Homo sapiens
agaggaaagagaaagccaagatccactaccggaagaagaaacagctcatggtttgggtacccagaccccaccta

SEQ ID NO: 338989 - DNA, 100 bp, Homo sapiens
tgattctgctactggctactattatgaccccttggcaggaacttattatgaccccaatacccagtttgagccccagctacatagatctgactgagtgtcc

SEQ ID NO: 338990 - DNA, 87 bp, Homo sapiens
tgtccgtccgcagtaccgacgcctgcaggtggtttgtgatgaaaatggttccaagggctatggatttgtacactttgagacgcagga

SEQ ID NO: 338991 - DNA, 83 bp, Homo sapiens
caaacgtggagatcaactcctctctgttaatggagtggaactgtggctgcaccatctgtcttcatcttcccgccatctgatga

SEQ ID NO: 338992 - DNA, 75 bp, Homo sapiens
gctcggagcgcgacacggagactaggtggcagatgttcaactgcatcacggagctggtcctccgagcaaagaaag

SEQ ID NO: 338993 - DNA, 98 bp, Homo sapiens
ttgaaatgatccaaggagttgctgcttttccaggaatgaaagacattcaggatcaacttgaacgaatatttctggatgatgcacgccaactctttgtg

SEQ ID NO: 338994 - DNA, 82 bp, Homo sapiens
gcaaagagaaaggaagcaggcccgttggaagtggttgtgatggaatgtgggatggtaacttatcaacatattttgacatgaa

SEQ ID NO: 338995 - DNA, 100 bp, Homo sapiens
ggagccggagttcttgtacgacctgctgcagctccccaagggggtggagcccccagcggaggaggagctctcaaaagccaaaactggacaagccaaggca

SEQ ID NO: 338996 - DNA, 98 bp, Homo sapiens
acactggtattttccaataccaacaggctctagccaacatgcagttacaacagcatacagcatttctcccaccagatgcagccgctctctgctccctg

SEQ ID NO: 338997 - DNA, 90 bp, Homo sapiens
aggaaggacaccgattatggattggcaacctggaccccaaaattaccgagaagcaagatttccagatgtagcaaatgggtttattgagga

SEQ ID NO: 338998 - DNA, 100 bp, Homo sapiens
tcagtgctatggagtggtgcagaagggcctccctgtggagctcctgcgtggtgctgccgctgctggcgctgacctggatgtcggctgtgctcgccgtcac

SEQ ID NO: 338999 - DNA, 90 bp, Homo sapiens
tttaaaattttacataagaagttacctttttcagctgagatgagtgaactgagtgtggcacagaaaccagaaaaacttttggagcgctgc

SEQ ID NO: 339000 - DNA, 74 bp, Homo sapiens
ggtacaagaaacttccaggactttgactgtcaggtatatacctccggataagagggaagaaaatgaccagtcaa

SEQ ID NO: 339001 - DNA, 100 bp, Homo sapiens
gaattcaaatgactatggttatgggggacaaaaaagacctttagaagatggagatattccaaatgtcttggttggcactgcatttaatgttgatgatgga

SEQ ID NO: 339002 - DNA, 75 bp, Homo sapiens
ggagcacgggtcatcttttccccagaggcgtcggaatggacctgtgccacccagaaacttgaagggtcaaagtgc

SEQ ID NO: 339003 - DNA, 107 bp, Homo sapiens
caacgggaagggccggcccgcctccctggccggggcgcagttcggaggttcaggacgtggcccagtggaacatcgggagcctccggaccatcctggacatggtggag

SEQ ID NO: 339004 - DNA, 100 bp, Homo sapiens
ctgggactcatggactgcttgtgaagcaggaagacaggtgtccgcaatgttgccagtgtctgtctgcagattggctacccaactgttgcatcagtacccc

SEQ ID NO: 339005 - DNA, 136 bp, Homo sapiens
tgggctggaggaacagaagcggaacagccacagcagcctcccaaggagtctgcaagttggccatttcataattctgaatcatgtctgataacggagaactggaagataagcctccagcacctcctgtgcgaatgag

SEQ ID NO: 339006 - DNA, 98 bp, Homo sapiens
gggcagccagcacaatcgggcggaggtggcgctgccccttcagttctttccaaatggcaatgcatttgccactggctcagacgacgccacctgcaggc

SEQ ID NO: 339007 - DNA, 90 bp, Homo sapiens
cctcactgaccccagagtggcagaaaggctgatgcagcaggtgatgaaacttatcaggacatatttcgtgatttttcccaaatggcatcc

SEQ ID NO: 339008 - DNA, 74 bp, Homo sapiens
atgatcgagtgcgacgcctgcaaggactggttccacggcaggacttcacaacgggataaagtgaagtagcttcg

SEQ ID NO: 339009 - DNA, 101 bp, Homo sapiens
cgcccgagcggcctcgcctgagctccgggggtcgtcgccccgcagggaaaggccgagggggacggcaagatgcacatcaccctctgtgacttcatcgtgcc

SEQ ID NO: 339010 - DNA, 51 bp, Homo sapiens
cgtgtaactgtgaatctttcaaagaatttctagaatttggaatcgagtgca

SEQ ID NO: 339011 - DNA, 50 bp, Homo sapiens
gcggattagccttcgcggggcaaaatggacaagaaggactcctaccagcc

SEQ ID NO: 339012 - DNA, 100 bp, Homo sapiens
ctgcttttttcattgttccactggacgctcatcagagggaagatctttttcctcaattgagatcctgcagatcattcagctggacctagacctgaagttt

SEQ ID NO: 339013 - DNA, 82 bp, Homo sapiens
cataagccattttccgaatatacagtttcagtacaaaacggttcgattcatcaaaaagatgctgtaaatgatgatgattttg

SEQ ID NO: 339014 - DNA, 100 bp, Homo sapiens
cggaggaagagccgggcagtccctggagcgggccagataacgaaggaggcccaacttcattcaataaggagcctgacggatttatcccagacggtagaac

SEQ ID NO: 339015 - DNA, 75 bp, Homo sapiens
cgccatgtcgggttattcgagtgaccgagaccgcggccgggaccgaggggtgggctttgacagcgagaatcccgg

SEQ ID NO: 339016 - DNA, 87 bp, Homo sapiens
ttcctgtacagcctgcagaactggtggatccatgctgtgctcacttctcaggactgtatggcttttggggggaacttcctgcacaac

SEQ ID NO: 339017 - DNA, 101 bp, Homo sapiens
agaaggtgactgcaaaggatgcactgtcagctgtgttccagatcatctccctggtaatttaccccgtgaagtacacccagaccttcacccttcatgccaac

SEQ ID NO: 339018 - DNA, 90 bp, Homo sapiens
tggcttctttgagactgaaatggcagatcttgtcacaaatacagaagtatgataacttaataacacctgtagtagattcattgaaatacc

SEQ ID NO: 339019 - DNA, 51 bp, Homo sapiens
gaagagggaagacacgcggaaacagccggagcggttgcagggcacacatta

SEQ ID NO: 339020 - DNA, 83 bp, Homo sapiens
agccgactggagcaggcagcagcccaggtttttagaacttcagccataaaaatgggcagaattttccttgatcatatcggtgg

SEQ ID NO: 339021 - DNA, 74 bp, Homo sapiens
aaagactgaaaccggaccctgagccagatgacaagaatcaaggagtctgcactatggaaacaacctgtcaatcc

SEQ ID NO: 339022 - DNA, 88 bp, Homo sapiens
ccttgtcagtggaggtggagttcggattttcagctgaactctcatctctcaacactggcaaatattcataagatctaccacaccctta

SEQ ID NO: 339023 - DNA, 90 bp, Homo sapiens
aaatgtataatattctcatgtggattcatgataattacagggcttttttccagacttcaagctcccattccaacagtaagagcttcttcc

SEQ ID NO: 339024 - DNA, 51 bp, Homo sapiens
ttttctggaatgtcattatcagacacaatgatgtgtcttgctgaatcaggg

SEQ ID NO: 339025 - DNA, 100 bp, Homo sapiens
cgcgcacggagaggaggctacttgccagaggaatgtcgggtcctcacaattcaaaacaattgaagatgacttggtgtccgccctcgtccggtcaggctgt

SEQ ID NO: 339026 - DNA, 88 bp, Homo sapiens
tcgaggagatcaagaaggagaccggctatgaggacggggacttggttgccttttccagtgacgaggaattgacaatggccatgtccta

SEQ ID NO: 339027 - DNA, 75 bp, Homo sapiens
gcctagacctgaactcttcagataatcagagtggaggaagtacagccagcagtgcaggaccagatggagttgaag

SEQ ID NO: 339028 - DNA, 80 bp, Homo sapiens
ttgtctccccgatctacggggctgacatcagcggctctttgtatgatgacttacagaatgtctgaaggggacagtgtggg

SEQ ID NO: 339029 - DNA, 100 bp, Homo sapiens
ggaggcggaaggggaaagcctggagtcctggctcaagcctgagcccttgtgaagccggcaatgacaagtctgtatggtcgccatgccgagaaaaccactg

SEQ ID NO: 339030 - DNA, 100 bp, Homo sapiens
gtagaatcactcaatcggaaatatacccctgtttcttatatgtgagatggaagattttcgaggtatagcagaagaatcatttccaagctttctcaccaat

SEQ ID NO: 339031 - DNA, 82 bp, Homo sapiens
ccgaggggaccatgtccgggaggcgcttccacctctccaccaccgaccgcgtcatcaaaggctggagtgcaatggtatgatc

SEQ ID NO: 339032 - DNA, 75 bp, Homo sapiens
cactgacattgcagagctgtgggctgtgttccacaagttcaaagcacgaaagtcaaagaagttgggaaagttaaa

SEQ ID NO: 339033 - DNA, 75 bp, Homo sapiens
gggcaagcctcaaatgaaccgcaggatttcgggacaaattgatggccaggagatcactgccaccgccgtgctggc

SEQ ID NO: 339034 - DNA, 83 bp, Homo sapiens
ccgataaaagtgaaggatgtaatagatcgtggcccttcaatttagaagagattaagcctgcctgctccgcttcagcggactct

SEQ ID NO: 339035 - DNA, 50 bp, Homo sapiens
gtcctacctgggtccaaggccgatgtgattagcctgaggcctgctcagtc

SEQ ID NO: 339036 - DNA, 75 bp, Homo sapiens
ccactctttccgccctaatggaggtctccagtttcgggatcatagacggtatttctatgtaaacgaacagtcggg

SEQ ID NO: 339037 - DNA, 75 bp, Homo sapiens
cctgcgtccgcgtcttggtacgcgccgcagcgcctgaggactaactgtggtcgccaggacccccccagagccaag

SEQ ID NO: 339038 - DNA, 100 bp, Homo sapiens
ctcatcaatgctgaggagcagacgagtggccaggcttctggggctgactcaactgctctcgtggcattatccttcagtggggctattggactgacttttc

SEQ ID NO: 339039 - DNA, 100 bp, Homo sapiens
ctttaggaaacacctctacctcctgcgaggcctcccgggctccgggaaaactacactggccagccttatgatctcctcattgcgtccccctctgcccact

SEQ ID NO: 339040 - DNA, 90 bp, Homo sapiens
cgaagacactgcgactccggagacagcccaaatatcctcggaagagcgctcccaggagaaacaacaaattccggaccccatctgagctcc

SEQ ID NO: 339041 - DNA, 97 bp, Homo sapiens
aaaatctttcagaagttgtcaacagtatagtttgggttcgccagttggaattgaagattcctaaccagcataatgctggagccgggagccaccaacc

SEQ ID NO: 339042 - DNA, 99 bp, Homo sapiens
ccgcaagcatgcccaccactgccacaaacgccgcaccaggtcttgtagcagcgcctcctcgtggtctcacgtgtgaaacatggctacagattggctggg

SEQ ID NO: 339043 - DNA, 90 bp, Homo sapiens
agacgccgggactccctggaaacctagaaatggaaacctgtccagtttaagtcgtcttggtctgagatataacagactgtcagcaatacc

SEQ ID NO: 339044 - DNA, 100 bp, Homo sapiens
ccacccttggtgatgagcctcggaaagtgctcctgcggctgtatggagcgattttgcagatgcccaaagagattacttggagcccctcgcgagtgtttcc

SEQ ID NO: 339045 - DNA, 95 bp, Homo sapiens
gtgtctgagaccatgcagtcagctacgggaattcagtactctgtaacacccagctaccagacagattacatcaatgccagtttcatggatggcta

SEQ ID NO: 339046 - DNA, 95 bp, Homo sapiens
cgcgtccgccgattcctcctccttggtcgccgcgtccttggctggcgtgcatcataggcgagtattagtggaatggctaagagatccatctcagg

SEQ ID NO: 339047 - DNA, 100 bp, Homo sapiens
gttagagtggacctacctgataaataccctttcaaatctccatctatagccttcacagttgttgatcacatagcatggtcatccactcacagcttaaaaa

SEQ ID NO: 339048 - DNA, 100 bp, Homo sapiens
agcggcatgtcaccatcactggctctccggtctccatcgccctggcccagtacctcatcactgcctggctccaggaggccagagctctactgaagcggcg

SEQ ID NO: 339049 - DNA, 83 bp, Homo sapiens
cggcatctttttgaaccaaattatgctgcaaataggctgaggggatctggcggtggagcgctaggatcagacgcccccgcgat

SEQ ID NO: 339050 - DNA, 83 bp, Homo sapiens
gtgggctgtgttccacaagttcaaagagcagaatcggagatcagaggaggctcatagagctgaacagttgcaggatgcggagg

SEQ ID NO: 339051 - DNA, 75 bp, Homo sapiens
ggctcctcaacacccctcgaagaggaagacttagagggcaaaacagaggaagaaatagaaatgatgaagttaatg

SEQ ID NO: 339052 - DNA, 100 bp, Homo sapiens
cagaagccgagcttcgggtaactctcacagtggaggccgccgccatgtctgcgcatctgcaatggatggtcgtgcggaactgctccagtttcctgatcaa

SEQ ID NO: 339053 - DNA, 75 bp, Homo sapiens
ttggatttgatggagccggaacaagcagtggacctgacatgttttgagatcaccattgaacacccacacacagat

SEQ ID NO: 339054 - DNA, 98 bp, Homo sapiens
aagacccaaactgtgtggggacggtgctggccagcagaccgcacacgctagatggccgaaacctggtcatcacggccctcaagtgccacaaatatgac

SEQ ID NO: 339055 - DNA, 74 bp, Homo sapiens
taccaggaggccaggggtgtcgccatggttaatcatgttatcagccctctgttggatatctactttcctgaagg

SEQ ID NO: 339056 - DNA, 75 bp, Homo sapiens
caaagattgcttgaagaaatccatgccatgaagcactttgatatgcctcatgatattgttgcatctgaagatggg

SEQ ID NO: 339057 - DNA, 82 bp, Homo sapiens
cctgggaggccagttaaatgtctctggttccatcataatgaatggatccaatatggcaaatacatcaccgagtgtaaaatcc

SEQ ID NO: 339058 - DNA, 100 bp, Homo sapiens
ccacatggatcattgaccctattgatggaacaactaactttgtacatagatggctttgaaatgtgctgatatttgtaacccatgtcggacgtgggaatta

SEQ ID NO: 339059 - DNA, 82 bp, Homo sapiens
ctgacaagagcatcaaccctctgggctggacagactgccgctgcccgtctccggtttcccccaggcatctaggaagacccag

SEQ ID NO: 339060 - DNA, 87 bp, Homo sapiens
cgccagaagggcaggccgcagagcaaggcccccgacagagaatcctttcctgtttgcattggaagccgtggttatctctgttggctc

SEQ ID NO: 339061 - DNA, 83 bp, Homo sapiens
cgcagtggtggccctggagcagtatgccagcaaggctcttggggtaggggaggtgctccatgtgaagacagagtccttggcac

SEQ ID NO: 339062 - DNA, 135 bp, Homo sapiens
gggtgcgaggtcgagtaccttccctgtcccatcgcaaacccaaagatccccgttcctggagattctgattgaggatgtacagttacccagcacgtgtacctcctcctcctcctattgctcgggctgtagtgccct

SEQ ID NO: 339063 - DNA, 96 bp, Homo sapiens
aagaatgcttgctcagtgagggtagctggtgcagaagccattttttaaacttaggtatttaagtactgaaagtctctgctggatgaaccgaatcct

SEQ ID NO: 339064 - DNA, 98 bp, Homo sapiens
tgaaaatcaacgacaacttgagcacagtcaccaggtgtcaagatgctgcaagtacataggactggactgggcaggctgggggtcagcctctccaaggg

SEQ ID NO: 339065 - DNA, 100 bp, Homo sapiens
ctcagcaacgccgtgcagctgcccatcgaccaggtactataagatctccgtggtgctcatgtgctttgtggtccccacgctggtgccctggtacatctgg

SEQ ID NO: 339066 - DNA, 83 bp, Homo sapiens
aagcctttaaatgcagcatctgcgatgtgaggaaaggcacctccaccagatatggctcgtggacagcagaaaattcagtctca

SEQ ID NO: 339067 - DNA, 98 bp, Homo sapiens
aattacgggaatgtgttctcactggggctattcacgaaaagcagcagctctagagttcttaaaccgctttgaagaagccaagcgaacctatgaggagg

SEQ ID NO: 339068 - DNA, 83 bp, Homo sapiens
acagaccccaactctgtccattctatccccagaagtagccctgaagagttgtctgctggttctcagcttgaagaagattctgc

SEQ ID NO: 339069 - DNA, 100 bp, Homo sapiens
cctgcatggctctggggaggaggaggaagaggaagaggaggatgacccacttggatgtctccccgttcaatgttgtggcctggcacgggaattatacacc

SEQ ID NO: 339070 - DNA, 100 bp, Homo sapiens
gtaaattatgagaaagaagaagaattcctcactaatgagctctccagaaaattgatgcaggcatggaggagtgacggcaggaactttctgtgctctgaca

SEQ ID NO: 339071 - DNA, 85 bp, Homo sapiens
cgggggttctgtagaaagtcttcgcagttctctcagtgggcagagctccatgacctttggaaggatgtcactttcaacttaaaaa

SEQ ID NO: 339072 - DNA, 75 bp, Homo sapiens
atgatgaacaaagtactgatgacagagatactggtgtaatggtaaaattatatccaaatatgactgcggtactgc

SEQ ID NO: 339073 - DNA, 101 bp, Homo sapiens
gaacaatagagctcgaccttatctctgtgaggaaaatagcagctgaatactatgacaacctccctcactacaattcctggataaaagtactgtatgatttt

SEQ ID NO: 339074 - DNA, 101 bp, Homo sapiens
tcgggatttacgtggagatcaagcgcagcgatgaatatgcttttaaggctattaaccagggtggccttacatcagtagctgtcagagggaaagactgtgca

SEQ ID NO: 339075 - DNA, 75 bp, Homo sapiens
tgataagctgagcagagccctgcgatactattatgacaagatgtgaatttcttcggagtaagaaatcctcagagg

SEQ ID NO: 339076 - DNA, 50 bp, Homo sapiens
tgaagacaaggccttccagtttggaagagtttgatttccatgtccgctgg

SEQ ID NO: 339077 - DNA, 75 bp, Homo sapiens
gtcgtatcctatatcatgcagagaaaagagatggaaacttacttgaagaaggcctgaggagcgatgcgacaggca

SEQ ID NO: 339078 - DNA, 50 bp, Homo sapiens
gaagaccttaagaagtttctaaaacgaatcagtgtcattcaaggacgtaa

SEQ ID NO: 339079 - DNA, 75 bp, Homo sapiens
gctagatcagcattctctaacttgttgctctatatgcaatcagtgctgtctactttgctggagtgatggtgcgac

SEQ ID NO: 339080 - DNA, 71 bp, Homo sapiens
acccggaaggcttcaaaggctgtcgcaaggaggaagaccatgctcgacagctgaccaaggccatgatgcga

SEQ ID NO: 339081 - DNA, 100 bp, Homo sapiens
ggcccacgccagacacgacgtctggcaggaacctcggcctcagagaaatcgagctatagcagattatcttcgttcaaatggctatgaagaggcatattca

SEQ ID NO: 339082 - DNA, 85 bp, Homo sapiens
ctggggccagggaaccctggtcaccgtctcctcagtgcctccggagccagcgtggtggccatagacaacaagatcgaacaggcca

SEQ ID NO: 339083 - DNA, 82 bp, Homo sapiens
ccaagcccctgtcccctacgtcctacatgaggatgagcaattcttaggttttggctcagatgaagaagtcagagtgcgaagt

SEQ ID NO: 339084 - DNA, 90 bp, Homo sapiens
acctgtctggagcaaggaaaagatccctggaatatgaagggacacagtacggtagtcaaacccccaggtgactctgacatcattagaagc

SEQ ID NO: 339085 - DNA, 100 bp, Homo sapiens
attagatcacaaacctcgagtcaccaacattttcccaaaacagaagtatttgtcaaagaaggtgtcacgtcttgaaattttaaatgtcctcagtgactct

SEQ ID NO: 339086 - DNA, 125 bp, Homo sapiens
cgcaaacgagtgaagcagctgagtgatgggcagcccccaccacccgcccaggccagccccagcagcaacagcagcacagctgcagaaccttggcctgaaaatgctacattatatcagcaattgaa

SEQ ID NO: 339087 - DNA, 97 bp, Homo sapiens
acagagagatggagagagacctagttaggacgtgagcctgcacttcgtgctctggggctgcctgcacgtgtaccagcgcatgatcgacaaggcggag

SEQ ID NO: 339088 - DNA, 90 bp, Homo sapiens
ggaagagagaccttagaaaggatcaggactggcggtatttgcaaccacgtggcttcacgagtccgccaaaccatcaggtgaataaacggg

SEQ ID NO: 339089 - DNA, 75 bp, Homo sapiens
tcgtcgacatgagtgatgtggaggaaaacaacttcgagggcagatattgcctaagtgtaatcttgaacatgggcg

SEQ ID NO: 339090 - DNA, 97 bp, Homo sapiens
tgttgaattagacccgtttcctatagatgagaaaccatacaagctgtggtacagcagggaagaactggaaactcagagaaagaaactgcccttccat

SEQ ID NO: 339091 - DNA, 97 bp, Homo sapiens
ctctgtgtcgctacaacctgcccgagagcgccccgagtgatcagcagctggactgtgccttggacctaatgaggcgcctgcctccccagcaaatcga

SEQ ID NO: 339092 - DNA, 98 bp, Homo sapiens
gtgagcgtcgaggaggcgcaggagactgaccgcaacggcaggctctgggtgaaccaggaggatgaggtggaggaggggcccagcgatgtgcagaacgg

SEQ ID NO: 339093 - DNA, 90 bp, Homo sapiens
ggatctctccttaacgcctttcaccattaagaggaaagcgatggaggagctgagcgctgatgaggtagacccagtgtaatcacaagcatc

SEQ ID NO: 339094 - DNA, 74 bp, Homo sapiens
gccgaggccccccgacggcggaggcgcccgcgggtcccctacagccaagcttgcctgggaccagtggcagggac

SEQ ID NO: 339095 - DNA, 100 bp, Homo sapiens
aagaagatgttcgatgtcaacaattacaaaggcaggataccgaagtgtataaagctacagtaaaagatgacctcaccaagtggcagaatgttctgaaggc

SEQ ID NO: 339096 - DNA, 98 bp, Homo sapiens
cgaagccccttcccaggtcctcaactttgaagagatcgactacaaggagatcgaggtggaagagattgaaaatcttcaagagcagcttagagacaagg

SEQ ID NO: 339097 - DNA, 110 bp, Homo sapiens
tcccagtaacagaattgatactaccagctctgccagttgggttgctggttctttcaggtttgttatccaggcataagaccaagaaattatcttcagaaaaggacattcat

SEQ ID NO: 339098 - DNA, 75 bp, Homo sapiens
ctcgccttggatgccttttccagtgactccattccactctttgaaggttcgagactataagaggcttacccccat

SEQ ID NO: 339099 - DNA, 96 bp, Homo sapiens
ctgagcagagccgccgaggatgataaacacccaggacagacctctgtgagtgaaagccttcagagggaagctgctaagaagcaggccatgaaacag

SEQ ID NO: 339100 - DNA, 100 bp, Homo sapiens
gagaacagaagatacagatctggcagaaaactgtgaaggaggctcatttgacaaagaaaaatgtcctgtttccccttatcctgattgcgtgatccagtgt

SEQ ID NO: 339101 - DNA, 50 bp, Homo sapiens
caaactcatggaaattgatcaggatgataatgaagataattcaaatgatg

SEQ ID NO: 339102 - DNA, 90 bp, Homo sapiens
ccctgatctccgttggctgcttggccatatttgtcactgtgatctccctcttggtgtacaaatgtcgaactctctcaggttcacccagac

SEQ ID NO: 339103 - DNA, 75 bp, Homo sapiens
tgtcgggggcggtgctgcccctctggagcgcgcttccgcaatataaaaagttgccagagtctgccctccgagacc

SEQ ID NO: 339104 - DNA, 75 bp, Homo sapiens
atccaacatcaaccgacagttggaggtatacacaagcggaggacagtcattttgtttactcattcagccctgttg

SEQ ID NO: 339105 - DNA, 100 bp, Homo sapiens
cgctttgatttacagcagctgcagactgggctggcttagatgaagatgaagatgcacatgtctgggaggataattgggatgatgacaatgtagaggatga

SEQ ID NO: 339106 - DNA, 82 bp, Homo sapiens
ttttggatcagcaaatgtcacaacaaccttggaagtagtaggtttggcagttctctaccagtggaccaatcttttcatcccc

SEQ ID NO: 339107 - DNA, 75 bp, Homo sapiens
ggctctgcggctggtccaggccttccagtacacagacgagcatggggaagctccatgtgcaagaagcttccggca

SEQ ID NO: 339108 - DNA, 75 bp, Homo sapiens
gccacatgcagctcagttctgcacaggtgattgcatactcggaacatcgttaccgtatctttggggaaaccatcg

SEQ ID NO: 339109 - DNA, 75 bp, Homo sapiens
agatgtcaaagacttagcttttaaattaaaaaggaagctattcaccattgagatatgatgatatgttagtggtac

SEQ ID NO: 339110 - DNA, 75 bp, Homo sapiens
aaagacaagaaggtttccaatcaggtgtggccgacgacgatgccctcgctgaggagcgcatgcggagaggccaga

SEQ ID NO: 339111 - DNA, 122 bp, Homo sapiens
cgtccgccccgcgagcacagagcctcgcctttgccgatccgccgcccgtccacacccgccgccagcacatgattaagtaccggtacatcccgttcacacatgggaagagaaggtacagaggc

SEQ ID NO: 339112 - DNA, 144 bp, Homo sapiens
gcactactggcccctgatccggttcttggtgcccctgggcatcaccaacatagccatcgacttcggggagcaggaaaagtacccagatgccgtgtacctctcggaggggccctcctcctgctccatggggatccgcagcgccag

SEQ ID NO: 339113 - DNA, 136 bp, Homo sapiens
cttgcggaaaggatgttggcggtccctgtgacctgtggagacacggccagatctgccctccagtttaatacaacatggaagccaccaaggcttacagaatgtgctttccagagctgtgacctgaactgtacctggg

SEQ ID NO: 339114 - DNA, 95 bp, Homo sapiens
atgcctgaaatgccagaggacatggagcagagattggtacaagcgcaattttgccatcaccttcttcatgggaaaagtggccctggaaaggattt

SEQ ID NO: 339115 - DNA, 75 bp, Homo sapiens
gcttgatcaggtggaacagattcagaaggagcaggattaccaaagggtctatgttaacaatgaatgggcaaccag

SEQ ID NO: 339116 - DNA, 100 bp, Homo sapiens
aaataaagctcctgggcaaggggacgtctgcagctgaggagttctgggaaatcgttcattcatttacagatgaacagaaaagactcttcttgcagtttac

SEQ ID NO: 339117 - DNA, 75 bp, Homo sapiens
ctgctccccagggctgcagcaagcaaggtggagccagagaccaccaccaggtatacagaagatgggtgtccacat

SEQ ID NO: 339118 - DNA, 75 bp, Homo sapiens
tgccctagcaccccgagaaccgtcagtttgagccagatgcaaaagctggcaggctgacagaggcggcctcaggac

SEQ ID NO: 339119 - DNA, 51 bp, Homo sapiens
ctccgtcgcctcaaacaggagctggtcccccggcagagggcagtagagatg

SEQ ID NO: 339120 - DNA, 100 bp, Homo sapiens
ccctcaacatctctcagagacgaaagatgatcacagtcgtgttaaactgcaaaatgctgagaatgattatattaatgccagtttagttgacatagaagag

SEQ ID NO: 339121 - DNA, 74 bp, Homo sapiens
ctcgcgtgagacagatcaagatcaagaccggcgtggtgaagcgacctttccaaagtgaaactgatgagatttga

SEQ ID NO: 339122 - DNA, 51 bp, Homo sapiens
aagcactgtggaagaagatggagggtgtggattttgacacttcatgacatg

SEQ ID NO: 339123 - DNA, 83 bp, Homo sapiens
ctgatgtgaaaaataccacgacaaaaccaccctagccataaaattttgagtagaaaaatccagaaatttgaaaatcagtatcg

SEQ ID NO: 339124 - DNA, 50 bp, Homo sapiens
aggaggcgaaatgtgcaaatgtttatggggagttctgggaaatcgttcat

SEQ ID NO: 339125 - DNA, 98 bp, Homo sapiens
gatcagatgtctaacgataaggagcggtttgccagtctctgctggatgaaccgaatcctaacagtccagccaatagccaggcagcacagctttatcag

SEQ ID NO: 339126 - DNA, 101 bp, Homo sapiens
caacggccaacttcggcaagatccagatcgggatttacgtggagatcaagcgcagcgatgaacatccagtcatggataaaaatgagctggttcagaaggcc

SEQ ID NO: 339127 - DNA, 90 bp, Homo sapiens
cactcctccaagaaccaacccccaaattggctgggacagctggtgcaactattatctcagccactggagcctctgcactgccactctgcc

SEQ ID NO: 339128 - DNA, 100 bp, Homo sapiens
gcaagatgccgctgccggttcaggtgtttaacttgcagcagtaccatcccactgatatcacgggcccgctcaacctctcagatccctcggtcagcaccgt

SEQ ID NO: 339129 - DNA, 83 bp, Homo sapiens
tacaatcaactgtagaagcctttgtagcagatggtctgtcttctgctgatcccaactctgattggaatgcaccagcagaagag

SEQ ID NO: 339130 - DNA, 100 bp, Homo sapiens
tcatcaccttcgtggtcgtctggtcctactacgcgtacgtggtggagctctgcgtgtatgcggtggtgctagaatttgttatattttccatgagactttt

SEQ ID NO: 339131 - DNA, 97 bp, Homo sapiens
gaatatatggctggacagctagctgcttatggctataaaattacagcaattctgtggtgttcttggtcacacatttatggagtttctgaagggcagt

SEQ ID NO: 339132 - DNA, 82 bp, Homo sapiens
tatcagttagagggtgacttagaaaatagcacagaagtgcctccaattcttcacagcaagtacagatgaagctcaggttccc

SEQ ID NO: 339133 - DNA, 100 bp, Homo sapiens
cggcttcctagtgagtcggcggctgatttagaaggaggttcaggctacggtgagccgaaggtgcgcacgaagaagcaggagctctcggaggcagagcagg

SEQ ID NO: 339134 - DNA, 98 bp, Homo sapiens
ttcctcctccaccgagtcgtgctctcgccccaacccgcgcgccagatacccagaaagcggtactctagaaatgaatgtcaaggatcttagaccacgag

SEQ ID NO: 339135 - DNA, 97 bp, Homo sapiens
tggaggaattcagtttcttgggggtaaaaagatggcctatcagaaggtccatgcagatcaaagagctccaggacactcacagtacttagacaatgat

SEQ ID NO: 339136 - DNA, 132 bp, Homo sapiens
agacctgagccgacactgggggcagtccgcgagccccgcactctctcgatgagtcggagaagtcccaacccagtgacttgattgtaaaaatttacagagcggaatcatatgctggtctccaagagtttaaag

SEQ ID NO: 339137 - DNA, 97 bp, Homo sapiens
gtgggacagacaaacaataacatgtagaaacatatcagctgttggagttcaaagaaggacgcagagccagccacacagccccacaggtcctctttag

SEQ ID NO: 339138 - DNA, 80 bp, Homo sapiens
ctgtcctactaccgcctcacacgcttcctctccagagtgatcaagtgtgacccggttctgggccggagaaggggcgacgt

SEQ ID NO: 339139 - DNA, 95 bp, Homo sapiens
accacaatggggaggacaacttcgcccgggacttcatggacatctccaagtttgcagagaaagacaatatagttcttggagaaggtggaatcaca

SEQ ID NO: 339140 - DNA, 74 bp, Homo sapiens
gctggcacagggccttctgctgcatttcctgcccagagctatcatggtgaacttacttcagattgtgcgggacc

SEQ ID NO: 339141 - DNA, 75 bp, Homo sapiens
gcaggtggtctgtgaagccacacagtgtccagatacgaggtctattgtgcaagtggagacattaggagaatttgg

SEQ ID NO: 339142 - DNA, 83 bp, Homo sapiens
gtgaccacttttggaccaaaggcctgtgtgctgcagaacccccagaccatcatggtgctttcttctgcgacctggtactcatc

SEQ ID NO: 339143 - DNA, 82 bp, Homo sapiens
tggagcgagagatggatgctcacccgaaggctgattactttgggggatatgagactttctactcggaatatcctgagtgttg

SEQ ID NO: 339144 - DNA, 100 bp, Homo sapiens
tggccccgcgctgcgcccgccctcgcctcacctggcgcagccctggactttgtctcacaagatgaaatgttgacgcccctggggagattggacaagtatg

SEQ ID NO: 339145 - DNA, 101 bp, Homo sapiens
tctagaagaaatgaaaaaacaggctgctgtccagtgtcttcgatctgcttctgatgaagagcagatgtctcaagtattagatgccatgtttgaaaaattgg

SEQ ID NO: 339146 - DNA, 75 bp, Homo sapiens
gcctcccaaagaagctgggattataggtgtgagccaccgagccctgccatcagctccatcaagtatgatggtgaa

SEQ ID NO: 339147 - DNA, 90 bp, Homo sapiens
taaacccgggacccacttcactccagtgcctccgacgcctcctgatgtgaagtacaacaagggcctgacctgctccagcatcactatcct

SEQ ID NO: 339148 - DNA, 73 bp, Homo sapiens
tgtcctctacagaaggaagcacaaaaagggacagtcgttgagccccatatgggggttggcaggcagcagagag

SEQ ID NO: 339149 - DNA, 100 bp, Homo sapiens
cgtttccacgactttctgggagactcgtcatcatcagatttgaaatatttaaagtggatacaaaactatttcagcaatgcagacaattaagtgtgttgtt

SEQ ID NO: 339150 - DNA, 105 bp, Homo sapiens
gttcagcttccaaagagatacagggcagaggaaaatgcaagaagactgatggagcaggcttgcaatattaaagagccggtgaaacctgaagaaggcagagatatg

SEQ ID NO: 339151 - DNA, 101 bp, Homo sapiens
tttgcaccctgcttggagacggacttgcttccggtctggctctgggagaggagtggacagcagctggttgagatacatccccatctggagacaggactgcc

SEQ ID NO: 339152 - DNA, 95 bp, Homo sapiens
ccgggtggcgcttctgcacgttcctgcaggcacggtggtgtcaaggcagggagaccagaggcatttcatccttcatgaagccattcaggattttg

SEQ ID NO: 339153 - DNA, 100 bp, Homo sapiens
atggcagccagtcagtggtggaggtggaaaaccatgaattccttgtaaaaccttcatttgatcctaatctcagtgaattaagagaaataatgaatgactt

SEQ ID NO: 339154 - DNA, 82 bp, Homo sapiens
aaagctgtgggcaagctgacgccggtccaatgaagcgtcaagtggcagtaaaatcaacccgaggctttgctcttaaatcaac

SEQ ID NO: 339155 - DNA, 82 bp, Homo sapiens
cccctgcgtcgccgggaccctcgcgcgcgaccgccgaatcgctcctgcagcagagagaccatggtgagagcaccagcaagct

SEQ ID NO: 339156 - DNA, 98 bp, Homo sapiens
ccgggctgagcttcctggagaagaggaagtgccgcagaatggaattcggcattgttcctacacagcttctcggcaacatctctatgttgataaaaata

SEQ ID NO: 339157 - DNA, 90 bp, Homo sapiens
gccggggcccccgtcgttgctgccgggattttggaggccggggccgcgctgagggcgcccagctgactgcttctcggaggagtgccgctc

SEQ ID NO: 339158 - DNA, 75 bp, Homo sapiens
gaagcacctgcacatccacactccgctgctcgacagtgtttgaaagatgtatggtgatcttgaaacctccagaca

SEQ ID NO: 339159 - DNA, 76 bp, Homo sapiens
gagccctgtttttgccaccacactccagcttggcgcgagcttcggcctcggctctgtaccatgaagaagggcccca

SEQ ID NO: 339160 - DNA, 71 bp, Homo sapiens
gagtcgaggtcctgcaggtggagctccggcagccgccctgaaactgctggagcgaacccgtgccaggcgag

SEQ ID NO: 339161 - DNA, 100 bp, Homo sapiens
gcatccagtgataacatcatggtccaggtctcagacttgatccgcagtggaaaacccatcaagcctgtcaaggatttgctaaagaagaaccaaatggaaa

SEQ ID NO: 339162 - DNA, 75 bp, Homo sapiens
agggggcggggcgtctacctgatcaacaatggctccccagaataatccagaagtcgattccatcatggcagaact

SEQ ID NO: 339163 - DNA, 75 bp, Homo sapiens
ctgaactggatcataaatgacagaactctttcatcaatctaccaacagcccttaccaacgagcttgactggcccc

SEQ ID NO: 339164 - DNA, 75 bp, Homo sapiens
gcagcgggagctgtccggaggccggcgtcgagtcaggactggtggagtcaacacagtcaatcaatagccaacctc

SEQ ID NO: 339165 - DNA, 74 bp, Homo sapiens
gagttcttacaacatggcagacattgacaagaccaaactcttacccaggatctactggagcagctgttggagcc

SEQ ID NO: 339166 - DNA, 82 bp, Homo sapiens
ctcgcgctgcactgtctctccgacgcaagactgtcccggcccgggccaccagcttgggctccccacggagggcagcaagtgg

SEQ ID NO: 339167 - DNA, 90 bp, Homo sapiens
tgaagttacagcaaaaaaatggtatacactcacgttaactattaaggttatcttgacgaatcagattacaacccatctgagtggagccct

SEQ ID NO: 339168 - DNA, 83 bp, Homo sapiens
ggggaactagggagcgtctccggctgcacagcgctcagacaatgcagatcttcgtgaagactctgactggtaagaccatcacc

SEQ ID NO: 339169 - DNA, 100 bp, Homo sapiens
gaacacatcgatctgggtatcaaatatgacccaagcattggtatctacggcctggacttctatgtgcatttttgaaacgttggggttgttggagtggttg

SEQ ID NO: 339170 - DNA, 106 bp, Homo sapiens
ccaagaactacatccgcgtcaagccccatccgtcagcccaaggccaaccccactgtcactctgttcccgccctcctctgaggagctccaagccaacaaggccacac

SEQ ID NO: 339171 - DNA, 97 bp, Homo sapiens
gtttctatgccacggtgatttaccaaaaaccacaggccttatgatgggaaatggagtaaaacaatggtgggatttgggcctgaggatgatcattttg

SEQ ID NO: 339172 - DNA, 98 bp, Homo sapiens
accgcagtatcatgctggccaagaagatcatcattaaggacggaggcacggctgaagccgacgtagcttctctgaacagacgcatccagctggttgag

SEQ ID NO: 339173 - DNA, 101 bp, Homo sapiens
catccatccagatgaacgtggccgaggtgagctggacccagaaagaatgggctcaggtattcagtacggagatgctgccttgagacagctgaggtcaccgc

SEQ ID NO: 339174 - DNA, 83 bp, Homo sapiens
ctacagcctactggtgactcggctgcagagaatggatcttggagaatgtctgaaagtccatgacctggctttaagagcggatt

SEQ ID NO: 339175 - DNA, 98 bp, Homo sapiens
atctcctccctcttctcccgactatttggcaagaagcagatgcgcattttgatgggcctccccatggccacccatggaccagtcggcattcacttcct

SEQ ID NO: 339176 - DNA, 82 bp, Homo sapiens
tgggctcggtattccccttcctgctagtcctggtggatctgcagtacgaaggctggctacagcaaacatcattcaagatgtc

SEQ ID NO: 339177 - DNA, 51 bp, Homo sapiens
ctctttctggcctggaggctatccagcgtgctggctgccagctgctgcgcc

SEQ ID NO: 339178 - DNA, 75 bp, Homo sapiens
ctcattctcctaatgttttccttcagcaaggacaaaggcacgtgtggttctcaaatataggcattctgatgggaa

SEQ ID NO: 339179 - DNA, 100 bp, Homo sapiens
acctggaagacagaggctggagatatggctcgtggacagcagaaaattcagtctcagcagaaaaatgccaaaaagcaagctggacaaaagaagaaacaag

SEQ ID NO: 339180 - DNA, 98 bp, Homo sapiens
ctggaggagctgcgctcggagaacgactatctcaaggttcttcctcaagttcttcctcaaatgcaaccagaactgcctgaagaatgcggggaatccca

SEQ ID NO: 339181 - DNA, 90 bp, Homo sapiens
gtctggcagatccagtcttgctcagctctcacaggagagggcgttcagaggctgaggggatctggcggtggagcgctaggatcagacgcc

SEQ ID NO: 339182 - DNA, 90 bp, Homo sapiens
ggagagccgggtaccggccgtggaagcggccaccgactactgtcagcagctgtgccagatgtcaccagcacctgcctagctgtcaaggag

SEQ ID NO: 339183 - DNA, 100 bp, Homo sapiens
cagagctccagcagccttgttagggcgtggcctgaggcttggataagtgggtcctattttgtaacggattatgatccaaccattgaagattcttacacaa

SEQ ID NO: 339184 - DNA, 73 bp, Homo sapiens
ccggcagagaattctggctccctgtaagggacagcatcgtggccgagctggaccgagagatgagcaggagcgt

SEQ ID NO: 339185 - DNA, 83 bp, Homo sapiens
tttgaagatggcaagaagtttgattcaagtggagacctttggcgacttggcctttggcgacatcttcctccacctgctcacgg

SEQ ID NO: 339186 - DNA, 75 bp, Homo sapiens
cgaggtggagagagcccagtgggaggtggagcgggcggagctgcagggattaaagcctgtggtttccacagaagc

SEQ ID NO: 339187 - DNA, 75 bp, Homo sapiens
gggcgtcttcccaggctgtcatataactcctgagaatagtggttcttaactctgctctgtgtgctccgggatgga

SEQ ID NO: 339188 - DNA, 74 bp, Homo sapiens
ttcgagccatcccagaaccacagccaagagcgccatgctgcactgcccctactggaacaccttctcgctgccgc

SEQ ID NO: 339189 - DNA, 51 bp, Homo sapiens
tgaaattgtccccgcagttttcaatcatggactttgaagaatatcctgaac

SEQ ID NO: 339190 - DNA, 74 bp, Homo sapiens
tgtagtatattttcagtgctgccgtatcgcgacagtacccaagtcgggacattagctgtcagcacgcagccctg

SEQ ID NO: 339191 - DNA, 74 bp, Homo sapiens
agttagttacttcctgtctagagttgtagcttccacctggagatctataaggacaggcagaaattctcagaaca

SEQ ID NO: 339192 - DNA, 100 bp, Homo sapiens
tggacacccagcggtctgacatcgcgacgctgctcaaaacctcgctccggaaaggggacacctggtttccctaggacttctgcatgcccatgccacacat

SEQ ID NO: 339193 - DNA, 83 bp, Homo sapiens
ctaatatttaagaaagaagatgttaactttcagggagcaaagagatggttcgagtgatgcggaagaagggcattgagcatcat

SEQ ID NO: 339194 - DNA, 90 bp, Homo sapiens
gccgcccctgccgcgcgcgccgcagcagcgccgccttccctgcgcagtcggtgtctccgcgtcgctggacacagtgcctgaggactttga

SEQ ID NO: 339195 - DNA, 82 bp, Homo sapiens
cctggatcccaatttccacgacccggagaccggagtgtactaatggtcacttgatgtgcgctggctgttttatccacctact

SEQ ID NO: 339196 - DNA, 105 bp, Homo sapiens
cagagacaacgtgtgtaccccaagtgcacatggctgaccacccctaaaagcacctggccccgctacagcaaaccaggccctcgggaccaaggatcacgtcatgac

SEQ ID NO: 339197 - DNA, 100 bp, Homo sapiens
agacgattccacttttcacagtctctaacattccctgtattgaacactgatatacaaggaatgaatagaagtcaagaaaaacagacctggtgggaaaaag

SEQ ID NO: 339198 - DNA, 87 bp, Homo sapiens
ggagcaagcggagctcccccaagagccggaaaggtttgtctacagattttgagcgttcgaagttgacccctgactaagtatactttg

SEQ ID NO: 339199 - DNA, 83 bp, Homo sapiens
ctgaagtcggtgtctgctgcgttcacggcaggattcggttagagaaagcatgggattatggcaaccacagaatctcagtagta

SEQ ID NO: 339200 - DNA, 90 bp, Homo sapiens
ggaagatttacagaagccgagacccacagctgttggagtccgtgcggctggagtaccgtgcggggctgaagaacatcgcaaatacactca

SEQ ID NO: 339201 - DNA, 74 bp, Homo sapiens
aaatctgaaaatgcccctggggagacacatgcacaagacaatgaagagcatgatctagaagaggatgagagtgg

SEQ ID NO: 339202 - DNA, 51 bp, Homo sapiens
cgagatttgaaagagctcagacatctgggctgacaggacaactggatcagt

SEQ ID NO: 339203 - DNA, 51 bp, Homo sapiens
aagacccaggagaagccgcccaaagaactgcatgccaatgaagatgtggaa

SEQ ID NO: 339204 - DNA, 98 bp, Homo sapiens
ggcgatccgctggcgctagtctgaccctccgccaggcaaaaggaagccattcgttcctggttaactcggaaacacatccagaggctgcatgcagctgc

SEQ ID NO: 339205 - DNA, 83 bp, Homo sapiens
cccagagccccgcggcccggcctcggggcagccatggactcgcaggaattgaagtccttgctggtgcagacgaagcggcgggc

SEQ ID NO: 339206 - DNA, 75 bp, Homo sapiens
gttccttcattttcctgtatattctctgtactatgtcgattcgacaggttttgacaacaattcgttcagggcacc

SEQ ID NO: 339207 - DNA, 100 bp, Homo sapiens
gccgaaggaggggcaaagctcaagatggcggacaaaacgccaggcggatctcagaaggccagttcaaagggtctctatggcagtgtaatagtggcaggag

SEQ ID NO: 339208 - DNA, 71 bp, Homo sapiens
gtcttcagcacccacccaccgtggtacaggacacagcattgttggttttgccatgtactattttacctatg

SEQ ID NO: 339209 - DNA, 73 bp, Homo sapiens
gagaagcaagaaggccctggacacagcaatatctctgggctttcacaggagttgatccctgaattttattatc

SEQ ID NO: 339210 - DNA, 95 bp, Homo sapiens
aagcccataccactatttgttgagaaatgtgtggaatttattgaagatacagaagagacgctcaaaccgccaagttaagcgaaaaaaatatacag

SEQ ID NO: 339211 - DNA, 75 bp, Homo sapiens
ctcccaacatgcgctggatcatccaggtgccccggatttagtggcccacaaactctttaacaacttgaaataaat

SEQ ID NO: 339212 - DNA, 100 bp, Homo sapiens
ctttggatcagcatgcaggactatgctgttagtaaagcaagtgcccagcaggtacctgtgatgggtgtacgttctatttcctgtgggagagtgctgaagc

SEQ ID NO: 339213 - DNA, 90 bp, Homo sapiens
gcgcgaatatcgtcatcgttagaaggtttggaaagcagagtggagaacaaagagttgattccaatgcaacaaattttagaagaagcggag

SEQ ID NO: 339214 - DNA, 82 bp, Homo sapiens
agtgagacttgttaaacttgaaaggcaccagtctgctgagtggcggtcgtgaatctgtacttgtagagtggcgcgatgcaac

SEQ ID NO: 339215 - DNA, 101 bp, Homo sapiens
tgtaaagtgaccaattcccttggtcaaagaagtgaccaaaaagtcatctacatttcagggaagcagctcgagagtgtcgtagaaagaagaaagaatatgtg

SEQ ID NO: 339216 - DNA, 80 bp, Homo sapiens
actctccgggaggggcgcttcccgacgccaaggtgctggagaatctggtaaaagcaccattgtgaagcagatgaggatcc

SEQ ID NO: 339217 - DNA, 75 bp, Homo sapiens
accatttgtctttagtcttggcaaagcatctcagttataagaaatgcacatctccgctcaaggtcccctgggaca

SEQ ID NO: 339218 - DNA, 100 bp, Homo sapiens
tctaggacactaaacctcatgatggactagaggcttttaccagatttcttaaaactgaattcagtgaagaaaatattgaattttggatagcctgtgaaga

SEQ ID NO: 339219 - DNA, 75 bp, Homo sapiens
ccagcgcagcgctgccatggagcccagcagcaaggagttaacagagcagtttcataaagttgaatctcaactgaa

SEQ ID NO: 339220 - DNA, 74 bp, Homo sapiens
aaaggggaggttacgcagcaaaccatccagaaggtgaatgaaaactttgccattgatttgatagcagagcagcc

SEQ ID NO: 339221 - DNA, 100 bp, Homo sapiens
cggcttttgagcaggagtccgggccctcgtgtcaccgctctgaagtcaaggagccctgggcgctgcctatggcacagccaagagcggtaccggcattgcg

SEQ ID NO: 339222 - DNA, 50 bp, Homo sapiens
gtccgacagccaggcccgggagaagtttctgagtcccttcaacatgatcc

SEQ ID NO: 339223 - DNA, 98 bp, Homo sapiens
ggcagcttctgggcctgcccgagctgctgggaaagatccagaactcaacagagaccccatctgcgtatgacctgcttattctgaccacaatcccaggc

SEQ ID NO: 339224 - DNA, 51 bp, Homo sapiens
aagacactctggacaccactatggacagatgacaaatcctgccatacagaa

SEQ ID NO: 339225 - DNA, 98 bp, Homo sapiens
agaaacaaaatgtcaacaaattgatggattctccggtgaagactcccatcaaggtgaaggtgatcgagaaggacatctctgtccaggccatcgcctgc

SEQ ID NO: 339226 - DNA, 98 bp, Homo sapiens
ccatgttttactatcctcagaaaattcccaataaaccagagtttgaggacagcttaacagagcgttccaaaaagaggactctccagctactttttatt

SEQ ID NO: 339227 - DNA, 100 bp, Homo sapiens
tgaaggatataatggaacaatatttgcatatggacaaacatcctctgggaagacacacacaatggaggatgatgactttgagttcactggcagccacctg

SEQ ID NO: 339228 - DNA, 50 bp, Homo sapiens
gtctcgtccacgacctccctaggtaaagtcagtgataaatcttttgtttg

SEQ ID NO: 339229 - DNA, 74 bp, Homo sapiens
cggtgatgagccgggcctggcggacgcggcgccatcgcagtcagaacactctgctccagccaaggtggtgaggg

SEQ ID NO: 339230 - DNA, 100 bp, Homo sapiens
cgtaaggctaggccgcgagcttagtcctgggagccgcctccgtcgccgccgtcagagccgccctatcaggtactccaaagattcaggtttactcacgtca

SEQ ID NO: 339231 - DNA, 89 bp, Homo sapiens
aaaatgaaaaaaaatgtacccttgaccaagctttcagaggtattctagaagaagaaattgagtacaagcgcaagctagccagagtttcc

SEQ ID NO: 339232 - DNA, 74 bp, Homo sapiens
ccctccctctcaaccacaataacaggcggagggtcggcgtaggtcagcccaaggccaaccccactgtcactctg

SEQ ID NO: 339233 - DNA, 74 bp, Homo sapiens
ctgctttggacgaagccctgcatggtggtgtggcttgtggatccctcacagagctgccactgcagagccccgcc

SEQ ID NO: 339234 - DNA, 51 bp, Homo sapiens
atgtgcccaacatcatcattgcgagtgggaagctttggggtggccggtttg

SEQ ID NO: 339235 - DNA, 100 bp, Homo sapiens
gcgctggccggatggaaatcctaatgacagtctccaaattcgcctccatctgtaccatgtgttccaagatgtacatgttatgatatttgttgggtttggc

SEQ ID NO: 339236 - DNA, 80 bp, Homo sapiens
cagccccaagacagagcgctactcctggcagtgcgtcaatcagagcgtcctgtgcgatcatggaagggaagtggttgctg

SEQ ID NO: 339237 - DNA, 100 bp, Homo sapiens
gaaaaacaatcgcttcaatgatgggaaggtggatcccgccgggaggtactttgctgtttctgtagaaaatgtttcctgactgcaatgagggaaagcggag

SEQ ID NO: 339238 - DNA, 51 bp, Homo sapiens
ggatcctgtacccagaatgccgtttgaggttatggaggttttgatgactat

SEQ ID NO: 339239 - DNA, 101 bp, Homo sapiens
aagcctcctacaagagtcctaccaaaattatgcaatgccaaccaaaaccatagaagtgttgcagttgcaggaccaaggcagcaaaatgctcctggactcag

SEQ ID NO: 339240 - DNA, 80 bp, Homo sapiens
actgcatcctgctcctcttctacttggcctacatccatgaagacaggccataggaaaaggatacagagtagagtttcatg

SEQ ID NO: 339241 - DNA, 83 bp, Homo sapiens
gctgacggtcctgtctctcgagttggaggcatcttgacttagttgctgggagcctggcattcagatttgggagaagtagcccc

SEQ ID NO: 339242 - DNA, 100 bp, Homo sapiens
agaagctgcacctgcactttgagaggctgttgctgcatgacaaggacaggttaatgactgaagggctctggaaaggggataagaggccggcttccttccc

SEQ ID NO: 339243 - DNA, 85 bp, Homo sapiens
gatctctctcatctcgctcggctgcgggaaatcgggctgaagcgactgagtccgcgatggagtgagtccatgacagaagaaaccc

SEQ ID NO: 339244 - DNA, 99 bp, Homo sapiens
agacaacagatgaattgtgaaagagagcagctaaggatatatggcagtgtatgggagaaattacatcgagcctttgccatttggagtggctttggtatg

SEQ ID NO: 339245 - DNA, 74 bp, Homo sapiens
tcggatttcaccacaagaagggctgccagtctgctttacaagaacttgaagaattgaaacaaattgttcccaaa

SEQ ID NO: 339246 - DNA, 100 bp, Homo sapiens
tcccctgatgccaatgtctcctctaatgcacccaagagtcaaggaagttcgaactgacagtgggagtcttcgaagaggatgaaattgattctgcagtaaa

SEQ ID NO: 339247 - DNA, 96 bp, Homo sapiens
cggtgtgccgtgggtccgcgctgcttccacccaacttcctgttaggtttggtgcacctcgatttggaggaagtagggcagggcccttatctggaaa

SEQ ID NO: 339248 - DNA, 100 bp, Homo sapiens
gtcctggttccactgcttactcgattggtgtctccgctgtgcctggctccgtatttccggttactgagactttgtgtggagagacagcataacggaaact

SEQ ID NO: 339249 - DNA, 90 bp, Homo sapiens
agattccctgaactggagtccttggtccccaatgcactggattacatccgcacggtcaaggtgaccaaggtggaggaaccctccaagtac

SEQ ID NO: 339250 - DNA, 50 bp, Homo sapiens
atcgcatttttagtaccagaagtactagacaaggtcttactgtgttgccc

SEQ ID NO: 339251 - DNA, 100 bp, Homo sapiens
gcggcggtagatttgaagcgcttcaaaggaccggacccagagaagaggaaaactctaccggtgcaggacacttggtggggttcccacacaagctcctcca

SEQ ID NO: 339252 - DNA, 73 bp, Homo sapiens
taatgtgaggcgacaagcaacaacaatcatagctgctgaatttcaatatgctgaaaccgtatttcgagataag

SEQ ID NO: 339253 - DNA, 100 bp, Homo sapiens
gctcccggggcgggccgggcgggccgcgggagccgcacgcggcgatatggaagaggagggcaagaagggcaagaagggttttggccaaattgggcgaggg

SEQ ID NO: 339254 - DNA, 90 bp, Homo sapiens
agcgtggggttgtggtcctggccaagagctacaatgagcagcgcatcagacagaacgtgcagggaaaatggagctgatagtatcctggat

SEQ ID NO: 339255 - DNA, 96 bp, Homo sapiens
gattgaaccagacactgatgctcctcaagaaatgggagatgaaaatgcggagggtctgttcctggtttcccagatgcataaaggaagacatatccc

SEQ ID NO: 339256 - DNA, 100 bp, Homo sapiens
atctattcgactttttcagagactgggacttggagcagcagtgagcagaaggagaaacgtgtgtggagtttaaagccatgttgattgcagtgggcatcca

SEQ ID NO: 339257 - DNA, 75 bp, Homo sapiens
cttattacgccgtctccaagatgtagctaatgaccgtggttcccactgaggggcactatgaacgaagaggagcag

SEQ ID NO: 339258 - DNA, 121 bp, Homo sapiens
atgagatgcaagcacacatattccatctggagactctgtccacctccacagaagccaggaggattcttacagaaaacaagtggttatagatggtgaaacctgtttgttggacatactggat

SEQ ID NO: 339259 - DNA, 100 bp, Homo sapiens
catgaacagaagtattgcattaactcaggcgcgctacttggagaaagaagagaagtgtctccctcctcccagtagagacggggtttcaccgtgttagcca

SEQ ID NO: 339260 - DNA, 75 bp, Homo sapiens
gaggcgagctagccgggagttacaccgccaccgccaggtattcagcatgtttttggagactctagtggatttcat

SEQ ID NO: 339261 - DNA, 90 bp, Homo sapiens
aaagattgtaccagttgagataaccatcagtttattaaagagggaaaatgtttcaacgtgcgcaagagttgcggtggcgggcagaggact

SEQ ID NO: 339262 - DNA, 99 bp, Homo sapiens
aatggagaaagatcacagcagtgttccaagttctaaagagatgactccggaattgatgataaaagcctgtagcttttatactggacatttagtaaagac

SEQ ID NO: 339263 - DNA, 50 bp, Homo sapiens
tttctaagcaggaactccccaggacacattcagctaacgtattttagcag

SEQ ID NO: 339264 - DNA, 101 bp, Homo sapiens
cccagacaagatggacaccgcggaggaagattaccagagactgatgactgtggcggagacgattacagctctcatgtttcctttccagtggcagcatgtct

SEQ ID NO: 339265 - DNA, 97 bp, Homo sapiens
acctctttctgggtgactatgtggacagaggctatttcagtatagagcgatctataactacaatgcttctcaagatgtggagctctccttgcagatc

SEQ ID NO: 339266 - DNA, 100 bp, Homo sapiens
atcttcaactgtacaagaagctttacacaatttccttaagaggcggatttccctgactgaagaccatgttgcaggcccacagctgcctacagaaccgtcc

SEQ ID NO: 339267 - DNA, 82 bp, Homo sapiens
gactactggggccagggaaccctggtcaccgtctcctcaggaaaacgaagccccctcctgtattgacagctgggaattgtgg

SEQ ID NO: 339268 - DNA, 101 bp, Homo sapiens
tccgcgcccccactcgcgctgcgatgacgcgctcactgttcaagggaaacttttggattacaacagcagtgaattgaaaacagcctgcaggaagcatgagc

SEQ ID NO: 339269 - DNA, 75 bp, Homo sapiens
tgtgagtggaagccatgaggccaaaggcagttgtattgcccctgaagaagatggccgaccggatcaggaagtatc

SEQ ID NO: 339270 - DNA, 98 bp, Homo sapiens
ggcgcagtctgcagcatggcgtacccggggcatcctggcgccggcggcgggtactacccaggcggggctactgggaacgttatttggaaacattcctg

SEQ ID NO: 339271 - DNA, 101 bp, Homo sapiens
cagcagcagaactggccagctgtgcagacctggggaccctctgtcaaggtttcatcgtccataacgaagagtgagactatttggaaacagagactgatcat

SEQ ID NO: 339272 - DNA, 100 bp, Homo sapiens
aggctctctccgctcgattttgtcaccgttatgtgggaagcgaatccagttctctcaagtagtgctgccagtagtaccatcacagcactgtcacctggag

SEQ ID NO: 339273 - DNA, 83 bp, Homo sapiens
ctttgccgtgacaacaccgttcccccagccgggctgaccatgtctgcaaaggagaagtcgaagtttgaagatatggcaaaaag

SEQ ID NO: 339274 - DNA, 74 bp, Homo sapiens
cgcaggcgcagacccacccgccatgaagccccccgcagggagtggagcttggtttcgggatctcggtgctgcag

SEQ ID NO: 339275 - DNA, 50 bp, Homo sapiens
gtggtcatgtcaacagtagcacaaggagaaggaagccaacatccttttgg

SEQ ID NO: 339276 - DNA, 100 bp, Homo sapiens
aggaggccgactacatcgagtggctgaagggacagaaagagattcggaacccagattccctgaaggaactgaaaccagccctgagcaaaggggttctgag

SEQ ID NO: 339277 - DNA, 135 bp, Homo sapiens
cccggccggagctgggtctggagacgccgtggcagcctgaacggagtgtgcgacggattgggaggttcctggtagagttacacagttgtgccgccagtatagcgacatgcctcctttgacgttagagggcatcca

SEQ ID NO: 339278 - DNA, 114 bp, Homo sapiens
aacttggtggccagcgccgcgcccggggccgtgcgctctcgggccactcggccgcaggagtctaccatggctcaagaatctcccaaaaattcagcagcagaaattccagtgact

SEQ ID NO: 339279 - DNA, 101 bp, Homo sapiens
cgtggagccaggcctgcagaggctgttctacaggggcaaacagctgatccaccttgagatcaagccggccatccggaaccagatcatccgcgagctgcagg

SEQ ID NO: 339280 - DNA, 100 bp, Homo sapiens
gccgtgtcaccttggaagtccagcgcagtgcccactaaacacgccaagatggtcatcatgggccagtgctactacaacgagaccatcggcttcttctata

SEQ ID NO: 339281 - DNA, 74 bp, Homo sapiens
aatgtcatcaatactcacaccaaagtgttagccaaggacagtggccttagagctattgagaatttgatgcaaaa

SEQ ID NO: 339282 - DNA, 101 bp, Homo sapiens
agatgtccggctgcagcagcaagtcccatcggaggacctccctgccctgtataccgagggaacaggtgagcgagtgctgtgctttcatgggcctcttcttt

SEQ ID NO: 339283 - DNA, 90 bp, Homo sapiens
aaggcatttccagcccgcccacccagtgtctttacatccaaaatgcaaagcagacaaatgggcatatcagggaagaacatgacaaaaagc

SEQ ID NO: 339284 - DNA, 74 bp, Homo sapiens
aggaatattggacctcaatacctataacgtcggcataatcaccagcaacacccgggacaataatacgggggcca

SEQ ID NO: 339285 - DNA, 96 bp, Homo sapiens
ggagggagtcttgcttggcgaccatctggacaatatctcgcccatggcaagctggatccctgtggattactttgcccaggtgtggcctcactcaca

SEQ ID NO: 339286 - DNA, 101 bp, Homo sapiens
gcaaatgcaaatcatggataactccatgtccagaagaaaagaagaaaaagtcagcactttttgaagtgtctgaggttataccagtcatgacaaataattat

SEQ ID NO: 339287 - DNA, 100 bp, Homo sapiens
aaagaaaacacctggagatcctgcgtttggtggtggtggtacaagctgcactccaagccaggcaagaaggagaaggaacgcggcgagattgaagtcacca

SEQ ID NO: 339288 - DNA, 98 bp, Homo sapiens
ttgccaattgaaacatccttctatcttggagtctcctacggtagtgtgcagcttatgcaaacgagagggtcatctaaagaaggactgtcctgaagact

SEQ ID NO: 339289 - DNA, 100 bp, Homo sapiens
cttactagatccaggcagttcctatctgctacagcacaacattctgaaattttttggttattgtaatgatgttgatcgggagttgagaaaatgcctgaag

SEQ ID NO: 339290 - DNA, 96 bp, Homo sapiens
ctcagaggcagacgatgaaactcagctgacattctacacggagcagtaccgcagtcgccgccgcagcaaaggtgtgaaatccagacaattgaagat

SEQ ID NO: 339291 - DNA, 82 bp, Homo sapiens
cgcctgcagacccggaagtggatggcgtggagatatggcgcaactgcggcgcgtatctctcctaaatgtgtgatcaaggaat

SEQ ID NO: 339292 - DNA, 76 bp, Homo sapiens
ctttccatcagtctcaacatagaaaggtaaactgtagctcaccagcagatatggatggaatccagaaagggctgga

SEQ ID NO: 339293 - DNA, 50 bp, Homo sapiens
gggcgccaggaccggccgaacgcagaggggacggcaaaacagaacagaaa

SEQ ID NO: 339294 - DNA, 100 bp, Homo sapiens
ggaagtcctgcagcgggatccaaactcccctctgtactcggtgaagtcttttgaagagcttcggctctttcttggactccgtactgttggtgtaaccaag

SEQ ID NO: 339295 - DNA, 98 bp, Homo sapiens
tagagttgttcagaatcctccaaaaccagtcatgaccactagacccacagctgttaaagcaacagagattatgcatgatgtgataaagaaggtcaaga

SEQ ID NO: 339296 - DNA, 100 bp, Homo sapiens
atgaggctcagggatgcctgtaccatgatgtgatgctggagaccttgacacttatatcctccctggactagacgcttgaagcaaagctgccatcccagaa

SEQ ID NO: 339297 - DNA, 73 bp, Homo sapiens
tttgagtccgcatcgccacagctgaaggctgcgagggactaagagcagagtgttacacataatattgcattac

SEQ ID NO: 339298 - DNA, 80 bp, Homo sapiens
cagaactgccccatcgatgtgcggcgcccgctgtataaggtctggtgagctgtaccttctttctggcagtgaatggtctg

SEQ ID NO: 339299 - DNA, 150 bp, Homo sapiens
tgaaattagacctaatcacagtggaagcttttaagcctatactttctaccagaagcttgaagggtttggttaaggtacctgaaagaattccgcacagagcagtgcccactctttgtgcaacacaaatgcacgcagcatcggccctacacc

SEQ ID NO: 339300 - DNA, 82 bp, Homo sapiens
cagcgcccgtgtcaccgccacgtcgcggacatggtatggggaggatgtcaggcaggaccagcagcagctcctggaggggatc

SEQ ID NO: 339301 - DNA, 83 bp, Homo sapiens
cgggctgaagcgactgagtccgcgatggaggttcacgcctacatcatcagctccctcaagaaagagatgcccaatgtctttgg

SEQ ID NO: 339302 - DNA, 122 bp, Homo sapiens
ctgatggagctggtgtggggcaccaagagcagccccggtctctcggacaccattttctgccgctggacgcaagttaccttatcccatatcacacaactggtcctcagccataacaagctaac

SEQ ID NO: 339303 - DNA, 75 bp, Homo sapiens
gaaatggcacctatggacaagtctataagagctcttcagaaaccaggctgctttcaggaacattgctgtggattc

SEQ ID NO: 339304 - DNA, 89 bp, Homo sapiens
cgggcctgcaccatgagcgtcccggccttcatcgacatcagtgaagaagatcagctgggatctagcaattgggaggcagcagacttggg

SEQ ID NO: 339305 - DNA, 46 bp, Homo sapiens
gaaggtgacaacttagagacggttctgatgactgtcttgtgaaaat

SEQ ID NO: 339306 - DNA, 82 bp, Homo sapiens
tcgactgctagagccgagcgaagctgtggacgaatgtggaacctcgctctgtggctgtgttcccttggcactccttagtccc

SEQ ID NO: 339307 - DNA, 106 bp, Homo sapiens
attcagatgggatctttccggatcaatccagatggcagccagtcagtggtggagcacttggctgctgttgaggaaaggaagatcaaatctttggtggccctgctgg

SEQ ID NO: 339308 - DNA, 50 bp, Homo sapiens
cctcccaaagtgttaggattacaggtgctgcgggaacccctggagccggc

SEQ ID NO: 339309 - DNA, 101 bp, Homo sapiens
ctgggccttttgggcagcttttccggcctgacaacttcatctttggatgtccttggtgaggattttgaaaatttgatcttcacaagagttgcctggatcat

SEQ ID NO: 339310 - DNA, 83 bp, Homo sapiens
atccgacttgccggcagaacttacgctgcgggaccccgggcactgttgctgctgcgggagatccagcaggccatccatggcaa

SEQ ID NO: 339311 - DNA, 75 bp, Homo sapiens
gaatttgcctcttctacagatagagctgttaagggctaagttctaaaaacatcagttcatctccaagcgttgaga

SEQ ID NO: 339312 - DNA, 100 bp, Homo sapiens
agatgtgtcctatgaataccgcttcctggagttcacgactctgagtgctgaacttcctccgttgccaaaataacaagaccaactacaatttggtatgtga

SEQ ID NO: 339313 - DNA, 50 bp, Homo sapiens
cggcggccaataccggacggtgcacactgctcaaagtgtggatctatccc

SEQ ID NO: 339314 - DNA, 100 bp, Homo sapiens
gccggagcggcacctacgtcctgatcgacatggttctcaacaagatggccaaaggcttctccagggaaagtgaccgaggcagtgaaagaggccattgacg

SEQ ID NO: 339315 - DNA, 100 bp, Homo sapiens
gacatctgggggccacaaatgctccttctcctggagacgcaactcaagcttcgggcagtacatgaacaactggctgctctgtcccagggtccaatatcca

SEQ ID NO: 339316 - DNA, 74 bp, Homo sapiens
ctgcttatggcggcgctggagagggggcgctgagctgttggggggccctcctcgccaaagacagcctagagagg

SEQ ID NO: 339317 - DNA, 97 bp, Homo sapiens
atgaaggccgtggtgcagcgcgtcacccgggccagcgtcacaggcagaggtggaggagacactgaagcgactgcagagccagaagggagtgcaggga

SEQ ID NO: 339318 - DNA, 100 bp, Homo sapiens
cgcgcgagctggagcactcgcgtgtgtgggaatgccctcatgaagcaataccaggttcagttctggaagatgctaattctcatcaaagaggactactttc

SEQ ID NO: 339319 - DNA, 82 bp, Homo sapiens
ggaagtgaattcacaactatatagcaagcttacagtaagaggatttgtacacacagatatgacgaaagacttgaaagaagaa

SEQ ID NO: 339320 - DNA, 100 bp, Homo sapiens
tcctctcaccaaaaacaggagtattaaatgaaaacacagtttctgcaggaaaagatctctctacttctcctaaggatattcattaccttgcactagataa

SEQ ID NO: 339321 - DNA, 155 bp, Homo sapiens
aacggatcaccaaattgatgtgtctgacgtcatcaggcttgttcaagacacaccggaggcgacggccatggccacaggtactccaaagattcaggtttactcacgtcatccagcagagaatggaaagtcaaatttcctgaattgctatgtgtctg

SEQ ID NO: 339322 - DNA, 98 bp, Homo sapiens
gaaagagtattttagtacctttggagaagttcttatggtgcagctcagtcaaaggccaactgtcgctgaactccttgccaggaagattctgaggttta

SEQ ID NO: 339323 - DNA, 100 bp, Homo sapiens
ggccacctgagtggcgcggcggtgtcagggccggtgcataaacttctcccgagttccatctcagtaaaagggaagcaggaagaccaagaaggtacgaaga

SEQ ID NO: 339324 - DNA, 75 bp, Homo sapiens
gccgccgccgcctcggccgaccagggacctgcccgcctgcggctgctccggctcttgaatgtcgtctctcaacta

SEQ ID NO: 339325 - DNA, 75 bp, Homo sapiens
cctgctggtcagcactgcggctggagaataaaggcagccccgttgatgactgaaaatgacaaagcatccacctaa

SEQ ID NO: 339326 - DNA, 98 bp, Homo sapiens
gctgctgctgccgctgctcgccgccgtggaaggcttctcacggcattcagcagcagcgttgctgtaaccgacaaagacaccttcgaattaagcacatt

SEQ ID NO: 339327 - DNA, 80 bp, Homo sapiens
gggacttcagcctgagcgccagcctgtcggcctgtacgctgctctacgagacaatgcagatcttcgtgaagactctgact

SEQ ID NO: 339328 - DNA, 80 bp, Homo sapiens
ttgaactagatcgagctgatagagaccctagtaacatgcactgttgcaagaattcaattccgtcttcctgatggttcttc

SEQ ID NO: 339329 - DNA, 83 bp, Homo sapiens
cagaaagtctgttcctttttgtagtaaaatgaatctttcaaagatcatctcctgtacacatcatagccactagcaaaagttta

SEQ ID NO: 339330 - DNA, 100 bp, Homo sapiens
ttaaaattctgcaagactacaatttgcaattggttgaatctggcgatgtggaacccatggatatggagggctgactatatacaccatgttttttcctggc

SEQ ID NO: 339331 - DNA, 148 bp, Homo sapiens
tccggctgctcttcaacgacgtgcagaccctcaaggatggacggcacccgcagggcgagcagatgtaccgcagcatggtgtttcacaagaggactttctacggaggaaccaagataaaaatgtgagagatgtaatatatgacattgcc

SEQ ID NO: 339332 - DNA, 132 bp, Homo sapiens
ggcgccgcgcttgctgctggtaacagggccttgcctagtgggccttccttcccagagtgatcagcagctggactgtgccttggacctaatgaggcgcctgcctccccagcaaatcgagaaaaacctcagcga

SEQ ID NO: 339333 - DNA, 75 bp, Homo sapiens
gcggtggtttggacgccggcggagacgcgggcgagatggagcctcgctctgtcgccaagactggagttcagcggc

SEQ ID NO: 339334 - DNA, 50 bp, Homo sapiens
gcctcctgtctccagagtcaacccacaagccctctccagggtcaccctag

SEQ ID NO: 339335 - DNA, 75 bp, Homo sapiens
ctccggggcagctccggcgggcgatgtctttggtggacttgggaaagaggttgctagaagcagcaagaaaaggcc

SEQ ID NO: 339336 - DNA, 98 bp, Homo sapiens
aaaactgggaagatgtaccaggagaccaggtcaagcccgaccaatacactgaggccctggcccagagggacaaaaaaatttccagaagccgatccata

SEQ ID NO: 339337 - DNA, 83 bp, Homo sapiens
cactgaagaagtagagtatttcaaccataaagacatcttaattgggcacgaaagagctgtttgcagacaaggtcccaaagaca

SEQ ID NO: 339338 - DNA, 100 bp, Homo sapiens
tgttttccttgtcgagcacggtgcaaccccaggtaaaataccatgaagattttgaaaaaacaaaggggagaggctttactcccgtcgtggacgatcctgt

SEQ ID NO: 339339 - DNA, 73 bp, Homo sapiens
gatcatcgatctctcagggtcgtcgggtgaagaattacctgaagacatcaggagaatacaaacttgcaggtgt

SEQ ID NO: 339340 - DNA, 115 bp, Homo sapiens
ttactttccaagaagctttcagaaccttcttctctccagtacctaccttacagggattataattactccttggtcaacaaaaatctctcatttacttcaccaccagcagtttcct

SEQ ID NO: 339341 - DNA, 83 bp, Homo sapiens
cgcctccatctgggccatggatggaaaaggcgacggcggattgacagaagtatgattggagagcccacaaactttgtgcatac

SEQ ID NO: 339342 - DNA, 118 bp, Homo sapiens
gtcgcgcccgggaggaaggaacgaggcaaggagctaaagcagcgtgcgttcagccctgggacatctgaatgggactccgagtgccttacatccctgcagccccttcctcttcctacac

SEQ ID NO: 339343 - DNA, 100 bp, Homo sapiens
cacaccgtggcagtgaagagctgctgaagtacatgcttcatagtccttgcgtctctctatgtgaatcccgatggagcggcccgaggaaggcaagcagtcg

SEQ ID NO: 339344 - DNA, 74 bp, Homo sapiens
tggagatgaagcctaagaatatgatcaggatgtagcccatcggatgctggccacaggcgagtgtactcctgagg

SEQ ID NO: 339345 - DNA, 100 bp, Homo sapiens
gagagatgtcggatttcgacagtaacccgtttgccgacccggatctcaacaatcccttcaagtttggaaattttagcattcaggtgccaggaatgcagat

SEQ ID NO: 339346 - DNA, 50 bp, Homo sapiens
tttacaacctgcacccactaaagtacggtggggattgcagctgctgagca

SEQ ID NO: 339347 - DNA, 80 bp, Homo sapiens
gggagatccacagctaagacaccgggacctcctggaagccaaaaatggcctttggaggagcctaaggtgatctccgcctt

SEQ ID NO: 339348 - DNA, 80 bp, Homo sapiens
cccgcgtccgccgattcctcctccttggtcgccgcgtccttggctggcgtatggcttcccagttacgactcttcgatccc

SEQ ID NO: 339349 - DNA, 88 bp, Homo sapiens
ggccgtcggactggagctctgggctgcggcgcacgccttgcccgcccagcttgtcaaggtggctttggagaaaagtctggcaactgtg

SEQ ID NO: 339350 - DNA, 101 bp, Homo sapiens
tgggcgtctccagtgtgagggagaagtatgagcttgctcacccaccagaggagtggaactctagaggacaaaatcccagtccttggcacaaactcaggaaa

SEQ ID NO: 339351 - DNA, 74 bp, Homo sapiens
ttttgccctgtggtgtctgtgcaggcatcttccctgagcctgagcgggaccctgtcatccagatctgctcgctg

SEQ ID NO: 339352 - DNA, 100 bp, Homo sapiens
tcagtataatcctacctatgagaccatgtttgctcctgagatcattcaacttcaagtggcacattatcttttaagcctagtcaatcattgattactcttc

SEQ ID NO: 339353 - DNA, 100 bp, Homo sapiens
atgtgcagcttccttgagtggcgagatctgaagattgtttacaaaagggctccagtttgtgttttcagctgcctactagacctcactacctggatggccc

SEQ ID NO: 339354 - DNA, 100 bp, Homo sapiens
gggccctccgcgcggtccatcgcccactggacgccgcccgcggccggaccggtgagatcggactggaactgttcggctgcgaccagaaatttattttcct

SEQ ID NO: 339355 - DNA, 75 bp, Homo sapiens
cgagcggggcaaccactgcgagtactgcttcaccagtattctaccttgtaaatactgttatttgtatatactgta

SEQ ID NO: 339356 - DNA, 83 bp, Homo sapiens
ccagtgtggaaaaccagtggtaaatgtcagctacaggccagcttatgaccagactgagaactatgagcagagaatacgtgaac

SEQ ID NO: 339357 - DNA, 96 bp, Homo sapiens
cagtaccagcgtttcacctaccttcccgccaacgggggaggcccccgctgagatgggggcgctgctgctggagaaggaaaccagaggagccaccga

SEQ ID NO: 339358 - DNA, 100 bp, Homo sapiens
agaaaaagtggatcttgtattgatgcactggagggataggatgggcattgctcaaaaagaggctaaatttggccgaagatggaccaaaatttcaaagcta

SEQ ID NO: 339359 - DNA, 100 bp, Homo sapiens
catgaccgtgttcaggcaggaaaacgtggatgattactacgacaccggcgaggaacttggcaggtgctggatccgggactccctggtcagctacatcacc

SEQ ID NO: 339360 - DNA, 97 bp, Homo sapiens
ttgacactccaaatgttgcgcttgatggatttactctggaaagaagctggtttggatcttcggaagaaggagagacgaccatcttgcaactagaaaa

SEQ ID NO: 339361 - DNA, 99 bp, Homo sapiens
gacatagtgaaatatgtgttcagcgcttacaagagagagtcccctctcatcgtcaacactatgggatgggtttcagattcgcttcaagctcagcttatc

SEQ ID NO: 339362 - DNA, 74 bp, Homo sapiens
ggactgtcttgggcagcatgcagtgctttctgggagagaagatgactgaggaggaggtggagaccgttctggca

SEQ ID NO: 339363 - DNA, 50 bp, Homo sapiens
acacctaaaccaacactcttttcaaataattggagtctggaagatgtgac

SEQ ID NO: 339364 - DNA, 98 bp, Homo sapiens
gactcctggcttgcttttggctacagaatcatcatctgcatctggagatttccactgggactttctggaggcaggctggagtgcagtggcacgatctt

SEQ ID NO: 339365 - DNA, 100 bp, Homo sapiens
tcccctgggatatatttttgagaccaaattaatcagcacattgatttataagtattgaaatggctgatggcaagtgcaggaagatccttttctacagcag

SEQ ID NO: 339366 - DNA, 82 bp, Homo sapiens
tcggctttcctggacctcggagactgcagagtcccagacccccaccccttcagccacatccttcttttctgggaagagcccc

SEQ ID NO: 339367 - DNA, 100 bp, Homo sapiens
cttcgctctactgctcggcagggcagctggcctctgggcaccggcggcccctctgcctcgcggaaaaggttccagcaacagatagaaatgctttaagttc

SEQ ID NO: 339368 - DNA, 112 bp, Homo sapiens
tcgacggcgattggaacaccctgccggtgatctttgaggacagatacgtggactgccctgcgacaggaaatgtcagccatcttggaatgtcacaggaactggttgaacacct

SEQ ID NO: 339369 - DNA, 50 bp, Homo sapiens
ccttcgtacccacagtgcttcatgagagagctcttcagtatccccatcag

SEQ ID NO: 339370 - DNA, 75 bp, Homo sapiens
ctccagcctgctgcgcaggataaaaggcaaactcttcacctggttgaaatcacaaagattagacacctttttaga

SEQ ID NO: 339371 - DNA, 89 bp, Homo sapiens
cacgcgggaggtgctgggggagaacgatgggcacctcaactgcttcgtctcggccgctgaccaccggcatgttctttggttcagcaccc

SEQ ID NO: 339372 - DNA, 90 bp, Homo sapiens
cccggagaaccgcggggacagcagccggccagccggggggcactgcccgcccgggctctgatcctaattatctcatggctaatgaacgca

SEQ ID NO: 339373 - DNA, 100 bp, Homo sapiens
gtggggggattctcgacctgctaacagaactggaccttttcgtctgttcggcacttgaagtactccttgtttaagaaatcactactgggcagtgtttcgg

SEQ ID NO: 339374 - DNA, 100 bp, Homo sapiens
cttagctgtgctcgcgctactctctctttctggcctggaggctatccagctcttccaggatctcaaccagttctctcactgcagagtctggagaagccca

SEQ ID NO: 339375 - DNA, 90 bp, Homo sapiens
agagttcagaccgtggcgaagtggagagtgacatgcagttggatggcggtgactgcgtgcaataccaagtttccaggcccgaagagcatc

SEQ ID NO: 339376 - DNA, 100 bp, Homo sapiens
gcttacaggaaactcttagaaggcgaagaagagagaatacagtcgttttgaagctaaaatacatgatttacgggagcagatgatgaatagtagtattagt

SEQ ID NO: 339377 - DNA, 100 bp, Homo sapiens
gtctccagcctcggtaccatggccgggatcatcaagaaacaaatcttgaagcacctctccaggtactccaaagattcaggtttactcacgtcatccagca

SEQ ID NO: 339378 - DNA, 100 bp, Homo sapiens
accaggattttgactggttgaggagcaaactggaagaatcccagcccactcatctcattcccgagtgacactgctgatcctgtaacatggaggattgtct

SEQ ID NO: 339379 - DNA, 71 bp, Homo sapiens
ggcggcgtttggtcccgggagcctcgccggaacaccttccaccatgaccacctcagcaagttcccacttaa

SEQ ID NO: 339380 - DNA, 125 bp, Homo sapiens
ggttatggcatttggctttgattactgctactggtcagtcaacccagaggatccccagtatgcatctcaagatgtgactggattatggacagaacttggaaatattgagaataatttcttaaagc

SEQ ID NO: 339381 - DNA, 100 bp, Homo sapiens
gacatcagcatatatgtcaactctaccatgtgctagagacagccaacaaaatattcatggttcttgagtatcctgtggagcacccagacaaattcctgaa

SEQ ID NO: 339382 - DNA, 84 bp, Homo sapiens
aatgcatatgtagcctacaaagttacaacacagaaagcacacctgagctgctcttaatatcatctcttgaagatacaaatgaaa

SEQ ID NO: 339383 - DNA, 75 bp, Homo sapiens
ttattcccttcaattcaagtaacagatggactcaccctgtcacccaggttggactgcactggcctcaacctcctg

SEQ ID NO: 339384 - DNA, 97 bp, Homo sapiens
gaatttctgaaagttttccttccatctctgctgctctctcatttgctggccatcggattgggtgtgtttcctgtaacaaatcgttcaagaaactctg

SEQ ID NO: 339385 - DNA, 95 bp, Homo sapiens
gagagtagcagtgccttggaccccaggagccaccatgttggtgataccccccggactgagcgaggaagaggaggctctgcagaagaaattcaaca

SEQ ID NO: 339386 - DNA, 90 bp, Homo sapiens
accgagcgggcaggaggccaccgctgcagcgcgggccccgcagaggaaggaagccggcgggcggggacactttcttcatgagcaacaaac

SEQ ID NO: 339387 - DNA, 75 bp, Homo sapiens
tgggaattctcttcactagaatatggagactgttcaatcaccagggaagccattaatttgctagaaccaatgaca

SEQ ID NO: 339388 - DNA, 100 bp, Homo sapiens
ccgaaatgggcatattgccacaaggccgctttgtagttcagaatgtttctgcacagaaagatggagaaaaatctagagtaaaagtcaaagtgcgagtcaa

SEQ ID NO: 339389 - DNA, 83 bp, Homo sapiens
cgagccttcacctacagcatcgtgggcgccggctcccagtttggctggtaggtgagtgctgtcctcggctcactttcctcaag

SEQ ID NO: 339390 - DNA, 129 bp, Homo sapiens
tggaagagggagtcaccactggacctccaaggaagccacgtgcagacatctacaaccttcgatctcctgacgaatgggcttccccaaggatttattgacattgctacttgagtgtgaacagttacctgg

SEQ ID NO: 339391 - DNA, 100 bp, Homo sapiens
agaggactctttttgtcctcaatgtgcccccatactgcacagagatgcgcctgcttcctctgcgccagaagaaggcccacctgatggagatccaggtgaa

SEQ ID NO: 339392 - DNA, 82 bp, Homo sapiens
tctgctcttcctcccttcgctcgcaccatgatttcaacactacacttgcacaatgtctttgaaaccaagagtagtagatttt

SEQ ID NO: 339393 - DNA, 56 bp, Homo sapiens
gttatattccttttgggacgccaattgatgataatgaagataattcaaatgatggg

SEQ ID NO: 339394 - DNA, 75 bp, Homo sapiens
ctcagttggaagcagccgatccagcctgcggagcctgtggggcagagtcttttattcaaaacttcagcgttctct

SEQ ID NO: 339395 - DNA, 82 bp, Homo sapiens
cagagcaaggggcttacgcagaaggacctggccacgagtctctggtaagaagagtgaaagcaaagaagccaagaagtctgaa

SEQ ID NO: 339396 - DNA, 98 bp, Homo sapiens
actactcttggaatcaaagataaatccaaatactgcatatcagaaacaacaggatgtaatccctgttcattactacttaatacctccaccaacaaaga

SEQ ID NO: 339397 - DNA, 75 bp, Homo sapiens
cgtgggcggtgggccccagccccacagaccagcccagcattcaggtcatcatcagatttgaaatatttaaagtgg

SEQ ID NO: 339398 - DNA, 101 bp, Homo sapiens
ccctcttctacggaggaaggaacgggcacagcaggatgtctcccgtgctaagctagcagctataattccggacccagttgtagctccttctatagtgcctg

SEQ ID NO: 339399 - DNA, 100 bp, Homo sapiens
aaccttcgactatgcagagacatgagatggtagccaacccctcaggagccagatgaccaagatgctccagatgaacatgagtcgcctccacctgaagatg

SEQ ID NO: 339400 - DNA, 100 bp, Homo sapiens
ggggaaccaaagcttcaagttcttggaacaaattctgaggagacatcacagctttcccagatcgggaggaaaaatatggaatgtgttttaccgctgactg

SEQ ID NO: 339401 - DNA, 74 bp, Homo sapiens
agaactatagcaatctggttttcttgggacccctcgtccagtcattgtggaacccatggagcagtttgatgatg

SEQ ID NO: 339402 - DNA, 99 bp, Homo sapiens
gtctggaaatggagaaactcattcctgattggctttctcttacaattgaactgcttcagaaagcacaggaacttagtgatttggcccgtgaccctccag

SEQ ID NO: 339403 - DNA, 97 bp, Homo sapiens
tcgaggtcctgcaggtggagctccggcagccgccctggtgaatctggattgggaaagtcgacattaatcaactcattattcctcacagatttgtatt

SEQ ID NO: 339404 - DNA, 98 bp, Homo sapiens
taacattctctgacacaaaccaagaaaaggtggtgattgtgatccagttacaacacagggatcacaacaaacacaaccgccacagaagcactatggca

SEQ ID NO: 339405 - DNA, 98 bp, Homo sapiens
tcctgcagatgctggatatccaggcatcccagctacgaaggatggaatcttcaatcaatcatatttcacaagcacttcgtcttagtaacatggccatg

SEQ ID NO: 339406 - DNA, 83 bp, Homo sapiens
gatattgagctttacatgcacttgaacagactagaaattgcaccacagatatatgggttgttgcaacaaggacagtgtcagag

SEQ ID NO: 339407 - DNA, 100 bp, Homo sapiens
agacagcatatttgagtcatttccttcgtacccacagtgcttcatgagaggactcagcccaggagagtgttattactcgagatattcatcgtacatttcc

SEQ ID NO: 339408 - DNA, 74 bp, Homo sapiens
cggagtatacaccatgagcaaagctcaccctcccgagttgaaaaaatcaactcacaatgaaatggagaagaata

SEQ ID NO: 339409 - DNA, 75 bp, Homo sapiens
gggaatttaagatgccaaagcagctcattcacatacagcgattgggtactagtacagctaaagaagcaaaggaat

SEQ ID NO: 339410 - DNA, 99 bp, Homo sapiens
aatgctagaagctatcaaagcccttgaagtcagtttcagtacaaaacggttcgattcatcaaaaagatgctgtaaatgatgatgattttgagccatact

SEQ ID NO: 339411 - DNA, 112 bp, Homo sapiens
gaccgcaggctgaccccgcagcggccgggctgtcgcggcccccacctcagtttttggctttcacccccaaccagtgaccaaagacttgaccactcaaagtccagctccccag

SEQ ID NO: 339412 - DNA, 82 bp, Homo sapiens
atgggcgggggtagagccccgccggagaggctgggcggctgccggtgacaggtctctaattaacagaagatggcaaagccca

SEQ ID NO: 339413 - DNA, 80 bp, Homo sapiens
aagtgataggagggctctgtagatccggaacatggtggcggtgctggaagtcatctccagcctggagaaataccctatta

SEQ ID NO: 339414 - DNA, 100 bp, Homo sapiens
gaactgaatgagtttcttactcgggagctggctgaagatggctactctggagttgaggtgctgaacgggctcctagatcgccctgactgggaggaagctg

SEQ ID NO: 339415 - DNA, 75 bp, Homo sapiens
caggagaatggaagaactctgatagcaccccaagtactggagaaaatgaaactgggattgacccatcaagatgct

SEQ ID NO: 339416 - DNA, 83 bp, Homo sapiens
gttgaagatgtcggccttctgagccgactgcggtggtcaagagggccaattcctgtccccccagcagcatggcatcgtgtgct

SEQ ID NO: 339417 - DNA, 76 bp, Homo sapiens
aaaccgtgtatgagggattcatctcggctcagcattcgttcagtcagagagcataatagaagtactgcgttttgat

SEQ ID NO: 339418 - DNA, 75 bp, Homo sapiens
cggtgctgcagacggcgagacctcctgcacaggttcctcatgagagtgctggactcctacggggatgactaccgg

SEQ ID NO: 339419 - DNA, 82 bp, Homo sapiens
tcctagcgcctggcctgcgcgccgctgcccgcgccacagcagcctcccgcgacgatgcccctcaacgttagcttcaccaaca

SEQ ID NO: 339420 - DNA, 98 bp, Homo sapiens
agaatttcacccaggttctgacaggaaacagtgacattcaaggatgtggccatggactttacaccagaggagtgggggaagctggatcctgcacaaag

SEQ ID NO: 339421 - DNA, 75 bp, Homo sapiens
aaaacattgaagacgtcattgcccaggctgcgctgtctggctcaccggctctctgagccccccgaggacctggac

SEQ ID NO: 339422 - DNA, 100 bp, Homo sapiens
agtgactcaaactgtgagaacttcaggagccatgtctgaccaggacgtttggaagatcatatccatgccagaggctcttgtgaggagatgagttggtaaa

SEQ ID NO: 339423 - DNA, 101 bp, Homo sapiens
ctttgcccctattatggagaaaggtgttccctagcaggaacgaatttcatatacacctccagagagcccagtgccgagttacgcttcctcgacgccacttc

SEQ ID NO: 339424 - DNA, 75 bp, Homo sapiens
gcgtccacagcctgctcagcatcctggacatcatcaccgttgccaggcaggaggggaggatcattctgacgtcgg

SEQ ID NO: 339425 - DNA, 100 bp, Homo sapiens
agaacaccaagaaggaggttgctacactaaaacagagttagcagagtgctgctggttccttcgatgatgactttgaccagtttgataagcctggcgcgga

SEQ ID NO: 339426 - DNA, 100 bp, Homo sapiens
ccgtgccctggggctgagccctcaggcaacatgagtgagaatgaggaagaggaaatttctcagcaagaaggcagtggggactatgaagtcgaagagatac

SEQ ID NO: 339427 - DNA, 75 bp, Homo sapiens
tgatgatgacttcttaggggaatgtgaatgtacccttggacaagccgccatggcatcagatgaaggcaaactttt

SEQ ID NO: 339428 - DNA, 83 bp, Homo sapiens
gtacctttatgaaccagtgtatcccaacaccagcagaaccaaaatcgtgtgtggtggcagatcctcctcttcctgcacaacct

SEQ ID NO: 339429 - DNA, 88 bp, Homo sapiens
aagccaaggaagcagatggaaggcactgcctccttacctgtgaggaatgcaaaataaagcatggattaagtgagaagggagactctca

SEQ ID NO: 339430 - DNA, 98 bp, Homo sapiens
gatctgatccccgaatatgaaattgcatgtgaacacgaacactctaattgcctcctgatagcacacagaaagctctcatttcactcttcagtgttcct

SEQ ID NO: 339431 - DNA, 75 bp, Homo sapiens
ctatcctcattatctccaaaccaaggctttcaccagttctcaggatgcccatagggatgggtgaagcctgcctgg

SEQ ID NO: 339432 - DNA, 100 bp, Homo sapiens
cccgggatcaccttcatcgtggtgcagaagaggcaccacacccggctcttctgcactgacaagaacgagcgggaacgaggcccagcaaaaagcagagacg

SEQ ID NO: 339433 - DNA, 50 bp, Homo sapiens
tctgggctcaacagaacacaggggcagtggagctactgctgtggttcagg

SEQ ID NO: 339434 - DNA, 75 bp, Homo sapiens
accaccagagcatcctggacatgatggagcatagcggcctgaccacaggggtggccttcgggcatcacgccaagt

SEQ ID NO: 339435 - DNA, 50 bp, Homo sapiens
actcctctctgttaatggagtgattccacaccaaatcatccatcacaaac

SEQ ID NO: 339436 - DNA, 100 bp, Homo sapiens
tggatattctggtggggagatgaacccaacctagtgggtgtaatacatcatgaactgcagggctacagattgcaacccaattaatatcaaagtatcctgc

SEQ ID NO: 339437 - DNA, 90 bp, Homo sapiens
ccacgacttccccagcatcccgggctacaacctgccgctgggagagctggtgacggcctccaaggccatcattgaaaaggagtaccagcc

SEQ ID NO: 339438 - DNA, 88 bp, Homo sapiens
caagagacccggtttctaatccctgctctgtcactaacaagctgcgtgatcttcgccatattttctgctcttaagaatcttcaagata

SEQ ID NO: 339439 - DNA, 98 bp, Homo sapiens
gacttcagagaaattctcatgatagcttccaagggacaaggtgtcaacaatgtgccggcaggtccgatcagaaaacaaagaaaagagtgcagtgatgt

SEQ ID NO: 339440 - DNA, 90 bp, Homo sapiens
cagaggggaacagatttcagtgtcctccttagctctgcagatgcacaaagcagggtcatcagaagcctctcgattcaaaagatgataata

SEQ ID NO: 339441 - DNA, 96 bp, Homo sapiens
ctggaatcctatcctactctggcagcccatcccggtgcacacagttcctctttctgaagatcagtgtttctacacctgtgggttatgacaaagaca

SEQ ID NO: 339442 - DNA, 100 bp, Homo sapiens
cccacgcctagggctccggcgcgtcacgggcctcagctgggattcccgcgcccctcggacggccacgagactcggtggatatcttgacctacgtggcttg

SEQ ID NO: 339443 - DNA, 100 bp, Homo sapiens
acaaggagctggacatcgagcctgagggaggggaaaggcgcagggccagcaggaagaccaagaagaaggaagggggtgccctccgggcccagagagcctc

SEQ ID NO: 339444 - DNA, 100 bp, Homo sapiens
ctgcagaccaatggacaccttctaagagtttggcgagtcagtgactgaagcgcccgtccattccaaggtgaaagaaaagatgttgtcccggttaagagta

SEQ ID NO: 339445 - DNA, 101 bp, Homo sapiens
cgggccggaacctcaagaaggaggtcagccgggtgctgtgcaagcggtgcgtccctgctatgtggatatttggtagcaatgactgatgtggaaactacata

SEQ ID NO: 339446 - DNA, 100 bp, Homo sapiens
caggaccatctggatgacttggtggtggagtgtagagatatagttggcaacctcactgagttagaatcagaggagctgctgctcaagaggtcatcaaaat

SEQ ID NO: 339447 - DNA, 100 bp, Homo sapiens
gccagcgacagcagccccgccccggcctctggggagccccaggaggttttttgctccactcaagcctgttagaatcaccatggaatacagctccagtggg

SEQ ID NO: 339448 - DNA, 100 bp, Homo sapiens
tgttcaataccaccttcgtctgcacagtcaccaatgccgtgggcatgggccgcgctgagcaggtcatctttgtccgagggtctcggattgcgagctggct

SEQ ID NO: 339449 - DNA, 100 bp, Homo sapiens
ctgaaggcctctgagactcagagatccctcctggagcaggaccttgctacctacatcacagaatgcagtgttgttgatcattatgaaaatcctagaaacg

SEQ ID NO: 339450 - DNA, 75 bp, Homo sapiens
tactacttacggtcacttggagaagaccctagaaaggattgttcagataaatttgaggatttacatgacatgacc

SEQ ID NO: 339451 - DNA, 100 bp, Homo sapiens
cgccgcggaacatgacggcgccctgggtggccctcgccctcctctggggatcgctgtgcgccggttaccttccgaacaagaatctatcactgtaatatta

SEQ ID NO: 339452 - DNA, 100 bp, Homo sapiens
tctagacagcgacatgcagaccctggtctatgagaactacaacaagttcatctcagccacagggaaatgtttcaacgtgcgcaagcgttgcggcggcggg

SEQ ID NO: 339453 - DNA, 75 bp, Homo sapiens
accgcatctggctggagccctgcattcgcggcgtgtgcagaatcggcaaggttggaaaccagaagcgtgttgttg

SEQ ID NO: 339454 - DNA, 90 bp, Homo sapiens
gagctgtttctcatctttatactcttccagggcccagtgttcaccatcataccaggggccagaggcgatggcttgcctccatgagacccg

SEQ ID NO: 339455 - DNA, 100 bp, Homo sapiens
gtgacagcaatcagctggcctggtttgatactgacctgtaaatcatcctttaggtttctaagcatgaattgaggaacagaagaagcagagcagatgatcg

SEQ ID NO: 339456 - DNA, 90 bp, Homo sapiens
ctcttactgcgggccgctccgacggcggtccatcctgtatctggagtccatctttcaccatcttctcctgagattgtactggaccgtgac

SEQ ID NO: 339457 - DNA, 90 bp, Homo sapiens
accttgaaggcatcgtgtggcaggaaacagaagatgattacctaggaacagtacgatttggggttatcacaaataaacatcttgcgaaac

SEQ ID NO: 339458 - DNA, 82 bp, Homo sapiens
ggcggaaacagagcaacccccggcagatcaagcgtgagaagccctaccactgcaactgggacggctgcggctggaagtttgc

SEQ ID NO: 339459 - DNA, 124 bp, Homo sapiens
tgccagcacagattttgggggtttcacgactgcacccaccaggaagatgtggctgtcatctgctcagctccactctgtgaacctgccggtgagttgcacttccttttcttcttcaaggtctgtg

SEQ ID NO: 339460 - DNA, 75 bp, Homo sapiens
acatgactcctgaagtcgtcggcgagcagatacaaactggactctcaggacaaaacgacaccagccaaaccagca

SEQ ID NO: 339461 - DNA, 76 bp, Homo sapiens
tcctccatgactcaaggcacagactctccagggaacaagctaccctctgagtcagcactggacttgaagataaatc

SEQ ID NO: 339462 - DNA, 75 bp, Homo sapiens
aagtaagaagccggtggtgactttccaaggcctatcactgtcccagcttctggatgaaatgcgggaggaccagga

SEQ ID NO: 339463 - DNA, 75 bp, Homo sapiens
tctgacttgtgcttggcagcaacatgaagatcattttgctgggctcaaaatgcagagaactcaaagatattcatt

SEQ ID NO: 339464 - DNA, 88 bp, Homo sapiens
actacacaagaatgacattgccatcaacgaactcatgaaaagatactgtcctaattccttggtgttggtattaggagatctgcacatc

SEQ ID NO: 339465 - DNA, 110 bp, Homo sapiens
ctgaggctctggaacttctgcccagctctccttgagagaagaagaaggaggttcctgctgtgccagaaacccttaagaaaaagcgaaggaatttcgcagagctgaagatc

SEQ ID NO: 339466 - DNA, 90 bp, Homo sapiens
atcaatgaggagatcacaccccgacggcagtccatgacggtgaagaagggagaggtcctctccacccggatcctggccatgaaggcctcg

SEQ ID NO: 339467 - DNA, 83 bp, Homo sapiens
gctgttttggaactgtcaggtacctcaaagccggacaaggcaaaatctcagcaagttcggacctctagtacaataaggcgaac

SEQ ID NO: 339468 - DNA, 74 bp, Homo sapiens
gaccatcgccggagcctgaggacacttctctgtcgtcacagtactccaaagattcaggtttactcacgtcatcc

SEQ ID NO: 339469 - DNA, 75 bp, Homo sapiens
cccattcagctcggccagtgggggctttggatccacagctacctcaactactcccgagcccggagaggacccacg

SEQ ID NO: 339470 - DNA, 102 bp, Homo sapiens
agttgtctacactggacatgacaccaagctgatgcagggcttccgttacaagatgaggtctgtgtatgctcacttccccatcaacgttgttatccaggagaa

SEQ ID NO: 339471 - DNA, 83 bp, Homo sapiens
gaacggcagccccaagaacggaaaggttaatttggagtggcccctggagtcagtttcctacaccatccgaggccccacccagc

SEQ ID NO: 339472 - DNA, 87 bp, Homo sapiens
cccagccatgcagactccacctttacaacagcctcaccaggaacaaggaactgctgctggagtttgaatcgaaaatgcggaagaggg

SEQ ID NO: 339473 - DNA, 75 bp, Homo sapiens
ccgagagcgcgaatatcgtcatcgttagaagttgagccccatatgggggttggcaggcagcagagaggccccttt

SEQ ID NO: 339474 - DNA, 80 bp, Homo sapiens
accaaggctgctagtgaacagcgacgtggcaccggcatggcctttggcttgcagatgttcattcagaggaagtttccata

SEQ ID NO: 339475 - DNA, 82 bp, Homo sapiens
agaggccgagggtttgatgaaggtggaggcagcgcggctctcagggggatatgagactttctactcggaatatcctgagtgt

SEQ ID NO: 339476 - DNA, 80 bp, Homo sapiens
gataccttcatcgctgacctggttgtggggctgtgcactgggcagatcatgtttgagaccttcaacaccccagccatgta

SEQ ID NO: 339477 - DNA, 75 bp, Homo sapiens
aagagacaggaggcagtagccaaacacccaggcccacccttcctccattctgagcacataaaaaccccacactca

SEQ ID NO: 339478 - DNA, 97 bp, Homo sapiens
tggctgcagggacccggtgacagcgtgagaggttcgcagagaaacccagcgtttgctggcagaaccagttcctggcatcaaagccgaaccagatgag

SEQ ID NO: 339479 - DNA, 101 bp, Homo sapiens
cgtgcgctcccccggctccccgcagggctacgtgtgcgagtgtgggcccagtcactacgggccgtactgtgagaacaagccaaatttgagtttcatcatgg

SEQ ID NO: 339480 - DNA, 100 bp, Homo sapiens
ctcaagttgaatgaaaatgccatctccaggctccaggctaaccaaaagtctgttctgtgggaagatgtaaatgctgctgcctgtgacctcgccagggaag

SEQ ID NO: 339481 - DNA, 73 bp, Homo sapiens
gcgtccggggctggcgttcccctggaggctggcatttccggagagttcttttgaagtcacttcagaaggatct

SEQ ID NO: 339482 - DNA, 75 bp, Homo sapiens
gtcgccccctacccgcttctcgtagtcctgggagcacagcagaagtcagcagccgctcttctaaaacattcaaac

SEQ ID NO: 339483 - DNA, 90 bp, Homo sapiens
cgcccgccagctgctccggagatacgaaatggaccaattttgacaagatatagtgctgcagcgtgcctgatgggatatattcagtcatgg

SEQ ID NO: 339484 - DNA, 96 bp, Homo sapiens
cgagcctaagagggcagccgcctgaaggaacgcgacggcggcgcccgcaggtgtcatggagaaactccagctgggcccagagattctgcagcggga

SEQ ID NO: 339485 - DNA, 100 bp, Homo sapiens
gcttgacattctcaaagactggtgctatgaagctcggcaacctttggcactgcatccatgagcatgcccacaggattcggcactcctgctccctacagtc

SEQ ID NO: 339486 - DNA, 50 bp, Homo sapiens
tgacgatgcccgggctgccagggtcaagctggtgggccagccggccgtac

SEQ ID NO: 339487 - DNA, 134 bp, Homo sapiens
gattgaattgacactatttgtggaggattgatatgacagaaaggagccaaggatgactcaagtttttggccagagatgatcacggacgtgcagctcgccatcttcgccaacatgctgggcgtgtcgctcttctt

SEQ ID NO: 339488 - DNA, 50 bp, Homo sapiens
ctccagtggagagttcttacgcgaacacttgccaagtatttcaatccttg

SEQ ID NO: 339489 - DNA, 74 bp, Homo sapiens
cctggatcaccgacagcacagacagaatccctgctaccattgttgacctcctgtactggagagacattaagaag

SEQ ID NO: 339490 - DNA, 82 bp, Homo sapiens
gattacctgggtctagagtgcggagctgctccgtggccacgaggacgtcaccatggatgacagtgatgggattccgtggtca

SEQ ID NO: 339491 - DNA, 74 bp, Homo sapiens
tctgcctcctctatgccatgtctcataataaaggttgatgataattagaagcatgctttccactgaacttcccg

SEQ ID NO: 339492 - DNA, 50 bp, Homo sapiens
ccctgaggactgtgagctggaggcctcccaaggtggggagggtacctggg

SEQ ID NO: 339493 - DNA, 75 bp, Homo sapiens
gcggcaccgggaggccgggccgagcggacttaaccaccaccatgtcgagcaaaagaacaaagaccaagaccaaga

SEQ ID NO: 339494 - DNA, 90 bp, Homo sapiens
attttgaagagggactccaagatgggaatgatacttttgctctgctgggtaagcgtctcccttctctcctggacagaaggccgtgtcctg

SEQ ID NO: 339495 - DNA, 115 bp, Homo sapiens
ggccgcccgggaactgctgacgcttgatgagaaggacccacggcgtctgttcgaagaatatgcttttaaggctattaaccagggtggccttacatcagtagctgtcagagggaaa

SEQ ID NO: 339496 - DNA, 50 bp, Homo sapiens
caaatgtggagttcatggatgaacggaaaacagttcttccttcaaagcat

SEQ ID NO: 339497 - DNA, 98 bp, Homo sapiens
tccctcgggctgacaagaaccacttcccaagacccacagtgcctggagaggacatggggaaggttggctggctcctctggctgatggcatgttgaggt

SEQ ID NO: 339498 - DNA, 100 bp, Homo sapiens
ttttcctttgagagttgaaattcaagtcaagttcataaagaatgtatgaaggttctcaacttgaaacgcttataacccacaccatggataacttattgga

SEQ ID NO: 339499 - DNA, 82 bp, Homo sapiens
tggatactcagcgtcgctggcagccgctgtacttggtatttctgggaaaagccagcttctgtttgcactggtcttcacaact

SEQ ID NO: 339500 - DNA, 83 bp, Homo sapiens
cagtctctggacaagatgaccacactccaggaatgccagtgcatcttttgcacagctgctgatgtttcagacaccgcaggaaa

SEQ ID NO: 339501 - DNA, 100 bp, Homo sapiens
ggagatcagcaccaaatcccacagaggcatctgaggtgcatgctattatgatgctaatcagtctatgtatgtgtttggaggctgtacccagagcagctgc

SEQ ID NO: 339502 - DNA, 100 bp, Homo sapiens
gtcgccgcgtccttggctggcgtggggcccaggcagtgccacttctgatctggggatggcatgtgaccgtgccagggtcttcctgcactcggacgagcac

SEQ ID NO: 339503 - DNA, 90 bp, Homo sapiens
agtcagaaactcagccactggttgccttggtaggcaataaaaaggctgaggggatctggcggtggagcgctaggatcagacgcccccgcg

SEQ ID NO: 339504 - DNA, 75 bp, Homo sapiens
cgcgggtgtcgctgggctgtcggcctggaccttgcagccgcaatgcatttacagccgaacaataccagcaacatc

SEQ ID NO: 339505 - DNA, 100 bp, Homo sapiens
aggcgccccacctagagaaacagccggcagccggcccgcagcgcgttctcccgggagagataatgtacaacggccagccaattaccaaaatggcctgtgg

SEQ ID NO: 339506 - DNA, 98 bp, Homo sapiens
gcccacgccaccaccctcccagccacctctgaagttgccaggcttcccaacattcttgtctgtgctgcaagctttcttcctggtggcagatgacatca

SEQ ID NO: 339507 - DNA, 82 bp, Homo sapiens
acccggcccccgacggctctgcagttaacgggaccagctctgcggaaaaatgcttggacagaagagatgagtactatttcca

SEQ ID NO: 339508 - DNA, 75 bp, Homo sapiens
cttcgccaccctgcggtggattgactacggcaaagtggccactcagctcctgccagggccatccaggtgaccgtg

SEQ ID NO: 339509 - DNA, 86 bp, Homo sapiens
acaaagttgaaaacaaagtgctggaacttagtgatttggcccgtgaccctccagcacaatgttctgcaggtccagttggggatgat

SEQ ID NO: 339510 - DNA, 100 bp, Homo sapiens
tccaagtttgactccagattttgctgaatggattagaggctgatcccttatccaacatggttctaaccttcagtactaaagaagatgcagtttcctttgc

SEQ ID NO: 339511 - DNA, 100 bp, Homo sapiens
aagccactccggccgaggaggagaagacaggaaaagtgaagtactcacggctggccaagtacttctcagaacgtggggatgctgtggccaaggcctccaa

SEQ ID NO: 339512 - DNA, 80 bp, Homo sapiens
gccacttgcttgggatcctttatcctggtcatcttctatttccaaacaagaggtggaaacatacagaagaagcaaggaaa

SEQ ID NO: 339513 - DNA, 100 bp, Homo sapiens
attcgattcaacggggttccggaccgcgctgcgctatggagcagaaatgcttcggttacccacagtctttcgccagatgagaccggtgtccagggtactg

SEQ ID NO: 339514 - DNA, 87 bp, Homo sapiens
gcaactccgccgcccaccatggcttccgaggagctgtacgaggtcgcccggctcatggagatgggattttccagaggtgatgctttg

SEQ ID NO: 339515 - DNA, 82 bp, Homo sapiens
gtcgcctccaggccaagagggatccttcacccgtgtctgctggtcctggactcccagaagcgagtcttctcctggggctttg

SEQ ID NO: 339516 - DNA, 75 bp, Homo sapiens
tgcagtccctcgtccagccacccccaggacacatgacggaagtgtgtatttttgggccactccacggcaggtccc

SEQ ID NO: 339517 - DNA, 90 bp, Homo sapiens
gcttcatctgcccctgcccagatccggaagaacggtgaatttcccccgcagtgctggccggcgaggactgcctgtggtacctggaccgga

SEQ ID NO: 339518 - DNA, 142 bp, Homo sapiens
caaggagactatgcagtgcttgctgctgaacctgagctgcaagttggaattgatataatgaagactagttttccaggttatactggagagctttgccagtccaagattgattactgcatcctagacccatgcagaaatggag

SEQ ID NO: 339519 - DNA, 95 bp, Homo sapiens
gaggtcatcgaaggctaccgggcccagcacagccagcaccgcacgccctgcaagggagatgccatctcatccggagatgatgaggatgacaccga

SEQ ID NO: 339520 - DNA, 75 bp, Homo sapiens
tattttctcacatatacaacacgattcttctaatggatgggaacatggggtgtgtggaggtcattgcaaaggaag

SEQ ID NO: 339521 - DNA, 100 bp, Homo sapiens
cacgagttcctcatcgcggccctggacgtgctccaccgacactgcaaagttagcaaaaggtgtgacaagcaacctgcctatgccccaaccaccacagacc

SEQ ID NO: 339522 - DNA, 100 bp, Homo sapiens
aaagctggatacaatgtaaagcagaatattcaggttcccagggaagcatggtactggttgaggcttgaagaggagactgaagaagatgaagaagaaaaag

SEQ ID NO: 339523 - DNA, 82 bp, Homo sapiens
agacacaggcataggactagaagcaggagtaggacaaggagtaggagtcgctctggattaatcgaattacagctgctagcca

SEQ ID NO: 339524 - DNA, 90 bp, Homo sapiens
cgaaatcatatggctgtagcattcgtgctatccctgggggttgcagctttgtataagggagtaactattcccagtcagaggcgctatgtg

SEQ ID NO: 339525 - DNA, 75 bp, Homo sapiens
ctcaaaccttgcttctaggagataaaaaggtgtggacactgccagcggctgcagccgacttggaatgacctggga

SEQ ID NO: 339526 - DNA, 100 bp, Homo sapiens
ccacgggccgggcatgctgccccccggaaggaacccctctcctcgctcttcggaaccaaaaagaagcttcccagagccggggccaggagccccaagcgcc

SEQ ID NO: 339527 - DNA, 85 bp, Homo sapiens
cggacaccgagtctgagaccagaattctcctgcaagaatgacggactctgggttccgggaaggcctctccaaagtcaacaaaaca

SEQ ID NO: 339528 - DNA, 75 bp, Homo sapiens
tcaggagagcgccccagggcaagccccgctccggccaacaagctgctctttggcgtaaattgcaatcgattaggg

SEQ ID NO: 339529 - DNA, 90 bp, Homo sapiens
gacctcttcaatttctgttcaagaaggttcacaatgaaaactgtacttatgttagctgaccaggctgaggcccgcaggtctaagaccaag

SEQ ID NO: 339530 - DNA, 83 bp, Homo sapiens
aggaagcccttccgcggaccgaaagatggcgtcccatgtagagtgccgtcctctgggagtgtttgagtgtgaactctgtacct

SEQ ID NO: 339531 - DNA, 74 bp, Homo sapiens
tggactcttgattggaatgttctccctgcagcagtcagcccaaaggaagaaaagcacttggttctgcttcgaga

SEQ ID NO: 339532 - DNA, 100 bp, Homo sapiens
gtgaaatcagacccacaacgaatgaatgaacagccacgtcaggtctatgctccatcagcaagcactgccgactacaatagggactcgccaggctatcctt

SEQ ID NO: 339533 - DNA, 88 bp, Homo sapiens
cggaagaggtggaccggctgcggacccagaaaaatggctacaaacttcctagcacatgagaagatctggttcgacaagttcaaatatg

SEQ ID NO: 339534 - DNA, 74 bp, Homo sapiens
ttttgactacaattctcaacaacaggtttttcgttggaatatacgttgcacatttatggcgattctgagtgtga

SEQ ID NO: 339535 - DNA, 104 bp, Homo sapiens
cgcttcaaaggaccggacccagagaagaggaaaactctaccggtgcaggggcctgtgaagcctccctggcctgctccacctgccatgtgtatgtgagtgaagac

SEQ ID NO: 339536 - DNA, 98 bp, Homo sapiens
ctggaccgacgtgatgggtatcctgatccagtttgctgaccagaagcaagaattcaacaaacgtcccaccaaaattggacgtcgctctttgtctcgtt

SEQ ID NO: 339537 - DNA, 75 bp, Homo sapiens
agcctcctgagtacctgggactacaggaccgagtctcctgccattccgagcaggcctggtatgggtaatggtgtg

SEQ ID NO: 339538 - DNA, 73 bp, Homo sapiens
tcggacgtggccatgaaagtactcaacagcatcgcctacaagaatggatgatgaacttgttgttggacatagt

SEQ ID NO: 339539 - DNA, 75 bp, Homo sapiens
tctgttccgcacaggcctgctgaactgggtgctttatataggaacaaaatccagtctcatagcagaggagaatat

SEQ ID NO: 339540 - DNA, 83 bp, Homo sapiens
gagctcgagaacatcgtagcgaacacggtgctactcaaggcccgggaaggtaccactgatgaaattatgaccaggtgggcccg

SEQ ID NO: 339541 - DNA, 80 bp, Homo sapiens
aaggcctggaccgagttccacaagaaggactgcggggacctggtggccatcgacctgcctagagctggaacgttacctcc

SEQ ID NO: 339542 - DNA, 98 bp, Homo sapiens
ggatctgctgccagcattagcctggctcaatatctaatcaatgtcaggaggacagatatctcaaggccaggatggaagaatcaccactaagccgggca

SEQ ID NO: 339543 - DNA, 101 bp, Homo sapiens
cctgcctcaggtttatttgtacaaatagcacaggaggaccagaagcggatggagaagatctcgaagagggtgaatgccatcgaggaggtgaacaacaatgt

SEQ ID NO: 339544 - DNA, 129 bp, Homo sapiens
atttctttttgcctgggattaaatggaatggaatacttggcctagcttatgccacacttgccaagtccatggcagaagtccttgctaaaaaagaagagctagcagatcgtctagaaaaggccaatgaag

SEQ ID NO: 339545 - DNA, 75 bp, Homo sapiens
cccggccccacccgatgcggcctccaaggggacaccgtggtgtttaaggatggccagtactggatccgaggccgg

SEQ ID NO: 339546 - DNA, 75 bp, Homo sapiens
gctgctgacgctctgggtgaagaatggaagatgtgttcagagcaacattgttttgttgacacaagcatttagaag

SEQ ID NO: 339547 - DNA, 75 bp, Homo sapiens
atatggagcctttggtgttgtctggaaaatgtttataggaggccttagctgggacactacaaagaaagatctgaa

SEQ ID NO: 339548 - DNA, 100 bp, Homo sapiens
gaacttggccccgcgcagcgtctggtcactcgctctcctctggggactgcagagaagcaggacctcgggccatggtacttcctcctgtgctggttccaag

SEQ ID NO: 339549 - DNA, 75 bp, Homo sapiens
agacaggagtggagtgatatcagacaccgagcttcagcaagctctctccaacgagactctccaacatgtgccttc

SEQ ID NO: 339550 - DNA, 100 bp, Homo sapiens
gagcggcgcgggctccagactcgccgtggtcaagttcaccatgagagggtctggagcccccaactcccttgacagtgtacgctggagcaggttccagggt

SEQ ID NO: 339551 - DNA, 100 bp, Homo sapiens
cggcggcggtgcaggcgtcccctctgcaagcgttagacttctttgggaatgggccaccagttaactacaagaaaaactgattgcttatcaacgagaattc

SEQ ID NO: 339552 - DNA, 87 bp, Homo sapiens
cagagtaaagctgctggacaacaccatggaaatatttgacattgaggagctcgtgtaaatgccaaggacaacatgtggctgactcca

SEQ ID NO: 339553 - DNA, 83 bp, Homo sapiens
tgagtcggtggcagagatcaatggaaccatgaactctctgttggatgaacccaatcccaatagtccagcaaacagccaggctg

SEQ ID NO: 339554 - DNA, 50 bp, Homo sapiens
tggacgcccatcccggtgctcactatgtaaaatggaccaatgacaagagt

SEQ ID NO: 339555 - DNA, 100 bp, Homo sapiens
gggatttcaacctgaaagtggaggctgcgaaaatagaagctcctgaagaatcatcagaggatgtgacaaaatatcaggaaggagtatctgcagaaaaccc

SEQ ID NO: 339556 - DNA, 100 bp, Homo sapiens
aggatgaaagtgagcagtccagaaagcggcttatcgaacagagccgggagttcaagaagaacactccagaggaggaattgttgataaagaccttcgtcac

SEQ ID NO: 339557 - DNA, 90 bp, Homo sapiens
ctatcagcaggctccgggctgaagattgcttctcttctctcctccaagcccactttccctgtaggtcccgcgatagggacaaatacggct

SEQ ID NO: 339558 - DNA, 75 bp, Homo sapiens
gagaaggttcagttggcaaaccagatatatgacttgtatgaatctgatgaacaagaaaagagtgcctatcaagag

SEQ ID NO: 339559 - DNA, 82 bp, Homo sapiens
gaggatcgacctcaacctggatatcagcccccagcggcccaggcccaactgattcttgctattccaaatcctcttccacgtt

SEQ ID NO: 339560 - DNA, 100 bp, Homo sapiens
gaggcaaggagctaaagcagcgtgcgttcagccctggggtatgtcgagagtaccaacgtggcaattgcaaccgaggagaaaatgattgtcggtttgctca

SEQ ID NO: 339561 - DNA, 99 bp, Homo sapiens
atccaccccaccttgtatgcaacgccccccttcacacacagtaagattgaaaagtatggattcccacctgatcttaccctcacccctcaagaaagcatc

SEQ ID NO: 339562 - DNA, 82 bp, Homo sapiens
tgaagacgtctgcgtgagaatagagaccaccgagggcgtgatggtgggcatgggtcagaaggattcctatgtgggcgacgag

SEQ ID NO: 339563 - DNA, 74 bp, Homo sapiens
cagattcgcagtggtcgcttcttctccttggtaattgatcaccctagacccagggacacccaattcatcgtaat

SEQ ID NO: 339564 - DNA, 100 bp, Homo sapiens
gaaacttgggactctgcaatagatacatggagcccatcagaatggcagatggcttatgaaccacaggtagatatagttgtaggtactccgggaagactag

SEQ ID NO: 339565 - DNA, 87 bp, Homo sapiens
ttcacatggatcctcttcaagcttaaacctggtctgttatgttctgaacccacacatgttttcggaaggaccagatggctgacactg

SEQ ID NO: 339566 - DNA, 100 bp, Homo sapiens
cggaagggtggtcagcgccgtggaggagatgaaataccgagaccgagctgcagaaagacgggagaagtacggcattccagaacctccagagcccaagcgc

SEQ ID NO: 339567 - DNA, 98 bp, Homo sapiens
tggcccagctccttggggtttccggctgcagggcggtaaggatttcaacatgcctctgacaatctctagtatgactctggggacgacgacgaggctac

SEQ ID NO: 339568 - DNA, 75 bp, Homo sapiens
acaaggccttccagtttggaagtcatcgtattgaggaagttcctgaacttcctttggtagttgaagataaagttg

SEQ ID NO: 339569 - DNA, 95 bp, Homo sapiens
ggcagacagacttatgctggaactgggttttagcaaggggcagcttcatgacttctgggtaccagattcttaataggagttgcagcagcaaaaat

SEQ ID NO: 339570 - DNA, 82 bp, Homo sapiens
ggaggagatgcttcagagagaggaagccgaaaacaccctgcaatctttcagacagcaaattgtggctactaatttgccccct

SEQ ID NO: 339571 - DNA, 74 bp, Homo sapiens
tcctgctcctcttctacttggcctacatccatgaagacagtctattatcctcccagtccacaacgctgaaccgt

SEQ ID NO: 339572 - DNA, 50 bp, Homo sapiens
ctcaacttggttattgtaaaaaaagattgtgttcacctattgaaaattaa

SEQ ID NO: 339573 - DNA, 100 bp, Homo sapiens
aggcttctctggaaacctggaaggagaaggcttcatccttgggggagttttcgtggtgggatcaggaaagcagggagtatatgttgctgcagtacgggaa

SEQ ID NO: 339574 - DNA, 51 bp, Homo sapiens
ttactgccttctgctgcagcgaaagaagagagaagggcacagttacctaag

SEQ ID NO: 339575 - DNA, 78 bp, Homo sapiens
attgtctcggacgtgcggggcctgggcctcccggtccgcaagcaggacgtgaccacgcagtctgtgatggggtttgat

SEQ ID NO: 339576 - DNA, 75 bp, Homo sapiens
atcagctacagactttcctgagtcaggagtataatgtctcaggaaggcgattatgggaggtggaccatatctagt

SEQ ID NO: 339577 - DNA, 95 bp, Homo sapiens
cttcgccttctgccgtgattgtcagtttcctgaggcctccccagccacgctttctgtacagcctgcagaactatcgggacttacagaagtctacc

SEQ ID NO: 339578 - DNA, 83 bp, Homo sapiens
gcttcataccagctgaagagcgacaagccgctggcagccgcggatctcaccgccgctcaggatgactatgctcagctgtgtaa

SEQ ID NO: 339579 - DNA, 82 bp, Homo sapiens
tccgacagccaggcccgggagaagaggactcagagagagtaatgataattaccggaccaaacatgggtggaaagagctccta

SEQ ID NO: 339580 - DNA, 50 bp, Homo sapiens
cttatcttaatggaatattgtcgagctttccccacaaataaaccagagaa

SEQ ID NO: 339581 - DNA, 90 bp, Homo sapiens
cctggtcttcgggctgtcgctcgtctacttcctcagcagcaccttcaagcagaaaagctttgacctggaaatactacgcaaaaaaaattc

SEQ ID NO: 339582 - DNA, 82 bp, Homo sapiens
cttggtttcgggatctcggtgctgcagacggcgagacctcctgcacaggtgtaccttccggtttcccagcacggccatcaag

SEQ ID NO: 339583 - DNA, 83 bp, Homo sapiens
gcattcgctacgcgggccgacccttgcagtgcctcatccagggactggtgattgcagctggaagtgcccatgaccgagctggc

SEQ ID NO: 339584 - DNA, 74 bp, Homo sapiens
acaccaccgcactgtcgctgcccgcctgccctgaggagtccccgctgcttgagcagcccgacggccatggaggc

SEQ ID NO: 339585 - DNA, 90 bp, Homo sapiens
caggagaagctggagctggcagagaaaaaggccaccgatgaacttgctactaccagcaccatgccctaccaatatccagcactgaccccg

SEQ ID NO: 339586 - DNA, 82 bp, Homo sapiens
tcgtctcctgtgtggcgatggtcttcctgctggggctcatgtttgaggatctcgaggacctggaagaagcagaggagccaga

SEQ ID NO: 339587 - DNA, 101 bp, Homo sapiens
gcctctttgtcactgcctggaccattgtccctgctgtttctcaggcatagaatgtcaagctaaccaggcgtccgctacttcagaagagtgtactgtcgcat

SEQ ID NO: 339588 - DNA, 90 bp, Homo sapiens
cttccaccgtgattgtgagtttcctgaggccttccctagccatgcttcctgtatagtctgtggaacgagctgtaaatgatcaagttttgt

SEQ ID NO: 339589 - DNA, 50 bp, Homo sapiens
ggctcgctcgcggctcttcggccatgttcaaaaggtgatgacctatcaac

SEQ ID NO: 339590 - DNA, 100 bp, Homo sapiens
cacctatatacttggagttggagacaggcacctggataaccttttgctaacaaaaacaggtgttccttcaggtaaagtgtcttcaagtagcagctctttg

SEQ ID NO: 339591 - DNA, 74 bp, Homo sapiens
catccgtgactcctggaatgcagacccccccaagacacatatgacccaccaccccatctctgaccatgaggcca

SEQ ID NO: 339592 - DNA, 100 bp, Homo sapiens
ctgggcccggtgtctgccgtgggcgtcacaggtcagaatggcggcagtggagcatcgtcattcttcaggattgccctactggccctacctcacagctgaa

SEQ ID NO: 339593 - DNA, 51 bp, Homo sapiens
gcaaacttgacactcaccctgaccggtgtcgtgaaaactacccctaaaagc

SEQ ID NO: 339594 - DNA, 50 bp, Homo sapiens
ctccggcggcgcgtcccccgagcttgagacaagaggagcagcagcggcac

SEQ ID NO: 339595 - DNA, 74 bp, Homo sapiens
cgcagcgacggcgtcgggagagcgcgcctagccggctcgcgaatgccatggacaatattaccaggcagaaccaa

SEQ ID NO: 339596 - DNA, 51 bp, Homo sapiens
cagtggtcgcttcttctccttgacctcatagttattcctaggagtcaagaa

SEQ ID NO: 339597 - DNA, 100 bp, Homo sapiens
tggagattctccggggacccttccgtatctgcctaggcattttgctgtctcctcctaatacggctgcttttgtcagagacgttttattaccgggagaatg

SEQ ID NO: 339598 - DNA, 82 bp, Homo sapiens
aagctcctacaaggcaggcagtattgggtgcaggcatccgtgtcattctggaccttactcccaactaccggggtgagaactc

SEQ ID NO: 339599 - DNA, 75 bp, Homo sapiens
gccgcttcgtcctctgcagtcaagacgctgggcgcgtcgaggactgggtacatgtcccagagcaagcacacggag

SEQ ID NO: 339600 - DNA, 82 bp, Homo sapiens
gaaggcccatgagttaggaggattcacgcagaggaccctgcggccttccgcagtgtttgtgtccctgggtacttgagattag

SEQ ID NO: 339601 - DNA, 74 bp, Homo sapiens
ttgctgccgccatacgcgctctccctgtttaggacgtgaccacgcagtctgtgatggggtttgatcctctgcct

SEQ ID NO: 339602 - DNA, 82 bp, Homo sapiens
tatcgagcaaaactttgggcctgtaatttctgttttcaaagaaatcaggtagttcgaggacactacaaaggtcagcaaattg

SEQ ID NO: 339603 - DNA, 98 bp, Homo sapiens
tgaccggggctgtgaaccctggcgaccactgcttctccgtgggcagcattggcgaccagcgcttcacggaagtatttgaaaaggagcagtccatctgt

SEQ ID NO: 339604 - DNA, 74 bp, Homo sapiens
gcaattgagcaggctgatctactgcaggaggatctcaaagatttcatgagacaagctggggaagtaacgtttgc

SEQ ID NO: 339605 - DNA, 100 bp, Homo sapiens
gtgcattccaggtacagaactgaggcccatcaggatgtggtgggaagatttaatgaaagcttctcggacttctattcagagtgaacttcatcgagataga

SEQ ID NO: 339606 - DNA, 100 bp, Homo sapiens
acgaaggggcttcttccagagccaaggaggaagggttgtccgggttcgagaaatggctgctactaccttaagcggtctgctacagtgtaactttcttacc

SEQ ID NO: 339607 - DNA, 75 bp, Homo sapiens
cttgcacctgtcccaactgtaaagaaggtggtggaaggtgcttttgaagatgatgatatcacgcacgttgaagga

SEQ ID NO: 339608 - DNA, 74 bp, Homo sapiens
taatggcaaataacttttccttggagagtcataacatatcactgactggtgtcatggagaaactccagctgggc

SEQ ID NO: 339609 - DNA, 100 bp, Homo sapiens
tgaactgatctctggtccaatgaaccgacacgcctggggggttgcctggtttggatttgccattctctgctggactggaacgtgtgaaagaagaattgtg

SEQ ID NO: 339610 - DNA, 100 bp, Homo sapiens
cctggccagaaaaggaagtaatccctagtgtcagcagattcagcggtactggtgtataataggtggcgggacaggcttcattgggacagccctaacccag

SEQ ID NO: 339611 - DNA, 50 bp, Homo sapiens
cgaatatcgtcatcgttagaaggaaagactttgtttgcctcatcatattt

SEQ ID NO: 339612 - DNA, 74 bp, Homo sapiens
tggagatggtgtcactcatgtcattcctgtggctgaaggggatgctaagggagataaagcaaaggtgaaggacg

SEQ ID NO: 339613 - DNA, 75 bp, Homo sapiens
tctctgtccaaggagatgaagtaacactgatcagtacaatggaacatgaattttcaataaaggaacgtggatttg

SEQ ID NO: 339614 - DNA, 100 bp, Homo sapiens
cttggctcctgtcccgctggccctctgtctgcctgtgtccctgaccatggctccctgcagtaccctttaacgggtcaatgcaaccaacttcatggaggca

SEQ ID NO: 339615 - DNA, 82 bp, Homo sapiens
agaaagccgttgcctccagcaccacttctaatgaatatgcttttaaggctattaaccagggtggccttacatcagtagctgt

SEQ ID NO: 339616 - DNA, 100 bp, Homo sapiens
cagaatctacaaattttgctactgtcagatggattgactatggaaaagttgccaaattggtttctagagaggaaggatctccccagctgtcttcagcaag

SEQ ID NO: 339617 - DNA, 82 bp, Homo sapiens
gcccgctcacctgcgctgtgatgcctgcagagctgtggcttaccagtgcctccggagccagcgtggtggccatagacaacaa

SEQ ID NO: 339618 - DNA, 82 bp, Homo sapiens
caagaaggagatcaatgagcggctgcttactgctcgacaggatcactactcttggaatcaaagataaatccaaatactgcat

SEQ ID NO: 339619 - DNA, 100 bp, Homo sapiens
ttggatcttgtggaaagtcagacttatatagaattggtgataggatcacaacttctgaggtcccagcaagagtcctaacatctagcagctctaccaccag

SEQ ID NO: 339620 - DNA, 83 bp, Homo sapiens
ctgatcaagaaaatcatccatctaaagcaccagtaaaatatggtgaactcattgtcttagggagcgctatagttatgtctgcc

SEQ ID NO: 339621 - DNA, 75 bp, Homo sapiens
gccacctggaccaggaataccacctctgatgcctggaatgccaccagtggaaatttaatggagccaccatttcag

SEQ ID NO: 339622 - DNA, 75 bp, Homo sapiens
cccacttggatcattaaggtgaagaaacctcaggactctccttcagcaactccagaagcttcagactttggtgat

SEQ ID NO: 339623 - DNA, 90 bp, Homo sapiens
gctggcctggtttgatactgacctgtaaatcatcctttaggttgttcctcaaagtcattcaagctgtactcgccgaaggagcccccgaac

SEQ ID NO: 339624 - DNA, 75 bp, Homo sapiens
ctcgcctcccggccgagctgacgtatgccgagattttgctgtcctggaggaccacaccctggctcacagcctgca

SEQ ID NO: 339625 - DNA, 100 bp, Homo sapiens
tgcgggatgcacgcctgtgtcctcattgctccaaactgtgttgtttcagctgtattaggatatgcaatatgatgaggatgatgatgaaatcaccccggat

SEQ ID NO: 339626 - DNA, 99 bp, Homo sapiens
cctgtcaaagggtgagacaaagttcatgatgatgctgaataatcccctatttgctggaaatcctcagcttcaagaacaaatgagacaacagctcccaac

SEQ ID NO: 339627 - DNA, 100 bp, Homo sapiens
cggggatgtatttggaacattatctggacagatgccgaggaatgtgacagggctgggagtgtggccacctgccaggccgtcatgcgtgccgtgattggga

SEQ ID NO: 339628 - DNA, 100 bp, Homo sapiens
ggggaatttccttgtgcctccattcccgggaggggggagcggcgttggaggccaccgtttccagatggctcagcgacttcttctgaggaggttcctggcc

SEQ ID NO: 339629 - DNA, 83 bp, Homo sapiens
cgggcttcccgggaccgaagtgcgaaatacaaccctgggcgctgcctatggcacagccaagagcggtaccggcattgcggcca

SEQ ID NO: 339630 - DNA, 80 bp, Homo sapiens
cagacgtgagctgagggcgcagaggcaggcaggtctcctctgagcctccggcctccataagacccaaaacagatgacacc

SEQ ID NO: 339631 - DNA, 100 bp, Homo sapiens
aggaggaataatatttatggagcatatattatggaacacagattttttatcaagcagaaatgcatcgaacaacgagaatcaagatcactgagctaaatcc

SEQ ID NO: 339632 - DNA, 75 bp, Homo sapiens
agtggcaggtgacagtctgcatgtgcagttttcaggtcaaagggaagtgtaccactgaccacatctcagctgctg

SEQ ID NO: 339633 - DNA, 90 bp, Homo sapiens
cgcccccatcccggaggtctccgccggctcccgggcagttcaattaacctccagaagatggctgaacctgcaggaataccagagcaagaa

SEQ ID NO: 339634 - DNA, 100 bp, Homo sapiens
gtcaaggaatgggtcgaggtagtagaccttacagaaatagggggcacggcagacgcggtcctggatatacttcaggaaagaccacagcaagattctttca

SEQ ID NO: 339635 - DNA, 99 bp, Homo sapiens
ggagacgacgctgctgggtccgctgagcggggcgacccgaggatctgtctggctccattgatgacctccccacgggaacggaagcaactttgagctcag

SEQ ID NO: 339636 - DNA, 100 bp, Homo sapiens
gggggtcgagcacataacggggttcgggtgtctcgtgtgtgaacatcacaggctgccccccggtgtggaccccacccaagtttcctcctccctgtcccct

SEQ ID NO: 339637 - DNA, 83 bp, Homo sapiens
aagctctttgacacacagcagttcttgtcagttatatcggcacaggtggcagtgatttctgaaagactgagggctgtcctggg

SEQ ID NO: 339638 - DNA, 98 bp, Homo sapiens
cttggtttcaacactatcggaatggagagaaggatattcctggactgactgatactacagtgcctcgccgcctgggccccaaaagagctagcagaatc

SEQ ID NO: 339639 - DNA, 83 bp, Homo sapiens
ctcagttggaagcagccgatccagcctgcggagcctgtggggcagggagtggagcaactgctgtagtccaagcagcttattgt

SEQ ID NO: 339640 - DNA, 100 bp, Homo sapiens
acgaccaccggataattctttttatgtgcgaacatgtaacaagaatccaaagaaaacaaaatggtggtatcatggagccagtctacttgatgacttatac

SEQ ID NO: 339641 - DNA, 100 bp, Homo sapiens
tttccatcaaaaagtgattaagcagagaatggagaagaaggttgattccagggaggctgccggcgtggaccgcgggaaggcggggctggggctcggcggg

SEQ ID NO: 339642 - DNA, 75 bp, Homo sapiens
aaaaactagccttcttgttgaaagctttcttcgagagtcacccagctccttcagctgagcgtaccatccagcagt

SEQ ID NO: 339643 - DNA, 50 bp, Homo sapiens
tatcactcgctcccttgatgatcttgaggaccctgtggttttggcatttg

SEQ ID NO: 339644 - DNA, 75 bp, Homo sapiens
agcagaagaaacacttcctataaatctcgcccaaacaggaaagagagggagccggcatcagaaaacaacactggg

SEQ ID NO: 339645 - DNA, 96 bp, Homo sapiens
gtcagatcagaaagaggcctccctcgtgagttgggcttggtaccgtgctgcccagaatgcccttcgggaggtgtagacggggcactgccttcagag

SEQ ID NO: 339646 - DNA, 90 bp, Homo sapiens
ctggaacatctgtcccctgttcaaagagccgaattcggaggatgtggaatgacactgtgaggaaacagacggagtcctccttcatggcgg

SEQ ID NO: 339647 - DNA, 90 bp, Homo sapiens
cgcgagtgtccgcggccgagcagcagaacccctgaacagtgcccaagtgttgtctctttgttgtcagagagttacaaccctcatgtgcgc

SEQ ID NO: 339648 - DNA, 75 bp, Homo sapiens
agacctggatctcgcgccacaaggagatgggatacccacccaccatcccagggtctacaacatccacagccggac

SEQ ID NO: 339649 - DNA, 96 bp, Homo sapiens
agaagctctccggtgtggtgaagagcgtccaccggcggctccgcaagaagtaccgagaaggtactggaaaactgggcttctcttttgtgagaatta

SEQ ID NO: 339650 - DNA, 100 bp, Homo sapiens
tcaactttgaagagatcgactacaaggagatcgaggtggaagagtctatcagagttagaaacagatattaaaattttcaaagagtcaattttggagatct

SEQ ID NO: 339651 - DNA, 74 bp, Homo sapiens
ccaggagagaatactactttgcaataacaatggaaaggtcatttcaacttttatcaaaatacaactcaaaccta

SEQ ID NO: 339652 - DNA, 75 bp, Homo sapiens
gcctcccaaagtgcttggattacaggccttgaggagctggttctctcagagatgaactcaccaagccggacccag

SEQ ID NO: 339653 - DNA, 75 bp, Homo sapiens
tactccctagcagtgtggtaaggaaccagcagcacaaacactgttggggcaacagtgaacagccaagccgcccaa

SEQ ID NO: 339654 - DNA, 100 bp, Homo sapiens
tcaactctacattcttctggagcatggacaagcgaatttcagtcagtggttctccaaaaaatgtggaatcctttgcatctatgctgagacattctcctct

SEQ ID NO: 339655 - DNA, 100 bp, Homo sapiens
agcagccagtccagcgggtggcccaacgatgtggatgcagttaaacacagtgggaatatcacttttgatgagattgtcaacattgctcgacagatgcggc

SEQ ID NO: 339656 - DNA, 75 bp, Homo sapiens
tgcagaaatggtgggacttgtgtagtggagaaaaatggtcctatgtgtcgaattggcagagggggtcgatttggg

SEQ ID NO: 339657 - DNA, 100 bp, Homo sapiens
tgaaggcagcactcagggccaggggagagagaagaggatcagcagtgcagccccaggatgcctcgcaggacctgtatgaggctggagagaagaaatgggg

SEQ ID NO: 339658 - DNA, 100 bp, Homo sapiens
caggaactgggtgctggtgcctatagcatgagcatggcggacaccgacctgttcatggaatgtgaggaggaggagttggagccatggcagaaaatcagtg

SEQ ID NO: 339659 - DNA, 82 bp, Homo sapiens
aggcggcgcagtacaccaacgcggtgcgcgaccgggagctggacctccggggacaggctgcgggaggagctgcaggactgag

SEQ ID NO: 339660 - DNA, 50 bp, Homo sapiens
tacatctgcagataaagtggagagggcagctttggaagaagtagaaggtg

SEQ ID NO: 339661 - DNA, 98 bp, Homo sapiens
gctgacatcagcggctctttgtatgatgacgctcttgtcaggatggtgaagctgttcatcggaaacctgccccgggaggctacagagcaggagattcg

SEQ ID NO: 339662 - DNA, 95 bp, Homo sapiens
tttaactacttcactcttggagtgttgaacagacacggtagaagactcgcccattttggaatgtgaccgtctgtccttcaggagaggacaccagg

SEQ ID NO: 339663 - DNA, 100 bp, Homo sapiens
cggaggaggaggaagaggaggagggcgactgtatgatcgtggatgtcccggatgctgcggctcaccttgcagagcgccaagtcccgagtggccttctttg

SEQ ID NO: 339664 - DNA, 75 bp, Homo sapiens
ttgggtcaacaccacatgaagagctagagagacttgcaggtgacagagctgaatgaacctctctccaatgaagat

SEQ ID NO: 339665 - DNA, 80 bp, Homo sapiens
ggacagttacgagatcttcatctgtcacgccaacgtcatccgctacatcgtgtgcaggcggacctacgtgggcgccatgc

SEQ ID NO: 339666 - DNA, 100 bp, Homo sapiens
atttacagatgcaggatcggaaagaatcccggccagacgtgcgaacagctccagctgggtttggactggtctgaagagagcggagaggaaccagaggact

SEQ ID NO: 339667 - DNA, 101 bp, Homo sapiens
cattgtagcaaaatggcgactgtcattcacaaccccctgaaagcgtactccaaagattcaggtttactcacgtcatccagcagagaatggaaagtcaaatt

SEQ ID NO: 339668 - DNA, 100 bp, Homo sapiens
aagtggtgcacaggtactaccgaccggacctgaaattgtatgctgctatgcatgaacctgatggagtggccggagtcagtgcaattagaaaggcagaacc

SEQ ID NO: 339669 - DNA, 74 bp, Homo sapiens
gcctacaggagtatgatgcaagattttgaagccagcttcataaggctattggacaaaataacgaatggttctcg

SEQ ID NO: 339670 - DNA, 83 bp, Homo sapiens
ggttgctgggatcttagtacaaaacgtgttaaagaatggaagttggatacactttgtgacttgtacgagacactgaccattac

SEQ ID NO: 339671 - DNA, 99 bp, Homo sapiens
tcgagtaccttccctgtcccatcgcaaacccaaagatccccgttcctggagattctgattgagatcacccggaagttcaggctgaattctgaaggcaaa

SEQ ID NO: 339672 - DNA, 101 bp, Homo sapiens
aaagaaagaaatattttgttatatgggcttctcatatcttacccacagtgtggaaaagccactggcagtgattcaagtggtgtcattgatctcacaatgga

SEQ ID NO: 339673 - DNA, 75 bp, Homo sapiens
cttgaaaaagctgccctgagacggtgtcccgccgaaaggaagatgagaatgtgcctactgctcctgatcctccaa

SEQ ID NO: 339674 - DNA, 83 bp, Homo sapiens
cctcaactctctatgtttgccagtggtttattttacagagatgacctgatcagagccatcaagaaactaaaggcacttggcac

SEQ ID NO: 339675 - DNA, 100 bp, Homo sapiens
ttccagaagatgattccaacgccaccaattccaacctggcaccgcctagaatccttcgatctcgcttcaggaagaaaagtacctcatcctcggccaccga

SEQ ID NO: 339676 - DNA, 75 bp, Homo sapiens
ttcgcagtggtcgcttcttctccttgcactgtatcaagaactgcctcctgagataaaggagcgatcccctccttt

SEQ ID NO: 339677 - DNA, 101 bp, Homo sapiens
cgtgtggatgctttacttttagacctcagacaaaaatttccacccaaatttgtgcaggtttcctttacctagtcatcctgctgcacctcctgaacatctta

SEQ ID NO: 339678 - DNA, 100 bp, Homo sapiens
tcattgtctcggacgtgcggggcctgggcctcccggtccgcaagcagaaatacgcatgctcacggaagccattataatcccatcatgcagcagcctgcac

SEQ ID NO: 339679 - DNA, 50 bp, Homo sapiens
gtgggtggcatgactaggatgcccaaggaactgtgtgaaccacagagcta

SEQ ID NO: 339680 - DNA, 74 bp, Homo sapiens
cccgccagcatgccccagtccaaagcaagctgaacagctgggaagagaagaccagcagcgactgcaccgaaacc

SEQ ID NO: 339681 - DNA, 90 bp, Homo sapiens
ggcggcggcggggatcgtctccggcagctttgaacttggcctactccagcatttacggcagctaccggaacttcgtgggacctccacact

SEQ ID NO: 339682 - DNA, 109 bp, Homo sapiens
gcattttttacagattgaagatttgtggcaaccctacgttgagtgtcatggagaaactccagctgggcccagagattctgcagcgggaaaatccaaggcttatttatgc

SEQ ID NO: 339683 - DNA, 75 bp, Homo sapiens
agggatccttcacccgtgtctgggctccaaacgaatcctgcggtcccatgagattgtgctgccccccagtggaca

SEQ ID NO: 339684 - DNA, 75 bp, Homo sapiens
ttagcccaacaaggaaacctcttagaaaaaagagtagcttcagtatcagacacagcacagcagccatctgaagag

SEQ ID NO: 339685 - DNA, 82 bp, Homo sapiens
cggaagtgggaagagagaaaggttgtgatggcggctatagctgcatccgagagggtgagcccctcagcggagatggtaatga

SEQ ID NO: 339686 - DNA, 100 bp, Homo sapiens
atctgctgtcgcctgcagctgctcgcctgtctccgtcggaagggagcccaagctttgcagagaaccactcacgaattcttgtttggtgcccttgctgaac

SEQ ID NO: 339687 - DNA, 74 bp, Homo sapiens
atgcttctgacggccaatgaaacccccaagatgggcatctattacattccacctgtcaagttggctgttgtttg

SEQ ID NO: 339688 - DNA, 97 bp, Homo sapiens
caccatcgagcgcctggaccgctttcgctgtgacccttatgcagggaaagaggacatcgtcccacagctcaaaggcataaaggcatcacaagtggtc

SEQ ID NO: 339689 - DNA, 75 bp, Homo sapiens
cggtgtagaggcggcggacgggccggagggaggatgttaaagccccgcgcattgcagtgtcgagatggctatgaa

SEQ ID NO: 339690 - DNA, 89 bp, Homo sapiens
cagatccgggagcacgtcatcgccatcgaagctgactttggtgtgtctgccaagaatctgaagactctacagaaacgagattccttcat

SEQ ID NO: 339691 - DNA, 75 bp, Homo sapiens
gctgatagtctccagcgggcctggactgtgggctggtgtgtggaactgtgcattcccttattcgtggaagcagcc

SEQ ID NO: 339692 - DNA, 83 bp, Homo sapiens
tagtctacaaaggaagacttgtaacctggagaagagggaaacagtgcttcttagtcctacgtcagcagcagtttaatgtccag

SEQ ID NO: 339693 - DNA, 83 bp, Homo sapiens
ccattgacgccatgtcgggttattcgagtgaccgagaccgcggccgggaccgagggttatgccaaggacgccctgaatctggc

SEQ ID NO: 339694 - DNA, 74 bp, Homo sapiens
gaaattacccagtatattcaaagctacaagggatttgttgacataacgaatagcctaacatggcagaccagaga

SEQ ID NO: 339695 - DNA, 100 bp, Homo sapiens
tgcggatcctgctggtgggagaacgtcagttgctctcccctgaaggaagagtattctcggatttcacctcagaggaggaagaattcaggctgccagaact

SEQ ID NO: 339696 - DNA, 75 bp, Homo sapiens
gccctgagcagctttcagcactggaggtacctcaggatgagtggggagggtaccccaccggtggcaaagatgagg

SEQ ID NO: 339697 - DNA, 82 bp, Homo sapiens
gcgaggaggcgcgggaggtgttcgagaacgaccccgagacgaggagctgatcacgcagtacctggctgagcttcggaacccc

SEQ ID NO: 339698 - DNA, 100 bp, Homo sapiens
tcagaaggaacaagaagagaaactgtatatgatgctgccagtgtttaacaggaattatatccagatcgagagacagaagattctgaaagggttcaatgaa

SEQ ID NO: 339699 - DNA, 90 bp, Homo sapiens
tggaagttaagggagacaaagttgaaaacaaagtgctggctctacagagtgaaggtttaaatccaaggtcatggcaaaacatctgaagtt

SEQ ID NO: 339700 - DNA, 95 bp, Homo sapiens
agacgccatgatttgcctttagaaggagctaagttggtgggccagtttattgctagagctgttggagatggaattttatgtaatacctatattga

SEQ ID NO: 339701 - DNA, 100 bp, Homo sapiens
ggcaagcagcaggctgcctgacacaggagagggccccagcagggccaccgggcggcaagaaataaggatctggcatgtcaacacaaacataggaagttga

SEQ ID NO: 339702 - DNA, 74 bp, Homo sapiens
aaaggatggctttggctttgcagacagcacagtcttacaggtgtgggcaagagcagtttactgttgcgttttgc

SEQ ID NO: 339703 - DNA, 90 bp, Homo sapiens
aaaaatgactaaaggagactttataggctctaatgctagaaaatttacagaaacactcaacaccccatgctgcattccagccaaattccc

SEQ ID NO: 339704 - DNA, 83 bp, Homo sapiens
ccaagaccttctcttgccaggccctgccctccgagggcttcagtctggagccgcccagaggacgatggcctggggcaatttcc

SEQ ID NO: 339705 - DNA, 100 bp, Homo sapiens
cacagtgctcctgcagtctctctgtgtggctgtaacttacgtgtactttaccaacgagctgaagcagaccgatgttgttgtcaactccgttcccttggat

SEQ ID NO: 339706 - DNA, 98 bp, Homo sapiens
tggggaatgcttttttatctcatattagtgcctgtgatggcatctttcatctaacacatgatagtatttctgctgcaagtacttctgatgttcaagat

SEQ ID NO: 339707 - DNA, 100 bp, Homo sapiens
cttcactttgctgcctgtgcactgaggcctcagaatctgctctacccgacttaacaggtgctccagctgctgctcctgcccctgcctcagtcccacagat

SEQ ID NO: 339708 - DNA, 83 bp, Homo sapiens
gcttgggttgacgatagccattcgctatagccacaggttgacatcatggacatatgtgagtccatcctggagaggaagcggca

SEQ ID NO: 339709 - DNA, 75 bp, Homo sapiens
ccgtgcaagtttgccggccccagggcccaggagctatcgaaaaaccttgaactgagtactaacagtttccaacga

SEQ ID NO: 339710 - DNA, 97 bp, Homo sapiens
ccaccctggtcacttccccaccggaggtttatcacaagaactgggcacctccgggctgtgaaaagttagggaagtgtctgacacctccagaatccat

SEQ ID NO: 339711 - DNA, 97 bp, Homo sapiens
taaagccgcctttcccctctgcactgtcaaggagaagatcattgaccaggtgtaccgtgggcagccctgctcctgctggcccaggccagacagcgtg

SEQ ID NO: 339712 - DNA, 80 bp, Homo sapiens
cgctctcggcttgaccgcattcttcctcccagcttccccgggcgctgcctggacaggcctgcctgcgtgctgggacatgt

SEQ ID NO: 339713 - DNA, 100 bp, Homo sapiens
tcctatcacgggcactagtgtggctctcctgttccagcaattggattgtctacatgggctggtgtgaagcccgggagcaagaccccctccaggacagagt

SEQ ID NO: 339714 - DNA, 100 bp, Homo sapiens
tcatttttaagaaaatttgtgcacacatttcatggacagctgattctttcccaggaagaagatttctctccccatgtcagctgtagtctgcctctggctt

SEQ ID NO: 339715 - DNA, 100 bp, Homo sapiens
ctttccgctgtggacaggaaaacaggagcatggggaagtgattgactgtgtgcaggagctgagccactccgtgaacaagctgtttggtctggcgtctgca

SEQ ID NO: 339716 - DNA, 100 bp, Homo sapiens
aggcagcggctggaagaagagttgctgtctgtgaggggaacaccaagcagagctctggccgagagacccaacatgagtgaagtttcctgcaagaaacggg

SEQ ID NO: 339717 - DNA, 83 bp, Homo sapiens
cagagctttcacgaaggcaccgacgtcatcatgctgaccaccaatcagatccgtaaggcctatggtcctgcccagcacgccat

SEQ ID NO: 339718 - DNA, 100 bp, Homo sapiens
ggccgagttcatgagcacatatgtcatgatgtatgctattgcggcagcacctcccgagatgtgttatgtggaaccgatgtaggaaagtctgatggatttg

SEQ ID NO: 339719 - DNA, 100 bp, Homo sapiens
cagaccacacccttgagcctgagcccgacattattcctgagatcatgattctggaaggaggtggtgtaatgaatctcaaccccggcaacaacctccttca

SEQ ID NO: 339720 - DNA, 98 bp, Homo sapiens
acagcagcctggtctcactgggaactttatagtggtagcagagactgcaacattctggcttgggttccatccttatatgaaccagttcctgatgatga

SEQ ID NO: 339721 - DNA, 100 bp, Homo sapiens
cttggaaggaaaattttgactcagcttacactgagctgaatgaaattggaagcaaactgaaaccgtgtcagttcagtcttcggtattggggaagggtgta

SEQ ID NO: 339722 - DNA, 97 bp, Homo sapiens
accactagtaccatgagtccctgcactggttaaagccatcgccacaacctggacaggcagcaaggtttattttcttgaaaaggctccaggcttcggc

SEQ ID NO: 339723 - DNA, 75 bp, Homo sapiens
gggaacccaggccccgccgaggcggccagtgagacggtttaagcggaagcatcttactgccattgactgccagca

SEQ ID NO: 339724 - DNA, 111 bp, Homo sapiens
accgaggaaaaggaatcgtatcgtatgtccgctatccagaacctccactctttcgacctgcctagagctggaacgttacctccagagcgagccctgctatgtttcagcctc

SEQ ID NO: 339725 - DNA, 100 bp, Homo sapiens
gaaaagctgagatatgatgattttgaagtcatttcacatcgaagccatgatttaaatatcggcgttaagccttatgattctgcagatgactggtctgagc

SEQ ID NO: 339726 - DNA, 75 bp, Homo sapiens
gaaactgcaggacttggatactgattatggctcaggctaccccaatggcgaggcggctttgcacaaggtggacat

SEQ ID NO: 339727 - DNA, 95 bp, Homo sapiens
caaatccatatcatactgcagaaattcctgactggcttcaggtttacgcacgagcccctgtgaagtctacctgcaagtcggatttcccaggttat

SEQ ID NO: 339728 - DNA, 90 bp, Homo sapiens
gaaccccctggcagatgttcaaatcacttgcaagtccactggtctccacataatgaaactattctggcttcaagtggtactgaccgccgc

SEQ ID NO: 339729 - DNA, 100 bp, Homo sapiens
gttgtgctgctgcttcggggactcagccagaaagctactgagggactgttgacattcagggatgtggccatagaattctctcgggaggagtgggaacacc

SEQ ID NO: 339730 - DNA, 97 bp, Homo sapiens
aaaaaacttccagaacatctgggagaatatttaatggaaaatcgcttggttaaaacctgacacttttaacaggttgattcttcaccacactgaaacc

SEQ ID NO: 339731 - DNA, 97 bp, Homo sapiens
gtctcatgggcagtggtttgagaatgatatggaacctagcaaagctgttccactgaatgcatctaagcaagatggacctatgccaaaaccacacagt

SEQ ID NO: 339732 - DNA, 101 bp, Homo sapiens
gattcgtagctaagactctacgacatccctgaagccgggaaatgctcctgggctataacgaaaagccaataaatctacaaatgtttattgggacagcagat

SEQ ID NO: 339733 - DNA, 100 bp, Homo sapiens
ggaccaatgcatcttcccaccaccttaaaccactggtccctccttgtggtccatttctgggcaccatgggctccacagtgtgcacagatgaacgaagtta

SEQ ID NO: 339734 - DNA, 100 bp, Homo sapiens
gtctgttcagacttcagcttggtgcatttatgtttgaatcatctttaagtctggcggtcacaaagtggggactcaaggcctccaggtgtttggatgagaa

SEQ ID NO: 339735 - DNA, 74 bp, Homo sapiens
acctctgcagtgtcttccacaacctggacaatgcagatcttcgtgaagactctgactggtaagaccatcaccct

SEQ ID NO: 339736 - DNA, 74 bp, Homo sapiens
tgcagggtaacatggcggatgcggaagagctccaaacgagaatggaagccgctggaggaccgtagctgcacaga

SEQ ID NO: 339737 - DNA, 104 bp, Homo sapiens
atggagatatgatttctgctgttcaaaaaagtccctaaaggtatggcatttcaaatatagatacaaccattgaaggaacgtcagatgacctgactgttgtagat

SEQ ID NO: 339738 - DNA, 90 bp, Homo sapiens
gaagaaatagagtttcttaatgcaattttcccaaatcacaagatttctgttgtgaaggatgtggctctgccatgaaggatgtcctgttgc

SEQ ID NO: 339739 - DNA, 75 bp, Homo sapiens
tgattgagattgtggaggaggaaattgatgatgcaatgcgcaactttgctgaaaaagtgtttgcctctgaagtca

SEQ ID NO: 339740 - DNA, 75 bp, Homo sapiens
cagggccccgagccggcccgggtcgagctagaacaacagaggcagcagttgcttactgaacgccaaaacttccac

SEQ ID NO: 339741 - DNA, 75 bp, Homo sapiens
cgctcattgggaatttagttaaggctgctcttgagcatgaagaagccaagatcctccgaatccagcttgaattga

SEQ ID NO: 339742 - DNA, 75 bp, Homo sapiens
tgtcaagaaagaaaactcctccttgtacctaggtgctggagaatctggtaaaagcaccattgtgaagcagatgag

SEQ ID NO: 339743 - DNA, 100 bp, Homo sapiens
ggcgtgcttgtgggacacccgtttgacacggtcaagcaaggtgtccctgccttcactgtgctccaacctgaaggtcccctggcagtgctgagggaccgag

SEQ ID NO: 339744 - DNA, 100 bp, Homo sapiens
caagtcgagactactggccgaaggggcgtctgcggctctccgccgtccccagccctgcctctccctgggctctgagatttaccgcattgtttctcagaag

SEQ ID NO: 339745 - DNA, 75 bp, Homo sapiens
gtagagaagaatgaacattgtattgagaacaatatagatttgcagtcctattttgtaacggattatgatccaacc

SEQ ID NO: 339746 - DNA, 75 bp, Homo sapiens
tcgtgtgaaaattttcctgggtgcacttgcaggaaagacatggtgaagatttcaatggatatctttgtgaggaaa

SEQ ID NO: 339747 - DNA, 101 bp, Homo sapiens
gagaaacccagccgaagcatttaaaagatccctgcatgtcactgagtccaccatgctttacagaagaagacagatttagtctggaagctcttcaaacaata

SEQ ID NO: 339748 - DNA, 126 bp, Homo sapiens
gaagtgaagaaggcgcatcactcccagctgcgcaaagcttgcgaggtggcgttagtcaccattactttaagtactgcaaaatctcagcattggctctgctgaagatggtgatgcatgccagatcgg

SEQ ID NO: 339749 - DNA, 83 bp, Homo sapiens
gccaggaagcaattctggaagcgcagcaacagcaagctcccgggcagtatttagcgtggactacaatgatgaactggatatct

SEQ ID NO: 339750 - DNA, 100 bp, Homo sapiens
gactttatcaaaaacatgattacagggacatctcaggcgagtatgggctccggaacaaacgtgaggtctggagggtcaaatttaccctggccaagatccg

SEQ ID NO: 339751 - DNA, 87 bp, Homo sapiens
ccggaatcattcccttggctgttaatttctcagagttaccgagctgatacccagacataccagccttataacaaagactggattaaa

SEQ ID NO: 339752 - DNA, 75 bp, Homo sapiens
caggcatcctcatataattaaactgacttgtttacactgggcatgtaaacgaaaccatggtcaggtggtctctta

SEQ ID NO: 339753 - DNA, 100 bp, Homo sapiens
tggcggccaatgtgggatcgatgtttcaatattggaagcgctttgatttacagcagctgcaggtcgcaatggaagaagagatcgccgcgctggtcattga

SEQ ID NO: 339754 - DNA, 98 bp, Homo sapiens
ctgctgcacccacgaatctgcccacccctcctgtaacccagcctgtttcacttcttgaccattcctcaagaattttgtatccaaggcccaaaagtttg

SEQ ID NO: 339755 - DNA, 83 bp, Homo sapiens
ccatgatgctgccatctttccaggaggctttggagcggctaaaaacctgtctccctgagtctttgaggacacagcctcgctgg

SEQ ID NO: 339756 - DNA, 100 bp, Homo sapiens
tccgacacggagcctcatttactgaacagtggacagatggttatgcttttcagaatcttatcaaaagcatcagatggtgaaggagaaggagacacagaag

SEQ ID NO: 339757 - DNA, 97 bp, Homo sapiens
cgcctcgccacgcgcccggacggcctggggttgctgcccgtcagtctcgaaagggcaaaataacatggcagccagacgaattacacaggagactttt

SEQ ID NO: 339758 - DNA, 75 bp, Homo sapiens
caggagctcaatgcccacaaccagagaagagcgttcctctttgcatcctctatgagaaataccgtgactgcctta

SEQ ID NO: 339759 - DNA, 50 bp, Homo sapiens
tttacttcaagcaggggctgatttaataatgaacagttggcgcgatcagg

SEQ ID NO: 339760 - DNA, 74 bp, Homo sapiens
cctgtgactccacccagcaaagcgggccggcgtagcttctgggatatgctggtgtgctccatcctctggtctcc

SEQ ID NO: 339761 - DNA, 97 bp, Homo sapiens
ccatctggctggcagagcaacgggtgcccctgagtgtgcaactgaagcctgaggtctccccaacgcaggacatcagaactgataaatttcaaacgga

SEQ ID NO: 339762 - DNA, 99 bp, Homo sapiens
gaaaatagaaaagtgtggctggtctgaagccttaaagaaggagaggatcagaaagagataaagattgagccagctcaggctgtggatgaagtggaacct

SEQ ID NO: 339763 - DNA, 101 bp, Homo sapiens
ctgcggtgctctgccatattgtgtcttccccggccggtccctcgcctcccggccgagctgacggaccgcctctttttcgtcatggaatatgtaaatggtgg

SEQ ID NO: 339764 - DNA, 100 bp, Homo sapiens
gtccaaagcagtcgtaagaagaggtcccaatcccccactctttccgccctaatggaggtctccagtttcgaaacagactgaatttgatctgattaatgtg

SEQ ID NO: 339765 - DNA, 75 bp, Homo sapiens
aacctctacgccgacatcgacgccgcgtggcaggcgctgcgcacccgcgatgccctcctagctagccgtcacggg

SEQ ID NO: 339766 - DNA, 100 bp, Homo sapiens
tcatggacaataccacgctgctgattgagctggaatattgtaatgtgattacccaaccagctgaaatgaatgttaaaactgagacagagagtgaagagga

SEQ ID NO: 339767 - DNA, 75 bp, Homo sapiens
gatggaggggaaaatttcatagtgcttctgcatctaggaatgaagaatgcagtaatagtggccttgtcttcaaaa

SEQ ID NO: 339768 - DNA, 100 bp, Homo sapiens
tgaaggcatgccaatttatcgtagaccatatgaaaagggtcgcctaatcatcgaatttaagagttaaacatgaagtttctggagagacagtggtatttca

SEQ ID NO: 339769 - DNA, 75 bp, Homo sapiens
ggggattctcgacctgctaacagaactggaccttttcgctctcatttcactcttcagtgttcctgttatttatga

SEQ ID NO: 339770 - DNA, 100 bp, Homo sapiens
atctgaggtggctcacgttgaccaactctttgatgatgcatccaggccaatgagtgccaggagcgccctgttgagtgtaagttctgcaaactggacatgc

SEQ ID NO: 339771 - DNA, 100 bp, Homo sapiens
ggctgcgggaacccggaggcccaacgtggtgctgctcctcacggacgaccaggacgaagtgctcggcggcatggttctccttactatgacaatgtccgcc

SEQ ID NO: 339772 - DNA, 100 bp, Homo sapiens
tgtattggagaaggccaatttggagatgtacatcaaggcatttatatgagtccaggtacacagggacaagagaagatgatgatgatgggaccaaaggaag

SEQ ID NO: 339773 - DNA, 82 bp, Homo sapiens
atgtccagatgaaccggctgatgcatccaattgagcctggaggctgatgggaaccaccctgtagaggtccatctgcgttcag

SEQ ID NO: 339774 - DNA, 100 bp, Homo sapiens
gaacaagcatctactcctgcagggctgaattccacagctaaaaatcgaggggagctgcagcgggagtcagacttcatggccagtgtagacagcagctgga

SEQ ID NO: 339775 - DNA, 100 bp, Homo sapiens
agcgtcctggaaaacttcaccatcctccagatggcaactcttggggaagctcgcctaagggaaatggaagccttgcagtctctcagactcgccaatgaag

SEQ ID NO: 339776 - DNA, 82 bp, Homo sapiens
tccacccaccgccgccgcctcccagtaacctttggaaacatcagaagctactctccattgacctggacaaggtggtgttacc

SEQ ID NO: 339777 - DNA, 75 bp, Homo sapiens
caactgttgtcctcatgatgtcctttctggaactaaaacgttgtgtgacgtgatcctcatggtccaggaaagaaa

SEQ ID NO: 339778 - DNA, 100 bp, Homo sapiens
tattagccatggtcaaccccaccgtgttcttcgacattgccgtcgacggcgagcccttgggccgcgtctcctttgaggcctcctacacctacctctctct

SEQ ID NO: 339779 - DNA, 83 bp, Homo sapiens
cttctgctctcactgcggagaggtgtttggtgcagaagaagtctgggccaacggtcacaaaagttgtcactgttgtgacaacc

SEQ ID NO: 339780 - DNA, 83 bp, Homo sapiens
cttaccaaggaatctgcttttcaagtatgccaccaacagtgaagaggtccaggggcaagttcatcctactctcgagtctaatg

SEQ ID NO: 339781 - DNA, 100 bp, Homo sapiens
gccgcggcgaggagcgagcgctgcgaggtggcggcctgaggagccgggtgtgggctgagccctgcctgattgatgctgccaaggaggagtacaacggggt

SEQ ID NO: 339782 - DNA, 75 bp, Homo sapiens
tggagcgtgtcctgaaggagttccaccaggccgggaagcccatcgggaatactcccccagttgcaagaggcgcag

SEQ ID NO: 339783 - DNA, 83 bp, Homo sapiens
agcctggagccaagtacccagatgtggcctctcccacactccgcagatggtggccagcagagatctgcaaccccaggtctgtg

SEQ ID NO: 339784 - DNA, 80 bp, Homo sapiens
ctgcaccaagtggcgaaggagccggctccaaggtggcagtagagaagagcatcacagaagttgctcaggagctgacagag

SEQ ID NO: 339785 - DNA, 96 bp, Homo sapiens
ctgctgccaactcacgtctggggagtggggctgctgtccaatcccagagatctttgtgaggcgagcctcaccaacagcgtggagcctgcacaagga

SEQ ID NO: 339786 - DNA, 98 bp, Homo sapiens
tacatgaagacacggcttttccaggtgaacaacaacgggatcatctccttcctgaaggaggtttctcagttcaccccagtggccttccccattgccaa

SEQ ID NO: 339787 - DNA, 87 bp, Homo sapiens
atctcttacctttcaaagtggtgggatattatagatattcagaagaaggatgctgttaaaaggtgtgatgaatgcagactctgctac

SEQ ID NO: 339788 - DNA, 90 bp, Homo sapiens
ttagccaccgccgccggcagcgaagacgcggagaaaaaagttctcgatctcttacctcagctagaagctccgagttctcttactcccagc

SEQ ID NO: 339789 - DNA, 82 bp, Homo sapiens
gcagtcagctacgggaattcagtactctgtaacacccagctaccagcacaaacacagagcagtctaaagcaaccgagcactg

SEQ ID NO: 339790 - DNA, 75 bp, Homo sapiens
tgaactcagacctattgcaaggaaaggacactcccctaacatatttggtggtggtatcatggatacagaaatgtc

SEQ ID NO: 339791 - DNA, 90 bp, Homo sapiens
gagaccggctgccggctgacgtctccttgcgatggagcatatccggacgaccaaggatgtgaagttaccccagatgtaaacatttcaggc

SEQ ID NO: 339792 - DNA, 98 bp, Homo sapiens
aatccatcagccaactgaaagaccagcaggatgtcttctgcttccgatataagatccaggccaaagtggtggacttgctttgtgaagagacagttcat

SEQ ID NO: 339793 - DNA, 101 bp, Homo sapiens
caggacacccctgaagccgagaaatgaaatctcctttacagacaataggtgaagaacaaacccagaatccctacactgaactgctagtactgaaggctcat

SEQ ID NO: 339794 - DNA, 50 bp, Homo sapiens
ccgaaaatataattacgttgctatgtgatcacatggaaaatgtgtatggc

SEQ ID NO: 339795 - DNA, 75 bp, Homo sapiens
tgaactctgcacagcaagcccaggctcattatcagaatgtgacagtgatgataacatgggtgccaaaaatacttc

SEQ ID NO: 339796 - DNA, 50 bp, Homo sapiens
cagaagcagatggattcgtccttttagatacagatccacgggttttagaa

SEQ ID NO: 339797 - DNA, 95 bp, Homo sapiens
cctttggccagaagatcggccacttccaggagaagtttcggtgtccgacatccctgtctgttgttaaagacagaaacctaactgagaaccaagaa

SEQ ID NO: 339798 - DNA, 96 bp, Homo sapiens
atgtataacatacctaaggggcctgtttccagagagctcttatggagaacgccatttggatgattttaacctaccgctctcagcagatataatcct

SEQ ID NO: 339799 - DNA, 73 bp, Homo sapiens
cgagaacaagtttaacgacaagcacatcaccactctgcaggcagaagatcccctgggagcaattcacttgaga

SEQ ID NO: 339800 - DNA, 82 bp, Homo sapiens
cccgcctgcccgcccgggagctgtcggccccggcccgactctatcacaagaagtctgaccagtgcacaggacttcagggctt

SEQ ID NO: 339801 - DNA, 82 bp, Homo sapiens
gagacacgcctgggcccaggtgtggcgtctctgtccccatctggttttagttcagaatgaccgaagaagcatgccgaacacg

SEQ ID NO: 339802 - DNA, 49 bp, Homo sapiens
ttcgagtgcagtgaagccctggcggacgcatccacccaacccaccagta

SEQ ID NO: 339803 - DNA, 90 bp, Homo sapiens
gcgacttatgtctgttgcttatacgtatgataatctggctcctagacaccaactctacaacattacctgtcatatactgaagaatctctt

SEQ ID NO: 339804 - DNA, 127 bp, Homo sapiens
ttcttatggtgggacccaacttcagggttggcaagaagataggatgtgggaacttcggagagctcagattagatggagtcccctgtttccacaccagcagtgctgccaatacaccttttggtgccag

SEQ ID NO: 339805 - DNA, 83 bp, Homo sapiens
gaagactgagaattgtgtggccaaacactctgatctacaaatttggaagaaccgaagagctatggacctgagatcacttctta

SEQ ID NO: 339806 - DNA, 82 bp, Homo sapiens
cgaggagcgggaagagttgctgggcggtctctctgtgctgatccgcgtgcgcctggagctgcggcggcaccagcgtgccggc

SEQ ID NO: 339807 - DNA, 100 bp, Homo sapiens
ccgggagagtagcagtgccttggaccccaggttgacctgacagttcaagaaaaggagaaatatcttaatgtgtctcgctggttttgtcacattcagcatt

SEQ ID NO: 339808 - DNA, 100 bp, Homo sapiens
ggcgcggctgccgtccggacgagacaggcgaacccgacgcagaagagtccaccaccggacagccagggatccaggtccggcacgatcaagacccaggcta

SEQ ID NO: 339809 - DNA, 100 bp, Homo sapiens
ctgacacctcccaccatggacagcttcgacttagccctgctccaggaatgggacctcgagtcactgtggacggcggctccctggaccaggtgctgaaaga

SEQ ID NO: 339810 - DNA, 75 bp, Homo sapiens
actttctttcactgcagaattaacaagcttatccaagtgttccttccttgttgtcctcctggtgcgaagagctcg

SEQ ID NO: 339811 - DNA, 100 bp, Homo sapiens
tgggggattcgcagggaggatgtcgggacaccccggaagctgggaaatgcatcacaggacatggccccctcagccacctagctggggcccatctaggagt

SEQ ID NO: 339812 - DNA, 100 bp, Homo sapiens
aacagaatcagctgttccctgcgaaagcctcaagtactacagccttccagcagccttcccagacccacagatcacacccagggaaaactaataaagccac

SEQ ID NO: 339813 - DNA, 75 bp, Homo sapiens
gggcaagcggaaggtgatgcccaagatggaccagagaaagcatgggattatggcaaccacagaatctcagtagta

SEQ ID NO: 339814 - DNA, 90 bp, Homo sapiens
ggaaaggaactgatgttcccaagtggatcagcatcatgaccgagcggagcgtgccccacctccagaaagtttcagagactcctccactct

SEQ ID NO: 339815 - DNA, 90 bp, Homo sapiens
cacgcggcggcgccgcctgtttacgctctggccaggctgccgcacctctacaggaactttgccgcggagcagtatgccagtgtgttcgcc

SEQ ID NO: 339816 - DNA, 80 bp, Homo sapiens
caaatggcacttcattggccacctacagaaacaaaatgtcaacaaattgatgggagcaagtgttcctgctgccagttctt

SEQ ID NO: 339817 - DNA, 100 bp, Homo sapiens
acgccccggtggagaagctgaggttgacatcatggacatatgtgagtccatcctggagaggaagcggcatgacagcgaaaggtctacttgcagcatcttg

SEQ ID NO: 339818 - DNA, 50 bp, Homo sapiens
caccccgccagctccagagccacgtacgctgctgtgacttactcgaagcc

SEQ ID NO: 339819 - DNA, 75 bp, Homo sapiens
cggacttcaatgcccagtccccagctcgccagcaggctgaggggatctggcggtggagcgctaggatcagacgcc

SEQ ID NO: 339820 - DNA, 83 bp, Homo sapiens
ctcgggagctcatcttcgtggggcgtgaggagtgtgagctcatgctacaggtattgacctgatggacatggcttcggacatcc

SEQ ID NO: 339821 - DNA, 98 bp, Homo sapiens
cgttaagtcacttatcaagtcatttgacttgggacgcccaggattgaaccagctgccctttgaccctgctaacaacaacgagcccctgcagtttggta

SEQ ID NO: 339822 - DNA, 82 bp, Homo sapiens
ctgctgcggcgcggggaccgctgtgctctcgactgtgtcagggaaaagggaggcaaggtcctggtccactgtgaggctggga

SEQ ID NO: 339823 - DNA, 100 bp, Homo sapiens
catgctctgatgacggcactgttagaatctgggactttcttcgttgccatgaggaaagaattctccgaggtaaacactacacgtgaagagtggtgaaagg

SEQ ID NO: 339824 - DNA, 50 bp, Homo sapiens
tggaagggtggagtttcactttgaagagcagtcattatggcgaaccttgg

SEQ ID NO: 339825 - DNA, 97 bp, Homo sapiens
ccggtacctgccggacacgcttctcttggaggtgctaagtgtggtggctcacacctgtaatctcagctacttgggaggctgaggcagaagaatcact

SEQ ID NO: 339826 - DNA, 101 bp, Homo sapiens
ccagaagaagggaaggcgcgagtgaggaaaggaggtactgtagcttggtgctaacagtggtttgcacatcatcatctttgatgaaattgatgccatctgca

SEQ ID NO: 339827 - DNA, 50 bp, Homo sapiens
gatactgacctgtaaatcatcctttaggtgaagctgtacttcacaaaaac

SEQ ID NO: 339828 - DNA, 82 bp, Homo sapiens
ccctgcccccaagaaggaagtcatcatgggccggcctggaacagacagccctcagcgcctttttccaggagaccaacatccc

SEQ ID NO: 339829 - DNA, 74 bp, Homo sapiens
tgtctggaagctgccaatccttggacaggtcagcagacaggtacaggtgaacaaaggcagagtaaactgtcacc

SEQ ID NO: 339830 - DNA, 85 bp, Homo sapiens
aaatggcacttcattggccacctacagaaacaaaatgtcaacaaattgatggtgccagccatttttggagtctcctttggtatcc

SEQ ID NO: 339831 - DNA, 51 bp, Homo sapiens
gtcgctacgggagcagccagatgacagacatcacacctccagtgcaatccc

SEQ ID NO: 339832 - DNA, 50 bp, Homo sapiens
agctctatgcctcagaaatttcttgatgaagaaaacctgcttgatatcac

SEQ ID NO: 339833 - DNA, 100 bp, Homo sapiens
ccaagatgagactgatgaccggcctgaatgtccctatggaccatcctgttataggaattgaatgatctggcacgggaccctccagcacagtgttcagcag

SEQ ID NO: 339834 - DNA, 85 bp, Homo sapiens
attggatttaaaagacagtcctcgtcagcactgactttcagctatggaatcggaggcatacacggaatacctgaggagcatccac

SEQ ID NO: 339835 - DNA, 90 bp, Homo sapiens
ggaattattggaggccaggtttactggagtaggtgttagtaagaatggatgatgaacttgttgttggacatagtgcaagatcagacatct

SEQ ID NO: 339836 - DNA, 100 bp, Homo sapiens
tttctttactctggggtcccggctgccctgtggcctcgctcctcggaggacgcaaacatgcagatctttgtgaagaccctcactggcaaaaccatcaccc

SEQ ID NO: 339837 - DNA, 100 bp, Homo sapiens
ctgagctggtcagcacagcctgcggtttccggctgcaccgcggcatgaatgtgcccttcaagcgcctgtctgagtttccctacgtataccctggtggttc

SEQ ID NO: 339838 - DNA, 50 bp, Homo sapiens
ggctgagagcccacaggcccccacagtgatttgcgtcatgtggattgggt

SEQ ID NO: 339839 - DNA, 82 bp, Homo sapiens
ggcctgcagcgggagctggacggcgagcgcgagcggcgcgagaaagcttcccaggtggcttcccctcttcccctgggggctg

SEQ ID NO: 339840 - DNA, 98 bp, Homo sapiens
caaaacataccaattcttgaatgacatccgagcgaaagagaaagagagatgggatttcaccatgctactcaggcttgtcttgaactcctgggctcaag

SEQ ID NO: 339841 - DNA, 51 bp, Homo sapiens
tccagcatgactcatccccgggagtgttgatcatttacccttcgtggtgac

SEQ ID NO: 339842 - DNA, 82 bp, Homo sapiens
aaaaagctggaagaagtagtgaacaagaagcacgagctcttcagtatccccatcagccagtttccgaggtgctgagaagcac

SEQ ID NO: 339843 - DNA, 90 bp, Homo sapiens
gattctcaggtcactgtggatgttcttgagtcttgctttgtcgcccaggttggagtgcagtggcacgatctcggctcagtgcaacctccg

SEQ ID NO: 339844 - DNA, 100 bp, Homo sapiens
ccagtttggcagagcaccaggccaacctgcgaatgtgctgtgagttggccctgtgcaaggtggtcaactcccactggccgcagcctgggattccccaggg

SEQ ID NO: 339845 - DNA, 50 bp, Homo sapiens
cgtcttatttaatccacatcatagggttctatggcctggatgagtctgac

SEQ ID NO: 339846 - DNA, 75 bp, Homo sapiens
cctgagagccgggtggaccctgaggtccttcacagcctgcagagagaactcgatgccaccgcaacggtattggcg

SEQ ID NO: 339847 - DNA, 82 bp, Homo sapiens
ctgaaatctggagtgaagaacgccgccatccagccaccattccaaggagtccttcaataatgttaaacagtggctgcaggaa

SEQ ID NO: 339848 - DNA, 75 bp, Homo sapiens
atcgacaagacgatccgggtaaagttccagggaggccgcgaagaattatatccagatcgagagacagaagattct

SEQ ID NO: 339849 - DNA, 88 bp, Homo sapiens
gccaacttcccggtgcggcccagcgacgtgtggatcgtcacctaccccaagtccgctgatggtgagaccattctaaaaggcctccagt

SEQ ID NO: 339850 - DNA, 76 bp, Homo sapiens
aggaattttgaagtacaccgtggtgacattgtatcattggtgattttgacacttcatgacatgtcattatttagag

SEQ ID NO: 339851 - DNA, 75 bp, Homo sapiens
cttaaatgaagccactgattagcaatttaaagatcctctccaagatgatgaggagtctgatgaggaagctgtgaa

SEQ ID NO: 339852 - DNA, 50 bp, Homo sapiens
ttacctttgccttggaatacaggaggaagatgataagatcagatgggcgt

SEQ ID NO: 339853 - DNA, 75 bp, Homo sapiens
ggtagagccggccgagctgaggcggtcgcggccatgaaggaaaatggcaaatgcacgacagcggcctcctgaaca

SEQ ID NO: 339854 - DNA, 75 bp, Homo sapiens
aaacctgtgaaaaagaacttgccaaaatcaacacattttattcaggattgtcaccagacctgcaatctatggagc

SEQ ID NO: 339855 - DNA, 75 bp, Homo sapiens
aagatgttccaagcaacaaggatgtcacatctctagattggaattgcatctgggggaggtgttgtagccattgac

SEQ ID NO: 339856 - DNA, 83 bp, Homo sapiens
gcctgctgttggcaaccctcctggactaggctgctcttgttaatcacatggatgttgtgctatacttggtagatcagaaactc

SEQ ID NO: 339857 - DNA, 100 bp, Homo sapiens
cctgcccttacacctgtgctcctatacaagattaacattcatgcacaaaacaacttgcagcagcttttcatgaggaatttgttgtgagagaagatttaat

SEQ ID NO: 339858 - DNA, 100 bp, Homo sapiens
gatttcagcaaatttggagcaggcatcaagcattgcacagttctctccaataacatagatcatctcttactgaatttaacactgtctgatatcatggtct

SEQ ID NO: 339859 - DNA, 96 bp, Homo sapiens
agccttgaacgtctggactctagggaccctgctgaatagctggggctacaggcgtgtgtcactgcgcccaggaagctcataaaatggtgagagaag

SEQ ID NO: 339860 - DNA, 74 bp, Homo sapiens
agacccggcaccacctcccggtccgccctccagattcaaccctatgaaaagataaaggccaggggcttgcctga

SEQ ID NO: 339861 - DNA, 100 bp, Homo sapiens
gtcctcatggaagaagagcaagatttaccagagcaaccatataacagcctggagcagctgtgcatcaacttcaccaatgagaaactgcaacagtttttca

SEQ ID NO: 339862 - DNA, 97 bp, Homo sapiens
cctggatgcagctcacctccgagcccaagctgtgaccagtgacgcagactggaagtcccgtttactgggagagaagaggttaaggaacacccaggtg

SEQ ID NO: 339863 - DNA, 117 bp, Homo sapiens
tgaccatcgaaaggagcaagagcaagatcaccgtgacatccgaggtgcctttctccaaaagaacaccttccaccatgaccacctcagcaagttcccacttaaataaaggcatcaagc

SEQ ID NO: 339864 - DNA, 50 bp, Homo sapiens
cacaggacctggaaaaattacatacggatgtttccagtcctaaagattag

SEQ ID NO: 339865 - DNA, 75 bp, Homo sapiens
gtcttcaccgtccgcatcgaccgcaaggtggaacggcacatgtgtgatggggacattgttatcttcaaccggcag

SEQ ID NO: 339866 - DNA, 82 bp, Homo sapiens
cttgttgctcttcggggactccatcacccaggttgacatcatggacatatgtgagtccatcctggagaggaagcggcatgac

SEQ ID NO: 339867 - DNA, 148 bp, Homo sapiens
gtccaggatgcctttgccgccgccaagctcctggccctggccctgatcatcctgctgggcttcgtccagatcgggaaggtgaattttgaagattgcaccggtcgacaaaggacagcctatttttccctcgacacccgattcaaagtgg

SEQ ID NO: 339868 - DNA, 102 bp, Homo sapiens
gacgctggccgtccaaaatccaccaaagaaagtgacctctgagaaagtgagccagaaacatgctgagcctttgacagggacttgcaacaaagcattgccaga

SEQ ID NO: 339869 - DNA, 100 bp, Homo sapiens
cggggatacagcctggaaggtgcgtgtggggctgggtctcggagtgggagacgtggagtgcagtggtggtgaccgcggtggcttcaaaaattttggtggt

SEQ ID NO: 339870 - DNA, 96 bp, Homo sapiens
gaggatattcagtctctctggcaccttggagacagtgcgaggccgaggggtagtgggcaggagtatgctcaggtaatcaaaatgttgggaaatgga

SEQ ID NO: 339871 - DNA, 100 bp, Homo sapiens
ccgggctgggctttcctcacccgggagaaaatgcagaagtctccatggacgtttccctggcttaccgtgatgacgcgtttgctgagtggactgaaatggc

SEQ ID NO: 339872 - DNA, 100 bp, Homo sapiens
aggaaaagcaccaggcaaaccaccatcacatctcattttgcaaagggagtgcctggtgaagaatgtgatgggatcactagcatgtctgcggagagcggcc

SEQ ID NO: 339873 - DNA, 74 bp, Homo sapiens
ggcagctggagaggtctccaacaagcttccaaaatggcctgggttgctatgcgaaagcaagactgtggtttcat

SEQ ID NO: 339874 - DNA, 75 bp, Homo sapiens
gctgaattggatgaaagataaagcccttaaggacaaggtgaatcagctcccggccgactttaggattcttctgga

SEQ ID NO: 339875 - DNA, 50 bp, Homo sapiens
gtgcggactcgcctccgtgaaggtttggtgcacctcgatttggaggaagt

SEQ ID NO: 339876 - DNA, 75 bp, Homo sapiens
aatagaccctctgtccaggcagcattaaaacttaagcaggaaaactcaatgtgagtagtgacactgtccagcatg

SEQ ID NO: 339877 - DNA, 71 bp, Homo sapiens
ctggatgggactgatggggacaacatgtctcttcaggagctggacgaggttcaaaatgagcctgtttggaa

SEQ ID NO: 339878 - DNA, 103 bp, Homo sapiens
gtggattccacccaggaaggagctgtgtatttcatcaaggctgcccctgatggggcctggcaatgactgagcaggcccagccccagaggacaaggaagagaag

SEQ ID NO: 339879 - DNA, 82 bp, Homo sapiens
ctgtggttctctgtcccaggctgttccctaagaaggtctgcccaggactcagacctcctgccccccgaggtctgcagtctcc

SEQ ID NO: 339880 - DNA, 75 bp, Homo sapiens
tgaattcggtaaccatagaccaaaagatggtctgtcttctgctgatcccaactctgattggaatgcaccagcaga

SEQ ID NO: 339881 - DNA, 50 bp, Homo sapiens
cggcatcaggcttcccttatccggagacccaagaagccaccgcctccatc

SEQ ID NO: 339882 - DNA, 100 bp, Homo sapiens
ttgataaatgaaatcttcctaagtatagtgagtgatggattggaactgagaccgaaatataatggaattttacattgcttgactaccatttggaaacttg

SEQ ID NO: 339883 - DNA, 82 bp, Homo sapiens
gccacctgggaggtggacggctccagccccagctgcgtgcccaggaagatgatccctatgatcttgaagatgtttctgcaca

SEQ ID NO: 339884 - DNA, 100 bp, Homo sapiens
tcaacctcctctggcccccggaaaacctaaccatgaagacttgaacttaatacagcaagaaagaccatcaagtttaccatgggcctttggagtgacgctg

SEQ ID NO: 339885 - DNA, 100 bp, Homo sapiens
gagggagcggcgccccctcccccctccggcgcggaccccgcgtgcgccttgctcgcccgcagccccgagaccgcagacagaagccctgggggatgcggag

SEQ ID NO: 339886 - DNA, 75 bp, Homo sapiens
tatgcctctccgccactcatcaccaatgtcacggattaaactgcaaatatctcatgaagctgctgcctgtatcac

SEQ ID NO: 339887 - DNA, 74 bp, Homo sapiens
gtcaaaagggacagccgcaaagccctggttgcccaggtacgcaaagagaaccagtggtgtgaagagaagtgaaa

SEQ ID NO: 339888 - DNA, 98 bp, Homo sapiens
tcgctgattacagctggaaacaattgatttgctcttacgtatttgtgtgacttgactcttcaaacacaaagctgaggagtacctgtcatttgcctttg

SEQ ID NO: 339889 - DNA, 101 bp, Homo sapiens
acggcaccaactattcgcggagctggaatgactggcaacccagaatctggtcaacctgtagttccgttggacagacagtttctcatccatgaactaaatgc

SEQ ID NO: 339890 - DNA, 80 bp, Homo sapiens
gctcactgcacgccagaacctgaggagagaatggcatgccaggtaaacattggagaactgatggcatcagcaatgtatcc

SEQ ID NO: 339891 - DNA, 76 bp, Homo sapiens
cgggcagctcgggaacatggccctggagcggctctgctcggtcctcaaaggagctccttcccttaacagagctgag

SEQ ID NO: 339892 - DNA, 50 bp, Homo sapiens
cggcttcctccagacctctcggcgcgggtaaaatgtcggttccaggacct

SEQ ID NO: 339893 - DNA, 74 bp, Homo sapiens
gttccagccgttcaacgtggctgtttctagcaacgtgctgttcctgctgatcctaagtgtgaacgtgaagtccc

SEQ ID NO: 339894 - DNA, 141 bp, Homo sapiens
gaactggagaggaccaacaaattcatcaaagacgtaatcaaagacggcaacgcgcttatcagcgctatgagaagtactccaaagattcaggtttactcacgtcatccagcagagaatggaaagtcaaatttcctgaattgc

SEQ ID NO: 339895 - DNA, 100 bp, Homo sapiens
cgctgcgccgacggctccacctacaaggtgtttcatacaaagaatacaagtaactgatgaatgaagggggcatcttgtgtccccacaatcctgctgtgcg

SEQ ID NO: 339896 - DNA, 90 bp, Homo sapiens
gcaacaacataatgcccagagttggagccaattaaaccaggtatgaggatacatgggctgcacttcacagaagagccaaagactgtgcaa

SEQ ID NO: 339897 - DNA, 82 bp, Homo sapiens
gctatgtccttttggcttcgaggtttaccccttccaggctaccaagcagtttctcgaagagattaacaagtggacagttcag

SEQ ID NO: 339898 - DNA, 100 bp, Homo sapiens
gttggctcccccggattgcctggaattcctggggaagtcggagcctgagcaccagcactgagcctggccgtgggaaggaagcatgaagacctctgccctc

SEQ ID NO: 339899 - DNA, 100 bp, Homo sapiens
cctcgagatactaaaggaagaattccggttggccatggctctgagtggtgatgggcagaatctgtttacgaaagacgtgacagtgatcgagggagaggtt

SEQ ID NO: 339900 - DNA, 100 bp, Homo sapiens
atgaacggcaagctcgggaactggctgacaaatatgggaagaaggtagataatgactataatgcccttcgagaaagactcagcaccttgcctgataaatt

SEQ ID NO: 339901 - DNA, 98 bp, Homo sapiens
aacgcctcggccgtcgtcctctacaatgaggagcgctacgggaacatcaccttgcccatgtctcacgcggaaacaggaccttgccctgtcactcagga

SEQ ID NO: 339902 - DNA, 100 bp, Homo sapiens
cgaggcagcctccgcggaggagcagaagacaatgcagatcttcgtgaagactctgactggtaagaccatcaccctcgaggttgagcccagtgacaccatc

SEQ ID NO: 339903 - DNA, 96 bp, Homo sapiens
tctacctccatcaggaccccagatgtctgacagccctgtgtgacaccaagataagtaacatccaggtccagagagcatcgcagacatcgatctcgc

SEQ ID NO: 339904 - DNA, 100 bp, Homo sapiens
aagaagattactctgcaacagctaaaggccctgagacgggagttaaaggagaaagaatattctgtcctgaatgctgtcgaccaggcccgagttttcttgg

SEQ ID NO: 339905 - DNA, 75 bp, Homo sapiens
tccgagtgtgggcagcagccggtcgtggagaaatgcgagaggaattacggaggttgagctggtccggaatcccta

SEQ ID NO: 339906 - DNA, 75 bp, Homo sapiens
attttgatgtgattgaagagattgatgcaattattgataaatcagacttcacagagaatgcagttgtcttgactt

SEQ ID NO: 339907 - DNA, 90 bp, Homo sapiens
ctgctcatcttcagctgttgggagagtccctaagcctcattggacaccgtctgcaggaaactgagagacaggggtctcactgtgttgccc

SEQ ID NO: 339908 - DNA, 100 bp, Homo sapiens
gcgtcccgctcgctgggagagaggtacctctccttttccctctccctttccctaaggccagcactccttgcccgaggacagagatggcgagcgcccggat

SEQ ID NO: 339909 - DNA, 101 bp, Homo sapiens
cgaaggggtggagagtgatatgaagagcgagagaaaagagaggacagcggacgagcagatccgcacaggaagtcctggagaacctgaaggaccgctggtac

SEQ ID NO: 339910 - DNA, 128 bp, Homo sapiens
gcgttagtattggccgtgtacccgaaaaactgattgactgggctggcgttaactgtgcggaggcaggtgactacaattgcaaagtagaatttgctttgacacctgatgccaggacaatagtatgttac

SEQ ID NO: 339911 - DNA, 97 bp, Homo sapiens
ccttctatggttgtatgtgccagtaatgaagatcacaaaatcgcttatgacccttctttgtcttcgcacgtgagccttccagatggtcaccctcaca

SEQ ID NO: 339912 - DNA, 51 bp, Homo sapiens
cagcgccttcatcctggggctgcgatgatccgagcagttggcagactaaaa

SEQ ID NO: 339913 - DNA, 75 bp, Homo sapiens
aattctgacgccctcaaggtcgccaaggaggtggacccccaggttgtggaagatatcaataagcgcagagagccg

SEQ ID NO: 339914 - DNA, 75 bp, Homo sapiens
tttcatggttccatcagccgccttcatcaaatcaaacaggcattaagggatcattgcaagagcagcgtgactgac

SEQ ID NO: 339915 - DNA, 100 bp, Homo sapiens
aaattccacaccctcttgtgccttttgatggacctgaaacacgaccctcctctgagtagcatcccttgtctgcattataagaaaatgaaggacaacgagg

SEQ ID NO: 339916 - DNA, 100 bp, Homo sapiens
ctctcgatgaggataacatccctccagaagatggtgtcatggagaaactccagctgggcccagagattctgcagcgggaaaatccaaggcttatttatgc

SEQ ID NO: 339917 - DNA, 100 bp, Homo sapiens
aagcagaataaatctgtactcgtgcctcatggatccaaattaaaggaaggatttgatgccctggatccctttattcccatcctggtttccaactataacc

SEQ ID NO: 339918 - DNA, 100 bp, Homo sapiens
tcatcagtttgttgtgcttgtcaagatcaggggtcacgggcgtcagcggtccagggaaggaagcaaagcaaatggagaatggcatgctggtgacggacag

SEQ ID NO: 339919 - DNA, 100 bp, Homo sapiens
aggagtgattctggaaaagtaagcacagaaaatggagacgcacccagagaaagaggctcatcactgtcaggcctttctgtatagagcccacaaacatcgt

SEQ ID NO: 339920 - DNA, 83 bp, Homo sapiens
aagactatgaatctctgttccaaatgctttgctggtcagcccaaggccaaccccactgtcactctgttcccgccctcctctga

SEQ ID NO: 339921 - DNA, 82 bp, Homo sapiens
ccttctgccgccggccggcgcgtcgtccccacagtgatgatgatgatgattttgatgatgaggaagctgaagaaaaagcgcc

SEQ ID NO: 339922 - DNA, 103 bp, Homo sapiens
aaggaccagtctgcagagggatcctgtggctggaagcgaggaggctccacacggccgttgcagctaccgcagccagggtctcactctgtcacccaggctggag

SEQ ID NO: 339923 - DNA, 50 bp, Homo sapiens
ttttggactccattgccgcactgcagataagatttgtgaccaaatcagtg

SEQ ID NO: 339924 - DNA, 90 bp, Homo sapiens
cgtcgatatgcagaaacactctttgacattctggtggctggtggaatgctggctcctctggcttatgagccattctctactctagccatg

SEQ ID NO: 339925 - DNA, 101 bp, Homo sapiens
gggaaccctgagctggagcagcaggccaggctcggagacctttccccccgcagaaggagccacggaggaggagaagttactgagccggaagatgatgaaat

SEQ ID NO: 339926 - DNA, 50 bp, Homo sapiens
agtatgtcaatcgcttgccccagcacaggcccagtggttctcagcacccc

SEQ ID NO: 339927 - DNA, 82 bp, Homo sapiens
tacggggccttctacagtgacggggagatcagcatttgcatggaacacatggctgccgcgggcggacacgccagaggaggag

SEQ ID NO: 339928 - DNA, 83 bp, Homo sapiens
cgccctgttccccgcgctgcggcctggcggcttccaggcgcactaccgcgggaaatgatggcgggaacacagcaaaggagacc

SEQ ID NO: 339929 - DNA, 98 bp, Homo sapiens
ccggagtgaggctgaagggagtggatcagagcactgcctgagtttttcagaagaagtgaagtcaagatgaagaaccatttgcttttctggggagtcct

SEQ ID NO: 339930 - DNA, 74 bp, Homo sapiens
cgggcgtgagggcgaggcggcggcggcggcggccagagagcagcagccgcctgcctacaacacagcagtcccct

SEQ ID NO: 339931 - DNA, 82 bp, Homo sapiens
aatatctgtcttcggtggactccttcggcagtccacccaccgccgccgcctcccaggactccatccccgtgtctacctccct

SEQ ID NO: 339932 - DNA, 96 bp, Homo sapiens
gaaatcagaagcatcaggattctgttacgttaatgatattgtgcttgccatccttgaattactaaactgaagaaaaggtgactggtctcatgagcc

SEQ ID NO: 339933 - DNA, 76 bp, Homo sapiens
agaactgttgagttttatcattttcgttaagtgaccgtgcgcagcgctgtaactaggcggggtttcaccatgttgc

SEQ ID NO: 339934 - DNA, 82 bp, Homo sapiens
agtcgtgctctcgccccaacccgcgcgccaggatctcattttgcccaacggtggtactccagcaggtacttcaagtccagct

SEQ ID NO: 339935 - DNA, 75 bp, Homo sapiens
ttaactgcgctgcatagttatatggatgccgatcaaagtccagatctccatctccaaaaagaaggtaagctaaat

SEQ ID NO: 339936 - DNA, 83 bp, Homo sapiens
ctggacccggaccggttttgggtgcaccctttgctcccgggctcatccaccatcatgatccatgacttgtgcctcgtcttccc

SEQ ID NO: 339937 - DNA, 96 bp, Homo sapiens
ccgctgggggttgcggcggcgctgagccagcggggccgtgtgacaccatcgccacaacaggctcgggtctgtcctccccatatgttacctgaagat

SEQ ID NO: 339938 - DNA, 100 bp, Homo sapiens
cagcctccctagtagctgggactacagaaaatggggagttcctttccctggatctcggagggtccaagttccgagtgctgaaggtgcaagtcgctgaaga

SEQ ID NO: 339939 - DNA, 82 bp, Homo sapiens
cctggcggcttccaggcgcactaccgcgatgcggcattccaaaagaactcactgtcctgattgggatagcagagaaagctgg

SEQ ID NO: 339940 - DNA, 83 bp, Homo sapiens
ccgcggcggcagcagcagtgagaggtggaaaggagactatggaaccaggatccagcagtacttcccatccaactacgtcgagg

SEQ ID NO: 339941 - DNA, 98 bp, Homo sapiens
tccgccagggggcctgcgtggatattgttaatcctgccagtctttctcttcaagccagggtgcatcctcagaaacctactcaacacagcactctaggc

SEQ ID NO: 339942 - DNA, 50 bp, Homo sapiens
agaagattggacagcaggtcgacagaatggtggaaagcagcagacataat

SEQ ID NO: 339943 - DNA, 50 bp, Homo sapiens
ctttcctctgctgccgctcggtcacgcttgggcgcaccctacgacgcgca

SEQ ID NO: 339944 - DNA, 100 bp, Homo sapiens
ctaggaatctatgatgctgatggtgatggagattttgatgtggatgatgccaaagttttattagacatatgaagatccatgagaaggaccctaacagtgc

SEQ ID NO: 339945 - DNA, 118 bp, Homo sapiens
cgaggtgctcacggccgagcagattctacaacacatggtggaatgtatccgggaggtcaacgaggtcatccagacaatgcagatcttcgtgaagactctgactggtaagaccatcacc

SEQ ID NO: 339946 - DNA, 107 bp, Homo sapiens
ctctgagggagggtccgagccagccgctgttttgccggaggagcccctcaggcccaattctgtggtgttcttggtcacacatttatggagtttctgaagggcagtgg

SEQ ID NO: 339947 - DNA, 82 bp, Homo sapiens
gagttcgctgccagccccaagaaggagaccctcatccagctgatgcccttcttcgtctgtcaataccagcaaatatgcagaa

SEQ ID NO: 339948 - DNA, 83 bp, Homo sapiens
gagatatctgcaatgatgtactgatcccctgtttttggagcacagctttcaactttgaacagatccgaacttgatcaacataa

SEQ ID NO: 339949 - DNA, 100 bp, Homo sapiens
tgaacagaaaaagaggatacctctgcgatcccgggtcatctccagatgctagggttatgggtgaagagcgattatatgttagagatagctgatcaagtgg

SEQ ID NO: 339950 - DNA, 131 bp, Homo sapiens
aaatgtctattcttctaattctggcacaatcttatctagctatagttcctcatggtcctgcactccatggactaaattctcaggtgcctaaaaggccagaggggcttctcaggccaacctccttttgatgg

SEQ ID NO: 339951 - DNA, 114 bp, Homo sapiens
ggaatttgtggctggctggatctctggtgagacatttttcttccttctgtcacatcacacccaatgacacgatgaggcgagtggtacgacagagcaagtttcggcatgtatttg

SEQ ID NO: 339952 - DNA, 74 bp, Homo sapiens
ccgaggtgccaccgtggaaggacagaatggtttcagccatgccacagagctccggcagtcatgggcccgctata

SEQ ID NO: 339953 - DNA, 75 bp, Homo sapiens
acaagatttaacctgtcatcaagacctgggattttggtgcaggaacgaatttcatatacacctccagagagccca

SEQ ID NO: 339954 - DNA, 82 bp, Homo sapiens
acaactcgggcgccgacgagatcgggtgatgtgtccaatctagatcccaacttctcatttgaaggcaccaaactggatgtgg

SEQ ID NO: 339955 - DNA, 51 bp, Homo sapiens
cctgctcctaaaaaacctacaggcctacgaggacaagcagaaactcaagcg

SEQ ID NO: 339956 - DNA, 100 bp, Homo sapiens
cttgcctgggctctccgggaatccaggacctccgggacgaaagctccttcgagaactcatagaacggaagaccagctccttggatcccaacgatcaggtg

SEQ ID NO: 339957 - DNA, 100 bp, Homo sapiens
agtgataaaggaaaggaagaaatgcaatttgctgttggctggagtggttccttaaatgtcgaagaaggacactctaaatgatcaagattctgatctgggc

SEQ ID NO: 339958 - DNA, 90 bp, Homo sapiens
gattttttggagcgacaaattcagaccgtataatagacgctggccccaaaggaaactactctcgatttatgaatcacagctgccagccca

SEQ ID NO: 339959 - DNA, 51 bp, Homo sapiens
tcatcatgaaggacacttaactcttgcattgaaaggctctagttacagtgg

SEQ ID NO: 339960 - DNA, 75 bp, Homo sapiens
gcggacagaagctgtgctgacccacaaacaagctcaaggggacggcaaaacagaacagaaaggcggagataaaaa

SEQ ID NO: 339961 - DNA, 100 bp, Homo sapiens
ccagcctggctgggctcaggagtccatccctcatgaaaaatgactgaccactgctgggcagcaggagggatgatgaccaactaattcccaaaccccagtc

SEQ ID NO: 339962 - DNA, 149 bp, Homo sapiens
cgggagaagaaccagcccgaggtggacatgagtgaccggggcatctccaacatgctggatgtcaacggcctctgtactaggttttgacaagcttgcatcatgcgtgagtataagctagtcgttcttggctcaggaggcgttggaaagtc

SEQ ID NO: 339963 - DNA, 100 bp, Homo sapiens
agcacttcatccagcagtgcacaggagcgggcggggcagccatgctcctgtctgggggcgatcctccggcgcaggaatggttcatggtgcagacaaaatc

SEQ ID NO: 339964 - DNA, 74 bp, Homo sapiens
cggtcctgcacgccctgtctgaaggccaacattgagcgtctggaggagaatgattcagtggtggctggtggcgg

SEQ ID NO: 339965 - DNA, 100 bp, Homo sapiens
gggcggccccgccttgcgggctggagatggaatcgccacttatatatgtttcagttttgcttttgaacatatttgaattttcatcaggaatagtatataa

SEQ ID NO: 339966 - DNA, 100 bp, Homo sapiens
accgcgtccacacccgtcaacacaccctccagacccccgtccagtgaattctggctttgaccagcttcgacttgaaggattgctttgtgatgtgaccctg

SEQ ID NO: 339967 - DNA, 100 bp, Homo sapiens
cctgatctctctcgctgtgagacatgtctgagactcctgctcagtgtagcattaaggacttgagagagacaagtttgataataaaacggtttcatttgag

SEQ ID NO: 339968 - DNA, 100 bp, Homo sapiens
ggaaggcgctgattcccagttctcaggactgagcacggaaggcatctaccgggtcagcgggaacaagtctgagatggagagtctgcagagacagtttgat

SEQ ID NO: 339969 - DNA, 100 bp, Homo sapiens
ggccaatccgaccacggggtctgtggagtggctggaggaggatgaacactatgattaccaccaggagattgcaaggaagagaagttaaacttctagagaa

SEQ ID NO: 339970 - DNA, 97 bp, Homo sapiens
ggggacggccacatgaaagttttcagcctcatccagcaggcggtgacccgctaccggaaggccatcgccaaggtgacttcatggtcatgacgatttt

SEQ ID NO: 339971 - DNA, 74 bp, Homo sapiens
tggcgagacagtgcctggggaacatcaggtgactgtcccacccatttagttgaatgtagcggccagagaggcac

SEQ ID NO: 339972 - DNA, 97 bp, Homo sapiens
agctattacattgcttgaacaaaataattgggacttagtgcacaaacatttcactgaagatattcaaacaaggcaatatcgttccttggaagttcta

SEQ ID NO: 339973 - DNA, 50 bp, Homo sapiens
attggatattgattgccagtttttaagagtttgagcggtgctgaactgtc

SEQ ID NO: 339974 - DNA, 89 bp, Homo sapiens
caggctggaacttgccctgtctcctcgcagatgaggagcatattaatgaaaagtgccataaactgaaaaaccaaacatgagggtagcag

SEQ ID NO: 339975 - DNA, 51 bp, Homo sapiens
ggatgtcatgtcctacttcaatggggccttgctggaccaagtagagcactg

SEQ ID NO: 339976 - DNA, 82 bp, Homo sapiens
attgattcagtgggaaatgatgtggatgttgtctctgactctgaagttgtcatttagtaaaaacggagtagttagaatagat

SEQ ID NO: 339977 - DNA, 100 bp, Homo sapiens
gacggcggaacccgtgggcctgtggactgcagcctcggcggtcagcagagttcctgagttggaggtagaagaagaaacccaagttcaagagatgacttta

SEQ ID NO: 339978 - DNA, 100 bp, Homo sapiens
ccactttgcaggtggaacagaatggggactatggtaggggcaggacttggatgttgtgggtgatggtatgcagtgtcctccttcacctttgctttttgat

SEQ ID NO: 339979 - DNA, 101 bp, Homo sapiens
ctttgagaagaacattttcaacaagacccatcggactgacaggaaaatctgcccagtcatttcaagttcaaggagtattgtccccaggtcttcaggaacct

SEQ ID NO: 339980 - DNA, 74 bp, Homo sapiens
acatcctgacctagagcccatcctaagcctctgaagagccaatccattcaggatgggaaaccacgcaggcaaac

SEQ ID NO: 339981 - DNA, 100 bp, Homo sapiens
tcaatccgccgagtcatatggggacctttcggaggaggtaatatgcacgtgtcactagctgaggccctggaggttcggggtggaccacttcaggaggaag

SEQ ID NO: 339982 - DNA, 80 bp, Homo sapiens
cacagccggtcaggaacggtttcggacgatcacaacggcctactacaggggtgcaatgatgaggtttatataactttcca

SEQ ID NO: 339983 - DNA, 100 bp, Homo sapiens
tgattacctgtctggagcaaggaaaagagccctggaatatgaagagacatgagatggtagctaaacatttaggtatatgccctcattttgcttaagacct

SEQ ID NO: 339984 - DNA, 82 bp, Homo sapiens
ccctctcgcctcgggtctcgggggccgctctgggatcccggccaccagcaattgtccggtcgcaatggaagaagagatcgcc

SEQ ID NO: 339985 - DNA, 100 bp, Homo sapiens
ctggaaggaaccgctctcgcttcgtcctacacttgcgcaaatgtctccgaaaacctcggatcaattctcagctggtggcacaacaagtggcacaacagta

SEQ ID NO: 339986 - DNA, 80 bp, Homo sapiens
agatcatctacgacgagaaccggaagatgctcatgaagcagcaggaccggctggaggagcgagagcaggacattgaggac

SEQ ID NO: 339987 - DNA, 82 bp, Homo sapiens
tgaaagagctatatttggtgtcctgtaaaatcacagattatgaacgaggtcactcggacactatggtgttcttttacctgtg

SEQ ID NO: 339988 - DNA, 74 bp, Homo sapiens
gcggcctgtaatcccagcgaccgccagggacgctgccaaggtctgcagagaattcaccgagcgtgagcaaggag

SEQ ID NO: 339989 - DNA, 78 bp, Homo sapiens
cctccaggagcccagacaccagccccccaccatgaaattcattgtacaacacacgaaccccttcaatacctggatagg

SEQ ID NO: 339990 - DNA, 98 bp, Homo sapiens
gggatccacacagctcagaacagctggatcttgctcacactctttcaagagaagcttccttgttcactgattaccaaagctatgtcatccatggctgc

SEQ ID NO: 339991 - DNA, 100 bp, Homo sapiens
cctggaagacatttatgaaagcccaaatcacctgtacttggtcatgcagctgggtcttgctcctcagaacaaaccagaattgcagaaggtgatggaaaaa

SEQ ID NO: 339992 - DNA, 75 bp, Homo sapiens
gccccagcagcccccgaaggccctatcaggacatggagtatgaaagacgtgccactttctgcgactcccagcttc

SEQ ID NO: 339993 - DNA, 100 bp, Homo sapiens
gcctggggccagcccagtatccagagcagcgttcagcagggactgcagactcaggactgggcgtggtggaagtggaggagggcgaggtgaacgggcagga

SEQ ID NO: 339994 - DNA, 75 bp, Homo sapiens
gagaatgcacttactggctcattcagagccatgtccattggagcccgttcccaatcagctcgtacttacttggag

SEQ ID NO: 339995 - DNA, 98 bp, Homo sapiens
agacatctacgcagcgaaatcgagcctggccttgagggtccacaccgcgagggaagatgcgtgcgcccattaatgtatgacaacatgtccacaatggt

SEQ ID NO: 339996 - DNA, 96 bp, Homo sapiens
cgaggatgtgtccctggactttggaaacgaggaggagctggcctttaggaaagccaagatcagagtgtgaacatggctacgcctcttcattcccgt

SEQ ID NO: 339997 - DNA, 75 bp, Homo sapiens
gcatattcctgatacatatctatgtgaacgttgtcagcctagcattccaagaatcaagcactacaaagtgatgag

SEQ ID NO: 339998 - DNA, 100 bp, Homo sapiens
ctccaccagcatggagtcatctacagtttccatagcaaggcgtgtacaagatccattagctgagctagtgaaaattgagccaaagcacattggagttgga

SEQ ID NO: 339999 - DNA, 100 bp, Homo sapiens
cctctgtacgcccgttcactgatgtgtcttgctgaatcagggctctcttatccctgccatcgacttacagtgggaagaagatcttcacctgcacagaccc

SEQ ID NO: 340000 - DNA, 51 bp, Homo sapiens
gacaacctcagaggacaacgaagtgttcggctgaactcacgggaatcaaat

SEQ ID NO: 340001 - DNA, 75 bp, Homo sapiens
tctacgcctccatccacaagattgaggagggccatctggctgtgtactacagctgttccatttcctccaagtcac

SEQ ID NO: 340002 - DNA, 75 bp, Homo sapiens
aaactggaattttttttcaggctgaggcctgtgtgacaaatgatacggtcatcacactgaaacggtgttcaaccg

SEQ ID NO: 340003 - DNA, 100 bp, Homo sapiens
tctcaaaaacaaaattctgaactcaggacttggcaagcagcactgtgtgctgttcatgtcatcaggaaagttcctgaacttatggagatgtttttaccag

SEQ ID NO: 340004 - DNA, 100 bp, Homo sapiens
gtacaacagcatcttcagcctgctcagcttcgagaagattggctacacagcaaaccagtccagctacgggggcccagccagccagcagctgagtgggggt

SEQ ID NO: 340005 - DNA, 82 bp, Homo sapiens
caggagccccttgccaggagtgttcaagatgctctctctggaccgatcccactaatgattacggacctgaagccaaagaaca

SEQ ID NO: 340006 - DNA, 100 bp, Homo sapiens
agaatctgctctacccgacttaacagatgtgaaaggaccacccacccaccgtctgtcttgtggtcagtcaccctacaccgagacaacaacgtgggagcgg

SEQ ID NO: 340007 - DNA, 99 bp, Homo sapiens
tctctccttgctgcatctgcagcaacgtcggatgcaggtgcaatggatgagcttcatagtctggatccaagaaggcaagagttattggaagctagattt

SEQ ID NO: 340008 - DNA, 132 bp, Homo sapiens
catagacgagcggccccgggacgggcagctagcgcgaccctgagccggcgcccgtggtccggccatggacgacctcgccattcctctcactgcctacggaccaatggcggcggcagcggcggcagcggctgt

SEQ ID NO: 340009 - DNA, 112 bp, Homo sapiens
gctggctggatctctggtgagacatttttcttccttctgtcacatcacacccaatggtccagacccagtacttattatgaactgttgggggtgcatcctggtgccagcactg

SEQ ID NO: 340010 - DNA, 101 bp, Homo sapiens
ttgcgggcgcagcgggcagtgtcggaggccagcggggccggaagcggcggcgcagggtgctgataagactgtgaaaggcccagatggactgaccgcctttg

SEQ ID NO: 340011 - DNA, 90 bp, Homo sapiens
tacttttacctacgttggcggccccagaagggtgtgaacggcatgtctgtggatgagaagcctgactcccccatgtatgtgtatgagtcc

SEQ ID NO: 340012 - DNA, 51 bp, Homo sapiens
tgaatgccagtgcccagggccacagttcgcaggacagatggcggctctgtg

SEQ ID NO: 340013 - DNA, 99 bp, Homo sapiens
tagccatcttctaattttcattccttcaaaggtgagcacctgcggatctgtccccagggctacacctgctgcaccagcgagatggaggagaacctggcc

SEQ ID NO: 340014 - DNA, 90 bp, Homo sapiens
ggggttcctggtcatacaccagtactaccaaggacagcttttttcctgcaaggatcagttcgacagcttagacaagcatacacaatgggg

SEQ ID NO: 340015 - DNA, 100 bp, Homo sapiens
ggttacgtagattggcgtgctgcaaaccagctctaggcggctctgggtataattgaaatcctcaaaggaatgcaagaattgggagtacatcctgatcagg

SEQ ID NO: 340016 - DNA, 78 bp, Homo sapiens
ccggccgtgagctgcggcaggacggctggagctccaccagatctgcagaattctgaatgcccatatggactccctgca

SEQ ID NO: 340017 - DNA, 98 bp, Homo sapiens
gactcggccgctgtcaccagcatgcaaatttcttccaagagggcctatgaaggggtgctgcagctggtggaggctcgcgggcgctacgaggagctctg

SEQ ID NO: 340018 - DNA, 100 bp, Homo sapiens
ggaatatccatgtcggcttgtagagagattgcagacggcccccaagttacatgaactacctgctagactcacaccccagcaaaaatattgatgtccccag

SEQ ID NO: 340019 - DNA, 87 bp, Homo sapiens
atttgcggatagctccaaactgggatattctccggagtagagatgaagagagaatttctaaacctggggctgtctcaactcctgtaa

SEQ ID NO: 340020 - DNA, 74 bp, Homo sapiens
ggctcagtctgcggccaagactccgtcctgcaagactgctgagaaggaagaatttgaacatcaacagaaagagc

SEQ ID NO: 340021 - DNA, 82 bp, Homo sapiens
ggagaactaaatgggagaagaggaatgttccctgacaatttcgttaaggtttcgcatcgccgaagatagattctgttgctgc

SEQ ID NO: 340022 - DNA, 100 bp, Homo sapiens
agaatcaaagctgatagagaagattcttctcaacatttctgcagactgcctcaacagagtgatagaactggttagtactgcagaaaaaccacgacttaaa

SEQ ID NO: 340023 - DNA, 100 bp, Homo sapiens
tcttcctccccgcgctctggcgtagagggccacagccatctctgggagttagttttggaacgccattcggctcaggtattggcactggcttgcaatcaag

SEQ ID NO: 340024 - DNA, 100 bp, Homo sapiens
ctcaaaaccctcctcatcatctactccttcgtcttctggcccccaggctccgctcttgccagagggacaggagccatggctcagaaaatggactgtggtg

SEQ ID NO: 340025 - DNA, 98 bp, Homo sapiens
tgaaggcattgaagcttgcacaagctctccagacaaagtcaatgtaaatgacatcatcctgattgctctcaataattcaattcgtcataatctgtccc

SEQ ID NO: 340026 - DNA, 97 bp, Homo sapiens
tcacaaccacatgattgggattgggccagtcttaaatatctacccatggaataaagagctgtatttgatcaggctcagaagtggaaaaatatgaaga

SEQ ID NO: 340027 - DNA, 82 bp, Homo sapiens
tcccgagtagctgagactacaggcagaagtcaattcatctggaaagactatctctgagtcagacttaaaccactctttttca

SEQ ID NO: 340028 - DNA, 97 bp, Homo sapiens
gggacatctatttggcgatcaacatcaccaacggcgaggacccttgattcctgaagagaacaaggagagggtacaagaactccctgattctggagcc

SEQ ID NO: 340029 - DNA, 100 bp, Homo sapiens
ttgcttcaggaatcttgcagaagaccgcagtgggataaatctcaaagatctcgtacaagatccttctttgctgaccaactgactgaagagcagattgcag

SEQ ID NO: 340030 - DNA, 101 bp, Homo sapiens
cacacttcaagaaaatgtaaacaagtatcagcaagtggctccttctcctgaaaaagccgaggaggagagtgagaggcttctgagggaactctatttgtttg

SEQ ID NO: 340031 - DNA, 100 bp, Homo sapiens
gtgctcggagccctgctcgggagctggtccccaacgaggtgtggaaccccttcttgctggaactccacggagagactggaccctgatgctcccataagac

SEQ ID NO: 340032 - DNA, 50 bp, Homo sapiens
ccgagctccagccgaaggagaaggggggaccatcagcacgtgcccatcga

SEQ ID NO: 340033 - DNA, 98 bp, Homo sapiens
tgcagggctacgcggccaagactgtgttcgagtgtaaactggagttgctggtgggcagccctgcttcctgcatggaactggagctgtatggagttgac

SEQ ID NO: 340034 - DNA, 96 bp, Homo sapiens
acaaaatttgtctgcaaacctggagccagaaacattaccgtcatattccacccattactaaggacgctgacttggctcgtttgctgagctccggct

SEQ ID NO: 340035 - DNA, 100 bp, Homo sapiens
caagcttttcggcctcagtgtacgctgtcgccacaatcccaaccaccagctgcctagagagagacaattgcagcatgactttcccagggccctgattttc

SEQ ID NO: 340036 - DNA, 90 bp, Homo sapiens
ggaaatggtcttgtcacctttcaacttcgaggactggaattccgagaatgcatatactacaactgctattaatgggacagatttctgtac

SEQ ID NO: 340037 - DNA, 51 bp, Homo sapiens
gattgagccgcgcacgctacagtacaaggagattgcatcctacctgatcac

SEQ ID NO: 340038 - DNA, 100 bp, Homo sapiens
aactcgtggttctccactcaggttgacactgtggccaccaaggtgaaggtattgcaggcaatgggatatccaacaggctttgatgcagatattgaatgta

SEQ ID NO: 340039 - DNA, 90 bp, Homo sapiens
cggtctcggtgtagctgccgtggttgccaggagagctgcgccggcgagaagcggccgagccagcagcagatgatgtctgtcctcatgaac

SEQ ID NO: 340040 - DNA, 82 bp, Homo sapiens
cgattggaaccagcacaagtacaactgttccagctcagcaggccgtttgcaggcttcgaggactttctgccctcccacagca

SEQ ID NO: 340041 - DNA, 100 bp, Homo sapiens
tgtgaaacagagaaagataggcggccatggtccaaccttgaagggttttggccaaattgggcgagggcacaaaataaccacttaccccttctcaccgagg

SEQ ID NO: 340042 - DNA, 98 bp, Homo sapiens
ggcggcaggcgccttcgcggaccgagcctgacggagccggaggctgggagccgcggcggcctgggcatctgcagaaaaagaggcaatcaagggtacat

SEQ ID NO: 340043 - DNA, 75 bp, Homo sapiens
aattctggacacattgggattaaaggtttttcgttggaatatacgttgcacatttatggcgattctgagtgtgag

SEQ ID NO: 340044 - DNA, 80 bp, Homo sapiens
tttattactggcagcatgtatatctttttgcccttggtttctagaatatgcccaaatgatgtctgtcgcatctggaaaag

SEQ ID NO: 340045 - DNA, 100 bp, Homo sapiens
ccagcgacctgaacctggaggcttccgaggcaatcaagcattcagaatgagcgtaagtgccctgtgtgcctctctgtgcctctgggagttgggagggagg

SEQ ID NO: 340046 - DNA, 85 bp, Homo sapiens
cgttaaacatctgaaagggtcagttaacaagcacaagccctggctggagcccacctaccacggcatagtcacagagaacgacaac

SEQ ID NO: 340047 - DNA, 74 bp, Homo sapiens
ttaggcatccagggacgcaggattcacaaggagagcctgtcccgcctcctgtccacctgtggcctcgtccagtc

SEQ ID NO: 340048 - DNA, 75 bp, Homo sapiens
gtcaatttcatacagaaccttgtgttttacattgaagctgcatataaaactgcttgggtaattccagaattgatt

SEQ ID NO: 340049 - DNA, 101 bp, Homo sapiens
atattagactggaaaattcttctctttttagctcgtggcacaaaatcctgatggactccacgaaagaaatgactgctgtccatgcaggcaacataaacttc

SEQ ID NO: 340050 - DNA, 90 bp, Homo sapiens
tgcactattctttcccaggaaccattggataaggataaagacttaattcagtgcacaaatgagatgaatgtgaacatcccacagttggca

SEQ ID NO: 340051 - DNA, 83 bp, Homo sapiens
cgcgaggcaacctctgggccaccggacttctgcacggacctggccgtctccagtgccaacttcattcccacggtcactgccat

SEQ ID NO: 340052 - DNA, 100 bp, Homo sapiens
atgtgggcatggcagacaaatctgtagtgtgtactggccacatatggaagcattgcattgattgtcttatatttcaagttaaggtccaaaaaaactccag

SEQ ID NO: 340053 - DNA, 82 bp, Homo sapiens
ccaacttcggcaagatccagatcgggatttacgtggagatcaagcgcagcgatgtgtaatcgctcaaattcctcttctcctg

SEQ ID NO: 340054 - DNA, 100 bp, Homo sapiens
gcggcgctgagccagccgggacggacatgcgcgggagggcgccgcggggcagccgccgctcctccggggacctcagcagccatgtcgaagccccatagtg

SEQ ID NO: 340055 - DNA, 49 bp, Homo sapiens
cttttggaggctgccaggataataaggctttccaaggaatcccttcaat

SEQ ID NO: 340056 - DNA, 98 bp, Homo sapiens
tcctaaatagctgacattgcatcttcaagactgttggaatgagaccgtggagctttttcgtgctaagatgccgttacggaaacatcgctgtcgtttca

SEQ ID NO: 340057 - DNA, 83 bp, Homo sapiens
catcatggtgaagctcgcgaagaaaccaaggtgtatgttggtaacctgggaactggcgctggcaaaggagagttagaaagggc

SEQ ID NO: 340058 - DNA, 100 bp, Homo sapiens
gcaggcgggaggcaacggagctaccagccgctgctggccttcctgcaaggactcttcactttctatcaccatggttacgaactggccaaggatttcgggg

SEQ ID NO: 340059 - DNA, 100 bp, Homo sapiens
aaatggaatcctcctctgcgagaaataatgaagatgtttcattttcaagaccagcagatcttgaccttattcagtcaactccctttaaacccctggcact

SEQ ID NO: 340060 - DNA, 100 bp, Homo sapiens
gggagcccccagaaggctgtgagaaagtgcgtgtgtttgaagaagccactctgaagttgcagccggagtgaagaagagcggaccgctgcccagtgctgag

SEQ ID NO: 340061 - DNA, 98 bp, Homo sapiens
ggcggacgcgcgcagcccgcccgcccggcgaccagcaaggttcttgagcacgtgcccctgctgctgtatatcttggcagcaaaaacattaattctctg

SEQ ID NO: 340062 - DNA, 97 bp, Homo sapiens
ttcccggcgtctaggggagcgaaggctgaggtggcagcggcaggagagtccggccgcgacaggacgctgtgctccattgaagtgacttgtgaatcag

SEQ ID NO: 340063 - DNA, 100 bp, Homo sapiens
ctccagcgcgtggtgggggaactgctggggaaggcgattggcatcgatctctccatcccttccgaggcccgacttcgtgagtgtgtccgcttgaaaccaa

SEQ ID NO: 340064 - DNA, 100 bp, Homo sapiens
ttttttagtgcagcgggagagagcgggagtgtgcgccgcgcgagagtgggaggcgaagggggcaggcctctctgtgctgctgaaggcagatcgcttgttc

SEQ ID NO: 340065 - DNA, 96 bp, Homo sapiens
cacagtccctccacgcggaaagaagtaccttcgccggtcaccggctcctgcagggtgtgtgcggattttaggcaaacaagaaaatattagagtgat

SEQ ID NO: 340066 - DNA, 100 bp, Homo sapiens
gcttgtcggggacggtaaccgggacccggtgtctgctcctgtcgccttcgcctcctaatccctagccactatgactgtgccctgtccacggtgcctcctg

SEQ ID NO: 340067 - DNA, 100 bp, Homo sapiens
tctatccgggacaaggaaggttacaatagcatacattatgctgccgcctatgggcacaggcagtgtctggaattggttggacgtgataagtatgagcctg

SEQ ID NO: 340068 - DNA, 75 bp, Homo sapiens
ctcggccccaggagccaataacctgcaggttggtgttcgaggaagagacattgttgttcttggtgtggagaagaa

SEQ ID NO: 340069 - DNA, 90 bp, Homo sapiens
atttaaaccacatggctatctaaagagatcttctggtgaccccacttctcgctgctcatgccgctgggactggggcggcggaaaaaggcg

SEQ ID NO: 340070 - DNA, 74 bp, Homo sapiens
ccgactatttggcaagaagcagatgcgcattttgatggagctgccaaacggaggcccgaagaaaaagaacctga

SEQ ID NO: 340071 - DNA, 75 bp, Homo sapiens
actttctgcctgcttctagaattcctccaagcatttatataactctgcagccttcaaagctcgaaccaaagctag

SEQ ID NO: 340072 - DNA, 98 bp, Homo sapiens
tctgcggctccaggagggcgcaggagcgggactgagagcgcctggaggctcgagcggaggtttgttgcatattctaaggacccagacataggcttggt

SEQ ID NO: 340073 - DNA, 90 bp, Homo sapiens
ctgacagctgtgtactttgccctcagcatctcccttcatgtctgggtcatggcagatggctcggtgagctgcaagaggacagactgtgtg

SEQ ID NO: 340074 - DNA, 75 bp, Homo sapiens
gagagagaggtggacagatctgagagatactgaggttcgagaacttgtcttggacaattgcaaatcaaatgatgg

SEQ ID NO: 340075 - DNA, 83 bp, Homo sapiens
ttctcccggcagcagcccgacgcaaaccaaggatctggggatcttcgcactatcccaagcacatacccccggcctcatgagta

SEQ ID NO: 340076 - DNA, 100 bp, Homo sapiens
gacgccagcggacacgcgggcgagggatacccacccaccatcccagggtctacaacatccacagccggaccgtcacccgctatcctgccaactctatcgt

SEQ ID NO: 340077 - DNA, 51 bp, Homo sapiens
tgaaaatgtgctgcctcgagagccgctggccaaggagcgggagctggaact

SEQ ID NO: 340078 - DNA, 96 bp, Homo sapiens
actgggacgttggggagggggctgtgccgggcggagagaactcagcgaggattctgagggcatccgcttcgatcctgaaattccgcaaacactacg

SEQ ID NO: 340079 - DNA, 100 bp, Homo sapiens
cctgcctcagcctcccgagtacctgagattagcccaggtttctaagcatgaattgaggaacagaagaagcagagcagatgatcggagcagcatttgtttc

SEQ ID NO: 340080 - DNA, 116 bp, Homo sapiens
aagaaatgaaccagtattcttaaattgatttcaagtttgaacaagtgtaaacaggaacatcgataagtagtgtaaaaacttgcacaatgaaatccgaagccaaggatggagaggag

SEQ ID NO: 340081 - DNA, 95 bp, Homo sapiens
ctggaggtactgagaggatggaaatcagcgcggagttaccccagacccctcagcgtctggcatctgtgagcgagtgctgtgctttcatgggcctc

SEQ ID NO: 340082 - DNA, 75 bp, Homo sapiens
gacagtcacaattttgtaataagctacaagtggaccttctagtgcagttgttcctaatacctcatctcggaaaaa

SEQ ID NO: 340083 - DNA, 90 bp, Homo sapiens
gctgccctcaaggtcgtgcgtctgaagcctacaagaaaggaagatcctagtacctccccctctccggggacccgagcagccagccagcca

SEQ ID NO: 340084 - DNA, 82 bp, Homo sapiens
tcctgtcaagcgagaaagaacatcctctttaacccagttcccaccctcacagtcaggtgagaagccctaccactgcaactgg

SEQ ID NO: 340085 - DNA, 75 bp, Homo sapiens
ccgcctcttcagctcgccatggatcccaactgctcctgcgccgccggctgacaaacgggctcatcataatgcact

SEQ ID NO: 340086 - DNA, 113 bp, Homo sapiens
ctccacttcacacagaagaatcgcatgaaccctgagggcgacatcaagggtgtgataccagatctgcgatgagctgggagtgaagcggccatcttctgtgaaagtattctcag

SEQ ID NO: 340087 - DNA, 90 bp, Homo sapiens
ctcggatcgaatccctcacgcgggcgcggatcgaccggagcagagagctggcgagcaagccacccgcgagtcggccttcgttcacgccat

SEQ ID NO: 340088 - DNA, 75 bp, Homo sapiens
cacccagcagagatcagcaatccttggctcactgaggaggtttggtaagaatgattgatgttggctgatattgga

SEQ ID NO: 340089 - DNA, 75 bp, Homo sapiens
gcggagccccccgacgggccggcccgcgagcagccggaggccccggtcccggtactactgagcgagtgtgcttga

SEQ ID NO: 340090 - DNA, 82 bp, Homo sapiens
tcctctacaccatcgacaccgaaaactccaccgtagcccttgccaaaggcgggaggcagcaccgggctcttgatggacttgg

SEQ ID NO: 340091 - DNA, 102 bp, Homo sapiens
ctcccgccggccgtctccttaacaccgaacaccttatagctgaggtggtaccagtttaagaagtgagaacttcttcactgactgaaatttgcatatcaatcc

SEQ ID NO: 340092 - DNA, 99 bp, Homo sapiens
gtccgcaaggccggagaaggccgccgggcccgggcatggtggtctggggcaacgcggaagtactatactggcaattgctggagaagattttgcaattgt

SEQ ID NO: 340093 - DNA, 73 bp, Homo sapiens
gttgacactgctgtgcgccacgtgttgctcagacagggtgctggaggcgctgctgccgctgaagggcctagag

SEQ ID NO: 340094 - DNA, 78 bp, Homo sapiens
cgttagaactcgcgtttccacttcagagatctgttgtttttcagaggcaccaaataatgtcatctgaaatgttgccag

SEQ ID NO: 340095 - DNA, 82 bp, Homo sapiens
ccgtgcgggacgcgggcgccaggaccggccgaacgcagagatgaaggatttgggggcagagcacttggcaggtcatgaaggg

SEQ ID NO: 340096 - DNA, 100 bp, Homo sapiens
ctaccgatacatcaatggtaggaactcctctgatgtcctggtttatgttaccagcaatgacactacggtgactctgacatcattagaagcatgccagaac

SEQ ID NO: 340097 - DNA, 100 bp, Homo sapiens
gcaagaaactgttgaattagacccgtttcctatagatgagaaaccatacaagctgtgggtgtcgaagtgcagacagactacgtgcccctgctgaactcgc

SEQ ID NO: 340098 - DNA, 96 bp, Homo sapiens
acagtgccaagttagatgccgattacccacttcgagtcctttattgtggagctgactggaaataccggcatgcaggattgatggccttatctgcca

SEQ ID NO: 340099 - DNA, 98 bp, Homo sapiens
tgcccaggccgtggcccctcagccgtgtggctgctgagctctgtggagccaggggccgtggtgttggaccacctcggggggctttggtacgtggtaca

SEQ ID NO: 340100 - DNA, 60 bp, Homo sapiens
ggggggagcggcgttggaggccaccgtttccaggacacaatgtttgcacgaggactgaag

SEQ ID NO: 340101 - DNA, 76 bp, Homo sapiens
cttcttgggaattgcttcgtttgccattttcttatggagaactgtccttgttctcttagaacaagctctggtgatt

SEQ ID NO: 340102 - DNA, 100 bp, Homo sapiens
aaatgttcaagtttaccaaaagagaggcaccgctggaacactaatgaggtggtggtatcatggatacagaaatgtctgaagatatagaccacaacttaac

SEQ ID NO: 340103 - DNA, 90 bp, Homo sapiens
attcctcaaacaccaccaagtcaaggatacaggtgtacttttgcatgtgatgggagatgccctggggtccgtggttgtggtcatcacggc

SEQ ID NO: 340104 - DNA, 106 bp, Homo sapiens
acagaagcaacagccttacacagagtgttcagcaagctccaacaattgtgtaagtgtcgtgtgggagccaatgggagatgggaagaaaatcatttccttggctgat

SEQ ID NO: 340105 - DNA, 74 bp, Homo sapiens
cctggttctggaatcctcagttcaaggtgaagagtcttttgaagacctgaccgaagaaagcaaaacactggcct

SEQ ID NO: 340106 - DNA, 50 bp, Homo sapiens
cactttgtcaccaaatgtgcctttcaggcctgtagtggtggagacacgcc

SEQ ID NO: 340107 - DNA, 100 bp, Homo sapiens
tcaaagcatggctaagagtgttcagtagaaatgggtatattacagctaatactgacacagaagaacagagttttccagtccctaaggcatttaacacacg

SEQ ID NO: 340108 - DNA, 100 bp, Homo sapiens
ccaagaagccagtcaagcggccagactggggcagcacctactccgtgtcagtggtggagaccgactacgaccagtacgcgctgctgtacagccagggcag

SEQ ID NO: 340109 - DNA, 100 bp, Homo sapiens
cagccctaacggtggtggagaacccaaaggagttgtatcccgcattttgtattcacaacggaggctccgaccttgagcggctccccacagccagcacctg

SEQ ID NO: 340110 - DNA, 100 bp, Homo sapiens
ggagttcgtctcttacgtctgcggaagtgcagctgcctcagttcttagcgcagcatcatggcagaacaggatgtggaaaacgatcttttggattacgatg

SEQ ID NO: 340111 - DNA, 75 bp, Homo sapiens
caaggccaagtatccgccagtcaataggaagtacgagtgatggagtctcactctgttacccaggccggagtgcag

SEQ ID NO: 340112 - DNA, 51 bp, Homo sapiens
gagtggaaacgcttgtagggtttcaccaggcacatgaggatttcatgtatg

SEQ ID NO: 340113 - DNA, 76 bp, Homo sapiens
tcttaatcccatatctggacatctggaacatccatgaatcatgtcaaccctgccatggacttcacgcagactccac

SEQ ID NO: 340114 - DNA, 100 bp, Homo sapiens
ggaagccgtggctgcgctctcttccctctgctgggcgtcctgttcttccaggtgatgtaaattggagtcaaccaggtgaaaagaagttaactgggggatc

SEQ ID NO: 340115 - DNA, 90 bp, Homo sapiens
acctgcgggggatgacagctgaaccgcctaaaggagatgatcacggaagccttggcccaaggtgggatgcacataagagcccggttcccg

SEQ ID NO: 340116 - DNA, 80 bp, Homo sapiens
ccagactcctggagatcgacccgtacttgaagccctacgccgtggacttccagcgcaggagctagagttaatgccaaaga

SEQ ID NO: 340117 - DNA, 75 bp, Homo sapiens
gggtccctgtgacggagcccaaggttgatgactgtctgcacatcaccgaacgatgagagaggactacagcgacaa

SEQ ID NO: 340118 - DNA, 100 bp, Homo sapiens
ccgccgctcccggcagtgctttccccgcgtactcgggatggcggcggccgcgctgaggctcccggctcagtgactgtgctggcgatatttaatgaattgc

SEQ ID NO: 340119 - DNA, 80 bp, Homo sapiens
attctaccacctgtagttcagccaagtccaaggtattgttgcagcatctggcagtgagactgaggatgaggacagcatgg

SEQ ID NO: 340120 - DNA, 100 bp, Homo sapiens
cctgaggaagatgaagaccagagaaaccctgcaaaggagtccctagagacacctagtaatggctaagtcctatcagccatggaaacaccattgctctctt

SEQ ID NO: 340121 - DNA, 73 bp, Homo sapiens
gtgaagatcgcggcgccggagttgcataagggagatacaacctcatcagccttgaaaggtgccatccagttag

SEQ ID NO: 340122 - DNA, 120 bp, Homo sapiens
gtttgggactgccccggcaactccagggtgtctggtccacgacctatcctaggcgccatggaacgaatgcaggaatttgggaactgagctgtgcaagtgctgaagaaggagatttgtttg

SEQ ID NO: 340123 - DNA, 75 bp, Homo sapiens
atcccttccgaggcccgacttcggaccaagaatcgccttcagccctgtctggtgcatccttggcagaaagtgagg

SEQ ID NO: 340124 - DNA, 100 bp, Homo sapiens
gtccgcccgtcggtctgcagcgcggctgagatttattcaggagattgagcatgctctgggtcttggcccagccaaacagtgtcctcttcgagagtttctc

SEQ ID NO: 340125 - DNA, 75 bp, Homo sapiens
acaaagtcaagagacagcgattggacagaatttgtgaaggattttttatcaagcagaaatgcatcgaacaacgag

SEQ ID NO: 340126 - DNA, 90 bp, Homo sapiens
ggcagagtgtaatgctgtccgccaggccctgcaggacctgctttcggagtacatgggcaataaatttctgaataaattggcagaagaacg

SEQ ID NO: 340127 - DNA, 50 bp, Homo sapiens
aattccaatcccagttcatttttgaggcgatcgagatcggatgacagcaa

SEQ ID NO: 340128 - DNA, 98 bp, Homo sapiens
ggtattgtaccgctgagggaaaggagcgggactccggacctccaggaggtagatgatgagctggagatcaaggcctactatgcaggccacgtgctggg

SEQ ID NO: 340129 - DNA, 102 bp, Homo sapiens
tcccagctggagcaagggaccgagctatgggtggctgagagaggaaccacccagggctgccatccagtagagacggggtttcaccgtgttagccaggatggt

SEQ ID NO: 340130 - DNA, 101 bp, Homo sapiens
tagacaattaataaaagaaatgaattctgccaaagagaaatataaagaagctttagctaaaggtagtggaggacatgctagaggacgaggaagaagaagat

SEQ ID NO: 340131 - DNA, 51 bp, Homo sapiens
aggccaggagccaggggcccagaagatcctgttctaccttttaaatgatgc

SEQ ID NO: 340132 - DNA, 100 bp, Homo sapiens
aaagagaatgatgaagagaaaggcccggagactgaacaacatcaagcctttttgtatcagttaatgcaacatcaccaccagcagcaccaccaacctgaac

SEQ ID NO: 340133 - DNA, 100 bp, Homo sapiens
gacgtgtatggaaactcatcaggacggaagcacaggggccactcagagtcgcccgagaacaaagccttctagacaagctcagtggaatctgaagggccca

SEQ ID NO: 340134 - DNA, 50 bp, Homo sapiens
gggtgaagcgccagcaggagagggttatcaatactctggctgaccatcat

SEQ ID NO: 340135 - DNA, 83 bp, Homo sapiens
actgctggggtggtggttccaatgagacagggcacaccaaactccatctggaagctcttcgtgggcggtcttgactggagcac

SEQ ID NO: 340136 - DNA, 100 bp, Homo sapiens
gccgaccgggcgcaccgaccatggcctccaaatgccccaagtgcgacaagaccgtgtacttcgtaagactttgaccccgacgcaggcttcagtgattgcc

SEQ ID NO: 340137 - DNA, 83 bp, Homo sapiens
actaatatttaagaaagaagatgttaactttcaggtaccgggaagccagtgttgaagtgatggagataatgtctcgttttgct

SEQ ID NO: 340138 - DNA, 50 bp, Homo sapiens
caatatatcttcacagaaatggcctcggatcccattgaagataccacgct

SEQ ID NO: 340139 - DNA, 100 bp, Homo sapiens
ctgatagtgccagcctggcctggtttcctgtttggaggaacgtctgcgggggacagtgctgcccaggatggacaacagcaaacagcaccaaccactgtat

SEQ ID NO: 340140 - DNA, 146 bp, Homo sapiens
atgtcttattgggctcctgtctgcaggatttacgcgcacgttggaaccgaagagagctctgttgttgcattgccaggtataaactccgaattgttaagccaccaaaattacccctagagaaaaaacccaaccctgataaggatggt

SEQ ID NO: 340141 - DNA, 82 bp, Homo sapiens
agcgctccacatcctaccaggagctccatgtccatccgctggccgggccgccccctcggaagccatgcctggatactgatag

SEQ ID NO: 340142 - DNA, 90 bp, Homo sapiens
cgccgcccatcgagtcgaagcaccgcagcctggtgcagatcatctacgacgagaaccggcaggatcctaaggcctttgtagtccttcagc

SEQ ID NO: 340143 - DNA, 96 bp, Homo sapiens
gttttgaagcgttcgatcttttaacatcacatcacatgctgacagcacaagaaggatgccctttgccatgttatgatcctgcaggaagaccctcac

SEQ ID NO: 340144 - DNA, 88 bp, Homo sapiens
ctgcttctccttttcatgagtgttcctgtggtctctgcacctcctttctgatcgaatcatcaatttagttgttggcagcttaacatcc

SEQ ID NO: 340145 - DNA, 82 bp, Homo sapiens
cgcctcctcgaagtagacctcaaaaatgggagccatgtctgaccaggacgtttggaagatcatatccatgccagaggctctt

SEQ ID NO: 340146 - DNA, 100 bp, Homo sapiens
cgccgcctcagccgccgccgccgccgttttcgcctgcagctgctcaccgtgcacgatctgattttctggagagatgtgaagaagactgggtttgtctttg

SEQ ID NO: 340147 - DNA, 83 bp, Homo sapiens
cagagtggagccatggctagagaaagaagcttccggttctgaggtcctggaggtgccatttccctctctgttgaagcaaaggc

SEQ ID NO: 340148 - DNA, 78 bp, Homo sapiens
gattccaaagttgaagttttgacctataaaaaggcagatactgatctggtattttggagataacggcagtggaggtgg

SEQ ID NO: 340149 - DNA, 90 bp, Homo sapiens
aaatcaggaagattttggataaaacacgatttagtatcttgcctccaaagctatttagtggattatggattttcagtgaatttaataaaa

SEQ ID NO: 340150 - DNA, 82 bp, Homo sapiens
tgaatctggtgatgaacttagcagcagctccactgaacagataaggacactcttgcactcctgtaatgagcctggcactgtg

SEQ ID NO: 340151 - DNA, 75 bp, Homo sapiens
gccaaattaaaaaacgttcagcttctctaaactccaagcaaaccagtccagctacgggggcccagccagccagca

SEQ ID NO: 340152 - DNA, 75 bp, Homo sapiens
caggttacatcattgcagtccaccgaaaaatgagacttactattgagctgtctcgaactcagaagtcaagagatt

SEQ ID NO: 340153 - DNA, 51 bp, Homo sapiens
gcgtgagtgatcactctcaatcccggagcaacaagatatggatttggatat

SEQ ID NO: 340154 - DNA, 87 bp, Homo sapiens
gccgcccggggcagggctcgggagagcgggctcaggcccgatgtcaccgcataggccagagcaaagctgtgaaggtgtatcgcctca

SEQ ID NO: 340155 - DNA, 100 bp, Homo sapiens
cctagggtgcagcgggcgcgtctgcggctggtgttggcgcatctctagcggcaacctttggcactgcatccatgagcatgcccacaggattcggcactcc

SEQ ID NO: 340156 - DNA, 122 bp, Homo sapiens
gtttaatagatgacaatgatctctaccgatgggaagtccttattattggccctccagatacactttagcctcagccggaccatcctcatgtgtgggcctctcatcaaggaggagactcacag

SEQ ID NO: 340157 - DNA, 100 bp, Homo sapiens
ttttgggagattataggagaactgggcgacggagcctttgggaaagtgtacaagatgatgtgatgccagccacttactgtgaaattgatttagataaaga

SEQ ID NO: 340158 - DNA, 100 bp, Homo sapiens
gaggaagtctccctacctgccctcggcccaccgggtcagcgggctcatgatggccaaccacaccagcatctcctcggccggaaggtggtggtcgtacgct

SEQ ID NO: 340159 - DNA, 51 bp, Homo sapiens
ccacccagcagcagggcatcaagtgtaaacaggaacatcgataagtagtgt

SEQ ID NO: 340160 - DNA, 78 bp, Homo sapiens
catccgcctgtgggacacctaccaggttgacatcatggacatatgtgagtccatcctggagaggaagcggcatgacag

SEQ ID NO: 340161 - DNA, 98 bp, Homo sapiens
tgatagacatgggggcctcaaacgtggagatcaactcctctctgttaatggagtggtatatgagtagaccagtgatgagtggcccaggactctatgac

SEQ ID NO: 340162 - DNA, 83 bp, Homo sapiens
caccacgcaccgactatgtcgcctgccaccgagccgggcccacctccccaccaaggaagcaaccaaccagtggttcatcccag

SEQ ID NO: 340163 - DNA, 90 bp, Homo sapiens
gtcagcctcatggagcggcggaggctcaaccagctgctcctgcccctgctgcagtgtggacaacagtgagtatatgcggaatggagactt

SEQ ID NO: 340164 - DNA, 100 bp, Homo sapiens
cggtgcctgggttccaggaggacacgctgcagttggccttcatcgacttgagacaagtacagcaatcatttgaaactccaagggccaaagctcaaatgcc

SEQ ID NO: 340165 - DNA, 96 bp, Homo sapiens
acagaacgcggctcccagccacaccaagttcaggtgctcttacagcctgttccaagtgtggcttaatccgtctccaccaccagatctttctccgtg

SEQ ID NO: 340166 - DNA, 136 bp, Homo sapiens
acctgtaagaacagaaaatcgtcttatagttgagaatttatcctcaagagtcagctggcaggaggagatgttaaagtaacccatcttgcaggacgacattgaagattggtcttctgttgatctaagatgattattt

SEQ ID NO: 340167 - DNA, 88 bp, Homo sapiens
tggggagggtactgtgaatggcaaccctcactagaactacatagttggagtcaggggattggccggcagggtgatatgactgattcaa

SEQ ID NO: 340168 - DNA, 50 bp, Homo sapiens
acaacttccaggttcccatcctgcgggccatccagagtagagatgtggcc

SEQ ID NO: 340169 - DNA, 100 bp, Homo sapiens
tctacctggaggtctccactctggtcagcaagtatccagacatcaggccgaggacgatgatcccgccgggggagtgcacgtacgcgggccggaagcggag

SEQ ID NO: 340170 - DNA, 100 bp, Homo sapiens
aaaaattgtataattgttccaaatggagataatgtatttgctgcagtcaagtgggtcttcaaacaactctatgataaaggccttgtttatagaggtgtga

SEQ ID NO: 340171 - DNA, 100 bp, Homo sapiens
gcaggaccaacctctcctctggatgctctaggtacggattttcaaatatgcgctatatttcttcgctaattagtggtgttggtattttcatgatgggtgc

SEQ ID NO: 340172 - DNA, 101 bp, Homo sapiens
ggagcccatcgccctccctggcggcctcaccctgccaccggtgcccttcaccaagcttcccatcgtcagtttaatggatcgagaagtggcgttgcttgctg

SEQ ID NO: 340173 - DNA, 82 bp, Homo sapiens
gggtgtttctggccacgtgcttcaacgctctgctgcccgctgtgagggaaaaggttgctgcttttgctcagaggacatccat

SEQ ID NO: 340174 - DNA, 74 bp, Homo sapiens
gctgagcctgctggtgctgctgcctgacgacggcgtggagctcagcacggtgtaataatgtcctttatatcaga

SEQ ID NO: 340175 - DNA, 82 bp, Homo sapiens
gggaccacggtcaccgtctcctcagcctgggctggaagctcttctacgtcacaggctgcctgtttgtggctgtgcagaactt

SEQ ID NO: 340176 - DNA, 75 bp, Homo sapiens
aggcttcaggcgacccgtactgggcctactctggaatgagagaggaaatgtcattaggatgccaggaggcttttg

SEQ ID NO: 340177 - DNA, 154 bp, Homo sapiens
tgccctttaggatttgttagaaaggagacccgactgcaactgctggattgctgcaaggctgagggacgagaacgagaagtgacagtgtgttcgtgttcttctgaggtgtcagcaaagtttgttctacatgcagtccagcttgtgaagcaaagag

SEQ ID NO: 340178 - DNA, 87 bp, Homo sapiens
atgctgtctctagactttttggacgatgtgcggcggatgaacaagcggcaggtctttcccgcggtgacttcccttgggctgaatgaa

SEQ ID NO: 340179 - DNA, 82 bp, Homo sapiens
cccagatgtgggttttgaccagcagtccatgaggccaggccctgcctttcctcaacagatcctgcccgggagctgaaggtcc

SEQ ID NO: 340180 - DNA, 100 bp, Homo sapiens
ggctggtgccgcgttcctgctgctctgcctgctccacaagcggcgccgcgccctcggcctgcacggaaacagatgattatgctgagattatagatgaaga

SEQ ID NO: 340181 - DNA, 100 bp, Homo sapiens
aagctgagggcacgtgtttgcggttcagccctttgatgaccgcagcagatgccttattggaggaactggaacgctccacccttcaggacagtgatgaata

SEQ ID NO: 340182 - DNA, 82 bp, Homo sapiens
tgctttgtggagggtacttcattgatgccacaaccataatagaatgtctacattccttggctgacaagattttgaaaaagaa

SEQ ID NO: 340183 - DNA, 98 bp, Homo sapiens
ggaagtgcggggctccaatggcgctttctacaaggtattccagcgtcttcaggaaacagtttagactctcttcaagatgacaatcctccacactggct

SEQ ID NO: 340184 - DNA, 100 bp, Homo sapiens
ggaagatgcaagcggtttgggaccttgaacaaggcaaatatggttttggacatggatttgattgacatactttggaggcaagatatagatcttggagtaa

SEQ ID NO: 340185 - DNA, 78 bp, Homo sapiens
atttataatggaattggagtcagcagaactgaaatagcaggcgcggggcgaaggagctgctagaacaatgctgaggcg

SEQ ID NO: 340186 - DNA, 76 bp, Homo sapiens
cgcggatgggatccagctgttagtcgggctaaggcagctggataagcacagccaggccacagcccagcagctggtg

SEQ ID NO: 340187 - DNA, 100 bp, Homo sapiens
gcagttcagatactcccggccgttccggaaaggagaaaaggatccagacaatgaatttgctgtagtaagcattaataatgtctttcatctttgagtggat

SEQ ID NO: 340188 - DNA, 98 bp, Homo sapiens
acgcgcagctgcaggctgagaagcagaaggccaggtcgtgcattgaggcccatgagaaggacatggagctctcatttgccgtgcagcgcagcaaggac

SEQ ID NO: 340189 - DNA, 82 bp, Homo sapiens
aagccagcctaactgagctctggactttggggacagctgtcagtggcctaggccgcaggacctccggctagcctgtttcagc

SEQ ID NO: 340190 - DNA, 82 bp, Homo sapiens
caacatcgacatcaagtcggccggggatttaggtgagcatctgcctggagtgtaacagcagcaaactgcgcgggctgaagcg

SEQ ID NO: 340191 - DNA, 75 bp, Homo sapiens
tatatgtgaaatcatgtccactgatcaaggaaacaatgtgatgagaaccattcatggggtgggagagatgatgac

SEQ ID NO: 340192 - DNA, 100 bp, Homo sapiens
cagaagaggatggcaaaggtggctaaggacctcaacccaggagttaaaaaggagcatctttccttgaagaagtacattattgacattgtggttgaaagta

SEQ ID NO: 340193 - DNA, 80 bp, Homo sapiens
ctctaagcaggaattaattgactacaagcaaaaagctactagaatactgcaagtgggtgtacattacgaattgactgagg

SEQ ID NO: 340194 - DNA, 75 bp, Homo sapiens
aaaacagtttacctcttatctaacaggagtggcaaaattctattcagaagaatgcaggccttgcttttatcgaac

SEQ ID NO: 340195 - DNA, 75 bp, Homo sapiens
aaggagcagtccgtgctcaataattgacccaggactcattttcaggaaagcctgaaaatgagtaaaatagtgaaa

SEQ ID NO: 340196 - DNA, 97 bp, Homo sapiens
cttaggggactatgttgacagagggtacttcagtattgaattcttcaccaaaggacatggatgaaaatgaaagcaaccagtctctgatgacaagcag

SEQ ID NO: 340197 - DNA, 100 bp, Homo sapiens
aggaagaagaccatgctgggaccttccaggactcagcccaaaaccatgtttgcccaagttgaatctgatgatgaggaagcaaagaatgagccagaatgga

SEQ ID NO: 340198 - DNA, 87 bp, Homo sapiens
gaagagctggcgcacctgttgctgcctcagccctgtgcaaaccagagaccatcatgcagacatcagagactgggtcggacacaggct

SEQ ID NO: 340199 - DNA, 75 bp, Homo sapiens
caccgcggccggagctgtgggctggaagagagaagggcacagttacctaagtatcaacgtaatcttcctcggcca

SEQ ID NO: 340200 - DNA, 100 bp, Homo sapiens
agcggggcaaacagtgagtggggttcagcgtagactctggaccaggagaggcccgcggtgaccgaggcctgggccccggccttcttgggtgattctgtcc

SEQ ID NO: 340201 - DNA, 75 bp, Homo sapiens
ctgccggctgctccgcaccccggggtcccaggaagggcggcccagaatatatacagccctgctctgggacacacc

SEQ ID NO: 340202 - DNA, 82 bp, Homo sapiens
cgagaacgagcggtggagattgatggggagcgcatcaagatataattggtgattacaactttcctctataaattaactcttg

SEQ ID NO: 340203 - DNA, 74 bp, Homo sapiens
tcaaaccttgcttctaggagataaaaaggttccagcaacagatagaaatgctttaagttcactctggggaaagc

SEQ ID NO: 340204 - DNA, 82 bp, Homo sapiens
gagtgcagaagatctgggtgcccgtggaccacaggccctcgttgcccagattacatatccagccatactcatggaccccagt

SEQ ID NO: 340205 - DNA, 87 bp, Homo sapiens
cctgaaggatctctggaatgatgggctcatccacctgcagacatggggcgcagaaagtcaaaacgaaagccgcctcccaagaagaag

SEQ ID NO: 340206 - DNA, 90 bp, Homo sapiens
ctgaaaaggcagatctcaactgaaagatacgaacgtggttatgatattcctctcaaccctttaaatctgatccctttctatgctggttct

SEQ ID NO: 340207 - DNA, 98 bp, Homo sapiens
tgtctgagcggcgcagcgagccgcggcccgggcgggctgctcggcgcgggttgaaatcacaaagattagacacctttttagataggtgttcttcagca

SEQ ID NO: 340208 - DNA, 100 bp, Homo sapiens
tgaatttccaggccttcgccgagctgtgcaggatgagacttctgtgagcagcgaggattttgatatgagcgactccacatggatgtcagctgacccgcac

SEQ ID NO: 340209 - DNA, 74 bp, Homo sapiens
cttacagaaatgtgtcttgttgcatttggtaatttagcagaacttggtcctggcattgatgtgcctgctccaga

SEQ ID NO: 340210 - DNA, 90 bp, Homo sapiens
ctcagcctctgccaggactctgccacggcaagctcattcggacaaacgcctgtggtagtctgtagagaatgccaaatgagggaatccccc

SEQ ID NO: 340211 - DNA, 83 bp, Homo sapiens
ccgagcagcgccagcggccgagcgggcggcttcctggcctgggcgctccggtggcggcggagatgtggacgagtgctcactag

SEQ ID NO: 340212 - DNA, 100 bp, Homo sapiens
ccggttcgagatcagcttcgagtgcagtgaagccctggcggacgagattctagactttggctacccacagaattccgagacaggcgcgctgaaaaccttc

SEQ ID NO: 340213 - DNA, 117 bp, Homo sapiens
cttttgtgaagccaagatcaagacagcaaaaagacttgtcaaagtcaagatttaaattccaggttgtcatcaatggccgagagtttcccccagctgaagctggaagcaagaaagtgg

SEQ ID NO: 340214 - DNA, 99 bp, Homo sapiens
ccggtgttcccgcgctttatcaagattatcgagactctcttccagaacccagaagagggctggcagctgtacacctcagcccaggcccctgacgggaaa

SEQ ID NO: 340215 - DNA, 82 bp, Homo sapiens
ggggattgggcagcacattttgaaaaatcctctcattattaacagcattatcgataagtgagcgtcaccctggacccacagt

SEQ ID NO: 340216 - DNA, 75 bp, Homo sapiens
agccggggcggagcacgcgagctatgcttgtagaaacttcattaaaaggagaaattgcctttgatcccagaagcg

SEQ ID NO: 340217 - DNA, 50 bp, Homo sapiens
cccgcgatgtcctatgcccccttcagaggatttttactgggtctaccaga

SEQ ID NO: 340218 - DNA, 82 bp, Homo sapiens
ggccggcacgaaggcgtccccacgctggaagggccctgtttgtgctcttcgtcctggcctacatccacatcgtcttctcccg

SEQ ID NO: 340219 - DNA, 112 bp, Homo sapiens
ttgacatgagcatccacttccagacggctgccgacttcatccaccgggcgctgagccagccaggagggtgtttctgtggcctgggactggttagcaccaacaagtcctgctc

SEQ ID NO: 340220 - DNA, 82 bp, Homo sapiens
ctgcctaatttacagcaaccatgaggtttgaaggagaagttctgaaggactctgactagagcaagtttcatgttcacgagag

SEQ ID NO: 340221 - DNA, 82 bp, Homo sapiens
gtggcactgctgtccttgcccgggggctggctgcactgccccaaggactttgtctctaacgaagtgccggagcacccatgtg

SEQ ID NO: 340222 - DNA, 90 bp, Homo sapiens
ttggattcacccacagcggggcggcggcggcggcggctgcggcccaatataggtattgggagagttgctgctacatctttaggaaatttg

SEQ ID NO: 340223 - DNA, 99 bp, Homo sapiens
tgtattgagaacaatatagatttgcaggaaaatgttaaatatgctgtgcgcttgaggaactatggaagccgtacagccaatggagatggaggaatgacc

SEQ ID NO: 340224 - DNA, 90 bp, Homo sapiens
aagaaaatgtagagataatttgtaacctgcagcaattgattacccagttatcgctgccccagagcacatcagctatgtgccccagctctc

SEQ ID NO: 340225 - DNA, 74 bp, Homo sapiens
ggagactggagtcgaaggccgtgaggacaacaccatcgacttcctggagtacgtggcagctctgaatctcgtgc

SEQ ID NO: 340226 - DNA, 100 bp, Homo sapiens
cagagaaagtgaaactgatcagacgaactacgaacccctggacgggagagtctgccggcggagaatataaggataccagaaggccctattgatcaggggc

SEQ ID NO: 340227 - DNA, 83 bp, Homo sapiens
aaaaaagtcaccgccgctagggtcgccgttgcatcggtgcagggcaaggtatcatgatattagctggtttgacatcaagtcat

SEQ ID NO: 340228 - DNA, 96 bp, Homo sapiens
tacctgttgacgtgtcaagcactaactgtgatcagcgagtttgaggcctctcccgactcgttttcctacagaattcccaacctgagtaggaatcgt

SEQ ID NO: 340229 - DNA, 100 bp, Homo sapiens
ggaagtttgagagaagtttaagagaagaaatggacatgattgcctaaatcagccaaacacaggaaatgtttcctgacatctttgtagcttcatgagtaat

SEQ ID NO: 340230 - DNA, 89 bp, Homo sapiens
ggtgctgaagaaggcaacgctgaaagataaacgggccttcttcatcatctgcacctccaagctgggcccaccccagatctatgagctgg

SEQ ID NO: 340231 - DNA, 108 bp, Homo sapiens
gcgcaccatgtcatcgtcaccgtgcccttaggtttgatgaacttgtgaaaaaattcaaagtcgaatatcatgctggtggctctacccagaattcaattaaagtggctc

SEQ ID NO: 340232 - DNA, 100 bp, Homo sapiens
tggcgttggaataccggctctcagcggctgattgcaagtcaagtagctgctttggaccttggctataagcctggggtggaagcaattcggaagaaccctc

SEQ ID NO: 340233 - DNA, 74 bp, Homo sapiens
cgtggaagctcagagtgtgaccaactggaaccctcaagaggaccgagagttaaacatgaagtttctggagagac

SEQ ID NO: 340234 - DNA, 82 bp, Homo sapiens
taaagttccatcctgagaatatttcacaaagaatttccttaagagctggactggtactgccaaatctgtcgaaagggagata

SEQ ID NO: 340235 - DNA, 100 bp, Homo sapiens
ctgacatggccagacttgatttcaatcttataagttttaaccgtgattggagataccacaaagaagaacgagtatggattaccagggcaccaggcatgga

SEQ ID NO: 340236 - DNA, 100 bp, Homo sapiens
ctcttgatgggaaggaccatttctggactacagctgagattgagaactgcttcataatcctcaatgaccactgagcagtttacaggagatcatactcagc

SEQ ID NO: 340237 - DNA, 75 bp, Homo sapiens
agtatttggagaactcactgatgaatctccacaaaccggaggactacccccagactgcagtaagtgttgtcatgg

SEQ ID NO: 340238 - DNA, 74 bp, Homo sapiens
aagagtgctgaggagtcggagtgtactggtattgctcgagttccacttgctggagctgccgggggcccagggat

SEQ ID NO: 340239 - DNA, 50 bp, Homo sapiens
ccagccccagcagcaacagcagcacaggccaaacgtaccaagaaagtcgg

SEQ ID NO: 340240 - DNA, 74 bp, Homo sapiens
agaaacaagccgtggaataggtgtatcaagtaatggtgcaaagcctgaagagaagcaaaccaagccagcagaag

SEQ ID NO: 340241 - DNA, 74 bp, Homo sapiens
ctggacctggaaggggagactctgctgacacccatcacccacatctcacacggagctggagtttgttcagatca

SEQ ID NO: 340242 - DNA, 98 bp, Homo sapiens
gaagctgcaacagtgcagagttgccaaagaaaacctcacagcacgggtagctctgaacggattcagctctcaggaatgtataatgtccgtaaaggcaa

SEQ ID NO: 340243 - DNA, 98 bp, Homo sapiens
ggttgtggatcttgaagctttggaaaggcagttatacttaagcatgaacattgacgacaaactggaaggattgtttcttaaatgtggcggcatagacg

SEQ ID NO: 340244 - DNA, 90 bp, Homo sapiens
ggccagtattatcaggcatggagatgctactgatgtcaggaggtcctgtaataaagagggatccgaacaagctcagaaagaaaatgaatt

SEQ ID NO: 340245 - DNA, 134 bp, Homo sapiens
tcgtgtgcgccttctggatcccggactcgcgcgggatgccccacgtcatccggatcgttaacaagcacaagccctggctggagcccacctaccacggcatagtcacagagaacgacaacaccgtgctcctcgac

SEQ ID NO: 340246 - DNA, 82 bp, Homo sapiens
gccaggtgaagggagacctggccttcctcaacttccagaacaacctgcagcagctgtatgtggagctggtggtgaagaatcc

SEQ ID NO: 340247 - DNA, 83 bp, Homo sapiens
acaggacagtgtcatgggctccaaaggagacagacagtctagcagtgcttccttggagaccctgttagcacttcttcaggcag

SEQ ID NO: 340248 - DNA, 75 bp, Homo sapiens
caactgaagactttaaacatctggctcgcaagggctgaaggcctttcggcagcagctgaggaagaccacgcggac

SEQ ID NO: 340249 - DNA, 115 bp, Homo sapiens
ctgactgggcctccatcaacctctgtgttgttatctgcaagcgctgtgcagccttcagtgcagtcctacagggcagcctcttcgggcagctgggcaccatgccctccacctacag

SEQ ID NO: 340250 - DNA, 100 bp, Homo sapiens
atccagagctgtgcctcccagcaccacagtccttctgcagtccctcgtccagccacccccagcaaattatgcgcacagccatgaagtataacctgggatt

SEQ ID NO: 340251 - DNA, 100 bp, Homo sapiens
agggaaaacatccttgtaatgcgactagcaaccaaggaacaagagatgcaagagtgtactgtgcaaactgaacaatgaggacgcatggacacaggaaggg

SEQ ID NO: 340252 - DNA, 74 bp, Homo sapiens
cccttgctcgtgctgtctaccaggcgcaagcaaactgtcgagtaggagttgcagcactgaatactctagcaggc

SEQ ID NO: 340253 - DNA, 74 bp, Homo sapiens
aggatgtggatgccctcaagtcctggctggccaagttactggagccgatggcaaggatctcacattatcagtct

SEQ ID NO: 340254 - DNA, 100 bp, Homo sapiens
ggttgaggttcaatgcagacaagacggatgtgatgctggaagaaggtagataatgactataatgcccttcgagaaagactcagcaccttgcctgataaat

SEQ ID NO: 340255 - DNA, 90 bp, Homo sapiens
atctctgagaatgacccgttctggaatcagcttctctcattttctttccctgcaccaactagcaggtatcagcagatgttgcacacaaac

SEQ ID NO: 340256 - DNA, 83 bp, Homo sapiens
gtttttcggatcatgtctggtggctccgcggattataacagaaacttgagttcggctctaggttccatgtccccaactacatc

SEQ ID NO: 340257 - DNA, 87 bp, Homo sapiens
agaagccagtcacgccgggagctggtacacagcctcaggtctatgctccatcagcaagcactgccgactacaatagggactcgccag

SEQ ID NO: 340258 - DNA, 100 bp, Homo sapiens
agatcattcacgatcttcccgtactgtcgagtaagcttgatcctgtgcagcgaattgagcagtgtacacgaggttctctcttcatgtgtagcattgttca

SEQ ID NO: 340259 - DNA, 118 bp, Homo sapiens
ggctgctgttggtcttggagcattgtgctactatggcttgggactgtctaatgagattggagctattgaaaaggctgtttgcagtacctaccccagctaactggcagcagcatccttc

SEQ ID NO: 340260 - DNA, 83 bp, Homo sapiens
tctgccaggcagaaggcctctctcctgatacagcaggcgctcaccatgttccctggagctcaccatggatgatgatatcgccg

SEQ ID NO: 340261 - DNA, 100 bp, Homo sapiens
aagagaacgcgagaagggaagatgggggccgtcctgaggagcctcctggcctgcagcttctgtgtgctcctgagagcaaagtgtgggatgctgtctcagg

SEQ ID NO: 340262 - DNA, 75 bp, Homo sapiens
aggaagaagggctccaccatggagcgctggccgccatggcatcagatgaaggcaaactttttgttggagggctga

SEQ ID NO: 340263 - DNA, 76 bp, Homo sapiens
agccggttggggtgtgagaggttttctcgctctagggtactagatggaaacttgagaaaggactgcttattgataa

SEQ ID NO: 340264 - DNA, 75 bp, Homo sapiens
ctcagttggaagcagccgatccagcctgcggagcctgtggggcagctgcatcttcctcccgtgaggctggccgag

SEQ ID NO: 340265 - DNA, 82 bp, Homo sapiens
gagttggctgtcgcgcagcgtaacttcattcttcaggccctgagcctgtgcaattatttcgagagtcaaaatgtggatttcc

SEQ ID NO: 340266 - DNA, 82 bp, Homo sapiens
attcaagccaagctgaccaagaagccaaagaactggctaggcaaataagctttaagatggccctgctgtggcaccagtgacc

SEQ ID NO: 340267 - DNA, 83 bp, Homo sapiens
cctcccgggtggcttacagacgctgccagcatcgccgccgccaggtgctgaaggtcgccatcctggctgagaagtacgcggtg

SEQ ID NO: 340268 - DNA, 100 bp, Homo sapiens
cccccaaaagttgtcaggttgaaaatggaagagtaattgcctgctttgattccctaaaggtatgcgccaggggaacgaccatggcactcagtaccgctcg

SEQ ID NO: 340269 - DNA, 89 bp, Homo sapiens
agacactgtgtactgtgtggcatatgcgaaggatgggctgaggagcagacatcattccctgccctggcagtgacttggagccctgaaga

SEQ ID NO: 340270 - DNA, 87 bp, Homo sapiens
ttcagttggagttggaatttgtgcaatgtttagccaacccaaattaccttaattgagagatgaatggagagtatagaggcagaggat

SEQ ID NO: 340271 - DNA, 90 bp, Homo sapiens
gttgtaccttgtgacagaatatgccaaaaatggagaaatttttggttcctggtacagttcagacaggacaaagtatgtgtgaagtttatt

SEQ ID NO: 340272 - DNA, 99 bp, Homo sapiens
agctactgactctgtttcagccatcttcgataaaggcaaaaagatcctcacagccaccgtggacaatgccaacatcctgctacagattgacaatgcccg

SEQ ID NO: 340273 - DNA, 99 bp, Homo sapiens
ttgaaaaagacagtgacgacaaaacaccagatgatgaccctgagcaaggaaaatctgagggactctcacagaaggaggaagaggaggacacttttattg

SEQ ID NO: 340274 - DNA, 50 bp, Homo sapiens
atcatattatagatggagtaaagaaagatgttctcgtccgtggcgcacct

SEQ ID NO: 340275 - DNA, 100 bp, Homo sapiens
actcaacatgacactcctggggtctgagcattccttgctgattaggagcaagttcagatcaggttcttgattattacagacctctttctgaaaagcccgg

SEQ ID NO: 340276 - DNA, 75 bp, Homo sapiens
cccggttgtcctcaggcgctgtcagggtgatgtgagcagagcccaggaatgccttatgtggatcggcagaaccga

SEQ ID NO: 340277 - DNA, 96 bp, Homo sapiens
gtcaatgcacaaaatggatttggaaggactgcgctgcaggaggaatcttcgagtatgcggacggccccaacgcccaggtcatgaatgccgaggagc

SEQ ID NO: 340278 - DNA, 74 bp, Homo sapiens
acattgctcatcggatcacccctaaggttggtcttggacaactgcacctgcacggagggcgtggagtagaacag

SEQ ID NO: 340279 - DNA, 51 bp, Homo sapiens
ggcctgtccatcccatctcataatgccttccctgtgtctggtcaactctat

SEQ ID NO: 340280 - DNA, 75 bp, Homo sapiens
aggagactgaccgcaacggcagggtcacgagaagagaatgccttctagatgcaaaatcacctccaaaccagacca

SEQ ID NO: 340281 - DNA, 75 bp, Homo sapiens
cttctcctggagacgcaactcaaggcagctgacacacaagagttcaggaccaaactgcacaaagtatttcgtgag

SEQ ID NO: 340282 - DNA, 100 bp, Homo sapiens
cctttaacacacctactgggattccttgggcaatggtgaatttgaaaaggggatctgttctggagccagaagggacagtagaaatcaaattccgcagaaa

SEQ ID NO: 340283 - DNA, 99 bp, Homo sapiens
ggaaaaacgaccttcgtgaaacgtcatttgactggtgaatttgagaagaagtgatgagacaaaccatgcttctgccacatcaacacaggactttctgga

SEQ ID NO: 340284 - DNA, 100 bp, Homo sapiens
atgggccattctcctggaagagattgaatgcacagaagaagaaatgatgatgtttgcagccctgcagattcgacttccacctgaagtaaatcggatattg

SEQ ID NO: 340285 - DNA, 75 bp, Homo sapiens
ctgtcacaggtgccgaggcccagaagttatcaggaactgttgccgttattacatcagatgggagaatgattgtgg

SEQ ID NO: 340286 - DNA, 83 bp, Homo sapiens
tcagcggctgacacttcaggagcacaagatggtgtggaatcgaaccacccacctttgttcctccgtgtcacaaagcagtacct

SEQ ID NO: 340287 - DNA, 100 bp, Homo sapiens
agtggcacctgcgcgaagctggccaaagcctgcccagacggctcacctgtgcgggatggaacaaaagaatccttccaaaccacaaggaaaatcaccaggc

SEQ ID NO: 340288 - DNA, 82 bp, Homo sapiens
ctggccgagcaggctgagcgatacgacggaggatacgaagcgttttcggcttcctgcccggagctgtgcagcaaacagtcga

SEQ ID NO: 340289 - DNA, 101 bp, Homo sapiens
cggcgagtcgggctctggaggaaaagaaagaatcttttagctgaaaaagtagagcagctgatggaatggagttccagacgctcaatcttccgaatgaatgg

SEQ ID NO: 340290 - DNA, 83 bp, Homo sapiens
gttcagtcactgcaatcttcatgcccatcagtttcttgtgagaagaaaacaaaatggacagcaaattatggatgaacctatgg

SEQ ID NO: 340291 - DNA, 90 bp, Homo sapiens
ctcgcctttgccgatccgccgcccgtccacacccgccgccagattggtttatcttggaagctaaagggcattgctcatcctgaagatcag

SEQ ID NO: 340292 - DNA, 75 bp, Homo sapiens
ctgttctgccggctctgaagacttcagacacggcttacctggatggggtgtcgttgcccgacttcgagctgctca

SEQ ID NO: 340293 - DNA, 108 bp, Homo sapiens
cgaatagcagtcaaggctgagatggaggccgtttttctggagaacctgaggcatgcagctggggttttggctcaggaggagatgttaaagtaacccatcttgcaggac

SEQ ID NO: 340294 - DNA, 101 bp, Homo sapiens
tggacaggcagagtgctgatgtgaaaaataccacgacaaaaccaccctagttattgaagaaattgaagaaatgatgcaggaatcaccggacccagaagatg

SEQ ID NO: 340295 - DNA, 76 bp, Homo sapiens
agtgagaaggaggctggctgcagagaccatgataaaccgagaaaactggtgtacaatagagccatgccctgatgca

SEQ ID NO: 340296 - DNA, 90 bp, Homo sapiens
gttttgtgaatatttcttcaattgccccatcattgaagtttatgggaggacttacccagttcaagatctcttccgttccctgctggcagt

SEQ ID NO: 340297 - DNA, 100 bp, Homo sapiens
aaatgaccgagagcttcgaggcagattacatgaagaagctgtttgttttgattctgagctagatgaacatattaagtggttccagcaagaatacgtgaaa

SEQ ID NO: 340298 - DNA, 98 bp, Homo sapiens
agattcgcagtggtcgcttcttctccttgcaaaatgcaggcccgaatagcattctctgcctatctccagcatgttcaaattcgcctgatgaaagacag

SEQ ID NO: 340299 - DNA, 74 bp, Homo sapiens
gctcgcgctactctctctttctggcctggaggctatccagcaggaattacggaggttgagctggtccggaatcc

SEQ ID NO: 340300 - DNA, 82 bp, Homo sapiens
ccaagagtgagcgagcggacccgcgatgggcttgggcactgtttaaaggaaagttccgagaaggcatcgacaagccggaccc

SEQ ID NO: 340301 - DNA, 100 bp, Homo sapiens
ccggtgccctcccgggcggcgaccggggcctgggtccacgccgagggcaggacgaacttcaccagttgaggctgtgaagctgggcagggtttcagctgag

SEQ ID NO: 340302 - DNA, 73 bp, Homo sapiens
tggcctaccccgatcgaaaccccgattacacctcaacaagaaggcaactgacaaacagccttatagcaagctc

SEQ ID NO: 340303 - DNA, 112 bp, Homo sapiens
gaagttgcgaaggatccccaacggggaggccaacgtgaagaaagagaagaagaaggaggttcctgctgtgccagaaacccttaagaaaaagcgaaggaatttcgcagagctg

SEQ ID NO: 340304 - DNA, 89 bp, Homo sapiens
tcgaaaggagcaagagcaagatcaccgtgacatccgaggtgcctttctccaaaaggacctcagcagccatgtcgaagccccatagtgaa

SEQ ID NO: 340305 - DNA, 98 bp, Homo sapiens
gaacaatggccgtccttcagattgaagctgaaaaggctgaattacgtggttggaagtgtgccagatgcgacctgcgagaaaacctctggttgaatctg

SEQ ID NO: 340306 - DNA, 95 bp, Homo sapiens
gggttgaactggaccctcatgtcagggactgtgttcagacctacatccgtgagtggctaatcgtgaaccggaattatcttcaggcagagtgagaa

SEQ ID NO: 340307 - DNA, 50 bp, Homo sapiens
ccgccgaggggcccagggaggacgcgtgtggacgaatgtggaacctcgct

SEQ ID NO: 340308 - DNA, 74 bp, Homo sapiens
aagaggaggaggaggaggattccgaggttatggctcatagttcaccccagagcattttagatgatgttgccatg

SEQ ID NO: 340309 - DNA, 74 bp, Homo sapiens
ttctgctcctttcctggcagcaggggtttcaatgggaggagccatgtccattggagcccgttcccaatcagctc

SEQ ID NO: 340310 - DNA, 95 bp, Homo sapiens
cacccacccggggaacaagatcaacctcctcggcttcttgggccttgtccactgccttccctgcaaaggtgacttgcttttggagggcttcaaca

SEQ ID NO: 340311 - DNA, 100 bp, Homo sapiens
tgggcagactgtcttcaacatcttgcctggtggcttggatctgatgactttgaagtcccatgaagctgaggtcttgaagcagctggctgagaaacgagag

SEQ ID NO: 340312 - DNA, 100 bp, Homo sapiens
ctaaagcttcggcacaagggcccaactggaattccacttacgggtggtgcagagccggagccggagccggagccgcgccgcgccgcaccatggcgcccac

SEQ ID NO: 340313 - DNA, 50 bp, Homo sapiens
tcgcgggcactccagggcgtgtttttgggacatccaacgggctcatagag

SEQ ID NO: 340314 - DNA, 75 bp, Homo sapiens
aagaaaacaatttctcctgctctgcagcttctgttcagtgttcacttggcaagaagagtgcttcaattagaaaaa

SEQ ID NO: 340315 - DNA, 82 bp, Homo sapiens
tgaagtagcaaaggcaagaaggcaacgacgttccatctgtggaaggacctaccaaccagcagccattgtttgatgtcctgtg

SEQ ID NO: 340316 - DNA, 100 bp, Homo sapiens
cttgattacccgttaagtcccccaaagatgagatttacctgtgagatgtttcatcccaacacaaaagcggcgccaggaaattgaacaaaaacttgaagtt

SEQ ID NO: 340317 - DNA, 90 bp, Homo sapiens
cgttggactacagaagagcagcttctcgccgtacaagaaggtggaagcaggagcacctgtcacagctccctggaatcgacaccctgctcc

SEQ ID NO: 340318 - DNA, 100 bp, Homo sapiens
gcagactctcctgctaccgttgactcagaaacaataacactaaacagtggaacactacagacatttgagattcttccccaccgggtgctcagcagttctg

SEQ ID NO: 340319 - DNA, 89 bp, Homo sapiens
tgagtctactctgtcgctcttgtgccctagcaccccgagaaccgtcagtttgagccagatggtatttgacaccgaaatctcagtttggg

SEQ ID NO: 340320 - DNA, 90 bp, Homo sapiens
gatcgggagcgcaaggtcgccctcaaggccatgatcaaaactgaagtgaagctctcagtcgtcacctacctaaccagctccatagtggat

SEQ ID NO: 340321 - DNA, 100 bp, Homo sapiens
cacctgagccgcccggagaggagcctcggccccgtacccagacttaattcagtgcacaaatgagatgaatgtgaacatcccacagttggcagacagttta

SEQ ID NO: 340322 - DNA, 100 bp, Homo sapiens
cgcgcgcctttgtgcgcgcgccgaggtacatgtcccagagcaagcacacggaggcccgggagctcatgtactcgggagccctgctcttcttcagccatgg

SEQ ID NO: 340323 - DNA, 100 bp, Homo sapiens
tgtgggagacacgccaaagctcccaagggaagtagatcgagattcagatggtcacgtcagctttagagactttgaatatgccctgaactatggacagaag

SEQ ID NO: 340324 - DNA, 98 bp, Homo sapiens
gaaaacttttaaatgcaaaacactcagagaaatcaccaccttctacagatttattcctgacgacattgaatgccaccactagtaccttccagtttgaa

SEQ ID NO: 340325 - DNA, 90 bp, Homo sapiens
gttgtttcttatctattatataagcacacagcaagcaccttctgagagatttaccgcattgtttctcagaagcaaatgtcagacagacgc

SEQ ID NO: 340326 - DNA, 100 bp, Homo sapiens
gaaggctatttcgccgctggcgtcaggactattttcacgttttaatgccgagaggtctctgtgacgattttgatggtggagccagggcaagatttactgc

SEQ ID NO: 340327 - DNA, 100 bp, Homo sapiens
gtgcatctggctgttagaagaattcatgctcatccgggtggttatccaaatgccaacccagtccaggtttcaacagcaacattttttcttttcttcaacg

SEQ ID NO: 340328 - DNA, 51 bp, Homo sapiens
tgtctcaatttggctacaaaagggagttgaccacatttggccatttcccag

SEQ ID NO: 340329 - DNA, 75 bp, Homo sapiens
accttcagcggatttggggattaggctcttttaggaaatggcaactgctgacaggaagtttggcatccacctccc

SEQ ID NO: 340330 - DNA, 117 bp, Homo sapiens
aaaacccttgggtgcagatcatgatgtttaagaacatgacgccgtcacccttcctgcgattctacttagactgacatcaatttgccctatcttacaatggattcttctggacccaag

SEQ ID NO: 340331 - DNA, 51 bp, Homo sapiens
gcaggttctcggagggaccgggataggttatgatggagggtggtcgcagca

SEQ ID NO: 340332 - DNA, 87 bp, Homo sapiens
ccactccagtcggtgttgagcacggcgagcagtctcaggcctttagtgatgatggccctcgggaccaaggatcacgtcatgactccg

SEQ ID NO: 340333 - DNA, 100 bp, Homo sapiens
ctgtcagttgacctaccccttgcacacctaccctaaggagcttggaccccgattggctgcaatgctgaactttaatcttcagcaactttgtggccccaag

SEQ ID NO: 340334 - DNA, 83 bp, Homo sapiens
cggtgaactctgtccagttttcaaaccacacagcaaaagactgttgaagtagagagcattttgcccagctcactcggattctt

SEQ ID NO: 340335 - DNA, 100 bp, Homo sapiens
agctatggattccctagtgaagaatggcatcccctttacggtttatgataatgtgagagtggaaccaacggattcaagaggccacaatcagagaatggaa

SEQ ID NO: 340336 - DNA, 83 bp, Homo sapiens
cagtcttcccgcgtccgccgattcctcctccttggtcgccgcgtccttggctggcgtaaagtttcctacactactgaggttta

SEQ ID NO: 340337 - DNA, 100 bp, Homo sapiens
gttgtattgcaatcatggtgcagaaataccagtccccagtgagggtgtacaaatacccctttgaattaattatggctattgctgctaaaattgattcaat

SEQ ID NO: 340338 - DNA, 90 bp, Homo sapiens
ccggcgtctgcgcttccccatggggctggcctgcggcgcctgggcgctctgagaacaccttccaccatgaccacctcagcaagttcccac

SEQ ID NO: 340339 - DNA, 82 bp, Homo sapiens
cctcagcctcctaagtagctgggactacaggtctctaattaacagaagatggcaaagcccagccacagcagctatgtccttc

SEQ ID NO: 340340 - DNA, 82 bp, Homo sapiens
aagaaatttggagtgtgcgtgcgcgccgagcggagttcatgatcaagtgttgcccacaccaaatgcttcatccagagtcata

SEQ ID NO: 340341 - DNA, 100 bp, Homo sapiens
aacttcagagacctaagctttttccagagaagagaagctttactggtgttccagccctaaggttcattgtagggaaggaagaaattcccacacattcttt

SEQ ID NO: 340342 - DNA, 82 bp, Homo sapiens
tgtctgagactcctgctcagtgtagcattaaggttctccttactatgacaatgtccgccccctctcttaccctgattcggat

SEQ ID NO: 340343 - DNA, 98 bp, Homo sapiens
gaaagggaaaacccccattcattctggattggtggatctgaagtacaaaatattttccaggactgttctgatggctacatgtgcaaaatacactttca

SEQ ID NO: 340344 - DNA, 75 bp, Homo sapiens
tgtgcagccgcgaggaggcgcgggaggtgttcgagaacgaccccgagacgctgtcgcctggttgggcccggaaat

SEQ ID NO: 340345 - DNA, 95 bp, Homo sapiens
gagcgcttccttataggatctctgcccacagtcagcagcacaacagaggcggtttgcagaaaaaacttcagcatgtgccaggaacacaacctcac

SEQ ID NO: 340346 - DNA, 82 bp, Homo sapiens
gaaggaggccggtgactttcacttccagccagctgtgaagaagaaggatcctgcttatttttatggatatgtgtatttccga

SEQ ID NO: 340347 - DNA, 75 bp, Homo sapiens
cgcgctgcagccggagacccggagaaagggtgtttgtgctctgccaaggcctcctgcagctctgccaactcctgt

SEQ ID NO: 340348 - DNA, 74 bp, Homo sapiens
actcctgacacttccccttccccaccgaaccgcggaactgtggctgcaccatctgtcttcatcttcccgccatc

SEQ ID NO: 340349 - DNA, 97 bp, Homo sapiens
tgttgaaggaggagtttgctgttttctcagtctcctgagaaattccaggtgaccaagaatatggcccaggtgaccaaagccctggacaaggccctga

SEQ ID NO: 340350 - DNA, 89 bp, Homo sapiens
caagtgtggctacttcttcttggacgacacggaccctgatagcatgaaggattttgagcaaatttttcagaacataaaacaagaatata

SEQ ID NO: 340351 - DNA, 90 bp, Homo sapiens
tatgatgcccctgaagatgtgcacctagggggcggctaccccgtggggtttgaattttgggaagattttgaagaagaccatgggaagggg

SEQ ID NO: 340352 - DNA, 96 bp, Homo sapiens
cccgatcccgaccccaaaagagtattcttggatcttgcacaggaaggaattaaagctgcagaagaaagatcagcaactggagcctaaaaaaagtac

SEQ ID NO: 340353 - DNA, 100 bp, Homo sapiens
gggtacccggctctgcatcgcgtcgccatgatgggccatcgtccagtgctcgtgctcatgatcaccagcagcttgcaaaacttatccaggagtcgccaac

SEQ ID NO: 340354 - DNA, 75 bp, Homo sapiens
gctcccttgacaggcggctttgcatcggaaatcagctctacagttcaggaagagcctaggctggatgtcttgatc

SEQ ID NO: 340355 - DNA, 75 bp, Homo sapiens
atcacgccctttctcttgctcaaggtttgatgacaaatacaccttgaagctgaccttcatcagtgggagaacaaa

SEQ ID NO: 340356 - DNA, 100 bp, Homo sapiens
gccctatgtggaagaggagctgagcatggtcattctgcttcccgatgacaacacggacctcgccgtgcaccgactagatttccttcagctgatgattgac

SEQ ID NO: 340357 - DNA, 75 bp, Homo sapiens
cacagctccatttggcctgaagcctcgatcagtgcagctgtctgcttcagaaagtgagggctccaggaatgagga

SEQ ID NO: 340358 - DNA, 100 bp, Homo sapiens
gttcggcgaggcgcagctgtaccgccagttcaccaccaccgtgcaggtcgtcatcttcataggctcgctgctcggagaaggtaaagcttgatgctgaaag

SEQ ID NO: 340359 - DNA, 90 bp, Homo sapiens
gtctggagcaaagacaggagccctggaatgtgaagagacatgagaccatagccaaacccccagatccgagtgaagcctgacaggaccggt

SEQ ID NO: 340360 - DNA, 75 bp, Homo sapiens
aagaatggcttcacatgtatgctcatcggggagatctttgagctcatgtgaccccaaaggagccatgataaccca

SEQ ID NO: 340361 - DNA, 74 bp, Homo sapiens
gcatgtggagttcggaggaaaagggctcaggtttgacaactattcagccaatgtgatggtggacagcaagccag

SEQ ID NO: 340362 - DNA, 100 bp, Homo sapiens
cgacatcgacgccgcgtggcaggcgctgcgcacccgattacggtctttggtcaaacaattagagagaggggaagcttcagtggtagatcttaagaagaat

SEQ ID NO: 340363 - DNA, 51 bp, Homo sapiens
gatcaacttgaacgaatatttctggattcactccttctccagttgcacagc

SEQ ID NO: 340364 - DNA, 74 bp, Homo sapiens
cgatggagtccaacatatgatgtatcttctatcttaacatcaattcagaccctatcagatttggatatgtcctt

SEQ ID NO: 340365 - DNA, 50 bp, Homo sapiens
actgaccgctgccgcccagcacgtccagaagcggccagcttgatgtccgg

SEQ ID NO: 340366 - DNA, 75 bp, Homo sapiens
atttgacccaggacagaaagaacttgttgtaggagcaaggatggtgctgctccactggtgcctgctgtggctcct

SEQ ID NO: 340367 - DNA, 90 bp, Homo sapiens
cggctcggcgccttctgcgtctcccggctggtggggaagcctctgcgccgccggcaccatgagtagccggatcgagctgggagatgtgac

SEQ ID NO: 340368 - DNA, 50 bp, Homo sapiens
ctaggggcagcgagcaagacagcaagcagcttcggaaccaaaaagaagct

SEQ ID NO: 340369 - DNA, 101 bp, Homo sapiens
aatcatcgaggcatgggggtccacactgcaatgtttttgtggaacatgatgatgattattctccaccgtctaagagaccaaaggccaatgagctaccgcag

SEQ ID NO: 340370 - DNA, 100 bp, Homo sapiens
ggctctccagcacagacgatggctacattgaccttcaggaattacatgaacgacagccttcgcaccgacgtcttcgtgcggttccagccagagagcatcg

SEQ ID NO: 340371 - DNA, 74 bp, Homo sapiens
gcgccgcgaccatggagcgccccgaagcggctggagttaaccgaatttcatactggcctgctgatccagaaata

SEQ ID NO: 340372 - DNA, 75 bp, Homo sapiens
caggcggtgacagagtggagccatggctagaggtacaatgactcttcttgcttttcacctaagttgaataagcac

SEQ ID NO: 340373 - DNA, 98 bp, Homo sapiens
ggaagattgccagaggttttaccgagagcatgaagggtctaaaattcccaggactccacagctttgcaccagataagcctggaggaatactaatgatg

SEQ ID NO: 340374 - DNA, 51 bp, Homo sapiens
gccttcgcatggagctggaaaccatcaagattgctgctctctgaacactat

SEQ ID NO: 340375 - DNA, 49 bp, Homo sapiens
ccttgatccagtatgcttatacagggatgataccggggactctccagag

SEQ ID NO: 340376 - DNA, 50 bp, Homo sapiens
cttgagaaaaaattcctggaaaacccagtgattcgcctttgccagtctca

SEQ ID NO: 340377 - DNA, 100 bp, Homo sapiens
ttcttggatcttggaggtggtgtaaaggaagctcaagtatatcaagcattcaaattgctcacagctgatcctaagaggacagttatgggatggatgggaa

SEQ ID NO: 340378 - DNA, 114 bp, Homo sapiens
tggcacaaacatggctgggaggaattggtatattacacaggtggataagattgtggaccagctgcagcagttaatgcaggtgtatgacttggctgcccttcgggattattggag

SEQ ID NO: 340379 - DNA, 82 bp, Homo sapiens
gagccatgaggcgccagcctgcgaaggtggcggcgctgctgctcgggctgctcttggagagtgaagacatttccacctggac

SEQ ID NO: 340380 - DNA, 74 bp, Homo sapiens
acggataacagagttcacatattcaaacctgtatctgtgcaggcaatgtggctaaagtaaataatgccagcctg

SEQ ID NO: 340381 - DNA, 100 bp, Homo sapiens
cttccgtcccggacagagcccgtggtcgcgcaggtcgtgatgtctcgggagtcggatgttgaggctcagcagtctcatggcagcagtgcctgttcacagc

SEQ ID NO: 340382 - DNA, 89 bp, Homo sapiens
ctttcgccagcccgtgccgcgagcgcggcctgcaggaggaagccatcttcgacaagagcacagggaaggttgttttgaagacgttcagc

SEQ ID NO: 340383 - DNA, 97 bp, Homo sapiens
tgaaaagaaatacctgtgatttgctttctcggagcaaaagtgaaatattaggaagctgtgattttcaaagctaattatgaaaacatttatcattgga

SEQ ID NO: 340384 - DNA, 96 bp, Homo sapiens
acaatggacatccggacaaagagtcaaggtggggagccaacatacaatgtggctgtcggcagagctggtagagatgtgccgtttgggggtgctaaa

SEQ ID NO: 340385 - DNA, 93 bp, Homo sapiens
cggcgcggcagagtccccgtacgcctacagtaacgccgcggcgagtcctttgcacatgttggcaacacacgcatccgcatcggcctccctgcc

SEQ ID NO: 340386 - DNA, 76 bp, Homo sapiens
tgtgtcccacttgttcgcggcctatagatttggagcaagaggtggtggtggccttcccccgaagaaatttggtaat

SEQ ID NO: 340387 - DNA, 100 bp, Homo sapiens
agtccagagctgaggactgcctgtttgcaggtgtgatgaatgcagactctgctaccattttggctgtttggatcctcctttgaaaaagtctcctaaacag

SEQ ID NO: 340388 - DNA, 75 bp, Homo sapiens
caaaactgaagtaggagataattggaggctaaaggctaaagaattacctccaaagccattgtcaagaccacagca

SEQ ID NO: 340389 - DNA, 75 bp, Homo sapiens
gtgctgaatcctggctgtgtgaccccaaggcagagcggcttgggtaaatccaccttaatcaacaccctcttcaaa

SEQ ID NO: 340390 - DNA, 100 bp, Homo sapiens
caaatacttttagcagcactagtattgcccaagctgactatggccttgaacacttggttaatgatcctgctctgaggggaggcaacctgttcccaaacca

SEQ ID NO: 340391 - DNA, 82 bp, Homo sapiens
agccaggcagtctcgaatcctctcctggtttagggaggggaagtggagttggatcacaggattgattttgaactcagagaag

SEQ ID NO: 340392 - DNA, 100 bp, Homo sapiens
gacgggctttaggctggaagcgccttagaggagccatttttccagtttgaatcagaaactgcaactggaacaggagaagcttagttctgattataacaag

SEQ ID NO: 340393 - DNA, 83 bp, Homo sapiens
gttcgtgcgctgtggagacgcggagggtcgaggcggcgcggcctgagacctgcctagagctggaacgttacctccagagcgag

SEQ ID NO: 340394 - DNA, 97 bp, Homo sapiens
agcaacagctctgccggctggaagggttacgactcactgattaaaaagagggactttttcaaatactttgcacttttgattgtgtattatggatacc

SEQ ID NO: 340395 - DNA, 97 bp, Homo sapiens
gggacgtcctttttgcccttcctcctctgtgcggtgctgctcagtgcagttcaggtcttgggcgtctttggtactggcttttttaggggtctgcctg

SEQ ID NO: 340396 - DNA, 97 bp, Homo sapiens
acatcgacctgtaccagagattccagggtcaacaaaaggagtttctgggaggactcagcccaaaaccatgtttgcccaagttgaatctgatgatgag

SEQ ID NO: 340397 - DNA, 98 bp, Homo sapiens
gaaaaagaagtttgacattcagaaacttatcaagaggttctactctttggatagagaccaaaatcatactttgaagattgtggctgcacggctcaacg

SEQ ID NO: 340398 - DNA, 98 bp, Homo sapiens
cagaattgttcagtggaagcccctgcttggatgcctgtccaccactgtactagagccagctgctccccgggaacaacttcaccaatgagtgcaacata

SEQ ID NO: 340399 - DNA, 75 bp, Homo sapiens
aacttcctaatggtgctggggaaaggcagctttggcaagacgtcttgctgccctccaaaaaagaagagaacttcg

SEQ ID NO: 340400 - DNA, 97 bp, Homo sapiens
gaaacagcaacgttctctatgggcagcaccgtttctatggaacccaaaaagggcggcgactggcggcgcgatggacctgaccgggctcctgctggac

SEQ ID NO: 340401 - DNA, 100 bp, Homo sapiens
tcgtggtcctgttcatgtgggcagaaggggcttggaccattcctgcaaacagccaaaccggcgagaagaggccagacatctgcctccattctccccagag

SEQ ID NO: 340402 - DNA, 100 bp, Homo sapiens
ccccccacgcggcggcgccgcctgtttacggtatgggcactaggaaaagacttcttccatcaagcttaattgttttgttattcatttaatgactttccct

SEQ ID NO: 340403 - DNA, 100 bp, Homo sapiens
gcctctctccgctctgcctatgacagcaccatggagaccatgaactatgcccagtttaacaggcgtcatcattgtcgccgctgtggccggctagtgtgca

SEQ ID NO: 340404 - DNA, 75 bp, Homo sapiens
gcctgctgaactgggtgctttatataggggcagagcggcttgggtaaatccaccttaatcaacaccctcttcaaa

SEQ ID NO: 340405 - DNA, 98 bp, Homo sapiens
ggtgggccaaacccgtttcttaggaaaccaggaatccagggaaggcaggagatgggtctcactctgtcacccagactggagtgcagtgagtggtgcga

SEQ ID NO: 340406 - DNA, 83 bp, Homo sapiens
gtcctcgcttgcagttcagcgaccacggaagcggggagaggtggtgagagatgacccctgttgaggatttcattggtgtctgc

SEQ ID NO: 340407 - DNA, 98 bp, Homo sapiens
aggatttcagatgcagtggtttgtttacggattccccagctttccgttgcacaaacagtgaagtgacagtccagcccagcccctatttgagttaccgg

SEQ ID NO: 340408 - DNA, 90 bp, Homo sapiens
cgaccgcaccgtcaactatgtcctgaagtgccgagttaatcccgtcatgtattgacccggaaacatcatctcatttgcctataagacaga

SEQ ID NO: 340409 - DNA, 75 bp, Homo sapiens
atgaagattttctacaaggggaagaacactgacatggctccttactatgaagccttgtgcaaatccctcgactgg

SEQ ID NO: 340410 - DNA, 75 bp, Homo sapiens
tcctgctgggcttcgtccagatcgggaagggtacggacattgctgcaggagaagaggttgccatcaagcttgaat

SEQ ID NO: 340411 - DNA, 50 bp, Homo sapiens
cggagcgaacagggggctggacagggaagaggaagaacgtctgagaaata

SEQ ID NO: 340412 - DNA, 90 bp, Homo sapiens
tgaatgagtttcttactcgggagctggctgaagatggctactctggagttgagctcgccatggccaaacagctgcaggcccgaaggctag

SEQ ID NO: 340413 - DNA, 75 bp, Homo sapiens
ccagagcaccccttctcagaacagaaagcgtctctacaaagtgatccggaagatcaccatccatctcaacagggc

SEQ ID NO: 340414 - DNA, 75 bp, Homo sapiens
agccaaggaggtggacaccatcacggcaggagatgttggcacacctgaaaccatggccccaaccattgtggttcc

SEQ ID NO: 340415 - DNA, 90 bp, Homo sapiens
acaagatccggcccatagccgagcagactggcatctgtaaggtgcggccgccgccgatgactcctcctctgagagtggcagcggcaatgg

SEQ ID NO: 340416 - DNA, 101 bp, Homo sapiens
gcacaaccatcgcagttggaagcccatggggcagacgttggaacttgccaggaatccagcaatgatgcaggagatgatgaggaaccaggaccgagctttga

SEQ ID NO: 340417 - DNA, 101 bp, Homo sapiens
ggaagaccttcactgattgttttaactgtctgcctatagcagccattgtggatgagaagatcttctgttgtcatggagaaggggacgaactggtagtacct

SEQ ID NO: 340418 - DNA, 75 bp, Homo sapiens
tgaaaatggagccagttgtatcgacatcagtggagaacctcagagggaagtggaatcccgattgcttgatgattg

SEQ ID NO: 340419 - DNA, 87 bp, Homo sapiens
gaacgatgtgcgagaactgcgcagacctggtggaggtgttaaatgaaagttcacgcctacatcatcagctccctcaagaaagagatg

SEQ ID NO: 340420 - DNA, 133 bp, Homo sapiens
caagaaacaacagagcccatgaaaactgacagtgctgaaagtgaagactgagattcagcaacatggctgacaaggccaagcctgccaaagctgccaacaggacgccccccaagtccccgggggacccctcgaa

SEQ ID NO: 340421 - DNA, 82 bp, Homo sapiens
tcggtgacatcatcttctacgacctgaaggaaaattgcctaagaattatgacccaaaagttaccccagatccagaaagatgg

SEQ ID NO: 340422 - DNA, 85 bp, Homo sapiens
aagcatttaaccagcatggctacttcatattttggaaagcagtttttaagacaagcagcctgcttctgcaaagtggtacgatcga

SEQ ID NO: 340423 - DNA, 101 bp, Homo sapiens
ggagccacccgcgaaaattcggccagggttctcgctcttgtgagaaagatcagtctaaagaaaaggagaagaaagtgaaaaaaacaattccttcctgggct

SEQ ID NO: 340424 - DNA, 98 bp, Homo sapiens
gatctccggcagcggcctgggaactcttagctgagcaggcgagagactcacatttccagtcaaaactcggagctgagtagtgctgctctacaagccct

SEQ ID NO: 340425 - DNA, 102 bp, Homo sapiens
cttctatgtacctgcagaacccaaattggcgtttgtcatcagaatcagaggaatataccacagcatttggtctagaagagctcaaggaatgtatcaaaatgc

SEQ ID NO: 340426 - DNA, 100 bp, Homo sapiens
aacctatgcttgtgaaaatggacatacggatgttgcagatgttttacttcaagcaggggctgatttaacattcactactttcactgcctaagaatcctgg

SEQ ID NO: 340427 - DNA, 88 bp, Homo sapiens
caaaagacgcattgcaaacttaattaaagaactggccagaaatgcactcggtgatggaaagagagccactattctgaagaacacttgg

SEQ ID NO: 340428 - DNA, 88 bp, Homo sapiens
aattttgaacaagggctgaaggcctatggaaaggattttcatttgattcaggctaataaagaggagatgttaaagtaacccatcttgc

SEQ ID NO: 340429 - DNA, 89 bp, Homo sapiens
cggaggcaatggatgaacagagcgtggaggaagaaccggacccggcgaacctggaagtggaccatgatttcttccaggacaaggtgtgg

SEQ ID NO: 340430 - DNA, 82 bp, Homo sapiens
agatcgtggcccttcaatttagaagagattaaggactttgtgttttatgccccacgtctgagaatcaacaagcggatcctgc

SEQ ID NO: 340431 - DNA, 74 bp, Homo sapiens
gaagtggtgatgcaagaagtttctaggaaaggccggacaccagggagtgcatccgccccaacccttttccccct

SEQ ID NO: 340432 - DNA, 98 bp, Homo sapiens
ctggcgcttcctgcgcatcgtctgcaagaccgcgaggcgagacctcttccaggcccagacatgtccgtccttgtaagttaaaagcttccatgggagcc

SEQ ID NO: 340433 - DNA, 83 bp, Homo sapiens
gctggccaagaagatcatcattaaggacggaggcacggagcatattaatgaaaagtgccataaactgaaaaaccaaacatgag

SEQ ID NO: 340434 - DNA, 82 bp, Homo sapiens
ctcgcctcccggccgagctgacggcaactcgagatgtggtgctgagccgggtgccggagcaggaggaggaccggacagtgag

SEQ ID NO: 340435 - DNA, 80 bp, Homo sapiens
gtttctctttcgctcttcgcgctacacacccagattggcttccagcgcgcagactaatagggatgccaaaggaaaaatat

SEQ ID NO: 340436 - DNA, 100 bp, Homo sapiens
acagtttgctattcgtatgtgtccaccgttgaccacaaaaaacatcaagatgtatcagccactgctggctgttggtggatggagagagaaagaaaaagcc

SEQ ID NO: 340437 - DNA, 100 bp, Homo sapiens
gccaaggctaaaagacgaaataccaccggaactggtcgaatgaggcacctaaaaattgtataccgcagattcaggcactggtgaggtggattgatgatga

SEQ ID NO: 340438 - DNA, 83 bp, Homo sapiens
cagaatccaggagttcattgaactcatccggcagaataagagactggacgctgtgagggtacctgctcttccgagacttctgc

SEQ ID NO: 340439 - DNA, 75 bp, Homo sapiens
ccggagaggagcatgaatggagcaaaatggcggatcatgtgcagggcaccaatgcctctgctctggaaaaagaca

SEQ ID NO: 340440 - DNA, 96 bp, Homo sapiens
aactcctggcaaagtcatcagttgccaattgttacatacgaaactgtctcccgcctgccatgcagaaagtcatgtataagggactcgtccccgagg

SEQ ID NO: 340441 - DNA, 101 bp, Homo sapiens
ataattgaggaatacctagcattcgatcacatagatattggttggatttcatcccttactggtctcaaccaaaatattcctgttggaatcatgatgataat

SEQ ID NO: 340442 - DNA, 101 bp, Homo sapiens
cagagagatccaagcgcacagaaaaacacaagaagattcagccctgtcatcttgtgcaaaatgccttcacctgaatgacatctacctccatcaggacccca

SEQ ID NO: 340443 - DNA, 96 bp, Homo sapiens
gaagggaagctgatcatgggcattggtcaccgagtgaagtcggacagtcattttgtttactcattcagccctgttgcaggtcccaataaactcttc

SEQ ID NO: 340444 - DNA, 100 bp, Homo sapiens
atcttattgatattaagactattgctataggtagatggacttctcttctaccacaaacagacccactacagccccggaagcactcccttggtgggctggc

SEQ ID NO: 340445 - DNA, 82 bp, Homo sapiens
cagattcgcagtggtcgcttcttctccttggtttactcctggcttgggggcattaggaagcactggaggctcttcgggaact

SEQ ID NO: 340446 - DNA, 82 bp, Homo sapiens
gttcatgcaaagcgctgagaacaggaccccccgccccccttaaaactagagatcgatacatcagtagtctgaaaaagaaatg

SEQ ID NO: 340447 - DNA, 75 bp, Homo sapiens
ccaacgcctggctcggagcagcagcctctgagggctgaagaagatgcagagcagcctgaagctggtggactgtat

SEQ ID NO: 340448 - DNA, 83 bp, Homo sapiens
ctgtcttggagcaaagcagctgttgtgggagtgaagacatttccacctggacacctgaccatgtgcctgccctgagcagcgag

SEQ ID NO: 340449 - DNA, 98 bp, Homo sapiens
aatatcctctgtggagaacacccccccatggaggcgaggtatatgatgatggaaagtatgtgtatgtagtaacagaacttatgaaaggaggtgaattg

SEQ ID NO: 340450 - DNA, 106 bp, Homo sapiens
ctccactgttcctggaggaatccgagaagagcagagcggagggagccccagacacggccccttcccagctgcctgcctgccctagccagctcccaggtgaagagac

SEQ ID NO: 340451 - DNA, 75 bp, Homo sapiens
cgcgtctctctgctgcggcgcggggaccgctgtgctctcggttcatgaagatttgcccgttttcttctaaaagtt

SEQ ID NO: 340452 - DNA, 100 bp, Homo sapiens
gagacagccattcggagctacatccagtgaataagggcagctgcaatgactctccgcacggtattattgtcattgcaagcactattggcagctgcagagc

SEQ ID NO: 340453 - DNA, 83 bp, Homo sapiens
gaggccccagggcgtcgcagcgccgcgtgcggcccactcacgggccggattttttatcaagcagaaatgcatcgaacaacgag

SEQ ID NO: 340454 - DNA, 82 bp, Homo sapiens
tccacccaccgccgccgcctcccaggtctgtgaggaacagaagtgcgaagaagaggtcttccctctggccatgaattacctg

SEQ ID NO: 340455 - DNA, 50 bp, Homo sapiens
ttggcgaggcccaagagcagtgatgacccagatgatgtggtaccagttgg

SEQ ID NO: 340456 - DNA, 88 bp, Homo sapiens
ggagggtacggaccccacatgagggattggattcagcatcaaaatacatctactcatattgagagctgtcgacagttacgtcaacagt

SEQ ID NO: 340457 - DNA, 90 bp, Homo sapiens
ggatacctacggagcacgagaaatacggcgtgggttgctacaagcctcaggaaaaatcagattacttgatgttggcagctgctttaaccc

SEQ ID NO: 340458 - DNA, 100 bp, Homo sapiens
ggcttgaaattaccaactgctttcctttccctcagcacacagaggatgatgctgactttgatgaagatcatagcaatggatcatttaacttgaaagcttt

SEQ ID NO: 340459 - DNA, 98 bp, Homo sapiens
gggcttatgggatacagctggacaagaagattatgacagattacgccccctatcctatccgcaaacagctgtggaaaatctctgttctcacaaagtct

SEQ ID NO: 340460 - DNA, 50 bp, Homo sapiens
gcagccttagccctagtgtagaggcgtgccgccgccagacggattactgg

SEQ ID NO: 340461 - DNA, 82 bp, Homo sapiens
agatcatcgagcatttcaaacgctccatgtccatccgctggccgggccgccccctcggaagccatgcctggatactgatagc

SEQ ID NO: 340462 - DNA, 102 bp, Homo sapiens
gctcccctaaactggggcctggaaaaggggatgatcatggtgattttactgctgcttgtggctatcgtggttgttgcagtctggccgaccaactgatggcag

SEQ ID NO: 340463 - DNA, 100 bp, Homo sapiens
ccggcggaggtggaggccatcctgcaggtcatccagagggcagagcggctcgacgtcctggagcagcagagaatcgggaaagaccacagcaagattcttt

SEQ ID NO: 340464 - DNA, 76 bp, Homo sapiens
gtctctctcagaacttggtgctgctagaatgcaggaacagcagatcatatactcctatgaaaggaggaatctccaa

SEQ ID NO: 340465 - DNA, 75 bp, Homo sapiens
ctacgacgcgctggtgcacttcgcgctggttattgcttacaactcagaaggtaaaagtaatccaagtgaagtagt

SEQ ID NO: 340466 - DNA, 100 bp, Homo sapiens
tcatccttaaaggggtcatactgctggccctcttcgctcgcttattacttcaagatccaggcaaccacttaattaacatgacttcttctacaacgctaaa

SEQ ID NO: 340467 - DNA, 76 bp, Homo sapiens
gactccattgacagaaggttttgttttgacatagaagctgctgatcgtggtattgttggaaatagtgcaactgcat

SEQ ID NO: 340468 - DNA, 75 bp, Homo sapiens
ctgattttggatccagaatcagcaaggttctcctgaaaagaaagctgaacattcatctataaatcaagaaaatgg

SEQ ID NO: 340469 - DNA, 96 bp, Homo sapiens
aagaaatggaaatctggggaggtgaaaatatagaaatgtctttcagatcaatgatacacttgatgacatctttgacggttctgatgacgaagaaga

SEQ ID NO: 340470 - DNA, 80 bp, Homo sapiens
gttcaggaaggattcctgagattccaggaggaagtactggcgaagtgctccatgatggacttgggcattccagcaatgac

SEQ ID NO: 340471 - DNA, 90 bp, Homo sapiens
gggatacccttccatttcaaagaacagaatgctaaggaagctgtggcaagtaaacttatgagtgctttgctgagtggcctgacagatcgg

SEQ ID NO: 340472 - DNA, 75 bp, Homo sapiens
ggaccacgcatccatccagatgaacgtggccgaggtcaagtctggcaccatctttgacaacttcctcatcaccaa

SEQ ID NO: 340473 - DNA, 97 bp, Homo sapiens
gccatggatggcagagaaagaaggcccaggagatcccagttcaggtctcctctgagcctccggcctccataagacccaaaacagatgacacctcttc

SEQ ID NO: 340474 - DNA, 100 bp, Homo sapiens
aactcacgtccgtcgctgctgcaaccccaagatgtcggagacacggtggaaacgcttatgttacagaatgtctgaaggggacagtgtgggagaatccgtc

SEQ ID NO: 340475 - DNA, 95 bp, Homo sapiens
ctctgccctcagtatcaacaatgattgctcaagacttctttgtggctttgctaaaggacaggtggcaatcactgggcagcttggtgtgaagcccc

SEQ ID NO: 340476 - DNA, 50 bp, Homo sapiens
cctagcgtcctggaattacttcaatcaaggtcggcactcttcaccctccc

SEQ ID NO: 340477 - DNA, 99 bp, Homo sapiens
cccgaatggtgactgcaagaccttccagggtcccaactgcccagccacctgtggccgagtcctccctgatggaggagatgttaaagtaacccatcttgc

SEQ ID NO: 340478 - DNA, 74 bp, Homo sapiens
gcctcccagagtgctaggattacaggttatcaactggcaaacatctcttcacattccaccacaagctaaactca

SEQ ID NO: 340479 - DNA, 100 bp, Homo sapiens
ctgtatttgaagataagtttaggccagacatggaggtttatgaaggcgagcgtgccatgacaaaggataacaacctgcttggcaagtttgaactcacagg

SEQ ID NO: 340480 - DNA, 74 bp, Homo sapiens
gcagtttcaataacaggtcattgccgagaaaaggaatttcttcacatggctcctggagaagtgaccatcacagt

SEQ ID NO: 340481 - DNA, 100 bp, Homo sapiens
cttgatctgtgaaagcgggcgttttggaagataccggaagtagagtcacggagaggtataccaagcttggctacgcaggcaacactgagccccagttcat

SEQ ID NO: 340482 - DNA, 100 bp, Homo sapiens
agaaattgctgcagattttactttatgtgagaaaatctacaatttcttcgagacactcatataaaggatctgtctggctccattgatgacctccccacgg

SEQ ID NO: 340483 - DNA, 101 bp, Homo sapiens
cccacttgcccagcctgccacaaggactcacaccacccggcaagaactgctcactacggctccctgccccagaagtcacacggccggacccaagatgaaaa

SEQ ID NO: 340484 - DNA, 131 bp, Homo sapiens
aaacaaaactcgctgattttaaaagatctggaacatcgaaaggaccaagtaacacagctttcacaagaggtgaaaagccatacaagtgtacctgggaaggctgcgactggaggttcgcgcgatcggatgag

SEQ ID NO: 340485 - DNA, 100 bp, Homo sapiens
gaaagacgtcgaggggacgattggaatgacagattggtgctgaagacatggacggcttccaggcagacacggaggaggaggaagaggaggagggcgactg

SEQ ID NO: 340486 - DNA, 100 bp, Homo sapiens
aggcagatgggcacatgatagccttcctgggggacacccagggccagctgtacaaggagcggacaggggtgaagatggtcatgatccaggatggcccatt

SEQ ID NO: 340487 - DNA, 100 bp, Homo sapiens
ccccaatccggtccctctggcccggcctgacccggtctggcttgttcgggctcagcggccgcgaggccgcagctcccgtgtgcagcaaacaacttcctcc

SEQ ID NO: 340488 - DNA, 50 bp, Homo sapiens
cgggacctgtgccaggcagacaaggggaagccgtcccagctgcagtccca

SEQ ID NO: 340489 - DNA, 100 bp, Homo sapiens
gagtgtgcccacctgcgtaagggggcagagacaggacagtttattctgcgttgtagcagcatttggctgtttctactactgaatgaatctttgaaaagct

SEQ ID NO: 340490 - DNA, 75 bp, Homo sapiens
aaagtttaccgaattgttcctgaggaagagcaaaaattgtgggcgaaatgctgaaaacttcgaccgatttttcac

SEQ ID NO: 340491 - DNA, 100 bp, Homo sapiens
gacagttcaagcaatgtcacaggacaacatcctgggcaaagtcaaaactcttcagtcccagtcggtacctccttttccacctggtgaagtacatctttgc

SEQ ID NO: 340492 - DNA, 100 bp, Homo sapiens
gcggccgcagctgcgaggagctcactgcggtcctaaccccgccgcagctcctcggacgcagcttcatattctccaattcagcctcattctctaataaaac

SEQ ID NO: 340493 - DNA, 100 bp, Homo sapiens
ccactgcccggctgccttccacctccagtgctggtttggtgcacctcgatttggaggaagtagggcagggcccttatctggaaagaagtttggaaaccct

SEQ ID NO: 340494 - DNA, 100 bp, Homo sapiens
ggagaaccccttggatatcgccaggatgacattgctacaagtggttggtgtggtctctgtggctgtggccgtgattccttggatcgcaatacccttggtt

SEQ ID NO: 340495 - DNA, 88 bp, Homo sapiens
tgggagatccaagagattcagtatcactcgctcccttgatgatcttgagatcaaagttttacgaagggtgaaggaggagaatgatcgg

SEQ ID NO: 340496 - DNA, 75 bp, Homo sapiens
gagcaacccccggcagatcaagcgtctcctctgagcctccggcctccataagacccaaaacagatgacacctctt

SEQ ID NO: 340497 - DNA, 98 bp, Homo sapiens
ctgtaacgtcccactggtttggacatattcctctcctgatctggcctcatctgttccagggaggtgggattgaggtcaactgctatgatgtgtttgga

SEQ ID NO: 340498 - DNA, 74 bp, Homo sapiens
taggcacggacgcaacacttttggaacttagacgctaacaatgcagatcttcgtgaagactctgactggtaaga

SEQ ID NO: 340499 - DNA, 90 bp, Homo sapiens
gagggcatcttcaaccacaaagtgaggaggacatgtaccgtgctgcagatgaaatagaaaaggagaaagaattgcttatacatgaaagag

SEQ ID NO: 340500 - DNA, 75 bp, Homo sapiens
ggtcttacattgctgcatcaagaaacccaagctgctgagagcctgagcccttgtgaagccggcaatgacaagtct

SEQ ID NO: 340501 - DNA, 101 bp, Homo sapiens
tttatcaaaatcccaggctgtcggaagcaagggaccgcagatgttcatggactgcagcccacaggccctgcccatcgcatcagaggacaccacggggcagc

SEQ ID NO: 340502 - DNA, 119 bp, Homo sapiens
cgaacagcgggcggtgttcccggctccgtggggccgtcttcccggcgagtccgcgacggtcgccgcccacggcgaggcgtttacagtccctaattaaaaatattacacttagaagaaca

SEQ ID NO: 340503 - DNA, 90 bp, Homo sapiens
ggcccccacaatgaagcagtcggacgcgtctccccaagaaagcggggatctgacgagcttttctctacttgtgtcactaacggaccgttt

SEQ ID NO: 340504 - DNA, 82 bp, Homo sapiens
cttgttggaattggtgacaaaatcagaggcatactttataggagatacaactcgtcaacgaatcaaattcagtgatgacaga

SEQ ID NO: 340505 - DNA, 75 bp, Homo sapiens
ctggctgagagcagcaagcaggaccgggagaatgaggaagaggatggagatgaagatgaggaagctgagtcagct

SEQ ID NO: 340506 - DNA, 100 bp, Homo sapiens
tccaccgacgtggaggcagccgtcaacagcctggtcaatttgtacctgcaggcctcctacacctacctctctctgggctccgggacttggtgctgtcagg

SEQ ID NO: 340507 - DNA, 100 bp, Homo sapiens
agaaggggaaaagctacttcaagagctgcatgcttctgggaggccggaagaccacggacatccctttggaaggctacctgttgtctccgatccagaggat

SEQ ID NO: 340508 - DNA, 88 bp, Homo sapiens
tgatgtcgacaatgaaagccatttcttcttatgcttgtactcccagagtacctcatccacgctttcttctgtgtcatgtttctttgtg

SEQ ID NO: 340509 - DNA, 100 bp, Homo sapiens
tatgcagtgcttgctgctgaacctgagctgcaagttggaattgatataatgaagactagttttccagatcctgatgaatttgagcgaatatatgagcctc

SEQ ID NO: 340510 - DNA, 74 bp, Homo sapiens
ggccgaggtagaggcagtggcgcttgagttggtcgggggcagcggcaggactggagactgatgcatgagggggc

SEQ ID NO: 340511 - DNA, 75 bp, Homo sapiens
gtacgggctcccttcgccaaactcttcattttctctttttcggctttgtgagaaaccttaccatcaaacacgatg

SEQ ID NO: 340512 - DNA, 82 bp, Homo sapiens
gtggcgatgttggtccaagggaactgggtggtgaagaggagtttcggacgtggctgagggaggaatgggggcgcacgctgga

SEQ ID NO: 340513 - DNA, 100 bp, Homo sapiens
caactttctgggatccagcgagcgacatgtaccatttactggacagactggggcaacaccccccgtattgaggcctccagcatggatggctctggacgcc

SEQ ID NO: 340514 - DNA, 100 bp, Homo sapiens
gcttggcacgtggctcccttggtgttccccttttactgccaggacactgagatttggagaggttgaaggtttagaacagatgtggaaaaatgtttacttc

SEQ ID NO: 340515 - DNA, 75 bp, Homo sapiens
agatatggacgcagcagagccgggggagcttatccgcatgccaaagatggggaagaccatccacaaatatgtcca

SEQ ID NO: 340516 - DNA, 100 bp, Homo sapiens
tattttggcccaggcacccggctgacagtgctcgatgaagcccatgaacgtggaatatctcatgatggacgcctccatcctgctgcccccaacaggcacg

SEQ ID NO: 340517 - DNA, 77 bp, Homo sapiens
ggaaaatgtatctgcaaagcaggctaccagcaaaaaggagacacttgtgaacgctgctggaaagtacagacaacaag

SEQ ID NO: 340518 - DNA, 100 bp, Homo sapiens
tttgactccagtgttaagagaagaaatgaggacatatcagtatcggttcctcagtggtgtgctgaatattgtctttccatccactaccagcacgggggcg

SEQ ID NO: 340519 - DNA, 74 bp, Homo sapiens
gccaactacacagaccttactccccttagaacagggaaatgatgtcactctgaaactcaggctggaatacactg

SEQ ID NO: 340520 - DNA, 100 bp, Homo sapiens
cctcaactcagatggatacacccctgagccagagtgctgtcacttgtctgcaatggccggcagaatacatcattgtctttggactggctgaagggaaggt

SEQ ID NO: 340521 - DNA, 98 bp, Homo sapiens
tgaatctggtgatgaacttagcagcagctccactgaacagataaggctgtcaccactgactaaagaagagaaaactgcggcagagcaattcaaatttc

SEQ ID NO: 340522 - DNA, 100 bp, Homo sapiens
ctattattggaaatatgctacagatagatgttaaggacatctgcaaatctttcaccaatgaaagtggagaatgaggacatgaataaagaccagatcttgc

SEQ ID NO: 340523 - DNA, 74 bp, Homo sapiens
ggagggaggaagctgggacacccgggagtcaggaaatggcctcagcaactgttgccattcccaaagaacaccat

SEQ ID NO: 340524 - DNA, 74 bp, Homo sapiens
ctaaaaataagcaacttggccacgaagaaggtgaccaagaatatggcccaggtgaccaaagccctggacaaggc

SEQ ID NO: 340525 - DNA, 75 bp, Homo sapiens
tgccatcggagttacccacttccagctggacagtcattttgtttactcattcagccctgttgcaggtcccaataa

SEQ ID NO: 340526 - DNA, 98 bp, Homo sapiens
gtgatccaaggacatatgacccagatttcaaggggcctgttgccaacagggaagaggaagaacgtctgagaaataaaattcgagctgatcatgagaag

SEQ ID NO: 340527 - DNA, 50 bp, Homo sapiens
tctcccttcatgtctgggtcatggaaatcactgaccaggacatgtttgga

SEQ ID NO: 340528 - DNA, 100 bp, Homo sapiens
gaagtactgaatctaaatgggtgtacaaagacaacagacgctccaaaagaaactcttccttcaaaacctgtgaagaaagagaaggaacagaggacacgtc

SEQ ID NO: 340529 - DNA, 100 bp, Homo sapiens
agtggaggtttcaagtaatccactaacaaccagttccaaattctgtcatcaaatcctgtgctgctgttcctcgtgagcaaattggtcaggagatgttgga

SEQ ID NO: 340530 - DNA, 73 bp, Homo sapiens
gggaaaacactatcctctgagatcccagatcatgagatatgtgaaagaggccaaagaagcaactaagaatgga

SEQ ID NO: 340531 - DNA, 100 bp, Homo sapiens
caatcattagttcagtgcagtgtctgacttgtgacagggtctatgcctctcagcgaatgagagctggcaaaggcaaaatgagaaaccgtcgccgtatcca

SEQ ID NO: 340532 - DNA, 100 bp, Homo sapiens
agcctccggcggaggccggcccgcacgctgggactcctgctgctggtcgtcttgggcttcctggtgctccgcagatgaggacggggacttggttgccttt

SEQ ID NO: 340533 - DNA, 87 bp, Homo sapiens
ctggctctgaaggcgaacgcttcgctggccatttaggagctctgctcaaagccagacggtcccccacggcccttcaggatgaaagct

SEQ ID NO: 340534 - DNA, 75 bp, Homo sapiens
tggacaaaggaatgatgagcaccgtgacggaagttcgagccctcaggaaaaatatattcagggggaagagatgta

SEQ ID NO: 340535 - DNA, 100 bp, Homo sapiens
tgcatcttggcttcacagcatgcttgggctcagctcacattctgggaggccagccaggtgcggcggcagcacatggagcgttgtaccagcttcctggtgg

SEQ ID NO: 340536 - DNA, 99 bp, Homo sapiens
tctcttcgcctcgcctcgggacccgcggtccccgctcttgctgaattctccactttaccaatacttacaggatctgggacacacagactttgaaatatg

SEQ ID NO: 340537 - DNA, 51 bp, Homo sapiens
tgacgagctgcaatttggttatgagcattccagtgtatcagagtatcatcc

SEQ ID NO: 340538 - DNA, 98 bp, Homo sapiens
gattcccttgcaaatttacatacgagaatggcttgtgaaatcatgcctctgcaaagagactttggctatgaaaggattaacactgaactgtttaggaa

SEQ ID NO: 340539 - DNA, 99 bp, Homo sapiens
caacattgtccatatctccaatttgggtcctgtggtgacagataatgggaattttatcttggactggaagtttgaccgggtacacaaatggagtgaagt

SEQ ID NO: 340540 - DNA, 83 bp, Homo sapiens
agaagtcgtacagagtgtcattgacagccaagctgaataccactagaaacatacctgtaaccagagacagctgattatagctt

SEQ ID NO: 340541 - DNA, 75 bp, Homo sapiens
gcttgtttcacatctgtaacaacagttttatgtgctgaaagagttggccagatgactaagacatataatgacata

SEQ ID NO: 340542 - DNA, 90 bp, Homo sapiens
tgaagaataccagcaaaggcaccgtgacaggccaagtgcaggggccagaagacaaagtcaattccatactcaatgatgaggcacggcggc

SEQ ID NO: 340543 - DNA, 50 bp, Homo sapiens
tctcccttcatgtctgggtcatgggaccgtttggagggagccattcacct

SEQ ID NO: 340544 - DNA, 75 bp, Homo sapiens
ggacattccaggccacagtcctgggaagtcagatgggattgaaaggatgagacctgcacgcagtggctcacagca

SEQ ID NO: 340545 - DNA, 60 bp, Homo sapiens
gggagctgaggctgaaatctggatctgtgccagttcagaagcaggcgagcctcttccctg

SEQ ID NO: 340546 - DNA, 100 bp, Homo sapiens
gcggcttaagcgccgccgcggtctgcggaatgtcaactattcaacatggaggcggaggtcgataagctggaactgatgcagaaatgatggaagaattgca

SEQ ID NO: 340547 - DNA, 100 bp, Homo sapiens
aactgtactatacacatcgtgacagtcaccattaacggagatgatgccgaaaacgcaaggccgaagccaaagccaggttctacaagctgcacgagcggag

SEQ ID NO: 340548 - DNA, 75 bp, Homo sapiens
tgtaactgctaatgccgctaccaattctccttcatgtacaagagataacgaaggaggcccaacttcattcaataa

SEQ ID NO: 340549 - DNA, 50 bp, Homo sapiens
cccgagacgcgcctggcgcggagagaagaagaaggaggttcctgctgtgc

SEQ ID NO: 340550 - DNA, 83 bp, Homo sapiens
ggacaatggtcaccgtctcttcagaaaccaaggtgtatgttggtaacctgggaactggcgctggcaaaggagagttagaaagg

SEQ ID NO: 340551 - DNA, 97 bp, Homo sapiens
tttaaaatcattggaccatttagtaagaagaattccagtcttataaagaagtggttctgaaagatggaagaattgaaagactaaagttagagcttga

SEQ ID NO: 340552 - DNA, 75 bp, Homo sapiens
gccgagcgcctgcgcatcagcccggacaggtaaacacctttgtaaagaatctgtaaccaataccatgaagttcag

SEQ ID NO: 340553 - DNA, 100 bp, Homo sapiens
cacgggcaaggcggagagtgacggagtcggcgagcccccgcggcgacaggcaagaaactatattcagtctttgactcagatgccgaagatgaactttgcg

SEQ ID NO: 340554 - DNA, 75 bp, Homo sapiens
gcattttgcaacgcagttcggagttattatgagatccagacatttaatgtggatgcaccatgccagaccgtggaa

SEQ ID NO: 340555 - DNA, 83 bp, Homo sapiens
ttcgtcgtccccctccccccaaccagggagcccgagcggccgccaaacaaaggtctcctctgagcctccggcctccataagac

SEQ ID NO: 340556 - DNA, 71 bp, Homo sapiens
gacatcatgctggccactggcaagctgtcccctgatgccatcccagggggttttgtgctgctggatgggga

SEQ ID NO: 340557 - DNA, 90 bp, Homo sapiens
gaggagatggacattttggaccagggagccctacagcgtctcttcaaaaagggggtggcccgattctacaggtcacggaaaaagcacttg

SEQ ID NO: 340558 - DNA, 97 bp, Homo sapiens
atgtcatttcatccaccacattacttaggccggggtttgaagtctcacgcctacattcacagtgtccagtttagccaccatgttttcctcaacctcc

SEQ ID NO: 340559 - DNA, 74 bp, Homo sapiens
accaggactgcaggacagtcgcatgttggcagataaattgaacatgactccagaagaagctgaaaggtggattg

SEQ ID NO: 340560 - DNA, 100 bp, Homo sapiens
gtgaaaggagcagtagatgatgatgtagcagaagtttgctgctttgtggtgcacaagcggtgccatgaatttgtcacattctcctgccctggcgctgaca

SEQ ID NO: 340561 - DNA, 100 bp, Homo sapiens
ctggagcaaggggaactgccatggggcctcgatccctgggaacctatgggcagggaggctctcagaggtatctgtccagtagcgtttccattccccaaac

SEQ ID NO: 340562 - DNA, 90 bp, Homo sapiens
ggcagcagaagccagggcagctgaaagacagagaccttcaggcgaaagggcgtgtggttgcgcctgaggaagatacttttctgtgttttg

SEQ ID NO: 340563 - DNA, 100 bp, Homo sapiens
cagttccctgtcttgggaaaaggagaactcctgactgattagcattcacaccaggagagacagcgtctggagaccatcctcagtctctgtgctgaataca

SEQ ID NO: 340564 - DNA, 75 bp, Homo sapiens
aggctttctgcttcactactgcctcttggccgtcacgcaagggtaaaccagacttgaatacaacattgccaatta

SEQ ID NO: 340565 - DNA, 75 bp, Homo sapiens
aagaagatgaagaagattgtggatgccgtgatcaagtacaaggacagtcgaaatcagctgtccgccctgcctgcc

SEQ ID NO: 340566 - DNA, 100 bp, Homo sapiens
gaataacccgcccccagcgggatgtgaaggactccgggtgaggccggccacgccccgcacggcagtataccttaaatggcaagaaggaaataaatcatct

SEQ ID NO: 340567 - DNA, 75 bp, Homo sapiens
tcttttggaggaggaggatgaatttgatagagagggtcctgccctccggaggagcagcctcgaggctggtggttt

SEQ ID NO: 340568 - DNA, 100 bp, Homo sapiens
cacagtgaggagtaccagcaggctcagcacaagttcctggtggccgtggagtctatggagccgaacaacatcgtggtgtgggcccatcgctggatggatc

SEQ ID NO: 340569 - DNA, 88 bp, Homo sapiens
atatgtgccgccagtgtttccgtcagtacgcgaaggatatcggtttcattaagcatggccaagtatttccggaacaacttcattaatc

SEQ ID NO: 340570 - DNA, 83 bp, Homo sapiens
ctgccacacagccatttcctgacttctgctgcatgtgcctgggatttatgtgatcagtttggctgaaccccgtctgcccctgc

SEQ ID NO: 340571 - DNA, 83 bp, Homo sapiens
caccagcagctgtactggagccacccgcgaaaattcggccagggttctcgctcttggtcaaaatgcagatcttcgtgaaaacc

SEQ ID NO: 340572 - DNA, 75 bp, Homo sapiens
cttttgcctcccaccgtgattctgaggcctccccaaccatgtgcaatttgtgtgacgttcctctgtatgacattt

SEQ ID NO: 340573 - DNA, 75 bp, Homo sapiens
ggcctgcagcggctggagtacagaggctacgactcggcaggccttcccttcttcttggtggtgttcttgagtaag

SEQ ID NO: 340574 - DNA, 48 bp, Homo sapiens
ctcgttggaggctgtgcagcagaagggaccgcagatgttcatggactg

SEQ ID NO: 340575 - DNA, 101 bp, Homo sapiens
cagctgtccaatcacctcgcaggagccctaggcattccaaaatatgcccggtgctatccgcccagctgctcctagaccaccatttagtactatgagaccag

SEQ ID NO: 340576 - DNA, 75 bp, Homo sapiens
tgacaacgttagagaaagtcatcaatgagacctggttgctatgtccaccacaggggacaagattcttgatactgc

SEQ ID NO: 340577 - DNA, 101 bp, Homo sapiens
gctggttagtgtgctctgagggagggtccgagccagccgctgttttgccggaggagcccctcaggccgtcacgagaagagaatgccttctagatgcaaaat

SEQ ID NO: 340578 - DNA, 82 bp, Homo sapiens
cgtgaagctcaccgacagtgccctgagggccttcgagagctaccgcgccagacagataccccatgtttccccatcactcgag

SEQ ID NO: 340579 - DNA, 50 bp, Homo sapiens
cgcggcggccgcagctgccacaaaccaggagtttgttcatctggcaaaga

SEQ ID NO: 340580 - DNA, 75 bp, Homo sapiens
tcgccatcttggatccgcgggacaagaaaattcatgcgcagagagactttcaagcagctggctggatgttcgtca

SEQ ID NO: 340581 - DNA, 100 bp, Homo sapiens
caccttacttcagcccctcaagggacacaaagacactgtgtactgtgtggcatatgcgaaggatgggatgcttgaagatggaaagaaatttgattcctcc

SEQ ID NO: 340582 - DNA, 90 bp, Homo sapiens
atggaaggggcctccagggtctgcagacaaggcaggtgatttgccttcaaggaaactggggagtcagaaaattgggaactcatatcaaca

SEQ ID NO: 340583 - DNA, 50 bp, Homo sapiens
ctataaaagcacagttttaagagagtggacagaggactgcagaaaatcaa

SEQ ID NO: 340584 - DNA, 98 bp, Homo sapiens
cgaggagggggatgaagctcaagaccaggagactcggtccccacccaaccacagaaatgagaaccacaggcagtgatcagcagctggactgtgccttg

SEQ ID NO: 340585 - DNA, 96 bp, Homo sapiens
agggatgagtcatgtggcagtggaaaatgcgctcgggctggaccagcagtttggtgccctggttgtcagatgttggaaagcagtaggacggaacat

SEQ ID NO: 340586 - DNA, 75 bp, Homo sapiens
gtgaggccgtggatgcaggcattaaggctgctgacttgagtaaaccaatagataaaaggatatacaaaggaacac

SEQ ID NO: 340587 - DNA, 100 bp, Homo sapiens
gaatcatggacggacagaggatgcacttgtccaatcctcaatcctggaatagcgggttttgcagcaattgttgcatatggattatataaactgaagagca

SEQ ID NO: 340588 - DNA, 82 bp, Homo sapiens
caacatgcctcaccctcatctatatcctttggcagctcacagacccctttgctgatgcaagtaagggtgatgacctgcttcc

SEQ ID NO: 340589 - DNA, 100 bp, Homo sapiens
ctttatgctgtacatggaaatcatgtgaaatgtgtaaagatgctcttaggggcacgttccgctttgaaagacctgatggctcccactttgatgttcggat

SEQ ID NO: 340590 - DNA, 75 bp, Homo sapiens
tgtcttggtgcttcttgctcttttgggtgtcatcattgccaaaattggctgattgcaattctggcccaactcaac

SEQ ID NO: 340591 - DNA, 122 bp, Homo sapiens
ccgagatgtctcgctccgtggccttagctgtgctcgcgctactctctctttctggcctggaggctatccagcccggccaagagccactgcacaatgaggagctggcaggagcaggccgggtg

SEQ ID NO: 340592 - DNA, 58 bp, Homo sapiens
agaactgaccgtccaggtcaaagaacacagatatgtagaactcttcttgaattctaca

SEQ ID NO: 340593 - DNA, 88 bp, Homo sapiens
tgagacacaatttatcattgaataagtgttttaagaaagtggacaaagagaggagtcaggctgatcagctgaccgaagaacagattgc

SEQ ID NO: 340594 - DNA, 83 bp, Homo sapiens
agctccaggattctgacagggatgttgcgaagaaaccaggaatggatctggcagacacctatattatgtttgttcggcaaaac

SEQ ID NO: 340595 - DNA, 89 bp, Homo sapiens
cactgtgaaggtggtcatcatcccgccttttgaggacggcactccccggagtgtgaagcctcagtttaggtcatctggtggttcagaac

SEQ ID NO: 340596 - DNA, 100 bp, Homo sapiens
aagaatgaacattgtattgagaacaatatagatttgcaggtgttctttgacctaatgagagaaatcagaacaaagaagatgtcagaaaacaaagacaaga

SEQ ID NO: 340597 - DNA, 89 bp, Homo sapiens
atccgcagagaaattcagaacctcaagcttttcaggcatcctcatataattaaactaaatgactgctgtccatgcaggcaacataaact

SEQ ID NO: 340598 - DNA, 75 bp, Homo sapiens
gaagacagatatgaggaagagatcaaggtcctttccgacaagctgaaggaggcgctttgacttccgtccaaaacc

SEQ ID NO: 340599 - DNA, 100 bp, Homo sapiens
ggctgtaccggcagatcctcaggggcaagtacagttactctggggagggtcctgaggacaccgtgagccagccaggcctggccgctgggcctgaccggcc

SEQ ID NO: 340600 - DNA, 82 bp, Homo sapiens
ccggttccttggtgtcatccagccttagcaaaccagaggtgggacgctcgtccctgctggtggggaatctcaagaagaagta

SEQ ID NO: 340601 - DNA, 82 bp, Homo sapiens
tgctctcaactacaacatcgtttcagggagccacacaggacagttgacccaacacttctgccacctgaagaacgacacctgc

SEQ ID NO: 340602 - DNA, 90 bp, Homo sapiens
gcagcaggctgtggcgcggcggccgcggactcagattgatggacaacttttcttaattaagcaccttttgatacttcgtgaacaaattgc

SEQ ID NO: 340603 - DNA, 100 bp, Homo sapiens
gacactacaggaagtggagctacagatagtaaagatgatgatgacattgacctctttggatctgatgatgaggaggaaattatggaagtggaaattacaa

SEQ ID NO: 340604 - DNA, 74 bp, Homo sapiens
aaaacccaagtggaaccaccttgtccacaaattcgtcattggccacttaaaggagctcgaggccatgagcagat

SEQ ID NO: 340605 - DNA, 100 bp, Homo sapiens
ggcgctcaccatgttccctggaggtgcggcggcagcacatggagcgttgtaccagcttcctggtggatgagctgggcgtggtggatcgatcccaggccgg

SEQ ID NO: 340606 - DNA, 100 bp, Homo sapiens
gtcgaaggcggtccagcagccctttcctgagcaagcggtctctgagtcggagtccactccccaggtttctctggaaacccccctggtaagtgtggaggag

SEQ ID NO: 340607 - DNA, 83 bp, Homo sapiens
caggatcaaagacgaattccagttcctgcaagctcagtatcacagacctgcctagagctggaacgttacctccagagcgagcc

SEQ ID NO: 340608 - DNA, 75 bp, Homo sapiens
aggacatggagtatgaaagacgccttcaggctctacacacagatgatcctctcacttgggattatgtggcaaggc

SEQ ID NO: 340609 - DNA, 76 bp, Homo sapiens
cttgcctgaatattttgcaccctatcaagcagagcggtttcgaagacttggtggtggacttgctttgtgaagagac

SEQ ID NO: 340610 - DNA, 51 bp, Homo sapiens
tgcagaacgtcccaattcttcaggccaagtttggaaattttagcattcagg

SEQ ID NO: 340611 - DNA, 82 bp, Homo sapiens
cttccgtgggcaacgtggccgacagcacaggctccagggagcagtgtcagggccagggagacgatggtctccgtgactatgg

SEQ ID NO: 340612 - DNA, 100 bp, Homo sapiens
tacctgatgaagtttgtcttgaaaagtgaaaatggttccatttccattttccctgttctcaaggactcacaccacccggcaagaactgctcactacggct

SEQ ID NO: 340613 - DNA, 75 bp, Homo sapiens
cgtcagcatcccagccgtgctcacgatgagcgggatcgtgtgcagaagaaaaccttcaccaagtgggtcaacaag

SEQ ID NO: 340614 - DNA, 82 bp, Homo sapiens
tcagcggtctgatgcctggagcaccactgcagccagaaagcgagcaaaatgatgcttcaacacccaggccaggtctctgcct

SEQ ID NO: 340615 - DNA, 73 bp, Homo sapiens
aggatgagcctgcagagcgcgcagtacctccgatgccttcaattaagttgcagagttctgatggagagatatt

SEQ ID NO: 340616 - DNA, 101 bp, Homo sapiens
ttacgctggaaaaactccaacagcttcatatggacagatggacttcaaatgctgtttgtattccagagactagaggctgacccgcggctgattgagtccct

SEQ ID NO: 340617 - DNA, 76 bp, Homo sapiens
ctcactgacttcaagaatgaagccacggacccttgcgtgatgtcttggcattgcccattttcaagcaggaagattc

SEQ ID NO: 340618 - DNA, 75 bp, Homo sapiens
cgccagcactagctcagacgcaaggaatcagagatcattgatttcttcctgggggcctctctcaaggatgaggtt

SEQ ID NO: 340619 - DNA, 50 bp, Homo sapiens
cttcccgtccgcggcgtggaggtgcggcatcgtcctgggggcgctgctct

SEQ ID NO: 340620 - DNA, 100 bp, Homo sapiens
ttatttgagagatgtatcagtttcttctgaagtacaatcaactgtagaagcctttgtagcaggaatcatctgctgcagtttgctttagagtcaccagcca

SEQ ID NO: 340621 - DNA, 100 bp, Homo sapiens
aacgcctcggccgtcgtcctctacaatgaggagcgctacgggaacatcaccttgcccatgtctcacgcgggtcgcctggtcggcgctctggatgcagtgt

SEQ ID NO: 340622 - DNA, 100 bp, Homo sapiens
caaatccatcaagctcatcaaaagactgctgcctcatatccgggggaatgtgggctttgtgttcaccaaggaggacctcactgagatcagggacatgttg

SEQ ID NO: 340623 - DNA, 100 bp, Homo sapiens
atttttgccaattgtgtggccttagcgatctatattccctttccagaagatgattccaacgccaccaattccaacctggggaactgtgtcaatctgacag

SEQ ID NO: 340624 - DNA, 100 bp, Homo sapiens
aagaccaccccacggccgccaccaagatgagcagggcccttgcggagttccgcgtccgaggtgtgaaggtatggttccgaccggcgtttagccgagctct

SEQ ID NO: 340625 - DNA, 75 bp, Homo sapiens
gagatttggagcccattttagaggcatctgttctatcttcccatcataaaaaaatcacttaggaaaatggctgtt

SEQ ID NO: 340626 - DNA, 100 bp, Homo sapiens
ggccattttagacgcagtaaccgagtcgtgtctgttcaaaccggcacggtctgatccggaaatatggcctcaatatgtgccgccagtgtttccgtcagta

SEQ ID NO: 340627 - DNA, 49 bp, Homo sapiens
gcttcggcccgggccgctcaggtgcagcatgaacaggctgaacactttg

SEQ ID NO: 340628 - DNA, 99 bp, Homo sapiens
cgggtcgcaacgctgtgggcgttccaggaggtggtcgtggcgaacctggcagctgcgacaatgcagatcttcgtgaagactctgactggtaagaccatc

SEQ ID NO: 340629 - DNA, 83 bp, Homo sapiens
aagaaaagaagtggtttatcaaaatcacgttataatcagattttgaccaagcattttgtaagagtccctgtgaagcaggaaga

SEQ ID NO: 340630 - DNA, 75 bp, Homo sapiens
aagtagcccccagcctgtcagccctaattggggaagcgatgttcccgctgcctgtcaccaacgggaagggccggc

SEQ ID NO: 340631 - DNA, 101 bp, Homo sapiens
ggacctgttgaaaaaaatctgggaggttgaacttattaatactcgctctttactgagcgtgtttgaagaagatgctggcaccctcacagactataccaacc

SEQ ID NO: 340632 - DNA, 96 bp, Homo sapiens
atcaaaacaagccctccaggaactcacgttattaatgctgcactggctttagcagcaaaaccacagagtaaactggcccaagagaacatggatctt

SEQ ID NO: 340633 - DNA, 83 bp, Homo sapiens
cgaggcaccgaggcactcagaggaggttttgattcccaccatggccatcacccagtttcggttatttaaattttgtacctgcc

SEQ ID NO: 340634 - DNA, 100 bp, Homo sapiens
gacattagaggtcatccaaagcagccgtcccctctgcagcctctctgacaagtgacagcaccagttgcccttgaagcagaaaacagaggtgaaatgaaac

SEQ ID NO: 340635 - DNA, 80 bp, Homo sapiens
caatcttaattcctcacagagggcctgagacctgggaggaagctggagaaaagatgccctctgaatctttgtgtttggct

SEQ ID NO: 340636 - DNA, 74 bp, Homo sapiens
ttggcatcaacttggtggagaatagaaggcaaatggtgaagccaaaaaccttccctcttacccggggccgagca

SEQ ID NO: 340637 - DNA, 83 bp, Homo sapiens
gagtcatcggacgccagaatctggtcagcccaaggccaaccccactgtcactctgttcccgccctcctctgaggagctccaag

SEQ ID NO: 340638 - DNA, 76 bp, Homo sapiens
gaggaatgttccctgacaatttcgttaagttaacagccaggtccttgcctgctgtgcagtctgatgaaagacttca

SEQ ID NO: 340639 - DNA, 80 bp, Homo sapiens
cagcgccaacagcaacgcggaccacccgcggcgagtcctttgcacatgttggcaacacacgcatccgcatcggcctccct

SEQ ID NO: 340640 - DNA, 133 bp, Homo sapiens
tcccctgctatccccaacaagaggaaagacacacctaccaagaagccagtcaagcggccagagctctgcgtgcctcttgctgtgccctacctggacaaacccccaactccgctccacttctaccgggactggg

SEQ ID NO: 340641 - DNA, 89 bp, Homo sapiens
caggcagtcccgcggcagcaggatcacaggctggaagattatatctggatcaccaccagagcaagccctttctgaagcttcattccaag

SEQ ID NO: 340642 - DNA, 83 bp, Homo sapiens
gcggtccggcccggggccccgggatctcggctgtccttcctcccgattgggaaaatgaggtacgttagtgttcgcgattttaa

SEQ ID NO: 340643 - DNA, 100 bp, Homo sapiens
ttggggccctggttctgcttggcctgggggtcctcctcttctcagctggtgagtgacacacggagagtgtctgacatccagtggtttcgggaggcctatg

SEQ ID NO: 340644 - DNA, 100 bp, Homo sapiens
catgacacagctatctctgggccactccactatgccccttaccacaggagctctgcacagggaaacttcgtggcttgcatgacagctattttacgacaaa

SEQ ID NO: 340645 - DNA, 100 bp, Homo sapiens
taagactctttaaagaaggcaaggagagaatgtatgaagaacagtcacaggacaggtcctatggcagcgtatacaaagctattcataaagagaccggcca

SEQ ID NO: 340646 - DNA, 75 bp, Homo sapiens
tttgtaagaggtggtatcgcctagcctccctgtgctgtcaggaatctacaggacttggctcgtatttacattcga

SEQ ID NO: 340647 - DNA, 100 bp, Homo sapiens
atcgcggacttcctgcggagccgccgcatcatgtccaccaccaacgtgcgcaagttgatgaactgcggaggacttcctcgttctgcccatcttcctaaca

SEQ ID NO: 340648 - DNA, 74 bp, Homo sapiens
cagatagtaccatgatagctgtatcagttttagatggagcaggattagatattgatttccatcttgcctctcca

SEQ ID NO: 340649 - DNA, 74 bp, Homo sapiens
ttgaataacgtctccttgtttaccctggtggcacatttagaacgaacagggcattacttaactgtgaaagataa

SEQ ID NO: 340650 - DNA, 83 bp, Homo sapiens
cccctggaaaggggcaggaacgacaaactcaaagtccaggcactacctggcagcaccatctaaacctgtatcatctgctgtgg

SEQ ID NO: 340651 - DNA, 83 bp, Homo sapiens
aggagagcatcgactggaccaagatcgagcccagcgtcaacttcctcaagtcgcccaaaggagcggagagtttaataggcaag

SEQ ID NO: 340652 - DNA, 80 bp, Homo sapiens
cttccaaccagagcttgtgtagcgtcagatccttgagtgataaaggagtagagtcctcctgcatatgcccaagaggattg

SEQ ID NO: 340653 - DNA, 75 bp, Homo sapiens
tgcttcccttgtcttctactgggagccacttaaccgtcaggtgctaaaatgatgtattttctggacaagtcaagg

SEQ ID NO: 340654 - DNA, 75 bp, Homo sapiens
gctgagcgatatcacagaacacaagattaatcaatgtcaactgacagtagctgctgcaagaagggacagacgttg

SEQ ID NO: 340655 - DNA, 78 bp, Homo sapiens
tagtactccttttggccatggtagtaaccagcgcctgaattctgctattatctatgaccgagatttctcttacaatta

SEQ ID NO: 340656 - DNA, 90 bp, Homo sapiens
cggtgggggcttagcgcactggaggagcggcgggcttcagacaggtcttgggcgtctttggtactggcttttttaggggtctgcctgggg

SEQ ID NO: 340657 - DNA, 100 bp, Homo sapiens
ctggaacctgtgtgagattctttttattgaagtggccccagatgcagagcaaagcggcagtccccggacagggatgggctctgaccaggaggacagcaag

SEQ ID NO: 340658 - DNA, 50 bp, Homo sapiens
ttcacgagtcttcaagccttcagagtgatcagcagctggactgtgccttg

SEQ ID NO: 340659 - DNA, 102 bp, Homo sapiens
tctgacattttctatcagtgaagccattaagctctgtgtcactgtggtggcgtatgctcccgaatcattcagaaggctggagtgcaatggcgcaatctcggc

SEQ ID NO: 340660 - DNA, 79 bp, Homo sapiens
agggagtttgacagctattaaaaccagggctccacagttaggaggtcggatcatgctaaaaggagataatattactctg

SEQ ID NO: 340661 - DNA, 51 bp, Homo sapiens
cacaactccagtgctaactcaacagggagaaagaggccaagaaggaagacc

SEQ ID NO: 340662 - DNA, 90 bp, Homo sapiens
gggaaggcactcaaaagtggggggcaggaaagctccagtcagcccggtcaagcatgacagcaactcaaactcggcaaacttccaagacgt

SEQ ID NO: 340663 - DNA, 75 bp, Homo sapiens
gaaagacatcgtggagtattacaacgacagtaacggtgtgacagtttgggagttgatgaccttcggggcagagcc

SEQ ID NO: 340664 - DNA, 100 bp, Homo sapiens
cttcgctcagtctgcaacctcttcagctactgggacatccaggtgttttacagggaggccctgcacatccccccgagtgttctgccagttctggataatc

SEQ ID NO: 340665 - DNA, 50 bp, Homo sapiens
ccttaccgaggaggagtatcagtcatcgtgacagaaaagacaaacatcct

SEQ ID NO: 340666 - DNA, 82 bp, Homo sapiens
caaccgcctacgagacactcaagatacctactggagcaggatttcccaggcatgaggattggtccggagcccaccacagact

SEQ ID NO: 340667 - DNA, 97 bp, Homo sapiens
caacgcaatgatgaacaacaatgaccttgagctctgattatacaaaaccaggagacattgaccctacatcagtagcaagtcccaaagatccagaaga

SEQ ID NO: 340668 - DNA, 101 bp, Homo sapiens
cctcgggccgacgccatgaagatcaaagatgccaagaaaccctgctaaagaattacctccaaagccattgtcaagaccacagcagtcatctgcaccagtcc

SEQ ID NO: 340669 - DNA, 100 bp, Homo sapiens
ccatcaggtaggctgcgttgaggatctttgctcttccatccgcctttgatcgtcttcctcttcagccatccaggagttggtggtgaccccgcccagttgg

SEQ ID NO: 340670 - DNA, 80 bp, Homo sapiens
aattcttccactgatatctcaaaaggtgatctggacaaaggaacaggtatctcaggacctcagcaatggagaatatcccc

SEQ ID NO: 340671 - DNA, 100 bp, Homo sapiens
agactgcgccgtcctcccgggagagccagaaagaggacatggctgctgggcagcgggaagcgaggccccagagtaacagattccctggataccctttcag

SEQ ID NO: 340672 - DNA, 83 bp, Homo sapiens
attgctggctacagcttcagaagaccgaagcgttcgtatctggaagccgcttacaaacacgcagatggcaagaagattgatgg

SEQ ID NO: 340673 - DNA, 98 bp, Homo sapiens
ccggtcaaaatggaagtgaatccccctaaacaggagcacctgctggcgctaaaaggctctgtatgtggatgtgatccgtgtgaacagctactactctt

SEQ ID NO: 340674 - DNA, 75 bp, Homo sapiens
caacattgatctcctatttttggcttcaagattttgtgccaaccagtggttacccaggctgtccttacccacctg

SEQ ID NO: 340675 - DNA, 75 bp, Homo sapiens
ctgtgcttcctgtacagctgcggaaccgactgcctccgggcctgccaggagcagatcgaagccctgctggagtca

SEQ ID NO: 340676 - DNA, 83 bp, Homo sapiens
acatttcatggggctccactaacagcttctcaaaagtgaaataagaagattggaaaggaatcaagagcgagagaagtctgcag

SEQ ID NO: 340677 - DNA, 71 bp, Homo sapiens
cgcgaaggatatcggtttcattaaggtctgggaggggctgaacgtggtgaagacaggccgagtgatgcttg

SEQ ID NO: 340678 - DNA, 75 bp, Homo sapiens
tatctaccggaggtacagcaagttctttgacctgcaggatgaaaactttcggaagagaaagttgcctgtggtaag

SEQ ID NO: 340679 - DNA, 76 bp, Homo sapiens
aaaacgtgaccactgaggatgtggagaaggccacaggtgacagagctgaatgaacctctctccaatgaagatcgaa

SEQ ID NO: 340680 - DNA, 74 bp, Homo sapiens
ggacaagctcctacaaggcaggcagtattgggtgcagtatgctattgcggcagcacctcccgagatgtgttatg

SEQ ID NO: 340681 - DNA, 100 bp, Homo sapiens
gcaagaacagagagagaggtggacagatctgagagatactgagctcacctgttctccaggaccagccctgctggggcccaggcccaggctctgagaggcc

SEQ ID NO: 340682 - DNA, 82 bp, Homo sapiens
gacccacatcatgaagtcggcggatgtggagaagcattttttactgtctacagaaacttattgtaattcatttttcctcact

SEQ ID NO: 340683 - DNA, 97 bp, Homo sapiens
ggggttcgctggctgcggccccggctccggcccccgcaggagcaggagcagcagccaagctggacagatgacctgcctctctgccacctctctgggg

SEQ ID NO: 340684 - DNA, 100 bp, Homo sapiens
attataaagctcaaccgagttctaggcttcaaacctaaggatcttagtgcaacattgctctgcaaacttggaccagggcagagtgagatagcagaggagc

SEQ ID NO: 340685 - DNA, 98 bp, Homo sapiens
tcgcagcgtggattttaaccgaggcacggacaacatcaccgtgaggcagggggacacagccatcctcaggagccatgtctgaccaggacgtttggaag

SEQ ID NO: 340686 - DNA, 102 bp, Homo sapiens
gtcagcgatagcccagtggatggccattccagatcatgctttacgattatggaatatccagacggacactctggtggcaatatttggaggcgtagaagggca

SEQ ID NO: 340687 - DNA, 100 bp, Homo sapiens
tttctcggtttatgtgctcttccagccctggtacctgacagtgtaaagaaggagctcctacaaagaataagaacattccttgctcagcatgccagccttt

SEQ ID NO: 340688 - DNA, 75 bp, Homo sapiens
gacttgcagcacaatgaactgctagacctcccagatactataggcattggaatggatacttgtgtcattcctttg

SEQ ID NO: 340689 - DNA, 99 bp, Homo sapiens
gtggagccggcgagagagtggcagcgggggctgatggaagtgcagtgggggctggagagggcaccctagagcccatgatgctgcccaaacctgggacct

SEQ ID NO: 340690 - DNA, 75 bp, Homo sapiens
gtcaaggggttaaattctccaagcccaggcagctctgtggccatggatatgttccagaaggtagagaagatcgga

SEQ ID NO: 340691 - DNA, 98 bp, Homo sapiens
attccagatgttcctgtggaccccagtccagatgtatttatttgtgggggctataatggagaggtgatcctgggagatatctggaagttgaatctgca

SEQ ID NO: 340692 - DNA, 101 bp, Homo sapiens
aaccctcacggcaacgggctgctctacgccggcttcaaccaggaccacgattcctggtcgggtggcttccagtggtcttcagtctgtcgtgcaccgatgag

SEQ ID NO: 340693 - DNA, 100 bp, Homo sapiens
aagagacctctacttagctcagcaattcttaccttatgagacgtgcaggtaccatcaggaagcagcgggataagctgataaaggaaggaaagtacacccc

SEQ ID NO: 340694 - DNA, 76 bp, Homo sapiens
aggagctgtagagaggaccccggtacatctgaaagccgggaaatgtctgaaccggacggcttttctcatttccact

SEQ ID NO: 340695 - DNA, 82 bp, Homo sapiens
aggacccactggaagcctagaaatggtggcgacatgtctaagaatgtgagccagtcacagatggcaaaattgaaccaacaaa

SEQ ID NO: 340696 - DNA, 90 bp, Homo sapiens
taaaagtctagagatcaggactctggcagttgagagactgttggagcctcttgttacacaggcttttaaagaagcagttttttcaccgag

SEQ ID NO: 340697 - DNA, 83 bp, Homo sapiens
gagcacatgcattcacgccgggtgatgcaccgagcaaattgtggctactaatttgccccctgaagatcaagatggctctgggg

SEQ ID NO: 340698 - DNA, 97 bp, Homo sapiens
agaaagaagagccatgggtcctaccactccaaaactttgaggcgaggaagatcccgagggaaagccacacaggaaaatggctttgtaaagaagtttg

SEQ ID NO: 340699 - DNA, 74 bp, Homo sapiens
ggaaatactggttcttgaaccgaagactcataatgaaacatgatgaaagtattgagggggcatcagaattgggt

SEQ ID NO: 340700 - DNA, 75 bp, Homo sapiens
acagggcaccaactatgaagactctcagggcgcgatttaagaagacagagtgtttctgaaagatctatccagcac

SEQ ID NO: 340701 - DNA, 75 bp, Homo sapiens
tggtagagaaactgaagacgcaaatgttggatcaggaggaggactgcttcaccagtttttctactggctccttct

SEQ ID NO: 340702 - DNA, 107 bp, Homo sapiens
gtgaaacttgtccgtgccaaatttcctgaacacaccattatggtcaaaatgcagatcttcgtgaaaacccttaccggcaagaccatcacccttgaggtggagcccag

SEQ ID NO: 340703 - DNA, 50 bp, Homo sapiens
gttgattggaggagcaaccacttcaaagcaggaagaccaactgcatccat

SEQ ID NO: 340704 - DNA, 90 bp, Homo sapiens
ccaccgcatcgcgctcaacctgcgggagcagggccgcgggaaggaccaggtctctgagcggcccctgatgttcctgttggacactcctgg

SEQ ID NO: 340705 - DNA, 82 bp, Homo sapiens
ttcttacatgagcattttaggaatgacaccagggtttggagataaaacatttgttgttcagaaagacgagaatccaggactt

SEQ ID NO: 340706 - DNA, 50 bp, Homo sapiens
tgcgtctgtggtgaacctgacagcagaattcagtgacgcgcagcgccccc

SEQ ID NO: 340707 - DNA, 77 bp, Homo sapiens
caagcccagattccaaaacttatgtcaaaaataaactatcaatcttgcccagactggagaaaggactgcagcaacaa

SEQ ID NO: 340708 - DNA, 90 bp, Homo sapiens
cgtggtcaccgtccgagacgccaaacacaccaactttgtggagaccactctgcttcatttttgggagaaaacttctcacactatggcagc

SEQ ID NO: 340709 - DNA, 50 bp, Homo sapiens
ctgcctgcagccagaaggagatgagggtgttctaaggatacattttattg

SEQ ID NO: 340710 - DNA, 100 bp, Homo sapiens
caggaagtggctttttatcagttgcaacaggactgtgacctgagctgtcagatcaccattcccaaaggctggagagcagcaaaccctgcctcctggattt

SEQ ID NO: 340711 - DNA, 90 bp, Homo sapiens
agatgcccctgataaaggatacgttgttttttgctccactcaagcctgttagaatcaccatggaatacagctccagtgggaaggccactg

SEQ ID NO: 340712 - DNA, 100 bp, Homo sapiens
cgccaagagcgacgccgccgtgtgcccaacggtcggtgtccccggctgaggcagcgcggccgcagcagccctacgtccttctatggccgcttcaggcact

SEQ ID NO: 340713 - DNA, 97 bp, Homo sapiens
ggaattcaagagctgaaggacaaacactggttcagtgaaaatgggtttgaagagggattaagtacattgggacttgtatcaggtctttttagtgcaa

SEQ ID NO: 340714 - DNA, 50 bp, Homo sapiens
tttgcatccggagagtggacaagaaaagaagatggcgaattagaagatgg

SEQ ID NO: 340715 - DNA, 88 bp, Homo sapiens
agaggccgcggaggagaagccggaggaggacaacgactaccaccgcagcgacgagcagggctttgttcgcgggggtcacagctctcat

SEQ ID NO: 340716 - DNA, 77 bp, Homo sapiens
ccaatgttggagccgtctgcaaagtgtccccggcaagaaggttatttcttatgagggtcatggatatcccctatcta

SEQ ID NO: 340717 - DNA, 87 bp, Homo sapiens
gcgggctcgagagctcgccccgaacgggggtcttcctcctccgccgttgacagtcatcaagagttcatataactagagctgtcctgg

SEQ ID NO: 340718 - DNA, 75 bp, Homo sapiens
ttgtagcctaccacgcagctgggaaaaaggctttggcaaatgttcctcctgctgatcaagagaagctttttatcc

SEQ ID NO: 340719 - DNA, 75 bp, Homo sapiens
aaggatcgcggggcccggagaggtgataacgtggtgctggaccagacctacctgtggcagggtgttcgagtggcg

SEQ ID NO: 340720 - DNA, 75 bp, Homo sapiens
aaagatccccgttcctggagattctgattgaggtggtgcgcgtgggcagggcgcggggacatggggcccgacatg

SEQ ID NO: 340721 - DNA, 96 bp, Homo sapiens
ctacgagctgtttctcatctttatactcttccagtatggtttgaagtggtgaacatggatttttctcggcttcacatgtacagtcctccccagtgt

SEQ ID NO: 340722 - DNA, 83 bp, Homo sapiens
caacagtaacgaaaaacagggcttgctgggcctaaaggagataacatttatgaatggagatcaactatacttggtccaccggg

SEQ ID NO: 340723 - DNA, 90 bp, Homo sapiens
agcacaagaatcatagcaccgtgacagtggaggaggccaaggccgagaaggaggcaatggatcacttggagtcctttattgctgaatgtg

SEQ ID NO: 340724 - DNA, 89 bp, Homo sapiens
tcgtgcacgacttcgtcgtgggtcagcaagagggccccgctgaccaggtggctgcagggaccggcagcaatgcctgctacatggaggag

SEQ ID NO: 340725 - DNA, 75 bp, Homo sapiens
ctcgccatggccgacgaaaagcccaaggaaagaccacagcaagattctttcattcgtctcctcctagcctggggg

SEQ ID NO: 340726 - DNA, 100 bp, Homo sapiens
ccacattgctgcatttgttctgcctgacttggaccctggaaaacctggccctcttcaatttctgacaaaagatttattcctgacgacattgaatgccacc

SEQ ID NO: 340727 - DNA, 75 bp, Homo sapiens
ctgcctgcatctgctgctgaccctcgtggtacagcagggaagaactggaaactcagagaaagaaactgcccttcc

SEQ ID NO: 340728 - DNA, 83 bp, Homo sapiens
tccactgttcctggaggaatccgagaagagcagagcggagggagccccagacacgaaatcttcccaaggctgcagacaccgac

SEQ ID NO: 340729 - DNA, 51 bp, Homo sapiens
gtgaaggacccggagccgaaacaccgctgaagctgagggtcagaatgatac

SEQ ID NO: 340730 - DNA, 100 bp, Homo sapiens
cctgggctggggcaggagccgggaaaactgaggctgccatcaaaaacttcagtccctactacagtcgtcagtactctgtggctttctgcaatcacgtgcg

SEQ ID NO: 340731 - DNA, 90 bp, Homo sapiens
atttgtggtgtacttctgggaccttcaggactaaatagtattaaggagcgagttcagaagacctttcctcacccaattgataaatgggcc

SEQ ID NO: 340732 - DNA, 100 bp, Homo sapiens
catcttacccagtggaacctaagaaattaaattctccagatcgttctgcagtgggagcgtgtgactgcggaagctgtgaagccacgggagacctcggagc

SEQ ID NO: 340733 - DNA, 100 bp, Homo sapiens
aaacgcaagaagtacaacgtgccggtccagacacctggatttcattagcatcatgacctacgattttcatggagcctggcgtgggaccacaggccatcac

SEQ ID NO: 340734 - DNA, 90 bp, Homo sapiens
aacaagtgtctttggttataaattatgatctacctaccaatcgtgaaaactatattcacaggaaagaccacagcaagattctttcattcg

SEQ ID NO: 340735 - DNA, 98 bp, Homo sapiens
gtacctgtactcctctgaggactacattaagacctggaatcatttttctgataatgaggcagagcgggttaaaatgatggaagaagtggaaaaacttt

SEQ ID NO: 340736 - DNA, 100 bp, Homo sapiens
ctgtgatccctcaagactggtccacggagtgtatgaccacaaacagccatcaagagtcactgctagttggattgaagcacacctgccagatgattctaaa

SEQ ID NO: 340737 - DNA, 83 bp, Homo sapiens
cttcgaaagcatcatccacgagttcgacccgtggctcttgtcaggatggtgaagctgttcatcggaaacctgccccgggaggc

SEQ ID NO: 340738 - DNA, 83 bp, Homo sapiens
tgtctttatctgctgtcaaggatcttgtgtgctccatagtttatcaaaagaattaaacaaccaccatgtcgagcaaaaaggca

SEQ ID NO: 340739 - DNA, 99 bp, Homo sapiens
ctgattggcaacatgttagctttgaagtggatcctaccagatattccgaggccgggatgtgacgctcctctacagccagctgcaggtcttcttctccag

SEQ ID NO: 340740 - DNA, 75 bp, Homo sapiens
gcccgcaggtgctatgctgtgggccccgctcagggacagagcagaatgggctgatatagatccggtgccgcagaa

SEQ ID NO: 340741 - DNA, 97 bp, Homo sapiens
ctcctcggccacctcctccgcggacgccggggagaacccagcaaagaacagtctgaacttgatcaagatttggatgatgttgaagaagtagaagaag

SEQ ID NO: 340742 - DNA, 99 bp, Homo sapiens
gactctgcaccctgcccagaggtccctcagcaaagatggtacaaaagagtctttggaggatgcggctttgatgggacgctgtgcagagctgcaagtccg

SEQ ID NO: 340743 - DNA, 82 bp, Homo sapiens
ggggaagcagtgggaaaatcgcaaggaagccggctcaccaaccaccaggagctgtgggccttcatcgtcaccaacctggcga

SEQ ID NO: 340744 - DNA, 100 bp, Homo sapiens
aaaaaggataaggagatcatagcagagtacgatactcaggtcaaaggaagcgaaatgtggtgattttaaagctgttatagtggaagtatcaggacaagcc

SEQ ID NO: 340745 - DNA, 74 bp, Homo sapiens
tgattctgccaaaacaaaagctctgcaaactgttattgagatgaaggaaccagcagcacaaacactgttggggc

SEQ ID NO: 340746 - DNA, 82 bp, Homo sapiens
gtggagcccttgatggagaaggggcatctggtggctggatctctgctctggtggtgccgaagggcaacacagcagtatccgt

SEQ ID NO: 340747 - DNA, 75 bp, Homo sapiens
gcaagggattgctggctacagcttcagaagaccgaagcgttcgtatctggaagctgctgatgcaaggaatcccct

SEQ ID NO: 340748 - DNA, 100 bp, Homo sapiens
gcaagatggcggacgagaaggacagggaagcctctgaagagccaatccattcaggatgggaaaccacgcaggcaaacgagaattaaatgccgagaaggcc

SEQ ID NO: 340749 - DNA, 49 bp, Homo sapiens
ccgtggcctccaacctgcaggacggcggctgtgagtgtggaccccttct

SEQ ID NO: 340750 - DNA, 75 bp, Homo sapiens
caccaaatgttgacctgacgaaattccacaaaacctcttctggaaacatgctcctgatatggaagatatattgac

SEQ ID NO: 340751 - DNA, 98 bp, Homo sapiens
ggatggaagggcaggacgaggtgtcggcgcgggagcagcacttccacagccaagtgcgggagtccacgtgcccttgctaccagttccgagccagccga

SEQ ID NO: 340752 - DNA, 98 bp, Homo sapiens
ttgttggccgaattacactaaatctttggagaatcatgagaaatgagtgagaaagatcagtctaaagaaaaggagaagaaagtgaaaaaaacaattcc

SEQ ID NO: 340753 - DNA, 83 bp, Homo sapiens
gcggttgaagagcctagcgacgaggagccggctttgagcaggtcgttccaggggtagaggaggcatgaaggatgaccgtcggg

SEQ ID NO: 340754 - DNA, 73 bp, Homo sapiens
aaaccttttctctgctcagtaacggcactgcggctggcgtggcagatcagactgtgtacagtgccctgggcct

SEQ ID NO: 340755 - DNA, 95 bp, Homo sapiens
acctgactctctgaggctcattttgcagttgttgaaattgtccccgcagttttcaatcatgtgcctggctctctggctatgaaaatcctgtggtg

SEQ ID NO: 340756 - DNA, 124 bp, Homo sapiens
gttgagaggaagaaagggcaatttagccatctgtgtgattatcctcttgtttatcctggctgtcatcaatttaatagaacaggagaaagagccgcggtggctgacattacactccaactgggag

SEQ ID NO: 340757 - DNA, 74 bp, Homo sapiens
cagatcggaacggaggcctgtggtatgtgatcgaatgtcctaactgtggcgtggtctatcgtagtcggcagtac

SEQ ID NO: 340758 - DNA, 74 bp, Homo sapiens
gggaaaatgactgcatgttcccctcaagagtccagcctctgatgaagcaggagagaaagaagccaagtctgatt

SEQ ID NO: 340759 - DNA, 127 bp, Homo sapiens
tgccggggcaggggcggaggcggaggcagaggtggaggcgctttgaaagcggcaacctttggcactgcatccatgagcatgcccacaggattcggcactcctgctccctacagtcttcccaccagct

SEQ ID NO: 340760 - DNA, 83 bp, Homo sapiens
cccaggcgcggagggaagacgccctggtgctcaccaagcaaggtcaaaatgcagatcttcgtgaaaacccttaccggcaagac

SEQ ID NO: 340761 - DNA, 107 bp, Homo sapiens
tttggggggaaactaggtcgatggtcggcggcgcccggatgggcagctgaggtgctggagaatctggtaaaagcaccattgtgaagcagatgaggatcctgcatgtt

SEQ ID NO: 340762 - DNA, 82 bp, Homo sapiens
tcaagatgatatttattcaccaaacaaggacacaatgtttgcacgaggactgaagaggaaatgtgttggccacgaggaagac

SEQ ID NO: 340763 - DNA, 88 bp, Homo sapiens
ctgtccttcctcaggggttccagtgcgaggaaaagcacctccacgttttgatcaacaatgcaggagtgatgatgtgtccgtactcgaa

SEQ ID NO: 340764 - DNA, 75 bp, Homo sapiens
tggtcttaccacttatcatctccagtcttgtcacaggagcccagtttcctccaattgcagcacaagaccttcctt

SEQ ID NO: 340765 - DNA, 98 bp, Homo sapiens
ttaaaagattatgcgttcattcattttgatgagcgagatggtgctgtcaagatgggaaagggctccttcaagtatgcctgggtcttggataaactgaa

SEQ ID NO: 340766 - DNA, 50 bp, Homo sapiens
acaaatctccctgccgcagccagataccccagaatcttccatgctccgtc

SEQ ID NO: 340767 - DNA, 75 bp, Homo sapiens
gggacgcgacgcgccccgcctcccccgtccggtccctctctccacggctgatcagctgaccgaagaacagattgc

SEQ ID NO: 340768 - DNA, 100 bp, Homo sapiens
agaactctgtcaaatgaagaacactttcaagaaccaggtgctgtgattgtctccacgccccaggacatcgcattgatggatgcacacaagggtgctgaga

SEQ ID NO: 340769 - DNA, 82 bp, Homo sapiens
aatatctgtcttcggtggactccttcggcagtccacccaccgccgccgcctcccaggagagtcgcggttgctgatcgtggtg

SEQ ID NO: 340770 - DNA, 100 bp, Homo sapiens
atcctggcatggatgtatacggaggagaaaatattgaactgggaatcaagatcgaaagctgctttgcgtcgcagttggagcagcacccccaccgcaggtg

SEQ ID NO: 340771 - DNA, 100 bp, Homo sapiens
aactgggaggtggccatcttcggaccccccaacaccctctacgaaggcggctacttcaaggttttgaacgaagaatgtgatcagaactggtacaaggcag

SEQ ID NO: 340772 - DNA, 76 bp, Homo sapiens
gtttctggtgggatcgttggctatgtaaaaacagacagtcagtcggatgcggagactgcagccgccgcgggcgaag

SEQ ID NO: 340773 - DNA, 100 bp, Homo sapiens
tggaacagtttcagctggcatggtactggatatagtacaggtttacacagtaaacaatgtgaatgtgatcaccaaaatacgcacagaacatctgaccgag

SEQ ID NO: 340774 - DNA, 100 bp, Homo sapiens
tctcaatgccgctgccctgcgcttctcccagctgcaggctcatgatggagcagtccaagaagtcctccctcatggtggcccgcagtattctcaacaacaa

SEQ ID NO: 340775 - DNA, 98 bp, Homo sapiens
aagcaccatgacgtccatccatttcgtggttcacccgctgccgggcaccgaggaccagctcaatgacaggaagctcttcgtgggcggtcttgactgga

SEQ ID NO: 340776 - DNA, 75 bp, Homo sapiens
cggacagtgcagggaagcaactgcagagggaatgcctggctgcgcacctaggcggtaacgatggaaatcactccc

SEQ ID NO: 340777 - DNA, 85 bp, Homo sapiens
cgttgctggtgcgagtccttaggtggaggagacactgaagcgactgcagagccagaagggagtgcagggaatcatcgtcgtgaac

SEQ ID NO: 340778 - DNA, 82 bp, Homo sapiens
acaagcaccccaataacctcaaggtgcaggagaacccggggaggaggcccaggctctgctggagggcttcgagggtgagatg

SEQ ID NO: 340779 - DNA, 100 bp, Homo sapiens
ggacagtctggcccaggctggcgaggtcacaccgacaaatctgaagcgggtttgccaggggagtgtacccgtctccccagcctgggccacccggtccaca

SEQ ID NO: 340780 - DNA, 100 bp, Homo sapiens
tgcagccacctgagcagctttgcgatccttatggctcattatgacgtggagcacatccgcgtgggctgggagcagctgctcaccaccattgcccgcacca

SEQ ID NO: 340781 - DNA, 75 bp, Homo sapiens
cttgctgctttttctaactatttcaagatgatatttattcaccaaacaagaaagatcatacatggaagcgaatca

SEQ ID NO: 340782 - DNA, 101 bp, Homo sapiens
ccgggatcaaagtgtaccagtcggcagcatggttacatggacacagaacagtatgaagaagcagtacgagactatgaaaaagtataccagacagagaaaac

SEQ ID NO: 340783 - DNA, 75 bp, Homo sapiens
aagctaccagagaatcaagctatccaaatgcgattagttgatgtggcctgcaagagagacaagagagacacctcc

SEQ ID NO: 340784 - DNA, 76 bp, Homo sapiens
gcaaagtgaattgcagagtcaggatactgctggtcaagagaggtttagaacattaactcccagctattatagaggt

SEQ ID NO: 340785 - DNA, 99 bp, Homo sapiens
gggctgagctagctgtgttccaccgggatgtccacatgctcctggtggatctggagctgctgctgggcatagccaagattcatgttacatgtaaagctg

SEQ ID NO: 340786 - DNA, 96 bp, Homo sapiens
cggaccggatggcaagaatcagctggggcagaagcgcgtggtcaagggcttatgatttcttctcgggtttgaaacatgcccccagatgagcaagac

SEQ ID NO: 340787 - DNA, 100 bp, Homo sapiens
tagacctccagattgtaaattccagtttggttccccagggggtagtattgatgatggaaattttcagaaatctggttttcaaaattcacttctacagatc

SEQ ID NO: 340788 - DNA, 75 bp, Homo sapiens
gaataatttgcatcagcaattggcaaaatatatccttggaacagaagatcttattgtggaagtgacttccaatga

SEQ ID NO: 340789 - DNA, 90 bp, Homo sapiens
gatgtgtctgacgtcatcaggcttgttcaagacacaccggaggcgacggccatggccacaggctgtggaaaatctctgttctcacaaagt

SEQ ID NO: 340790 - DNA, 74 bp, Homo sapiens
gagaaatgaaataacctttgacaagattttcaatcagaaaattgggaatagcatttcaaggttcagtggaggag

SEQ ID NO: 340791 - DNA, 100 bp, Homo sapiens
tgccaaaggttactcccagcagtgccatcagcagcatagcaagggaacacaacagtagatgagttaatgatgagactcatggctgcaatggagatcttca

SEQ ID NO: 340792 - DNA, 99 bp, Homo sapiens
ccttagctgtgctcgcgctactctctctttctggcctggaggctatccagcatcttcgtgaagactctgactggtaagaccatcaccctcgaggttgag

SEQ ID NO: 340793 - DNA, 73 bp, Homo sapiens
gaaaacgtggttgtagagttccgtgactcccagccacccaggctactttgggaaagttggtatgaagcattac

SEQ ID NO: 340794 - DNA, 88 bp, Homo sapiens
acatagacctggaccagccagaggacgcgggctctgaggatgagctggaggagggggttggtcaaagaaaaagtgatgtatgaaaaag

SEQ ID NO: 340795 - DNA, 50 bp, Homo sapiens
acactggtttggaagttgcaatcaaaatgcgatgtcaccatttctacctg

SEQ ID NO: 340796 - DNA, 100 bp, Homo sapiens
ctggtctctcttacctgctccccaacgtcttaacttgcctccgacgtcttcacggtagctacagcaagctgggtagcaggcagatccaaaggatatcatg

SEQ ID NO: 340797 - DNA, 100 bp, Homo sapiens
ttcaactaccaggtcgccaccaagcagctcctgttccgactgctgggctcagtttatgaacctcttaaaagcattaatcttccaagacctgataatgaaa

SEQ ID NO: 340798 - DNA, 100 bp, Homo sapiens
agcgtgactgccctggtgcagtgtgtcctgcgggccaccaaggattatatgcgtcaggcaggagaagtgacttatgcagatgctcacaagggacgcaaaa

SEQ ID NO: 340799 - DNA, 89 bp, Homo sapiens
tgtccaggattctcatggcagcccctggcatgggaacaacatcaagcctttttgtatcagttaatgcaacatcaccaccagcagcacca

SEQ ID NO: 340800 - DNA, 80 bp, Homo sapiens
cagaatctaaaaatgctgcgtatagtggaaccttatgtgacctggggcttaaagcttttcaagccaggccaagaagctgt

SEQ ID NO: 340801 - DNA, 75 bp, Homo sapiens
gagtgactgcgtcaggcatctcaatcatggagaagctaaaacttacttatgaggaaaagtgtgaaattgaggaat

SEQ ID NO: 340802 - DNA, 75 bp, Homo sapiens
agccacgatgatcgcgggctcccttctcctgggtgatattcatgaggatttttgcagcgtttgcagaaaaagtgg

SEQ ID NO: 340803 - DNA, 95 bp, Homo sapiens
gatcacctgtctggagcaaggaaaagatccctggaatatgaagagacacagtatggtagccacacccccaggtcctagcagaagatgtgactcag

SEQ ID NO: 340804 - DNA, 75 bp, Homo sapiens
ggcaagtgagagccggacgggcactgggcgactctgtgcctcgctgagggagaactcgagagagggtcctcgagg

SEQ ID NO: 340805 - DNA, 83 bp, Homo sapiens
ggagatccgaaggaatgaaatccgggtggaagttaaacgagctgagcctcgggacagcaagagccaagcgccgggacagccag

SEQ ID NO: 340806 - DNA, 73 bp, Homo sapiens
aagaagcgggccgcatgcctgtgtttccgcagcgagagcgaggaggagatcctggctgcagctctgaccgaat

SEQ ID NO: 340807 - DNA, 74 bp, Homo sapiens
atatgccaccagcatttattaagaaatgggtcctgatgaatatgaagagatggaagaagaggaggaggaggaag

SEQ ID NO: 340808 - DNA, 101 bp, Homo sapiens
tttcaggccccggacaggaggcagtgccgcttcggccgaaggcccgagcgcccgaggcgtctgggatggtgtgggaccggattccagaggggtgactacca

SEQ ID NO: 340809 - DNA, 75 bp, Homo sapiens
tggaagaggacgggctttaggctggaagcgccttagaggagccatttttccagaacaatgctaaagtagctgtgc

SEQ ID NO: 340810 - DNA, 50 bp, Homo sapiens
ggcggccctacgtagcctggcttctggctataatgatccagccttttatg

SEQ ID NO: 340811 - DNA, 83 bp, Homo sapiens
aaggtggcgatgttggtccaagggaactgggtggtgaagaggactttgtgttttatgccccacgtctgagaatcaacaagcgg

SEQ ID NO: 340812 - DNA, 75 bp, Homo sapiens
agtggagctggtcgcagatcctgagacccggacagtggcagtgaaacagggttttctgcccaaggatttgcaagc

SEQ ID NO: 340813 - DNA, 90 bp, Homo sapiens
accggagcgccgctcgccgcagacttacttccccggctcagcagggaaagatattaataaggcagcggaaagaagaaatatgaatacggc

SEQ ID NO: 340814 - DNA, 97 bp, Homo sapiens
cggggatctgtgagtcttctggcaaacagtgtttgcctctggttcagctcatacaacagcttcttaggttcttgatagtccacaatgggtgaaccac

SEQ ID NO: 340815 - DNA, 100 bp, Homo sapiens
ggactagcttcttcgctaattttgacacagaaattcctttcctgctagaactttcagaatctcaggcgggtgagggagaagatgtcaaccggacactaga

SEQ ID NO: 340816 - DNA, 101 bp, Homo sapiens
atctgcccacccctcctgtaacccagcctgtttcacttcttgaggaatggcttcttgtgggaaccaaacaaggacatcttcttctctataggattcggaag

SEQ ID NO: 340817 - DNA, 82 bp, Homo sapiens
cggttgcttgggccagaaggttctctggtggaggcgctcttcctggtgtcccgcccagtagtggccgatacgacatggaatc

SEQ ID NO: 340818 - DNA, 75 bp, Homo sapiens
tgcttcctctgcgccagaagaaggcccacctgatggagatccaggtgagccagcaactgcagaccatgttccacc

SEQ ID NO: 340819 - DNA, 90 bp, Homo sapiens
ccaatccccggcagctctctcagagaaagcagcagctgccaacatagatgaagtgcagaagtcagatgtatcctctacagggcagggtgt

SEQ ID NO: 340820 - DNA, 100 bp, Homo sapiens
cacaagcaaccatggcaggccaagatctcagtcattacccctttgctgatgcaagtaagggtgatgacctgcttcctgctggcactgaggattatatcca

SEQ ID NO: 340821 - DNA, 75 bp, Homo sapiens
tttcacagctgattcctgggagcacatccatttcattggcaaggctgagctggctgaccgacccaatccccctac

SEQ ID NO: 340822 - DNA, 75 bp, Homo sapiens
ggtttccaggatcaaaactaacctttcaggaattgaatgatctggcacgggaccctccagcacagtgttcagcag

SEQ ID NO: 340823 - DNA, 74 bp, Homo sapiens
tttcagttcactaatgaagcccgagaaatgccctctgcccgaggagatgctcagctacgcccgggatgacaccc

SEQ ID NO: 340824 - DNA, 90 bp, Homo sapiens
ccgggagctctcccgtctcacaggggataagaagtttcaggtgaccattgtgaggtagatattttgttctaattttccagatgaggaagc

SEQ ID NO: 340825 - DNA, 50 bp, Homo sapiens
ggagaatgcgctcttcaagcggatcttgttcattcagcagacaacacaag

SEQ ID NO: 340826 - DNA, 100 bp, Homo sapiens
gtgaagaagcaggaggctaagaaagtggtgaatcccctgtttgagaaaaggcctaagaattttggcattggaaggatgataaagactatgctttaaaaca

SEQ ID NO: 340827 - DNA, 75 bp, Homo sapiens
cggaagcggagagcaacagcgcgccggtaaacctagcctttaagcaacctggaaagaggctagaacaccaaggaa

SEQ ID NO: 340828 - DNA, 101 bp, Homo sapiens
gcgctgagccctacaacacccccagcggccgccggctcccccacgaggagcagtatagcatcaagttctagaggaattgggagccattgcaaatctgaggg

SEQ ID NO: 340829 - DNA, 75 bp, Homo sapiens
cagcagccagtattcgggaaaggcagacagaaggtagaagatagcaccatgccgattcgtcgaactgtgaattct

SEQ ID NO: 340830 - DNA, 75 bp, Homo sapiens
cgaagatgaacagggttcctggggcatcgacgatctccatatttcattgcaagctatgctaagaaggaatctgat

SEQ ID NO: 340831 - DNA, 100 bp, Homo sapiens
tgctctaaaccttatagcctgcttatgggggaagattaagcctgatcaagatgacaacctcccaaaagcaccgagacttcgtggcagagcccatggggga

SEQ ID NO: 340832 - DNA, 80 bp, Homo sapiens
attaggtgtggaaagaaacccagccagaaagcaacagtgttaccagcattagtgccagcagtagttcccaagggctgtct

SEQ ID NO: 340833 - DNA, 75 bp, Homo sapiens
gagtcagggcgctgagggagcgttgacagggaagcagccggatggatgaccattctgccccccttggagaaactg

SEQ ID NO: 340834 - DNA, 90 bp, Homo sapiens
caacaatgtgccgggttccgatttcagcatcggggcagacaccgccctgaacactatcaccgacggaattcctggggaagtcggagcctg

SEQ ID NO: 340835 - DNA, 101 bp, Homo sapiens
caacagcaccagcagttcctggagaagcagaagcagcagcagctacagctgggcaagcaatacttcatgctgttgctgctgactgatggtgctgtgacgga

SEQ ID NO: 340836 - DNA, 100 bp, Homo sapiens
cccagctgcccggtgcccgaggaggcagccaagctcatggcctgccactgcgtgcataaaataccatgaggagtttgagaagagccgcatgggccctagc

SEQ ID NO: 340837 - DNA, 100 bp, Homo sapiens
gagagcgcctggaggctcgagcggaggttatttgctggtataaaggatggagaaagcctgcagctctttgaacaaagttctcgctctgcgcataaacaag

SEQ ID NO: 340838 - DNA, 100 bp, Homo sapiens
ccggagaggagcatgaatggagcaaaatggcggatcatgtgcagagatcctgcatattttgatgaaaattggctaaacagaatcaaaactgaagtaggag

SEQ ID NO: 340839 - DNA, 75 bp, Homo sapiens
gctgcgaggaaaatggcggcgggagagtaacagttacccctcaatgagcgacccctacctgtccagctattaccc

SEQ ID NO: 340840 - DNA, 82 bp, Homo sapiens
gaccccccccgcgcctgcacttagccccgcgcccgagggtgcttcaaggatgaccgcatcgtcttctggacttggatgttct

SEQ ID NO: 340841 - DNA, 75 bp, Homo sapiens
ctcagtttgtgcaggacaccgacatggaacagggactcactggggaagtaaaagattatgagcctccatttggtt

SEQ ID NO: 340842 - DNA, 114 bp, Homo sapiens
ggacaagaatatgctgccaaaattatcaacaccaaaaagctttctgctagggattacacccatgctaatttggtggataaggcattgcagctcttgaaggaaagaatactgaaa

SEQ ID NO: 340843 - DNA, 100 bp, Homo sapiens
ctggaagacaacgctctctgctgagcagaacgcacacatggaggctgtcctgcagagaagtgccgcgcacatgagagacggggtttcgccatgttggcca

SEQ ID NO: 340844 - DNA, 50 bp, Homo sapiens
gtttgtcatcatgtgagagagaatagggtgaaggtacgctcgagcgtggt

SEQ ID NO: 340845 - DNA, 83 bp, Homo sapiens
ctggcatctgtaaggtgcggccgccgccggttaaccccaaagattggctttccttggagtgaaatcaggaacatctctttcaa

SEQ ID NO: 340846 - DNA, 100 bp, Homo sapiens
gaaaaggggacacggcggtgcttagggaaatctaagttaatttcaaggcattcgaaatggggaaagactattattgcattttgggaattgagaaaggagc

SEQ ID NO: 340847 - DNA, 90 bp, Homo sapiens
tgatcaaaccagtgcagagaatcatgaagtatcagctgttactgaagttaagtgggcagaccaacatccacctcagcaaaaacttcttcc

SEQ ID NO: 340848 - DNA, 82 bp, Homo sapiens
atcctcggctccctgctgggcgggaccctggtctccgcgtacggttacagaatgtctgaaggggacagtgtgggagaatccg

SEQ ID NO: 340849 - DNA, 74 bp, Homo sapiens
aaatgtccttaaagcaattgagcaggctgatctactgcaggagctgccactgcagagccccgccatggaagaca

SEQ ID NO: 340850 - DNA, 144 bp, Homo sapiens
cacatccttgtctgtgaagctaaactcaatgctgctgtgtgggaagaagatttgtaaagaaaactcttagcgcaatgtccctgctcttctctcgatgcaactctatcgtcacagtcaagaaaaataagagacacatggctgagg

SEQ ID NO: 340851 - DNA, 80 bp, Homo sapiens
ccttcaaccactatctcagtgcaatggacattatacaacgtgaaggctgagatctttcccccttcgggaatggagtattg

SEQ ID NO: 340852 - DNA, 112 bp, Homo sapiens
agaagaagatccgaatatctttgcctatgcctgtgatttttctccaagagccattgaatatgttaaggatgctcgtcagaagttccgctctgttctggttgaagcaacggtg

SEQ ID NO: 340853 - DNA, 101 bp, Homo sapiens
ttgaaggctcctacatgtgttcatgccacaaaggctatacccggactccggaccacaagcactgtagagaaataaacggtgactggcaaagagctgatgca

SEQ ID NO: 340854 - DNA, 51 bp, Homo sapiens
ccttagtaaagtctctattttaggtacaggtgaacaaaggcagagtaaact

SEQ ID NO: 340855 - DNA, 96 bp, Homo sapiens
acttcctagtaagggacgtctctggagagattctgaggtgtttgagatgctgagcacctgaagaccctgtccctgtcctacaacgccctgggagcc

SEQ ID NO: 340856 - DNA, 100 bp, Homo sapiens
cttacaaggaaatcctaccttgcatggattgggttttcagctgaagggagtatgagcctgatgtgggcagaatccagatgagctggccagtgctgtgaag

SEQ ID NO: 340857 - DNA, 83 bp, Homo sapiens
gcctgagctgccgcctcctccgccgcccgaaaacccggagtgccccgcacagcactattcctgatcagagaactccagttgct

SEQ ID NO: 340858 - DNA, 90 bp, Homo sapiens
cggaaaatggccgccgccgccgccgccgcgccgagcggaggaggaggaggaggcgaggaggagagactaaatgaaagctcattagcatct

SEQ ID NO: 340859 - DNA, 83 bp, Homo sapiens
gtcatcagattttgccaagattattaacaatacagagaatcttgtgcgggaattgctgaagacgcgacatgtcaacatcttgc

SEQ ID NO: 340860 - DNA, 75 bp, Homo sapiens
ctgagaaggacgcgcagtccatctctctcagaatctgatgttccagcagaaatccaggtgttaaaagaaccccta

SEQ ID NO: 340861 - DNA, 90 bp, Homo sapiens
tggcctgctggatggagtgatgatggttcaatgatgaggtgaagcacatcaaggtggtggagaaggacaactggatccacatcacagagg

SEQ ID NO: 340862 - DNA, 82 bp, Homo sapiens
cgaggagctcatcgggcagattagcgacatccgagtgcagaacctgcaaggtgctggggagtcagggaagagcaccatcgtc

SEQ ID NO: 340863 - DNA, 98 bp, Homo sapiens
aagcggccgcggccagggaacggggcatcgcggttccaacggcatgaattgctggaggaagcccggagacaaggtttaccttttgcccaatgggacgg

SEQ ID NO: 340864 - DNA, 100 bp, Homo sapiens
cttcatcctaccgctccgcccgagctatgaagacatgattggtgaggaggtgccatcggatcaatactactgggctcctttggcccagcatgagcgagga

SEQ ID NO: 340865 - DNA, 98 bp, Homo sapiens
gctaaccctttactcgcgacctttcgcttcaccttcacagcagccctgcgagatttgcttgtaaatgcatcacgaagaggcagcccagaatgaagaaa

SEQ ID NO: 340866 - DNA, 100 bp, Homo sapiens
gctccggctcctggaggacaagaacggtgaggtgcagaacctggctgtcaagtgccgtgttgccgcccgctgtgctatgagcagtcagagcgccgtctcc

SEQ ID NO: 340867 - DNA, 99 bp, Homo sapiens
gtggtcgcgtctcggaaaccggtagcgcttgcagcatggaaatctggcattttttaaagtttgcgccccacaaagaggaaatattccaaaggtactcag

SEQ ID NO: 340868 - DNA, 98 bp, Homo sapiens
gcacccggcattgcaacagccagaacgggtgccaggcttcccgtatccagcagccaccgccgcggccgcctaccgaggggcgcacctgcgaggccgcg

SEQ ID NO: 340869 - DNA, 101 bp, Homo sapiens
atcgaagatggagagagacatcttggcagaagtgaatcaccccttcattgtgaagcttcattatgctgtggatggaaaagcaccacttgctactggagagg

SEQ ID NO: 340870 - DNA, 75 bp, Homo sapiens
gtcaagactgttgtcatcatcctgggctgcaagatcaaggccctgcgggccaagacaaacacctacatcaagacc

SEQ ID NO: 340871 - DNA, 83 bp, Homo sapiens
cctggatctgaggatgtgaaacttaaatttgaagaggaagaggaggaagagccggaaggaaaaccaagtgatgcagaaagttc

SEQ ID NO: 340872 - DNA, 75 bp, Homo sapiens
cacgagcgaagtacagcttatggatgggtcagcccaaggccaaccccactgtcactctgttcccgccctcctctg

SEQ ID NO: 340873 - DNA, 75 bp, Homo sapiens
caccttgcccactcccatggtcctgcagaggagaacatattgtgatgttcgtgcctcagagctaaaactatgagt

SEQ ID NO: 340874 - DNA, 90 bp, Homo sapiens
atccgtttgttcaggaaccaccagtgacagagactttccaggacctgtccaaacaagtggaaatgtcttatggcactgtccgggattctg

SEQ ID NO: 340875 - DNA, 93 bp, Homo sapiens
ctggggccagggaaccctggtcaccgtctcctcagacgatgccactgacaaggacctgtcggacctggtgtctgagatggagatgatgaagat

SEQ ID NO: 340876 - DNA, 98 bp, Homo sapiens
agaccaagccaacgatggtctttcctctgcattgctgatcttgtacttggattcagcaaggaaccttccgacctgcgaccgcatcaagcagtccgcca

SEQ ID NO: 340877 - DNA, 100 bp, Homo sapiens
ctgaaccctcgcggccgcaacgtgtgccgtgctcccggggttcacacctccaggaatggatagatcctctccagataacagcccagtgcacgggatgtta

SEQ ID NO: 340878 - DNA, 98 bp, Homo sapiens
ggatatcaagagtataatgtctatggtgaagtcttttgtacagtggttaggtttctttacctccagaaagaagaatattggccccttgaattctggaa

SEQ ID NO: 340879 - DNA, 75 bp, Homo sapiens
acaggactgacgaatcttctggatgtccctggattgaatattttaataagcggaaaacctactttgctcacgatg

SEQ ID NO: 340880 - DNA, 96 bp, Homo sapiens
gcctcctgagtagttgggattacagtcaccaaaggcttcgtgtacagctctttcctaaagccctacaatcctcgccgcagccactccgatgcctcc

SEQ ID NO: 340881 - DNA, 98 bp, Homo sapiens
cccaaagcaattacacccagaagattacctttgactcttgtcccaggactatacaggctccaacccaagttccagtggttgtgtctcctaggaatcag

SEQ ID NO: 340882 - DNA, 100 bp, Homo sapiens
taggaggcctgggcctctctgcctgctgtagccgtctgccgcgcccttgttcctgcagctatatcgcaggcaccagtgacaagtgggaaaagctggagaa

SEQ ID NO: 340883 - DNA, 100 bp, Homo sapiens
agagtctgaccgcctcccgcggaggggtggccgccgccgaccacttaattcagtgcacaaatgagatgaatgtgaacatcccacagttggcagacagttt

SEQ ID NO: 340884 - DNA, 146 bp, Homo sapiens
gtcatgagagacacgatgagaagtccttaaaggtagatcactgattcacaggggagcaggcggaggcaaggggccaattcctgtccccccagcagcatggcatcgtgtgctgaaccctctgagccctctgccccactgcccgccgg

SEQ ID NO: 340885 - DNA, 75 bp, Homo sapiens
acaaactgctgagcctgccaatgcaacagccacggaagattaagcagatgactttgaagaagccaaggaaatttt

SEQ ID NO: 340886 - DNA, 82 bp, Homo sapiens
tccaactgcgggacaggaagtggccgtagcggcttgttggataagggctttcagcaatcgtgagaccgtctagtataagaca

SEQ ID NO: 340887 - DNA, 83 bp, Homo sapiens
cccacaagcagatctactactcggacaagtacttcgacgaacactacgagtaccggctcttctcaaccatctgtgagtccagg

SEQ ID NO: 340888 - DNA, 100 bp, Homo sapiens
ttcagttggcaaaccagatatatgacttggcaaagccaaagctaattgagccactcgactatgaaaatgtcatcgtccagaagaagactcagatcctgaa

SEQ ID NO: 340889 - DNA, 100 bp, Homo sapiens
aaaataaatagggaagatggagacaccctctgggggtcctctctgagtcaaatccagtgctggagaacacattcaaatcagttattgcacagattggacc

SEQ ID NO: 340890 - DNA, 51 bp, Homo sapiens
gccatggccttctacgttgtgaaaatggtggaaaaggattattcatacctg

SEQ ID NO: 340891 - DNA, 75 bp, Homo sapiens
aaggccggaagcggccgggctggatcaggatgagctgccactgcagagccccgccatggaagacacgccgttggt

SEQ ID NO: 340892 - DNA, 98 bp, Homo sapiens
tctggagcacttatctgcgccccctgctggttgtgcgaaccccgggcagcccgggaaatctccaagtcagaaaggaaccctaaggactctgcaatatg

SEQ ID NO: 340893 - DNA, 74 bp, Homo sapiens
agcaggactgcgccgcgtcttcctcaagaaaaatatggctcaggagactaaccagaccccggggcccatgctgt

SEQ ID NO: 340894 - DNA, 100 bp, Homo sapiens
tgctgctcagtgtggtggatcatttcaaccgactggcacagcctccaggttggcgggctcatctgcgctggggttctgtgcgccatgggcatcatcatcg

SEQ ID NO: 340895 - DNA, 100 bp, Homo sapiens
catgaaggaggatggaagggcaggacgaggtgtcggcgcgggagcagcacttccacagccaagtgcgggagtccacgcacctgtggaatcctctcaagag

SEQ ID NO: 340896 - DNA, 96 bp, Homo sapiens
gacgccccggggcgggggcgatggcggcggcggcggccggagcttctctcagccgaaaccaaggtgtatgttggtaacctgggaactggcgctggc

SEQ ID NO: 340897 - DNA, 100 bp, Homo sapiens
ctgacgggaccaagttcgcaactggaggacaaggcggtggaagaagatatccccatagcgaaagaacggacacatttcaccgtccgcctgaccgaggcga

SEQ ID NO: 340898 - DNA, 100 bp, Homo sapiens
tgggactagtatcttgcagtctgttaagcctcggagtgaatcagaactcattgatgaactttcagaagattttgaccggtctgaatgtaaagagaaacca

SEQ ID NO: 340899 - DNA, 50 bp, Homo sapiens
ggctgcagcggatcaccggtggactttgtgttgctgaaagagcggactct

SEQ ID NO: 340900 - DNA, 98 bp, Homo sapiens
caacgcacgtctgctcggagatcatttgggagatccaagagattcagtatcactcgctcccttgatgatcttgaggtctcacaagaatcttttcttat

SEQ ID NO: 340901 - DNA, 96 bp, Homo sapiens
gcggtgggccccagccccacagaccagcccagcattcaggtgacgatggcttaatagaatttaccacagttactttagagtctccgaaagcatggc

SEQ ID NO: 340902 - DNA, 100 bp, Homo sapiens
gcctcccaggtagctgggattacagatgaacaagagaactgggcaacccatgatccacatctacctggacaaggaaacaggaaagcccaaaggcgatgcc

SEQ ID NO: 340903 - DNA, 97 bp, Homo sapiens
cggcggtccagggtcctgggcagtcgcgccagagctgagcggagggcgcggcgcgagaacgtatggcacagtcacaagggtgggtgaaaagatacat

SEQ ID NO: 340904 - DNA, 100 bp, Homo sapiens
caccccggagattgctttctggggaagctccccaggtgtgtcctggtagacaactgctcccaggagctggcatagaagcaaacctgcaggaaaagccaac

SEQ ID NO: 340905 - DNA, 75 bp, Homo sapiens
gctgcggagcccgctcacccgctccctagttgctggagaatgtaaccctaatccataaaccagtgtcgttgcaac

SEQ ID NO: 340906 - DNA, 50 bp, Homo sapiens
cttccaccaaccgccagatcgggaagatgagaatgtgcctactgctcctg

SEQ ID NO: 340907 - DNA, 82 bp, Homo sapiens
tcggcagcgcccgcggagacgtgaagaggaggcaagtgaggcctatctggttggcctttttgaagacaccaacctgtgtgct

SEQ ID NO: 340908 - DNA, 75 bp, Homo sapiens
ccctgagaaccgtttacttccagaagattggtggagcttgatctgaaggttcgagaaatggctgctactacctta

SEQ ID NO: 340909 - DNA, 75 bp, Homo sapiens
ccaactccaatgggcctttccagcccgtggtccttctccatattcgagtcctattttgtaacggattatgatcca

SEQ ID NO: 340910 - DNA, 100 bp, Homo sapiens
agaagaccacacactgggaaacatcattaaatcgagctggtggtggctctgagtcatcttgtggttcagtatgaaagcaatttctgcaccgtggccctgc

SEQ ID NO: 340911 - DNA, 75 bp, Homo sapiens
gattccaggcagtgaggcttgggccgctggacccagattcttctaacagagaaaatgccattgaggatgaagagg

SEQ ID NO: 340912 - DNA, 74 bp, Homo sapiens
acatgcatatttgggtccaactgtgaagccagatgataagataaacttctgcactggaggggcctctcctcccc

SEQ ID NO: 340913 - DNA, 100 bp, Homo sapiens
gaaaaggaagcaaatgagctgatggaagatctgtttgaaactatgcatcaaattgcaatttggaggagaggcagcacaagcagaagcctgggcctggcta

SEQ ID NO: 340914 - DNA, 90 bp, Homo sapiens
tgaattcttacaacctctctacgccaaagaaatccagtcccgaccaacaatgcagatcttcgtgaagactctgactggtaagaccatcac

SEQ ID NO: 340915 - DNA, 101 bp, Homo sapiens
gagggggtctctcagtaatgctggggaccctgagatcgtcaagtctcccagcgaccccaagcaataccggaactctagccaagaaccacggcctacactct

SEQ ID NO: 340916 - DNA, 82 bp, Homo sapiens
attgctggtgccttcattcatgaaaagcatgcccatacgattaaacctgcctccaccctgaagttccacatgaagacacttg

SEQ ID NO: 340917 - DNA, 75 bp, Homo sapiens
ctagttgcaggaaaacaagctcagggcttccactgattctacattatgggcaaatccagacagaacctttgactt

SEQ ID NO: 340918 - DNA, 99 bp, Homo sapiens
ttccccaaggggtccgtccgagggatgacctggctcagagtcataggagcagtttttgcaagaaaggatcaaagtgaacggaaaagctgggaaccttgg

SEQ ID NO: 340919 - DNA, 83 bp, Homo sapiens
gtctacgagctgtttctcatctttatactcttccagaaaaaagcctggagcaggagctggccagccccatcctggacattgag

SEQ ID NO: 340920 - DNA, 98 bp, Homo sapiens
cgccttctgccgtgattgtcagtttcttgagggctccccagccatgcttcctgtacagcctgcaaaactaggctattttagcctgcaaaaccccaaag

SEQ ID NO: 340921 - DNA, 100 bp, Homo sapiens
gtcccatttcgcccctcgcgtccggagtccccgtggccaggatggcaatgattcagatgaattcatgtaaaaggagaaaaggagaaaaggacctttgaaa

SEQ ID NO: 340922 - DNA, 98 bp, Homo sapiens
ggaatccctgccccatctgtcgagatcacaagttgcatgttgactttagggtccctgagctgcggaagaaatctcgccgagagtacctggctaagcgg

SEQ ID NO: 340923 - DNA, 75 bp, Homo sapiens
gcatggcttctggggacctttacgagtgccaaagagatggatgagactgttgctgagttcatcaagaggaccatc

SEQ ID NO: 340924 - DNA, 50 bp, Homo sapiens
agacatcgaggtgggagaggagggccgcaagcttcttatcattgggacca

SEQ ID NO: 340925 - DNA, 83 bp, Homo sapiens
tgcagcgggagctggacggcgagcgcgagcggcgcgagaaagagctctttgttcaatgcctagccacctattcctacagacac

SEQ ID NO: 340926 - DNA, 100 bp, Homo sapiens
tggagaatggcatgctggtgacggacagtgcagggaagcaactgcagagcatccttcggaaagctctggacaagatcgcggaaatcaagtctctgttgga

SEQ ID NO: 340927 - DNA, 101 bp, Homo sapiens
ggtgacagtctgcatgtgcagttttcagggagtaactattcccagtcagaggcgctatgtgtattattatagctacctgttaaagaatcatctggattata

SEQ ID NO: 340928 - DNA, 50 bp, Homo sapiens
atgcctcaccaagtcacatgacaagcaaaccatccgggtatggctgaaaa

SEQ ID NO: 340929 - DNA, 90 bp, Homo sapiens
aatatttaatggaaaatcgcttggttaaaacctgacacttttaacagtacggcaagaagaagctgaaatacctgccctacaatcaccagc

SEQ ID NO: 340930 - DNA, 82 bp, Homo sapiens
ttttgccttctgattctaactgcaaaggtatttaccttgctgtggattgctgactggatggtccatcacttctggaggaaag

SEQ ID NO: 340931 - DNA, 75 bp, Homo sapiens
cagagacgcaagagaaaaatccactgccttccaaagaaagtttgcagtatcttcagagtctgaattttgagcgga

SEQ ID NO: 340932 - DNA, 83 bp, Homo sapiens
ctcctcctctgactgcctccaacgtaaaaatattcctgacattcagacaactgacttgtaactgacttataactgacttgtaa

SEQ ID NO: 340933 - DNA, 100 bp, Homo sapiens
ttgaagtcttggcctcggaggatgcagcctttggactcaaggatgttttagaagaatgtatgtctcttcccaagctatcttcttattctggatgggtggt

SEQ ID NO: 340934 - DNA, 83 bp, Homo sapiens
atgtacaactcgactcaagggctgctgatggccggctcagtcagtgctatgtttggcatttctcacaagagtggcaaagatac

SEQ ID NO: 340935 - DNA, 75 bp, Homo sapiens
aacacctgaaggagcacatgaagctgcacagtggctcagcaggagacacagaaggcagcgctgcggtacgagcgg

SEQ ID NO: 340936 - DNA, 100 bp, Homo sapiens
accccagcccgtggtcctgatgccaacagtgtaccagcagggcgttggctatgtgcccatcacagagcactacaaacaccactggtttcccgaaaagccg

SEQ ID NO: 340937 - DNA, 75 bp, Homo sapiens
gccgcatgagcatcgcggagcttgacccgtccatcgctgtggtggatccataaagaacccagccaacccgcagag

SEQ ID NO: 340938 - DNA, 90 bp, Homo sapiens
cttgctcccatctactttcttctctagaatccacgggacgagcctgtggagtgggagacacctgacctttctcaagctgagattgagcag

SEQ ID NO: 340939 - DNA, 106 bp, Homo sapiens
gtcagccaactggggaaagtggaattgaaatcccataaagcctagggactccacgtaccccagctgggtctcattgttccagaactgcattagttaagattaccca

SEQ ID NO: 340940 - DNA, 88 bp, Homo sapiens
gcgctgctgacattgagacctggtgtcagccttacaggaccagaggagcgagagcagcaagaaccacacccagcagcaatgtcagcgg

SEQ ID NO: 340941 - DNA, 100 bp, Homo sapiens
gggactttgaacatgtcggggatcgccctcagcagactcgcccaggagaggaaagcatggaggaaagaccacccatttggcaagaagtacaagcccctgg

SEQ ID NO: 340942 - DNA, 83 bp, Homo sapiens
tctagcggccgggactctgaactatggcgtttaaggaagaaatctctaaacgttttaaatcacatactgaccaacttgtgttg

SEQ ID NO: 340943 - DNA, 101 bp, Homo sapiens
ctgttggagaaataaaaatgacttcccattatgtgattgccatctttgccctgatgagctcctgtttagccactgcaggctccctgactggcagtcctcac

SEQ ID NO: 340944 - DNA, 99 bp, Homo sapiens
cccggagtccggatccgatcccgctctgcacattccaaagtgttatagttttgccgctggactcttccctcccttcccccaccccatcaggatgatatg

SEQ ID NO: 340945 - DNA, 100 bp, Homo sapiens
cgcggggcgacgctggctgcagggacccggtgacagcgtgagaggttcgcagagtcactgaactgatgcaggagcagtcatacctgaagtctgaattggg

SEQ ID NO: 340946 - DNA, 83 bp, Homo sapiens
ccaagtatttgatcctggggagtctgattcagatgacaactgtacagatgtcactgttacagaaaccccagaaccagcgatga

SEQ ID NO: 340947 - DNA, 50 bp, Homo sapiens
aaatgattcatttctggaagcattctactattgatgcctgaattaccaca

SEQ ID NO: 340948 - DNA, 82 bp, Homo sapiens
gtccttctccactttcgccagcccgtgccgcgagcgcggcctgcaggagaagtcaatgaaaggattctattttgcaaagctg

SEQ ID NO: 340949 - DNA, 90 bp, Homo sapiens
tcttcagtcactgtgtcaaatttgttcaagggtatagttaataaagtgtcttctagccacattggctgtttagtacatgggtgtttcaat

SEQ ID NO: 340950 - DNA, 100 bp, Homo sapiens
acactgaagaagtagagtatttcaaccataaagacatcttaattgggcacgaaagagccctggactttgtctcacaagatgaaatgttgacgcccctggg

SEQ ID NO: 340951 - DNA, 87 bp, Homo sapiens
gacggggaggtaccaggtatttgagagcaatcgccaccgctttcctggaacttgagaacacacgcaggacttgaaagatgttactaa

SEQ ID NO: 340952 - DNA, 101 bp, Homo sapiens
aaggaatttacagattatcttttcaacaaatccctagaaatagaaccacgaaaccctaagcctctcccaagatttggtctaaaattcccaggactccacag

SEQ ID NO: 340953 - DNA, 100 bp, Homo sapiens
gtcaccggagcgacagaaaacttggaactaagctggaggacaccgagtactcttatgcagtccccatggttatcaatactctggctgaccatcatcatcg

SEQ ID NO: 340954 - DNA, 100 bp, Homo sapiens
ccaggggctctgggagtggctgccaggcagagaagaggcgatggcggcgatggcatctctcggcgccctggcgctgctcctgctgtccagcctctcccgc

SEQ ID NO: 340955 - DNA, 98 bp, Homo sapiens
agcatttcagataaatacctttgatctaagggttcagcctttcaatgtgacacaaggaaagtattctacaggaacgtcaaggtcgtgggaaataaaag

SEQ ID NO: 340956 - DNA, 82 bp, Homo sapiens
cctgtgacctcctgggtgtaggggccgagtacgcccgggtggtgggatctgaatacacacgctctggattaatcgaattaca

SEQ ID NO: 340957 - DNA, 75 bp, Homo sapiens
attactttgaagtgaagattgtcagcaaaggaagagatggcgtggtgatggtggatgaggcacacgaaaggaccc

SEQ ID NO: 340958 - DNA, 101 bp, Homo sapiens
cccggggacagcatcgcccaggcccctggaaatggaccctcaggaatatgcctttcttatatgttatcaggctacagaccgtatttatcatcagaagcaat

SEQ ID NO: 340959 - DNA, 75 bp, Homo sapiens
cagcagcccgacgcaaaccaaggatctggggatcttcgcactatcccaaggatctatcttgggatcccatggctt

SEQ ID NO: 340960 - DNA, 75 bp, Homo sapiens
gggcacaaggccaggttcccaagagctcaggtgaactaccgaggccaggtggtgagcctgatccggatgcggaac

SEQ ID NO: 340961 - DNA, 100 bp, Homo sapiens
aaactatcaatgcagcaattggagtcactacgtcaccggtgctgccttctctgatccagatatcatggaaatcaggacagtggcagttggaattgtggca

SEQ ID NO: 340962 - DNA, 100 bp, Homo sapiens
agcaaatactcagaaacatccttccagaaggagcgaactgaagaggttctacacaattgctcttcttcatgcatctcctccccaattttgccgagtgctg

SEQ ID NO: 340963 - DNA, 90 bp, Homo sapiens
catgggagacacgccgcttcatcgagctgcctttacaggacgaaagactcctgaaacagactactctttgcctttttgctgcagttggag

SEQ ID NO: 340964 - DNA, 100 bp, Homo sapiens
tgaatgtacacacctcattgtgcaagaaccaaaaggttgctccttgagggcaggacagttcttatggctttatccgttgcgtaagcacagagaggtctgc

SEQ ID NO: 340965 - DNA, 95 bp, Homo sapiens
aattagtgttcaatttaaccagctatttcttagaccaaataaagagaaaatagactttcttcttgaggcaaaacccatttatggcggttggctgc

SEQ ID NO: 340966 - DNA, 75 bp, Homo sapiens
tgcttttatattcatctcaaaaacaaaattctgaactcaggacttggcaacgggacgaccctgggacagtctcca

SEQ ID NO: 340967 - DNA, 80 bp, Homo sapiens
gcctggaggaagagaaggcagctgtgactgaggcagtgcgggccctgctggtggacccccaaaagtacaagggcatattt

SEQ ID NO: 340968 - DNA, 74 bp, Homo sapiens
gtgtgtacatcacccccatggaggccctggcagagcaggctggaaatggaacatttaacagggcaaaactgttg

SEQ ID NO: 340969 - DNA, 75 bp, Homo sapiens
cctggtaactcaaggctaccaagtgaaggaccctgatgtcgcttttgaacagcccctgcacctggcagccagcga

SEQ ID NO: 340970 - DNA, 75 bp, Homo sapiens
aatcgtgaaacttcagaatacttcaagaatagcagaggagcagcttagcagtgtctgcaaaaacgaatcttttcc

SEQ ID NO: 340971 - DNA, 90 bp, Homo sapiens
gagctgagaggagaggcaggtgtgtgcagtgaagcagccgacacgagtcgttgttcataaaacagcttttgaaagttgagagcacacccc

SEQ ID NO: 340972 - DNA, 82 bp, Homo sapiens
caggagtcggcggctcagttgtccatgaccctgaaggtccaggagtacccgaccctcaaggagcacgtgaattgcctctgct

SEQ ID NO: 340973 - DNA, 89 bp, Homo sapiens
gcagggcttggcacgatacgtgttccagtcagtgtaaggcaaacattggtgggcaccgatcttcctgttcattctgcaagaacccaaga

SEQ ID NO: 340974 - DNA, 98 bp, Homo sapiens
gaaaaccttgtatgaggtcaaatccgagaacctgggccaaggcgacaagatggcccactgcgtgaccttggttcagctgtccatttcctgtgaccatc

SEQ ID NO: 340975 - DNA, 87 bp, Homo sapiens
cttagctccatcaaatctcaaacaatttatgagattattgataattctcaaggattctacgttttcaccagtgatcattaaagaatg

SEQ ID NO: 340976 - DNA, 99 bp, Homo sapiens
tgcagctgcctcagttcttagcgcaggcagaagctcctcctggggtagagacagatcttattgatgttggattcacagatgatgtgaagaaaggaggcc

SEQ ID NO: 340977 - DNA, 116 bp, Homo sapiens
tggagagggagaggttgaaggaacagaaaaatgagaagacaactcactggtcctgtccctgctatcagtggggcactgaagaaagcaggactgagtcttaaggacatggatttggt

SEQ ID NO: 340978 - DNA, 73 bp, Homo sapiens
tcgtgtcgtacgtacgccctgagcctctctacatatgacatcgtgatcactacctatagcctcgtggccaagg

SEQ ID NO: 340979 - DNA, 101 bp, Homo sapiens
gcaaaatggcggatcatgtgcagatgcctgaggaaacccagacccaagaccaaccgatggaggaggaggaggttgagacgttcgcctttcaggcagaaatt

SEQ ID NO: 340980 - DNA, 76 bp, Homo sapiens
tctgatattttaggccaaggagctactgcaaatgtctttcgtggaagacataagattctatggaggtgaaacctat

SEQ ID NO: 340981 - DNA, 83 bp, Homo sapiens
tgcagtttgaggctctgaacaagagatcccatttcattctgaaggccggcatccccgttccttaatgggcaagaatttccgct

SEQ ID NO: 340982 - DNA, 100 bp, Homo sapiens
ggatatgaaactggaagacatcctgaactgctttctgaagcaagtttccaagaagctcttcaggaaagcattcctgacattcaagcgcacgagtgggtgc

SEQ ID NO: 340983 - DNA, 75 bp, Homo sapiens
ctgtctcagcagtctacagcacggtcatcatcagatttgaaatatttaaagtggatacaaaactatttcagcaat

SEQ ID NO: 340984 - DNA, 100 bp, Homo sapiens
tgatcatcaagccagacaacttctggcagaaacagaggactaattttggcagttctaaatttgaatttgaggttcaaatggttgtcctgatcctgattta

SEQ ID NO: 340985 - DNA, 98 bp, Homo sapiens
gagaataaaactccagcgagatccgggccgtgaacgaaagcagtgacggaggagcttgtaccaccgacctcgaagtagggggaaaactgcagtggaag

SEQ ID NO: 340986 - DNA, 74 bp, Homo sapiens
ctcatcccaggttgccttggaaaatgccaacgccgtgtctgaaggtgctgaagggcctgaccatcactcattaa

SEQ ID NO: 340987 - DNA, 90 bp, Homo sapiens
ggcgcgggaggtgttcgagaacgaccccgagacggcatgactacggggccccccaggaggcgactctcggggccaacaaggtgatcgaag

SEQ ID NO: 340988 - DNA, 100 bp, Homo sapiens
cggcaggggagagcatggctcagcggatggtctgggtggacctggaggtttttcgttggaatatacgttgcacatttatggcgattctgagtgtgagggc

SEQ ID NO: 340989 - DNA, 101 bp, Homo sapiens
ctggcaggagcggctgcgggctactgaaaagttccagctggagttgatcaaggatgatgaaaaagaggctgaggaaggagaggatgacagagacagcgcca

SEQ ID NO: 340990 - DNA, 78 bp, Homo sapiens
cttctccagcggagatggccaatacaggtgatttggcttctgcacagttaggaggagcaccaaaccgatgggaggttt

SEQ ID NO: 340991 - DNA, 98 bp, Homo sapiens
cctgcgactcctggaccaccgggcgctggtctgctcccagccgtaagactttgaccccgacgcaggcttcagtgattgccgcggatcagaagcctgag

SEQ ID NO: 340992 - DNA, 75 bp, Homo sapiens
ggcgggcctcccgtttctggctccgggctgagcttcctggagaagaggaagcttcgagagctgtgcccaggagtg

SEQ ID NO: 340993 - DNA, 100 bp, Homo sapiens
taatctgcttccatcccgccagtttgggcaaatgttctctagttacccaactaccactgtacttcccacacgtcgggcacagactcctccaatatcttcg

SEQ ID NO: 340994 - DNA, 89 bp, Homo sapiens
ccgaacaattggaggagacctggtggaaaaggttgatctcatagacaagtttgtacatccaaagtctccaggaaacctagagaaaaacc

SEQ ID NO: 340995 - DNA, 100 bp, Homo sapiens
ttttggcaaaccatgaatcgagaatggaaaggaatagacaggctacgcctggacaaatactatatgagactttagaagacagctttccatcgacactagg

SEQ ID NO: 340996 - DNA, 82 bp, Homo sapiens
aacagttggatcttgctcagtctctgtcagaggaagatcccttgtctattatcctcccagtccacaacgctgaaccgtggct

SEQ ID NO: 340997 - DNA, 74 bp, Homo sapiens
gtgatgcctgctagccaaaaggagatgtgaaagctggaaacattcttcttggagaagatggctcagtacagatt

SEQ ID NO: 340998 - DNA, 50 bp, Homo sapiens
cagcattcctacagatataaatagggataaagtaattcctaataaagtgg

SEQ ID NO: 340999 - DNA, 83 bp, Homo sapiens
cgatgagtggccgcgcggaaggagctggagacggtcgtagctgcggtcgcgccgagaaagtaagactttgaccccgacgcagg

SEQ ID NO: 341000 - DNA, 49 bp, Homo sapiens
aaaaccagtgctcaagtatttgagtctgatgatttgaagaagagaagag

SEQ ID NO: 341001 - DNA, 75 bp, Homo sapiens
cagtggaacctccagcagcaggagcagcacttgctggcgctcagacaggatgggagctacagtttttgtccagcc

SEQ ID NO: 341002 - DNA, 100 bp, Homo sapiens
aacgactctgcgccgccgctgcctccatcctgggcaaacctgcggacagcgctgtcggcttcaatgaaatggaggccccgaccacagcttataagaagac

SEQ ID NO: 341003 - DNA, 100 bp, Homo sapiens
actataggcatcctttccacatgacacccatgccttacgacttacaagacagtgggagtagctcaccgttacccaagtatgcttcatctcccaaaccaaa

SEQ ID NO: 341004 - DNA, 75 bp, Homo sapiens
cgcgggacctggcgctgcagcgaggtatgatctcgtgaaaccttgagagaaactgaatgacgaatgaaactattg

SEQ ID NO: 341005 - DNA, 100 bp, Homo sapiens
ctcgcccaccacgtccagcttcaccacgcggctgcacaactgcaggaacaccgtcacgctgctggaggagggttctccaaaaaatgtggaatcctttgca

SEQ ID NO: 341006 - DNA, 98 bp, Homo sapiens
aagaactgaaccggactaaggccaccatgaatgccatccgggaagagcgggaccggctccggaggaggaacacttcagttatggaagatcaaaatgaa

SEQ ID NO: 341007 - DNA, 108 bp, Homo sapiens
gtgaactcagcctgtttcagagcctccacaccatggtgctgaacgaggatgggtactcctccaccatcaaggacaagatcctgaccattgatgtgaagcccggttgga

SEQ ID NO: 341008 - DNA, 90 bp, Homo sapiens
tttcctagcaaaatatgcaaagtgtgaccagtgtggaaacccaaagctccagcgattcaagcgctccctctccctcaagaccatcctccg

SEQ ID NO: 341009 - DNA, 50 bp, Homo sapiens
cacctgcagctggcgcctctgcagtggggccttccggagcagtactacag

SEQ ID NO: 341010 - DNA, 75 bp, Homo sapiens
cttggtggcattaacaacatcctagtcccacaccagcggacccgctggggcccagcccctactcatggtgcccag

SEQ ID NO: 341011 - DNA, 78 bp, Homo sapiens
ctagtcatccctggcttcatgagtgtatgattcgtctctttaatactggactaattgtcagcctagaaaaggaacttg

SEQ ID NO: 341012 - DNA, 98 bp, Homo sapiens
aggatgatgctgactttgatgaagattgcagagggaatggcatacatcgagcggaagaactacattcaccgggacctgcgagcagctaatgttctggt

SEQ ID NO: 341013 - DNA, 90 bp, Homo sapiens
ctttctacagaacaaactgcacagcttggtactgagctcttcattgtcaggattgtccgtgtggagcccttggtgaccatgggccaggtg

SEQ ID NO: 341014 - DNA, 97 bp, Homo sapiens
tgcttaggattcactgcacatcgaattaagagagcagaaggatgggaggaaggtcctcctacaggtgacgcatccaaagaagacattgacactgcta

SEQ ID NO: 341015 - DNA, 98 bp, Homo sapiens
ccgcctcggtgctgctgccccgcgggtgctgaaaactgtcaaggtagctacagcaagctgggtagcaggcagatccaaaggatatcatgaagtttcca

SEQ ID NO: 341016 - DNA, 75 bp, Homo sapiens
gccccctggagggggcagtcccgggagaacctgcggcggccggagcggtcaaaatgcagatcttcgtgaaaaccc

SEQ ID NO: 341017 - DNA, 97 bp, Homo sapiens
agcggatccaaagacccaggaatgacaggtattgaagcccctgggtgataatttgatggaggaaaacataaggcagtctgtaacaaactctatcaaa

SEQ ID NO: 341018 - DNA, 59 bp, Homo sapiens
cggcttcgccttctacagcctggactacaaggcctgtgggagcaaatctgtgtatgacg

SEQ ID NO: 341019 - DNA, 75 bp, Homo sapiens
gcggctaatgtggcttcacctggaaggcctaatgggattgtttgaaaaacgtcgcttcaggaaattcctagtgta

SEQ ID NO: 341020 - DNA, 100 bp, Homo sapiens
ggctttcggcgcggggggacagaggaggctcgtggggaggccatcatctgtgcgatctctgcggtggacgaggtggactacaagacggctgaggagaagt

SEQ ID NO: 341021 - DNA, 74 bp, Homo sapiens
gtgctggagcagggtctcctgattcttttcctgctagagttcccggccctcgggaccaaggatcacgtcatgac

SEQ ID NO: 341022 - DNA, 51 bp, Homo sapiens
cccgggattggaccgacgcagccatggtcaccatcagaaaagctaagtttg

SEQ ID NO: 341023 - DNA, 75 bp, Homo sapiens
tggtctggctgttgggaaggaaaaaagatggacagagacgtatgtgcgttggtctcctaagggcacctacctggc

SEQ ID NO: 341024 - DNA, 51 bp, Homo sapiens
ttactacacaagtaactattcccaaagatgctgaattggccagtccactga

SEQ ID NO: 341025 - DNA, 75 bp, Homo sapiens
gtcccccccggagaaaaagttgaagcgttatgattttcctaagcccagtgaagagaagattaagttaattctcaa

SEQ ID NO: 341026 - DNA, 80 bp, Homo sapiens
gtatttcaaccataaagacatcttaattgggcacgaaagaggttgggatttgctgtgttcctgggcaggtgcctggtcaa

SEQ ID NO: 341027 - DNA, 75 bp, Homo sapiens
ggagacacggccagatctgccctccacctcgtggtggaacatcggacccattcaagaggaaggatgaaagctcta

SEQ ID NO: 341028 - DNA, 80 bp, Homo sapiens
tcagctatcgccgctgactgtgcccctgtggaaggaggaatgtatcctgtcaggtataatgtcagtgaatggcaagaaag

SEQ ID NO: 341029 - DNA, 75 bp, Homo sapiens
cgactgcgatgactcctcagtggtcttccgtagtgggcagcagtcagtgacaggtgtaacctctgtggatgacag

SEQ ID NO: 341030 - DNA, 100 bp, Homo sapiens
gagaagccaggagccaaaagctgggcaaaagatgatggaagcattgctgttgcccttggttatactgcacatctggtctccatgatttcctttttcctac

SEQ ID NO: 341031 - DNA, 112 bp, Homo sapiens
tcgacttcctagatgtggagctggaggatggagagttcctggtccagaactttacacagaaaaggtgctcaaaggatatttgtttaatgaatgtggtatgctgacatttaaa

SEQ ID NO: 341032 - DNA, 100 bp, Homo sapiens
cagcacggaggcggcggcggtggcggtggaggagccggggcggcgggcggcggcggcggtgggcacatccgcgtgggctgggagcagctgctcaccacca

SEQ ID NO: 341033 - DNA, 75 bp, Homo sapiens
ttcactgagctgccataccccgaaagattttcagctgaactctcatctctcaacactggcaaatattcataagat

SEQ ID NO: 341034 - DNA, 100 bp, Homo sapiens
ctggtgcatagcagcaagaattcctctaggatacattctttggaacggaactgccaggcagctgattacagaagagaggattccaaacaacacacagtgg

SEQ ID NO: 341035 - DNA, 88 bp, Homo sapiens
acattcgctgcatcaagcccaacagccagggccaggcgcagacctttctccaagaggaggatgctgaaaacgccattcaacagatggg

SEQ ID NO: 341036 - DNA, 99 bp, Homo sapiens
gtgaactcgtggcgagagaaggaaaatgcgcgtcccgggcgcgggagagccagtgtaactccttcaagactggagtgacacacactgcatctgcatctg

SEQ ID NO: 341037 - DNA, 100 bp, Homo sapiens
attgctaggcggagacagtgcagggaagagagaccttagaaaggatcaggactggcggctaatcttccagtaccaacaattgcagcaatagatggactcg

SEQ ID NO: 341038 - DNA, 83 bp, Homo sapiens
caagtacctgcagatcctgacctctctgatgagatggatcggcgtccgagctgggccacagcctgaacgagaacgtcctcaag

SEQ ID NO: 341039 - DNA, 75 bp, Homo sapiens
gcaatcctggagccccccagtgaggaaaagactgtatcttcaccattgacccatcaaccgcccgagacctcgatg

SEQ ID NO: 341040 - DNA, 75 bp, Homo sapiens
ccaaatggctttagtcagagtcccacagccctgtacagcagcccacctgagaaacggtgggagcccagagtatat

SEQ ID NO: 341041 - DNA, 100 bp, Homo sapiens
gcgcccgccaccggctccctcgggagctcatcttcgtggggcgtgaggagtgtgagctcatgctacagggtcgataaagacaggagtggagtgatatcag

SEQ ID NO: 341042 - DNA, 100 bp, Homo sapiens
aggggaacgcggtggcgtgcctgcgcctcttcccctgcagcgccgtgcagctcgccgcctaccgcaattgttgccacctcctccctttcatggttccatc

SEQ ID NO: 341043 - DNA, 100 bp, Homo sapiens
cgccaagtcttggacgccgtgtactatctccacagaatgggcatcgtccacagagacctcaaggagttggtggtgaccccgcccagttggcccagaggat

SEQ ID NO: 341044 - DNA, 75 bp, Homo sapiens
ctggctcccaatacaccgggcaaagcacgtaaggtcaaaatgcagatcttcgtgaaaacccttaccggcaagacc

SEQ ID NO: 341045 - DNA, 98 bp, Homo sapiens
ggccacgctcatcctctatgaggacctggtgcacattctcctaggctctcccgagttcaaagaggccttttcattgtttgaccggaccccgactggag

SEQ ID NO: 341046 - DNA, 83 bp, Homo sapiens
tgggaggtcggcggccccaaaaaataccgtagcagtaggcaggacagttccaattcaacaaaaacctctttaccctggcactc

SEQ ID NO: 341047 - DNA, 100 bp, Homo sapiens
aagggtgcacagcccctggctacggatgagttccacccgttcatcgaggccctgctgcctcacgtccgcgccttcgcctacacctggttcaacctgcagg

SEQ ID NO: 341048 - DNA, 100 bp, Homo sapiens
gcggcgcggtcggacaagggcagtcccggggaggacggtttcgtcccgtcggcgctggggacccgcgagcagagtccgctcagaatttgatcagatcgac

SEQ ID NO: 341049 - DNA, 100 bp, Homo sapiens
tgaactcttcagataatcagagtggaggaagtacagccagcaagtaattccctcctggtcccagacagtctaagaggcacagataaacgcagaaatggac

SEQ ID NO: 341050 - DNA, 121 bp, Homo sapiens
gtcgcctagtaaacggggctgctggtgggccgcgtcgaagacatggaccagggctacggagctcaccatggatgatgatatcgccgcgctcgtcgtcgacaacggctccggcatgtgcaag

SEQ ID NO: 341051 - DNA, 100 bp, Homo sapiens
catctgatgctgtggaacttgcaaatcgaagaaaggatcttgttcgagtagaagccacagtcattgaaaagacagaatcatggccaagaatcattatgag

SEQ ID NO: 341052 - DNA, 100 bp, Homo sapiens
accaagtgtggggagccgtcgcgccccgccgcctgccgagcctttgatgtccccaagagtggacattcctctggttatgatagtcgttctgcacgtgcat

SEQ ID NO: 341053 - DNA, 99 bp, Homo sapiens
atgtgtcacactttggagtcggctggtcttagccctcagctgttgttggtcctcagaatggttggaatgaccctccagctttgaacagagtacccaaaa

SEQ ID NO: 341054 - DNA, 75 bp, Homo sapiens
tgggagttcccaattaacaatgaagcaggtatgtgtaatcctcgaaattatagtgacacacctccaacttcaaag

SEQ ID NO: 341055 - DNA, 74 bp, Homo sapiens
ttatatcctccaggaatactggccaggccaaagatgaagaggaagcctttctggattggagtgatgatgatgat

SEQ ID NO: 341056 - DNA, 75 bp, Homo sapiens
gagccgggtcccaccatggccgcgaatcgagattttcccctaccttgtggtggttattgggttagagaatgtgtt

SEQ ID NO: 341057 - DNA, 100 bp, Homo sapiens
atcatctctgtgcactgataataaccctgcagattctgctcctaagtgtaggagagaacttggtgcctcttccactctggagtgaagttaatgaaagtct

SEQ ID NO: 341058 - DNA, 74 bp, Homo sapiens
tttctctctgggaaccttctggaaagaaagtgcatcaactggtatcccagcctgggctgaatcgaggcctgatc

SEQ ID NO: 341059 - DNA, 90 bp, Homo sapiens
tctgtgtaagaagtactccagggaaacctcccaggtacatcgagtacatgtgtgacatggtggcggaggagcccatcacaccccacagca

SEQ ID NO: 341060 - DNA, 83 bp, Homo sapiens
atgtcgggttattcgagtgaccgagaccgcggccgggaccgaggaattgtggtggttttggactccatgattaaggtgttcac

SEQ ID NO: 341061 - DNA, 82 bp, Homo sapiens
tctagtaacccgcgaaatgatgggatagcgttgcaaatccttaaaagagtcttaacggatttgaatttgttgaaatgagcag

SEQ ID NO: 341062 - DNA, 101 bp, Homo sapiens
gccgcctgcctgcctgccactgagcaccaatgttgttatgaattattcagagatcgagtctaaggttcgagaggcaacgaacgatgatccttggggacctt

SEQ ID NO: 341063 - DNA, 75 bp, Homo sapiens
agccctggtgccaggtgtccatccccgtgctgagatttgcctgaagacctggataatctccatttttgtcatgga

SEQ ID NO: 341064 - DNA, 90 bp, Homo sapiens
tcgtcggattgcccatgcacttgttgcagaaacagccaaggtatgtgaggagcagcgctgtgaggaggaagtcttccccctggccatgaa

SEQ ID NO: 341065 - DNA, 100 bp, Homo sapiens
agagagacaatgctcgctcgtctctgagtgccagtcacccaatggtgggcaagtggctggagaaacaagaacagcttggctgaagaggaaataaaaacag

SEQ ID NO: 341066 - DNA, 82 bp, Homo sapiens
gctgataataacacagttattaatggactgcttggaaatataggctttatcctgtggataaacgcagagtgaacgagtttgg

SEQ ID NO: 341067 - DNA, 82 bp, Homo sapiens
taccatctcggactcccgacccgccgccggctccggccgcgtttcccgggtaaagggcaatcccacagagtattgatgagga

SEQ ID NO: 341068 - DNA, 100 bp, Homo sapiens
gtttcatctgtggatggagtattgcctcctaattttccctacagagatgatgtcatgtcagtgaatcctacctgtttggtccttattattcttctgttta

SEQ ID NO: 341069 - DNA, 100 bp, Homo sapiens
tgccggtggtgcgagtcttcggagcgaccccggcagtactatactggcaattgctggagaagattttgcaattgttgcttctgatactcgattgagtgaa

SEQ ID NO: 341070 - DNA, 83 bp, Homo sapiens
ctgggcacccacggagcctccggggctgttggaatcgaagcctcttaaaatggcagatgacttggacttcgagacaggagatg

SEQ ID NO: 341071 - DNA, 100 bp, Homo sapiens
gaggaatgttctgggcaccaagaatctttctcagatcctctctgacagagaagaaattgcacacaacatgcagatggagcagatggtgctttttacccag

SEQ ID NO: 341072 - DNA, 100 bp, Homo sapiens
gtccccagagcctcagtttgtgcaggacaccgacatggaacagggactcactgggggaaacaaatggaagactgctgcgaccctgcccatctctttgcta

SEQ ID NO: 341073 - DNA, 51 bp, Homo sapiens
ctctgaaaaatggctccctccgagttaaggccgccatggcatcagatgaag

SEQ ID NO: 341074 - DNA, 99 bp, Homo sapiens
gccagtaggcaatcacctgaaggatctgacttccagaagtcaatgcagaccctgcaggacttgctcactgatcttcatgcactccaggtcaccatcaca

SEQ ID NO: 341075 - DNA, 98 bp, Homo sapiens
cagaatatccgatacaaaggagaatctggtttgaagatgccgcatttggattggatgaattccaaattctgcttgcttgctttttaatattgatatgc

SEQ ID NO: 341076 - DNA, 83 bp, Homo sapiens
attaagaacatccatggagtcagttttccaagagataacttcaccaagatgtccagtgataggcaaaggtccgatgatgagag

SEQ ID NO: 341077 - DNA, 100 bp, Homo sapiens
ctcagatcactgtataaccacccagtaccaaaggcaaatactcctgtaaatttgagtgtgttacccagcatgccacaatctgattgctgacctggatgga

SEQ ID NO: 341078 - DNA, 74 bp, Homo sapiens
ccgggaggggccgcgccgccaccgtctgaactaggatgtcccgacatgaaggtatgagggtgctggttgatgct

SEQ ID NO: 341079 - DNA, 100 bp, Homo sapiens
gaggacttgaaaagctgagatatgatgattttgaagtcatttcacatcgaagccatgatttaaatatcggcgttaagacagatgtgctggtgctgagctg

SEQ ID NO: 341080 - DNA, 96 bp, Homo sapiens
gcatcgtgaggagggaggagaaaacctggaccaggcacgggaagatgcccagaactcttagctgtggaagaacatcatgcctatttataaccactg

SEQ ID NO: 341081 - DNA, 83 bp, Homo sapiens
cgcacctcgtcaccaaggccaagcccagacacatggccccaggccaagcaccccatcaggctaccccgtggagggatgcccac

SEQ ID NO: 341082 - DNA, 50 bp, Homo sapiens
aagtcccgcggctacggcttcggagaagaaatgggtgaccgttggtgaca

SEQ ID NO: 341083 - DNA, 100 bp, Homo sapiens
tgaaaaatacagagctggctgtcttccatgatgaaacaggctgctttgctggctctgcaagaaaatggactagacgcaactacagtgaaacaagagcact

SEQ ID NO: 341084 - DNA, 60 bp, Homo sapiens
tctcctgaagcaacatctggttctacaggtcagccaatcaaccctcaatgtcgaatctac

SEQ ID NO: 341085 - DNA, 50 bp, Homo sapiens
cggaaaccggtagcgcttgcagcatggtaagtaaggaggtctctgtacca

SEQ ID NO: 341086 - DNA, 100 bp, Homo sapiens
cccgggacatctgaaagccaggaaatgtgaactttgaggcgctgatcatcaccatgtcggtagtcgggggaaccctcctcctgggcattgccatctgctg

SEQ ID NO: 341087 - DNA, 98 bp, Homo sapiens
gtgtcccctagtccctacagcagcagcagctggcgccgctctcgcagtccctacagccctgtgctcagattctggacaatcaggaagtccaagccaca

SEQ ID NO: 341088 - DNA, 82 bp, Homo sapiens
ctcggactcctgcgaccgcatcaaagacgaatttcagctactgcaagctcagtaccacaggaagagctgaagagagacctga

SEQ ID NO: 341089 - DNA, 76 bp, Homo sapiens
atggacgatgatgccaatggtgatgtggatgtggaagaaagtgatgaggagttcgcagtccctgattatcgttcct

SEQ ID NO: 341090 - DNA, 82 bp, Homo sapiens
ttcagtggtgttggtagtaaaatgggatcatagacggtatttctatgtaaacgaacagtcgggcgagtctcagtgggagttt

SEQ ID NO: 341091 - DNA, 82 bp, Homo sapiens
tggcgtgcgacaacgcggcgcagaactcttccgccctctctggatgagggaacagaagtggaggaaacaaaagaagcagcag

SEQ ID NO: 341092 - DNA, 51 bp, Homo sapiens
agcaggacccggtctcgggaccagccgtaccttaaggcaggttctatgaaa

SEQ ID NO: 341093 - DNA, 100 bp, Homo sapiens
ccaactgctcctgcgccgccgcccaccaagaaaacacattgtggagcgctatacagagttttatcatgtacccactcacagtgatgccagcaagaagaga

SEQ ID NO: 341094 - DNA, 75 bp, Homo sapiens
cagaacagttaatcctcaatttaagcctgatctaacccctagaaacagctggagttatactcccaaagacaaggc

SEQ ID NO: 341095 - DNA, 90 bp, Homo sapiens
cctcctgagtagctggaattacagtcaaccacagaagcccctgtgaagcgagcatctctgctgggtgatatgcatttccgaagcctgcgc

SEQ ID NO: 341096 - DNA, 51 bp, Homo sapiens
tgagatggtagccaaacccccaggaagaagccatggatttaataaatagag

SEQ ID NO: 341097 - DNA, 100 bp, Homo sapiens
ggctgacctggcctatcagcttcagagatgggagcctcactgtattgcccaggctggtcttgaactccggagctcaagtgatcgtcttgcttcagccttg

SEQ ID NO: 341098 - DNA, 100 bp, Homo sapiens
gtccagtaccagaatgtcccaaggaacacctgggcaacagaatattggtcaagttgctgaccttgaagttgaaatcacaaagattagacacctttttaga

SEQ ID NO: 341099 - DNA, 98 bp, Homo sapiens
tattcccgcctctccgacccggtctcacttcgctcctgggcagctgcgcggagaactggggttcctaaaagtaaagctttagaggccaccaaattggc

SEQ ID NO: 341100 - DNA, 75 bp, Homo sapiens
cggctccttgcgtcccgcctccctgggagctccgcacgggtcaatttttctgtggaaataaatattgtgataaaa

SEQ ID NO: 341101 - DNA, 51 bp, Homo sapiens
ctggtcaaatttcagccatcagcaaaaaacaaccctttttgctgcacatgt

SEQ ID NO: 341102 - DNA, 83 bp, Homo sapiens
cgcaacgagtcttcgccagcccaaaggcgactcgacaccgtcccagctgaagagaggttttgggatttgagattgacgcggtg

SEQ ID NO: 341103 - DNA, 75 bp, Homo sapiens
tgcaccatctgaaaatggtgaaactaaagctgaagaggaaaagaccagtgccctcagtctgagcaacgttgctgg

SEQ ID NO: 341104 - DNA, 98 bp, Homo sapiens
ggggggagagccactgacgccgggaccgggaccgccgccgccgccgccaccatgggaactctaatgatccaggacaaagaagttaccctggagtatgt

SEQ ID NO: 341105 - DNA, 75 bp, Homo sapiens
gaactaaatgggagaagaggaatgttccctgacaatttcgttaagggcggaagcttcgacgtggcagacagaatg

SEQ ID NO: 341106 - DNA, 83 bp, Homo sapiens
ctcttcgctctcttcctggctgcgtccctaggcataatcaccagcaacacccgggacaataatacgggggccacctaccccca

SEQ ID NO: 341107 - DNA, 96 bp, Homo sapiens
ttccggaggcccggccacctctgagaagggagacgacgctgctgggtccgctgagcggggcgacccgaggtcctcagaatggttggaatgaccctc

SEQ ID NO: 341108 - DNA, 100 bp, Homo sapiens
ggcgacctgggcaccagcaggacccgaggccaggagccaggggcccagaaggttatgatgtgattgctcaagcccaatctgggactgggaaaacggccac

SEQ ID NO: 341109 - DNA, 84 bp, Homo sapiens
tctcggcccgccgagatggcgctcgaccccgcagggccgttgctccagggagaactgcaaatatcttcatccacccccacattt

SEQ ID NO: 341110 - DNA, 83 bp, Homo sapiens
ctctctttctggcctggaggctatccagccaaaacacttactattttggagtttaaagtatgtcatcatggcaaagtttcgga

SEQ ID NO: 341111 - DNA, 82 bp, Homo sapiens
cagaaaacctgcagaagaactggcttcgggaattttaccagaccacaggcacccaggataactcagtacacatgggttctca

SEQ ID NO: 341112 - DNA, 100 bp, Homo sapiens
ggaaaaggctaatggcacaactgtccacgtaggcattcaccccagcaagggaccgtttggagggagccattcacctacaggagcaggacatggagaactc

SEQ ID NO: 341113 - DNA, 75 bp, Homo sapiens
ctttgatccagaacttgcagcaacaatagtgaagcccaagagccaaaggaatcaccaccaccttctaaaacgtca

SEQ ID NO: 341114 - DNA, 98 bp, Homo sapiens
ctccgtgggagccagcgagcctctctccctgatcttacgtgctcaagtgagtccattcttgcacaccgagaaaatatgcgacagatgataagaagttt

SEQ ID NO: 341115 - DNA, 50 bp, Homo sapiens
cctatggcgagaaaggctatggtgccgacttcctggtgacggaggtggaa

SEQ ID NO: 341116 - DNA, 75 bp, Homo sapiens
gtggaaatgctaacctggtatttatgcttaaaagaaacagtgagttttcggctttgtgagaaaccttaccatcaa

SEQ ID NO: 341117 - DNA, 100 bp, Homo sapiens
gagaatgggaattctcttcactagaatatggagactgttcaatcaccagggttctccttactatgacaatgtccgccccctctcttaccctgattcggat

SEQ ID NO: 341118 - DNA, 100 bp, Homo sapiens
gtcagctgcgtgattcccgtgattgcgttacaagctttgtctccttcgacttggagtctttgtccaggacgggagttgaccacatttggccatttcccag

SEQ ID NO: 341119 - DNA, 75 bp, Homo sapiens
tcttagcaagtgcggggaagagctgggtcgactcaagctgctacaggagctgagagaccctaccctcactttccg

SEQ ID NO: 341120 - DNA, 90 bp, Homo sapiens
gagagcccaacgcctggtgctcaagactttctccgagtgtttctgaaagatctatccagcactccgatggccagcaacaacaccgccagc

SEQ ID NO: 341121 - DNA, 83 bp, Homo sapiens
aattcggtggaacgaggacgcggactgcgaaggcaggtgaatgaaaactttgccattgatttgatagcagagcagcccgtgag

SEQ ID NO: 341122 - DNA, 100 bp, Homo sapiens
gggcaacctcggagcttatactcctcccagtgacgggtctggagtgcgtgggggaccggctgttggcggccccttggatctcccttcgtggagacgacac

SEQ ID NO: 341123 - DNA, 80 bp, Homo sapiens
ggacccagccctgcgtgaggccgcggagcgccagctcaatgaagtgtcgtgaaaactacccctaaaagccaaaatgggaa

SEQ ID NO: 341124 - DNA, 87 bp, Homo sapiens
aacaagactgcggccaacttggtagtggaaactgggcagagagagatcatcattgcctgaatttagctttgtgactgcaagagcaag

SEQ ID NO: 341125 - DNA, 98 bp, Homo sapiens
atcgacggccgcaaggccaacgtgaacctggcatatctgggcgccaagccgcggagcctccagacggtggaacatgacaaggaattcttccacccacg

SEQ ID NO: 341126 - DNA, 75 bp, Homo sapiens
gcgcttcgtgcaccggggcggtccgttgccaaagccagattctggatgaaattgaagaacataacatcaaaatct

SEQ ID NO: 341127 - DNA, 80 bp, Homo sapiens
cttcccagcaaccccatcctaatggcttatggcagtatctcatgtgcccagctggctggaaacctggcagtgataccatc

SEQ ID NO: 341128 - DNA, 74 bp, Homo sapiens
cgaggagctgcggctctaccccccggagtactccaaagattcaggtttactcacgtcatccagcagagaatgga

SEQ ID NO: 341129 - DNA, 100 bp, Homo sapiens
gatgggaagtccttattattggccctccagatacactttaattgcagccaaaattggaggcgatgctgccacgacagtgaataacagcactcctgatttt

SEQ ID NO: 341130 - DNA, 80 bp, Homo sapiens
gcccacggccactcccgccgcgcaggagtcgggcaccatcccaaagaagcgtgctgggcctaaaggagataacatttatg

SEQ ID NO: 341131 - DNA, 100 bp, Homo sapiens
tgatagcgggcgtgagcggcggcgtcttatccaaccttgcgctgcatccgctcgacctcgtgaagatccgcttcgccgctatatgccgctatcctctggg

SEQ ID NO: 341132 - DNA, 101 bp, Homo sapiens
cgccgcggtgaagttctccgccatgaacctgaggggcctcttccaggacttcaacccgaggccgtggaggagctcctggagaccctggatctggaaaagaa

SEQ ID NO: 341133 - DNA, 98 bp, Homo sapiens
aggaggaccagaaggagatcggtgacctccgtgcccagcagcagcaggaaatttcgatttgcacactgatttggcccaccattcctggagagatctcg

SEQ ID NO: 341134 - DNA, 98 bp, Homo sapiens
aatggccagcagaaaaagagaataataccggagtggtcagtcaaaccttcaaatgtagtgtgaaagtgcgattgtgccctgatcggatcagtctcatc

SEQ ID NO: 341135 - DNA, 115 bp, Homo sapiens
ctctgaaaggctctccttgcagctgcttagacgctggatttttttcgggtagtggaaaaccaggttgcaagaaagctcaagtagcctatggagaggatgcaaggcttccagctga

SEQ ID NO: 341136 - DNA, 50 bp, Homo sapiens
cataattcttattgaaaccgttggcagaagctcctcctggggtagagaca

SEQ ID NO: 341137 - DNA, 100 bp, Homo sapiens
ttttttggcacccatgaaacatacactctgtgcagttttagagagagacacactcagtattcgagaaagtcgactttttggagctgttgtacgctgggca

SEQ ID NO: 341138 - DNA, 75 bp, Homo sapiens
gaggccgcccccgcggcggccgcgctcttcgcctgggaggaggaagccaagaatctggtgagcgaagccatcgca

SEQ ID NO: 341139 - DNA, 80 bp, Homo sapiens
gcaagcgtggcggcaagatcatcgtgggcgacgccacagagaaagttgtcactcagcccagtccatcagtttctcagccc

SEQ ID NO: 341140 - DNA, 83 bp, Homo sapiens
caaaaagaatctgcctatgcaaagtcagaagaatttgctgtatgccgagatgggtgcttcaaggatgaccgcatcgtcttctg

SEQ ID NO: 341141 - DNA, 90 bp, Homo sapiens
cgccgctccggtcctgccccgaactgcccacggccggcagcgcttccaatctccagtctatgtgctgaagaagcagcagcccaagagcag

SEQ ID NO: 341142 - DNA, 100 bp, Homo sapiens
ggtgaatctctaccattcagcagcagctggccgcgacagtaccaaagctttctctgcatttgttggacagacgaagcggcgggctctggagaagattgac

SEQ ID NO: 341143 - DNA, 100 bp, Homo sapiens
aggaaaacttcgtggctgaagatgtgaatgaagaacaagattactatcctctgccagcaggtttcaaagagcagatttacgatgtatacaggtacctgcc

SEQ ID NO: 341144 - DNA, 51 bp, Homo sapiens
agagtttgcagcaaagatcattgaagtgtgaagcctcagtttaggtcatct

SEQ ID NO: 341145 - DNA, 75 bp, Homo sapiens
gagttgggcgagctgctctacaacaagtctgagtacatcgagacgctggtgccgacaagaaagccgaggctgggg

SEQ ID NO: 341146 - DNA, 100 bp, Homo sapiens
agcctcaaaatgaagatggcacatggcccaggcagaccttgcagtcaaagattggattcagcatcaaaatacatctactcatattgagagctgtcgacag

SEQ ID NO: 341147 - DNA, 100 bp, Homo sapiens
gcaagttaaaaccaaagtgtcagcacctcaacaacatttttttttggcttaacaaaacatcaaacggcatacaaatgagcatgtaacttctaatgccagc

SEQ ID NO: 341148 - DNA, 73 bp, Homo sapiens
acaaacgctttgccacattcagccgccaatgatcccatttttgtgaatcctcactatggatgggctcattgag

SEQ ID NO: 341149 - DNA, 98 bp, Homo sapiens
agaaagggaatgtgttttcatcccccactgcagcaggcacaccaaataagggcggcaccttcctacttctgcccagccacagccctcccctcacagtt

SEQ ID NO: 341150 - DNA, 51 bp, Homo sapiens
ctcgggggcggcggccacgccaaggacggttaccttatcccatatcacaca

SEQ ID NO: 341151 - DNA, 100 bp, Homo sapiens
gtggagcagacgctactcccgctggtttctcagtccccaaagctccagagatagatccagtagagtgtttggtggcagataactctgtaacagtggcttg

SEQ ID NO: 341152 - DNA, 75 bp, Homo sapiens
tgaagtggtgaaggagtgtgtgcagcggtcacagagatgcggcggaccctgacgcctgccagctccccagtgtcc

SEQ ID NO: 341153 - DNA, 100 bp, Homo sapiens
aagcttgaaatgctacatttccaaggttgattcttcaccacactgaaaccattaggaaaaatccttgtggttaacagcagaggcttcagagtgtaacctg

SEQ ID NO: 341154 - DNA, 100 bp, Homo sapiens
atgccagggttatccagaagcgagtccccaatgcctacgacaagacagccttggctttggaggtgattacgtttttgaagaagaaggacaagttcatcag

SEQ ID NO: 341155 - DNA, 100 bp, Homo sapiens
ggcctccgagcagtcctctcagcccacttgcacggtaaatggatttcgcagttatgtagatctttatgtgaaagacaaattggatgaaactggggtggcc

SEQ ID NO: 341156 - DNA, 100 bp, Homo sapiens
ggctgacctcgtgttcccgtgtgccggtggtggtgtgcacattgagccccggtatagacagttcccccagctgaccagatcccaggtgttccagagcgag

SEQ ID NO: 341157 - DNA, 115 bp, Homo sapiens
aaacacacccatcctggtagacggcaaggatgtgatgccagaggtcaacaaggttctggacaagatgaagtctttctgccagatgaacgggaccgggttcagaagaaaacgttca

SEQ ID NO: 341158 - DNA, 83 bp, Homo sapiens
cttccacgggccgtacacagtgcaggccgggttgcccctgcctgtttaaagaagaaaacccgtatgctagatttgaaaacaac

SEQ ID NO: 341159 - DNA, 100 bp, Homo sapiens
attggagtgaaccggagaccccgaaaacggaagcgcagggagaaggaagaggtgtttgaaaaggacttccaatagtagtcagacattatcatcctgtcat

SEQ ID NO: 341160 - DNA, 87 bp, Homo sapiens
cggtacctcggaccagctctgtaaaagccccgcctctgccttcggatagcttcttcctggagaagaatatgtttgttttcttcttga

SEQ ID NO: 341161 - DNA, 75 bp, Homo sapiens
cgatggaggagctgagcgctgatgaggctattcaggcagctatcagccaggcctttaaaaccccagaggtcatca

SEQ ID NO: 341162 - DNA, 101 bp, Homo sapiens
atcctgctgggatttttgagctggtggaagtggttggaaatggcacctatggacaagtctataaggggcatggtctagtggcccagtcaggacgcggaaac

SEQ ID NO: 341163 - DNA, 100 bp, Homo sapiens
gatcttttcaatgctgcgaaagctgccaaaagtgacatgcaggacagtcattttgtttactcattcagccctgttgcaggtcccaataaactcttcataa

SEQ ID NO: 341164 - DNA, 104 bp, Homo sapiens
ctactttgactactggggccagggaaccctggtcaccgtctcctcagtgtttaactgctgaagagatcttttcccttcatggcttttcaaatgctacccaaata

SEQ ID NO: 341165 - DNA, 101 bp, Homo sapiens
cttctatcaggcaacttgaagtggcccacaaactctttaacaacttgaaataaatgtgtggacttaattcaccccagtcttcatcatctgggcatcagaat

SEQ ID NO: 341166 - DNA, 95 bp, Homo sapiens
ccagaggatgacacccgggacaacgtttattactatgatgaagaaggaggcggagaagaggaccaggactcgctcagcagcagcctgaaaacttg

SEQ ID NO: 341167 - DNA, 100 bp, Homo sapiens
gaacatggacacgagaacccccataaataatcttcgactaatggctgaaggataaatcaacatggcaactatgattccaccagtgaagctgaaatggctt

SEQ ID NO: 341168 - DNA, 50 bp, Homo sapiens
cctaaccggctggctgcagacccggaaggggaacagtttgtgaagaaaat

SEQ ID NO: 341169 - DNA, 131 bp, Homo sapiens
cttcagccaaagaaacaagccgtggaataggtgtatcaagtaatggtgcaaagcctgaaggtgtccgcaatgttgccagtgtctgtctgcagattggctacccaactgttgcatcagtaccccattctatc

SEQ ID NO: 341170 - DNA, 50 bp, Homo sapiens
caagatctgccagaaaattaaattagtgatagattcgtgtggcctttcaa

SEQ ID NO: 341171 - DNA, 83 bp, Homo sapiens
agtactgtgggtgatatttgcctttagtgcactcttctccttcacagtaaagtggctggtagcccgagaatgtctatttcatc

SEQ ID NO: 341172 - DNA, 83 bp, Homo sapiens
cgtggcgctcggctgcgcgctgctcctcgccctcaagttcacctgcaggtaccccaagaagctagtgcagacttattcagtgt

SEQ ID NO: 341173 - DNA, 75 bp, Homo sapiens
gaacttgatgtccaaataattggggttaaggtttttaatgaccacaacaagcaagcatgcagcttactgcttgaa

SEQ ID NO: 341174 - DNA, 75 bp, Homo sapiens
gcctaggcattttgctgtctcctcctaatacgttggttgaatctggcgatgtggaacccatggatatggagggct

SEQ ID NO: 341175 - DNA, 82 bp, Homo sapiens
cgtggccttagctgtgctcgcgctactctctctttctggcctggaggctatccagcatcatgcatgccccgcggtccaggga

SEQ ID NO: 341176 - DNA, 97 bp, Homo sapiens
agcgtcaacatcctgctcaagaagcagcagtcttactactttgaccgcgatgatgtggctttgaagaactttgccaaatactttcttcaccaatctc

SEQ ID NO: 341177 - DNA, 83 bp, Homo sapiens
ctcggcgctgccgtctctggaggagtactggcaacagcccagacacatggccccaggccaagcaccccatcaggctaccccgt

SEQ ID NO: 341178 - DNA, 50 bp, Homo sapiens
cgagaaggtgtccgaggcccgcaaaaaatgctgtccagtttcaacgagtg

SEQ ID NO: 341179 - DNA, 90 bp, Homo sapiens
tccaactttgcgacggaaatgtgtcatcgaaagccaggtgtccctggccagtgtccttccacctgtccacaagcatggggaacatcttcg

SEQ ID NO: 341180 - DNA, 100 bp, Homo sapiens
gctgacaggccgctctgtggagtttgaggagatggacattttggaccagggagccctacagcgtctcttcaaaaagtgcacagccagagaacaacacatc

SEQ ID NO: 341181 - DNA, 108 bp, Homo sapiens
gcgggtacctgcggccaattcggtggaacgaggacgcggactgcgaaggcaggtgctggagaatctggtaaaagcaccattgtgaagcagatgaggatcctgcatgtt

SEQ ID NO: 341182 - DNA, 75 bp, Homo sapiens
cgagcacagagcctcgcctttgccgatccgccgcccgtccacacccgccgccagttcaaatctgaacatcaatga

SEQ ID NO: 341183 - DNA, 99 bp, Homo sapiens
cactggatcgcctcccaagtggcagattggtgagcaggaatttgaagccctcatgcggatgctcgataatctggctgtgggtgagcgtggaggatgctc

SEQ ID NO: 341184 - DNA, 100 bp, Homo sapiens
caccgccctcaccacccctatccagacggctgcccttcaagtaccaccaccaaaaccctcaacaggggcatctctgagttcatcgtgatggctgcagacg

SEQ ID NO: 341185 - DNA, 82 bp, Homo sapiens
atcctgcaactccagtcaatatcccacttaaatcattccaggttgatgataattagaagcatgctttccactgaacttcccg

SEQ ID NO: 341186 - DNA, 100 bp, Homo sapiens
tggtttggctttggctacacagcactggttgtttctggtgggatcgttggctatgtaaaaacagccacagatccatgatgtgcagttctctggagcaggc

SEQ ID NO: 341187 - DNA, 100 bp, Homo sapiens
cagcgggggcgccggctgggagaacatacatatgatagttgagaaagacacatattctgatcatgaagaaataaacacaagttaaatatgactaagcaga

SEQ ID NO: 341188 - DNA, 101 bp, Homo sapiens
aattttgagtagatccatagtgaaacggtgggcaaattttgcaaaatatgggttacttcctcagaatgttggcctcctgtatgttggaggttatgaaagac

SEQ ID NO: 341189 - DNA, 88 bp, Homo sapiens
gggttagcttcagaagaaattgatattctattaaatattgcactcagtggcaaatttgcatcaggatactcaaagtggaaaggatcac

SEQ ID NO: 341190 - DNA, 101 bp, Homo sapiens
gcgcttgagttggtcgggggcagcggcaggagaagttgccccagtgcaaggcactgcattcgacctgagaaagccagtggagcttggaaaacacctgcagg

SEQ ID NO: 341191 - DNA, 88 bp, Homo sapiens
agagagacccgcgcgctggcccttcccgaaaccccttggctccagtgcaccatagttctatatgaagggaaagaacggcttattccag

SEQ ID NO: 341192 - DNA, 88 bp, Homo sapiens
tgtcagtccttactgttcaggacgttggtcaggtgatgcctggaggttgctccttgagggcaggacagttcttatggctttatccgtt

SEQ ID NO: 341193 - DNA, 100 bp, Homo sapiens
atgagtcgggccacgccttggtgggctggatgctggagcacacggaggccgtgatgaagatgccatggacaatattaccaggcagaaccaattctacgat

SEQ ID NO: 341194 - DNA, 100 bp, Homo sapiens
aaattaattcatcattagagaaattagatctgggtgactgtgatctggtaaccttcaaagcatcaagacattcagtttcaccagatttaaaatatgtcct

SEQ ID NO: 341195 - DNA, 100 bp, Homo sapiens
cgccgccagggtctgcagggcctgggccgccgctgctacctgcagcgccgtgtggcacgacacaaaaatcagtgcaggcctgagtgttccttccagcatg

SEQ ID NO: 341196 - DNA, 100 bp, Homo sapiens
tgtttgcacaaacatttcagcaaactatgctgccttcaataagttctcgaggctggacagtccaagatcaaggtgcctgcatctggcgtctagtgtggac

SEQ ID NO: 341197 - DNA, 75 bp, Homo sapiens
cagctctcaggcattaacaccatcatgtttaccgacaagactgtgaaactttcgggatggtggtgaaaatgctga

SEQ ID NO: 341198 - DNA, 95 bp, Homo sapiens
agaagtcgcgtgtctaggtgagtcgcggtgggtcctcgcttgcagttcagcgaccacggaaacatttactagggacaacttttgagtgtcagacc

SEQ ID NO: 341199 - DNA, 100 bp, Homo sapiens
acccacttcactccagtgcctccgacgcctcctgatggaggtgcttcccaaggaccgtagatgcctctctagagcatgagctcaggcaagagtgcccgct

SEQ ID NO: 341200 - DNA, 100 bp, Homo sapiens
caccgactactgtcagcagctgtgccaggtcaaggtcagcatctcctcgacgatcaagatctatctctcttcgtagatcaagatcagcttcactcagaag

SEQ ID NO: 341201 - DNA, 82 bp, Homo sapiens
tttgcctggtgcccgttggagacaagctccaggccggagctccctggggaagggaatgcagggttgctggggctgggcccag

SEQ ID NO: 341202 - DNA, 121 bp, Homo sapiens
ccgctcgggcctccacacgggcctccgaagagctgccgcgacgcccggcccgcagggcaggagcatcagatccatgctgctgctgactcggagccccacagcttggcacaggctctctcag

SEQ ID NO: 341203 - DNA, 98 bp, Homo sapiens
tatcaggtgctgattgatgctcgtgactgcccacatatagaggtgaatcaactctgggctggcctgggctactattctcgtggccggcggctgcagga

SEQ ID NO: 341204 - DNA, 100 bp, Homo sapiens
tactgcccaagagaaattatcagtctcatgaagctctgctgggaagcgaatccggaagctcggccgacatttcctgttccaggaatggatggaggtgctt

SEQ ID NO: 341205 - DNA, 74 bp, Homo sapiens
cgggatacaaagtcagcccaggcagacctccaggtttttgccaatccagaagactgtgtagcatttggcaaagg

SEQ ID NO: 341206 - DNA, 90 bp, Homo sapiens
cttgtgtcatctgagggcagatttaagaatctcagagaagctctgaaaaagttaggaattttagacccagttctgctactgactttctgt

SEQ ID NO: 341207 - DNA, 51 bp, Homo sapiens
tgcagactgcctcaacagagtgatagaactgataaatttcaaacggaagag

SEQ ID NO: 341208 - DNA, 82 bp, Homo sapiens
cacaaggctcagcaaagcggctggcgggtacaatgactcttcttgcttttcacctaagttgaataagcaccctgtgcacttt

SEQ ID NO: 341209 - DNA, 82 bp, Homo sapiens
ctcgggaccggctgccatcttagtctagggactgaggagtcgccgccgccccgagtcccgggtttggaaatcccttgtctcc

SEQ ID NO: 341210 - DNA, 100 bp, Homo sapiens
ccagctggcgcggcggctgcagacggtggccgtgctgcagtgggtcctgaaatacctgctgctcgacagttgaatttctgaatgaaaagctggaaaaaag

SEQ ID NO: 341211 - DNA, 90 bp, Homo sapiens
tatgtgccgccagtgtttccgtcagtacgcgaaggatatcggtttcattaagatgctgagggttggaaaagcaaaagcagatgtgtggcc

SEQ ID NO: 341212 - DNA, 83 bp, Homo sapiens
ctcgctgggagagaggtacctctccttttccctctccctttccctaagcatttgacattgtgcagcaaagaaatggttatgga

SEQ ID NO: 341213 - DNA, 98 bp, Homo sapiens
tcttgcgggagaccgggttgggctgtgacgctgctgctggggtcagggcaagctgcctgtcctgctgcttggccgctcctcagagctgcggccgggag

SEQ ID NO: 341214 - DNA, 98 bp, Homo sapiens
tgtatctcaacaccctgagtgcggatttctgctatgatgacagatggaaagaactccagtggatccaagcgttataatcgcaaacgtgaactttccta

SEQ ID NO: 341215 - DNA, 100 bp, Homo sapiens
cagcactgcccgacagtcctagctaaacttcgccaactccgctgcctttgccgccaccatgcccaaaacgggatactgaggggctacttgtgagatggca

SEQ ID NO: 341216 - DNA, 75 bp, Homo sapiens
aaaagatgatcacaattgaggaagcacttgctaggtgaggtgctggcggaggagtccatagtatgtctgcagaaa

SEQ ID NO: 341217 - DNA, 96 bp, Homo sapiens
tcttgctgcaccgcagcagcccctccccaacccggtaaaatgtgggcgataattcctttcttacaaggctttggaactgcgacataactagcgatg

SEQ ID NO: 341218 - DNA, 90 bp, Homo sapiens
tccctcttcagtttacatatatggcagtggcaaactcttccacatagactttggatatattttgggtcgggatccaaagcctcttcctcc

SEQ ID NO: 341219 - DNA, 83 bp, Homo sapiens
gagctgtcagttttctgtggatgaagaggaagaaatcctacttagcgacatgaacaaacagttgacttcaatctctgaggaag

SEQ ID NO: 341220 - DNA, 82 bp, Homo sapiens
cctcacgcacctgagccccgaggagaaggcgctgaggaggacgagattgaggagctgcgggccgagatgctggagatgcggg

SEQ ID NO: 341221 - DNA, 74 bp, Homo sapiens
tgggtcgcttggaagaagccaaggtaggcacgagacggtacatggctcctgaggtgctcgagggagccatcaac

SEQ ID NO: 341222 - DNA, 82 bp, Homo sapiens
agcccggcaccccccgccgacaaggaggcacgtggtgaggtgtgtatggcttcccgtggactcagcctcttccccgagtcct

SEQ ID NO: 341223 - DNA, 100 bp, Homo sapiens
cagcaagggggttgtccacgaggaacaaattgtacatttgcccattctcaggaagagcttgaaaagttgatctcctatcaagagtttttggcatttgaat

SEQ ID NO: 341224 - DNA, 90 bp, Homo sapiens
cagctctttcctttccgtctggcggcagccatcagtcttcgagtgcttcgactgaccatgatcccctgggccccctccctcctggctggg

SEQ ID NO: 341225 - DNA, 100 bp, Homo sapiens
atgtgctggagaagatggagctgctggaccagaagcacggagcgagaacccgagcagcgccatgagcaacactaccgtcgtccccagcactgcaggtccg

SEQ ID NO: 341226 - DNA, 90 bp, Homo sapiens
ggccgaaccgtgaagggctggaggccccggcggctaggcagccagataagctggtggtggtatggacccgtcggaaccgacgcatctgct

SEQ ID NO: 341227 - DNA, 82 bp, Homo sapiens
ccaaaggggacagcgagtcggaggaggacgaggacttggaaggtgtggtatctgtgcgctttgaagaagatgaagacaggaa

SEQ ID NO: 341228 - DNA, 74 bp, Homo sapiens
gggagcttgccttgaaggacaagaacagcgccgtcaccagcaggtggagccatcgaagcccccacccacaggct

SEQ ID NO: 341229 - DNA, 100 bp, Homo sapiens
acagtcccctggggactcagaggagtacttcgccacttactttaatgagaagatctccattcctgaggaggagcaagacttcaaggactgcattcgtagg

SEQ ID NO: 341230 - DNA, 100 bp, Homo sapiens
ttgctgttcatgagtggaatccatgtttctggacgcggatttttggcctcatactctgttatagataaacaagatgtcttatgtctccagaaaattcaga

SEQ ID NO: 341231 - DNA, 75 bp, Homo sapiens
gtggggcaatccgggcttgcagacgaggcctcatgcattgtgcgtcagcagcaatgtttatggtgaaaaatggca

SEQ ID NO: 341232 - DNA, 51 bp, Homo sapiens
ttttgaattactttgttatgcagaaagtaaacactttgtgctactctgtgg

SEQ ID NO: 341233 - DNA, 98 bp, Homo sapiens
cttctctttgaaattcttcgaatggcagaggaaattggggataaagtgtctcctctgagcctccggcctccataagacccaaaacagatgacacctct

SEQ ID NO: 341234 - DNA, 82 bp, Homo sapiens
ccttctccactttcgccagcccgtgccgcgagcgcggcctgcaggaggaactgtggctgcaccatctgtcttcatcttcccg

SEQ ID NO: 341235 - DNA, 78 bp, Homo sapiens
cttccatgccaccgtcagttttgacactgacacagatcccaccaaatattttggttgtgagctgggagcacagaccca

SEQ ID NO: 341236 - DNA, 90 bp, Homo sapiens
atggctctcagcgatgctgacgtgcaaaagcaggtctcctctgagcctccggcctccataagacccaaaacagatgacacctcttcccag

SEQ ID NO: 341237 - DNA, 82 bp, Homo sapiens
atatcttgaaaagctgccagaaagatccttcatgatgagagatttggggacacttctctctcctgtgtgtagttgatagttt

SEQ ID NO: 341238 - DNA, 99 bp, Homo sapiens
cacagccatctccaccccgttggaaaaggaggaacctcctctggaaatgaacactgggcaaccgcctccacgtttgataaactttcagaatcacagccc

SEQ ID NO: 341239 - DNA, 101 bp, Homo sapiens
actgaagtaacagcagcaatgaccttccctcgggaattccacctctgcgtttttccctccagccaaaactggacaagccaaggcatctgtagccaaagtaa

SEQ ID NO: 341240 - DNA, 51 bp, Homo sapiens
ggaaagaatagcacttggagtgcaaaccagtccagctacgggggcccagcc

SEQ ID NO: 341241 - DNA, 100 bp, Homo sapiens
ccaggacaagaagaacatgctgttttctgtttgggccccatggtatccctgtgacagtatttcccaaaagggaatataaggataaaccagaagccatgcc

SEQ ID NO: 341242 - DNA, 106 bp, Homo sapiens
caacaacaccaggaaactgacctcggggttgcggcgaccttttggagtggctgctcaagagggccagcagtgaggacacgctcaacaagccaggaagtaccgctgc

SEQ ID NO: 341243 - DNA, 74 bp, Homo sapiens
cctcagccatggacgcgtccctggagaagaatattccaacccgggaccggctagagggcatggcagccttcagg

SEQ ID NO: 341244 - DNA, 50 bp, Homo sapiens
gctgccccatttccgtgctgcccttgggcacgcctatctcaggaagtggc

SEQ ID NO: 341245 - DNA, 90 bp, Homo sapiens
cccgggaggtgttcaagacccagggggtgatcaagtacatggggccggcaggcttatcagtaacatcagaacaaataaatcctcatagta

SEQ ID NO: 341246 - DNA, 100 bp, Homo sapiens
ctcggtcagcagctgctctcccagccgcgccagcctcctcactggcctgccccaggaccatcagcacgtgcccatcgacatccagaccagcaagctgctc

SEQ ID NO: 341247 - DNA, 100 bp, Homo sapiens
ctccaagtgtggaccctgcaaatataaagctgagtgtgatgaagatgcagaaaatgttgggtgccgagagtgaaaacgaagaggagagccctcggcagga

SEQ ID NO: 341248 - DNA, 90 bp, Homo sapiens
gtggactttggcagtggaaacgccagcatgcactctcgaactccccacagagtacggtgttcagaacctcaagaaggcatgaagccagcc

SEQ ID NO: 341249 - DNA, 100 bp, Homo sapiens
aagagggagaagattgggagcaagaagatgaggacatggaccccagattagaacacagttcctcagttcaagaagacaaatttacatgtattggagacca

SEQ ID NO: 341250 - DNA, 75 bp, Homo sapiens
gggctctgttgcttctctgggtcccagtgggagctggtgaggtggccaacttcgctgcgtatgcgtttgcaccag

SEQ ID NO: 341251 - DNA, 100 bp, Homo sapiens
cttaccttaaaccttttaagcaaggaaattgaactaagaaatggagagcaatggccaatgtacatggtggactatgccggcctgaacgtgcagctcccgg

SEQ ID NO: 341252 - DNA, 97 bp, Homo sapiens
aagactgtccttcggacaagttttagatctatccatactaatggaaatgtaactggaactgactctgatgataaaatcaaggaccatcaagcaagat

SEQ ID NO: 341253 - DNA, 51 bp, Homo sapiens
ctttggatccgcagaaatcgagagagctggcggtcaccatggcaatgcggg

SEQ ID NO: 341254 - DNA, 89 bp, Homo sapiens
gtgatgtcttccagactcggtgctgtacccgccctcattcttggaatcccagaacaggccttaagtcttctccacatggccatcgagcc

SEQ ID NO: 341255 - DNA, 115 bp, Homo sapiens
accctcccagaccggccgctctcccctcctctcacggcacctcccaccatgaaggccgagacgcatccagagctttcgtgaccggggactgttctgaagcaggcctcgtggatga

SEQ ID NO: 341256 - DNA, 74 bp, Homo sapiens
tttcctgaggcctccccagccatgctgaactgtcattgattacaacggggaacgcacgctggatggttttaaga

SEQ ID NO: 341257 - DNA, 83 bp, Homo sapiens
gggacaccctggaagccaggaaatgcgggctgacgcacgaggcacacaggaaggaggtggagcaggtgtatctgcgctgtgcg

SEQ ID NO: 341258 - DNA, 82 bp, Homo sapiens
gacaaagatggcggcagggaccagcagttactgggaaggtctgctgtgcacgtgctgcagaactccatagacagcctcactt

SEQ ID NO: 341259 - DNA, 75 bp, Homo sapiens
cccaacccagaccacacccttgagcctgagcccgacattattcctgagaaaactttagaaactgttcctttggag

SEQ ID NO: 341260 - DNA, 101 bp, Homo sapiens
ctgaccattttctactgtccctgcgcgaggaccctctttgcaagttcagtgcttaacctgaccgaactggctgcccttcggcctgaccttgggaaactgaa

SEQ ID NO: 341261 - DNA, 100 bp, Homo sapiens
cggcggcgcgcgggggcgacgcgcgggaacaacgcgagtcggcgcgcgggacgaagagtcgacttcaatgttcctatgaagaacaaccagataacaaaca

SEQ ID NO: 341262 - DNA, 101 bp, Homo sapiens
agggcctcagggccggctaccactgcggctactgcgattccaaggagggcaaagcgtcctgcggacccattccaacaatctcgtaaaacatggtggattac

SEQ ID NO: 341263 - DNA, 75 bp, Homo sapiens
gatgttgtcaaggtggcctaccaggaggccaggggtgtcgccatgctgaacatccatgtgggaaacatttccctg

SEQ ID NO: 341264 - DNA, 83 bp, Homo sapiens
ttaaatgatgtattttgtgatcgcagcgatgaaagggaacggcaggagcagctgatgggatatcggaagagagggccgaagcc

SEQ ID NO: 341265 - DNA, 74 bp, Homo sapiens
aaaaagcagtctaaacctgtgaccacccctgaagaaattgcacaggctcgtggtcccaagaagcatctgaagcg

SEQ ID NO: 341266 - DNA, 74 bp, Homo sapiens
gacagagtgcacagtggacgccgaagcctttaatctcaggtgctggagaatctggtaaaagcaccattgtgaag

SEQ ID NO: 341267 - DNA, 75 bp, Homo sapiens
atttccatgtcaacatagtcctggctctctatgagaacatgctggtggagctgccctttgcaggcttctttcttt

SEQ ID NO: 341268 - DNA, 50 bp, Homo sapiens
ctgtctccacggacgactcagagcaaggggaacgcccttttgcttgtgac

SEQ ID NO: 341269 - DNA, 75 bp, Homo sapiens
ttctatgtacctgcagaacccaaattggcgtttgtcatcagaatcagagggtctgtttctgtcgactgtggacca

SEQ ID NO: 341270 - DNA, 75 bp, Homo sapiens
gtggcaactcccaaggaggggacccagggatccgagaaaggaagacttggggaagatgaagatcctgccaaaggt

SEQ ID NO: 341271 - DNA, 90 bp, Homo sapiens
tggtcagtttaaagatatcagcctgtctgactacaaaggcggggagacaaccccttccccaagaatgctgatgggactatatgctacgac

SEQ ID NO: 341272 - DNA, 75 bp, Homo sapiens
gaggcggcgagagatggtcaggtctggagctcgaccgggccagcaaagtgcctgcattcgtgaggatgattgctc

SEQ ID NO: 341273 - DNA, 100 bp, Homo sapiens
tctgagtgtgaaaaaaacaaaagcagcccaatttttgcattccaggagaatgtttggaatggttttggaaaaaattattattcctgaaattcagaaggta

SEQ ID NO: 341274 - DNA, 82 bp, Homo sapiens
gagcgagctccccgacgaggagcgcggcgagatctacgtgccagatgtgaagttcatttccaatccgccctccatggtggca

SEQ ID NO: 341275 - DNA, 100 bp, Homo sapiens
gaaaaatgccagccagaagaggcgttcgctgcgcgtgcacattccgatggcccctgagttctgcagcctcgaggaaggcctgccctatctggacatggtg

SEQ ID NO: 341276 - DNA, 74 bp, Homo sapiens
cctgccgctcctgccggcagctccaaccatgggaggccgcgtctttctcgggagcatcgagtacagctgtccgg

SEQ ID NO: 341277 - DNA, 100 bp, Homo sapiens
attcagctgtgcgaccgggacgcaagccagggctgagcaggaagaagaattcattagtaacactttattcaagaaaattcaggctttgcagaaggagaaa

SEQ ID NO: 341278 - DNA, 88 bp, Homo sapiens
gtgaagagacttacagatgcaggggagtccaggttgtcaatcggtcacagagaaagaagcatcttcattcctgcctttcctcaatata

SEQ ID NO: 341279 - DNA, 100 bp, Homo sapiens
ctgcccggtggtccgcctctcaggacagaggtgcaacatttgggagtttatgcaaggccccttttggatatgtgccacgttggtctttgccatagcaatt

SEQ ID NO: 341280 - DNA, 100 bp, Homo sapiens
gtacaaccttcaaaacaactggaatatttagcaaggattcaaggctttcaggtgggatgtgtgtgggctgaaattccgagctgcggttgtgcatgagaat

SEQ ID NO: 341281 - DNA, 100 bp, Homo sapiens
acctcccgccccgcgcgcccagccggcgagggacattggaccagggtcgggggtcgcggccgctccagcgagagaaccatggagtctggcagtaccgccg

SEQ ID NO: 341282 - DNA, 101 bp, Homo sapiens
gaagggccacgcgtcccccagtaggagaatgactccgattcgtgaccctcagcgccggtgcatgtcgatgcacccagattggctgaaaacttctgtgtctg

SEQ ID NO: 341283 - DNA, 100 bp, Homo sapiens
atctgcaaggtggtggaagtgggcagcaagatctacgtggatgatgggcttatttctctccaggtgaagcagaaagaaaagcacatctcccaggatcctg

SEQ ID NO: 341284 - DNA, 100 bp, Homo sapiens
gagcctcggcttgatcctcaccaggaacatgggaactggaggttttctcgagcgctatagttatgtctgcccagatttagtaaaagaatttaacaagtat

SEQ ID NO: 341285 - DNA, 74 bp, Homo sapiens
cggcaagtggttcttcctcagctctctcctgcagcctccaccaggcggtgtgaagatgcctaatgtacccaata

SEQ ID NO: 341286 - DNA, 100 bp, Homo sapiens
aagaggcgtctgtgtcgcagcttggtctcagaggagcatcgctgggattgcagccttcttcgctgagtctctgcccagtgtgggagggcagatcattccc

SEQ ID NO: 341287 - DNA, 51 bp, Homo sapiens
gaatctggagctgtcattttagaagcaactttcatcctttgaaacgtgtgc

SEQ ID NO: 341288 - DNA, 83 bp, Homo sapiens
cttgctggtgcatgcgtcgtcggcctctgggcagcagctgcagaaccttggcctgaaaatgctacattatatcagcaattgaa

SEQ ID NO: 341289 - DNA, 75 bp, Homo sapiens
cctacagagatgcactgagatacaaacctgtgccaatgggtcatgtttggttagaaggtgacaatctacagaatt

SEQ ID NO: 341290 - DNA, 83 bp, Homo sapiens
aactccaccgtagcccttgccaaagacttcccaagtaagaagcggaagaggagccgctggaaccaagacacaatggaacagaa

SEQ ID NO: 341291 - DNA, 146 bp, Homo sapiens
ccaaagtcacagaaataatacctaaatatggcagtataaatggagcaacaaggctgactataagaggggaaggcatttgcaagtaaaatcactggcatgttgttggaattatccccagctcagctgcttctccttctagcaagtga

SEQ ID NO: 341292 - DNA, 82 bp, Homo sapiens
acaacaaggcctgctgcccgctggagggggtcaggccatcaccccagcagactactccaaaggattcggcgggaagtatggg

SEQ ID NO: 341293 - DNA, 98 bp, Homo sapiens
cgggtccagcgcagaccaggacgacgaggaagccatctatcacacctgtgaggcctccaacttccagtgccgaaacgggcactgcatcccccagcggt

SEQ ID NO: 341294 - DNA, 75 bp, Homo sapiens
ttttcctaaaaggattgtacaccttagaagtgcttaaggaagagtgatgaaggtatcctctggcacatgcaggcc

SEQ ID NO: 341295 - DNA, 83 bp, Homo sapiens
cagagatgtcaagccccataatgtcatgattgatcatgagcacagaaaggttcaacttcttggggccgatggcctagagcaag

SEQ ID NO: 341296 - DNA, 80 bp, Homo sapiens
cacaaaaacagatacatcaacattttagcatatatgattctataacagactcttccagaaatgatatgaagaggaaattt

SEQ ID NO: 341297 - DNA, 87 bp, Homo sapiens
caactgactgaagagcagattgcagaggactactgagcccagccaggctgtatgccattgctgccaaagaaaaagatattcaagagg

SEQ ID NO: 341298 - DNA, 100 bp, Homo sapiens
atgaaaagaatatatacttacagacgggccaaggagatcttcaaggacactcctaaagggacttgcaacaaagcattgccagagaacctagtgctccttc

SEQ ID NO: 341299 - DNA, 80 bp, Homo sapiens
aacagaggcgtctaagagactgggaaagtggccggcctgttttcaatggttccagcaggtcaacacgggagaaggaacct

SEQ ID NO: 341300 - DNA, 100 bp, Homo sapiens
cgggctctggcctggccgacgaggctgccgaagacagtggtgaggagggcgcccctgaacctgcaccaggttatgagtgccagtgagccgccttagatag

SEQ ID NO: 341301 - DNA, 95 bp, Homo sapiens
ggggccttaaagccccttcgtctccccagcacccactctctgggggcaggtgggcccggtgacagaggagctctacggtgactttgaagacttgg

SEQ ID NO: 341302 - DNA, 88 bp, Homo sapiens
tctccctgaagcccaccggtccccaacgcatcatgccagggagccaagcgtcctgcccggccacagatttgaccagttttgggccatc

SEQ ID NO: 341303 - DNA, 90 bp, Homo sapiens
catcccatctcttggacagatgatgccagttaattactttgaatccaaggccacctttgatgccatttctaagacctacagctacctgac

SEQ ID NO: 341304 - DNA, 74 bp, Homo sapiens
atcaacagaacttctttgtcttcgggtgccactgtaagaaggattttcttactggagtgcaatgtgagagaagt

SEQ ID NO: 341305 - DNA, 129 bp, Homo sapiens
ggaatgtcaactattcaacatggaggcggaggtcgataagctggaactgatggcttggctataagaagtatgaacatgtcctgtgtactctgaaggtggatagcaatggtgtgatcacagtaaagcctg

SEQ ID NO: 341306 - DNA, 88 bp, Homo sapiens
gtctgggccgcgctggccgtcggactggagctctgggctgcggcgcacgccttgcccgcccagggagcggacatggactacgactcgt

SEQ ID NO: 341307 - DNA, 75 bp, Homo sapiens
agtaaagcaaaacagagtcggagtgaaaagaaggcacggaagatgagcacaatgcctggactccccacccggccc

SEQ ID NO: 341308 - DNA, 75 bp, Homo sapiens
tccgagggtgtcctgttacttccaagtcatcaccagaaagaaatacaggtatcaggatgaagatacacctcctca

SEQ ID NO: 341309 - DNA, 100 bp, Homo sapiens
agaacgaccagctgagcaccgggccccgcgccgcgccggaggaggccgagacgctggcagagaccgagccagctacaagagactgtgaaaaggaagttgg

SEQ ID NO: 341310 - DNA, 101 bp, Homo sapiens
ccatgaactagtaacaagcaaaattgctctacggaatgacttggatcaggccaggagtggtggctcacacctgtaatcccagctctgggaggccaaggcca

SEQ ID NO: 341311 - DNA, 100 bp, Homo sapiens
tttctactggacattttaggtgcaacaggattaacctccatttcagctaatcatgggagagattaaagtctctcctgattataactggtttagaggtaca

SEQ ID NO: 341312 - DNA, 51 bp, Homo sapiens
ctcctccaacaccaatcatcccagacggacaaagtattttggacagatatc

SEQ ID NO: 341313 - DNA, 90 bp, Homo sapiens
gcccgggcctgcaccatgagcgtcccggccttcatcgacatcagtgaagaagatcagagctccagagattatattggggttgccattttg

SEQ ID NO: 341314 - DNA, 75 bp, Homo sapiens
cggaagcgtctttgctcaaggatcccagttttctctggatgacgtgcaaacggggattcagcgtccgatcctttg

SEQ ID NO: 341315 - DNA, 82 bp, Homo sapiens
gcctgagcccggcgcaggtgaccggcgcgcgggagcgctacggccccaacggatgcctaaatcaaaggaacttgtttcttca

SEQ ID NO: 341316 - DNA, 100 bp, Homo sapiens
ggagaagctggcagctctctgtaagaaatatgctgatcttgcattttttactgtctacagaaacttattgtaattcatttttcctcactccagtagtaag

SEQ ID NO: 341317 - DNA, 100 bp, Homo sapiens
cagaactgaaacaactggaaactgttttggatgatcttgaccccgaggtcacctcatcatctcaaggaggagcattcccctgggctaaggcactggggcc

SEQ ID NO: 341318 - DNA, 85 bp, Homo sapiens
gaagcaggtggaattatgccctgttggttccaatgctgggattggctgcttttctggacaggttgctggaccccgccaacagagc

SEQ ID NO: 341319 - DNA, 74 bp, Homo sapiens
tccagccccgcctcaacagcatcatgcaggacaaccctccatatgataagggagccttcagaatcgaaatcaac

SEQ ID NO: 341320 - DNA, 97 bp, Homo sapiens
aagagactggagatgaggaggatgggagtcccatcggtggctgcaatattaaaggtgaagatgagagctgggactttggcactggtgctggatttta

SEQ ID NO: 341321 - DNA, 100 bp, Homo sapiens
tggcccatggaaaagattttgcatctagaggaattgaaagtggccagcatcgaaatgttcagccttttagtgatgaagatgcatcaattgaaacaatgag

SEQ ID NO: 341322 - DNA, 75 bp, Homo sapiens
aactttggaaacttatgaattctgacacagctccgaattgattccttctttagattagcacaacaggagaaagaa

SEQ ID NO: 341323 - DNA, 82 bp, Homo sapiens
cccgcgcgcccggccggcccggagcaccgagctcgcggcacggtaggaggttgcagtgggacctggggctaggccacctccc

SEQ ID NO: 341324 - DNA, 82 bp, Homo sapiens
tgaggactcagaccagtctctgcaagattgctgatgtatattcaagatgagtggattaggagaaaacttggatccactggcc

SEQ ID NO: 341325 - DNA, 87 bp, Homo sapiens
tattgaagtgtcaaaatccatagatggaaaagatggagctgtaatcgactgtgaggataagaatggaaatacccctttgcacatagc

SEQ ID NO: 341326 - DNA, 98 bp, Homo sapiens
ctctctctgcgcctcatcagcgactatgcagtcagtgcccaaggcttccacgccacctatgaagtgcgtgctgttcaccggctcctggagcaccgcca

SEQ ID NO: 341327 - DNA, 100 bp, Homo sapiens
agaaaacttgttgaagagattggctggtcctatacagaagccttgtactacacagatgacacagccatggccagggccctggtgcagtccctgctagcca

SEQ ID NO: 341328 - DNA, 100 bp, Homo sapiens
gagtgtggactttttgaatttcaagaacagtaaagttggaacacagcagagggtgtgtaataaaatacagaatgcttccaggaccactcatgatgtacca

SEQ ID NO: 341329 - DNA, 50 bp, Homo sapiens
ggccgagcaggaggcgccatcatgggttaatgcgagatgatacaatatac

SEQ ID NO: 341330 - DNA, 112 bp, Homo sapiens
cttcgagcgtcccggctgtaccaatggagcctgaagagttcggcgcagttcctggggtctccacagctgaggcagaataatccagaatggctactctgatctatgttgataa

SEQ ID NO: 341331 - DNA, 100 bp, Homo sapiens
ggtcttcaggcttttccactggctcacctttaggcttctgacacttttacctacgggagttctgggaaatcgttcattcatttacagatgaacagaaaag

SEQ ID NO: 341332 - DNA, 83 bp, Homo sapiens
ggcccggcaccgagttctctctgcagcctgtggtagctgttcctcttgttatgccagtttgtagaaggaaagaggatgaggtg

SEQ ID NO: 341333 - DNA, 100 bp, Homo sapiens
gtttgactgctgcctccgaaggagtatttacaagaacaagtttgagttgacgtatgtgggacctagccaggtgaggcaggcgactaatcagattgtgatg

SEQ ID NO: 341334 - DNA, 85 bp, Homo sapiens
ctgcgtgtgcggggtgcgtgggtgcctggagatgaagctggaaagatgctgagggttggaaaagcaaaagcagatgtgtggccca

SEQ ID NO: 341335 - DNA, 75 bp, Homo sapiens
cagcatcaatgtctggaacatctgtcccctgttcaaagggcgccatgttttggaagtttgacctgcacacaagct

SEQ ID NO: 341336 - DNA, 93 bp, Homo sapiens
ggggggaaactaggtcgatggtcggcggcgcccggatgggcagctgaggttaatgttgaagaaggaaaatgcggaagtcgtcatttgacaagt

SEQ ID NO: 341337 - DNA, 50 bp, Homo sapiens
gtggcaaccgcctacgagacactcaaggaagcaagatttccagatgtagc

SEQ ID NO: 341338 - DNA, 82 bp, Homo sapiens
tctcgtcggcggcgccctgcaccgcgcctcgcaaagcaacttgccactccctactgaataaagctacagtaaaagaaaaaaa

SEQ ID NO: 341339 - DNA, 100 bp, Homo sapiens
ctcaagatggcggagctgggcgaattaaaggtcactgatatgatgcttcaggacaaaccctatcctgactggggaaaatcagcaagagctttctggaaga

SEQ ID NO: 341340 - DNA, 100 bp, Homo sapiens
agagttattctcaagctgtcacaggagctgggttgcggcccatttgtgaatttatgaccttcaatttctccatgcaagccattgaccaggttataaactc

SEQ ID NO: 341341 - DNA, 100 bp, Homo sapiens
ctttgccaccatgggggagaccgtaatgagcgtcaaaattatccgaaaccgcctcactgggtgacagagctgaatgaacctctctccaatgaagatcgaa

SEQ ID NO: 341342 - DNA, 85 bp, Homo sapiens
ctcctcggagtccttggggacggagcagcgcgtcgtggggcgagcggcagtaagactttgaccccgacgcaggcttcagtgattg

SEQ ID NO: 341343 - DNA, 74 bp, Homo sapiens
agcgccgagggcgagatcgtgcaggtgtcttctctttagggatggtgaggttggaaaaaggctcctgtaaccct

SEQ ID NO: 341344 - DNA, 100 bp, Homo sapiens
cgtcttgcacgtgcgaggggcatttcaggagtttcctgtctgtcaggtatgctccagaatcactgacagagagcaagttttctgtggcctcagatgtttg

SEQ ID NO: 341345 - DNA, 82 bp, Homo sapiens
cacgtctccaaaatgagtcgcatcttcaacccccatctataccatggcctgggagaccatcctgatggatacactggaggac

SEQ ID NO: 341346 - DNA, 98 bp, Homo sapiens
gctggctgctgaaggatgaacggagaggaagaattctttgatgccgtcacaggtgggctgggggccctgactggacctggcctggccagcttactggg

SEQ ID NO: 341347 - DNA, 75 bp, Homo sapiens
acccatctggccgggcagtaccttcttcaagagaaatggagcccttctccaaggagtatgctgctgctgttccgc

SEQ ID NO: 341348 - DNA, 113 bp, Homo sapiens
aggcacgtcctcgacctcagttgccacgtgcacatgctggtgccttccagggctgcctatgtcagatcagtatgtgaagctggaggaggagcggcggcaccggcagaagctgg

SEQ ID NO: 341349 - DNA, 83 bp, Homo sapiens
tgggaaagatctaccttctggaagctactactacgtggtgcttggaaaggttatggaaacaaaggacatgctttacatcgtca

SEQ ID NO: 341350 - DNA, 100 bp, Homo sapiens
tattatggctaataacacaacaagtttagggagtccatggccagaaaacttttgggatggactagaggcttttaccagatttcttaaaactgaattcagt

SEQ ID NO: 341351 - DNA, 75 bp, Homo sapiens
ggatggcagcgcagcctagttggaaaatgtttataggaggccttagctgggacactacaaagaaagatctgaagg

SEQ ID NO: 341352 - DNA, 100 bp, Homo sapiens
agaagagtgagagatggaacccgaagaagaaaggattcgttacagccagagattggtcctggacccaagccagaagcctctgcaaagcttccttccagac

SEQ ID NO: 341353 - DNA, 83 bp, Homo sapiens
ctacaccgaccagccgcacgccgaccggcgccgggagatcctgggtgaatgaaaactttgccattgatttgatagcagagcag

SEQ ID NO: 341354 - DNA, 75 bp, Homo sapiens
accgtcctgccttccgagatcgatgtgcgccaggagtacccactgccacacatgcctcatataagtgaatgcttg

SEQ ID NO: 341355 - DNA, 101 bp, Homo sapiens
tgtatggccgccgtcgcaagaagatctgggattggcacaagactctgctaccagcacaaagagcccaatccttcttggcagtctggcccatcagatctaca

SEQ ID NO: 341356 - DNA, 100 bp, Homo sapiens
agctgcagtgacatgtccagcatgaatcccgaatacactcaaaccagtgaagcttgggaaagtcattgacctccagtcgttctgctgagaaacatctggc

SEQ ID NO: 341357 - DNA, 97 bp, Homo sapiens
cgagccgggccgccgacgatgccgcggggccgccccccgaagcccagggagagcaaggcgcgcggcgactccggtgaaaggaaagcaagccaggatg

SEQ ID NO: 341358 - DNA, 75 bp, Homo sapiens
cagcctcctaagtagctgggattacagattgggaaaatgaggtacgttagtgttcgcgattttaaaggcaaagtg

SEQ ID NO: 341359 - DNA, 100 bp, Homo sapiens
tcgggatggcaccggttacactggctgggcagctatcagaggactcctgaaacctggagagctacctgctgtataaaggctggcctgagggcatttgctg

SEQ ID NO: 341360 - DNA, 100 bp, Homo sapiens
ttaaggaaacaggtgtaattaccccagaagagcttccctctgtgtgttgcagtcctgtggcattatgcatgccccctcccagtgaccccaggctttttat

SEQ ID NO: 341361 - DNA, 78 bp, Homo sapiens
ttatgagtacctttgtcatttggaagaagcgaagaggtgtgtgtggaggccagtatgaagctgaaaaagcaggtgaca

SEQ ID NO: 341362 - DNA, 87 bp, Homo sapiens
attcttttcagaatagaaaacactctgaaaagatggctaaattagggaagctgtacaccactaatggtagcaactctccaccctcaa

SEQ ID NO: 341363 - DNA, 74 bp, Homo sapiens
gcatctgagtcaacaacggatgaaaatgaagacgacattcagtttgtcagtattgttgaacagataaatacgaa

SEQ ID NO: 341364 - DNA, 85 bp, Homo sapiens
ttcttccaaggaaccagtgcgaaggaatttttgagagatatcttcaatctcctgtttttgttgccaagtctaaaggaccgacaac

SEQ ID NO: 341365 - DNA, 82 bp, Homo sapiens
tgtgatcgccagcgccggcctcctccgtgcggagaagaagctgcggccgcacctggccaagaaactagatgatggccattta

SEQ ID NO: 341366 - DNA, 82 bp, Homo sapiens
atagtgatgaagctgtaatcaataaaaaacttcccaaagaactcctgttacgatttgggaatggatgatgaaggagatgatg

SEQ ID NO: 341367 - DNA, 100 bp, Homo sapiens
ggagggggagactgtgccgtggagggcctcgccatgtcctgctgcccgtttggcaatgaggagcagcagctggcgtgggccaagcgggagagcgagaagg

SEQ ID NO: 341368 - DNA, 89 bp, Homo sapiens
ggactctgcacactcttcggcctgacgcccaccctcaatggcggaccgtggctgagcatggagctgtccccccgcagtcctccggagat

SEQ ID NO: 341369 - DNA, 100 bp, Homo sapiens
gtaagcgcagaaagcaggcgaacccgcggcgcaataacgatgccagatatacgaaacccagaaggaactcagtacagttcccatcctcagatggcagcca

SEQ ID NO: 341370 - DNA, 100 bp, Homo sapiens
aagaaaatacttttcttcaatgataagagctgtcagttttctgtggatgaagtggtcatctccatcagaggcaactgaaagtttcttatcaaaagaaatt

SEQ ID NO: 341371 - DNA, 82 bp, Homo sapiens
caagaaacatctcaccaatttcaaatccgacctcccagtgccaagtgtataagcgtgtccagaattggtgggtctcactgac

SEQ ID NO: 341372 - DNA, 51 bp, Homo sapiens
ccagtttcaagcagtattaagagtaaatgcgaaaccttgaaagccatttga

SEQ ID NO: 341373 - DNA, 97 bp, Homo sapiens
ggtggagatgcgggcaacgacacaagaaacacaacttcagacttgcagaaaaccagtgaaggggcctgaggacttgcgccgtgagtttggtcgatat

SEQ ID NO: 341374 - DNA, 100 bp, Homo sapiens
caatgtcaaccgcagcgtgtcagaccagttctatcgctacaagatgccccgtctgattgccaagggtgtccgcaatgttgccagtgtctgtctgcagatt

SEQ ID NO: 341375 - DNA, 83 bp, Homo sapiens
tgctgagccagcggagctgcttgacgccatcctgggcctggaggaagtgcggctgacgccatccatgaggaaccggagtggcg

SEQ ID NO: 341376 - DNA, 101 bp, Homo sapiens
taccatcctggtccaaacatgaaagaattcccaacatcaagattgattgaaacatattcaatgggctgttgaagctcaaatccgaagttttggacagactc

SEQ ID NO: 341377 - DNA, 100 bp, Homo sapiens
tggctcactacgacaccaccgctgatgagatcctgcagcagtgtgatggccaccagcccctcgggttccaagatgcagctactggagacagagttctcac

SEQ ID NO: 341378 - DNA, 101 bp, Homo sapiens
tcatctgttgcagaagaataggaacctctacttccccaccaaaaagtggcacacactggagagatatcaggccaagaccagcttcaagtctccatggtacc

SEQ ID NO: 341379 - DNA, 82 bp, Homo sapiens
gcttagacgctggatttttttcgggtagtggaaaaccaggaagcgccgcggagccatcaacagcaagcagctcacctacctg

SEQ ID NO: 341380 - DNA, 98 bp, Homo sapiens
tgatgagattttttcagcaacaaggtttggccggaagaatgtgctgttcgtgaccatgggcatgcagacaggcttcagcttcctgcagatcttctcga

SEQ ID NO: 341381 - DNA, 101 bp, Homo sapiens
cccagacaccggtgtcatgagcaggaaggaaccgctggaaacactgaagaggtgaacggaagagtccttatgttgcagtatgctgtatagtaatggccttc

SEQ ID NO: 341382 - DNA, 50 bp, Homo sapiens
atgcatcgtcccctggactctctcaaaaaccttccttccttccagatgtg

SEQ ID NO: 341383 - DNA, 80 bp, Homo sapiens
ccattttctgccgctggacgcaagggtgaaaagttcggaccctttgctggagagaagagaatgcctgaagacttggatga

SEQ ID NO: 341384 - DNA, 88 bp, Homo sapiens
caaaaagtttgtccacagagacttggctgcaagaaactgtataaagcacagctgagtacaagctaactggagtaactttgctgttttg

SEQ ID NO: 341385 - DNA, 83 bp, Homo sapiens
aaataggatttaaccgctctctgcctcccaggtggacgacatccttggagaaggcagcgacgacagcgacagcgagaagagga

SEQ ID NO: 341386 - DNA, 83 bp, Homo sapiens
ctagcgctggccgcgaccccggcgccacaatggtgcgcatgaatgtcctggcagatgctctcaagagtatcaacaatgccgaa

SEQ ID NO: 341387 - DNA, 74 bp, Homo sapiens
gtcacaggccctgtcattgcgcctctcttcccgcagtccaatggatgggaccccaatgaaatgttcaagttcaa

SEQ ID NO: 341388 - DNA, 74 bp, Homo sapiens
atctaagactctgggacactcctgaagtcgggaaatggtgacatcactcaaaaaggatatgaaaagaaaagggc

SEQ ID NO: 341389 - DNA, 100 bp, Homo sapiens
gtgttggctaaatccactgaaggaacagaaacaattgaaggagtctataacacagctccagtgatcattctacatatattgtacaaacactagattttca

SEQ ID NO: 341390 - DNA, 51 bp, Homo sapiens
cgctgccgccgccgcgcgcgggatgataatgaagataattcaaatgatggg

SEQ ID NO: 341391 - DNA, 105 bp, Homo sapiens
ttttaacctggaggatgcagtgaaagaaacttcctcagtaaagcgctccatggtccccttctcgatgcgcatcttgcacgcggagcttcagcagtacctggggaa

SEQ ID NO: 341392 - DNA, 98 bp, Homo sapiens
aaaaggagagcctctgagctcaacggaggattgtgcctgagaagaacccacagagggcaaggggacgcgagataaggtcctgatcagaatcatggtct

SEQ ID NO: 341393 - DNA, 50 bp, Homo sapiens
tcgctgtggagatcatggactatgaaggctggaatgcaatggcgcaatct

SEQ ID NO: 341394 - DNA, 74 bp, Homo sapiens
cgcgcccatggcagagccagaccaggagcccaaggtgggcatcaagaccatcaaggtgtactgccagcgcatgc

SEQ ID NO: 341395 - DNA, 80 bp, Homo sapiens
aggaggcaggacgtgcccggccccgcgtcgtctggcgccgccgccgccagcgcgaatttcgctaaggagtttgtgatcag

SEQ ID NO: 341396 - DNA, 90 bp, Homo sapiens
agctaatgtccccacccatctgctgctcatgtgttgtgtactccggttgctatggaaatacatgaccacgcaaaaggaagtccattctga

SEQ ID NO: 341397 - DNA, 82 bp, Homo sapiens
gccaagctgatccgacagagaaagttgatgcgatgaagagagttgaagaaatcaaacagaagcgccaagctaaatttataat

SEQ ID NO: 341398 - DNA, 99 bp, Homo sapiens
ctggaatcccatttgtttggggttggtagaaggtgttattgggaaaattcaacttcattcagatgcagtacctctttttctgagacttcttcgttcacc

SEQ ID NO: 341399 - DNA, 74 bp, Homo sapiens
gctcgcgctactctctctttctggcctggaggctatccagcgaaggtgggagtcaatcattttgacaagtctcc

SEQ ID NO: 341400 - DNA, 98 bp, Homo sapiens
cggctggctgactacttcatcgtggtaggctatgaccacgagaagccagtacttcctcgcgtattgctaaaggaggagttgaccacaccaaaatgagt

SEQ ID NO: 341401 - DNA, 101 bp, Homo sapiens
atcccaactcaggactccacacaattaaccttgctggcaacccactggaggatagagattcatagtgaccacttagtagctagtgagaaacagcatatgct

SEQ ID NO: 341402 - DNA, 95 bp, Homo sapiens
acagggcagacgttagcgtgagtgatcactctcaatcccgggcagaaatggtgcacagtgctttccaggcccagcgggctttccttctgatggcc

SEQ ID NO: 341403 - DNA, 97 bp, Homo sapiens
actgttcatcctcacctatgcaaagaaagggaagctattgctgggattttgaggaggcctcccagtagcattggatgcaggaaaaaatacattgacg

SEQ ID NO: 341404 - DNA, 100 bp, Homo sapiens
ggatgtcgggacaccccggaagctgggaaatgctggcggcaacccgcgatctctagagaacagcctggatgaagaagtgaccatcgagatcgttctctcc

SEQ ID NO: 341405 - DNA, 90 bp, Homo sapiens
acttcacatactcaccatacctcccctgtccagaaaagctgccttatatgcgtcagaagagatcaattctacagaaatttccagtggttc

SEQ ID NO: 341406 - DNA, 100 bp, Homo sapiens
ttagaagccgggatgttggaccctcccttcgttccagacatctttaatctcatgaagtacgacagctacagccgcttcttaaagtctgacttgtttttaa

SEQ ID NO: 341407 - DNA, 100 bp, Homo sapiens
cctcagcaacctgacaattctgtcgtgtcccgaaggcagacggtaacaagtactccttgctggattgaacttcatctgaatggacctctacagtggttgg

SEQ ID NO: 341408 - DNA, 100 bp, Homo sapiens
ctcggcccggcggctcccagtgccgcgcgccaagatccattcgttgccgccggaggggaagcttgggatcatggtacagagcatgaagcagacgaacagc

SEQ ID NO: 341409 - DNA, 100 bp, Homo sapiens
gaagacactacaggaagtggagctacagatagtaaagatgatgatgacattgacctctttggatctgatgatgaggaggcaactttggctttggggattc

SEQ ID NO: 341410 - DNA, 100 bp, Homo sapiens
gcaaaaatgacatcaacattctgaaatgtggcagtattcggcttggagaaaaggttctgccattacaggaccagtagcaaaggagtgtgcagacttgtgg

SEQ ID NO: 341411 - DNA, 75 bp, Homo sapiens
ccagagtcacacacggtcctaagagctgggcaccaggaagcgaaggctggtcccgtggctgtcatcagtggtgag

SEQ ID NO: 341412 - DNA, 89 bp, Homo sapiens
tgtcgccatgggccgccgccccgcccgttgcctgcttagacgcctggtgactctcatttcgcagcaggccacgctgctggcctccaatg

SEQ ID NO: 341413 - DNA, 96 bp, Homo sapiens
ccccagtcggtgctccggggaggtcacctgacgaggagttgtcgagatgtccacagaaggaggatttggtggtactagcagcagtgatgcccagca

SEQ ID NO: 341414 - DNA, 99 bp, Homo sapiens
gcataatatgtatgccaaagcagcagccttctcgacagccttttactgtgaacaggaacggcagagtcgaaacaaacaatgagggcgaaccagtttctt

SEQ ID NO: 341415 - DNA, 82 bp, Homo sapiens
gagagcggcgaggcggcagccacaggcatctcccctcagatggaagtcacatgtgtgcccacgcccacaagcacagtgtcct

SEQ ID NO: 341416 - DNA, 83 bp, Homo sapiens
caagaagttggagaagaggctgttaaagaagcatgagcaaaagcgaaagcttcggatctacatttccaatacgttcagtccca

SEQ ID NO: 341417 - DNA, 82 bp, Homo sapiens
ccaggccctgaacgcggactggcacgcagactgcttcaggggacccaagtaacagggaggaaagcagatgttattaaggcag

SEQ ID NO: 341418 - DNA, 97 bp, Homo sapiens
gtggtagccttaaaggatgtagtaacaagagtcccgtggttccagctacacttattagtgaaaccaatccgtaatctaaatggacattcaattgggc

SEQ ID NO: 341419 - DNA, 100 bp, Homo sapiens
ggagcgggtgctgcaggcgccgccgccggacgtcggcaacggagaagatcgggtgctaccaaggttttgcttttgcatggaaatgtctactgcacagttg

SEQ ID NO: 341420 - DNA, 75 bp, Homo sapiens
cctcagagtaaagctgctggacaacaccatggaaatatttgacattgaggtgcgttccatggatgaactgaatca

SEQ ID NO: 341421 - DNA, 75 bp, Homo sapiens
gggaagcagaagcaaacagaagaccccttcctgagttggttgattcttcaccacactgaaaccattaggaaaaat

SEQ ID NO: 341422 - DNA, 101 bp, Homo sapiens
agaccctacagaccaggcactccgtcagtgagatggcctccaacaaggaagacaactgttagttttgtggcttactgctgctccacccagtgtctgcagac

SEQ ID NO: 341423 - DNA, 51 bp, Homo sapiens
ccttcgacgggcacaacctcaagggacagaagatgagcctgtcggtcctgg

SEQ ID NO: 341424 - DNA, 75 bp, Homo sapiens
ccggaatggagggctccgggcccaagtttgaggaggtccaagcatctcattttgaaggcctaatcacaaccatag

SEQ ID NO: 341425 - DNA, 83 bp, Homo sapiens
aagatcaagaggtggagctggttgtagattattgaagcagccgacacgagtcgttgttcataaaacagcttttgaaagttgag

SEQ ID NO: 341426 - DNA, 100 bp, Homo sapiens
tacatcctgagctacatggccccctggtttagggaggacctcagaaagtactactacagtaaaaagcaaagttgatgaaagagaaaaatatatgatagga

SEQ ID NO: 341427 - DNA, 97 bp, Homo sapiens
atttgatcttctgatgaagttatcaaaaacagctgtacattttcaggcactggtgaggtggattgatgatgaatcttctggcacacctggagcaact

SEQ ID NO: 341428 - DNA, 74 bp, Homo sapiens
tttccggtggtgggaaagtgaacgaatcccgaatcaaagcggcgcattgagtaatctatgccagcaattatgac

SEQ ID NO: 341429 - DNA, 98 bp, Homo sapiens
cccgggcggaaggcgagcggagcgcggccgcgcgggcagcagacggcagacggtgcccggcgcccacgggtaaagatgacggcgccttgaggtaagct

SEQ ID NO: 341430 - DNA, 95 bp, Homo sapiens
agaatgtgatctcagcaccctacatgcgcagcatgatgcagacgcttgcccagaaccccgactttgctgctcagtgctgcattagacgtggaact

SEQ ID NO: 341431 - DNA, 138 bp, Homo sapiens
ggaaagtgaggcagctgcaaggagggcggcgggactgcactcgagtgtccagacctgctcgatgggagaactaatgccgacgtgatgaccgccctgtcccagggctacaggatgccccgtgtggagaactgcccagat

SEQ ID NO: 341432 - DNA, 75 bp, Homo sapiens
gactatgtacgctacatggtagagaaccacggggaggactataagtgctggccattcaggcccgaaagcggaggc

SEQ ID NO: 341433 - DNA, 88 bp, Homo sapiens
cagcaactgaggcagcggcaggctcaggtgcagccgctggcacctctcggccatgctgagctccacggcacgggcagcacaggcaccg

SEQ ID NO: 341434 - DNA, 90 bp, Homo sapiens
gacgtggcttgaattgggaggggggcagctggagcctcaggcggcagcgcttctaggtgaacatgtcaaaccttttaagccagagaaagc

SEQ ID NO: 341435 - DNA, 82 bp, Homo sapiens
ccagtgctgcctgcattcgcggggcatgttcccgaggctgtcaccagcaattctgtggtgttcttggtcacacatttatgga

SEQ ID NO: 341436 - DNA, 101 bp, Homo sapiens
cagctttgcagcccccgaacgcggcctcgcacagttggtgcttcccgtgctgctgttgatgctggctttgttcccaatgacatgcaagttggacagacggg

SEQ ID NO: 341437 - DNA, 82 bp, Homo sapiens
ccacggcctcagtggcttggtccagtaccagatggcacagctgctccgggaccgtgaagtggggcagcgtgagcaatccact

SEQ ID NO: 341438 - DNA, 100 bp, Homo sapiens
gaacacgaccatctccctgctgaccaccgacgacgccatggtctccatcgaccccaccatgcccgcgaattcagaacggggcataaggaaatggtggcag

SEQ ID NO: 341439 - DNA, 75 bp, Homo sapiens
agatgacagacttggacaacatgtcccaacattacatcccaatcactttgggaagcagtgacatccaacctgtat

SEQ ID NO: 341440 - DNA, 75 bp, Homo sapiens
gctgcccgccagggcccagatgatcagccaatcagtgtcgccgcggttcctggttctaaagtcctcgccggccca

SEQ ID NO: 341441 - DNA, 100 bp, Homo sapiens
caagcatgtacggcaaaggcaagagtaacagcagcgccgtcccgtccgacagccaggcccgggagaaacctcacattccaatcagcaaattagttgtttc

SEQ ID NO: 341442 - DNA, 80 bp, Homo sapiens
ggctgtttggaaagacccaggagaagccgcccaaagaactggtttgatctgtggatgaaatgaatcatgattttcaagct

SEQ ID NO: 341443 - DNA, 100 bp, Homo sapiens
gtgaaggattcgggcgcctgcttcagtggaagtggcagtttttgtctttgataaaaaactgattgacaagtatcaaaaatttgaaaaggatcaaatcatt

SEQ ID NO: 341444 - DNA, 100 bp, Homo sapiens
ccacggtcagcgtcatcaccatcagcagtgacacggacgaggaggaggaacagaaacacgcccccaccagagattatggagaagtctggcgaggaaggaa

SEQ ID NO: 341445 - DNA, 101 bp, Homo sapiens
aatttgcaggatgggagggctcagggtgtgcgttcccctctgctgaggcagagctccagtgaacagtgcaggttctgggccggagaaggggcgacgttcgg

SEQ ID NO: 341446 - DNA, 50 bp, Homo sapiens
tggagtaggaggcaggtctccgcgatctattcggcttagcgactgaagat

SEQ ID NO: 341447 - DNA, 74 bp, Homo sapiens
ctggccttgtgggattggctgtgtgcaatactcctcacgaggtttgcctgcaatgagatttcattctctacatt

SEQ ID NO: 341448 - DNA, 81 bp, Homo sapiens
ctgagatgttccctgtctcacgccatcactctgcagaatggggaaatggagagagaacctgaaagagccccaaactcgagg

SEQ ID NO: 341449 - DNA, 97 bp, Homo sapiens
caaacgtggagatcaactcctctctgttaatggagtggccaagtttcttcctaacagtggtgattctactctggccatgtgtgcccgtgacgggcag

SEQ ID NO: 341450 - DNA, 75 bp, Homo sapiens
ggccaccatggttctggtctcctggatcatgtggacagtcattttgtttactcattcagccctgttgcaggtccc

SEQ ID NO: 341451 - DNA, 82 bp, Homo sapiens
tgcgcctgcggaggcggtcctatgacggtccctgtgcgttttattgcgacctgccggtgggaactttgtctccgagtcggag

SEQ ID NO: 341452 - DNA, 50 bp, Homo sapiens
tttgagcccggaagcgcagaagctggaatattggtataatagcatatatg

SEQ ID NO: 341453 - DNA, 98 bp, Homo sapiens
tgaatggctcaaagaaaagcaaaccgatgtccaggggtcttgtgcaggacctgaaagtattccctcgttatgccacgaccagataagaatcaccagtg

SEQ ID NO: 341454 - DNA, 83 bp, Homo sapiens
ctccccgcaggctcgcagactcacctgatcaccgggaccaagaatcgccttcagccctgtctggtgcatccttggcagaaagt

SEQ ID NO: 341455 - DNA, 82 bp, Homo sapiens
gtagagtcgctggagcgggcggagctgtgcgagagcctcctcacttgggttgacatcatggacatatgtgagtccatcctgg

SEQ ID NO: 341456 - DNA, 96 bp, Homo sapiens
agtcgcgcacaagtgttatctctgtaccgggcgatgctgagagagagcaagcgtttcagcgcctacaattacagatggagtctcaccctgtcgccc

SEQ ID NO: 341457 - DNA, 95 bp, Homo sapiens
tcatagaccagaaccttagtcccgggaaagggccacaggagaatggtatgctgctcggcatggagtgaagaccaccccgtgtgcaatctgttcac

SEQ ID NO: 341458 - DNA, 100 bp, Homo sapiens
caggagtcattttggatttgggctgacctggtagacttctgaaagacagtgctctgggttcaagttgtcctcaggctggagcattggatttgctaaagga

SEQ ID NO: 341459 - DNA, 80 bp, Homo sapiens
gccgtggcggctggaggtagcggcggcggcgacgcgtccgggccgttcaaatctgaacatcaatgatgtactagggaact

SEQ ID NO: 341460 - DNA, 75 bp, Homo sapiens
tatgacaggcctcggggtcgtcccatgtccaaaaagaagatgggactgagtatgggctgagtgaagctgacatgg

SEQ ID NO: 341461 - DNA, 100 bp, Homo sapiens
gcctcaacaagggccacaaagtgaccaagaacgtgagcaagcccaggcacagccgacgccgcgggtttgcagaccaatacatctggtcagaagacgtggc

SEQ ID NO: 341462 - DNA, 100 bp, Homo sapiens
ggaatacctggcattgacctctcagatcccaaacaactggcagaatttgctagtgttatagttttgccgctggactcttccctcccttcccccaccccat

SEQ ID NO: 341463 - DNA, 75 bp, Homo sapiens
gcccaagtggcggggactactggtgcctgcgctgaaaaagtggctacagcaaaccaaacagcccagcagcccagc

SEQ ID NO: 341464 - DNA, 76 bp, Homo sapiens
ctcagcctcccgaatagctgggaccacagaactctcagaaattgagcccaatgtattccttcgaccttttctggaa

SEQ ID NO: 341465 - DNA, 82 bp, Homo sapiens
aaagaaatagaaaatttgaagggtattgttccagatcttaacagtattctgctagcctaccaagaatccaagacacattttg

SEQ ID NO: 341466 - DNA, 75 bp, Homo sapiens
cagccaataggacatgatccaggaagagcagtaagggactgagctgctgcacaaacgtgcagatatctgatagcc

SEQ ID NO: 341467 - DNA, 75 bp, Homo sapiens
ctgagaaactggaccaccatcctgaatggtttaacgtgtacaacaaggccaagtataaggagcgagggacggtct

SEQ ID NO: 341468 - DNA, 97 bp, Homo sapiens
gatgaagttcgagcactaatatttaagaaagaagatgttaactttcagctgcttttctaacccaaactgtatgtcttgatgacactacagtaaagtt

SEQ ID NO: 341469 - DNA, 98 bp, Homo sapiens
cctatggcgcctggtcccccagtgttgggtactggaagatgaaagagactatacaagggaccgggtcctgggggcctgagcctcctggacccggcata

SEQ ID NO: 341470 - DNA, 100 bp, Homo sapiens
aggacctgccactatgatgccggatggaactttgggattggtgaaggccatggaggtggacatagaggagaggcctaaagagcttgtacggaagccctat

SEQ ID NO: 341471 - DNA, 100 bp, Homo sapiens
agagctgttaacacttcctagataacgggtgctggagaatctggtaaaagcaccattgtgaagcagatgaggatcctgcatgttaatgggtttaatggag

SEQ ID NO: 341472 - DNA, 95 bp, Homo sapiens
cacgctggactggtgcgaggagaactactccgtgacctggtacatcgccgagttctaaaaccagaactgatggctctatttgcagtctttcagac

SEQ ID NO: 341473 - DNA, 137 bp, Homo sapiens
ctagaagcagcccaggctttgcagaatcttgcactcatgagacctgaattggtaataccccctgtacttgaaagctggatcatcattgaactaaaacacaaagcaagagaaaaaccttatgatagtaaaagtttgcg

SEQ ID NO: 341474 - DNA, 75 bp, Homo sapiens
agcaagttgaagcccgaagttgtggaggagctgaccaggaagacctactctgagcgtgctccgcctctcaccttc

SEQ ID NO: 341475 - DNA, 111 bp, Homo sapiens
aactattacaatcgcttgtacaaaggagagtttaaacagccaaaacagttcattcatattcagcgagaagctgtgcctgaggatgaacagatcagtgccaaggaccagaag

SEQ ID NO: 341476 - DNA, 51 bp, Homo sapiens
caggaggccaggggtgtcgccatggatccagccgcagaagccaggatgaag

SEQ ID NO: 341477 - DNA, 88 bp, Homo sapiens
ttgaccatcttggtgagaaacattaagacctactaccagccagagactgctgctactttgaaacgtacgatagaggccctgatggaca

SEQ ID NO: 341478 - DNA, 100 bp, Homo sapiens
gagtatacattcagtatcatggatgaatttcaggtgtgatccctcacatccacaaatctctgattggaaagaagggacagcagaaaactgcttagaggga

SEQ ID NO: 341479 - DNA, 75 bp, Homo sapiens
ggaatacctggagtcaaagcagttccttcaccgagacctggtcaccaagaagttctactcaatgggctgctacga

SEQ ID NO: 341480 - DNA, 90 bp, Homo sapiens
cgagaatcaaggcgttgagcctcaaggaaatcgctgataaagatgggaacaataaagttctgtctttcactatcccctccttatccaagc

SEQ ID NO: 341481 - DNA, 97 bp, Homo sapiens
gcggctcgggctcgggctccgctctcaagaggcagaatttatataataatcctttcaactctatgagttacaccagtccttacagtccaaatgccag

SEQ ID NO: 341482 - DNA, 75 bp, Homo sapiens
gtctcatcccagaaagagaagactttaaccactgtgatgcctgagaatccatgctcctcacatgggtcaactgtt

SEQ ID NO: 341483 - DNA, 82 bp, Homo sapiens
gcagtgatgatggagctcagccctccacctccacaggtcttctcagtacagcatggtggctggggcaggccgagagaatggc

SEQ ID NO: 341484 - DNA, 98 bp, Homo sapiens
cggctttgccaattccgccatggagcgtatctgtgagaaacgccggcacgaaggcctcccagaaattgaccttggctcccaaactatataacaagtac

SEQ ID NO: 341485 - DNA, 97 bp, Homo sapiens
tcctgctggccctcatgacagtggtcatggccgtgtgctccctgcctctcacgctgtctgacagcaaagatgcttttaagaagacgtggaaccccaa

SEQ ID NO: 341486 - DNA, 96 bp, Homo sapiens
cctggagccaggggggccttcggaacagatgcacacccttcctgggtgatgacattgcctaagatactgagccatatcgccccagcattttgcatg

SEQ ID NO: 341487 - DNA, 90 bp, Homo sapiens
agatcattcgctgcttgaaagcttttatgaacaacaagagcagcactttccagaggtgatgctaggagaagaatttcttagcctgagtct

SEQ ID NO: 341488 - DNA, 100 bp, Homo sapiens
tctttcatctctcccaatgtttcagccaagtagtaagaacactgagaagggattatctagcattaaaagctccaggtgctccttcagctccaaggagagg

SEQ ID NO: 341489 - DNA, 100 bp, Homo sapiens
atggaatattgtcgcaccccatgcactgtcagttgcaatattcctgtggtgtctggcaaagtacaagttgtgcaaagtgaggaagattactgtgggagtg

SEQ ID NO: 341490 - DNA, 75 bp, Homo sapiens
ctggaacgtctttagcaaaacccgttcgacaaaggtggagccgccaccaaaatgcagattttcgtgaaaaccctt

SEQ ID NO: 341491 - DNA, 75 bp, Homo sapiens
cctgatgccccttccccaagaaggcaaccaagttgttaaaagccttgaaaggctacattaaacatgaggcaagaa

SEQ ID NO: 341492 - DNA, 103 bp, Homo sapiens
cccggttggtagagggtttgagtccgcatcgccacagctgaaggctgcgagggactaagagcagacaaaaaatcgtggaattgccattccagtggatttggac

SEQ ID NO: 341493 - DNA, 50 bp, Homo sapiens
tgagttcaaagccccagggattccctcagcaatccaagcctccactgagg

SEQ ID NO: 341494 - DNA, 99 bp, Homo sapiens
ccacggagtgtctcataaacggctccttcctttgagaagctgcacacatacatgtaagagaagcaaaaatgtcagatgatatcaggaaaaggtttgaat

SEQ ID NO: 341495 - DNA, 100 bp, Homo sapiens
tattcagacagcaattaacaaagaccagccagctaaccctacagaaggacctgatcccaaccttgaagaaagtcctaaaagaaaaaatattacatatgag

SEQ ID NO: 341496 - DNA, 98 bp, Homo sapiens
ggaagcagctggcttcactgctcaggctgagaagaaagccaaggtcattgcaggaatgaatgctgtggaagaaaaccaggggcccggggagtctcaga

SEQ ID NO: 341497 - DNA, 75 bp, Homo sapiens
caaacttggaaagagcaagatcggcagccctaaactgtctcgagctgaacagcgaatgaatagattggatcagtg

SEQ ID NO: 341498 - DNA, 109 bp, Homo sapiens
gaaagctcttcttgaaaaatgcaaagatgtagatgagagaaatgagaggagaattctgcctaagccaactcgaaaaagccgtacaaaaaataagcaaaagcgtcccagg

SEQ ID NO: 341499 - DNA, 75 bp, Homo sapiens
ctcaaggaaacctttccaacacagatgtccaagctgccaaaacatatgcagtaatgtcacctcaaaagagagtta

SEQ ID NO: 341500 - DNA, 100 bp, Homo sapiens
ccgggatcgtgaccgagaccgtgaccgagagcgtgaccgagagcgcgaatatcgtcatcgttagaagggacaagatccaccagctcctcctgtggactaa

SEQ ID NO: 341501 - DNA, 75 bp, Homo sapiens
aacagacgctccctgtgatttatgtcaaggaatgatgagaagacagcagctgattacaagattttaggtggttca

SEQ ID NO: 341502 - DNA, 97 bp, Homo sapiens
cttcaaagcacataaaaacactttctgaagctcatgaagactgtgtaaataatatcaggcattggcacatctccacttaatagaatatgttggagaa

SEQ ID NO: 341503 - DNA, 90 bp, Homo sapiens
accatcatgctgcgcggccttcccatcaccatcacagagagcgatttacaagacctaagttccaagaagcagcagtcccacaacattctg

SEQ ID NO: 341504 - DNA, 107 bp, Homo sapiens
gggaagcagcgtgagcagccggaggatcgcggagtcccaatgaaacgggcagccatggccctccacagcccgcagattggccttaagagaaggacggagccacatac

SEQ ID NO: 341505 - DNA, 83 bp, Homo sapiens
tgccagtattgccactcccgcacggagcagcagttccatcccgagccctgggcgctgcctatggcacagccaagagcggtacc

SEQ ID NO: 341506 - DNA, 98 bp, Homo sapiens
ggaaggggcagtacaagcttacgtctctgctcttcagtacaatcctgtgatcttattcctgataatgttggttatgcgcaaacgtgttgctcttacca

SEQ ID NO: 341507 - DNA, 110 bp, Homo sapiens
gtcccgggggcgcagggaaggagggcgtccgagtcaacaaccgcttcgagctggttctgcggggagtgtctccagccctgcctgcaggtgccatccccgctgtgcccact

SEQ ID NO: 341508 - DNA, 99 bp, Homo sapiens
gccgagccggaactgcggcagtctctccctgccaggctcttcatccaagtatgaaggctatgaagtagagtcatctttaaaggatgccagctttgagaa

SEQ ID NO: 341509 - DNA, 82 bp, Homo sapiens
ccatcgtgcgggtcttgcaaaggtatccagggtgtgagcaagcagaactcagacagctctgtcatgctgaagctggaaaaca

SEQ ID NO: 341510 - DNA, 98 bp, Homo sapiens
agaacgtctacaaagccgtaggccactacaacgtggctatcccctctgacgtctcccacttccgcttccatgtagttttggatgttgggtgtggaact

SEQ ID NO: 341511 - DNA, 100 bp, Homo sapiens
caggggccactcagagtcgcccgagaagaaggagtcaagactgagaacaacgatcatattaatttgaaggtggcggggcaggatggttctgtggtgcagt

SEQ ID NO: 341512 - DNA, 97 bp, Homo sapiens
catcggtagtcaacgggtctgctttcccctcgggatcaactcttccaggaccaccaaaaataactttggctggactcttgctctgtcacctaggctg

SEQ ID NO: 341513 - DNA, 100 bp, Homo sapiens
ggacgcaactggaaacagtacaaacaagaagacagcatctggaacacagatatgtagaactcttcttgaattctacagcaggagcaagcggtggtgctta

SEQ ID NO: 341514 - DNA, 83 bp, Homo sapiens
aagtaaaaaagaaggaggcacacaaaagacatctactcttcctgcagtactttataggcacttttaaatcaacttagagctgt

SEQ ID NO: 341515 - DNA, 87 bp, Homo sapiens
cttatgagtggaacatggctagcaggaatgcttactgttgcgtggttcgttattaacagatatcatttgaggatgtggctgtggatt

SEQ ID NO: 341516 - DNA, 83 bp, Homo sapiens
cttatgagctcggttttcttatgcttataagagtggaacagtgtactaatggtcacttgatgtgcgctggctgttttatccac

SEQ ID NO: 341517 - DNA, 87 bp, Homo sapiens
ccctgaaggcctcgctggagatcgagtaccaacttcaggatgagttagagaaaggtgaacgggacaatgcagaactgcaggagtttg

SEQ ID NO: 341518 - DNA, 50 bp, Homo sapiens
cgtagtcctgggagcacagcagaagtagaatggatcttggagaatgtctg

SEQ ID NO: 341519 - DNA, 100 bp, Homo sapiens
tgggaacccactgaggcacccggacctcgtcaggccgctgcagatgaccattccagagaatagtgacagtggtacaggaaagaaagaaaaagaaaagaaa

SEQ ID NO: 341520 - DNA, 96 bp, Homo sapiens
ttggaatttgtgcaatgtttagccaacccaaattaccttaattatatgaattgagaattcgttatttgccaaaaggatttctaaaccagtttactg

SEQ ID NO: 341521 - DNA, 100 bp, Homo sapiens
gtgagcgcccccatcccggaggtctccgccggctcccggtactatactggcaattgctggagaagattttgcaattgttgcttctgatactcgattgagt

SEQ ID NO: 341522 - DNA, 100 bp, Homo sapiens
ctcggcctccccttggattcagacgccgattcgcccagtgaatgatttgggaggggacttcaaaggagttggtaaaggctccttagctgctgataaggtt

SEQ ID NO: 341523 - DNA, 100 bp, Homo sapiens
ctaggtcttgtatgaaacctgtgagcccttgccagcatccagccatgggggatatgaaaaccccagattttgatgaccttctggctgcctttgacatccc

SEQ ID NO: 341524 - DNA, 88 bp, Homo sapiens
cgcccaggtggccggcgcttcaggaactccttgcctttgccgattggaagcattaacaatttcatcctttctacgtgactgtacaatg

SEQ ID NO: 341525 - DNA, 100 bp, Homo sapiens
tgcgcccgcgtcttcagggcccagtccctcggacccatcgccgcttctagaccctactgcggtctcggatattgccgggggccgccccatcgtgtccgct

SEQ ID NO: 341526 - DNA, 100 bp, Homo sapiens
aagcagcagctcaccgaggacggggactcggtcgagctgtgcagttttagcgggtacaagatctaccccggacacgggaggcgctacgccaggaccgacg

SEQ ID NO: 341527 - DNA, 90 bp, Homo sapiens
tatgccagcagcttgttgtacaccatgctgtgacctacaagcaaactaaatagccaacatttctgaacccctaagtctcctgtgccaagc

SEQ ID NO: 341528 - DNA, 74 bp, Homo sapiens
acctccaaacccaaaatccactgcttcaggagcctaaagcgtgggaggttggaaagaaccatgactgtattcag

SEQ ID NO: 341529 - DNA, 90 bp, Homo sapiens
aggccgcacaggaacaggagggtctgatgtcctccagatgggcttcgacggcttcttctttgggcgccttgattatcaagataagtgggt

SEQ ID NO: 341530 - DNA, 51 bp, Homo sapiens
tgttagcctttgcagtctcgacataagtggttccagctgagccatcttccc

SEQ ID NO: 341531 - DNA, 75 bp, Homo sapiens
ccaggactgcctgagacaagccacaagctgggagaagtgaaatgacaacctcactagatacagttgagacctttg

SEQ ID NO: 341532 - DNA, 75 bp, Homo sapiens
tagaaaacgggctagaaaatttatagactctgatttttcagaaaggtgttcagtggaatcacacttacaaaattt

SEQ ID NO: 341533 - DNA, 102 bp, Homo sapiens
tccgagctgaagcagctcatccaccagcagctgagcaaggtcccagcgactccagtttgatgtctcttcccccaatggcatcttactcttccgagaaaccag

SEQ ID NO: 341534 - DNA, 74 bp, Homo sapiens
atcctagaccaagtgataaactgaaccctaaaacaattaatccggctgtattcatcaccaaagaaaaaacttac

SEQ ID NO: 341535 - DNA, 100 bp, Homo sapiens
ggactttgcagaaatgtgtgcagactacatggcatctaccatagggggaaggaagccatgctgaagcaccgggactacgagacggccacactatcggaca

SEQ ID NO: 341536 - DNA, 89 bp, Homo sapiens
atccgtttgttcaggaaccaccagtgacagagaccaggagctgcattatctattctagacaaatttcttgaagaatcctccaaactgca

SEQ ID NO: 341537 - DNA, 50 bp, Homo sapiens
tggagaagctgaggacacacaggaaatgctgagccgattatcaggattag

SEQ ID NO: 341538 - DNA, 88 bp, Homo sapiens
ttccccatgcaggaccagaggaagtgggcagaagaactccaggcgcaagcgggatcttgtactctcttcataccctaatgatcccagc

SEQ ID NO: 341539 - DNA, 73 bp, Homo sapiens
caaaacccctcgcctggctcggacccacggagccggcagcccagcactccgctacgtcaaaagctacctcctc

SEQ ID NO: 341540 - DNA, 75 bp, Homo sapiens
agagaatggctgctttggaagataagcttgaattcggagtgatttaccactgcacagaggagcggctgtacacgg

SEQ ID NO: 341541 - DNA, 90 bp, Homo sapiens
tttggctccagaaataattctcagcaagatcatgcaacagatgagtgaccaccgctacgacaaactcactgtgcctgatgacatagcagc

SEQ ID NO: 341542 - DNA, 83 bp, Homo sapiens
gcagctggaccggcaaattaaagcaattatgaaagaagtcattccttttttgaaggaatgtgaattggacccttgctgcgaag

SEQ ID NO: 341543 - DNA, 75 bp, Homo sapiens
tgctgcaaggaacttccatgcctctaacactcatcttcaaaagactgttgtggaagctgatcgaggaagcctaag

SEQ ID NO: 341544 - DNA, 117 bp, Homo sapiens
cccccgggagaagggacagactactccagataccgaggctgcaggttaacgtccctaaaacccgccggactttctgtaagaagtgtggcaagcaccaaccccataaagtgacacagt

SEQ ID NO: 341545 - DNA, 100 bp, Homo sapiens
cggggcagcgctcctggcgctgctggctgcgctctgcccggcgagtcgggctctggaggaaaagaaagcctccggcctctcctcctctccgtcaacaccc

SEQ ID NO: 341546 - DNA, 83 bp, Homo sapiens
tgcagaggaatattggacctcaatacctataacgtcgaatgcagctagaattgtccgtgctctttttgaaattgctctgagga

SEQ ID NO: 341547 - DNA, 82 bp, Homo sapiens
gttgctttccaaaatggcgcgggtgctgaaggctgcagccgcgaatgccgtagtctccaaaaaaagttggtgatgacattgc

SEQ ID NO: 341548 - DNA, 97 bp, Homo sapiens
cgccatggcgtccaacatggaccgggagatgatcctggcggattttcagcttatgtccctgatgccaaaaatgcacctactctttcctctaactctg

SEQ ID NO: 341549 - DNA, 51 bp, Homo sapiens
gtgggctggtgtgtggaactgagtagtgagtcagtcaccctggacctgctg

SEQ ID NO: 341550 - DNA, 50 bp, Homo sapiens
aaagaaacaagtttgctctcagcggtgtgaagatcattcaccgatgaaga

SEQ ID NO: 341551 - DNA, 74 bp, Homo sapiens
tgggtgatttgttctgtatcagaagacaatatcatgcaagtgtggcaaatggatcagttccatgacaagacccc

SEQ ID NO: 341552 - DNA, 83 bp, Homo sapiens
ggtgcagcttcaagcttaggaccacccaccatgcctatccaggtgctgcacccctcatcctgtctcggattgtgggaggctgg

SEQ ID NO: 341553 - DNA, 96 bp, Homo sapiens
ttaaaaagctgcacgcaagtgttaaacttctggcagcagtggatggtgcaggggaaagaggtgggaaggaggtcctgggagggacactggatgtct

SEQ ID NO: 341554 - DNA, 83 bp, Homo sapiens
cacaacaaaccctggtcttcaaagtttggcataaaggagggcgaactttctgaccaagtatacaactacccagagggcctagg

SEQ ID NO: 341555 - DNA, 80 bp, Homo sapiens
caagaaccggggcaagaggaaagctgatgccacttcttcccaagacagtgaattagaagctgcctgctgtttcccgggga

SEQ ID NO: 341556 - DNA, 75 bp, Homo sapiens
cctgttcatcaatgcctacaacagtttcccaacaaaatcgtggcccaggtagcttgcgatgtccttcagttgctg

SEQ ID NO: 341557 - DNA, 100 bp, Homo sapiens
agactctgaagatgatcagacaaggcaaagcgaaattggtcattctcgctaacaactgcccagctttgagaatgtgacagtgatgataacatgggtgcca

SEQ ID NO: 341558 - DNA, 75 bp, Homo sapiens
tttataagttcagtgctgatgaattcttcataccccggaatttggaggttttggttcagttagtggaaaaattga

SEQ ID NO: 341559 - DNA, 83 bp, Homo sapiens
tgggtcctgaatcttctgggagctgaggaaccagatatcttgaaaagctgccagaaagacagaaccaagttgtattgttagac

SEQ ID NO: 341560 - DNA, 100 bp, Homo sapiens
gatctgaagagctatggtgaaacaccactgaagcattgccaagccccagtggaccacctgcatttgccgcccacccctccgagcagtcacggcagtgact

SEQ ID NO: 341561 - DNA, 50 bp, Homo sapiens
aaaggggatcccactgctaaaaagctattgacctgaaaagtggttctgga

SEQ ID NO: 341562 - DNA, 113 bp, Homo sapiens
cccggatgttgcggacagtatgaggcaagcgcagggggacggggaccagcagctgtcgccgccgctctcaggagcttcgagaacaactggaacatttacaagctcctcgccca

SEQ ID NO: 341563 - DNA, 83 bp, Homo sapiens
gccagaggtcaacaaggttctggacaagatgaagtctttctgccaggcctgccagtgagcttctaccatcatggacctattgt

SEQ ID NO: 341564 - DNA, 100 bp, Homo sapiens
gtctcgttgctgcctctgtgtacgctgaggggggaggctgcgctacatggtgaagcagttggagaatggggagataaacattgaggagctgaagaaaaat

SEQ ID NO: 341565 - DNA, 100 bp, Homo sapiens
cggaagctgagtttttatccatgccccctaaaaagggaggtgatggaattaaaccacccccaatcattggaagatttggaacctcactgaaaattggtat

SEQ ID NO: 341566 - DNA, 50 bp, Homo sapiens
gtcagaattggagacccgtctggaaaagataccccagaatcttccatgct

SEQ ID NO: 341567 - DNA, 75 bp, Homo sapiens
agaggaaaattcaggcaacgcctcgcgttgggcaaactctttgattctacaatagctgatgagggaacatggact

SEQ ID NO: 341568 - DNA, 117 bp, Homo sapiens
acagctagtatcatgacagcagcttcagaaccagagctggcttccagtgcttttttaggaccaaaggatatatttccttactcagaaaataaggaaaagtatggcaaaccaaataaa

SEQ ID NO: 341569 - DNA, 100 bp, Homo sapiens
gtgtcccatgtttttgagtatatccgttctgagacatacaaatatgtatgggtttcgacagaccatgatgaaattgagaatgtggccaaacaatttggtg

SEQ ID NO: 341570 - DNA, 75 bp, Homo sapiens
gaataaaaacatttcaactccctacagttgtgccatgcgtagttgatgtcacttggcgatattcctgcaaacatg

SEQ ID NO: 341571 - DNA, 90 bp, Homo sapiens
cgtttccacgactttctgggagactcgtattgatgtcaagaaaggccgaggtcgatacattgatacctgcatggtcatctttgccccccg

SEQ ID NO: 341572 - DNA, 75 bp, Homo sapiens
gcgtcctggaattacttcaatcaagacacaactcagatgggaagttcatcgcccgggcacagcggatagagtacg

SEQ ID NO: 341573 - DNA, 113 bp, Homo sapiens
tgaacccagaggtcgtggaggtggccgtggaggcagaggtggcatgggtactatactggcaattgctggagaagattttgcaattgttgcttctgatactcgattgagtgaag

SEQ ID NO: 341574 - DNA, 100 bp, Homo sapiens
cggccacacatcccactgtaaaactattttgggaaacatttcatgagtttccattggaaaagaagaagaagtttctctctgccatttacctgaagaacat

SEQ ID NO: 341575 - DNA, 74 bp, Homo sapiens
ctcagccctgtggctgggggcagagctcagatcttgtggaagccctgaagccagagtatgtggcacctcttgtc

SEQ ID NO: 341576 - DNA, 98 bp, Homo sapiens
cacgaaaggcagccgcggatcgccgcgctcagcgacaaacaaggatcgcttacacctgagacgaactacagaacagcacgtaccagaggtggaagtcc

SEQ ID NO: 341577 - DNA, 75 bp, Homo sapiens
gtcagtggctctcttggccctcctgaaatgaggtgcctgcttccccttctgccatgattggaagtttcctgaggc

SEQ ID NO: 341578 - DNA, 99 bp, Homo sapiens
ccggcgggccgcgcctggtgatcggctccttaccagctcacctctcaccgcgcatgtttggagtgtgacaaaattaggcaagaacgagatgaagccgtt

SEQ ID NO: 341579 - DNA, 75 bp, Homo sapiens
ccccctgcctccctctccgctgtggaaatcatcgagttccccatcctaaagctaaatggccggaccatggagatt

SEQ ID NO: 341580 - DNA, 100 bp, Homo sapiens
gaacctgacaccatcagcaaaggagactttataactatagggctttattgaacaactctcattattaccatatggcccatggaaaagattttgcatctag

SEQ ID NO: 341581 - DNA, 75 bp, Homo sapiens
gccctgtttttgccaccacactccagcttggtaataatttttcaccatgcatcggaaaaaggtggataaccgaat

SEQ ID NO: 341582 - DNA, 100 bp, Homo sapiens
ctggagtcgtgagcgcgcgcccgccccgctctgggaggaccgcgagttctctttcaacatgttcgaccaccctattcccagggtcttccaaaaccgcttc

SEQ ID NO: 341583 - DNA, 97 bp, Homo sapiens
accccgcagcacagccgcgacttcaagccaaaagaatgcaatggtgtaaagattccagttgatgccagtaaacctaatccaaatgatgtggagtttg

SEQ ID NO: 341584 - DNA, 99 bp, Homo sapiens
gatgggtacatggtggtgaatgtcagtagcctctcactgaatgagcctgaagacaaggatgtgactgacgcagagggctctacgtgtttgcacctggct

SEQ ID NO: 341585 - DNA, 80 bp, Homo sapiens
gagttcattgaactcatccggcagaataagagactggacgctgtgagctacgagttccagggagctctgtcctggtgacc

SEQ ID NO: 341586 - DNA, 51 bp, Homo sapiens
ggcctccccagccatgtggaactgtgctggagaatctggtaaaagcaccat

SEQ ID NO: 341587 - DNA, 100 bp, Homo sapiens
ttttgaaagaatgtaccaagaggcatactgactccattgacagaaggttttgttttgacatagaagctgctgatcggtgcatcatttctggcatggcttc

SEQ ID NO: 341588 - DNA, 75 bp, Homo sapiens
cttggacctctgaaggaatagaacggtcaaggagattatgtctacgtttacagataacccaggaggctggagaat

SEQ ID NO: 341589 - DNA, 83 bp, Homo sapiens
aaaacatttcaactccctacagttgtgccatgccaagtacagatgaagctcaggttccccaaggaaatattgaccaggttgct

SEQ ID NO: 341590 - DNA, 100 bp, Homo sapiens
tggttattcttgatattttgagcaaactcttcttctctgatcagtgcccagaacaaggaaacaggtgctggagaatctggtaaaagcaccattgtgaagc

SEQ ID NO: 341591 - DNA, 90 bp, Homo sapiens
gagctcctggtcgatgaagaggatgatgtttttggtgaaggctttgtccacccagacccactctggatcccattcaaagaggtggcagtg

SEQ ID NO: 341592 - DNA, 98 bp, Homo sapiens
ggaaatcgcctcccgagaagaagttgaggcgctatggacttgccatgaggtgttgaagccttgtttcactgagttggagagactggacctaaatggcg

SEQ ID NO: 341593 - DNA, 89 bp, Homo sapiens
cactggatgaagaagcgcggccttcacacatcccagccggtgactgcagtgagattctgcatatacagactcatgaaaaattcatcaga

SEQ ID NO: 341594 - DNA, 100 bp, Homo sapiens
agcaaagctcaccctcccgagttgaaaaaattgaatttagtggaagcttttgtagaagatgcagaattgaggcagactttacaagaagatttacttcgtc

SEQ ID NO: 341595 - DNA, 96 bp, Homo sapiens
gtgaagatcacctaccgtgatggccgcactggcgaactgggctaccttaaccctggggtgactgtgtccccagcccctgccacaatggtgggacat

SEQ ID NO: 341596 - DNA, 100 bp, Homo sapiens
tccaagaacaatagcttgccctcataaaaaatctcctgcaaagaagctgagccatgcaattagtaaatctttggggtgtgtacccacgagagaacccccg

SEQ ID NO: 341597 - DNA, 100 bp, Homo sapiens
cttcttcaaggaggtgctcaagccatgttttggaaaagagaactcaaggtctggcagggagaaaggagcaagatccctgcatgtcactgagtccaccatg

SEQ ID NO: 341598 - DNA, 96 bp, Homo sapiens
ggaggcacctggaagctgctgggctctgtggtctatgcccacagcaagactggtcgaattgacaaatcttaccctacagtatgtggccacacagga

SEQ ID NO: 341599 - DNA, 83 bp, Homo sapiens
tgaaagtgaaaatgttagaagaactcgtgagccggattgatgtcacgccgatgatggagctgaagcccaacgcaggtagcgac

SEQ ID NO: 341600 - DNA, 82 bp, Homo sapiens
ccctgccgctgctgatcccaccgcggatttccatcaccagggccgagaacgacaggtgagcacctgcggatctgtccccagg

SEQ ID NO: 341601 - DNA, 74 bp, Homo sapiens
tgtggagccaggcagtctcgaatcctctcctggtttagggaggggaaggatgcggtgacggtgctcctggccag

SEQ ID NO: 341602 - DNA, 100 bp, Homo sapiens
aagtacattgtacaagaaaatgcacttgaatttggacagtgaaaaggcccttaaaaaggaaccgcggggaaaggcgaatgggtgcttttgaatgtgttcg

SEQ ID NO: 341603 - DNA, 75 bp, Homo sapiens
agaagcattggaagaggtttttatctgagcttgaagttttactactgattcagtggtcccaatttaaaggctatt

SEQ ID NO: 341604 - DNA, 100 bp, Homo sapiens
aggtacctgggttcaactaaagcgccagtccccatgtgagagcagcagaggcggtcttcaacatcctgccagccccacacagctacagctttcttgctcc

SEQ ID NO: 341605 - DNA, 97 bp, Homo sapiens
gaaaaccagatccagaaactggaggagtcccgctcgaagctaggtgtcatggagaaactccagctgggcccagagattctgcagcgggaaaatccaa

SEQ ID NO: 341606 - DNA, 75 bp, Homo sapiens
gctggagctggcagaggcgcagaggcagatccagcagctggaggacttcactgaggatgtcaactgtgcttttga

SEQ ID NO: 341607 - DNA, 100 bp, Homo sapiens
caccaggagagacctccggctgaggtcagcttcccagagaggaagagtacaggggctcaggtccaggtggcaggggatatgctacccaactcaactgagc

SEQ ID NO: 341608 - DNA, 100 bp, Homo sapiens
ctctgccagcaccttgggaagagaaagaaaatgccgaaggcactcagacagggcgttacctactgcggagaaagttcagcaagcagtcttaccatggccc

SEQ ID NO: 341609 - DNA, 90 bp, Homo sapiens
tattgcctccaaaatatttttaactgcagaggtgcccctgcccaacacccttcccctccctaagagggagactatacaacagagctccag

SEQ ID NO: 341610 - DNA, 98 bp, Homo sapiens
acctaaaacatccggaaatcctgccaacagtgcaaggaagcctggttcagcaggtggccctaaggttggagcatgcagcagaactgattaaaacagtg

SEQ ID NO: 341611 - DNA, 97 bp, Homo sapiens
cgtttcctcctccagaggcctgcacgcggggcgcgggccccgaaggctctccatcgaaggcaacattgggagagacaaaggcagcgctgccctcggg

SEQ ID NO: 341612 - DNA, 49 bp, Homo sapiens
ccctccgccaggcaaaaggaaggactttgcctcccgggccaaactggca

SEQ ID NO: 341613 - DNA, 49 bp, Homo sapiens
gcgaagaagatcgaaaattaaacctcagttgctgatcatctgggctgtg

SEQ ID NO: 341614 - DNA, 75 bp, Homo sapiens
cgaggaggaggacagcgagcgcagcagtgacggcgaggaggccgagatccaattctggtacagcagttgcgccgg

SEQ ID NO: 341615 - DNA, 100 bp, Homo sapiens
cgcgcacagcggagcaggaggcgcccggcactcgcagggcgccctgcgtccggcagaggaggcgagcatcccgctcaggtgatgaggaacccctcgcgca

SEQ ID NO: 341616 - DNA, 75 bp, Homo sapiens
tgcccggtgcccgaggaggcagccaagctcgtagcctgccactccgtgctggtatgtgtgcaacagagagaaatt

SEQ ID NO: 341617 - DNA, 97 bp, Homo sapiens
ccagcctgtgacctttgtgaccaactccacctacgcagcagacaagggggttggacaccagctcttcctgtgtcatcccgataccagtatcctgagg

SEQ ID NO: 341618 - DNA, 90 bp, Homo sapiens
ggcggcggcgcgtcctccagcggcggcagcggcgctcgcagcgcccgacctgcctgaccagtgcacgcccaacccctgcgataggaaggg

SEQ ID NO: 341619 - DNA, 100 bp, Homo sapiens
tcactgcaacctccacctcccaggtaaatacggcatcatctgcatggaggatttgattcatgagatctatactgttggaaaacgcttcaaagaggcaaat

SEQ ID NO: 341620 - DNA, 100 bp, Homo sapiens
cgaggaggagctggatgccgaagtcctggaggtgttccacccgacgcatgagtggcaggcccttcagccagaacaatatgatacatcttcaaaaactcac

SEQ ID NO: 341621 - DNA, 75 bp, Homo sapiens
cccctagacgcgccgaggggccgggctacgagcggctgaggtgccaagtcctgccctgccaacttcttggcagct

SEQ ID NO: 341622 - DNA, 82 bp, Homo sapiens
agggtttccaccgttcgttcaaggtggccctcatgacactgacgctcttcccggtccggctcctggttgccgctgccatgat

SEQ ID NO: 341623 - DNA, 85 bp, Homo sapiens
gtggacctgcaggatgcagaggaagctgtggagttggtccagtatgcttactttaagaagattcctgccagctgggctactcggc

SEQ ID NO: 341624 - DNA, 100 bp, Homo sapiens
ctcacaaccactgcgccaggaaagtgtacctggagtacaagagggtccctaacagcagaccacctgaatatgagttcttctggggcttgcgctcctacca

SEQ ID NO: 341625 - DNA, 100 bp, Homo sapiens
gggctgaagacatgtactcggcccagagccaccaggcggccacaccgccgaaagacggcaagactcggaaagctagcctcctatctgccaagtcatccac

SEQ ID NO: 341626 - DNA, 82 bp, Homo sapiens
gcgttacgggcggtacggaggaggtggaagttaaacgagctgagcctcgggacagcaagagccaagcgccgggacagccagg

SEQ ID NO: 341627 - DNA, 100 bp, Homo sapiens
ggagagcgaggacgacgtggaggcggagtggcgcccggcgaggtagcgccaggcgaggtccaagccttgtcatcggccagtaagtttgaagcagagttga

SEQ ID NO: 341628 - DNA, 100 bp, Homo sapiens
agtagacatggcgagcgactccccggctcgaagcctggatgaaatagatctctcggctctgaggtactatactggcaattgctggagaagattttgcaat

SEQ ID NO: 341629 - DNA, 100 bp, Homo sapiens
agtctttgctctcagcatcggtgcacttgtaatatacttcatagattcatcaaattactccacaggatccgctgaacataggatgttgccacaaaatcta

SEQ ID NO: 341630 - DNA, 100 bp, Homo sapiens
atcactcccagctgcgcaaagcttgcgaggtggcgttagattgaaaaggaagatcaggccaaccccaaagaagaagtgaccaaggaggagtttaaactga

SEQ ID NO: 341631 - DNA, 90 bp, Homo sapiens
ggggtgtccgagttgccgccggagaggagtggcctcgcccgcttgggtggttgagtttgcctcttatggtgacttaaagaatgctattga

SEQ ID NO: 341632 - DNA, 121 bp, Homo sapiens
ggccaagtatggagaacatgaagccagtcctgacaatgggcagaacgaattcagtgatatcattaagtccagatctggattgctgtcacgtctaatgtggctgctgcctcgtgtcacatct

SEQ ID NO: 341633 - DNA, 100 bp, Homo sapiens
aacacacccaaagatgctgcgcagcaggatgcaaaggccgaagagaacaagaaggagcctctctgcaggcagaaaccctttggagtgaatcaacctggac

SEQ ID NO: 341634 - DNA, 100 bp, Homo sapiens
tggaatgcttgacagagatgagtttgcagttattactgattttgggcactccaagattttgggagagacctctctcatgagaaccttatgtggaaccccc

SEQ ID NO: 341635 - DNA, 51 bp, Homo sapiens
ccgagctggacccggaccggttttgggtgattgaagcctccgatgttgtcc

SEQ ID NO: 341636 - DNA, 100 bp, Homo sapiens
acgtcttggaggaaatagcttcttttggagaaaggattaagaagtgtctcactttgtcgcccaggctggagtacagtggtgcgatcttgactgactgcaa

SEQ ID NO: 341637 - DNA, 100 bp, Homo sapiens
aaggatatcgacgtcgtgatccagaagtccagagctgaggactgcctgtttgcaggaatggtcctcgtccgaagtgagaatgggcagttgttaatgattc

SEQ ID NO: 341638 - DNA, 82 bp, Homo sapiens
gccgctctagcggccgggactctgaactatggcgacctgcctagagctggaacgttacctccagagcgagccctgctatgtt

SEQ ID NO: 341639 - DNA, 75 bp, Homo sapiens
gttcgtgccttacttgatatggattgtcagctgttgccagcaaaccgcaatacaccaagtcccattgatcctgac

SEQ ID NO: 341640 - DNA, 50 bp, Homo sapiens
tggaattacactgtgatacgactgactctttgtcacccgaaagaaccgcc

SEQ ID NO: 341641 - DNA, 50 bp, Homo sapiens
cggctcgggacggaggacgcgctagtctcatgatggagcagtccaagaag

SEQ ID NO: 341642 - DNA, 100 bp, Homo sapiens
gggcgggcggccgggagccatggagcgcggccctggggcccgggggcgcgggccggggtgggagcatttcctgaagacgtagtcatgcagcacgtcagca

SEQ ID NO: 341643 - DNA, 83 bp, Homo sapiens
atggaaacaccatggctgcggcggcccagctctctctgacacagatgtgtcatccccacaccagcgagcctctgccaagatga

SEQ ID NO: 341644 - DNA, 100 bp, Homo sapiens
ccgggatcgtgaccgagaccgtgaccgagagcgtgaccgagagcgcgaatatcgtcatcgttagaaggctgcaagaagtgaaagtcatggctgaccgcat

SEQ ID NO: 341645 - DNA, 82 bp, Homo sapiens
ctcgtcctgcccgtgctgctgctgctggtttggggactggacccgggcacagacaggtgatttggcttctgcacagttagga

SEQ ID NO: 341646 - DNA, 75 bp, Homo sapiens
ccagctctgtccgctgcccacagcctagcagtcgggaccgtactgaggaaaagctccagaaagctgtgacaaaac

SEQ ID NO: 341647 - DNA, 82 bp, Homo sapiens
gactctgactctcggactgagaaacgcaagaaactatgttccaacttcctgtcaacaatcttggcagtttaagaaaagcccg

SEQ ID NO: 341648 - DNA, 100 bp, Homo sapiens
gagaaatttcgacctgatatgcgaatgctgtcctctcccaagtattcactctatgaagtgcatgtcagcggagctatgctgggactcatgtatgtctact

SEQ ID NO: 341649 - DNA, 90 bp, Homo sapiens
attcgaaaagcagttcaacgagaatgaagccatccaatggatgcaggaaaactgattcctttgtgggtggagtcatcggcctcatttttg

SEQ ID NO: 341650 - DNA, 105 bp, Homo sapiens
ctgaaatccatctctgccacagagacagctcaggaagcaactttgaattttgagactgaagaagtagaactttccttctccaagaatggagaagacctaggtgtg

SEQ ID NO: 341651 - DNA, 75 bp, Homo sapiens
cgtctcttctgcagatacattgatcgcatccatatttttttcaggccagcaccaggagctgctgctgaaacagct

SEQ ID NO: 341652 - DNA, 90 bp, Homo sapiens
attttgtgatcgcagcgatgaaagcggtgcagaggggcaggatgccgccgacccagccgacccacgggcagttcgcgctgaccaacgggg

SEQ ID NO: 341653 - DNA, 101 bp, Homo sapiens
gaagaactaagaatattattagcacaagagcaccatactttgagggccaagtcctgtatctgccatgtctgtggcgtccacctcaacaggctgcattcctg

SEQ ID NO: 341654 - DNA, 100 bp, Homo sapiens
gacatgaacgaggccaagcggagggtgcgcgagctctaccgcgcctggtatcgggaggtgccgaacactgggaaaagaatcccgcccactaagacgcgac

SEQ ID NO: 341655 - DNA, 90 bp, Homo sapiens
gggaggccaagaccgctgtgtggaggtagccgcagcgccagcaccagctcttgaatgtcgtctctcaactagccaaacggaatctgcgac

SEQ ID NO: 341656 - DNA, 100 bp, Homo sapiens
ctcaacttctagttccacctgaaaactgtagtgctttgatgacagtagggaaagaaccatttcctaccatttacgtagattcacaaaaagaaaatgagag

SEQ ID NO: 341657 - DNA, 98 bp, Homo sapiens
ggcgttcttccgctggctcagccgcaagtacccgtccatcatagtcaactgcgtggaagagaagtgtttgaaagatgtatggtgatcttgaaacctcc

SEQ ID NO: 341658 - DNA, 82 bp, Homo sapiens
tcccaatcccccactctttccgccctaatggaggtctccagtttcggttactataacaacagtaccaaggtggctgtgaaaa

SEQ ID NO: 341659 - DNA, 100 bp, Homo sapiens
gaaaacagttacaggacatagcaactctggctgatcaaagaagagcagcccatggtttattttcttgaaaaggctccaggcttcggcttggaaaatccca

SEQ ID NO: 341660 - DNA, 51 bp, Homo sapiens
gtacgggcagttgcagtgttggagctaaacccacaccagttatcctattga

SEQ ID NO: 341661 - DNA, 82 bp, Homo sapiens
gagaagcgcagcgacggcgtcgggagagcgcgcctagccggctcgcgaatcatggaaagagtggaagctcagatgttgtgag

SEQ ID NO: 341662 - DNA, 98 bp, Homo sapiens
aaggacagaggttcaggatcttcctctccctcgggacccaaggccacaaaggagagctccgtggagagaaggttttacacatccataagtagaccttt

SEQ ID NO: 341663 - DNA, 82 bp, Homo sapiens
ccagacggcgtgtgagcagctgggacaggttccaaggagcaggggcctcgacaaaggaagggagcagccccagcagagaaga

SEQ ID NO: 341664 - DNA, 76 bp, Homo sapiens
gcaggtgcacgcttatctttatctgtggcatgcaactggctcctggatttggatttggaattgcaatatctggtgg

SEQ ID NO: 341665 - DNA, 98 bp, Homo sapiens
gctaatttgcaatacggaaattttaataggacaaccctccatatgataagggagccttcagaatcgaaatcaactttccagcagagtacccattcaaa

SEQ ID NO: 341666 - DNA, 75 bp, Homo sapiens
atcaatagacagcattcagaaggaccccagatggatcctgagcttgaaaaaaaactgaaagagaataaaatatct

SEQ ID NO: 341667 - DNA, 75 bp, Homo sapiens
gcgaagggggctgaggaaaggaggttggtcaaagaaaaagtgatgtatgaaaaagaggcaaaacaacaagaagaa

SEQ ID NO: 341668 - DNA, 95 bp, Homo sapiens
atcattgtgttaatggtgaagcacagcgattcccaacgaggtcactcggacactatggtgttcttttacctgtggattgtcttttatatcatcag

SEQ ID NO: 341669 - DNA, 100 bp, Homo sapiens
ggacacagcttctagtgttgctttggatcttgtggaaagtcagaatgcccagcctacagagtctgagaaggaaatttataatcaggtgaatgtagtatta

SEQ ID NO: 341670 - DNA, 75 bp, Homo sapiens
ctggcggacaggcgacagcgacctgcggcaggaatggaagttggatacactttgtgacttgtacgagacactgac

SEQ ID NO: 341671 - DNA, 75 bp, Homo sapiens
agtgggagcggatgtttaatacttcccggatcccaggagaggagacaggcaccatggctgaggaaacagctccag

SEQ ID NO: 341672 - DNA, 82 bp, Homo sapiens
gcgggcccgaggccggaggaacccggactccggcgtagcgggggatatgagactttctactcggaatatcctgagtgttgcg

SEQ ID NO: 341673 - DNA, 50 bp, Homo sapiens
cacacctgtgtggccttcgcctgggaatactcccccagttgcaagaggcg

SEQ ID NO: 341674 - DNA, 74 bp, Homo sapiens
ccccgagcagcggtggaagctggttacgccaaggaggccctgaatctggcgcagatgcaggagcagacgctgca

SEQ ID NO: 341675 - DNA, 75 bp, Homo sapiens
gaagacttaaaggagttgtcacccactgaaggaagttttgtccatcaactaaaggcacaaacagatacctcactt

SEQ ID NO: 341676 - DNA, 75 bp, Homo sapiens
tcggcttctgagacggcggcagcagcggcattcagctcttcaagaagcccagccccttcatcttcatcagccagc

SEQ ID NO: 341677 - DNA, 97 bp, Homo sapiens
gaatatttaatggaaaatcgcttggttaaaacctgacacttttaacagtctttccagactctcctggggcttatgaagctgagtcaccatccccacc

SEQ ID NO: 341678 - DNA, 104 bp, Homo sapiens
tgcactcactctacgtggagttgggccctgcaggaaggacggacttcaggggcagtttgcaggcctttcagatatatccatctcacaagacatccccgtagaag

SEQ ID NO: 341679 - DNA, 75 bp, Homo sapiens
accgagctgggcccgtgagccactcggcctcagagatgctaagatctcatccagtgagcatatgagaatcggggg

SEQ ID NO: 341680 - DNA, 100 bp, Homo sapiens
cctcctcctcctcctggccctgactctgctcctgctggccggattcctgcactcggacttagagctggacacaccgttctggaggacacgtgccggcggc

SEQ ID NO: 341681 - DNA, 100 bp, Homo sapiens
cgacgtggatggggcagctaggggcagcagcttggatgcggaccctcagtcctcaggcagctgtgagtacccaggaagctgcaccgtgtggcctggagct

SEQ ID NO: 341682 - DNA, 110 bp, Homo sapiens
atacactctggaaatgattaaactagtaccacataatgaaagtgcatggaactatttgaaaggtgattgttggggccaaggaatgccatgtggagagtgcaggtgaagtg

SEQ ID NO: 341683 - DNA, 82 bp, Homo sapiens
gcctcttcgacggctttgactgccagcgtgcggaaggccagtgcaagggccggaagccaggcagcggcggccggaagaacgg

SEQ ID NO: 341684 - DNA, 75 bp, Homo sapiens
acgagccctcaccagtccccaatgtagaagaggtgacacttcccaaaacaggaccccaacgcagacactgaatgg

SEQ ID NO: 341685 - DNA, 96 bp, Homo sapiens
tgtaaagaaagaagatggaactttctatgaatttggagaagagcaatttacagcaatgagggatttatacatgaaaaatggacaaggatttgcatt

SEQ ID NO: 341686 - DNA, 75 bp, Homo sapiens
agaagatgtgccgccgctgccaacgtcgagcggcgacggctgacgaaatctcacaaaactgtcccttatcttcag

SEQ ID NO: 341687 - DNA, 98 bp, Homo sapiens
ttcagctgcgctccagtcggcccaggcgccgcggcgaggagcgagcgctgcgaggtggcggcctgagaaaatggagctggcgctggtgcctgtgagcg

SEQ ID NO: 341688 - DNA, 90 bp, Homo sapiens
aacacctgtcagtgtgagcctggctggggagggaccaactgctccagtggggatatcattttcaatgcccaatacccagaactgcctccc

SEQ ID NO: 341689 - DNA, 100 bp, Homo sapiens
ctcattgatgttaatgaatggtgctatacttgaattttctaaggtgtcattaggacacagaatttccaggtgttgtggtgcgaccaattggtgaatttcg

SEQ ID NO: 341690 - DNA, 100 bp, Homo sapiens
gaatgcagttgcttcagtacccataatgtattcttggtctcccctacagcagaattttatgaaatttctgaataaattggcagaagaacgcagacagaag

SEQ ID NO: 341691 - DNA, 75 bp, Homo sapiens
ggacgcggcgctgctgaccgacatcgaagtattcatccacaatgcgatacctttcatagggtttggctttttgga

SEQ ID NO: 341692 - DNA, 50 bp, Homo sapiens
attccaagtaactcttatttggctttgatgaactaggtggacttctcaaa

SEQ ID NO: 341693 - DNA, 90 bp, Homo sapiens
ctcgggaacaagagaagctccttgggcaactgaaagaagtacaagcagacaaggagcaaagtgaggagtctcgctctcagtcaaaatctc

SEQ ID NO: 341694 - DNA, 100 bp, Homo sapiens
cttccggagcttctcagaagacagagggttttcttttgaggagatcatgaatcagacagataaaaatcaacaagaaatcccatcataccttaatgatgaa

SEQ ID NO: 341695 - DNA, 98 bp, Homo sapiens
agatttttctcctatttcagcagttggccacaacttcattgctgggaaaagtttggaaattttagcattcaggtgccaggaatgcagatgggacagcc

SEQ ID NO: 341696 - DNA, 75 bp, Homo sapiens
cttcctggcctgggcgctccggtggcggcggagtctgcgctcctcagaccaccggcaggtgaacagcctgatgca

SEQ ID NO: 341697 - DNA, 75 bp, Homo sapiens
ctttccaacacagatgtccaagctgccaaatcaaactgtgttattaaccttgtgcctgataaacaacaagtgctt

SEQ ID NO: 341698 - DNA, 83 bp, Homo sapiens
ctgagaaccatgctcaccgaccctccggtggctgctggcagcggaatcccccagatcaagtgcttcctcaacggggtgaagat

SEQ ID NO: 341699 - DNA, 98 bp, Homo sapiens
gtttggtgccagaatcacaagcaatgttctaaggtatggtgatccggtccaccgtgtggttaggattcccaaattttgttgacagcgtctcggatatg

SEQ ID NO: 341700 - DNA, 51 bp, Homo sapiens
gttcttcttcgagtatttgtagaaggtaatagctcttcaagtctgcaataa

SEQ ID NO: 341701 - DNA, 100 bp, Homo sapiens
aggatgatgatattagtgatactttctctgaaccagcaattcaattaaaccccagctatatcagggcaatattgaggagagcagagttgtatgagaagac

SEQ ID NO: 341702 - DNA, 83 bp, Homo sapiens
ctggaattaggcaaatatggacagtgccctctggtggtcagaagatgctgtgctgtctcgttaggatgaatggattaaaatgt

SEQ ID NO: 341703 - DNA, 96 bp, Homo sapiens
gtgccgggacctctgggcgctgtggctgctgctgaaggccggcgcagggtcggcactcttcaccctcccgagccctgcccgtctcggccccatgcc

SEQ ID NO: 341704 - DNA, 75 bp, Homo sapiens
gccaatatgatatacaagacaaggtgaagcctcggaagagccggtgccatctgtgggggctttgggccaggggtc

SEQ ID NO: 341705 - DNA, 100 bp, Homo sapiens
gccaaatatggcgtgggcttctggaagcctggatctggaatcattcaccagtctctggatggtcgtcagatccgtgtggatcatgcaggcaagtctgctc

SEQ ID NO: 341706 - DNA, 83 bp, Homo sapiens
ccaactgtgggaactctttccagcttgtgtctgggtgcagagcctccagctccaccatgagctgcacgccgcccacctcctct

SEQ ID NO: 341707 - DNA, 100 bp, Homo sapiens
cggcggcctcggcctccggcgcagcccggaaatgtccggcaagatcgagaaagcagttgcccagaagattgttgccacaaggaagaagcagcagctgtcc

SEQ ID NO: 341708 - DNA, 75 bp, Homo sapiens
aaagtcctattccaacagtcatgaggccttcatggtgaaacacctcttggagtatacccaggcaacagagtctaa

SEQ ID NO: 341709 - DNA, 80 bp, Homo sapiens
gttgatcgacagtccatcaccttaatctcatcacccagtggaaggcgtgtttaccagagacagggtctcgctatgttgcc

SEQ ID NO: 341710 - DNA, 80 bp, Homo sapiens
ctgggtttgaacggaatgctggagtcagtggaagacggagctggtcggcccgaagggactggtgattgcagctggaagtg

SEQ ID NO: 341711 - DNA, 100 bp, Homo sapiens
tcatccacgatgtctctttcgacttccacgggcggcggatggcaacctgctccagcgatcagagcgttaagctttaccgatttgttacaactcaagcaag

SEQ ID NO: 341712 - DNA, 78 bp, Homo sapiens
ggacagcaggacttccaaggagagcatgtcggaggctgatcgcgcccagaagcaaactgtcatcaggagcttaaatag

SEQ ID NO: 341713 - DNA, 99 bp, Homo sapiens
gatttgcaacccttccgggaagccatagctctgcatgcgccagcagccctgtggtggcgacgacgatggaccaggagccagtgggcggtgtggaacgag

SEQ ID NO: 341714 - DNA, 75 bp, Homo sapiens
ggaggaggagcggacgtcggcttctccccgcgggagcccccagcatgggtgctggtctgaggttggtgaccaaca

SEQ ID NO: 341715 - DNA, 100 bp, Homo sapiens
tccacaaggacagccatgggaggatggatgtggagaaaggcaagattgaagacacaggaggcagtggcggctcctattccatcaaaacccagtttaactc

SEQ ID NO: 341716 - DNA, 75 bp, Homo sapiens
ggacttgatgaatataatccattctcggattctagaacagaaggatatggagtaatagtactaaatcccaatgaa

SEQ ID NO: 341717 - DNA, 80 bp, Homo sapiens
gagtaaagtcagcatgagcaaaaactccaaactcctctccaccagcgccaagagacaaacatcatatctgaactaagtaa

SEQ ID NO: 341718 - DNA, 82 bp, Homo sapiens
ttgggacccaccgctgccctcagctccgagtccagggcgagctctctatcaatatcagctcacatcattgaaaagataattt

SEQ ID NO: 341719 - DNA, 98 bp, Homo sapiens
cggggggcggctgagacagcgcccagggcctcggagcaaggcgttggcaggaaagtaatggtccaacagacagttatgcagctatttcacaagtggat

SEQ ID NO: 341720 - DNA, 98 bp, Homo sapiens
gctatacttgaattttctaaggtgtcattaggccaggacgactggaatgggaccaggccgtcgctgaaggcccctcctgctaggccagtgaagggagc

SEQ ID NO: 341721 - DNA, 100 bp, Homo sapiens
aaggtgaagagttgtcccagctcggcccgcgggggagccccgggagccgcacgtgtccgagctgcaggaggagggaatgaacgccatcaacctgcccctc

SEQ ID NO: 341722 - DNA, 76 bp, Homo sapiens
gtgcgtgggtgcctggagatgaagctggaaaggcctgggcggatgatgtggagcggtttcagaaaatgttcagaca

SEQ ID NO: 341723 - DNA, 100 bp, Homo sapiens
cagctgctaaatagcaaagaccaggaagtgctgcttcaaacgggcagggctctaggaaacatatgttacgatagccgtagtgggcagcagtcagtgacag

SEQ ID NO: 341724 - DNA, 82 bp, Homo sapiens
tctcaagctcatattttgaagtgtttacgggccgggtgctcgtccactgccgggaaggttatagccgctccccaacgctagt

SEQ ID NO: 341725 - DNA, 99 bp, Homo sapiens
ttatttagccggagtgagaagcaagaaggccctggacacagcaatatctctgggctttcacaggggtcaggcccagccccaggcccagtggtattactg

SEQ ID NO: 341726 - DNA, 82 bp, Homo sapiens
ccaacgccgtgttcgacatcctggccgtgctgcagaaactatgttccaacttcctgtcaacaatcttggcagtttaagaaaa

SEQ ID NO: 341727 - DNA, 100 bp, Homo sapiens
aaagcttccaggaacaagccatggagggtcaaagaaactcctggttgagctcaaagttattttacattaatagctctccagacccccagctggccatgtg

SEQ ID NO: 341728 - DNA, 100 bp, Homo sapiens
cagaaagtgctttgaatccgcagtgccactatggatttggaaacttacgatcaggagtgttgcaacggttacagataaccacctgcctcaaagataatct

SEQ ID NO: 341729 - DNA, 103 bp, Homo sapiens
atcgatgtttcaatattggaagcgctttgatttacagcagctgcagagctgctgcccaaagggagcaaggaggaacagcgggattacgtcttctacctggccg

SEQ ID NO: 341730 - DNA, 99 bp, Homo sapiens
agaagcagtacgaagactcctgccgcgtataccaggcatccagccccgatgaggcacagaccccacaggctcctcggacactgggtccatcacctcctg

SEQ ID NO: 341731 - DNA, 82 bp, Homo sapiens
gcgagcacagagcctcgcctttgccgatccgccgcccgtccacacccgccgccaggccactgcagaacaaattagacttgca

SEQ ID NO: 341732 - DNA, 73 bp, Homo sapiens
aaggagcgcggagcccggcccggaagctaggagctggttgttcgtttcctcaagcgagcatcaaataacctcc

SEQ ID NO: 341733 - DNA, 75 bp, Homo sapiens
cagaaccccgactttgctgctcagccgtactctgacagctgtgcacgatgccatccttgaggacttggtcttccc

SEQ ID NO: 341734 - DNA, 100 bp, Homo sapiens
ggagacgccaccgaccccaacggcaccagccctttgcacctcgcagctaaaaacggccacatcgacatcatcaggagatcaaagacgctggccttcagac

SEQ ID NO: 341735 - DNA, 74 bp, Homo sapiens
tgacacttacaagatggacagggatgataattgggcctccaagaattgagaaaatcatgagttctattggagaa

SEQ ID NO: 341736 - DNA, 74 bp, Homo sapiens
tccactatttttccaaagtggtggatgaggttgggtatctacagccattggttgctgttcaggtcagctttgct

SEQ ID NO: 341737 - DNA, 83 bp, Homo sapiens
ggaatggtgcaggcaggcgctgagaaggacgcgcagtccatctctctcagtgagacggtttaagcggaagcatcttactgcca

SEQ ID NO: 341738 - DNA, 75 bp, Homo sapiens
ctcaattcaccacttggatcacaggtcctcatgctgataccgccagtggatgccagaatttgcagtgtggttttc

SEQ ID NO: 341739 - DNA, 50 bp, Homo sapiens
cggtcattatgagaaacaagcatgatatcatcaagttgaatcgaaaggaa

SEQ ID NO: 341740 - DNA, 75 bp, Homo sapiens
gacacacaaagaatagagttgagcctgtgggacacttcgggttcctggtagagttacacagttgtgccgccagta

SEQ ID NO: 341741 - DNA, 98 bp, Homo sapiens
atagagcaactgttgaactcagctgcctgtaggttgaaaggattgttgacaaaaggaaaaataaaaaagggaagacagagtatttggttcggtggaaa

SEQ ID NO: 341742 - DNA, 75 bp, Homo sapiens
gcgtgtctaggtgagtcgcggtgggtcctcgcttgcagttcagcgaccacgggatcgttgacatttcgggatgtg

SEQ ID NO: 341743 - DNA, 104 bp, Homo sapiens
tggagcccaggctgttgcttcccagactggtggtgaatcctccatagtctgttccgccatggagtcatagttgcagctgactccagggctacagcgggtgctta

SEQ ID NO: 341744 - DNA, 130 bp, Homo sapiens
ctgaaactaaaagatgtcacaaaggaaaacgaggaaagtcccaggatgactactgtgtcaaatccatccttttacaatccctgctattattcgtccattcagcgtattgaactatgatccacctcaaagg

SEQ ID NO: 341745 - DNA, 100 bp, Homo sapiens
gttcctattcggccatctttgctcctccctgcaactaactccattcttaattgaatagctgcaatctccatggcctctaagataacagacatgcagcttg

SEQ ID NO: 341746 - DNA, 75 bp, Homo sapiens
tgttaagcagattacttccatcagtattgagccaggagttgagaaggaagactcgccagccagatgccaaagatg

SEQ ID NO: 341747 - DNA, 82 bp, Homo sapiens
tggagcagtggagcccaaagacccctggagacatggtccgcgggagagctgtggggcttggtgagtgtttcgtggcctctcg

SEQ ID NO: 341748 - DNA, 100 bp, Homo sapiens
gagcgccatggctcactccccggtgcagtcgggcctgcccggcatgcagtgtcaacctaagaaaaagtctacgccactgaagtatgaagttggagatctc

SEQ ID NO: 341749 - DNA, 73 bp, Homo sapiens
agatcagtagaagcagatttcttttggatagtgatgggaaaaggatttggtattcctgttggatgactgcaat

SEQ ID NO: 341750 - DNA, 136 bp, Homo sapiens
gcgaagatggcagctgctgaggaggagccgaagcccaaaaagctgaaggtggaggcgccgcaagcgctgagggttgagaatgcttgcaccaagcttgtccaggcagctcagatgcttcagtcagacccttactcag

SEQ ID NO: 341751 - DNA, 83 bp, Homo sapiens
cagcagcccccggcccgcgctgcccgcactcctggtcctgctcggggctctgttcccagatcaatgtccgagttaccaccatg

SEQ ID NO: 341752 - DNA, 100 bp, Homo sapiens
ggggcgcagagcgcgggaggcggcggcggcgcggagcccagaaactggcagacctttcacttcgtatccaacaaattgaaacaactctcaatattttaga

SEQ ID NO: 341753 - DNA, 82 bp, Homo sapiens
cgatagctctgaagatgaggttgactggcaggatactcgtgatgatccctacagaccaggtggaagaagagcccgaagaaga

SEQ ID NO: 341754 - DNA, 99 bp, Homo sapiens
tcaccaccccagatgacctggaggggaaaaatgaggactcagtggaactgctggtgttggctaccaagtcaggattgttacccccaccacctgcgctcc

SEQ ID NO: 341755 - DNA, 100 bp, Homo sapiens
tgggcgcccagcacgactcctcgggcagcctcaacgagaactcggagggcaccggaggtggtatggtcaggaaaaagactacaatgtactagtcatggat

SEQ ID NO: 341756 - DNA, 100 bp, Homo sapiens
gaaccatgcactgtaactctcaagtatacaggaatattgttattaggaagctctacagaggatcatttcaactctggcaaataaaaatgatgaaattcag

SEQ ID NO: 341757 - DNA, 75 bp, Homo sapiens
agagccaagagtcagtattccggccagcttcacgaagtcagagaggaaatggctagtgatgagctgaaagagatg

SEQ ID NO: 341758 - DNA, 83 bp, Homo sapiens
cttgtgggagcaaaaccaacgcctggctcggagcagcagcctctgagatggagtcatcagaacccactgtgaggaagtgactt

SEQ ID NO: 341759 - DNA, 75 bp, Homo sapiens
tttttctgaagttgttcattaagacttcccagcattcctacagatataaataggatgctcgtcagaagttccgct

SEQ ID NO: 341760 - DNA, 100 bp, Homo sapiens
tcagggctcccactgattctacattatggattaaaagtaagttggatcaaggaggagtgattcaagattttattaatgccttagatcagctctctaatcc

SEQ ID NO: 341761 - DNA, 100 bp, Homo sapiens
ttgccggcggttgtggaggagctcctgagcgagatggcggcggcggtgcaggagagcgcgcgaaatagggatgaggaagaaatgaccaaacgagatgaca

SEQ ID NO: 341762 - DNA, 75 bp, Homo sapiens
cctcagttggaagcagccgatccagcctgcggagcctgtggggcaggtggagctggccctgctacagcgctccta

SEQ ID NO: 341763 - DNA, 75 bp, Homo sapiens
tacgagaaagtgtcttatgtctctggatcctccttgcttaccacacacccccagctctatcgtccgagctttgtg

SEQ ID NO: 341764 - DNA, 100 bp, Homo sapiens
tggatgtgtcggtgaccatctcgcaggatgccggcagagtctggtgctggcagaaagtagtcctggaagggatagtactgaatattttattgtatttgag

SEQ ID NO: 341765 - DNA, 75 bp, Homo sapiens
tcactccccggtgcagtcgggcctgcccggcatgcagatgtggtgaagctgtagagaaaaacaagcgtctcatca

SEQ ID NO: 341766 - DNA, 75 bp, Homo sapiens
tgacgatggctcttttcatatcagagattctgcttctcagaagatgcactattatagatactctaacgccaaggt

SEQ ID NO: 341767 - DNA, 100 bp, Homo sapiens
gcagacttggccaaatggacgggactattaaggtgctgtccttattcccagcccagtcaagagctaccggggctggctagtcatgggggagcccagtaga

SEQ ID NO: 341768 - DNA, 75 bp, Homo sapiens
ccaagtctctgacttgtgcttggcagcaacatgaagatcattttggttttgggtctagtaatactggttctgtgt

SEQ ID NO: 341769 - DNA, 75 bp, Homo sapiens
cgaaaacggaagcgcagggagaaggaagaggtgtttgaaaaggctttacaggaagtatggtgctggcatctgctt

SEQ ID NO: 341770 - DNA, 74 bp, Homo sapiens
caatttaagcctgatctaacccctagaaacaggtttactcctggcttgggggcattaggaagcactggaggctc

SEQ ID NO: 341771 - DNA, 82 bp, Homo sapiens
catggagagatagataaacgggtcagcccaaggccaaccccactgtcactctgttcccgccctcctctgaggagctccaagc

SEQ ID NO: 341772 - DNA, 74 bp, Homo sapiens
ggagagacgtcgctgaggggcttgcctgaagcgaggggtcatttatagcaaatacactgacctggttccaaagg

SEQ ID NO: 341773 - DNA, 76 bp, Homo sapiens
ggcacttatggccatttcagccaagtacaggggctcaggtccaggtggcaggggatatgctacccaactcaactga

SEQ ID NO: 341774 - DNA, 89 bp, Homo sapiens
ggcgtccagggcagctagggcctgggccgcggttcggccgcgccggccgagaagagcaagttagtaccttgtaccaaaacatcaacctt

SEQ ID NO: 341775 - DNA, 131 bp, Homo sapiens
gacgctagtgtgagcccccatggcagatacgaccccgaacggcccccaaggggcgggcgctgtgagtggcagaatttagtgacatttggaagcttttcaaacatggttccctgtagtcatccatatattgg

SEQ ID NO: 341776 - DNA, 101 bp, Homo sapiens
acaggtagagtacctgttgttgcagagttattttctgagtcagtttcagggacagtatgatttggtgaaatgcctggctcctattcgagaccccaagaccg

SEQ ID NO: 341777 - DNA, 50 bp, Homo sapiens
cccggagcagtacctcgtgctggaaggcgcaccctacgacgcgcacacca

SEQ ID NO: 341778 - DNA, 100 bp, Homo sapiens
gttcttggaagtaatgtcgtcttgtgacattggcctgggacaatcattgtggcagtgtaatgacaatagtaaagtccaggccatttcgggaaaaacaagg

SEQ ID NO: 341779 - DNA, 100 bp, Homo sapiens
gaatgacgatgacgtctaccgcagcctggaggagctggccgaacaccattcgcttttcacccaagatgatttgatgtcttataaaactctgatgaaccat

SEQ ID NO: 341780 - DNA, 100 bp, Homo sapiens
gaaggggacatcatctgtgtgttctcacagtgcaaagttccccatcaagtggacggcccccgaggcagccctgtacgggaggttcacaatcaagtctgac

SEQ ID NO: 341781 - DNA, 96 bp, Homo sapiens
tgcttttcgcttttcttcttctgcaacacggctacggtctacaagatctgcgcctggatgcagctcttggcagcgttgacagaaggctacgttggg

SEQ ID NO: 341782 - DNA, 88 bp, Homo sapiens
cgcagacatggacaccaaacatttcctgccgctcgacccaagaagcttcgcttccacccaaagcagctgtacttctccgccaggcaag

SEQ ID NO: 341783 - DNA, 50 bp, Homo sapiens
cgtcaacctcagcaagactgagaagatgactccatcaagaatgctggagg

SEQ ID NO: 341784 - DNA, 76 bp, Homo sapiens
gaaaggattccgccttgttggtctgaaattcatgcaagaagagccaatgttttccacccataatcctttctgccga

SEQ ID NO: 341785 - DNA, 100 bp, Homo sapiens
tggtcctattggatgacaattttcacatctcccgcttccccctccaaagaggtatatttgcgtgctctcgtgagaaatctttttaatgaaggaaatgacg

SEQ ID NO: 341786 - DNA, 137 bp, Homo sapiens
cgttgacgtccatttaccagtcttccctggcaagattcttctgaattgtgctgccttggccaaaagaggtgtggtatctgtgcgctttgaagaagatgaagacaggaacttgtgtctaatagcatatccattgaaag

SEQ ID NO: 341787 - DNA, 100 bp, Homo sapiens
ttcaggaatcttgcagaagaccgcagtgggataaatctcaaagatctcgtacaagatccttctttaacggtggcagccgaagttaggaagcagatctccg

SEQ ID NO: 341788 - DNA, 73 bp, Homo sapiens
caaataagctatatactttggttacctatgtacctgttaccactttcaaaactgccactgcagagccccgcca

SEQ ID NO: 341789 - DNA, 100 bp, Homo sapiens
tccacgccagccgcaccatgccgctcctaagcctgcacagccgcggcggcagcagcagtgagagccgcctgtgatgctgccgtcccccgtcgccccgtgg

SEQ ID NO: 341790 - DNA, 82 bp, Homo sapiens
cggcctggcggcttccaggcgcactaccgcggtgctggctgccagctgctgcgccccccatgtagaaggtgcacctcctggg

SEQ ID NO: 341791 - DNA, 80 bp, Homo sapiens
tggatgtttataggcatcatattaacagacttaattcagtgcacaaatgagatgaatgtgaacatcccacagttggcaga

SEQ ID NO: 341792 - DNA, 99 bp, Homo sapiens
cctatctgttcagctacagaaacagcaactacctgaccagactgcagaaaccccaagacaagcttgagaggtgaagttccagcagcgatttgtgtttcc

SEQ ID NO: 341793 - DNA, 82 bp, Homo sapiens
gcccgccagtggcccgaggtccgggtatgatgttctgtccccgggggagatgcaacggctctcctttgcccgactcttctac

SEQ ID NO: 341794 - DNA, 80 bp, Homo sapiens
aaaagtcctttctctgcagatagcctctatacccgttgagtgcttaagaagacatgttggataacaagaagaggtgtaga

SEQ ID NO: 341795 - DNA, 74 bp, Homo sapiens
ttatttttcacgaatcagctacgaaaggctaaagaacgtgccaatggaatggagcttgatgggcgtaggatcag

SEQ ID NO: 341796 - DNA, 75 bp, Homo sapiens
agacacccaagaagcacagaagtggaagaggaagaacgtctgagaaataaaattcgagctgatcatgagaaggcc

SEQ ID NO: 341797 - DNA, 100 bp, Homo sapiens
gcaggtgcagcggaggggccgccgctcacagatgacaacaagacccccagaggagcccaccacctggaccgggtacttcgggaaagtgctcatggcctcc

SEQ ID NO: 341798 - DNA, 100 bp, Homo sapiens
ttggcattcccattgctgtgcctacaccttcgccacccactattggaccagtgattcgcctttgccagtctcatctcgtgtctgctttgttaagttccat

SEQ ID NO: 341799 - DNA, 88 bp, Homo sapiens
gccggcagtcatctcgcggccgttcagatatgaagagaaggctactaaagacttggaacgatacaatagtcaaatgaagagagccatt

SEQ ID NO: 341800 - DNA, 87 bp, Homo sapiens
gctgatcttcgatgagctctcggattccttatgcagagtggccgacttgactttatattcagagcaccaatcaaattaagcaagcct

SEQ ID NO: 341801 - DNA, 100 bp, Homo sapiens
cggcagcgatggatgtggataccccgagcggcaccaacagcggcgcgggcaagaagcgctttgaagtgaaaaagataacggaggagatgatggatcaggc

SEQ ID NO: 341802 - DNA, 78 bp, Homo sapiens
taaggattccaagtaactcttatttggtggtggaggtggatacagcagtcggagaacatctggcagagacaaatacgg

SEQ ID NO: 341803 - DNA, 100 bp, Homo sapiens
acacggctggaggagaagtcccggcttagcagtgtctgcaaaaacgaatcttttcctacaacctgttaactgactggactgttggtaacaaagtaattgt

SEQ ID NO: 341804 - DNA, 98 bp, Homo sapiens
ggagcccgactcggtgattgaggacaagaccatcgagctcatggagggcttatcgagacaaattgaagttttggacccattgtgtactagcaacattg

SEQ ID NO: 341805 - DNA, 95 bp, Homo sapiens
ccgggcggcacgcacgcggtgcagggtaacatggcggatgcggaaggtttgccaagatggtggataagaatatttacatcattcaaggggagatt

SEQ ID NO: 341806 - DNA, 80 bp, Homo sapiens
tgctgtgtgctggagggcactaccagatgggctgcagaaccttggcctgaaaatgctacattatatcagcaattgaaagg

SEQ ID NO: 341807 - DNA, 75 bp, Homo sapiens
tcagcggggcgctccaggaggcactcacagaaatgggcaagttcatgaaacctgggaaggtggtgcttgtcctgg

SEQ ID NO: 341808 - DNA, 80 bp, Homo sapiens
gcgacagcggccggggcgcaggcgcccgtgcggaatggcagaaatgcttcggttacccacagtctttcgccagatgagac

SEQ ID NO: 341809 - DNA, 106 bp, Homo sapiens
tctccttaagtcggccttccctcacctacaagaagacgagttgtactgctgtcacaggaaatggacgctggattacaagcatggcagctcaggcagcagaagttgc

SEQ ID NO: 341810 - DNA, 75 bp, Homo sapiens
cgctactctctctttctggcctggaggctatccagcccgaacgaccctgtcaccaacatttgccaagcagccgac

SEQ ID NO: 341811 - DNA, 74 bp, Homo sapiens
tacagcagagaccttgagggatatctttcttcactcctcttcacttcttcaactctaaaatagagctcaagctt

SEQ ID NO: 341812 - DNA, 90 bp, Homo sapiens
gtcgcatcgaagcccaccttagccacgctgagtgtccgcttctcagcaacctcgatgaagaacattgatgatggcacctcagatcgcccc

SEQ ID NO: 341813 - DNA, 100 bp, Homo sapiens
gcgtacgccctcatggggaaaatctccccggtgactttcagaattcaaggaagccttctccctatttgataaagatggcgatggcaccatcacaacaaag

SEQ ID NO: 341814 - DNA, 75 bp, Homo sapiens
cgagggacaccgcagtatgaggcagagccacaatggtgcgcatgaatgtcctggcagatgctctcaagagtatca

SEQ ID NO: 341815 - DNA, 75 bp, Homo sapiens
acggcgaagaaacagaaatgaaacttctcaaatgagccaacctgagtcacaaggcagaagctcctcctggggtag

SEQ ID NO: 341816 - DNA, 101 bp, Homo sapiens
aggagatcccctcagttctgcgctgctcccgttccccctccccagagcaagagcttctttgaagggcagtctgcaccatgggactcggctaagaaagatga

SEQ ID NO: 341817 - DNA, 75 bp, Homo sapiens
ttaaagtgtggtctttagtggaaaaaaagaatagcattgaagaacttgatggtgtccttacatccatattcaaac

SEQ ID NO: 341818 - DNA, 87 bp, Homo sapiens
ttgtgaaaaataatggtattctcccgctttcaaatgaatgtctacttttgatagaaggtgctggtgaatctggtaaaagtacaattg

SEQ ID NO: 341819 - DNA, 100 bp, Homo sapiens
agaccactcacttgtttgttgtgacaacagagaacgtccaggaagagagaagggcacagttacctaagtatcaacgtaatcttcctcggccaggacaggc

SEQ ID NO: 341820 - DNA, 51 bp, Homo sapiens
ctgcgagtagaaacacaacctgaggttaaagagaagttgactgcggatcca

SEQ ID NO: 341821 - DNA, 51 bp, Homo sapiens
acaccatcaaccgcatcatcaaggtcatgcctctgctgcgagaagttctgg

SEQ ID NO: 341822 - DNA, 88 bp, Homo sapiens
cgggctgtgagagggggagcgtggagcctccgaggccgaggcaacgcggtaaaaatattgcttcggtgggtgacgcggtacagctgcc

SEQ ID NO: 341823 - DNA, 83 bp, Homo sapiens
cggagttccggtacaagctcctgcgggccggcgggtcacaggtccaaggggcaaatagcgaattcccatggaggagaatcact

SEQ ID NO: 341824 - DNA, 83 bp, Homo sapiens
gttcaaacatatccttgtagatggagatactttaagtggtgggggaaaagtagctccagctcaaccatctgaggaaggaccag

SEQ ID NO: 341825 - DNA, 100 bp, Homo sapiens
aggcagtgaggcttgggccgctggacccagctccctcgtgaaagatgcttctgttcctctgattgatgttacaaacctccctactcctcgaaaattcctt

SEQ ID NO: 341826 - DNA, 80 bp, Homo sapiens
ccgatccagcctgcggagcctgtggggcaggtcctatctgactcctgtacgggatgaggaagcagagtctttacggaaag

SEQ ID NO: 341827 - DNA, 100 bp, Homo sapiens
gcctgacttcttcctgctgctgcttttcaggggtgtctcccaggagtcttccaaggttctcaacaccaatgggaccagtgggtttctcccaggtggctac

SEQ ID NO: 341828 - DNA, 98 bp, Homo sapiens
tgcctcatcccaggttgccttggaaaatgccaacgccgtgtctgaagcggctggctgtcggcaattggattcttccagtacagcccgggcgctgccgt

SEQ ID NO: 341829 - DNA, 89 bp, Homo sapiens
tgggcaaccactcaggacggcccgaggatccggaaccagccatgtgatgccaagaggctcaggaactggcatttacagcaatgctgcac

SEQ ID NO: 341830 - DNA, 100 bp, Homo sapiens
agccatagtacctacagcagcactccagagttctcttggaacggttgattgtaaataggccacatccttggggtcttcttattaccttcattgagctgat

SEQ ID NO: 341831 - DNA, 51 bp, Homo sapiens
taatgtggaactggctcaggctgacaatatgtgcactcatttgtggacgtc

SEQ ID NO: 341832 - DNA, 75 bp, Homo sapiens
ctgcactgtggcaaggcttttgcttccaaatacaagctgtatagccgtggtccttcagcatatctctgtgctgca

SEQ ID NO: 341833 - DNA, 75 bp, Homo sapiens
gttcaactactagatgactttaaaatatcaggagttaatggaacactgctcggtttattagagctgtttctgaac

SEQ ID NO: 341834 - DNA, 98 bp, Homo sapiens
ccaggaccaaaagaggaagatagtcttgggacccttgcatggtgtttcaaagggtggtgaagaactaagttggcctttaccagagtttgatccaagcc

SEQ ID NO: 341835 - DNA, 75 bp, Homo sapiens
tgtccagatgggagtgatgaagctggctgcctacaggggttcataggaccccgaggatccaaaggtgcagtgggc

SEQ ID NO: 341836 - DNA, 83 bp, Homo sapiens
atcttcttctctcggtcccgggagcccccgcccggagtgagtagcgcgaggcggtgcgaaggcatgtagagcgcatgaagtac

SEQ ID NO: 341837 - DNA, 100 bp, Homo sapiens
ctcgggagtgcagggccagatcctgtgccagcggggaacacatgcccactttggaggaattctttgaagaagccattgaacaggcagaccctgaaaatat

SEQ ID NO: 341838 - DNA, 50 bp, Homo sapiens
gtgaaatcagaggagatgtaactatcggcttgaagctgcaaaagatgatt

SEQ ID NO: 341839 - DNA, 75 bp, Homo sapiens
cctccttcaccgccgcagaccccttcaagttctagtcatgccgagccgctgccgctcatggatttgtgccgtcgc

SEQ ID NO: 341840 - DNA, 101 bp, Homo sapiens
acatagacatttacgcggatgtcggcgaagagttcaaccagatgtctcacgcagccaccagtgccttctgccgttccattaagctgcagtgtgaactttac

SEQ ID NO: 341841 - DNA, 98 bp, Homo sapiens
gccctccgggaagatggcggccgtgcaggcggccgaggtgaaagtggatggcagcgagccgaaactgagcaagaaagtcagtggcctttcccccttca

SEQ ID NO: 341842 - DNA, 95 bp, Homo sapiens
cttgtacagcgccggtcaacatcgcggtcatcaagtactgtcatcatcagatttgaaatatttaaagtggatacaaaactatttcagcaatgcag

SEQ ID NO: 341843 - DNA, 90 bp, Homo sapiens
aaaagagacctctacttagctcagcaattcttaccttgtatggaacccttcagatcaaagcttaccaataaattcagtatgtagaacaga

SEQ ID NO: 341844 - DNA, 114 bp, Homo sapiens
cgccagtgcgcctgtgctgaggaccaggtgttggacgcagacggcgtcacttgcttgggcaatctgtacagaagctggtctgatggccttaagagaacgtagaatgaaagtaac

SEQ ID NO: 341845 - DNA, 75 bp, Homo sapiens
ccgaagggtccccgggacccgcctgctgagtggacccgggtgactctgacaccaccataccaatggacgaatcac

SEQ ID NO: 341846 - DNA, 100 bp, Homo sapiens
gggaatcgggagccgggcgcggggagctgcgcgaagccggggcggagcacgcgagctatggaacccaagacagaccaggatgaggagcattgccggaaag

SEQ ID NO: 341847 - DNA, 83 bp, Homo sapiens
cttgctcgtgccttagacaagaaactcctttccttaaagttacatgggaattggtctttctgctcaaggtgtgaacatgaata

SEQ ID NO: 341848 - DNA, 121 bp, Homo sapiens
gttattctggtacaagttaacccaggagaagcatttacaataagaagagaagatggacagtttcagtgcattacagagatgtcggcttatttataggaattgcttgaagccagagtcatgg

SEQ ID NO: 341849 - DNA, 51 bp, Homo sapiens
taatggagcagagacttcttggcaggtgctgggtaggccaggtttcagcat

SEQ ID NO: 341850 - DNA, 98 bp, Homo sapiens
tcacccaccaggcgttcagccacagcagccaccatatacaggagctcagactcaagcaggtcagattgaaggtatattgaagcaagtcaaagattaca

SEQ ID NO: 341851 - DNA, 50 bp, Homo sapiens
ggcgcctgcccctgcaacgggaggagcggtggtgccccccccgggcacgg

SEQ ID NO: 341852 - DNA, 100 bp, Homo sapiens
atgggaactgcacgtcaagatgtttatgatttgctaaaaacaaacctttatcaggatgatgcagtaacagctcagaattctgcaaatgcagattttgcaa

SEQ ID NO: 341853 - DNA, 98 bp, Homo sapiens
ctccaaggcatccctgcccacgggcgaaggcagcatcagccatgaggagcagaagtcagtccggctgtgggccaggactgctacacgagaatctggag

SEQ ID NO: 341854 - DNA, 101 bp, Homo sapiens
tcctgacctcaccgcgcccgtggccgccgtgcaggcggccgtcagcaacctcgtccggcctgattacatcaaccccagagccgtgcagctgggctcccttc

SEQ ID NO: 341855 - DNA, 100 bp, Homo sapiens
gatgacaaggatgatgatattagtgatactttctctgaaccaggacttggagagctgcagacttcgtttggatcccgagttggaccggcacagatatgag

SEQ ID NO: 341856 - DNA, 90 bp, Homo sapiens
aatcaaactgctacaagacaacaccctgatctggcatggacatagactaaggtgtcagtatgttcttcaagctgctctgctcctgggccc

SEQ ID NO: 341857 - DNA, 104 bp, Homo sapiens
taaagtgaaaattgtagcctgtgatggtaaaatattgttgtccagacatgataaataactttttgggactggctaaaacagaattttcaagtacagtaaataaa

SEQ ID NO: 341858 - DNA, 100 bp, Homo sapiens
cccggggctccgagccggagccgagtctgcgcctggggccggagcggttgcagggcacacattactcggtgcagtcggacatctggagcatgggcctgtc

SEQ ID NO: 341859 - DNA, 100 bp, Homo sapiens
gcagcatctgcgatgtgaggaaaggcacctccaccagcgatgtgcattttgtaagcactttggagccactatcaaatgctgtgaagagaaatgtacccag

SEQ ID NO: 341860 - DNA, 96 bp, Homo sapiens
acggaacttaagcgcaaatttgaacagatgaaacaagataggatcaccagataccagggcgtcatggtgggcatgggccagaaggactcctacgtg

SEQ ID NO: 341861 - DNA, 75 bp, Homo sapiens
cctgccgccggttgccggaggccatcgaggaagtgaagaatggtgccccgtgctgatgagacaatacttggtgca

SEQ ID NO: 341862 - DNA, 100 bp, Homo sapiens
aaaaccctttaaagaagatgatggaagaatttgtaccccatagcaaggttcatcagttcagtaacaagtcaacagagatggctttaagagtggcatctct

SEQ ID NO: 341863 - DNA, 83 bp, Homo sapiens
caatctctcctgcaagtatcccagtaacgcatccccaattaatagaattgtacaaatcagtggcaattccatgccaagaggaa

SEQ ID NO: 341864 - DNA, 100 bp, Homo sapiens
gccatcagctgcatcctccctatggcactggaaccctaaggactctgcaatatgaataattccctagagaacaccatctcctttgaagagtacatccgag

SEQ ID NO: 341865 - DNA, 90 bp, Homo sapiens
tctcagcaccttggcgaagccttgggtttctttcttaaaggactgatttttagaactccacatttgagcttgatccaaggattattcgac

SEQ ID NO: 341866 - DNA, 113 bp, Homo sapiens
gccgaggctgggctgaggcgccgcggtaccatgaggcgccgagagcctacgactagatttgcatctttacgtcctgcgcggaggctgctacacacatgcagaagtcatgctgg

SEQ ID NO: 341867 - DNA, 74 bp, Homo sapiens
tgatgatagccagtcccgagagccagtgagaaagatcagtctaaagaaaaggagaagaaagtgaaaaaaacaat

SEQ ID NO: 341868 - DNA, 97 bp, Homo sapiens
gacaacaccatcttctttacaacctatgcaaatggctcctgcagctcctctgaggagaggcaggtcatggatcatgccttcctccttctcagttctg

SEQ ID NO: 341869 - DNA, 95 bp, Homo sapiens
gcttcggccacgactgggatcctacgtgcatgaagatggacgaggtcctgtacagcatcgccgagaagttcaacttcctcaattgctttgcctca

SEQ ID NO: 341870 - DNA, 83 bp, Homo sapiens
ctgtgctcgcgctactctctctttctggcctggaggctatccagctcactgcttcaaccacctgtgagaaattagaaaaagcc

SEQ ID NO: 341871 - DNA, 80 bp, Homo sapiens
acaagcagatctactactcggacaagtacttcgacgaacactacgagtaccgagatgccctgtatccaagcccaatatgg

SEQ ID NO: 341872 - DNA, 75 bp, Homo sapiens
cagttcagaagaaatatactacactgcaagatctaatctgggcttccgttacaagatgaggtctgtgtatgctca

SEQ ID NO: 341873 - DNA, 100 bp, Homo sapiens
caccaattgacaacggttcaaaaatcaccaactaccttttagagtgggatgagatattcccactctggccactgcccaaaggggctcttatctgaggaat

SEQ ID NO: 341874 - DNA, 97 bp, Homo sapiens
gtatcatcaagaacagaacaggccctatggggcatacctatggctttattgacctcgactcccatgcggagtttgggctttgcaaaactgagaacaa

SEQ ID NO: 341875 - DNA, 74 bp, Homo sapiens
ggagtcccatttgggagcaagagccatctactcgtccgttaccggatcagtgtgcgtgtgaccaccatggatgc

SEQ ID NO: 341876 - DNA, 83 bp, Homo sapiens
cagcccttctggtgtcacctcccagggtgactcaactccagtgtactaatggtcacttgatgtgcgctggctgttttatccac

SEQ ID NO: 341877 - DNA, 100 bp, Homo sapiens
ttgacagatgctagttggtataccgtggatttctctatgaatcatcatcaagaactctgggagaacttttgaattcataaccaagccaacatctccagac

SEQ ID NO: 341878 - DNA, 83 bp, Homo sapiens
cagctgcggcggctcggggtgctctactggaagctcaccatggatgatgatatcgccgcgctcgtcgtcgacaacggctccgg

SEQ ID NO: 341879 - DNA, 101 bp, Homo sapiens
cccgcggtcctcgctctcgggcggggcggcggcgacgcggacctgcggactagcgaacccggagtccgtgcactggagaaggcgaggtcaagtgcccaact

SEQ ID NO: 341880 - DNA, 100 bp, Homo sapiens
aaggaagaagcctagaagaggaggaagaggaaagaaaaggagtcaggaatgcctcttaggtaaggaaactgcccacaatgaaaataagttttataatgta

SEQ ID NO: 341881 - DNA, 73 bp, Homo sapiens
gacggtgctggccccgggcaacgatcggaactcggacacgaggaaaggagcagtggcttccggttgaagccac

SEQ ID NO: 341882 - DNA, 75 bp, Homo sapiens
cagacaccgagcttcagcaagctctctccaacgatggttccagaccttgatccacctgttaaaaggcaacattgg

SEQ ID NO: 341883 - DNA, 98 bp, Homo sapiens
cctcctcaccgtgcggtcacggtgttgctctcttgccattcgtggatgagcgaaggctacgagctgccctagaagaggtatacccagacctcactcca

SEQ ID NO: 341884 - DNA, 82 bp, Homo sapiens
atggaaacgactcctcggccgagctgagtgagacgccttcctgagtcctggatctttcttccttctggaaatctttgactgt

SEQ ID NO: 341885 - DNA, 74 bp, Homo sapiens
agagtgaagatgagttgacaccttttgacatgagcatccaggcggctgagtgacagcccatcaatgaaaaagga

SEQ ID NO: 341886 - DNA, 100 bp, Homo sapiens
tcctgaatatttctcaggacctggtactccattaactggaaatgcagccactgaagaaggatctgtgccagttcagaagcaggcgagcctcttccctgat

SEQ ID NO: 341887 - DNA, 82 bp, Homo sapiens
atcttcgaacttagacttccggaaggactttggcgagggaaccacgtgaatgttgagggggcgacacacaagcaggtggtgg

SEQ ID NO: 341888 - DNA, 75 bp, Homo sapiens
cagccagaatggggaggaggagcctgagaaaactacccctgagtgtggtcccacaggatatgtagagaaaatcac

SEQ ID NO: 341889 - DNA, 100 bp, Homo sapiens
ccagctgttcattggaggtgtcactggatggtttgatgaacttgtgaaaaaattcaaagtcgaatatcatgctggtggctctacccagaattcaattaaa

SEQ ID NO: 341890 - DNA, 82 bp, Homo sapiens
taaaggagcagaggaaatggagacggtcatccctgtagatgtcatgaggcgagctggggagaacatttcaggataggaatag

SEQ ID NO: 341891 - DNA, 114 bp, Homo sapiens
cgctggccgggggcgcgggcggcggcgccggcaggaagcatctgggctgatgggccgtaccctgcaccgtgagccacccgcaggagaccaggagggcacagcactgcacctgca

SEQ ID NO: 341892 - DNA, 75 bp, Homo sapiens
caccacctccgccagttaagaggaaaaagatggcagtcttgggcacgtccatctgtaaacctgctgagagctctg

SEQ ID NO: 341893 - DNA, 98 bp, Homo sapiens
gccgagccgggatctcaggtcctcgggggcggcggccacgccaaggacggcaggtaattgctgccatggaaacacaactgtctaatgggccaacttgc

SEQ ID NO: 341894 - DNA, 100 bp, Homo sapiens
ggcttccagaggaattgactactatgacaggaacctggcactgtttgaggtctccgtgaggccgggtgacgctccagaatgggagacaagccaatttggg

SEQ ID NO: 341895 - DNA, 89 bp, Homo sapiens
tccttcagtgtggtcttccaggaggccgaggacacaccgctggatcagtgtaaggacggctgtcctcagcgaggggccgtgcacccgct

SEQ ID NO: 341896 - DNA, 100 bp, Homo sapiens
aagcaagctggttctctgggatataaataaggtgggatatgagcctcttcctccaacaataggacgaaatatttttgggcggcaagtgtgtcagcttcct

SEQ ID NO: 341897 - DNA, 90 bp, Homo sapiens
tctcggagacgagtggtgggagaaccagccgactggagcaggcagcagcccaggtcacgagaagagaatgccttctagatgcaaaatcac

SEQ ID NO: 341898 - DNA, 142 bp, Homo sapiens
gaacaagtgtgggagaggaagcggcggcggcggcgccgggcccgggggtggtgacagcaggtctgaggaagctgaatatggtgggcatgatcagatagatttgtatgacgatgtcatatctccatctgcaaataatggagat

SEQ ID NO: 341899 - DNA, 90 bp, Homo sapiens
gcctggggagtgttgccctgtgtgcgaaggtgctggagaatctggtaaaagcaccattgtgaagcagatgaggatcctgcatgttaatgg

SEQ ID NO: 341900 - DNA, 50 bp, Homo sapiens
tcttgaggatcttgacagcttgggaggacagtcattttgtttactcattc

SEQ ID NO: 341901 - DNA, 73 bp, Homo sapiens
ggagtgtaggtcatatcgccgcgagaaagatgctggtttcgagttttggagatccttgttttttatggaacac

SEQ ID NO: 341902 - DNA, 83 bp, Homo sapiens
tgaaggtctagtcaaacgcctccacaagaactctgtgaaggtgatgtacaagtgcctgtggccaaactgtggcaaagttctgc

SEQ ID NO: 341903 - DNA, 88 bp, Homo sapiens
ggaagatagtcttgggacccttgcatggtgtttcaaagggtggtgaagaactaaggaaatttgtacatagattctaggcaaaatctcc

SEQ ID NO: 341904 - DNA, 98 bp, Homo sapiens
gtggtcaggacctcaacaaaaccagccgacagcagataaacaccatctgattcagatcacaagaagaagaaaaagaaaaaagaagaggatcctgaacg

SEQ ID NO: 341905 - DNA, 90 bp, Homo sapiens
cccgggtttggagggagtttgagatgaagcgaatggagccagatgaccaagatgctccagatgaacatgagtcgcctccacctgaagatg

SEQ ID NO: 341906 - DNA, 100 bp, Homo sapiens
tgatgagcaagcagtaataaagtctcccttaaaatgcaccctccttccacctggccaggaatcagcttccttcaaaatgtctactgttcacgaaatcctg

SEQ ID NO: 341907 - DNA, 83 bp, Homo sapiens
ggcggggagcagctggtggaccagctcatccgcgacctgatgagtgaccgaggaggtggcgttcctttgaggaaaattgacag

SEQ ID NO: 341908 - DNA, 75 bp, Homo sapiens
ctggcctgggcgctccggtggcggcggagagacgtctcccacaacctgctccgggcgctggacgttgggctcctg

SEQ ID NO: 341909 - DNA, 90 bp, Homo sapiens
ctggtggcagggcatgaggacagcaatggttgtatcaactatgaagaagagaaagaagatcttggcgatgaggatgaagcagaggaagaa

SEQ ID NO: 341910 - DNA, 100 bp, Homo sapiens
tccaacacagtttcccaaagaaaaatgggcaccaagggcaaagttactcactataaacaatatccacccaacacaagcaaagtttattcctactttgaat

SEQ ID NO: 341911 - DNA, 75 bp, Homo sapiens
catacagaggagctggccacgaaatacgagagtgggaacctggataagcagacggccctgggaaacacagttcta

SEQ ID NO: 341912 - DNA, 98 bp, Homo sapiens
ctaaatacaacctctgtgcagtggtgatctgaagaggaatgattatacgcctgataaaattatatttcctcaggatgagccttcagatttgaatcttc

SEQ ID NO: 341913 - DNA, 100 bp, Homo sapiens
cgatctgcacttcgcattttggcattgacatttaattttagggtcctttatatagaagggagagtagatccttttatcctgccacaccagcaggttgata

SEQ ID NO: 341914 - DNA, 100 bp, Homo sapiens
ttcgctgaagtcatcatgagctttttccaactcctgatgaaaaggaaggaagattgtcaccagacctgcaatctatggagcagattcggagaattatgag

SEQ ID NO: 341915 - DNA, 138 bp, Homo sapiens
gagccatgggtcctcgacctgcagggagcagaggggacagaggcaccaaggacctccaagacaggtgtgatgaatgcagactctgctaccattttggctgtttggatcctcctttgaaaaagtctcctaaacagacag

SEQ ID NO: 341916 - DNA, 82 bp, Homo sapiens
tggagagtgcggagcaggctcatgagtgggtcaagtgtattgctaaggttttatgccgctgagataatgtgtggactgcagt

SEQ ID NO: 341917 - DNA, 75 bp, Homo sapiens
agtctcagggattaagcactttacttggacatcggcattggcatgttgtacaggagcccatcatggcgacgcccc

SEQ ID NO: 341918 - DNA, 88 bp, Homo sapiens
ccaggcctcggactccgcggccggcccggcgcggcccagcgccctcaggaacttgctactaccagcaccatgccctaccaatatccag

SEQ ID NO: 341919 - DNA, 75 bp, Homo sapiens
gcgggagggggggtggtgcgcacgcccccgaggacgcaggaagctcttcgtgggcggtcttgactggagcacgac

SEQ ID NO: 341920 - DNA, 87 bp, Homo sapiens
ggacggaagatcgggagcgggtccttcggagatatctacctggacctattcaggcctgttctgtgtggtcatcaatccttacaagaa

SEQ ID NO: 341921 - DNA, 100 bp, Homo sapiens
ctcgaggttgcaggactctttctgttcaggccagaccctctgggagcttctcagccattttccacagatcagcattccacgcctacgggaaggcaggcaa

SEQ ID NO: 341922 - DNA, 75 bp, Homo sapiens
gaagactgagaattgtgtggccaaagtatcagtcagagccggatctctcattggctgttgcagcagggatcagac

SEQ ID NO: 341923 - DNA, 100 bp, Homo sapiens
gcgcagctacctcatgactattgcaccacgcccggggggacgctcttctccaccacaccgggagatgatgcagtttgcttggcagagctataagcgttat

SEQ ID NO: 341924 - DNA, 100 bp, Homo sapiens
attgtagcctcaaactcccaggctcaagcagtcctaccatgtcagccttcccagtagctgggaccacaggtgtcactgacgtttgaggatgtggctgtgc

SEQ ID NO: 341925 - DNA, 98 bp, Homo sapiens
cgtgtgggagcgggagctgcggaaagatctttcattcgtacgtgcctttgagtttacctatgttaatgtttatggcactcacgttttggtaagtgctg

SEQ ID NO: 341926 - DNA, 96 bp, Homo sapiens
aattgttctagtctccaggcccagtacatggatgcttgttggatgaattaatgaaccttgacccacaccaaggtgccttatgcctctggcatgccc

SEQ ID NO: 341927 - DNA, 95 bp, Homo sapiens
gtgcgcacagacggcgagggcgaggatccggagtgtctgggagaagttggaatcgaagcctcttaaaatggcagatgacttggacttcgagacag

SEQ ID NO: 341928 - DNA, 100 bp, Homo sapiens
cgtcagcactgactttcagctatggaatcgaattcaattcgtcataatctgtccctacacagcaagttcattcgtgtgcagaatgaaggaactggaaaaa

SEQ ID NO: 341929 - DNA, 87 bp, Homo sapiens
cggaccgtgtcgccgacgccaaaggggacagcgagtcggaggaggacgaggacttggaaggtgcagcggaactgctgcctgacgctc

SEQ ID NO: 341930 - DNA, 100 bp, Homo sapiens
gaggaggagtccccaggaaagcgcctggacgcaggtggaagcagggaaaggcctggagatgaggaagctggttctctcggggttcttggccagcgaagag

SEQ ID NO: 341931 - DNA, 71 bp, Homo sapiens
ctctaacctgcacgactcctcgcacaagcagcgcaagaagagtaacagactagctagagacaatgaattaa

SEQ ID NO: 341932 - DNA, 75 bp, Homo sapiens
gaagcataagaacatgagaactgcgactcagcatgcagaagtggaaggagaacatgaatctctcagaggcccaag

SEQ ID NO: 341933 - DNA, 98 bp, Homo sapiens
ctgaatccagtaccaaaaacgtcaacaacagttttacggacggagaggagcaggaggagccgcgtggcaaggaggagcgccaagagcccagcaccacg

SEQ ID NO: 341934 - DNA, 100 bp, Homo sapiens
caccattactgtgacgtctgaggctggagaaaatgatgaaagcacagttggtggatctgaaatctgaactgacagaaacccaagcagagaaagttgtttt

SEQ ID NO: 341935 - DNA, 75 bp, Homo sapiens
tgcttttgatgtctgacaacgtggatcgttgttttgaaacttttccaagagataacttcaccaagatgtccagtg

SEQ ID NO: 341936 - DNA, 75 bp, Homo sapiens
cacccggcaactcagaaacatcaggtccaagctgtcaaagctcgaaaaacagcagcagaggaaagaaaagaccag

SEQ ID NO: 341937 - DNA, 100 bp, Homo sapiens
atacttgaattttctaaggtgtcattagcagaagaagatctttacaatccaaggctgctacccggtgatccggtgtctcttgcgccggaggggctgggtg

SEQ ID NO: 341938 - DNA, 75 bp, Homo sapiens
gttggctttggtttgaggaggctgaggaggagtcagagtcagaagcaaaggtagatggagagactgcatcggaca

SEQ ID NO: 341939 - DNA, 75 bp, Homo sapiens
ctgagaagggagacgacgctgctgggtccgctgagcggggcgacccgagatgggaagcggtctcgagcagaagcc

SEQ ID NO: 341940 - DNA, 100 bp, Homo sapiens
tgatcgccgggaacccttgccgctgctgtcctgcgaccccaagcaggtatccgcccccagatcatgaacggccccctgcacccccgccccctggtggcgc

SEQ ID NO: 341941 - DNA, 75 bp, Homo sapiens
ctaccttttgagctgggaaaactgtttcagttgcagactttaggcctgaaaggggatcccaacaagccctcagga

SEQ ID NO: 341942 - DNA, 100 bp, Homo sapiens
cagaagtccacttcagaaggtctgcttggtgacttggatacagaaatttcctgggctaaagtgcctcaatcaggaaccctgaagctgtcccacctacagg

SEQ ID NO: 341943 - DNA, 83 bp, Homo sapiens
ccctactacgatgcaatcctgagtctgtagcatctctgtctgttggagaaggcacaggtgtcagagcaccagtcagaacagca

SEQ ID NO: 341944 - DNA, 76 bp, Homo sapiens
gctgggaacccgcggtggagcgggacacgaacgtggagcggaaagaatgtcggagcgggccgcggatgacgtcagg

SEQ ID NO: 341945 - DNA, 100 bp, Homo sapiens
ccagccgggagcgctgcggggtgcccttctcctgctgcgtcagggaccctgcgggctgtgtctggctgtccctgataaaactgtgagatggtgtgcagtg

SEQ ID NO: 341946 - DNA, 100 bp, Homo sapiens
aagaagaaaaagaaggccctgagtcaaagaagatgcctcgaactaaacaaattcatcccagaaatctaagaggtaatatatgctttaaacactaaaaatg

SEQ ID NO: 341947 - DNA, 85 bp, Homo sapiens
tcgtgagtcccgtgggaaagctaacctcaccaaatctttagataagcactctttcaaccaaatgccaatcagaaaatctttgaat

SEQ ID NO: 341948 - DNA, 87 bp, Homo sapiens
ttcatctctataaccttgttcctggtataccaacaatggaacactttcatcagttttactaccattcctcaagaattttgtatccaa

SEQ ID NO: 341949 - DNA, 82 bp, Homo sapiens
cccggtgctaccaccaccgcgcagacctgcctagagctggaacgttacctccagagcgagccctgctatgtttcagcctcag

SEQ ID NO: 341950 - DNA, 83 bp, Homo sapiens
ccattcctcatttggcctgagcagctcagagtcaggaagtcagagcgcagaatgcactgctgcctgcaggcctgaggcagaag

SEQ ID NO: 341951 - DNA, 100 bp, Homo sapiens
ccgctgctgctgctgctgtgctcaggcctggccggacaggctacatccagaagatcaagtcgggagaggaggactttgagtctctggcctcacagttcag

SEQ ID NO: 341952 - DNA, 75 bp, Homo sapiens
cgccgggtttggggcgccgcagtcccgggaacggaggtctcggtccagctcgacttccagctcaggctccagcac

SEQ ID NO: 341953 - DNA, 82 bp, Homo sapiens
caagaggccatggaccctgtctcagtgtttggtgccctggttgtcagatgttggaaagcagtaggacggaacatactcttcg

SEQ ID NO: 341954 - DNA, 50 bp, Homo sapiens
gccggaacaccctggaagccgagaaatggctgcctgctgtttcccgggga

SEQ ID NO: 341955 - DNA, 75 bp, Homo sapiens
ctccgagcccgccgccacatcctctgagccaggcgggcaccacggcaggggctgagctaccctcatggaagggag

SEQ ID NO: 341956 - DNA, 83 bp, Homo sapiens
gctggccaagaagatcatcattaaggacggaggcacggcaccgaccgtcacgagctaacttcctggaagagctttccgtctat

SEQ ID NO: 341957 - DNA, 75 bp, Homo sapiens
ctgcttcccaatcccactgatgaggatcagcccatgccctgccaaggtaaccctgctggggtcagttatcttcac

SEQ ID NO: 341958 - DNA, 74 bp, Homo sapiens
agtgcttcaattaatccagaagatagtactttccctggtgctggagaatctggtaaaagcaccattgtgaagca

SEQ ID NO: 341959 - DNA, 100 bp, Homo sapiens
agctccaggccgtgcgcatgtttgctgactacctcgcccacgagagtcggagaggaggagcgagtggacattctaatcaacaacgcgggtgtgatgcggt

SEQ ID NO: 341960 - DNA, 100 bp, Homo sapiens
cgcctgtgtaattacctgtcccatcatctgacaattagcccacagagtggcaacttccgccaattgctacttcaaagcaacttgagttggtggaaccaag

SEQ ID NO: 341961 - DNA, 100 bp, Homo sapiens
ctatgtcagaaagaatttgtgtcagagagtggtgtcaagtatcacatcaactccgtccatgctgagagggagagacaagctcaacgagaagatgccctcg

SEQ ID NO: 341962 - DNA, 95 bp, Homo sapiens
ctcccgcctccgtgtgccctggttgtgagaagacgtctgtgtcgtgcgactagacgcttgaagcaaagctgccatcccagaagacgacatgctct

SEQ ID NO: 341963 - DNA, 97 bp, Homo sapiens
ggtggagtaggtcctgacactgtccataaatgtgcagagagccccccaaggtgaggctggagggccgcagcaccacctcgcttagcgtctcctggag

SEQ ID NO: 341964 - DNA, 78 bp, Homo sapiens
ttttgtccagggcagcatctctggtgcatgctgatgacgaaaaacactctttttgatcagaacaatgctgcaaaaaaa

SEQ ID NO: 341965 - DNA, 82 bp, Homo sapiens
gaagaggagagagcgcgggcctctaggaagttcaaatctgaacatcaatgatgtactagggaactactcattgactcttgtt

SEQ ID NO: 341966 - DNA, 96 bp, Homo sapiens
agcgatcgagagagaccggagaggtggagagtcattgaaattatgagactatcattcaaatggaagcattatagttcttcggaaccattatgatct

SEQ ID NO: 341967 - DNA, 101 bp, Homo sapiens
attaaagatgcagtacgccacggggccgctgctcaagttccagatttgattcagaatggacagtttagaagaacctcagaaaaaagtctttaaggctcgaa

SEQ ID NO: 341968 - DNA, 51 bp, Homo sapiens
gaaatgagatccgcttcctgcccaacggaatggaagttggatacactttgt

SEQ ID NO: 341969 - DNA, 73 bp, Homo sapiens
agattcatctcgacactgaaattacagctgaaagtacccatggcagacaagcctggtaacacagtgaatttcc

SEQ ID NO: 341970 - DNA, 100 bp, Homo sapiens
ccgagtgcctcaagttgctcctgcgggggaaggcctccatcgagatagacaaatggtggcccggagtttgctcgataccttgagggaagtctgcgatgat

SEQ ID NO: 341971 - DNA, 100 bp, Homo sapiens
gggagaaactcccacttcctacacaggaccaaagggagatcacactactggggtagcaaatgatggctcagacattcattctgctgtgctctccacaatt

SEQ ID NO: 341972 - DNA, 74 bp, Homo sapiens
ccgggccgtcttcccctccatcgtggggcgccccaggcaccagggcagcgtgatgatctcatcgccagcatcct

SEQ ID NO: 341973 - DNA, 83 bp, Homo sapiens
aataacaataaaaaacccaaaacctcaggctcccagtttacaattcaagcgctctgaagtttctgaagaagttacagaaaatg

SEQ ID NO: 341974 - DNA, 82 bp, Homo sapiens
caaaacactcagctgcaagtccaaagccacaaggtgggaagaagagcgctatcctgaaggcatcaagtggaaattcctagaa

SEQ ID NO: 341975 - DNA, 100 bp, Homo sapiens
atgctgggattggctgcttttcatatggctcgtggacagcagaaaattcagtctcagcagaaaaatgccaaaaagcaagctggacaaaagaagaaacaag

SEQ ID NO: 341976 - DNA, 50 bp, Homo sapiens
ggaggtgctgggagcgagttggctggctttatcctgtggataaacgcaga

SEQ ID NO: 341977 - DNA, 90 bp, Homo sapiens
atgaaagctttgtatgaacaaaaccagtctgatgtgtctttctgtggaatttggaacaattctagtttacacatgtgagaagagttgctg

SEQ ID NO: 341978 - DNA, 75 bp, Homo sapiens
aatgatccttttgctcctggtggaacagttgttgcagcaagcgattcagatcagccaaatggccgatgacacagt

SEQ ID NO: 341979 - DNA, 75 bp, Homo sapiens
ggggacagcccggaagagattgcagctgccatgatgatcccagactttaaacagcaaatttcagaattggagaaa

SEQ ID NO: 341980 - DNA, 74 bp, Homo sapiens
aaagtcctttgaaatggtgctggatgaaattagaaagtgcaggaatcacagccatggcccccaccctccaggat

SEQ ID NO: 341981 - DNA, 100 bp, Homo sapiens
gaaggacaccaagatgcggatccgggcctttccgggtgtactctgtgtgaccgcgcctatccctcggactgtcccgaacatggaccagtgacttttgttc

SEQ ID NO: 341982 - DNA, 82 bp, Homo sapiens
ccgactactacgccaaggaggtcacccgcgtgctaatggtggaaacccacaacggctgaaggtgatgtggccgccctcaacc

SEQ ID NO: 341983 - DNA, 51 bp, Homo sapiens
gattttgcatctagaggaattgaaagattcatcggttttgccaccaccatc

SEQ ID NO: 341984 - DNA, 82 bp, Homo sapiens
ccaatctctcataagccggattcagaaaataggtcatcgattgttctaagaacggaagcatctgggctggatggaatttagc

SEQ ID NO: 341985 - DNA, 83 bp, Homo sapiens
caagaaggcaacgacgttccatctgtggaaggacctaccaaccagacggcaaatggatacatcttgttttttcatattacatc

SEQ ID NO: 341986 - DNA, 50 bp, Homo sapiens
gggatcaaccagacggaaaacccggccaccagcttgggctccccacggag

SEQ ID NO: 341987 - DNA, 75 bp, Homo sapiens
catgcagcaaaagaaggagggtcctctcagtgattaagttaatcagctgtgttcagcgaatacttatgaacagaa

SEQ ID NO: 341988 - DNA, 82 bp, Homo sapiens
gtggccagggcacgtcactgcaggccagagtctctggtaagaagagtgaaagcaaagaagccaagaagtctgaagaaccaag

SEQ ID NO: 341989 - DNA, 100 bp, Homo sapiens
gagctgttgactggaagaacattgtttcctggtacagaccagctgttgatctatggacgaccagtgtatgtcactctaatagctagaagatccagtaaat

SEQ ID NO: 341990 - DNA, 123 bp, Homo sapiens
aaatgaagctgaatttatcctgagcaggcagagagcagaagatattcacagacatgcggaatttgaggttttggaaggaaggatgttgtagaacacttactacagatgggtgctaatgtccac

SEQ ID NO: 341991 - DNA, 75 bp, Homo sapiens
ttggaccagaagcacctctggctgctgcttcttggacacttaatgattgttggcaagaaatgtgctgctgatctg

SEQ ID NO: 341992 - DNA, 97 bp, Homo sapiens
ttctaactatttcaagatgatatttattcaccaaacaaggagagcgacttgcagttgtggaggtacagtgtgaacggctgaggatgctctaccggga

SEQ ID NO: 341993 - DNA, 50 bp, Homo sapiens
ggagtacgcgcgagagccttgatcttcccagacccgtcagattttgaccg

SEQ ID NO: 341994 - DNA, 74 bp, Homo sapiens
gaacatctcttcccagcggctcagtaacaaatgtggcaattattttggatctatcacctgtcatcataactggc

SEQ ID NO: 341995 - DNA, 100 bp, Homo sapiens
gcatgcaaactgaacagttcgagattgtcgtcatcctagaaggcattgtggaaacaactgtagacccaaatgatttgtacattgtagaacccctcaagtt

SEQ ID NO: 341996 - DNA, 50 bp, Homo sapiens
tccacccaaatcctcttctccaagaagggagatacttcaggggattaccg

SEQ ID NO: 341997 - DNA, 99 bp, Homo sapiens
aggcgctggagctgggtcagtccgccgctcaccccgcggccgcaccttcccgccttctcagggcaacaaccttcgggctgcaggggccgaggctctggg

SEQ ID NO: 341998 - DNA, 76 bp, Homo sapiens
ccaagatcggtgagattgccactgggtcccccgtgtcaactgaactgggaaacatggtagaatggtgcttacctca

SEQ ID NO: 341999 - DNA, 100 bp, Homo sapiens
cgagagcgtgaccgagagcgcgaatatcgtcatcgttagaaggccgggcatggtggctcacgcctgtaatcccagcacttcgggaggctgaggcgggtgg

SEQ ID NO: 342000 - DNA, 50 bp, Homo sapiens
gaggggagtggcaggtgatcctcacaggccagaagcctgtcttagatgtt

SEQ ID NO: 342001 - DNA, 100 bp, Homo sapiens
tggcccaggaggacgactgggaccgggacctgctgctggacccggcctgggagaagcagcagcgcaagaaatcttcccaaggctgcagacaccgacggat

SEQ ID NO: 342002 - DNA, 80 bp, Homo sapiens
tcattgaattatggcatagatcttgggaaaattgcggtggatattccatctattataaccaagaaactattaaaagcagc

SEQ ID NO: 342003 - DNA, 100 bp, Homo sapiens
aaacttctgatttcttttgcaaccctctgcattccatctctatgagccaccatacaagttggatggcttgaggactggtactaaaaggaaacgtgactgg

SEQ ID NO: 342004 - DNA, 100 bp, Homo sapiens
atggataataatggaatatcttggtggaggctccgcactagatctagaaacccagcgtttgctggcagaaccagttcctggcatcaaagccgaaccagat

SEQ ID NO: 342005 - DNA, 50 bp, Homo sapiens
tgattgcccccgggtctcagcagagcaaatcatggaggaagataaaaaac

SEQ ID NO: 342006 - DNA, 90 bp, Homo sapiens
aagagcctactgatgtgtttcctctacatcttaaagagcatgtctgatggtatgagaaagtgccagtcatcttggttgggaacaaagtgg

SEQ ID NO: 342007 - DNA, 100 bp, Homo sapiens
gaaaaagagccctggaatatgaagatatgtgagatggtggatgaatccccagaaaatgcttggacagaagagatgagtactatttccactaaggcctaga

SEQ ID NO: 342008 - DNA, 100 bp, Homo sapiens
tatttacccagaagtagtccatatgcccccaggtttccctagatgacaaataaacattccttttcctgcgtgaagatagtctgtggaaaccttggccatg

SEQ ID NO: 342009 - DNA, 100 bp, Homo sapiens
tgatcgccgggtgtcgatccttttccctccagtcaggcttttattgagatggagacaagagaagatgcaatggcaatggttgaccattgtttgaaaaaag

SEQ ID NO: 342010 - DNA, 75 bp, Homo sapiens
cttcatccgaaccctcagcctcaagccgctgctcttcgggtcagcagcctctggacccgtgaaagagctggtcgg

SEQ ID NO: 342011 - DNA, 91 bp, Homo sapiens
tcgaagaacagctgtggaaagaagttgcaaaacactgggcaagtatatcgcgtcaacacagcgacctgacgggacctggcgcaagcagcgg

SEQ ID NO: 342012 - DNA, 101 bp, Homo sapiens
cttcgcctatgcctgccaggctgctggaaactggaggcgaccagtgcccagaatatcgagttcctacaggtgattgccaagagggaggaggcaatccacca

SEQ ID NO: 342013 - DNA, 100 bp, Homo sapiens
agacaatggtagctgttatcctccatctactcaaagagcccagcaccgtgggggaaaagaccccctctccagccctgggggccctggatctcggaggagc

SEQ ID NO: 342014 - DNA, 100 bp, Homo sapiens
cacaccaaggacaccaggagcccccaaggagttggaagagggtgggctctaggtgaacatggagaatgggccaaatacagcaattttgatgttgctaccc

SEQ ID NO: 342015 - DNA, 101 bp, Homo sapiens
gtgacctttttggagggaaagaaagagccctggactgtgaagagtgaggagaccatagctgcacagccaggggctgggaaccgacgaggactctctcattg

SEQ ID NO: 342016 - DNA, 101 bp, Homo sapiens
ccggcctggagcgcgccgccaaggcggcgcgcgagctggagcactcgcagttcacccagggcatgatcttacctacaatgaatggagagtcagtagaccca

SEQ ID NO: 342017 - DNA, 98 bp, Homo sapiens
ggcgcccagtggcgtccacctgctcgtccgcagaggttatcctgaatacatgtctaacaattttccttgcaacgttagctgttgtttttcactgtttc

SEQ ID NO: 342018 - DNA, 87 bp, Homo sapiens
ccagtcggtgttgagcacggcgagcagtctcaggcctttagtgatgatggcagacatctggtccctgggcataacagctattgaact

SEQ ID NO: 342019 - DNA, 83 bp, Homo sapiens
tcctggagatgctgagcagagccaaggatgagtatgagagggaaactggagcacccatcctaactgatgatgttagcctgcag

SEQ ID NO: 342020 - DNA, 100 bp, Homo sapiens
ttctgtagcttttggtgcaccaattggaggagttctttttagcctggaagagaaggccggggtcagaaagaaaaaagagggtcccggggccgaggcagga

SEQ ID NO: 342021 - DNA, 76 bp, Homo sapiens
ccattgacgccatgtcgggttattcgagtgaccgagaccgcggccgggaccgaggctggacccacaaaccgtggag

SEQ ID NO: 342022 - DNA, 83 bp, Homo sapiens
ctggggccaagggacaatggtcaccgtctcttcagacacgtcgtctgcctcagaagatgagggctctttacggcgacccgggc

SEQ ID NO: 342023 - DNA, 98 bp, Homo sapiens
taccatgggcaccctctgggcatcgggccctgtctgcaatacacctgcaggaagagctcgatcaggttcagttttccagctgcggccggcctgccagc

SEQ ID NO: 342024 - DNA, 82 bp, Homo sapiens
gccgccgccgcctctccttgctgcagccatggacgagcagctgatgcagctgtacagtgcgcgccagcggcggcggctgaac

SEQ ID NO: 342025 - DNA, 83 bp, Homo sapiens
cggccgaagagcggcggcggcagcggcggtgtccctggccagtgtccttccacctgtccacaagcatggggaacatcttcgcc

SEQ ID NO: 342026 - DNA, 100 bp, Homo sapiens
atgaactcaggctcaagaaatgcccagtctttgggatttaagatcaacttcctttgtaagttttctggatatgccgcagaaggatccgtgccagaagcaa

SEQ ID NO: 342027 - DNA, 83 bp, Homo sapiens
gcgcggggaaccaaggagacgctcctggcactgcaggagccttcacgtaaatgggtccagtcatgcctcccagtaagaagcca

SEQ ID NO: 342028 - DNA, 82 bp, Homo sapiens
ggagaactcaaggtcttcatagaccagaaccttagtcccgggaaaggaccaagaatcgccttcagccctgtctggtgcatcc

SEQ ID NO: 342029 - DNA, 100 bp, Homo sapiens
catcgagtggcagagagatgggcagcctgtctcttctcccagtcttactactttgaccgcgatgatgtggctttgaagaactttgccaaatactttcttc

SEQ ID NO: 342030 - DNA, 83 bp, Homo sapiens
actttccaaaggctcctgagtttccaagttacaaagagtgctgttcacagtgcaaggccctgggaggagcggggacactgagg

SEQ ID NO: 342031 - DNA, 51 bp, Homo sapiens
atgaattgagtagacacttaacaagaaatgagccgtcagactgctacagca

SEQ ID NO: 342032 - DNA, 83 bp, Homo sapiens
ggagacggtacagctgaggaacccgccgcgccgaccaaactgcagctggaatacccagtacagttctgcttactacacttcaa

SEQ ID NO: 342033 - DNA, 50 bp, Homo sapiens
atcagcgagatctttgcaagtatcgcagcaataatgacgatgaggacctg

SEQ ID NO: 342034 - DNA, 83 bp, Homo sapiens
cggatgagtacgataccgaagcgggctgtgtgccccttctccacccagaggctattgagggcacctacattgacaagaaatgc

SEQ ID NO: 342035 - DNA, 100 bp, Homo sapiens
ggaggaggagtaggtgcgggtgaagatggcggcagccgaggccgcgaactgcatcatggagtgccggtggtggtgtgcacattgagccccggtatagaca

SEQ ID NO: 342036 - DNA, 97 bp, Homo sapiens
tttcctcgcttgcattcagctcctctgtgtttgccgcctgggctttaacgtgggcagcacgtcagggtcataaaaatatagttttgaagttgcttga

SEQ ID NO: 342037 - DNA, 100 bp, Homo sapiens
cttacaccactcccaagaagaataagcacaagagaaagaaggttaagctggctgtcctgaaatattataaggtgattaggaagaagcttgttcgtaaaac

SEQ ID NO: 342038 - DNA, 83 bp, Homo sapiens
ggacgaagatggggagaaggaagcgagactcatacgcaacctcaatggtttggtgcacctcgatttggaggaagtagggcagg

SEQ ID NO: 342039 - DNA, 97 bp, Homo sapiens
ttcatctttaaggacgaagagaggtgtgtgtgtaatattgactgttctcaaaccaacttcaatcccctctgcgcttctgatgggaaatcttatgata

SEQ ID NO: 342040 - DNA, 75 bp, Homo sapiens
acaggatttctccgcctcagcccaacggggagttggaatcgaagcctcttaaaatggcagatgacttggacttcg

SEQ ID NO: 342041 - DNA, 101 bp, Homo sapiens
aaggtggtggctgtccacctccaccagacggtccagactctgatgccagtatggactggagatgatgggagccagttggatagccccatggaaatccccaa

SEQ ID NO: 342042 - DNA, 82 bp, Homo sapiens
ctgaccttggctggcgcaaaggctgccctggatgggactcctggaattcgaatttagagtttaatttctcagagcattctct

SEQ ID NO: 342043 - DNA, 100 bp, Homo sapiens
cccccgctcccggggtccccggccggccaagcagatcctcagacagattctaagcctcctgagggattgttaggattccacacagactggctgacattaa

SEQ ID NO: 342044 - DNA, 82 bp, Homo sapiens
agcgcccccatcccggaggtctccgccggctcccggcaaccccaaggtccaggtggaggccatcgaagggggagccctgcag

SEQ ID NO: 342045 - DNA, 89 bp, Homo sapiens
gatggccgtaaccccgaaggaaatgaaggctttgtgatacctgatgaagggggcccacaggaggagcaagaagagtattaacagcctgg

SEQ ID NO: 342046 - DNA, 83 bp, Homo sapiens
gggtgtgagcagggctgagatgggcaccgcggatctggggccgtcctcagcaattctgtggtgttcttggtcacacatttatg

SEQ ID NO: 342047 - DNA, 89 bp, Homo sapiens
ctgcgccgctacctagcctcggaccccgactgccgctggtgcccggccccggactgcggggtaagagtaaagtctccaccagaagctgg

SEQ ID NO: 342048 - DNA, 101 bp, Homo sapiens
aaaccgggaaaggagaggatcccggagccgtggatcaatcttcctgtcctacaactgacaaaggatcccctaaagacccctggaaggctggaccatggcac

SEQ ID NO: 342049 - DNA, 82 bp, Homo sapiens
ctggaaaacaacgccttaccaagtggctgctgaaattagatcggccatggatatggaacattccttatgtcaaagcaccgga

SEQ ID NO: 342050 - DNA, 99 bp, Homo sapiens
gcggccgtcgatctcaagccgactctcaccatcatcaagacggaaaaagtcgatctggagcttttcccctccccggggaaaaagttggattgttaaaag

SEQ ID NO: 342051 - DNA, 75 bp, Homo sapiens
cttgtcctcccctttcatccctatgtggaaaacgagccccagtttgagggacagcgggatatccaccatgctgct

SEQ ID NO: 342052 - DNA, 98 bp, Homo sapiens
aagcaaaacaaaaaagaggcgaagatcgagtaggaactgcaggggaaatggaaaatgtttctttctcagcaaaatagaggagaagcttacccctcttc

SEQ ID NO: 342053 - DNA, 75 bp, Homo sapiens
agccccagattcaacccgtgtacgtgcctgtgcctaaatttgcagaaaaaacttcagcatgtgccaggaacacaa

SEQ ID NO: 342054 - DNA, 89 bp, Homo sapiens
ctcggctgcgccgcgtgtcctcggagcgcggtccctgtattggtctcctgctcctagaggtgaaaggtgtagcagtcactcggcctaca

SEQ ID NO: 342055 - DNA, 100 bp, Homo sapiens
caaagaggagccggccgcgcgggccgggaggggacggccgccggagccgcgaggccaacatgatgccttcttctgtagagtgggcgctttgcagaatacg

SEQ ID NO: 342056 - DNA, 75 bp, Homo sapiens
gccactacagttcatcaacatcaactacgtccctctgaaggagggcaaagataaaatgttcctgatagaaaaatt

SEQ ID NO: 342057 - DNA, 90 bp, Homo sapiens
gacctcagtgccaggagggtccctggtgggtgctgcatgaggcaggcgtcactgcagaaggagcgtgaggatcatccccggagaggacgg

SEQ ID NO: 342058 - DNA, 100 bp, Homo sapiens
gtggttacagggtcatccagagtttgctgttgatccccgatttctagcgttttcggctttgtgagaaaccttaccatcaaacacgatggccagcaacgtt

SEQ ID NO: 342059 - DNA, 75 bp, Homo sapiens
cgggcagcctcaacgagaactcggagggcaccggaggtatacaaaactaggatatgctggaaatacagaaccaca

SEQ ID NO: 342060 - DNA, 100 bp, Homo sapiens
atattcaaactctaaaccatctgaattggctcaatgatgagtgtggcaaaggagcagagaactttgacaagttcttcacacgaggacagcccgtcttaac

SEQ ID NO: 342061 - DNA, 80 bp, Homo sapiens
tgaaattcaaacaaggaggtactgcccttgtttgggtaccccgaatgggtgtgaacggcatgtctgtggatgagaagcct

SEQ ID NO: 342062 - DNA, 75 bp, Homo sapiens
gaacagacagaaggatgtaaaggatggaaaatacagccaggagcccgtcctgtttgggacgaccatcatggaaaa

SEQ ID NO: 342063 - DNA, 75 bp, Homo sapiens
caagaagggggaccttggcctttctaaaaaggttgtctgcattcaaaagagcattctattaaagctaccttaatt

SEQ ID NO: 342064 - DNA, 75 bp, Homo sapiens
caaaaaactgttagagctgtcggacctcgcagtggcaatgagaaatctctccagcgaacactgaatgagttaaaa

SEQ ID NO: 342065 - DNA, 90 bp, Homo sapiens
acccatccttattgctacagatgtagcctcccgtgggctaggaaaaagtctcacggctggaaacagagttagatgaggagaagaacaccg

SEQ ID NO: 342066 - DNA, 100 bp, Homo sapiens
acacatgatcttcctgtccctggagggtggagtccatgtccctggctgacagagggaaccctggaaatattacttcgcgcttgatggagaaggagaaggc

SEQ ID NO: 342067 - DNA, 80 bp, Homo sapiens
attttctcttcttctgaaaaagagatcttggacttccaatagtagtcagacattatcatcctgtcatactatggagccat

SEQ ID NO: 342068 - DNA, 51 bp, Homo sapiens
ccaagggactctgcaaccacatgccagccgagaccgacccgcccgcccgcg

SEQ ID NO: 342069 - DNA, 98 bp, Homo sapiens
gccttcaccagctatggcattagcccacaggccaaggtgcagctaaatcaagtccagcagctaaaccaggatccacaccttctcgaccctcatcagcc

SEQ ID NO: 342070 - DNA, 83 bp, Homo sapiens
tgaagatgacaatttattagatggtgacactgcagttgaatgacagcccatatcaaggcggtgtattctttttgacaattcat

SEQ ID NO: 342071 - DNA, 75 bp, Homo sapiens
gaagagggaaggacggttagtcagatgtggaagatgtcaagtttgtgatcaactatgactatccaaacagctcag

SEQ ID NO: 342072 - DNA, 96 bp, Homo sapiens
gaggagccgcgagcgctgaggatcttcaacttgctgctgagcttgggaagacattactggatcggaacacagagttggaggactctgttcagcaga

SEQ ID NO: 342073 - DNA, 82 bp, Homo sapiens
tgagagccagccctgacgtgaactcattttatctgccacgacccagaagaggcttcgtgacggagttatcagagacattgag

SEQ ID NO: 342074 - DNA, 100 bp, Homo sapiens
cgaagctggccaaagcctgcccagacggctcacctgtgcgggatggaacaaaagggtttctatcttactaaaggatatttcagaaaatctatattcactg

SEQ ID NO: 342075 - DNA, 90 bp, Homo sapiens
cagattcgcagtggtcgcttcttctccttgactcagcctgcctgcacccaggtgaaataaacagccatgttgctcacacaaagcctgttt

SEQ ID NO: 342076 - DNA, 98 bp, Homo sapiens
cgggcgagcgcagccaacatgtcggataccaaggtaaaagttgccgtccgggtccggcccatgaaccgacgagatctgaattccagagaacaggagac

SEQ ID NO: 342077 - DNA, 100 bp, Homo sapiens
cccctgctcagggtcttcatccagaaacgagccgtgctatcaagactaatcaggaccttctcccagaaactccatggacgcacattttctacaatgattt

SEQ ID NO: 342078 - DNA, 75 bp, Homo sapiens
catgtttccgcggagcggacccagcaatgacgatgtcaagccctccaacatcctagtcaactcccgtggggagat

SEQ ID NO: 342079 - DNA, 100 bp, Homo sapiens
gcatttcatactccctctggaataccttgggcattgctgaatatgaaaaggtctcacgctgttgcatgtgtcaatcagtttatcatcagtaggactcaag

SEQ ID NO: 342080 - DNA, 82 bp, Homo sapiens
agcgggagctggacggcgagcgcgagcggcgcgagaaaataaggagtcaggccagggcgggatgacactcattgattctaaa

SEQ ID NO: 342081 - DNA, 100 bp, Homo sapiens
cttttcattttacttcatcctccaaggagttcaatcacttggcgtgacttcactacttttaagcaaaagatatgactatgaatatgatgaaaatggtgac

SEQ ID NO: 342082 - DNA, 82 bp, Homo sapiens
caaggagctaaagcagcgtgcgttcagccctggggtgtttgagaagtcccccctgcgggtgaagaacttcgggatctggctg

SEQ ID NO: 342083 - DNA, 50 bp, Homo sapiens
gccagaagcagtatttgtcctggatttacgcgcacgttggaaccgaagag

SEQ ID NO: 342084 - DNA, 82 bp, Homo sapiens
gattctgcaaccaagcacctgaaacagcaggtatctagaagagcagaagacagagaatggaaaagataaggaacagaaacaa

SEQ ID NO: 342085 - DNA, 101 bp, Homo sapiens
tgtccatagtatcaatcgtaagctcactatattccattagaaagaataactgaagtgaagtgatggactccgatttggagagtagtaagacgtgaaaggaa

SEQ ID NO: 342086 - DNA, 100 bp, Homo sapiens
cgtcgcgaggattaagtttaagacttcgcgagaacagaatttcttttggcacctcctctccgcgcgttcttgggtcactgtggagcaacatataggcaac

SEQ ID NO: 342087 - DNA, 74 bp, Homo sapiens
ggcctcatctgttccagggaggtgggattgagcagtggttgcaggaatccagcaggctcacgcggaacagttgg

SEQ ID NO: 342088 - DNA, 50 bp, Homo sapiens
cggaagatgatcagccaggcacagaaggacaagattagatgcaccccggt

SEQ ID NO: 342089 - DNA, 96 bp, Homo sapiens
cgcctacggtggccgaagtgggacgcgccgagccggaggctgcaggatgatcacagctgggctggacccagtggggagaatccagatgaggacccg

SEQ ID NO: 342090 - DNA, 100 bp, Homo sapiens
gcaccttctacctgatagatgtgaagcccaagccgattgagataccactcagtggggagcatcctatggctctactttgagacgggtacctgggtgtatc

SEQ ID NO: 342091 - DNA, 75 bp, Homo sapiens
ttaagctggtggagaaactcgggtggaactctggagagaaccaagcaaatccttaggcatcagcattgttggtgg

SEQ ID NO: 342092 - DNA, 75 bp, Homo sapiens
ctcaattgaagcaagagatttctgaatggctgaggactccctctgcttctcccttacaccaggaatgaacctttc

SEQ ID NO: 342093 - DNA, 97 bp, Homo sapiens
cacatccccacatcaatgcactgccaatggcacattgcaagcaacccgtgccttgatggtggttggcatcctcctgggagtgatagcaatctttgtg

SEQ ID NO: 342094 - DNA, 90 bp, Homo sapiens
attatatcgcatcctatggctcaaagaaagatgattatatatcagacaccccgaagaactttctctcttaaagaaacccagagatccaac

SEQ ID NO: 342095 - DNA, 90 bp, Homo sapiens
tgtcgggttattcgagtgaccgagaccgcggccgggaccgagggtcaccatggctgttattggctcccttgctgtccccagctgttcccc

SEQ ID NO: 342096 - DNA, 75 bp, Homo sapiens
tgtcagaaaatggacatccctttccttggggaaatgcccgcagagctgcaagctttcttcctggtggcagatgac

SEQ ID NO: 342097 - DNA, 96 bp, Homo sapiens
aacatggaaggacctggactggagtcacgccagtacaaggaggatactggcaaagatgagggctgtgggacagatgatgtctaccatgttctaccc

SEQ ID NO: 342098 - DNA, 90 bp, Homo sapiens
attgttcctaaaccagaagaggaggttgcccagaagaaaaagtttaagaaaacccctcctaagatcccttataaggccatcgcacttgcc

SEQ ID NO: 342099 - DNA, 98 bp, Homo sapiens
cacagctccccattactctataccaggcactggcatggattaatttatctaatcacaacatcccagtaaggtctcctctgagcctccggcctccataa

SEQ ID NO: 342100 - DNA, 114 bp, Homo sapiens
cgcgagcacagagcctcgcctttgccgatccgccgcccgtccacacccgccgccaggtgtggacactgccagcggctgcagccgacttggaatgacctgggagacaaatacaac

SEQ ID NO: 342101 - DNA, 100 bp, Homo sapiens
ctttaccagaaaaaacatggtattaaactctataaacctctcattctccctgtgactcaggcccttccagtcacccgttgccttggcaatgtcatcacca

SEQ ID NO: 342102 - DNA, 83 bp, Homo sapiens
tgcacacctggatccaggataacggaggctggtactgctgcgcacggccactgccaacggcttccagatggtcaccagcgggg

SEQ ID NO: 342103 - DNA, 100 bp, Homo sapiens
aaatggaattatcctttattacacagtttatgtctgtgtgctggaattgatgttcgtctgtgtgatgttggtgaggccatccaagaagttatggagtcct

SEQ ID NO: 342104 - DNA, 90 bp, Homo sapiens
tattggaagaatgaatctggcacatggattcagtatggagaagaggaatccagaaccctggctgaaattgcaaaagcagagctggacggc

SEQ ID NO: 342105 - DNA, 75 bp, Homo sapiens
cggtggcgccggcggcgggacaggccaggttgctgtgctggctcatcctccttagaaagatatgcaacctccaat

SEQ ID NO: 342106 - DNA, 75 bp, Homo sapiens
tcttatttaatccacatcatagtctagagcatgtttggaaaggattcaagaattagaggacttgcttgctaaaga

SEQ ID NO: 342107 - DNA, 76 bp, Homo sapiens
cgaggaccatgctgggccggagcctccgagaaagctttggatgtagtcgatggaaaatatgtggttcgagactccc

SEQ ID NO: 342108 - DNA, 74 bp, Homo sapiens
gggtggtcaccgagaagtccccgaccgactggtgtcagttgtacccgaggcgttctcagcagcagcaagtacct

SEQ ID NO: 342109 - DNA, 98 bp, Homo sapiens
gcttccagtggaggcattttggggcagaatacagagatatggaatcagggtatggctctctcggcatgatgaccagcgtgctggtttgtccagatggc

SEQ ID NO: 342110 - DNA, 75 bp, Homo sapiens
ctcatccacagagccacatctgttaggttttgggatttgagattgacgcggtgaactctgtccagttttcaaacc

SEQ ID NO: 342111 - DNA, 83 bp, Homo sapiens
ccaggactgcctgagacaagccacaagctgatgacagtcatgtccctttccagggacctcaaggacgactttcacagtgacac

SEQ ID NO: 342112 - DNA, 95 bp, Homo sapiens
ctccaggtgctgacagcgcgagagagcgcggccctcaggagcaaggcggtggtggcggtggcggcccgcgatctgagccgtgcgaaggagtttgc

SEQ ID NO: 342113 - DNA, 82 bp, Homo sapiens
cacgagagcccggcccgcctgtgtggacggagaactacgatgacccgcacaaaacccctgcctccccagttgtccacatcag

SEQ ID NO: 342114 - DNA, 82 bp, Homo sapiens
cgacgggcatgccaagaagatgagaccgggggaggcgacgctaagttgctgatcgtggcggaggaacgcagtggatgccttt

SEQ ID NO: 342115 - DNA, 96 bp, Homo sapiens
ttgcagaaacgtcatgaagattttgaagaagtggcacaggttccttcaatggtgccttagctgctgttcctgtccaggacctgggctccactgtca

SEQ ID NO: 342116 - DNA, 90 bp, Homo sapiens
aattcaaaaacactatcccagggagtgcaagcttagagcgtctggccaagaatcagaggaagtggagaaccatggagtctggcagtaccg

SEQ ID NO: 342117 - DNA, 75 bp, Homo sapiens
aaacaatggcatttacagaaagagtcaacagcagtggcaacaggtagtgggcagcagtcagtgacaggtgtaacc

SEQ ID NO: 342118 - DNA, 101 bp, Homo sapiens
tgaaagcctttgtgattctcctcatcagaatctctcaagaggaattgacataggggatagcttaactattccagatgaattcacggaagacgaaaaaaaat

SEQ ID NO: 342119 - DNA, 90 bp, Homo sapiens
gagaatcctccagcatggattcctcctcatgagatgtgttcagagcaacattgttttgttgacacaagcatttagaagaaagtttgtgat

SEQ ID NO: 342120 - DNA, 95 bp, Homo sapiens
ctgacatggaggatgatttcatgtgcgatgatgaggaggactacgacctgtaaaaggcaatcgcaaatgtgagttgaactgccaggcaatgggct

SEQ ID NO: 342121 - DNA, 100 bp, Homo sapiens
cacgaggaattcttcttccattaataaatcaactcagtgatcctgattatattaatcagtatgtcatatggatgtaagaagccattaatggttattcatc

SEQ ID NO: 342122 - DNA, 75 bp, Homo sapiens
aacaagaatatttgaaactttgggcacaccaactgaggaacagtggccggatgatgatgctgaagctatccttgc

SEQ ID NO: 342123 - DNA, 74 bp, Homo sapiens
tgcctacccgccggcccgcgggtctacttcctcaaaggtacttggaaaaatggacaaggattgtgaaatgaaac

SEQ ID NO: 342124 - DNA, 74 bp, Homo sapiens
ctgtggctgtctcggaacccgtggtcctccgcttcatgtggtttggctttgaatgacagcaagaactctgtctt

SEQ ID NO: 342125 - DNA, 99 bp, Homo sapiens
cagatcgtgtaatgacggtatcattccataaatatggggaatactttcctggcacaggagacttgaggggacatctctacaccgttcccatccgggaac

SEQ ID NO: 342126 - DNA, 105 bp, Homo sapiens
agaaatgctctgcccttggagaactgctaacctagggctactgttgattttgactatcttcttagtggccgaacaagttgaaatcatcgcagaaggataaagttc

SEQ ID NO: 342127 - DNA, 106 bp, Homo sapiens
catgtctttaacttcagaatggtttgcaaagtatttgcaatcatcagcagctgcatgttggaaggacagaataacgggctcccagattcacaagccccaccaagag

SEQ ID NO: 342128 - DNA, 101 bp, Homo sapiens
ggcccaggttcttcaaaagatttttcggctttgtgagaaaccttaccatcaaacacgatggccagcaacgttaccaacaagacagatcctcgctccatgaa

SEQ ID NO: 342129 - DNA, 81 bp, Homo sapiens
ttaaagctgagctgcgaggaaaatggcggcgggagagactctgacctgtttttgttggacacccgtgtagtatgggcctca

SEQ ID NO: 342130 - DNA, 75 bp, Homo sapiens
gaaagatcctgtcaaaatagtccgatgccacgaacatacagaaatccttaccgcatttgcaagtaaaatcactgg

SEQ ID NO: 342131 - DNA, 87 bp, Homo sapiens
acgggctcccttcgccaaactcttcattttctcttctgctccatctggacacaagcatctgacggtagaagagttatttggaacctc

SEQ ID NO: 342132 - DNA, 82 bp, Homo sapiens
aatttacagaagcagtacgagaactggcagccaaggtccacaggtcctggctaccctgggaagagacaagaagtaaatgaag

SEQ ID NO: 342133 - DNA, 112 bp, Homo sapiens
ctgggagacgctgcctcggcccggacgcgcccgcgcccccgcggctggagggtgacaatgcagatcttcgtgaagactctgactggtaagaccatcaccctcgaggttgagc

SEQ ID NO: 342134 - DNA, 95 bp, Homo sapiens
ggacagaaaagacagtgttctgctttcatggagttcacagaagagtcgaggagagagaagtggagatcctgatgtttctcagtgccattgtgatg

SEQ ID NO: 342135 - DNA, 100 bp, Homo sapiens
atcgacgtcgtgatccagaagtccagagctgaggactgcctgtttgcagtgtgcaggagaagagaattgggtggacagcaggaccatctacgtgggacac

SEQ ID NO: 342136 - DNA, 100 bp, Homo sapiens
ggaaagattgcaaggtgaataaagaagtggagcgtgtcctgaaggagttccaccaggccgggaagcccatcggagagaactcgatgccaccgcaacggta

SEQ ID NO: 342137 - DNA, 75 bp, Homo sapiens
acatgtacgggaaacacatcgcatgtcctggaattggaagccaaaatggaccagctgcgaacaatggtggaagct

SEQ ID NO: 342138 - DNA, 100 bp, Homo sapiens
ggctggtggagttgttagtgtcctatggcaacaccttctttgtggttctcattgtcatccttgtgctgttggtcatcgcgtgggcttcctctaatattac

SEQ ID NO: 342139 - DNA, 73 bp, Homo sapiens
aaacattcgtctcggaaaccccgcctcttacagtcacgagttccaagatgagatgggattctccaacatggaa

SEQ ID NO: 342140 - DNA, 82 bp, Homo sapiens
aaaaccaaacaccctcagctccacattgagagcaaaatctacaagatgatgcagggaggagaagcagcagtccgcggcgtgc

SEQ ID NO: 342141 - DNA, 83 bp, Homo sapiens
ctacacaatgcgttgcctggctccacgccctgctgggtcctacctgtcagagccccaagacaccattcgcttttcacccaaga

SEQ ID NO: 342142 - DNA, 90 bp, Homo sapiens
ctccggaccatggccgacgacgacgtgctgttcgaggatgtgtacgagctgtgcgaggtgatcggaaattttatccaagtatgaagatca

SEQ ID NO: 342143 - DNA, 75 bp, Homo sapiens
caaatcctgagtccaaacactcaagatggatcccatggtccattattgcctttaccaagtcgttacagaatgggc

SEQ ID NO: 342144 - DNA, 75 bp, Homo sapiens
tttgatatctggggccaagggacaatggtcaccgtctcttcaggaactggaagaggaggcaacagtatttggggc

SEQ ID NO: 342145 - DNA, 99 bp, Homo sapiens
ccggatttggaggttcgtacacgcctgaaaattctcataccgctcccctcactgctatgtaaacaggaacatcgataagtagtgtaaaaacttgcacaa

SEQ ID NO: 342146 - DNA, 129 bp, Homo sapiens
gtcgtcatggagacaggtgctctcggttgcacaataaaccgacgtttagccaggtgttctttgcagaagatgtgggttcaaacaaaggtgcaatcattggactcatggtgggcggtgttgtcatagcga

SEQ ID NO: 342147 - DNA, 99 bp, Homo sapiens
cgggagattcagccgtgaagcaagtgcagatagatggccttaaggacagaataacgggctcccagattcacaagccccaccaagaggatcaccccagga

SEQ ID NO: 342148 - DNA, 88 bp, Homo sapiens
tgatatttattcaccaaacaagatgttcagcccacaagagcttactggtgaaggaatgggacaagacccatctttatgcaaagccagc

SEQ ID NO: 342149 - DNA, 100 bp, Homo sapiens
gaggagaagttcacagtcctgtttgagtctcagttcagtgttggcagcaatgagcttgtgttccaggtgaagagcccccctccatgcgcctgaaggcccg

SEQ ID NO: 342150 - DNA, 87 bp, Homo sapiens
cccatatgggggttctggagagcggggtgtgggggagtgcatccgccccaacccttttccccctcgtctcctgtgagaattccccgt

SEQ ID NO: 342151 - DNA, 82 bp, Homo sapiens
gcgtccagggcagctagggcctgggccgcggttcggccgcgccggccgaacccagtgacttgattgtaaaaatttacagagc

SEQ ID NO: 342152 - DNA, 100 bp, Homo sapiens
tttggtgtctgccatatctttgcatccttcaatgacacttttgtccatgtcactgatctttctggcaaggctttggagggcatgttccgcaagctcaacc

SEQ ID NO: 342153 - DNA, 119 bp, Homo sapiens
ctcaatgatggcgagtgctttgtgatcgaaaccctgaccggatcccataaacactgtcgatgatcaagttccagatgatcctcagtgagggataccatcctttcaatattcaagagtca

SEQ ID NO: 342154 - DNA, 96 bp, Homo sapiens
gttaaatcttgcacttcttctgagtgagggttacacatcattttggaatgactgtatatcatctggattacgtggctgtatgttaattgaattagc

SEQ ID NO: 342155 - DNA, 82 bp, Homo sapiens
tcggctgcgggaaatcgggctgaagcgactgagtccgcgatggaggtctgcagggaactggccaggcaagggggcaggcccg

SEQ ID NO: 342156 - DNA, 100 bp, Homo sapiens
caggtaggctgcgttgaggatctttgctcttccatccgcctttgatcgtcttcctcttcagccatccagcagccattgtggatgagaagatcttctgttg

SEQ ID NO: 342157 - DNA, 100 bp, Homo sapiens
cgaggagctcatcgggcagattagcgacatccgagtgcagaacctgcaaggagtacatcgatgcccaccctgagaccatcgtcctggacccgctccctgc

SEQ ID NO: 342158 - DNA, 96 bp, Homo sapiens
gttccacatcctggcgggcctcacgcacctggcggtcatcagcaacgtagatgatgagctggagatcaaggcctactatgcaggccacgtgctggg

SEQ ID NO: 342159 - DNA, 90 bp, Homo sapiens
atcgtgaccgagaccgtgaccgagagcgtgaccgagagcgcgaatatcgtcatcgttagaaggatgataatgaagataattcaaatgatg

SEQ ID NO: 342160 - DNA, 100 bp, Homo sapiens
tgccttcctccgctgaaacagggggaacgaattatctggcccctggggggctttcaggttcgatacaagaggctgttttcctagcgtggcttgctgcctt

SEQ ID NO: 342161 - DNA, 100 bp, Homo sapiens
caaatccaggtcgcgatcgaagagtccccccaagtctcctgaagaggaaggagcggtgtcctcttaagaaaatgaattggcagagggggtcgatttggga

SEQ ID NO: 342162 - DNA, 80 bp, Homo sapiens
caaccttctgcatcacagtatcctacaatggtcaaaatgcagatcttcgtgaaaacccttaccggcaagaccatcaccct

SEQ ID NO: 342163 - DNA, 100 bp, Homo sapiens
gtcctgcgtgttccgaagttcaggggccccctgatcccgctgagccccctccaggagcgaaagggttaagaatgatcagcagcgtgcagggtcaaagaca

SEQ ID NO: 342164 - DNA, 75 bp, Homo sapiens
attatttactcgatgatggaactctggtggtttcaggaaggtcacataatgagtatgactcctgaacagcttcag

SEQ ID NO: 342165 - DNA, 97 bp, Homo sapiens
gaagattttaggcggtatcaaatggaaagtttttccaaatattcatctgtacagttgcgacaaccaccagttaagcgtttgagacttcgtggtgatt

SEQ ID NO: 342166 - DNA, 75 bp, Homo sapiens
atttccaaggaagaatttcctctgaagcaccggtggtctttgggaagaagcttcctgcctttgccaccatcccca

SEQ ID NO: 342167 - DNA, 125 bp, Homo sapiens
cgtgagggaagcccaggagaccaggcagctgcgctcttgacagccaggtaccagatgaataatacggcagctagtccaatgtctactgcaacttcaagtagtggaaggagtacagggaagtctat

SEQ ID NO: 342168 - DNA, 74 bp, Homo sapiens
ggcggtgtctggcttggtgcggagaccccttcgggaggaaagtgactattttaccccacagggagaattccgtg

SEQ ID NO: 342169 - DNA, 50 bp, Homo sapiens
ctcaactccccagaagtctgtcactttgagtcttgctctgttgcccaggc

SEQ ID NO: 342170 - DNA, 98 bp, Homo sapiens
caccataggagacatggacgaagccttcaaatccatcaagctcatcaaaagcggagcgggcactggacacaatgaactttgagatgctcaaaggccag

SEQ ID NO: 342171 - DNA, 74 bp, Homo sapiens
ggagcgagctccccgacgaggagcgcggcgagatctacgtgccaggtgagaagccctaccactgcaactgggac

SEQ ID NO: 342172 - DNA, 100 bp, Homo sapiens
ccgatctgcccgttgtgtttgtgaaacagagaaagataggcggccatggtccaaccttgaaggtgcaacagctgcagcccggaaagaggtgataaggaac

SEQ ID NO: 342173 - DNA, 83 bp, Homo sapiens
aaaggaagaaatgcaatttgctgttggctggagtggttccttaaatgtcgaagaagggatcaagcgtgctttccttatcgagg

SEQ ID NO: 342174 - DNA, 100 bp, Homo sapiens
gtccctcaccgcggcatcaagcaggtccggacccactggctgctggagcttgtcaccaccagatgaggacggggacttggttgccttttccagtgacgag

SEQ ID NO: 342175 - DNA, 100 bp, Homo sapiens
aaaacgactcagaggaacaaacagatagccatgggaagaaagaaattcaacatggatcccaaaaaggtatctcagatgaagacatcatcaacattactct

SEQ ID NO: 342176 - DNA, 96 bp, Homo sapiens
gagaaggaggagcgggccgtggaggcttcgccgcctagtgttttccaagcagtgaagcacttgccgtgttgaactgaatgcactactggagaatgt

SEQ ID NO: 342177 - DNA, 137 bp, Homo sapiens
agaagaccattcagatgggatctttccggatcaatccagatggcagccagtcagtggtggagaattatatccagatcgagagacagaagattctgaaagggttcaatgaaatgagagtcatcttggacaatgaggag

SEQ ID NO: 342178 - DNA, 74 bp, Homo sapiens
ctgagcgcgtccaggcctgacagctctgcggctcgggccctgagtccaactgttacaaccactctaaaaaacct

SEQ ID NO: 342179 - DNA, 80 bp, Homo sapiens
atgaagaggatgatgtttttggtgaaggagtacttctttgattccagagtattaacagatggagaactggctcccaatga

SEQ ID NO: 342180 - DNA, 74 bp, Homo sapiens
tgagtcaggaattcagtttatggatgagccagaaatggcagtgtttctgcagatccccttgaaattagacacgc

SEQ ID NO: 342181 - DNA, 98 bp, Homo sapiens
ctgcccttcactcatggaagtcttcaggcaagtttttcacttacaagggactgcgtatcttctaccaagggaaagagaagaaggcgccgcccttgctg

SEQ ID NO: 342182 - DNA, 51 bp, Homo sapiens
tgcaggcctcctgctgctcctgtttgtggaccatgaaatggaggctcaggg

SEQ ID NO: 342183 - DNA, 89 bp, Homo sapiens
ggaaaatcatattatagatggagtaaaggatttaagtgccctgtatgctcaaaatttgtatcctcagatgaaatggatttgcatcttgt

SEQ ID NO: 342184 - DNA, 100 bp, Homo sapiens
agaaaatacaaatcacacgcataatggatgaaaggaaccgacagactccagggattagagctcgatctgcaaggcttcagtggttttgtgacagatgtgt

SEQ ID NO: 342185 - DNA, 100 bp, Homo sapiens
ccaagcctaaaaaggcccctgcaaaggaatgtgcggcaagaggagaagactatgagaaagtgaagttgctggagatcagtgcagaagatgcagaaagatg

SEQ ID NO: 342186 - DNA, 100 bp, Homo sapiens
ttcgtctcggaaaccccgcctcttacagtcacgaggtcagaaagacctcctgactccatgttacagtagacaaaacaagttggactcttttggacctata

SEQ ID NO: 342187 - DNA, 82 bp, Homo sapiens
ccccttgccaggagtgttcaagatgctctctctggaccgatcccactgtgtggacactgccagcggctgcagccgacttgga

SEQ ID NO: 342188 - DNA, 96 bp, Homo sapiens
gttcaattgaagattttaaggatcacattccaagggaaactgatatgaagtacaaggcgagtggataattccaacacaagactggcagtccaaatt

SEQ ID NO: 342189 - DNA, 75 bp, Homo sapiens
atgttcatgttgggaagaactgtgtgattatacctaatcatgagctggtttgggctaaaatgaaaggttttgggt

SEQ ID NO: 342190 - DNA, 99 bp, Homo sapiens
ccgcgcgcagggcctgcagcgggagctggacggcgagcgcgagcggcgcgagaaagccctgggcagtgacggggttcgggtgaccatggagagtgcgct

SEQ ID NO: 342191 - DNA, 101 bp, Homo sapiens
gagtgccggcttctcccctacgcgctacacaagtggagctccttttcctccacctaccttcccgagatgtgatcttcgtggtggaaagctaaattttaaaa

SEQ ID NO: 342192 - DNA, 80 bp, Homo sapiens
ccttcaaaggcacttcgtggggtcacagaatttcacggtccctcatggtgtctcactccagcagacagaggattgtgtcg

SEQ ID NO: 342193 - DNA, 100 bp, Homo sapiens
aggtctcgttcccgctcaagatcaagacacaggcataggactagaagcaggagtaggacaaggagtaggagtcggtgccagaaccctgtggagcatcatg

SEQ ID NO: 342194 - DNA, 75 bp, Homo sapiens
ttgcttgcttgcctgtgcgcgcgtgcgcggacatggcctcaaacgccatggccatgcagaaaatctttgcccggg

SEQ ID NO: 342195 - DNA, 100 bp, Homo sapiens
gtgagaagttgctctgtgtgctgagcgttctaaaggaaggcgtccgttggccttcgtacccgtcttgattgaggactgatcctttgaaatactccagcca

SEQ ID NO: 342196 - DNA, 50 bp, Homo sapiens
cgacctcgtgaagatccgcttcgccgtatcagcagcgtcgccagcaggag

SEQ ID NO: 342197 - DNA, 75 bp, Homo sapiens
ctccacgttgccctcaaagccctgcattccagaggttgactatagtcaatggggccaatggagccaagtgtatgg

SEQ ID NO: 342198 - DNA, 102 bp, Homo sapiens
ttctccttcgcatccgacgcaaccggcagcagcgctgccgccgcgtcctcagccaccgctccctcttcccacgaacccttaggagaaatcttgagagtggac

SEQ ID NO: 342199 - DNA, 98 bp, Homo sapiens
acagccgccccacccgcgccgctgcctcgctggggcccgggcccccttcccggtccactgtgccctgtccacggtgcctcctgcatgtcctgctgccc

SEQ ID NO: 342200 - DNA, 101 bp, Homo sapiens
cggaaatccattgcccgtgttctcacagttattaaccagactcagaaagaaaacctcaggaaattctacaagggtgagtggaagccccggcagatcgacaa

SEQ ID NO: 342201 - DNA, 75 bp, Homo sapiens
ggcgagaagccctacgagtgcaacatctgcaaggtccgcttcaccaggaagctcttcgtgggcggtcttgactgg

SEQ ID NO: 342202 - DNA, 75 bp, Homo sapiens
agtacaaaaacggcccttggatgatggaggtcttgtccaataagcatgtggctcctgatcatcttttgcaaatct

SEQ ID NO: 342203 - DNA, 98 bp, Homo sapiens
ctaactgcaccagtagcttttctgagaatacttgctgaaaaggaagttttctggaatggaaataagcgggttttgaaaacaaaaaaaagaaggagtgg

SEQ ID NO: 342204 - DNA, 90 bp, Homo sapiens
cctgactctctgaggctcattttgcagttgttgaaattgtccccgcagttttcaatcatgggaattaccttcagaattacagggaatttt

SEQ ID NO: 342205 - DNA, 100 bp, Homo sapiens
ttcctgggtcagtgattcccggaccctggaagagaagagggtggctaatgattaaggtcctggcattgatgtgcctgctccagacatgagcacaggtgag

SEQ ID NO: 342206 - DNA, 75 bp, Homo sapiens
cctggctccccatactagtcgccgggaatgtcactagtgcatctgggtctcagatggcaagcggcatcagcctgg

SEQ ID NO: 342207 - DNA, 82 bp, Homo sapiens
cgaggttcgagtgttgcagagcctgcggggcaagatctcaacagtatcaaagtgctctattttgggcagataaagtagcttc

SEQ ID NO: 342208 - DNA, 98 bp, Homo sapiens
ggcgactcccatgcatcggctaatagcccggagacaagcttccatgccattgcagtgtcaactaggcctcagttacttttcagtttgcccaaattgag

SEQ ID NO: 342209 - DNA, 98 bp, Homo sapiens
atgaagggacttgggatatttaattggataatagaagattgaaggaacggaaagatgctgaaggatgggagaccgttcagagaggaaggcctattcgt

SEQ ID NO: 342210 - DNA, 90 bp, Homo sapiens
gagaagcgtatggccacagaagttgctgctgacgctctgggtgaagaatggaagctctggcaggctgccctgagcacgctcaaccccaac

SEQ ID NO: 342211 - DNA, 100 bp, Homo sapiens
gcctgttacattctctatctgcgcaccttggagtccaagcttgtgctctttgagaggaggttcagatgagcccctgctgacttgagagagacagagagac

SEQ ID NO: 342212 - DNA, 82 bp, Homo sapiens
ctctgaggagctccaagccaacaaggccactgagaatgcaaaggaggaagtgaggcgaattctggggctgctggatgcttac

SEQ ID NO: 342213 - DNA, 127 bp, Homo sapiens
gaagcctctgaggcgctatggggcggtggaggagacggcttggaaaacggagagactggggagaagtgctggagaatctggtaaaagcaccattgtgaagcagatgaggatcctgcatgttaatggg

SEQ ID NO: 342214 - DNA, 90 bp, Homo sapiens
cagatcagtgaggatgtcatcagactcttcaaaaagtggcttctcctcagtggtagctctgggcgcaagcatcatctgtaacaagatccc

SEQ ID NO: 342215 - DNA, 83 bp, Homo sapiens
gttcaagtgacaaacgtacctgtggtccctggatccagtgctactgctacaaataagatggtcctagaacaattggagattca

SEQ ID NO: 342216 - DNA, 83 bp, Homo sapiens
gggcaataagagcctggtggtggcccacgcgcaggagagaacattgaaagtattctctaagctatttgaagagagtgactaaa

SEQ ID NO: 342217 - DNA, 50 bp, Homo sapiens
cccgcagtacaagaactggagagggtttcgaaaaaacgatgaaatgaaag

SEQ ID NO: 342218 - DNA, 98 bp, Homo sapiens
atgagatgattgccaaacccccagctatatcgagaagtttactgactttcttcggctctttgtgagtgttcacctaagaagaatcgagtcttactccc

SEQ ID NO: 342219 - DNA, 75 bp, Homo sapiens
agagaaattcagaacctcaagcttttcaggcatcctcatataattaaactcattagtgccagcagtagttcccaa

SEQ ID NO: 342220 - DNA, 80 bp, Homo sapiens
aggcaaagccggctgttaccctgcacagccgtcaccctcaactttcccttcaggagctgtggctaaaggaagtggagggg

SEQ ID NO: 342221 - DNA, 98 bp, Homo sapiens
tgcaccagcacagaagtggaattgaatctgctctaaaggagaccaaggatataattgacactggcaaaacaatgcagactttgctttccttggtcagg

SEQ ID NO: 342222 - DNA, 100 bp, Homo sapiens
tggacaccaaaggcttggtgagagcgctcggggaggaagccctgctgagatacttggactcagagttaacagcccgacatgagctacaggtggaaatgaa

SEQ ID NO: 342223 - DNA, 101 bp, Homo sapiens
taaaagagccctggaatgtgaagagacatgagacagtagtcaaatactcaggccaagcagtgaagccgttaccactgacctgccctgacttccaggacccc

SEQ ID NO: 342224 - DNA, 75 bp, Homo sapiens
gaccaagaggcagaagtacggggttgattattcaggacagggagttgaccaactgcaaagagtgattgacaccat

SEQ ID NO: 342225 - DNA, 87 bp, Homo sapiens
atcagataagcttgacattacagccaagatggtgctgtcccagagacaacgagatgaactatgctgaagattcagaagtgtcatctc

SEQ ID NO: 342226 - DNA, 75 bp, Homo sapiens
gttcagcctttttctaaacctgtgcactaggccttccaatgagggggatgagcaacaatacccctcagttaaatc

SEQ ID NO: 342227 - DNA, 100 bp, Homo sapiens
ggagcttatacagggatgtgatgctggagaactatagccacctggtttctcttgatacagtttatgtaacttgatggaagaaaatggaattactccaaaa

SEQ ID NO: 342228 - DNA, 90 bp, Homo sapiens
cctgactaaagcttgaaatgctacatttccaagccgagaccgacccgcccgcccgcggccccgcagcagctccaagaaggaaccaagaga

SEQ ID NO: 342229 - DNA, 75 bp, Homo sapiens
tcagaactgagaagctgtcaccacaggatggtcatccagaggataagccaacgcacatcatcttcggttctgaca

SEQ ID NO: 342230 - DNA, 100 bp, Homo sapiens
cagcatcccaccaacatttgatggtgaggaggaaccctcgcaagggcagaaggttgaagaacaggagatctcagccagcttttatgcaaagcagtttatc

SEQ ID NO: 342231 - DNA, 50 bp, Homo sapiens
gaagactaaagcatctgtcagaaaaacgaagcttcacaaaagatgtctaa

SEQ ID NO: 342232 - DNA, 83 bp, Homo sapiens
ctataatacccctgctgacatttggagcacggcatgcatggaatccatcaacagcatcaagtccagactaagcaaaagtgggc

SEQ ID NO: 342233 - DNA, 100 bp, Homo sapiens
tacaagttattttctcttcttctgaaaaagagatcttgatcaatgaactgagccatgttcaaatccctgttatgttgatgccagatgacttcaaagccta

SEQ ID NO: 342234 - DNA, 98 bp, Homo sapiens
ccactcttcggcgaagctttacgttcatgtaaacagcatgacgtgaggccgtggatgcaggcattaagctgagatctgtatctgtggacctgaatgtt

SEQ ID NO: 342235 - DNA, 75 bp, Homo sapiens
tatataccatgatctacaggaacttggtagtagtcaatcagcaggaaacctccacagctgttgagaaaaaggaga

SEQ ID NO: 342236 - DNA, 100 bp, Homo sapiens
ggccgccggggccgccatggagcccgactcggtgattgaggacaagaccatcgagctcatgcggaagatccatccaaaagctatgtgaaattacgagact

SEQ ID NO: 342237 - DNA, 50 bp, Homo sapiens
ggccaggttcccaagagctcagagtgcggcggaaagaacttccacttcgt

SEQ ID NO: 342238 - DNA, 102 bp, Homo sapiens
tccagaactctgtcaaatgaagaacactttcaagaaccagtgtttctgaaagatctatccagcactccgatggccagcaacaacaccgccagcatagcacaa

SEQ ID NO: 342239 - DNA, 100 bp, Homo sapiens
cacctgtgtctgtcccagcggcaggtttggtcagtgcccaggttgtgaactaaaggccgacaaagattatcactttaaggtggataatgatgaaaatgag

SEQ ID NO: 342240 - DNA, 74 bp, Homo sapiens
ggacgaggagtcggaggagccgcgggcggcgcggcccagctcgttccaggcttatttgcagctgggtatcaatg

SEQ ID NO: 342241 - DNA, 73 bp, Homo sapiens
cagggaccaggttaccctaacagcaggaaggttgtatttgatggtcctcgaagatttgaggatttagggtcaa

SEQ ID NO: 342242 - DNA, 119 bp, Homo sapiens
ggaacagccatgcaaaggcaggggaggaagccacctcgaggtagttcctgaaatgactgagatattgaagaaaaaatgaatcaggatcatgccttaaaaagaaaacttttgttaaagta

SEQ ID NO: 342243 - DNA, 80 bp, Homo sapiens
ctctttgcaacatttcaggaaaacagagaaagaagtgataggagggctctgtagactacatgaggaaataattgactttt

SEQ ID NO: 342244 - DNA, 75 bp, Homo sapiens
cctccccagtagctgggattacagactccccatccccaggatgtcaacctcagtccctcaaggccatacctggac

SEQ ID NO: 342245 - DNA, 96 bp, Homo sapiens
atgcagatgagaaggttcagttggcaaaccagatatatgacttgatatgattctataacagactcttccagaaatgatatgaagaggaaatttgcc

SEQ ID NO: 342246 - DNA, 51 bp, Homo sapiens
caacctcagccttccacatttgtttccgttactatggcaatgacggcaggg

SEQ ID NO: 342247 - DNA, 90 bp, Homo sapiens
ggctgccagcgagatgtcctcaacaagaacccttaggagaaatcttgagagtggacagcaattgtgaagatcgccagagagttctgtgtt

SEQ ID NO: 342248 - DNA, 100 bp, Homo sapiens
ggcagaggttctaccaactgaccaagctgctggactccatgcatgacgatttcagatgcatgccaggtttccactgattgccagaactcgagatcactac

SEQ ID NO: 342249 - DNA, 83 bp, Homo sapiens
ttattagtcatcaccgttattcctactaacgtcctgtgtcactgaggaaatctggcattttttaaagtttgcgccccacaaag

SEQ ID NO: 342250 - DNA, 50 bp, Homo sapiens
gaagcaacggtcccctgagatcatgtgatggcccgctccctctccccacc

SEQ ID NO: 342251 - DNA, 99 bp, Homo sapiens
gaagcgcagcaacagcaagctcccgggcagatgaggaaactgaggcttggtgaagttacgaaacttgtccaaaatcacacaacttgtaaagggcacagc

SEQ ID NO: 342252 - DNA, 95 bp, Homo sapiens
tgaagagacaggaggcagtagccaaacacccaggaacagatgttgttattgtaaagaatggaagaagaatatgtggaacaggaggttgtttagcc

SEQ ID NO: 342253 - DNA, 51 bp, Homo sapiens
gttggttatacattctaggaatctcaaagacactctgacctggtcacagcc

SEQ ID NO: 342254 - DNA, 50 bp, Homo sapiens
ctgccgttggtgatctggcatgggatggactctcagcgttctcatctctc

SEQ ID NO: 342255 - DNA, 100 bp, Homo sapiens
tgattttttcaagaagaggaatagggtgaatgaatctcatcagaaaagcaggattggtcttgatttgagcaatggtaaacctcgagacaacaaacaagca

SEQ ID NO: 342256 - DNA, 75 bp, Homo sapiens
cttgtccagaactctgtcaaatgaagaacactttcaagaaccagacaaggcgcctctgtcgaagagccttctgct

SEQ ID NO: 342257 - DNA, 82 bp, Homo sapiens
aggactgcgccgcgtcttcctcaaggcttgggcactgtttaaaggaaagttccgagaaggcatcgacaagccggaccctccc

SEQ ID NO: 342258 - DNA, 76 bp, Homo sapiens
ggtctctcgcgggcgggagaacggaaaactcccaacttcctggtcagaagacatgtcttcatctacatggcatctt

SEQ ID NO: 342259 - DNA, 100 bp, Homo sapiens
ggcccccgcctgcctccgccggctacagcgggaagagcgacccagccgatgcccaatcctgtggcgtactacctgcaccactcaccctggtggttccatc

SEQ ID NO: 342260 - DNA, 110 bp, Homo sapiens
gtcagtttacgcctctgagatcacacagctgcctgggggccgtgtgatgcccaagcaaaagactgttgaagtagagagcattttgcccagctcactcggattctttgctg

SEQ ID NO: 342261 - DNA, 75 bp, Homo sapiens
gtggaggcagaggtggcatggggtccctccttgtggtccatttctgggcaccatgggctccacagtgtgcacaga

SEQ ID NO: 342262 - DNA, 100 bp, Homo sapiens
ggagcgtgcaacaagacagccctggagcacaggaaggctgtgggcctgggcgacaggcaagagattctgaagggagtggtaatggaagtgaagatgcttc

SEQ ID NO: 342263 - DNA, 83 bp, Homo sapiens
cggacctgtctgggtctcagccgccaaagaccccgtccggtagatgcctgaggaaacccagacccaagaccaaccgatggagg

SEQ ID NO: 342264 - DNA, 50 bp, Homo sapiens
ggagaaagttttttggagacaagaaagcagatggtggagctgaatatgcc

SEQ ID NO: 342265 - DNA, 76 bp, Homo sapiens
gagggagttaaggacattccaggcagaggcaagaggctgtggccctgagaaagatcacgtctacctgcagctgcac

SEQ ID NO: 342266 - DNA, 100 bp, Homo sapiens
cgccgctccttgggctacgcgtatgtgaacttccagcagccggcggacgcaggttacgggcaggacttgagtggcttcggacagggcttctcagacccca

SEQ ID NO: 342267 - DNA, 74 bp, Homo sapiens
tttggttgcagaccaggttctgaatcccatgctgggcagagcaatggtggaacaaagcggcaaaagatatccca

SEQ ID NO: 342268 - DNA, 74 bp, Homo sapiens
ggagtcataaagaggacgccgggacaccaagaagcagggaaatggattttttatcaagcagaaatgcatcgaac

SEQ ID NO: 342269 - DNA, 100 bp, Homo sapiens
ccaccttcatcgtgaccaattactgggagagctgcagccaggagcaggaggtcaagcagaaactctttgtggtccccgcggatgaggcccaggctcgaat

SEQ ID NO: 342270 - DNA, 50 bp, Homo sapiens
cgggacatctgaaagccaggaaatgtgtgtgaaggctctggtttactacg

SEQ ID NO: 342271 - DNA, 100 bp, Homo sapiens
atggaaagagaagactgatagagacttcgttaagcatttcacaggacatgcaacgccagtttcgtcactgatgttcactaccatcagacctcctaatgag

SEQ ID NO: 342272 - DNA, 97 bp, Homo sapiens
ttcaagtctatggacgacgatttcggatggtatgttacttacggtcatgaactgatttggaagaacagggagccgctagtgaaaatctggcatgaaa

SEQ ID NO: 342273 - DNA, 75 bp, Homo sapiens
tggtgacttggatacagaaatttcctgggctaaagtcagcccaaggccaaccccactgtcactctgttcccgccc

SEQ ID NO: 342274 - DNA, 97 bp, Homo sapiens
ctctccgctcgattttgtcaccgttatgtgggaagcgaatccaccctgttcctgtattgggtaatggcctttattacaaaaacaataaaattggtta

SEQ ID NO: 342275 - DNA, 100 bp, Homo sapiens
ctttcgctcctcggccgcgcaatgggcacccgcgacgacgagtacgactacctctttaaaggaactttatattgctgttggaatatctggagccatccaa

SEQ ID NO: 342276 - DNA, 115 bp, Homo sapiens
ccaccgaggaaaaggaatcgtatcgtatgtccgctatccagaacctccactctttcggttgaaatcacaaagattagacacctttttagataggtgttcttcagcaccactgaca

SEQ ID NO: 342277 - DNA, 97 bp, Homo sapiens
aggcaatcatatgaagtttctgtcttaactgcagtaaatccacaagagatttgagttctgtgaacctgcatttgttgttggtaattgcctccagata

SEQ ID NO: 342278 - DNA, 95 bp, Homo sapiens
acaccacctacagcccaggtggttggcgtgcttaagattcagggagatgcacttatttacatggaaccagagaaacaagtgatgtccaggtcgtc

SEQ ID NO: 342279 - DNA, 83 bp, Homo sapiens
agccgatccagcctgcggagcctgtggggcaggatagaactggaggaacctccacttgttttggctgctgcaaatgtggtgag

SEQ ID NO: 342280 - DNA, 75 bp, Homo sapiens
tgctgcaacagcgactgcacgttgaaggaaggtgtccagtgcaggctctttattgagaaactaccaaaacatcga

SEQ ID NO: 342281 - DNA, 74 bp, Homo sapiens
agagagctgtgaaatatctttggcttgcagccaacaatgggctatctgctctatgcaagcacttagacaaccta

SEQ ID NO: 342282 - DNA, 100 bp, Homo sapiens
tcaaggtggcctaccaggaggccaggggtgtcgccatgatttccacaagacggcaccctatgtcgtcactggcagcgtagatcaaacagtaaaagtgtgg

SEQ ID NO: 342283 - DNA, 80 bp, Homo sapiens
gccttcccaggaccctcagggagagcgggcagccttccaggtggacaggcatgtttgccacagtcgcagggatatcccag

SEQ ID NO: 342284 - DNA, 80 bp, Homo sapiens
gaccttaaccctcaagccgaagccttcagtgggactcccccagcagatacattctcagtccagcccagaatcaaatgcag

SEQ ID NO: 342285 - DNA, 100 bp, Homo sapiens
ggccttctgctacatgctggcgctgctgctcactgccgcgctcatcttcttcgccatttggcacgagccagatgaccaggatgccccagatgagcatgag

SEQ ID NO: 342286 - DNA, 82 bp, Homo sapiens
tctacgacgacggcaccaacaccttcttctggttcgtgctggccgtgggcagcgccgtctttgatgccatgttcaacggggg

SEQ ID NO: 342287 - DNA, 75 bp, Homo sapiens
gaccacagcatgcacttccttccagcagctacacagggactttgaacatgtcggggatcgccctcagcagactcg

SEQ ID NO: 342288 - DNA, 75 bp, Homo sapiens
attgagtgagccaattccctggaacatcggaatttgccttttatgcgtgagctgaggtatctatttgcacttctt

SEQ ID NO: 342289 - DNA, 100 bp, Homo sapiens
agatttgccgattttgttggcatcgaattcgcactgatgaaaatgggctttgtcctgcatgtagaaaggctagtcaaatgaagcagtgggatatgctgca

SEQ ID NO: 342290 - DNA, 98 bp, Homo sapiens
gtgcgtgtgctcaaatgtgggcacaagtatcacaaaggggattccccagctttccgttgcacaaacagtgaagtgacagtccagcccagcccctattt

SEQ ID NO: 342291 - DNA, 50 bp, Homo sapiens
cctgcagcgggcgcagatgacgggtggaatgaatcttacttgttgaatat

SEQ ID NO: 342292 - DNA, 100 bp, Homo sapiens
cagactggcaggagcagattccaaaggcacaggaagaagcttgcaggctgagtatgagtttatcagctctggtctctacctagtggtgttattgcacttg

SEQ ID NO: 342293 - DNA, 90 bp, Homo sapiens
gtttccgcaaagagagggcggcgctggaacagttgcagggtcacagaaacatcgtggtgtcggcaaggccagtgcgtaaagtttggggag

SEQ ID NO: 342294 - DNA, 83 bp, Homo sapiens
tccaacttccagtggcccggtcgggaaagcctcctgacaaggtgatccgggcgggccccgcaggaattttatcccctcaccgg

SEQ ID NO: 342295 - DNA, 50 bp, Homo sapiens
cagccggagacccggagaaagggagcagcatggacctgtcagcaactaag

SEQ ID NO: 342296 - DNA, 98 bp, Homo sapiens
tacctccatcaggaccccagatgtctgacagccctgtgtgacaccaagataagtaacgtttccaatacttatctacaggaatcgccatgaccccagct

SEQ ID NO: 342297 - DNA, 75 bp, Homo sapiens
gggaaatcgggctgaagcgactgagtccgcgatggaggaaagatgaatgggagggctgattttcgagagccgaat

SEQ ID NO: 342298 - DNA, 83 bp, Homo sapiens
ccggcggtgcagcagccggccgacccagagtgtgtccctggccagtgtccttccacctgtccacaagcatggggaacatcttc

SEQ ID NO: 342299 - DNA, 82 bp, Homo sapiens
gcccctgcctgcgcctcccgcctcctgccgcagcccggtttatttatgaaacagagcatcataatggcatagcagagttact

SEQ ID NO: 342300 - DNA, 98 bp, Homo sapiens
aaggaaagtttttgaacttatgggaagcattgtcactgagattgcttgtggacggttcctagaagccaaaccaaactgacaataatgcttgaaaaatt

SEQ ID NO: 342301 - DNA, 76 bp, Homo sapiens
tgtctgatcccttgctcccatccctgcagcatgaacaagcctttggaggtgagaagtggaaaacaaatgttttatt

SEQ ID NO: 342302 - DNA, 100 bp, Homo sapiens
caccatcttcgacttgagcgaagttttatgcaagggaaagcaggcaggatgggagagtcgccgatagaaccacctcttccctgcctcctgggcttggggg

SEQ ID NO: 342303 - DNA, 100 bp, Homo sapiens
tgagagtgttaattctgctcctctcctgggcggcggggatgggagatgccttattggaggaactggaacgctccacccttcaggacagtgatgaatattc

SEQ ID NO: 342304 - DNA, 76 bp, Homo sapiens
ccgagtcaaagcgctgaaatgagccccgcggcaggagaaggaagccaacatccttttggagccatgaatattgtcc

SEQ ID NO: 342305 - DNA, 131 bp, Homo sapiens
gaggcagtggccctggtggaagacttgcagaaagaacctggaagacagaggctggagagccagctctcccaggcgctgaacggactgtcagacagggccaaagaagccaaggagtttctggtacagctgcg

SEQ ID NO: 342306 - DNA, 83 bp, Homo sapiens
gagcccagcgaagtcttcatcaaccgggaccgtggcttcggcttcatccgcttggacatggatttgattgacatactttggag

SEQ ID NO: 342307 - DNA, 90 bp, Homo sapiens
ggttagcagagcagccggtaacgttgctggaccgggacgcacgctcagctgaggaggacccccaaagaaattccgggtagatatgcctgg

SEQ ID NO: 342308 - DNA, 100 bp, Homo sapiens
gggctcctttccgtggtgtgtagccggcttggcgtgaccctcgcctgatccaggtcatttcttcagatagctccccagctgtggaaaatgagcatcctca

SEQ ID NO: 342309 - DNA, 90 bp, Homo sapiens
gggaagaactctgccaaagaggaaaccaagtttgcacaggtgtgagaaccaaggtctggtggaggcagctccaggcactgcccagtccga

SEQ ID NO: 342310 - DNA, 100 bp, Homo sapiens
agaagccgatgtgtgagaagaccaccatcaacaatgagtacaactaccgctgctggaccacaaaccgctgccagaaaaaaatacactttcgggaaatggc

SEQ ID NO: 342311 - DNA, 75 bp, Homo sapiens
gaggcttcaagacaaagggccccttacacaccagacagtgataatatgcagcatgcatactgggaactgaagaga

SEQ ID NO: 342312 - DNA, 82 bp, Homo sapiens
ctcaaggatgtcatatctatgagtaccgcgagagcaacaagttcatctgcagaagccagcggacgcctctgttcaacttgtg

SEQ ID NO: 342313 - DNA, 82 bp, Homo sapiens
gagccccttcctgagaagatcccaggtggctattatcatggaaaactaatttttcccagagaatttcctttcaaacctccca

SEQ ID NO: 342314 - DNA, 100 bp, Homo sapiens
gaagtgcagctgcctcagttcttagcgcagtggaagtagtggaggaagtggaagtcgagaaaacagtggtagcagtagtattggcattcccattgctgtg

SEQ ID NO: 342315 - DNA, 93 bp, Homo sapiens
tacagattgctgcagtggaaaatcagattggagctggagtgagccttccaggaattttggctgccaaatgtggtgcagaagtaatactgtcag

SEQ ID NO: 342316 - DNA, 100 bp, Homo sapiens
gtcatccacttcgcccaacctccaggttatgagtgccagtgagccgccttagatagaagcatcgtcagcactttattaatgatggatagtgagaataaac

SEQ ID NO: 342317 - DNA, 100 bp, Homo sapiens
cacaaataaaaaagctctgggcaccgtatcaagccaagaacagcccaatctcctttctgggcaaacgttccaagcactgaacctaccagatgtatttggg

SEQ ID NO: 342318 - DNA, 50 bp, Homo sapiens
aaagaacaggagaagtctgaacacgaagtcctggctgagcaaggttggaa

SEQ ID NO: 342319 - DNA, 100 bp, Homo sapiens
cttttaagcaaggaaattgaactaagaaatggagaggaattgaatgatctggcacgggaccctccagcacagtgttcagcaggtcctgttggagatgata

SEQ ID NO: 342320 - DNA, 100 bp, Homo sapiens
cgggaagcctgggtctcctctagcttatttggtgtctccagagctgtccaggtggttgtgtcaaaccgattggtgacatctccatgctgtattgtcacaa

SEQ ID NO: 342321 - DNA, 50 bp, Homo sapiens
agaacattgcacgatgcctcctggtgaagagatggcgtttgtgaagagtg

SEQ ID NO: 342322 - DNA, 50 bp, Homo sapiens
ggagaagagagctctggggtcgacacgctgcagatctgggacacggccgg

SEQ ID NO: 342323 - DNA, 100 bp, Homo sapiens
gcgctggccgggggcgcgggcggcggcgccggcaggaagggaggttcccctgaaggatgctaaggaatacgctgaatccataggtgccatcgtggttgag

SEQ ID NO: 342324 - DNA, 97 bp, Homo sapiens
ccgggagctgtacttctatatctacaagggggtccgcaagagaaacttttccatgtctgtaaatagtgctgctgtcctgcgattgacaggacgagga

SEQ ID NO: 342325 - DNA, 50 bp, Homo sapiens
aaaaagaacaggagaagtctgaacacgtgtgagttcttgatacgaatgaa

SEQ ID NO: 342326 - DNA, 100 bp, Homo sapiens
ctggagctctgggcccagaggacttctggcctttggcacgtcctgctccgtggtgctctatgaccccctggttatggccacaccgtgcccttgtcagatg

SEQ ID NO: 342327 - DNA, 75 bp, Homo sapiens
ccatcccaaagctattctgggggcaacagagttgtggaagatatcaataagcgcagagagccgctccccagcctg

SEQ ID NO: 342328 - DNA, 82 bp, Homo sapiens
gagaccgcaattcgagaatcaaagggccgggagcgatgggatgtttcagcagcccctgagaaggaagaggaggaagctgagg

SEQ ID NO: 342329 - DNA, 75 bp, Homo sapiens
aaagaaaacatcagagctgctgttgcaggacgctgccaaggtctgcagagaattcaccgagcgtgagcaaggaga

SEQ ID NO: 342330 - DNA, 98 bp, Homo sapiens
cacagctcctgaacgtcagcagctagagaccctgaaacgtaatgtcaacaaagctgccaaacggaggcccgaagaaaaagaacctgaaaaagtaaatc

SEQ ID NO: 342331 - DNA, 102 bp, Homo sapiens
cccgcggtgatgcgtgcttttcgcaagaacaagactctcggctatggagtccccatgttggtgctggagaatctggtaaaagcaccattgtgaagcagatga

SEQ ID NO: 342332 - DNA, 76 bp, Homo sapiens
cacagatggaccaaaggttatgcacaggacttggtggggaaacttaaagatgcttcgaaaagcctggaaagagcaa

SEQ ID NO: 342333 - DNA, 50 bp, Homo sapiens
gtgactaccaacgtttggaccagaaggaactcctcctcccacatctgatg

SEQ ID NO: 342334 - DNA, 90 bp, Homo sapiens
cagccagcagccgcttccgacagaactgaatgtaacttcaccgagtaaagaggagtgcctcatgcattgtgcgtcagcagcaatgtttat

SEQ ID NO: 342335 - DNA, 90 bp, Homo sapiens
gacgctggatggcactgacgttctcttcaccggcattggccgctggaccaacccccagtaccggcagttcatcaccatcttggaagcaac

SEQ ID NO: 342336 - DNA, 97 bp, Homo sapiens
tggactccctcaagtacagtgacctgcagaacttagccaagagtctgggtctccgggccaacctgaggtattggtaaaggttttcaaggtgtcatga

SEQ ID NO: 342337 - DNA, 102 bp, Homo sapiens
aggaaggtgaagtaggaccgaattcctgtgccgaagaggcctgcagtgggagagcaggaattggctgtgaaaggactgaggcagccatctgggggtagcggg

SEQ ID NO: 342338 - DNA, 101 bp, Homo sapiens
aagccggcctaccccagatcatccaaaaagatgtgtgcacagacccaggccatgcagatactggtgcctctaacttcgtcagcccagaacacctcacctct

SEQ ID NO: 342339 - DNA, 125 bp, Homo sapiens
gtcagttccttgtggagccggagctgggcgcggattcgccgaggcaccgaggcactcagaggaggaccaagaatcgccttcagccctgtctggtgcatccttggcagaaagtgaggaggaaaaca

SEQ ID NO: 342340 - DNA, 74 bp, Homo sapiens
gttcggatgagctacagaggcacaaacgtacacacacagtattgcaggtcaagtggctggtcagcaggggctgg

SEQ ID NO: 342341 - DNA, 82 bp, Homo sapiens
gaagagagaccttagaaaggatcaggactggcggccgagaggccccagcaacatgcagctacaattccagagacccctggcc

SEQ ID NO: 342342 - DNA, 100 bp, Homo sapiens
aatgcaacctctgtctcctgggttcaagcaaatctcctgcctcagcctcttgagtagcctgagtagctgggactaaagaaaccgaagctgaaagactggc

SEQ ID NO: 342343 - DNA, 50 bp, Homo sapiens
atgagccaggagaaggaatttcacaaggttcaagcgattctcctgcctca

SEQ ID NO: 342344 - DNA, 82 bp, Homo sapiens
ctggtctctggctccctcctcccagggccaggcgccgctcagaacgctgatcctacagttaaagacttaatcggaggcttca

SEQ ID NO: 342345 - DNA, 75 bp, Homo sapiens
gcctggaggattgtcactccaacctcttttcgctgaaacctgtttccctccaatcttgtggttgcagctttccgt

SEQ ID NO: 342346 - DNA, 96 bp, Homo sapiens
caatgggtccaagtgcgaccttaatgggaggccccgggaggccgaggttcgggcagagatctggctccacaaggaggcccagaaggagggctggag

SEQ ID NO: 342347 - DNA, 80 bp, Homo sapiens
gttggactgcagctcgcggtttcctggcttctagctgctcgactgatccaaaacatggatgccaccactgagccttgtac

SEQ ID NO: 342348 - DNA, 83 bp, Homo sapiens
cttgggggtcgagcacataacggggttcgggtgtctcgtgtgtgaacatcacagttggaatcgaagcctcttaaaatggcaga

SEQ ID NO: 342349 - DNA, 88 bp, Homo sapiens
gaccacaatggggaggacaacttcgcccgggacttcatggttctgactcagaagatcttttggaagaattgctgtgctgtttgatgca

SEQ ID NO: 342350 - DNA, 75 bp, Homo sapiens
cctcccaagtagttgggactacagatcagtccaaagtgtttgtgaaggtgtttactgaaattgaccggatgcccc

SEQ ID NO: 342351 - DNA, 100 bp, Homo sapiens
catggccagaaaacttttggggaaacttggatttaactggccagaagcaggtattcaaagcagagaacaatccctgggtgacccccattgcagaccagtt

SEQ ID NO: 342352 - DNA, 98 bp, Homo sapiens
ttaaatgatacctatcactcaagagactcttcatttagattggattctgaatatcagaaggggaaactgaggcccaaggaaattgagtatctctgcaa

SEQ ID NO: 342353 - DNA, 50 bp, Homo sapiens
caaaatcccaaagcaaaattaccaggcacgagaagccctgccaacgtggg

SEQ ID NO: 342354 - DNA, 118 bp, Homo sapiens
cgctgcggtacgtgtggcctctcctcctctgcagcccctgcctgcttatccagatccccgaggaatccgaggcctgcctggagccccagatcaccccttcctactacaccacttctga

SEQ ID NO: 342355 - DNA, 80 bp, Homo sapiens
tgtgttcgatatatacagagacagtagggttggtgttcgaggaagagacattgttgttcttggtgtggagaagaagtcag

SEQ ID NO: 342356 - DNA, 100 bp, Homo sapiens
attattcaaaaatggtggagaagtttcttaggcagaaagcaatatcaactaactgtgcagctgcccaacatgttcggcgaccttcggtccacgtttattg

SEQ ID NO: 342357 - DNA, 74 bp, Homo sapiens
cttagctgtgctcgcgctactctctctttctggcctggaggctatccagcgagcctggccctgcctctgggaca

SEQ ID NO: 342358 - DNA, 86 bp, Homo sapiens
agccccgagcactgtggccgaggcccacctgctgacatctacctgccaggattttttatcaagcagaaatgcatcgaacaacgaga

SEQ ID NO: 342359 - DNA, 74 bp, Homo sapiens
atttcgtagagtgtttgcttcggcagaaaacggtgaaactagtgaatattcgcaatgatgacatcacagatggc

SEQ ID NO: 342360 - DNA, 50 bp, Homo sapiens
gcaagctgtgcgacgtgaccctcaaggcgcggggcgaaggagctgctaga

SEQ ID NO: 342361 - DNA, 98 bp, Homo sapiens
aataccagcagcctgtgggatttattattttgaagtaaaaattgtcagtaagggaagagatgggcacgtgtggttctcaaatataggcattctgatgg

SEQ ID NO: 342362 - DNA, 90 bp, Homo sapiens
cagcgaggaagaagaggacgacgacgacgaggaagaggaggtttctgaggtctaccctgaactgcagatcaccaatgtggtagaagccaa

SEQ ID NO: 342363 - DNA, 100 bp, Homo sapiens
cagggacgtgctggccgtgatcaaacactgcaaggaccccctccggctcaagtgtgtcaagcaagagcaaacgaggcccctgagagctccacctagttca

SEQ ID NO: 342364 - DNA, 75 bp, Homo sapiens
ggggccgacccggcccgtagtgtggaagcagcttcagattgagaggatccagaatccagatctctggaatagcta

SEQ ID NO: 342365 - DNA, 83 bp, Homo sapiens
cagcgcaaccacgagacggccttccaaggttttaaaatcaaagatgggaaaatcggagaaaattgcccttccccatggccagc

SEQ ID NO: 342366 - DNA, 82 bp, Homo sapiens
ccggaatggagaaggaagaggagtcggtttacccaaggtccagcctagcccctaggcaccatgtcggacagtgatctaggtg

SEQ ID NO: 342367 - DNA, 90 bp, Homo sapiens
agaatggcggagtggaaaagagtcctggatttgaagtaaacagatgagaattctagctccagtgatccacaagctcagaaatacatcgcg

SEQ ID NO: 342368 - DNA, 75 bp, Homo sapiens
cgtgtacatggccgccgtcctggaatacctgacagggaacatccttctgtatcagaaattcccatgtttccatat

SEQ ID NO: 342369 - DNA, 101 bp, Homo sapiens
aagcccttcaacgcccgctacaagctgctcatccacatgcgagtgcactcgggcgagaagcccaacaagtgcatggttcgtcaaaaaatgttgtatgcagc

SEQ ID NO: 342370 - DNA, 98 bp, Homo sapiens
actatctcagccaggtccttcttctaatattattggccagtctgtggaagaagctatcagaatgtatgacaacatgtccacaatggtgtacataaagg

SEQ ID NO: 342371 - DNA, 83 bp, Homo sapiens
tggttatgaagaagaagaagatgagaacagtagacagtcgcacatccgcgtgggctgggagcagctgctcaccaccattgccc

SEQ ID NO: 342372 - DNA, 90 bp, Homo sapiens
cgaggagccggcgcggtcgcagtctccacggcgcaggcccacggtagcgcagccgctctgaggtgagccctattcccagaggcaggtggt

SEQ ID NO: 342373 - DNA, 105 bp, Homo sapiens
aacagttaatcctcaatttaagcctgatctaacccctagaaacaggtttgatattaaactgctctcagaattttcctcttgcctagcagatcagcatttgtattt

SEQ ID NO: 342374 - DNA, 74 bp, Homo sapiens
ggaacggcaaagtcatgggagcagagctcagacatgttctcaccacccttggagtgtgggctgctgctctcctc

SEQ ID NO: 342375 - DNA, 100 bp, Homo sapiens
accttcagctgtttcctgagttgctgtttcttgggactgcgaagctatacaggctgtgtgagcgccactttgaagggcatccaacccgcggctatccatg

SEQ ID NO: 342376 - DNA, 87 bp, Homo sapiens
cccgccactacctcctggctgccgtgaataggcagcctaaaggttgtctgcattcaaaagagcattctattaaagctaccttaattt

SEQ ID NO: 342377 - DNA, 51 bp, Homo sapiens
gcagaatacagagatatggaatcaggaaattcgaaatgagtcccatgacta

SEQ ID NO: 342378 - DNA, 73 bp, Homo sapiens
tcgcacgccatgggcagcttttccggggtggcaggcggcacagttggagatcgatgctatagaagacaaacaa

SEQ ID NO: 342379 - DNA, 82 bp, Homo sapiens
ctaattcagaaaagaagaagaagagggatactcccatgctgccaaagaaccaacgaaacgtatgctttccttccaagggtta

SEQ ID NO: 342380 - DNA, 82 bp, Homo sapiens
ttcgcaaagaaacgaacaacgctgctattataagctcaggccacagggtcaccacatacatcgcccacccatggaggcggcc

SEQ ID NO: 342381 - DNA, 94 bp, Homo sapiens
ctaccttgtcgaaacagaagacaaatcattctttgtaagaacaaaggaatgtatcctgtcaggtataatgtcagtgaatggcaagaaagttctt

SEQ ID NO: 342382 - DNA, 75 bp, Homo sapiens
cttaagagcgcggccggaaagcaggaattgaatgatctggcacgggaccctccagcacagtgttcagcaggtcct

SEQ ID NO: 342383 - DNA, 100 bp, Homo sapiens
ctgcttttccaacatcaagatcttcctggtgtccgagtgcgccctgatgctggcgcagggcacggtgggcgcctacctgctgacgcaccatgtcggtcag

SEQ ID NO: 342384 - DNA, 75 bp, Homo sapiens
catattttgaagtgtttacggctggactgtgctgctgccatctcggctcactgcaacctccctgcctgattctcc

SEQ ID NO: 342385 - DNA, 89 bp, Homo sapiens
caaagacaggagcgtcccggtgcggctgcacgtctcgcggatcatgctaggatcagcactgccagtggagatgggcgtcactactgcta

SEQ ID NO: 342386 - DNA, 75 bp, Homo sapiens
agagatgtgatgttggagaactacagaaacctcgtctccctgggaaacatgccctgaactgtcacagaatgaaac

SEQ ID NO: 342387 - DNA, 101 bp, Homo sapiens
ccctcagtcgcctcgcgcctgcaggtctttcacagagaccatgagctccctgtcccctgggaagccgtggcagaccaagctgagcagtgcgggactcatct

SEQ ID NO: 342388 - DNA, 74 bp, Homo sapiens
ttctaggcgtgcagagacatgcctcacccgaggatattaaaaaggcattacagtacctatagccaagctgcagc

SEQ ID NO: 342389 - DNA, 83 bp, Homo sapiens
cagctcatgggcacggctcgggacgtgtactaatggtcacttgatgtgcgctggctgttttatccacctactagcagatgccc

SEQ ID NO: 342390 - DNA, 123 bp, Homo sapiens
ccgctcgattggttctactgtgggtctggactgatctccatgtcctgttgtggggcttttacagcctttggatcgtcagtatttaaacagatcacatcatgcgtgagtacaagctagtggtcc

SEQ ID NO: 342391 - DNA, 97 bp, Homo sapiens
agaggaacactgccggggcccaaccacaagacgactcaataggaggaaggtacaccaggggttggaaaaaccacactaggcaaagaacttgcgtcaa

SEQ ID NO: 342392 - DNA, 90 bp, Homo sapiens
cggagaggcgggcgggaggccgacagtcagtcggatgcggagactgcagccgccgcgggcgaagtgctagacctcacctcacgggacaga

SEQ ID NO: 342393 - DNA, 75 bp, Homo sapiens
aataaaactgaccatagccagagaacagccctccatcttgcagcccagaagaataatccagaatggctactctga

SEQ ID NO: 342394 - DNA, 100 bp, Homo sapiens
gtgaatgccacacccttcaagattgctcgaggccagattcttgctcacttgtggcatctgggctactcaccagaagatatcattggcaacatctttcgag

SEQ ID NO: 342395 - DNA, 75 bp, Homo sapiens
acctgggcgtccccaacgggcgcatgatttgaacatggaattcaatccttcagatcatcctcgggccagcacaat

SEQ ID NO: 342396 - DNA, 100 bp, Homo sapiens
gacagcttcagggcccggagtactagtctcaacgagagacccaagaggtacacggtcctcttctcgcacggcaatgccgtggacctgggccagatgagca

SEQ ID NO: 342397 - DNA, 96 bp, Homo sapiens
gatggtgttaagaaactctcagtttgtgtttctgagaaaggtatatgtctcgagtccacggtatgcaccctaaagagaccacccgtcagctgagct

SEQ ID NO: 342398 - DNA, 100 bp, Homo sapiens
cgccaactccgtatacggcttcactggcgcccaggtgggcaagttgccgtgcctggagatctcacaggtgctgaagggcctgaccatcactcattaagaa

SEQ ID NO: 342399 - DNA, 85 bp, Homo sapiens
ggaccgacgtgatgggtatcctggtgaaaggtgtagcagtcactcggcctacacccacagcatcgaccttgtgaacccagcgacc

SEQ ID NO: 342400 - DNA, 83 bp, Homo sapiens
attcgcagtggtcgcttcttctccttgagggcaaggagttggtgcacacctacaagggctgcatcaggtcccaggactgctac

SEQ ID NO: 342401 - DNA, 101 bp, Homo sapiens
gggcgcccgcccatcttctggcccggcgtggtgcagggcgcgccctggagggacccgcgtctggctggcccggatgtgccgtttgggggtgctaaagctgg

SEQ ID NO: 342402 - DNA, 97 bp, Homo sapiens
tcatcatcttcctcctgtgcaccctcttcatcagattcagccagcaacagtccttcgtacagattctccaggaggtgaatgactttgcaggccagcg

SEQ ID NO: 342403 - DNA, 101 bp, Homo sapiens
tcaatgatgatgatgtcacaggttctgtgaaaagtgaaaggttgttgaatgttgggtcacgaagatctcaacctggccaaagaagagaacccagaaagatc

SEQ ID NO: 342404 - DNA, 75 bp, Homo sapiens
cctggatgaagccaccagcgctttggatgccgagagcgagtatctggtacaaagtgaaatcacttcagcaaacac

SEQ ID NO: 342405 - DNA, 74 bp, Homo sapiens
ttcttgaacagacagaaggatgtaaaggatggaaaatacagccaggtcagatgctgctgagcgggggtccccgg

SEQ ID NO: 342406 - DNA, 74 bp, Homo sapiens
agtctacaaaggaagacttgtaacctggagaagagctctaagcgaaagacatgaggcctcagcctgaaatgagg

SEQ ID NO: 342407 - DNA, 100 bp, Homo sapiens
gaacagactagaaattgcaccacagatatatgggttggaaagaatcatgtgatgtacagctttatataaagagacaatctgaacactccatcttagcagg

SEQ ID NO: 342408 - DNA, 82 bp, Homo sapiens
tatctacaagacattatagagcacctgaagttattttagctccgccgcatgcaagagatgattgcaaggatgcaggcgcaga

SEQ ID NO: 342409 - DNA, 101 bp, Homo sapiens
aaaaatgtctctctatccatctctcgaagacttgaagatggtgatggaatttcctgataatgtgttaaatctcgatggacatcagaataatggtgcacagc

SEQ ID NO: 342410 - DNA, 51 bp, Homo sapiens
tccagctcacccactgccagcagagatgccataagttctgctaacccgagg

SEQ ID NO: 342411 - DNA, 75 bp, Homo sapiens
caagaatctcgtgctcaccggtttctcccacatcgacctggtggttgtgtcaaaccgattggtgacatctccatg

SEQ ID NO: 342412 - DNA, 100 bp, Homo sapiens
acaatttctacagcagagaccttgagggatatctttcttcactcctcttcacttcttcactacaagagccaaatactgatcgacaacttattgaaacttc

SEQ ID NO: 342413 - DNA, 82 bp, Homo sapiens
aagtcctaaatgccgactcagtggaacaatcttttgttggattgaaacagctaatcactgacagacttcaaggatgcagctg

SEQ ID NO: 342414 - DNA, 75 bp, Homo sapiens
gttctccagttaaggttggaaagatggatgctacttcctattctagagttggtccaggtagcaatgatgagaccc

SEQ ID NO: 342415 - DNA, 75 bp, Homo sapiens
ctcccaaagagctgggattacaggttgagttggactatggatcaggtactgtgctcagcatcagaaaatgggatg

SEQ ID NO: 342416 - DNA, 77 bp, Homo sapiens
agtcatttctactggacttcatgcttagatacatgtataacaaggattcttctctaatacttgatgttcctctgggt

SEQ ID NO: 342417 - DNA, 50 bp, Homo sapiens
gggcagacccggggagccaggactagatatggagtctcactctgtcaccc

SEQ ID NO: 342418 - DNA, 88 bp, Homo sapiens
cttaatgggaggccccgggaggccgaggttcggggtgctttcttctgcgacctggtactcatctacctcatcaaaaagagagagtttt

SEQ ID NO: 342419 - DNA, 82 bp, Homo sapiens
cagcctcgttgcggccatcgccctgccggaccgcgcctcaggctcccccaggcctccggtgtggctgtctctgatggtgtca

SEQ ID NO: 342420 - DNA, 89 bp, Homo sapiens
gtactgtggcttccatgaagataacattccccagctggaagacgtttctcagttcctgcagaaatgatgccaatgggtggaatgatgcc

SEQ ID NO: 342421 - DNA, 75 bp, Homo sapiens
atgatgaggtttttgagaagaagcaaaaagagatggatgaagctgctacgaaagaaggtgcatttccagtcaccc

SEQ ID NO: 342422 - DNA, 82 bp, Homo sapiens
gaaaatggcagagaatacaaatttgatgtttcgtcagagttactagagagactaaggtgtcagtatgttcttcaagctgctc

SEQ ID NO: 342423 - DNA, 152 bp, Homo sapiens
tgggcagagccgctacacacgggccaatctggctagtaaaaaggacagaattgaatcacttgaaaagaggctcgaggccatctggctgctgtgcacaggcgctcgtgaggctgccttccggaacattaagaccattgctgagtgcctggcag

SEQ ID NO: 342424 - DNA, 89 bp, Homo sapiens
gttttctatcagatgttccacgtaataatgctggaacatcatttacagcgagcaatttcagcacagcaagtgtttagagaaaaaaaaga

SEQ ID NO: 342425 - DNA, 82 bp, Homo sapiens
ctctacaccatcgacaccgaaaactccaccgtagcccttgccaaaggtcaaaatgcagatcttcgtgaaaacccttaccggc

SEQ ID NO: 342426 - DNA, 100 bp, Homo sapiens
gggagagcgaggcggggccgccggggccgccatggagcccgactcggtgattgaggacaagaccatcgagctcatgggaagagcatggaggaaatcaaga

SEQ ID NO: 342427 - DNA, 75 bp, Homo sapiens
aatcacagactcctatttgaagtatttgacgaaaatagactgtgcaagcagctaatgactcagtctgtagactcc

SEQ ID NO: 342428 - DNA, 75 bp, Homo sapiens
tgcctacggaggtggcagccatctccttctcggtcaatgtgcgaaatggaatgagcttgcatgactgccttatga

SEQ ID NO: 342429 - DNA, 74 bp, Homo sapiens
tggtctaaagcttcggcacaagggcccaactggaattccacttacggggcggcgactggcggcgcgatggacct

SEQ ID NO: 342430 - DNA, 91 bp, Homo sapiens
ccgggaggaaggaacgaggcaaggagctaaagcagcgtgcgttcagccctgggcagaaaaatatggctcaggagactaaccagaccccggg

SEQ ID NO: 342431 - DNA, 50 bp, Homo sapiens
gaaagaggatgaacacagctctacgtcaaaatgcagatcttcgtgaaaac

SEQ ID NO: 342432 - DNA, 50 bp, Homo sapiens
gacagcggccccgccgcaccagagcaggtccgtaaaagccctgggctcag

SEQ ID NO: 342433 - DNA, 75 bp, Homo sapiens
cctgaagtgtctttggtccaacgttgttccaggtgttggggatgtcctttgcactgaccctgaactgccagattg

SEQ ID NO: 342434 - DNA, 82 bp, Homo sapiens
tcctccccagcatgtcagcatgaccaagcgcctctactacctctggatgtgaaacggggtctctgggggatccagtgacgtg

SEQ ID NO: 342435 - DNA, 82 bp, Homo sapiens
gatatagataagaatgctgatggtttcattgatctagaagagtatattggaagccagcagacctgcagaacttggctcccgg

SEQ ID NO: 342436 - DNA, 82 bp, Homo sapiens
ccctcagctccacattgagagcaaaatctacaagatgatgcagggaggaggtgccagaaccctgtggagcatcatgaactgg

SEQ ID NO: 342437 - DNA, 82 bp, Homo sapiens
tctcagcaagaacgggaacaaaactctgacggaattggaaaatattgaagtgacacaaggcatgtcagctgagacagcagta

SEQ ID NO: 342438 - DNA, 101 bp, Homo sapiens
gctaaggaattcccggcccctcagggccacggctttagcggtgtcttttgcgcctcctgacaaggtgatccgggcgggccccgcaggaattttatcccctc

SEQ ID NO: 342439 - DNA, 101 bp, Homo sapiens
gctaacggacagactagccttctatctctgtggcaggaaaccagggttttctagtaccttcacaggagaaaggagacccaaagatgaccaagtgtttgaag

SEQ ID NO: 342440 - DNA, 75 bp, Homo sapiens
gcggccgtcgcccaggagtcatcggacgccagaatctgaaaaatgttcgttggtggcctgagctgggatactagc

SEQ ID NO: 342441 - DNA, 95 bp, Homo sapiens
ccgctcgtcccgctcgtcatggcctacccgggatacggaggagggaacaactctgctcatggtgattacatgcaaaataacgagagcagcttaat

SEQ ID NO: 342442 - DNA, 100 bp, Homo sapiens
ctcacaatgggaacatgtacacctcatccctgtacgggtgcctggcctcgcttctgtcccagccgttaattaaggaaaagttgagccagggcgtgaccct

SEQ ID NO: 342443 - DNA, 100 bp, Homo sapiens
attgcgcccagacgggccggcccagagctcccgggtcgtctttcgtgtggccgcgagaacaccggagccggagcgatcgccgagagcaaagagcagctgc

SEQ ID NO: 342444 - DNA, 102 bp, Homo sapiens
cttgccgctgctgtcctgcgaccccaagcaggttgaaatcacaaagattagacacctttttagataggtgttcttcagcaccactgacaacacggttctgac

SEQ ID NO: 342445 - DNA, 75 bp, Homo sapiens
cactttgaaggaggatgctccagcaggcttcctgtgtccagtaccggttagtggtccgggatgtgaacacccttc

SEQ ID NO: 342446 - DNA, 90 bp, Homo sapiens
caagaagagaaactgaagaataacaacagagatctatcaatgaaaaatggctacaaacttcctagcacatgagaagatctggttcgacaa

SEQ ID NO: 342447 - DNA, 114 bp, Homo sapiens
ccgccatggagcccgactcggtgattgaggacaagaccatcgagctcatgtactatactggcaattgctggagaagattttgcaattgttgcttctgatactcgattgagtgaa

SEQ ID NO: 342448 - DNA, 100 bp, Homo sapiens
gccttgactatcaaaaacacagatatcgccaaggagctctgccttcctcccgtgaaactgcactgctccagggcatgatggatgaggaagggaaccagtt

SEQ ID NO: 342449 - DNA, 99 bp, Homo sapiens
tacaatagcagattctaatcaaaatatgcagtctcttttaccagcagaaccgttttgattaaaagtaacagtggtccgttgatgttggtatctcctcag

SEQ ID NO: 342450 - DNA, 100 bp, Homo sapiens
ataaaattaattgaaggcagcaaaaggcacaggcatcacacccatgttgcagctcattcgccacatcaccaaggaccccagtgacaggaccaggatgtcc

SEQ ID NO: 342451 - DNA, 76 bp, Homo sapiens
gaggagcattccaggatcttaaagaactagagagactgattttctgccgtctcttggcaaaaatggcaaataatga

SEQ ID NO: 342452 - DNA, 100 bp, Homo sapiens
ttacgtatttgtgtgacttgactcttcaaacacaaaggtgtgttgaggctcctggaacacggggaggagtacgtattcaccctgcctagtgcctacgccc

SEQ ID NO: 342453 - DNA, 83 bp, Homo sapiens
ctacggtgacctgaaagtgggggatcaggtctggctgtttattgatgagatgatatcatcaagttgaatcgaaaggaagggaa

SEQ ID NO: 342454 - DNA, 109 bp, Homo sapiens
ctgcgcatccaccccgacggccgagttgacggggtccgggagaagagcgaccctcacaatcatgatacatggtgatggcttgcagagtcgtaaacaaaagaagacacat

SEQ ID NO: 342455 - DNA, 98 bp, Homo sapiens
cgaagcaaggatttccgggactacctcatgaggaatgttacgttcataacttactaaggattagtgtatattttccaaccttgaggcatgaaattctg

SEQ ID NO: 342456 - DNA, 100 bp, Homo sapiens
tgggagcagaggaagccttgaggacctactcacagataggaattgaaggaggatcagctgatttattcggaggatttgctgactttggctcagctgctgc

SEQ ID NO: 342457 - DNA, 96 bp, Homo sapiens
gtctggactgatctccatgtcctgttgtggggcttttacagcctttgggggttatggttttgtgaaattcacagatgaactggaacagaagcgagc

SEQ ID NO: 342458 - DNA, 75 bp, Homo sapiens
agtcgtgctgatgtcatcatcacatcagggggtgtatccatgggggaaaagataattgacaataggctcccatgg

SEQ ID NO: 342459 - DNA, 100 bp, Homo sapiens
catttagaacgatgtgaacatcgaatcatggaatcccttgcatggctctcagactatacaggctccaacccaagttccagtggttgtgtctcctaggaat

SEQ ID NO: 342460 - DNA, 90 bp, Homo sapiens
cacctatgagacttcatctgtgtgatgaggacggggacttggttgccttttccagtgacgaggaattgacaatggccatgtcctacgtga

SEQ ID NO: 342461 - DNA, 100 bp, Homo sapiens
ggggagccccgggagccgcacggatccatcagttacacaagtgacaagaaatgttccaccaggacttgatgaatataatccattctcggattctagaaca

SEQ ID NO: 342462 - DNA, 75 bp, Homo sapiens
ccgctcaccatctatggcatccggtgatgataatgaagataattcaaatgatgggacccagccatccaaaaggag

SEQ ID NO: 342463 - DNA, 83 bp, Homo sapiens
caaatactctgaggggtacccgggccagagaagcaaggtctcgctgtgttaccctggctggagtgcagtggctacttacaggc

SEQ ID NO: 342464 - DNA, 100 bp, Homo sapiens
cacaggtagccctggacggcattcagtgttttgtgcacagccagaggacaacacatcacacacaagaaacagttgtgctcatgtgatgggggcctcagca

SEQ ID NO: 342465 - DNA, 100 bp, Homo sapiens
cagaacgcagatcagaggtagtcggacctttcccgctggcgcgcagcctcagctagtgaatctacagacctattttctcaggagctcagcctggccttac

SEQ ID NO: 342466 - DNA, 50 bp, Homo sapiens
atggagtgcctccaaaggttgctgagctgtgtcagcgtgttatgatgccg

SEQ ID NO: 342467 - DNA, 75 bp, Homo sapiens
cgggagatcgcggacgggttgtgcctggaggtggaggggaagcctgacaggagcaatggccaccagcaggtgaag

SEQ ID NO: 342468 - DNA, 75 bp, Homo sapiens
tcagcaagagctttctggaagaaaggaaatgttaggatcactttattctgaagtgatcactttgtaacgtatgag

SEQ ID NO: 342469 - DNA, 90 bp, Homo sapiens
ggaccaccgggcgctggtctgctcccagccggacaactacacctttgcccaacctgggattcaaatgaaagtgaaaatgttagaagaact

SEQ ID NO: 342470 - DNA, 100 bp, Homo sapiens
tgggagttgggggcaaggagaagatcctgtaccctggcgtggcccagagcatcaacagtgatgtcaacaacctcatggccgtgttgaacatgagcaacat

SEQ ID NO: 342471 - DNA, 88 bp, Homo sapiens
gctcccgggtcatcagccactacgccgggcaggatgccacggcgcagttgtgtagcagttgagtaatgctggttagctgttaaggtgg

SEQ ID NO: 342472 - DNA, 75 bp, Homo sapiens
cagtgacggaatgcctccatacatattgcttgcacacatttagatgtggatttagtctgcataactgtaacagag

SEQ ID NO: 342473 - DNA, 97 bp, Homo sapiens
ttcaaaaggagcagaaaactttacaggaattccgtcagaaatcgctggactgggagaagcaacgcttgatttatcagcaacaggtatcttcactgga

SEQ ID NO: 342474 - DNA, 99 bp, Homo sapiens
cctaacgtttaggcacattacaaaagctcaggagaagacaagaaaacgacagcagcctataaaactagagcctttggtgtcagctgtgatgcatgttta

SEQ ID NO: 342475 - DNA, 97 bp, Homo sapiens
acaggctccggctcatggcatcaagtggcatccatcataagttcaaacgatatgtcaataaacttcgaagcaagagtacagttttcaaaaagaagca

SEQ ID NO: 342476 - DNA, 100 bp, Homo sapiens
acatgctcttcactggcctcttcaccgtggagatgatcctgaagctcattgccttcaaacccaagttggaattaacgacctctggaaagatgccttttat

SEQ ID NO: 342477 - DNA, 73 bp, Homo sapiens
gatacaccttttccacagggaattgagttggaattgaatgatctggcacgggaccctccagcacagtgttcag

SEQ ID NO: 342478 - DNA, 57 bp, Homo sapiens
gtgaccgagaccgcggccgggaccgaggaaatacatgctacaggatttaactatcag

SEQ ID NO: 342479 - DNA, 89 bp, Homo sapiens
cttaacaggtatctgctcctcatggcgcaggagcatctggagttccgcctgccgatagtgtgtgtaccatatcagtggcgtgtaactat

SEQ ID NO: 342480 - DNA, 99 bp, Homo sapiens
agacactgactgaggaccatggaaaggtgggagaggacgtgcggcttctctgcttcctttgaacagagctctaggcaaaagtcaacaactctagcttaa

SEQ ID NO: 342481 - DNA, 74 bp, Homo sapiens
ctcgacaacagagtgggaactttctgtcttgtgatccattgcctggtgcatgccgtgataggggtgctgatgga

SEQ ID NO: 342482 - DNA, 90 bp, Homo sapiens
cgggacattaccaaaccactcattttaggagagaaggatattcctggactgactgatactacagtgcctcgccgcctgggccccaaaaga

SEQ ID NO: 342483 - DNA, 102 bp, Homo sapiens
tactcatgggcaaggaggttggcttcttcatcatccgggccagccagagctccccaggggacttctccatctctgtcaggaagatgaagtcctcagtacatt

SEQ ID NO: 342484 - DNA, 82 bp, Homo sapiens
agctgaccctgggagacatcgacggatgcagcagtctcggccctggctgctctatgcagtgaatattacatgaaggagccgg

SEQ ID NO: 342485 - DNA, 75 bp, Homo sapiens
ttgttgggaaaggaattacctttgacagcacaccgttccggaaggcaaaagccttgtatgcctgcaaagctgaac

SEQ ID NO: 342486 - DNA, 74 bp, Homo sapiens
tgtagcgtcagatccttgagtgataaaggagtagagggcacactatgtggtggggtggaacagtttgactgctg

SEQ ID NO: 342487 - DNA, 82 bp, Homo sapiens
ccaggacgaaaattttgtcagtaaagaagagttccaggcagtggagaagaagctggtgtctattatcctcccagtccacaac

SEQ ID NO: 342488 - DNA, 75 bp, Homo sapiens
cccttcccttccacagtgcaaggaagacgccgagaatctacctgttactcgtattttggacaatcttatggagat

SEQ ID NO: 342489 - DNA, 103 bp, Homo sapiens
aaattagacaagaaacattggaaaagaaatcctgataagaactgctttaatatttctcttagaagatgacatccatgtttcctgatgcttgttttattcatac

SEQ ID NO: 342490 - DNA, 50 bp, Homo sapiens
cagaaccacatcatgaacttgtgagcaagacgtggaaggtgattgcagag

SEQ ID NO: 342491 - DNA, 100 bp, Homo sapiens
caagcacaaagagcttgctccctacgatgagaactggttctacacgcgagctggtctatcatctcatgaagaactgctgggagacagaggcgtcctttcg

SEQ ID NO: 342492 - DNA, 90 bp, Homo sapiens
actatggcagcagcgtggcctccgccaccgtgcacatccgaatggacggaagtgaaaatgtgacaggattggacctttcagatttcccag

SEQ ID NO: 342493 - DNA, 75 bp, Homo sapiens
tgtggagaaagtcgtcttccacttgcacgaaagctttcctaggccaaaaagagattgcgtacccactgcagagtg

SEQ ID NO: 342494 - DNA, 100 bp, Homo sapiens
gttgcagttgtgtagtagttaagatggggtcgaggatttggtcttttgggttccatttttggaaaggatggtgtattaaaccagccaaacagtgtctttg

SEQ ID NO: 342495 - DNA, 100 bp, Homo sapiens
tgaatgtaacaaatgtgatgacaagaaggagagatctctgctgcctgcattgagggggagcatgacttcggcaacttcacctatcattctgaaatgggac

SEQ ID NO: 342496 - DNA, 100 bp, Homo sapiens
tgcggagggcttgaggctcgcgagcctccttcgccgcgccccacttgctcgtgcactttacacacatgaggtgctggagaatctggtaaaagcaccattg

SEQ ID NO: 342497 - DNA, 82 bp, Homo sapiens
cgaggactccagcacaccgaggatggagaaggaggagacaacccgggagctgctgctgcccaactggcagggtagtggctcc

SEQ ID NO: 342498 - DNA, 75 bp, Homo sapiens
ccaaggcccttagaggctgaaggtgcccagctgcagggcggcagtaatgagttaagtgggcagaccaacatccac

SEQ ID NO: 342499 - DNA, 100 bp, Homo sapiens
tgctttagccaccaaagacatgaggaaatcacagggctgaatattctgaactggtcgaaacattactatcaagtcagcaagacccagttatttaccagag

SEQ ID NO: 342500 - DNA, 100 bp, Homo sapiens
tctcgaggaatttcagcagctctatgtgaagggcacctttcacagccagcaggcattggaatatggcaccaaactcgttggaggaaccactccagggaaa

SEQ ID NO: 342501 - DNA, 132 bp, Homo sapiens
caaaagcagctggaggaggctgaggaggagaggacagaggtgcctggggcaacctccaccttgacggttccagcaacagcttgcacaactacagaaagaaaaatcagagattctgaaaaatctggcattata

SEQ ID NO: 342502 - DNA, 49 bp, Homo sapiens
cccatcctgggctcccccaccaagcgccgcccctggctgggggcacccc

SEQ ID NO: 342503 - DNA, 97 bp, Homo sapiens
ttgatgtgatcgtaatagggacggggagagcctggggatgtacaggagatgcctgctccagaatctcctcctggaagggatccagctgcaaatttga

SEQ ID NO: 342504 - DNA, 101 bp, Homo sapiens
agatggcgaaggtctcagagctttacgatgtcacttgggaagttcctctttagagagcaaagaccacctacaggcaccagacacagaggaacacaacacaa

SEQ ID NO: 342505 - DNA, 83 bp, Homo sapiens
ggaccctgagatcgtcaagtctcccagcgaccccaagcaataccgacaatgcagatcttcgtgaagactctgactggtaagac

SEQ ID NO: 342506 - DNA, 90 bp, Homo sapiens
gctgccctggccttgcagatcaccaacctcttgaccagctgtcggaaaaggtaacagaagatggaactcgaaatcccaatgaaaaaccta

SEQ ID NO: 342507 - DNA, 82 bp, Homo sapiens
agcaagcggaggacctacgccggcctgggttggatcgtcaaacgcaggctactaccttggtccatcaaatttttggagggta

SEQ ID NO: 342508 - DNA, 100 bp, Homo sapiens
gacatgtgttgtgcccctggaggaaagaccagctacatgggtacaggctgagaggctgagaaatcatcccctgaataactttttcctctcgattcccatc

SEQ ID NO: 342509 - DNA, 88 bp, Homo sapiens
agctttccatccagtggtctttcttccataagaaggagatggagccaatttctgaagaaggagagacgaccatcttgcaactagaaaa

SEQ ID NO: 342510 - DNA, 100 bp, Homo sapiens
tcgtcgtggagttcatcctcacacacgtggaccagctctttgggggtgctgccctctctggtgagagcaaagagcaggtggccaactcagcttttgtgga

SEQ ID NO: 342511 - DNA, 74 bp, Homo sapiens
caacaggctacccacctttccctggatatcctatatctttagaggacattcaagcttttgaaaagacatacaaa

SEQ ID NO: 342512 - DNA, 83 bp, Homo sapiens
cagaaattctattgagaacatagccaatgagactgtgaacgtgctgtggaatatatgggatgaagatgcccctgctaagattc

SEQ ID NO: 342513 - DNA, 74 bp, Homo sapiens
agtcaccaagaaattactgtctcaagtgatacggataccatacttgcagagctccttcagatacataaagaaca

SEQ ID NO: 342514 - DNA, 83 bp, Homo sapiens
aggacatcaagcccatgcgggaccagatcatccgcgtgaagcggttaaccccaaagattggctttccttggagtgaaatcagg

SEQ ID NO: 342515 - DNA, 105 bp, Homo sapiens
caccaggactgaccgctgccgcccagcacgtccagtatgccaccacgggctgttccctgaccctgcaccatacggagaaaccagaacatgaagacatatgtgaat

SEQ ID NO: 342516 - DNA, 97 bp, Homo sapiens
ctccacgacatcccggaagccgaaaaatgaatactagttgatcagcaagtttggaaaatagaagatgtcttcacattacaagttgtgatgaagtgta

SEQ ID NO: 342517 - DNA, 100 bp, Homo sapiens
catgaacatgaacacaaaagcaaacaggaagaagttggtacgggcactcttcatagttcctagacaaagatctcatggtggatgttcctggacatggaaa

SEQ ID NO: 342518 - DNA, 80 bp, Homo sapiens
gggcgagcggctgtgtggatgtcggcgaagccgcgggcgaggatgaaacgaggaggaagagatagtgaccgtaattcatc

SEQ ID NO: 342519 - DNA, 75 bp, Homo sapiens
agctcagcaattcttaccttatcgatcctgtcctcggtaccgtgggctttgggtctggcctccacgggtgggcct

SEQ ID NO: 342520 - DNA, 145 bp, Homo sapiens
gccgagggaaagcaagaatatctgttcctgcaactgcactgattctagaaacactctctattcgaactctcatgagtcgcaatgtatctgctgagcaaaaagatgaaaacaaagaagcaaagcctcgatccctacgcttcacctg

SEQ ID NO: 342521 - DNA, 95 bp, Homo sapiens
gaggaaggagactgacgatgtgttcgatgcattgatgttgaagtctcccacagtgaagggcctgatggaagcgggttacattccgaaaagcaaat

SEQ ID NO: 342522 - DNA, 101 bp, Homo sapiens
gcttgggagcaggaagatgtcgaatgaacttgagtaaactttggagtcggagtttaaaactagcttatactctacttaataaactgacaagtaagaatgaa

SEQ ID NO: 342523 - DNA, 51 bp, Homo sapiens
caagccaatcccaggaggaaaaacgaaaccaggcgatgcggaagaagctaa

SEQ ID NO: 342524 - DNA, 100 bp, Homo sapiens
cagccagatgggtgtatggatcctgtacggcagcagtctgggaatgccaacacagaaaccttgccatcaggtcctcccaaaccgaaggaccctgtatctg

SEQ ID NO: 342525 - DNA, 78 bp, Homo sapiens
cgctctccaggaggcgggcacattcaggtctcctctgagcctccggcctccataagacccaaaacagatgacacctct

SEQ ID NO: 342526 - DNA, 80 bp, Homo sapiens
caagtcaaacgcagaaggactgcctcactgagcaaccaagaagacggggtctgactgtgttacccaggctggtcttcaac

SEQ ID NO: 342527 - DNA, 100 bp, Homo sapiens
ttccggagtggggaagacctgcgtcctttttcgtttttcggatgatgccttcaatactacctttatttccaccatagttaccttatcccatatcacacaa

SEQ ID NO: 342528 - DNA, 75 bp, Homo sapiens
attccaagtaactcttatttggtaccaaccaagaagctgaagaaatatgagaaagaatatcagacaatgcgagag

SEQ ID NO: 342529 - DNA, 100 bp, Homo sapiens
catcaacaaagaagaccacacactgggaaacatcattaaatcgttctgagatgcagtaaaatcgctggtgtgaaagtagcagaaattacagagctaatat

SEQ ID NO: 342530 - DNA, 100 bp, Homo sapiens
cgctggagcggagccggccgtacgcggtgctgcgagggcagaacctgggtacttcttgcaagggatatgcattagcacatactcaagaaggggaagaaaa

SEQ ID NO: 342531 - DNA, 100 bp, Homo sapiens
caaggcggcccggcgggcgactggacggccggacagagccagggccaccagagaagacagaagatgaggtctaccaggcccagctgcccagagcttgcta

SEQ ID NO: 342532 - DNA, 100 bp, Homo sapiens
ggcggccgaacgatgtgcgagaactgcgcagacctggtggaggtgttaaatgaaacctaaacccaccaagggacgaatgcgcatccactgcttagagaat

SEQ ID NO: 342533 - DNA, 74 bp, Homo sapiens
aacacctgcttcatgaactccgctttgcaggttagaaaggcagtggacgctctcttgacgcattgcaagtccag

SEQ ID NO: 342534 - DNA, 100 bp, Homo sapiens
caaataagctatatactttggttacctatgtacctgttaccactttcaaaagttaatttggagtggcccctggagtcagtttcctacaccatccgaggcc

SEQ ID NO: 342535 - DNA, 74 bp, Homo sapiens
cttcgagcagcctctcgccatttcccggaacaccttccaccatgaccacctcagcaagttcccacttaaataaa

SEQ ID NO: 342536 - DNA, 100 bp, Homo sapiens
aacattattgctatgggatttcctgcagaaagacttgaaggcgtatacaggaacaatattgatgatgtagtaagttgaggctaagacgtctgaagccagg

SEQ ID NO: 342537 - DNA, 90 bp, Homo sapiens
ctcacctgaggtgaaccttcgaccttggacttctcagcctccagaatggagctcattaccatgatgctgttggtcgatgtagatcagcga

SEQ ID NO: 342538 - DNA, 75 bp, Homo sapiens
aagaccccgacagtgaacagactaagcatggccgaaacagaagccctgtcgaagcttcgggaagacttcaggatg

SEQ ID NO: 342539 - DNA, 100 bp, Homo sapiens
ggccgagatgtctcgctccgtggccttagctgtgctcgcgctactctctctttctggcctggaggctatccagcatagcagaccccacgttagctgaaat

SEQ ID NO: 342540 - DNA, 100 bp, Homo sapiens
gaaggttcaagatgtaaagaagactattcagaaaaagatgattgacgctgctcagatgaaggattaccaacgtgaattagaagaagctcgtgcatccaga

SEQ ID NO: 342541 - DNA, 100 bp, Homo sapiens
ggcgagttctcggtcaccatgtggtcctcaggacccactgatctcagcatgaagagacaattggcgactagctcaggatcctccagcagctcaaactcca

SEQ ID NO: 342542 - DNA, 50 bp, Homo sapiens
ggacggtcactcagcctatggaggttggtgatgacaaaactgtgaagcag

SEQ ID NO: 342543 - DNA, 50 bp, Homo sapiens
gaacggaaacaaagttattttgctcgccggtctgtgtgatattagtgaag

SEQ ID NO: 342544 - DNA, 141 bp, Homo sapiens
cgacttcggcggggcccaggtgagaaaggcccacctgtgtcctggttgagggtctccagggttctttggggcccgagagtacacagtcattaatgaagcctgccctggagcagagtggaatatcatgtgtcgggagtgctg

SEQ ID NO: 342545 - DNA, 100 bp, Homo sapiens
agccggtggagctcacgtttattcaacagggttagtatcattcaaggatgtggctgtggatttcacccaggaggagtggcagcaacttgacccttctcag

SEQ ID NO: 342546 - DNA, 100 bp, Homo sapiens
caaagcctacagtaaaggaaaaggggattttgctcgcaagtgatttaaagggagtgatagtcactctgagtgatgatggtcacttgcagtgttcatacct

SEQ ID NO: 342547 - DNA, 78 bp, Homo sapiens
tctgttgtgacagacacttcacatactgctgcccagtgtgccatcataatgtttgatgtaacatcgagagttacttac

SEQ ID NO: 342548 - DNA, 100 bp, Homo sapiens
gtgaaggtgatgaggttgaagatctctatgagcttttgaaacttgttaagtgtggaaaagccactggcagtgattcaagtggtgtcattgatctcacaat

SEQ ID NO: 342549 - DNA, 75 bp, Homo sapiens
aaaaagtcgatctggagcttttcccctccccggaaatttaaaagcctgttgattcaagaactttctaaagtattt

SEQ ID NO: 342550 - DNA, 100 bp, Homo sapiens
gcgaaggtctcagagctttacgatgtcacttgggaagatcagtcgcatcgaatacattcattcaaagaacttcatccaccgggatgtgaagccagacaac

SEQ ID NO: 342551 - DNA, 92 bp, Homo sapiens
ctattattacgcttcagagcattttcgaaactgttgggcgggagctgctgctccatctgattgactatctcgtaaccagtgatggcaaagac

SEQ ID NO: 342552 - DNA, 75 bp, Homo sapiens
cagctctgtctatcctaccaagataaagcttcaccaagaaggttgcccaggaaacgggcacagaagagatcagtg

SEQ ID NO: 342553 - DNA, 98 bp, Homo sapiens
ttcagtatcactcgctcccttgatgatcttgagttcgatcctttggtacagaagacagaccgacagatcgtccaataccacctcgagatgaagtcttt

SEQ ID NO: 342554 - DNA, 101 bp, Homo sapiens
tgcccagaccttccccattcctgctcctgttctgaaaccaatgaagtggctctgggaccagcgggcccaccatatattccagaagatattcttaagaattt

SEQ ID NO: 342555 - DNA, 106 bp, Homo sapiens
tagtgtatgtatatgagagtttcttgatctctttatctgtggatgaacaggacacagcattgttggttttgccatgtactattttacctatgacccgtggattggc

SEQ ID NO: 342556 - DNA, 95 bp, Homo sapiens
gctgcctctgcctggcgttgctttgcctgggcggtgcggacaagcgcctgcggttagcactctacgtatatgaatatctgctccatgtaggagct

SEQ ID NO: 342557 - DNA, 82 bp, Homo sapiens
cacaggaatatcgagagcgtcatgaacccgagctatagagaaaggagatgagggaaccctactctggaaactgtcagtccca

SEQ ID NO: 342558 - DNA, 82 bp, Homo sapiens
tctggaaccgggatggcgacgtctacactgagtcggaggcgaagacctgcctagagctggaacgttacctccagagcgagcc

SEQ ID NO: 342559 - DNA, 74 bp, Homo sapiens
cacaactatttcttatgtggacttaaaggaattcaggtctatgttaacaatgaatgggcaaccagtgttgggga

SEQ ID NO: 342560 - DNA, 100 bp, Homo sapiens
ggacgctcggtcccgcgctgcgcatccccgcggacgccacagcgctgaagtactagccggacatcatgagtggctgtcgggtattcatcgggagactaaa

SEQ ID NO: 342561 - DNA, 90 bp, Homo sapiens
gggcccttagagtcttggttgccaaacaggctacagagtgcggtggcgccagcacagaactctgctcaatgtccctctgtgctttcacga

SEQ ID NO: 342562 - DNA, 100 bp, Homo sapiens
aaaattacttggagcaaagggcagtcggcggagcttcgccaaggctggcgcagtcgtactaaggctcgtacgtctgcatcgattatcttacgtggggcaa

SEQ ID NO: 342563 - DNA, 89 bp, Homo sapiens
gtttcaaaagcagaacttctggaaaccgtggtccaagcagctcagtctgaggctaaggttgtatctcagtatcatgagctggtggtcca

SEQ ID NO: 342564 - DNA, 50 bp, Homo sapiens
agtcccaggatgactactgtgtcaagcttctccagggaaagtgaccgagg

SEQ ID NO: 342565 - DNA, 82 bp, Homo sapiens
acgagattggggccatgccaaggactatgtggagttttagttactatccagcagaaaacttgatagagtacaaatggccacc

SEQ ID NO: 342566 - DNA, 88 bp, Homo sapiens
atgtgtattgtgaaggaaatgatgtctatgatgtcatgctaaatcagtgattacagtggcgagatcttgaacaactgctgcgtcatgg

SEQ ID NO: 342567 - DNA, 100 bp, Homo sapiens
ttgaatctcccgctcccttgaggctggggttgcgtctgttgacgcggccgactacaatcccgagggcttccgagtggacctgccaatcaagtcggcccgc

SEQ ID NO: 342568 - DNA, 100 bp, Homo sapiens
gcggacttctacaaggaatttttaagtaaaaattttcagaagcacatgtattataacaggtactttacaaccttggaacagtgactccaccctgaacagc

SEQ ID NO: 342569 - DNA, 82 bp, Homo sapiens
cgaccagatcaacgccagcaagaacgaggaggacgcgggaacatgaaaggctcccggagcagcgctgactcctccaggaaac

SEQ ID NO: 342570 - DNA, 75 bp, Homo sapiens
agccccggaggcagagcggctgccatgacaccattcgcttttcacccaagatgatttgatgtcttataaaactct

SEQ ID NO: 342571 - DNA, 80 bp, Homo sapiens
gaggcctccccagccatgtggaactggccgtctggcttgcctgtgttcagcccacggtgttcccatggagcctctccttc

SEQ ID NO: 342572 - DNA, 100 bp, Homo sapiens
cttcccttttttactccattcaagagcagcattcataaatttccaggatggattggatgctttggtatatgatttggattttcctgccttaagaaaaaac

SEQ ID NO: 342573 - DNA, 83 bp, Homo sapiens
aaggccgaagccgagcagaggatctaaatacaagagtggcctattgccacgaaggaagacaggaggtccgaggagaaagcggc

SEQ ID NO: 342574 - DNA, 50 bp, Homo sapiens
gggaattgaatagatgtctccctattgagcagcccgacggccatggaggc

SEQ ID NO: 342575 - DNA, 75 bp, Homo sapiens
ggaggtgtggccactctcctcctcatccttgtcatcattggagagcgaagacctggagaaacagaacgcggctct

SEQ ID NO: 342576 - DNA, 75 bp, Homo sapiens
aggacttcaaggatttctacctttccatagcagaactcccccactggaaaggattctgaaagaaatgaagtcagc

SEQ ID NO: 342577 - DNA, 98 bp, Homo sapiens
gtcaaaggactctcttctaggagacaaggggcagacagctagctcttccttcaaaagttcctgccttttccgacaaggacagcctgggggatgagatg

SEQ ID NO: 342578 - DNA, 74 bp, Homo sapiens
tttgaatgtgatagagaccagatgtactacaatctgctaaaactgtatagcaagcctgaaatagcatgtgaaaa

SEQ ID NO: 342579 - DNA, 100 bp, Homo sapiens
gaggccatcaggggccttgataacacagagtttcaagctgcccatgatggggggagctttcatggactcgcccaacgaggacttcagcaccgagtactcc

SEQ ID NO: 342580 - DNA, 82 bp, Homo sapiens
cgccgctgccgctgccgctgccgcacctccgtagctgactcgtattaaaggtggaagaaggtccatatctttttctgtgggt

SEQ ID NO: 342581 - DNA, 50 bp, Homo sapiens
cacagaccactcagagatgaaggcctcctgcagatgcagctgatcctgca

SEQ ID NO: 342582 - DNA, 100 bp, Homo sapiens
aaagaagaccacacactgggaaacatcattaaatcgctcgcgggattgatgtgcaacaagtgtctttggttataaattatgatctacctaccaatcgtga

SEQ ID NO: 342583 - DNA, 100 bp, Homo sapiens
gcccgagtcggccaagcatgggcaaccactcaggacggcccgaggatccggaaccaggttcttgccaggctgtgtgagcaggagcccgctgctcttcccc

SEQ ID NO: 342584 - DNA, 100 bp, Homo sapiens
accctagccaggtgaatggctcaaggacatgtctcaggaaggctatggaactagatctcaacctcctctggcccccggaaaacctaaccatgaagacttg

SEQ ID NO: 342585 - DNA, 75 bp, Homo sapiens
catcacttttgttgatgtccctggctttctacctggttatggaggttttgatgactatggtggctataataatta

SEQ ID NO: 342586 - DNA, 100 bp, Homo sapiens
aacgcggtccccggcacgcaccatctgttgccatcccggccggccgaggccattgcagcctcttctgtaggagtactgtcaccccagaagaagtccccac

SEQ ID NO: 342587 - DNA, 80 bp, Homo sapiens
ggaagctacacttttcaccaaggaactggtgctgcagcgagagatggagagaccagagaagagaacaagctgttgattcc

SEQ ID NO: 342588 - DNA, 100 bp, Homo sapiens
ggcgagatgcctttgttcaccgccaaccccttcgagcaagacgtgggtgatgatgaacagtctacacagatggctgcaagttgggaagatgataaagtta

SEQ ID NO: 342589 - DNA, 100 bp, Homo sapiens
cgtacctctttgctaaatcgaacactgtatacaatccagtgatttatgtcttcatgatcagaaaggtggatccataaagaacccagccaacccgcagagg

SEQ ID NO: 342590 - DNA, 100 bp, Homo sapiens
acagctggcccagttctgcaacatcaccacctgcctggctgtggtgaatttaggaggacttttactccaagcactcctggaatattggcctagaacacat

SEQ ID NO: 342591 - DNA, 74 bp, Homo sapiens
tcgactgcccagagtccgcggccggggcgcgggaggagccaaaaacctgtatatcatctccgtgaaggggatca

SEQ ID NO: 342592 - DNA, 75 bp, Homo sapiens
gttttccgatttcttgctggttgaatacctccctctccactcccatcttcagggcccaaacctgcaccactgact

SEQ ID NO: 342593 - DNA, 88 bp, Homo sapiens
ctgggcatcgggccctgtctgcaatacacctgcaggaagagctcgatcaggttcagccaccaccagcctatgagcctccagcccctgc

SEQ ID NO: 342594 - DNA, 82 bp, Homo sapiens
aactattcgcggagctggaatgactggcaacccagccattttgcagactctgatcacagtgaaacgttccatgggaacttgg

SEQ ID NO: 342595 - DNA, 97 bp, Homo sapiens
cacagttactttatcccttcatctgtggatgggcaggtagacatagctgacattgagaatgaagagaaccgctactgtctattcatggaactcctgg

SEQ ID NO: 342596 - DNA, 97 bp, Homo sapiens
tcatttagcgctatggaagatgaccagaggactagacctgaagtttcaaagcaaatgcagccctgaggatttggctactgcatataacaacaggggg

SEQ ID NO: 342597 - DNA, 82 bp, Homo sapiens
tgccgtccgccttctctgtcagctctttccccgtcagcatcccagccgtgctcacgcccgtggaccgggagcccgtggaccg

SEQ ID NO: 342598 - DNA, 101 bp, Homo sapiens
tgtcatcctcattgctactgccctctgcgctcctgcatctgcctccccatgtcggcttcttcaagcggaaccggccacccctggaagaagatgatgaagag

SEQ ID NO: 342599 - DNA, 98 bp, Homo sapiens
gtttgtcagaggttccctttctctgataaagagaagaataagcttacgtttgagatcttaagtaacctaggagacttccagtttctcttcattgatct

SEQ ID NO: 342600 - DNA, 99 bp, Homo sapiens
cgcgccgagccggaggccgcgtggacccgaaagccgctgggaaaagatgggagtcccagcttctggagacggggttcctggggatcttcctgtgccctc

SEQ ID NO: 342601 - DNA, 97 bp, Homo sapiens
cgagcacgagctgtgaggggattcacttgtgtgcggaactcctcggaaccatgcaggtttggatgcatctgctcagactacttctcatgaactcacc

SEQ ID NO: 342602 - DNA, 74 bp, Homo sapiens
gtcgggcgccacagtgccacccaaggagaagaaggtaatcacaagtgaagaagctgaaagacgaggacagttct

SEQ ID NO: 342603 - DNA, 100 bp, Homo sapiens
ccatattctcaggcacagagaaagggcaaaaaagacgtggctcaaattttcaacaatattctcagaagacaaattggtacgagaactcctactgttgaat

SEQ ID NO: 342604 - DNA, 100 bp, Homo sapiens
agaggtgtcggaggtctcatctttgaactactgccggagcttctgccaggatggagaacctaataaggggaaggaatcccccgcaataccagagaagtcc

SEQ ID NO: 342605 - DNA, 51 bp, Homo sapiens
atcccagcataattcggcaaagaagggcgtataccgcatctctaggagaga

SEQ ID NO: 342606 - DNA, 90 bp, Homo sapiens
gggaatagtgagaggcctctcgcgggacctgggccattttggtctccctttggtgaagcacaatcagtgtcagagatggctttggattcc

SEQ ID NO: 342607 - DNA, 83 bp, Homo sapiens
gcagttactgtatggtttgcaagcagcagtgtggctgtcaacccaagctttgcgattacagatacattccaccgttgatctgg

SEQ ID NO: 342608 - DNA, 100 bp, Homo sapiens
gctggaggctcgcaagaaagccaagaacaagcagctgggccatgaggaagaagggacttcctcgcccgaagagcgcgggcacagcaacgcagatgcggca

SEQ ID NO: 342609 - DNA, 100 bp, Homo sapiens
aagatgcggaggctgcctcggcggagcagaggaaccacacgctgatcatgtgaacacctacctcttcatgatgcaagcccaaggcattctgatccgggac

SEQ ID NO: 342610 - DNA, 75 bp, Homo sapiens
agaagtagctgaatgtgttactccattgctgaggagtggtgaaaggtgtagcagtcactcggcctacacccacag

SEQ ID NO: 342611 - DNA, 100 bp, Homo sapiens
aagaccccaggcaggggtggcgccaaagaagaatgtcttccaagcaagccacctctccatttgcctgtgcagctgatggagaggatgcaatgacccagga

SEQ ID NO: 342612 - DNA, 100 bp, Homo sapiens
tttccttcgtacccacagtgcttcatgagagttgcagaactgctttattcactgcagtggtgtgaagaattagataacccacctatttttctaattggat

SEQ ID NO: 342613 - DNA, 83 bp, Homo sapiens
ccctgcccggcccggcccggccgccccgccgcccccgcggccccggccggaggagacaggtgtttcccattaaacactaccag

SEQ ID NO: 342614 - DNA, 73 bp, Homo sapiens
ggaaggcgatactctcgctcacgcagcaggagcaggggacgaagttcctgaatgttccaatgtttcgaaatgt

SEQ ID NO: 342615 - DNA, 100 bp, Homo sapiens
acaagatactccagcaccgaaattgtggaggttccccgaggaaaccgtggcccgagcgccggccaccgcggcccgctgcgaccaggacagcgcccccaac

SEQ ID NO: 342616 - DNA, 50 bp, Homo sapiens
gcaagaaagctaagcattgatattcccaggaaacctgaaagtctaggaac

SEQ ID NO: 342617 - DNA, 100 bp, Homo sapiens
gaagaagggacacctttcacagctatcagggaagggctcattgtcatccccaagccaggccagttctccaggtggaactgtagtgtagcgacctcactgc

SEQ ID NO: 342618 - DNA, 76 bp, Homo sapiens
tcatgttacgacagcaatttgaggtcaatgggcatttcttcaaaaattgctctatatgcaatcagtgctgtctact

SEQ ID NO: 342619 - DNA, 50 bp, Homo sapiens
cctggatcgacaccctctacagcagccctgggcagtgacggggttcgggt

SEQ ID NO: 342620 - DNA, 75 bp, Homo sapiens
ttttaatcaacatcttggcaagagtcttctggtccctgttgacactcagattgatggacaacttttcttaattaa

SEQ ID NO: 342621 - DNA, 100 bp, Homo sapiens
gtcggactggagctctgggctgcggcgcacgccttgcccgcccagatctccctagagcacgaaatcctgctgcacccgcgctacttcggccccaacttgc

SEQ ID NO: 342622 - DNA, 91 bp, Homo sapiens
cggcgcggcggtcggagaagtggcctaaaacttcggcgttggacaatgcagatcttcgtgaagactctgactggtaagaccatcaccctcg

SEQ ID NO: 342623 - DNA, 83 bp, Homo sapiens
tgcaaaaatgcggtccctgggatgccttcgcgtcttctcttccctcgggtgacttgagagaaagatgctggtttcgagttttg

SEQ ID NO: 342624 - DNA, 124 bp, Homo sapiens
gatgataaagatgatgatatccttctcaaccttgtgggatgtgaaaactctgttactgaagaccacagagtattcagccatggcctcgctggctggtgggctggacgacatgaaggccaatctg

SEQ ID NO: 342625 - DNA, 74 bp, Homo sapiens
tgctgctgctactgctgttgctgctgctcggatttttagactctgaggagcagttggagctaatccacattatg

SEQ ID NO: 342626 - DNA, 88 bp, Homo sapiens
atcgagttagaagccaccagcaagaagtcagccaagagatgtgttaaaggctttatcctgtggataaacgcagagtgaacgagtttgg

SEQ ID NO: 342627 - DNA, 90 bp, Homo sapiens
gcagccaccctggtgatgaagctgcagctgttcatccaagaggtgaaccacgccgtggagggtgagcccgtggtagcagcagaagcaggc

SEQ ID NO: 342628 - DNA, 100 bp, Homo sapiens
gccgagcggtggcgtcgttgtcgccccctcctcgtcgggaagaatcgtttggtctcctgccgtgcccggtagcacaggcggagtgcagcggaggcccctg

SEQ ID NO: 342629 - DNA, 97 bp, Homo sapiens
gcaaatcaagaggttccaatcttcgtgttcactttaaggttaatccctatatcctgaagaagaacatgatcctcatgacaaatcatttctatgcagc

SEQ ID NO: 342630 - DNA, 100 bp, Homo sapiens
gggaggacgccgggacacctggaagccgagaaatggctggacctgtaccgagcctcgggtaaatttgagcttcttgatagaattcttcccaaactccgag

SEQ ID NO: 342631 - DNA, 100 bp, Homo sapiens
gatcgccgggtgtcgatccttttccctccagtcaggaacagggcggatacctgaccaactcgtgatcctagacatgaagcatggagtggaggcgaaaaat

SEQ ID NO: 342632 - DNA, 101 bp, Homo sapiens
gagatgctgggcctcgaggagggggaccttgaagacgacttcgaccctgcccagcacgaccagctcatgcagtggaatcccccaaagaaggtaaagggagc

SEQ ID NO: 342633 - DNA, 75 bp, Homo sapiens
gaagagttggatactcagcgtcgctggcagccgctgtacttgaagactgtgcagtctttgtaactgatgaagagc

SEQ ID NO: 342634 - DNA, 90 bp, Homo sapiens
cttcgagtgggtctacaccgaccagccgcacgccgaccggcgccgggagatcctggggctggacatccacttcatccacgtgaagccccc

SEQ ID NO: 342635 - DNA, 75 bp, Homo sapiens
acaccatggctgcggcggcccagctctctctgacacagatccgagtgaagcctgacaggaccggtgtggtcacgg

SEQ ID NO: 342636 - DNA, 100 bp, Homo sapiens
gagaccgcggccgggaccgagggaatgcttctagtcacaacagacacccttggccatgactttcatgtcttccaaattctgactcatccttggtcctcat

SEQ ID NO: 342637 - DNA, 51 bp, Homo sapiens
ggaggatgcagcctttggactcaagcaagaagttgagaagtttacagacct

SEQ ID NO: 342638 - DNA, 75 bp, Homo sapiens
gaatttcctgtgttccctttgccgctcctggagttcactggacagagcgggatgccaccagcttgtccaaaggga

SEQ ID NO: 342639 - DNA, 100 bp, Homo sapiens
agaattcctcaatgactgccctctaaaggaagagagacttcttcaacaacgggacctcccagtggtgagttgatgctcctcggatagggtcgctccctgc

SEQ ID NO: 342640 - DNA, 90 bp, Homo sapiens
tatctgcacctggacgtaatggacgggctttttctcctccgtgacagccagagtaatccaaaggcatttgtactcacactgtgtcatcac

SEQ ID NO: 342641 - DNA, 93 bp, Homo sapiens
caggagtctgtcaaagagaaagtaacaagaatcattcttgcagcatttcgtatcttatgccttcattcatccggcatggtccaacaattccaa

SEQ ID NO: 342642 - DNA, 80 bp, Homo sapiens
agacagcgggagccggcgtgcgagcggcaggacactcatgaggaccatgatacttccactgagaatacagacgagtccaa

SEQ ID NO: 342643 - DNA, 82 bp, Homo sapiens
ccgagcgcccgaggcgtctgggatggtgtgggaccgggtttacgcaaatggcatccggaacattgaccttcactatattgtt

SEQ ID NO: 342644 - DNA, 100 bp, Homo sapiens
cgtccctctacgcgttttggttcccggttggtgcttcctgttcgcagctgcggcagtgaccatggaggctggtggcctccccttggagctgtggcgcatg

SEQ ID NO: 342645 - DNA, 75 bp, Homo sapiens
tagtaatcaagcagcagccagagaatgggaggctgcaagaaagcgtaagattgccattcgaaaagcccaggggaa

SEQ ID NO: 342646 - DNA, 74 bp, Homo sapiens
cgggtggaggttcgagcgctgttctcgctccggagccgctgcacatttcgctactgccttcctcatcaacaaag

SEQ ID NO: 342647 - DNA, 75 bp, Homo sapiens
gttcaccagcactgtctccaccctagaggaataaaattgaagggtgtttttcttagagaacatcatttgtcatat

SEQ ID NO: 342648 - DNA, 144 bp, Homo sapiens
gttactttgttccggagggatctgatctggataaagtggctgccgagagggctacaagcgtctacttggttcaaaaggaatttgaagcctacattaatgcttctggagaacatggaattgtggttttctctttgggatcaatgg

SEQ ID NO: 342649 - DNA, 50 bp, Homo sapiens
ggacggaccctcgccagtgctctgcgcagataaaataccatgaggagttt

SEQ ID NO: 342650 - DNA, 87 bp, Homo sapiens
tccactccgtcccccgcgggtctgctctgtgtgccatggacggatccagagacaatggccccgatgggatggagcccgaaggcgtca

SEQ ID NO: 342651 - DNA, 100 bp, Homo sapiens
ggcgccccgcgcctgccgctgccctacggcttctccgccatgcaaggctggcgcgtctccatggaggtgaaaggaaagcaagccaggatggatatttacg

SEQ ID NO: 342652 - DNA, 100 bp, Homo sapiens
cgatcaggaaactattgctgtagatgagtggattgtatttcagtctccagcaagaattgcccatcttgttaagcatgttggcagataaattgaacatgac

SEQ ID NO: 342653 - DNA, 100 bp, Homo sapiens
aaaagggctggaaacttcgctatcatggagatcaggaatgtatgcattgcagtggagaaaactatgacggcaaaatttccaagaccatgtctggactgga

SEQ ID NO: 342654 - DNA, 100 bp, Homo sapiens
ggaccgcgacggcagcagagcagaaacctcgacctgtctcccagttggttgcacagcaggttactcagcagtttgtgcctcctacacagtcaaagaaaga

SEQ ID NO: 342655 - DNA, 75 bp, Homo sapiens
cgaaaacagagttcagaagggaaggagatttaaccatagtagaaagaatggagaactattaactgcctttcttct

SEQ ID NO: 342656 - DNA, 75 bp, Homo sapiens
caatgtgttaataacttctcagattccgttgggctgaatcatgtcagggagatttaagtacattggccaatgtgg

SEQ ID NO: 342657 - DNA, 100 bp, Homo sapiens
ccttcgaggctctggagtcctccacggctacgaggctgacccgcggctgattgagtccctctcccagatgctgtccatgggcttctctgatgaaggcggc

SEQ ID NO: 342658 - DNA, 75 bp, Homo sapiens
cttaagatgtcctgcctgaaaggcatttttagatgaattcactaactggtcaagaataaatcccaacaaggccag

SEQ ID NO: 342659 - DNA, 90 bp, Homo sapiens
gacgatctggggcagctgactgccctccagagatggacagagacgtatgtgcgttggtctcctaagggcacctacctggctacctttcat

SEQ ID NO: 342660 - DNA, 100 bp, Homo sapiens
ggaagtactcagccgctaaatccaagaaagttcgtcgctgcttcctgtgctccaggagaggacatctcctgtattcctgtccagcccccctttgcgaata

SEQ ID NO: 342661 - DNA, 89 bp, Homo sapiens
acggcccccagcgcagcctgcatgttccagccgcttacaaacacgcagatggcaagaagattgatggcaggagggtccttgtggacgtg

SEQ ID NO: 342662 - DNA, 100 bp, Homo sapiens
gctgggaaacatggcgaccgagggaatgatccttactaaccacgaccatcaaatccgtgtcggagtccttacagcgtttagtcacatcaagaaatagaac

SEQ ID NO: 342663 - DNA, 123 bp, Homo sapiens
agcgcttgagggggactggcctggcgtgcactccgcacctcggggacattattgcgcgtggaacggctgcttttggaagtgcctacaccaactaatgttacaattgaatcctataacatgaac

SEQ ID NO: 342664 - DNA, 48 bp, Homo sapiens
tcacctgtgcgggatggaacaaaagatctgcattctgcccctcctgat

SEQ ID NO: 342665 - DNA, 100 bp, Homo sapiens
ctctttagctgaaatacttctgaaggagtctactcttcatcttgtgttgagacttcgtggtggtgctaagaaaaggaagaagaagtcttacaccactccc

SEQ ID NO: 342666 - DNA, 122 bp, Homo sapiens
gatgaactggagtgtgcggcccgataagcgctttcgcttggcgctgggcagcttcgtggaggagtacaacaacaaggtgatgctgaacaggagcttggcccccctccatctgtagatgaggc

SEQ ID NO: 342667 - DNA, 82 bp, Homo sapiens
tcatgaggctgtggtggatctttctgccatcactggtgcaagctatatttaacggagatcctgatgaagttcgagcactaat

SEQ ID NO: 342668 - DNA, 100 bp, Homo sapiens
cacgcgtcccccagtaggagaatgactccgattcgtgaccctcagcgccggtgcatgtcgatttcaatttcaccatttagtattgagagcacaagacgcc

SEQ ID NO: 342669 - DNA, 101 bp, Homo sapiens
agatcaaggacatggagaagatgttcaagcatgtactaatggtcacttgatgtgcgctggctgttttatccacctactagcagatgcccggctgaaggagg

SEQ ID NO: 342670 - DNA, 142 bp, Homo sapiens
tccagtttgaagatggagagaaaattgtggtccagggagagcctggggacgacttttacatcatcacggagattgatgaggacatgactgcccgaattagcatggctgatgtcaagttctctttccaatgtcctggtcgcat

SEQ ID NO: 342671 - DNA, 100 bp, Homo sapiens
gtatcggaggaccgccctgctccgggctcatcaggaagcccagaacctcatggccctcaccaatgtggacaccccattgaaaggtggacttaatacccca

SEQ ID NO: 342672 - DNA, 50 bp, Homo sapiens
ggaacatctggaggctgggaaatggtcgtcaaagtcctacattttagctt

SEQ ID NO: 342673 - DNA, 100 bp, Homo sapiens
cggatctcatatcttcacttggcaaactcaacaaggttttgaacgaagaatgtgatcagaactggtacaaggcagagcttaatggaaaagacggcttcat

SEQ ID NO: 342674 - DNA, 43 bp, Homo sapiens
ccatggagaacacacaaccagcacgtggactccctttaatcca

SEQ ID NO: 342675 - DNA, 75 bp, Homo sapiens
ggtggtctatatccatccttccagtgccctcttcaacagacagccagaatggtattgcacatctattacaaattt

SEQ ID NO: 342676 - DNA, 75 bp, Homo sapiens
attgcaaaccttattaatctcagggaactggatgtcagcaagaatggctgctctttggcgtaaattgcaatcgat

SEQ ID NO: 342677 - DNA, 99 bp, Homo sapiens
gccatcaagaagccaaccttgagaaggacaggaaagcaactggttgaagcctcagagcggttgaaatcccaggccaaggaactcaaagatgcccatcag

SEQ ID NO: 342678 - DNA, 90 bp, Homo sapiens
ccagatgctgtggccacatggctaaaccctgacccatctcagaagcagaatctcctagccccacaggatgaatattctatctttcctcag

SEQ ID NO: 342679 - DNA, 100 bp, Homo sapiens
cgaccaaagcgcctgaggaccggcaacatggtgcggtcggggaataagctactccctcttgatgccctcccctttgcccctcactcaggatgctccagac

SEQ ID NO: 342680 - DNA, 82 bp, Homo sapiens
cagacacagaaggccgacaccctgcacctgaaactccaagaggaggaggaggagagcaacaccagcaaagtgcccactgctg

SEQ ID NO: 342681 - DNA, 100 bp, Homo sapiens
gctactgcatgcccagcaccattcctaggctgggagcaaaacggtttatttatgaaacagagcatcataatggcatagcagagttactggaaatattggg

SEQ ID NO: 342682 - DNA, 100 bp, Homo sapiens
gacggaggagcttgtaccaccgtggaactgggcaaactattaaaatgcaaacagaaaacttgggtgttgtttattatgtcaacaaggacttcaaaaatga

SEQ ID NO: 342683 - DNA, 75 bp, Homo sapiens
caggaggcatttgaagttccaccatgaagctcatgactgctctggtgaatgttgccttaaacctcagtattcatc

SEQ ID NO: 342684 - DNA, 101 bp, Homo sapiens
gattggctttgagacgaccagaaatattggttcagcccctgaaagtttccaacaggaaatcatacaagttggatggcttgaggactggtactaaaaggaaa

SEQ ID NO: 342685 - DNA, 100 bp, Homo sapiens
gatcctcccgcctcagcctctcgagaagatacttggtgcttgaaaaactgaagaaggaagacgctgaccgaattcatatattcagttcttttttctataa

SEQ ID NO: 342686 - DNA, 100 bp, Homo sapiens
aaaaacctgagaacttcctgatctctctcgctgtgagacatgtctgagactcctgctcagtgtagcattaagctcagaccatgaccgacttcataccttg

SEQ ID NO: 342687 - DNA, 50 bp, Homo sapiens
gtccgcacctgttttccacagcagtttgtgaagtttgccaacatcgagga

SEQ ID NO: 342688 - DNA, 90 bp, Homo sapiens
tttatctagaggaaaacccagagaaaagtgaaacaattcaggacactgttgacttccccagaaatctggccaagtctgtaactgtggaat

SEQ ID NO: 342689 - DNA, 101 bp, Homo sapiens
ccaaacaccacatgttgtctcttagaagtgggagctgaacgatcaggaagtgtgctgcaccactggaatgaaatctattactttgtggaacagttggctca

SEQ ID NO: 342690 - DNA, 88 bp, Homo sapiens
cccgcatgctgcagcttatgaccatcaatatgtttgcagtacacaactcccagctgaaaggtttggtgcacctcgatttggaggaagt

SEQ ID NO: 342691 - DNA, 75 bp, Homo sapiens
tgccaatgttggagccgtctgcaaagtgtccccggcaagaaggacaaggagtagatgaacctctttcagaaactg

SEQ ID NO: 342692 - DNA, 75 bp, Homo sapiens
cctgttgacgacagctctcctcagaacccttaggagaaatcttgagagtggacagcaattgtgaagatcgccaga

SEQ ID NO: 342693 - DNA, 97 bp, Homo sapiens
aacatccaattctttcagaattttgcatggaattgacaggcataaagcaggttctgtacagagtaatgagatgtgtgacggctgcaaaccaggtgtt

SEQ ID NO: 342694 - DNA, 100 bp, Homo sapiens
gctgccaaaaaacctcagtcgggaggagctggttgatgcgctgcgggcagccgtggtggaccggaaagcttcgtctcagtacaggacctcaagactcacc

SEQ ID NO: 342695 - DNA, 102 bp, Homo sapiens
gccggatcaggagccgccgccgccatatcagatttctcactatgtgcaatagacactttggcagtgttgtggcacaaaccattcggactcaaaaaacggatc

SEQ ID NO: 342696 - DNA, 100 bp, Homo sapiens
tgaatcctgctcagagaaaactctacagagatgtcatgctggagaccttcaagcacctggcctcagtagcggcttactgaactaaagcgccagtgtgtag

SEQ ID NO: 342697 - DNA, 75 bp, Homo sapiens
cactcagttgttctgctgctttcagacccccgtatcttgcaatatattcagaactctccctcctagtgacagcaa

SEQ ID NO: 342698 - DNA, 80 bp, Homo sapiens
agaggaagccgaaaacaccctgcaatctttcagacaggtcagtgtgagaagaagattgtttctgagcttgagaagcttct

SEQ ID NO: 342699 - DNA, 90 bp, Homo sapiens
tccgagacgtcaaactcctagtgggcatgtcagagcgggagcgacaggtgatgaagaagctgaaggaggtggtggacaaacaacgcgacg

SEQ ID NO: 342700 - DNA, 50 bp, Homo sapiens
tgggatgcgggtcatcctcattctggttgactatagtcaatggggccaat

SEQ ID NO: 342701 - DNA, 100 bp, Homo sapiens
tgacatcttgatacggacttctggagaagtgcggctgagtgacttcttgctatggcagaaacctgctcctccaaagccagagcccaagcctaaaaaggcc

SEQ ID NO: 342702 - DNA, 75 bp, Homo sapiens
cccaggtgtaagcgcagaaagcaggcgaacccgcggcgcaataacgaacccttaggagaaatcttgagagtggac

SEQ ID NO: 342703 - DNA, 101 bp, Homo sapiens
gaactttcgaagttgagaaaagaacccctggaacgtgcgctcagcactgggattttctggttgtagatgagcatgagagtgtggagcagagtcggcgagcg

SEQ ID NO: 342704 - DNA, 75 bp, Homo sapiens
ttcacccgtgatgttggcctttaaattgtctttctcgagaagcaggtggaaacatgagcattcagtttcttggta

SEQ ID NO: 342705 - DNA, 75 bp, Homo sapiens
gaaagcatcgtcctaggaatggatttctcctctaatgacagaaccgtggaacctctggagtattacaggagattt

SEQ ID NO: 342706 - DNA, 75 bp, Homo sapiens
caccagtactaccaaggacagcttttttcctgcaagaccctacagcttggggcctgggctcctctgaccatcctc

SEQ ID NO: 342707 - DNA, 100 bp, Homo sapiens
ctgcatgtgaagctcaccgagacggcgatccgggcgctcgagacttaccagagccacaagaaattcattgtacaacacacgaaccccttcaatacctgga

SEQ ID NO: 342708 - DNA, 98 bp, Homo sapiens
catatcctatacttggtgaaaaaatcacccaagatacactgtactggaacaactataagaaatgcactcggtgatggaaagagagccactattctgaa

SEQ ID NO: 342709 - DNA, 75 bp, Homo sapiens
gcgatcggtgctgattcggcgcgatttgaggagctgctgctgcagactcctcaaccctgccacccccatggagtc

SEQ ID NO: 342710 - DNA, 100 bp, Homo sapiens
ccaccaccagatgccaagagttcaaactcaacaatattatccccatgtatcgaaggatgatcgcagtgatgtggagagcagctcagaggaagaagatgtg

SEQ ID NO: 342711 - DNA, 98 bp, Homo sapiens
cacctgccgggagggcttcagcgcggctccatcctggcctcgctggacacttttaagaagatgtgggtgtccaaaaaggagtatgaagaggatggctc

SEQ ID NO: 342712 - DNA, 101 bp, Homo sapiens
gcgaggccctggtcagccccgacggcaccgtcaccgaggcgccgcgcacagtcaagaaggttcatgcatgggagatctcagaccagttgttacagatccgg

SEQ ID NO: 342713 - DNA, 75 bp, Homo sapiens
gtcactttggacctatcaacagtgttgccttccatcctgatggcaagagcatccgcacttccactaatagccaag

SEQ ID NO: 342714 - DNA, 60 bp, Homo sapiens
gggagacacatgcacaagacagtttaggattgggtgtgtgtgtctcctctctgaatggca

SEQ ID NO: 342715 - DNA, 75 bp, Homo sapiens
ggattcaagttcgaaatatggcaactttgaaagataggatgctgagaacttgctggagtcacagccactgggatc

SEQ ID NO: 342716 - DNA, 73 bp, Homo sapiens
acagctaagacgccaggactccctggaagcctagaaatggatgttaatgcaggcgagggcagtgagtttgcag

SEQ ID NO: 342717 - DNA, 75 bp, Homo sapiens
tacacagatggaaccagaaaagatacgaggctctaggagagcggacaaggcaaaatctcagcaagttcggacctc

SEQ ID NO: 342718 - DNA, 96 bp, Homo sapiens
cgacgtacccgccgccgccgttggctggagatttgaacatggaattcaatccttcagatcatcctcgggccagcacaatattcctcagtaaatctc

SEQ ID NO: 342719 - DNA, 82 bp, Homo sapiens
caacagagaatcaatttggatcggcttatcataaccagggggaaatttgcagtggtgagaaaatgtataaagaaagattctg

SEQ ID NO: 342720 - DNA, 75 bp, Homo sapiens
ggtggaaatgagctggtttttcaagtcaaggtcaaaatgtgggtacagctcctgattcccaggatagaagatgga

SEQ ID NO: 342721 - DNA, 100 bp, Homo sapiens
ttttcatggatgcccctgtttctggtggaaagaccacagcaagattctttcattcgtctcctcctagcctgggggaccaggctcgaactgaccctggaca

SEQ ID NO: 342722 - DNA, 96 bp, Homo sapiens
atattccaagtcagttcagaagtaagcgctctaagaatcaagaaaatggaccagtttgttcgttacgaggctgagactcgggctgagtttgcggag

SEQ ID NO: 342723 - DNA, 98 bp, Homo sapiens
atcctggacccattgataactctggacttctcaaaggagtccatagaggccactgtattctattgaagaacatgtctaacagtaacactactcaagag

SEQ ID NO: 342724 - DNA, 74 bp, Homo sapiens
tcgagcgggtcaagctgctgctgcaggtttagacccagtgtgcctggtgggctgtgcccaggttcagagtcatg

SEQ ID NO: 342725 - DNA, 80 bp, Homo sapiens
gctcacgcgctccaggctgcgcccagagctcagctgctgggttggagaaaaagagggtgtcgtgaaaactacccctaaaa

SEQ ID NO: 342726 - DNA, 100 bp, Homo sapiens
cgacgaccggatcctgaggaggcagctgcggtggcagctgctgagttctcggtgaagttcctggccattttctatccaagatgtggtacaacctcttacc

SEQ ID NO: 342727 - DNA, 99 bp, Homo sapiens
tatgatagttcagatgacagtgattttaaagttggagatgcctcaggagatgtcagtgaaaaaagggatccagaatgattactaacctatgactcccaa

SEQ ID NO: 342728 - DNA, 98 bp, Homo sapiens
tacagaagaacaaacagagactgcgaaacgatcctctcaatcaaaataaggttaatgttcgtgaagaaattgaagagttttttccaagaatgtggaag

SEQ ID NO: 342729 - DNA, 128 bp, Homo sapiens
agaaattgataatgccagagaactacaagaacagagggattctttgactcagaaactacagagtgatggctgttttagtacttcaggtggaattcgtccttttcatcttcagaactggaagcagaaag

SEQ ID NO: 342730 - DNA, 100 bp, Homo sapiens
ctgctgccctcttgcgcgcgggaagcagcaccaagttcacggccaacgccttggcactagggtaagaatgattgatgttggctgatattggagtgctcat

SEQ ID NO: 342731 - DNA, 100 bp, Homo sapiens
gatgcatgccagagacttcacagtttctgctctggtgtcctgcttcaatgagttagaggtctgtatccatcctgatggcgtcatcccagtgctgactttc

SEQ ID NO: 342732 - DNA, 83 bp, Homo sapiens
aaccctgtaaaaccagccttagactatttttcaaacatttggatttaggtggcgagtagaaaaagaagtaatttcaggaaaag

SEQ ID NO: 342733 - DNA, 90 bp, Homo sapiens
ctcagacttgagggtcaactttaccagctgaagctgcacttagtgcattggaacgcagtcaaatttgaaaactttgaggatgcagcactg

SEQ ID NO: 342734 - DNA, 75 bp, Homo sapiens
cgggcgagcagcagttgagcgagcccgaggacatggagatggaagcccagctcaacattggcaatgtgctccctg

SEQ ID NO: 342735 - DNA, 73 bp, Homo sapiens
agactcaggccaatgactacttcaaagcgggcagttgcaggagatgcctctgagtcagcactcttaaagtgca

SEQ ID NO: 342736 - DNA, 74 bp, Homo sapiens
tccgtgctttgcccaaggagatggtctcattaagatgagacaaaaggacccagtgaaaggaatgacagcagatg

SEQ ID NO: 342737 - DNA, 90 bp, Homo sapiens
gtcccgtcttatgggacttgaggccctcaaggttggttttatgactggacccagacctatgatattgcattttattttagtggcttctgc

SEQ ID NO: 342738 - DNA, 90 bp, Homo sapiens
tctggggacctacttccgggtagccttcttcgggcaggataagtgggagaagatttgcagcactcaggacacaagcgtggaggtctatga

SEQ ID NO: 342739 - DNA, 96 bp, Homo sapiens
ttgagctgaaactcagtgagagcccagagcctggcaggagtccagaaagccagatggctgaacatcaggttaactccgttgactgccaaaatagca

SEQ ID NO: 342740 - DNA, 82 bp, Homo sapiens
gtccgacagccaggcccgggagaagtgtccctggccagtgtccttccacctgtccacaagcatggggaacatcttcgccaac

SEQ ID NO: 342741 - DNA, 119 bp, Homo sapiens
gaagggaacgggaacggccatgagcactgcagcgattgcgagaatgaggaggacaacagctacaaccggggatctttaatctcatgaagtacgacagctacagccgcttcttaaagtct

SEQ ID NO: 342742 - DNA, 75 bp, Homo sapiens
gctggcgttgctgcgctccgtggccggggagcaagcgccagtcctcatcaccgggggcatcgtggccacagctgg

SEQ ID NO: 342743 - DNA, 88 bp, Homo sapiens
tcatcatcatttacctgggaccaatggttttgatgataatcatattgaaatggattccaggcgtgtgcctcgagacaagctggcctgc

SEQ ID NO: 342744 - DNA, 101 bp, Homo sapiens
cactgcagcagtacactaccaacagatcaaagaaacccctccggccagtgagaattgtcactgctgttccaagggcacacgcagagggatttggaattcct

SEQ ID NO: 342745 - DNA, 100 bp, Homo sapiens
acaactcttcagatgcgtttctttggaaaaagaggacaaagaaaacttcattataaagaatttcgaaggttctttggcatggacacaagttcagtgggag

SEQ ID NO: 342746 - DNA, 82 bp, Homo sapiens
cccagacaaggctggagacaaacctcatatgcagacttatgaagttgaccttaataagtggaagttgcagctacatgagctg

SEQ ID NO: 342747 - DNA, 100 bp, Homo sapiens
cccttctcctgctgcgtgccagatcctgcggacaacaccatcgacttcctggagtacgtggcagctctgaatctcgtgctgaggggcaccctggagcaca

SEQ ID NO: 342748 - DNA, 100 bp, Homo sapiens
ctgctgggagatgggcctactcgcccgccaccctgcgctgccgccgctctgaggagttaaagggctgaaaacacagttaaatcactttcaaagttaaaag

SEQ ID NO: 342749 - DNA, 100 bp, Homo sapiens
ctgatgacttgggtcatgtagtccctaactccagactccaccagatgtgcaggccacataactcatcagaatggttttcaagtctgtccacattttgtgg

SEQ ID NO: 342750 - DNA, 95 bp, Homo sapiens
gaaagctcttgaagcagtatttggcaaatatggacgaatagtggaaggtggtgttatcaaggagaagaaattcctgccttgaccagatgtgtgga

SEQ ID NO: 342751 - DNA, 82 bp, Homo sapiens
tttacctgagcatatgagaaattctttcattctccagtgcatttgaaacgccactttatgtttcgaaaccatctctgtttag

SEQ ID NO: 342752 - DNA, 82 bp, Homo sapiens
agttcgagcagatcgacaagtccgggagctgggcggccatttaccagcactggagaggggtctcctgaaaaccctgcagaaa

SEQ ID NO: 342753 - DNA, 50 bp, Homo sapiens
gtccagctgaactctggctctcaaaacaccattcgcttttcacccaagat

SEQ ID NO: 342754 - DNA, 88 bp, Homo sapiens
ctggaggaggagcgagccaagctgcacgatgtggagcggtttcatcaccttaaatggttttgaaccaatgaaggtgtattcccttaaa

SEQ ID NO: 342755 - DNA, 88 bp, Homo sapiens
gagctgggaatcgggagccgggcgcggggagctgcgcgaagccggggcggagcacgcgagctatggcttcaacggaccacaccaaaat

SEQ ID NO: 342756 - DNA, 140 bp, Homo sapiens
tgacaaggccacaactctgcagtggaccacagcattcctgaaatacatccaggaaagacatggagattctcttaaaaagtcaccttcaggccattcagaggaggaaagagaggggaatatgaagtcagccaagccccaag

SEQ ID NO: 342757 - DNA, 74 bp, Homo sapiens
tacagcccacctcttgcatcgtcacctacagaaccagcagtcatcggcggctccaacctcacaggagagaagca

SEQ ID NO: 342758 - DNA, 88 bp, Homo sapiens
tgtccaggaactgtcggaacagaaccaaaggctattggatcagctcagcagggatgataatgaagataattcaaatgatgggacccag

SEQ ID NO: 342759 - DNA, 75 bp, Homo sapiens
ctgagttccttttggaggatccgtcttcaggcagtgtgtcccggcatggatatccggaacaacctcactaggttg

SEQ ID NO: 342760 - DNA, 75 bp, Homo sapiens
ctgagcatgaaatccaagaaagtcagccccaatttccgttactatggcaatgacggcagggactacaacaacctt

SEQ ID NO: 342761 - DNA, 100 bp, Homo sapiens
gaaaaagataaactcttcactgccattggttatagtgagagtacccacaacctaactttacctaagcagttttacagctcccagcacagtaggaaagaga

SEQ ID NO: 342762 - DNA, 75 bp, Homo sapiens
tgcctgacaacaccgatcacagaccaacaaataagaccatcatcatgtggaaactgaccagggatgagaccaact

SEQ ID NO: 342763 - DNA, 82 bp, Homo sapiens
agggagaggagctgtggataacgggaggtgaatttccatgtcaacatagtcctggtatgaaaactttcaaagacgactagca

SEQ ID NO: 342764 - DNA, 100 bp, Homo sapiens
tcgtcaagcagctgtcggccaagctcatcgccaacgatccctgccagaaccaccactgcaaacacggcaaggtgtgcgagctggatgagaacaacacccc

SEQ ID NO: 342765 - DNA, 82 bp, Homo sapiens
aggagcgtcccggtgcggctgcacgtctcgcggatcatgctggcgtctctggccgagcctctttttgtggaaaacgacagca

SEQ ID NO: 342766 - DNA, 97 bp, Homo sapiens
cctgtcactcctcagaaatgtcccagctccacgggtttccacattcaggagaatgaagaaagccattacgagctggcctgctgctgtgggtctgcag

SEQ ID NO: 342767 - DNA, 76 bp, Homo sapiens
aagttcagcatccccaagcagggggagtgagaaatgttttagatgaagataatgataatgttgggcaacccaatga

SEQ ID NO: 342768 - DNA, 75 bp, Homo sapiens
tggccgagcaggctgagcgatacgacggtgcatctgcagacgcagcaggaggtgaagctgcgcatgacgggcatg

SEQ ID NO: 342769 - DNA, 110 bp, Homo sapiens
cacagctcagaacagctggatcttgctcacactctttcaagagaagcttccttgatgaggagcgggaaggcctcctgcaccctggagaccgtgtgggaagacaagcacaa

SEQ ID NO: 342770 - DNA, 82 bp, Homo sapiens
gtcactaatgtacaggcagaaaacgagaggctcaccgcagtcgtgcaggatctgaaggaggatgaagcagcaaaggaatttc

SEQ ID NO: 342771 - DNA, 50 bp, Homo sapiens
accaccgcacccctacgctgaccagatcgagacatgtaagcagcatcatg

SEQ ID NO: 342772 - DNA, 100 bp, Homo sapiens
cacaaagtcaagagacagcgattggacagaatttgtgaaggataccactgtggctttaaaggctctgtctgaatttgcagccctaatgaatacagaaagg

SEQ ID NO: 342773 - DNA, 75 bp, Homo sapiens
gggagttctctgtgtctgtgaaagtccctgcaggaagcatcacccaggctggcagatcatggtagcagcagcggg

SEQ ID NO: 342774 - DNA, 75 bp, Homo sapiens
cgctgtacttgcgtccgctacagtatgtcaatcgcttgccccagcacagaacccagcgggtgccgcttctccacc

SEQ ID NO: 342775 - DNA, 100 bp, Homo sapiens
cttgttgctggtgtcgtctactggctgtacatgaagaagtcaaactatgacagagactccactttcaatgtgtttgtgggaaaaggacagctgatcacag

SEQ ID NO: 342776 - DNA, 82 bp, Homo sapiens
agaaactggaggagtcccgctcgaagctaggggacggcaaaacagaacagaaaggcggagataaaaagaggggtgttaaaag

SEQ ID NO: 342777 - DNA, 51 bp, Homo sapiens
tctagaagacccattacagaggtctctgctggatgaaccgaatcctaacag

SEQ ID NO: 342778 - DNA, 76 bp, Homo sapiens
gaacgggcccgtcaagctgcgcctgacagttactcccctgctggtgcctccctccttggcgcgcttcccacctgcg

SEQ ID NO: 342779 - DNA, 74 bp, Homo sapiens
acagccttcctgtgtggttttaccgcccagagagcgtcatggacctggaatctttagaacacgatgttcttgat

SEQ ID NO: 342780 - DNA, 75 bp, Homo sapiens
gatttagaaggaggttcaggctacggtgagccgaaggaagaaggtagataatgactataatgcccttcgagaaag

SEQ ID NO: 342781 - DNA, 75 bp, Homo sapiens
cacggacaacatcaccgtgaggcagggggacacagccatcctcaggtgattttacaacgagatgctgctctccat

SEQ ID NO: 342782 - DNA, 100 bp, Homo sapiens
cgtcaccctgcctcccctgcgtcccgccaccggccgcttctgtcctcggaggaaaaggcttctcttttacatcgtactcaggaagaaagaagaaagagag

SEQ ID NO: 342783 - DNA, 98 bp, Homo sapiens
ctcagtgagggtagctggtgcagaagccattttttaaacttaggtatttaagtactgaaagacgtcaagctgagtgtacaaagactgcacgaattcag

SEQ ID NO: 342784 - DNA, 100 bp, Homo sapiens
cgattctttgccttgccttatgtggaccattttctcagcaaaaatttctctgaagatgattttgcttctgcattgagaaaaaaacaatccgcatcttggg

SEQ ID NO: 342785 - DNA, 75 bp, Homo sapiens
cagacacagctcatgtctcattaatcacaccaacaaaaagatcctgtggtacagcacaagtgaagctgatgtgga

SEQ ID NO: 342786 - DNA, 75 bp, Homo sapiens
caaggttattcttaatcctgtaaatacgaatctttccaaaggagatgcccgttgctgatatgtgttcaagatgag

SEQ ID NO: 342787 - DNA, 100 bp, Homo sapiens
tggcagctcgtgcaattgttgccattgaaaaccctgctgatgtcagtgttatatcctccaggaatactggccagaaaatgatgcatcctgttgccagcag

SEQ ID NO: 342788 - DNA, 50 bp, Homo sapiens
tgcatcaggccgcgtctcctcaggctgtccccaatctcttcatgctggaa

SEQ ID NO: 342789 - DNA, 99 bp, Homo sapiens
caggaggctaagaaagtggtgaatcccctgtttgagaaaaggcctaagaattttggcattgggcaccatgccggtggaaaggatgcgcatgcgcccgtg

SEQ ID NO: 342790 - DNA, 100 bp, Homo sapiens
ccacaaccaacttcgacaccttccctgccgccatcctcactgtcttccagtccccctctacacaagaatctggatgcacgagaaaagtctaccttcagag

SEQ ID NO: 342791 - DNA, 100 bp, Homo sapiens
aggaccagtgggccagagatgaccctgctttcttggtcctgttaagtatctggctctgtgatttggtgcttccagatgtgagttatcaggtggaatccag

SEQ ID NO: 342792 - DNA, 90 bp, Homo sapiens
ggctgctctagcgagcagttcgaggaggaatcgatgacattcaaagatgtggctgtagacatcacccaggaggactgggagttaatgcgt

SEQ ID NO: 342793 - DNA, 83 bp, Homo sapiens
aggggaccagctctacatctctgagaaggagcccagcagagctccccctgacagaccgcgaggtagagatcctaaacaagacg

SEQ ID NO: 342794 - DNA, 100 bp, Homo sapiens
ctgctcctctcctgggcggcggggatgggaggtactccaaagattcaggtttactcacgtcatccagcagagaatggaaagtcaaatttcctgaattgct

SEQ ID NO: 342795 - DNA, 50 bp, Homo sapiens
gaaaccggcctggctatgatttatgggaggtggggaagacagggctccag

SEQ ID NO: 342796 - DNA, 100 bp, Homo sapiens
cagtcggaggagtactcggtgaaatcctgtcctgaagactgtaagaatgatatggaacctagcaaagctgttccactgaatgcatctaagcaagatggac

SEQ ID NO: 342797 - DNA, 75 bp, Homo sapiens
gtctgcaccagcagcacccgctcaccctcaagtgggtggacagcgaaggccacggcatatgcctccaaggacggg

SEQ ID NO: 342798 - DNA, 75 bp, Homo sapiens
gtcctggttccactgcttactcgaattcccgtactgattagtcaacagtggaaaatctgaagagatgcaagcagg

SEQ ID NO: 342799 - DNA, 82 bp, Homo sapiens
ccggctgaccaggaacctgggcgagcagcggcgggggcccgagggcgccgtgccgtccctgcagtgacaccgaggtgctcct

SEQ ID NO: 342800 - DNA, 50 bp, Homo sapiens
ctcgatccgcctgcctgcgcacctgcgagcagctgcattggcatggaaga

SEQ ID NO: 342801 - DNA, 78 bp, Homo sapiens
gacaccccggaagctgggaaatgaaaaatccagttacactcttaaaggaattgtcagtgataaagtctcgatatcaaa

SEQ ID NO: 342802 - DNA, 75 bp, Homo sapiens
gtgtgagtgcgcgaagatgcgaaaggtggttttgatcaccggggctagcagctctcaagctctcgcctttcctat

SEQ ID NO: 342803 - DNA, 50 bp, Homo sapiens
ggaaaaacttcttgccaaccaaatttaaaagattggaagacccgtttgag

SEQ ID NO: 342804 - DNA, 74 bp, Homo sapiens
tcaaaattatccgaaaccgcctcactggtactgtggaatgtctatggtgactgtgataactatgccacactgaa

SEQ ID NO: 342805 - DNA, 73 bp, Homo sapiens
aatccgaagtgccgcggaaagtggagttccaggaatggatggaggtgctttaactgatacaagtctcacagat

SEQ ID NO: 342806 - DNA, 90 bp, Homo sapiens
gccgcctcgctgtccctgcggcttctggggtggtattggaaggaactggccctgggcctctggaggcagcagtattctggcagaatttgg

SEQ ID NO: 342807 - DNA, 75 bp, Homo sapiens
gctgctcaataaccctgccctggagttcatcaaatacgtgtgcaagggctgttgataatcaggtgtatgtggcca

SEQ ID NO: 342808 - DNA, 90 bp, Homo sapiens
ctgggttggagagggagatcatgctggctgcaaagaagggactggcaaagaacagagcagttcaccatttgcattatatagaacgatatg

SEQ ID NO: 342809 - DNA, 75 bp, Homo sapiens
aagaagaggaagaggaaagaaagacaagtcaggcatggctctcacccagactagacgcttgaagcaaagctgcca

SEQ ID NO: 342810 - DNA, 100 bp, Homo sapiens
agaagctgaaagctgccgactgcgacctgcagatcaccaatgcgcagacgaaagaaggaggagatgttaaagtaacccatcttgcaggacgacattgaag

SEQ ID NO: 342811 - DNA, 98 bp, Homo sapiens
gcgacgaaccttggagagaggagaacgaacatcttctggacctttgtccaggagccaaaaacctgtatatcatctccgtgaaggggatcaagggacgg

SEQ ID NO: 342812 - DNA, 100 bp, Homo sapiens
gctgctggaggaggataacaagttttgtgcagattgccagtctaaagcacttgcacctcctgcgccgccgccccccatccaaggatatgccttcaagcct

SEQ ID NO: 342813 - DNA, 75 bp, Homo sapiens
gtttattggaaaaccagctcctaaaacaattcattttccatcaggacagacgattgacggcgtggaggacatgct

SEQ ID NO: 342814 - DNA, 100 bp, Homo sapiens
acccttggacttcagcctccagaactcatggcctgtatgagaagaaaaagacctcaagaaagcaacgaaaggaacgcaagaacagaatgaagaaagtcag

SEQ ID NO: 342815 - DNA, 75 bp, Homo sapiens
catcagccacgcatctgaccttgttgaaaactgtcgctgaaaagcaggagaagagaaatcaggatcgcttgagga

SEQ ID NO: 342816 - DNA, 75 bp, Homo sapiens
gagccaagttccgcagcctggcatggcttctggggacctttacgagttatctggaagtattttggatgtgtatag

SEQ ID NO: 342817 - DNA, 100 bp, Homo sapiens
cgcatcactcccagctgcgcaaagcttgcgaggtggcgttagaatctgcaaaatggctgataatttggatgaatttattgaagagcaaaaagccagattg

SEQ ID NO: 342818 - DNA, 88 bp, Homo sapiens
cgccccccaggaggggcgagagggagccgcagctgatgtcaggcagtggagctactgctgtggttcaggcagccctatgcaaacccag

SEQ ID NO: 342819 - DNA, 96 bp, Homo sapiens
ggactcaggcagtacgggaagaacttcttcagaattagaaaggagctgcttcccaataaggaaacatgctgaagctgctgaaagatggcagaagaa

SEQ ID NO: 342820 - DNA, 104 bp, Homo sapiens
tgcaggtccaaccacgctggtataccctcaaacccctcagacaatgaattcacaacctcaaacccgttctccgtctggctcttgctgattgaattcctttggtg

SEQ ID NO: 342821 - DNA, 100 bp, Homo sapiens
ctcttggcctgtccctcacatccgatgcaccctttttgtcagattatcaggatgagggtgaccgggttattgatgtgggatctgaatggcgaactttcag

SEQ ID NO: 342822 - DNA, 121 bp, Homo sapiens
gcgtcccccaccgtgccgctgcagctcgggcagagccgccaagctttgggctgaaaatgtgtgtctgacatgcaagctcagtggggcagagacccgtggattgctgtgccctgccctccgg

SEQ ID NO: 342823 - DNA, 100 bp, Homo sapiens
tggctgaatctgtgtctacattgatctgggctgctcctcgactccagtcagaagtggctgagttgaaaatagtctggtgtggcagatgtggatagctgga

SEQ ID NO: 342824 - DNA, 95 bp, Homo sapiens
tgaagttactgaaaaggaggtagaaatactcttcattcaagtcaatcagtttgcattggtgtgactgcacagaaaagttacaaaacaaatttgac

SEQ ID NO: 342825 - DNA, 97 bp, Homo sapiens
gtttagccaacccaaattaccttaattgatgactcactggttgtgtggaaggaagtcgatttgacccggctgtctgagaaggaacgtcgtgatgcct

SEQ ID NO: 342826 - DNA, 98 bp, Homo sapiens
ttacggaaaaggaacagattgttcctaaaccagaagaggaggttgcccagaagaaaaagattcaggtttactcacgtcatccagcagagaatggaaag

SEQ ID NO: 342827 - DNA, 75 bp, Homo sapiens
cgcagtggtcgcttcttctccttgtgcgcaggaccattgtcaagatcccttctaccctggaggtcgacgtggagg

SEQ ID NO: 342828 - DNA, 100 bp, Homo sapiens
tttgcctgtgggacgctccgtggatgaggctctgcggctggtccaggccttccagtacacagacgagcatggggaagaaatggaatctatttggaatttg

SEQ ID NO: 342829 - DNA, 98 bp, Homo sapiens
cgtgatctccagcgccggcctcctcagtgcgaagaagctgcagccgcacctggccaagggatacagttgatatattagttggatggcatatagatcat

SEQ ID NO: 342830 - DNA, 100 bp, Homo sapiens
aaccagatatgatatcccagttggagagggaagaaaagctttggatgaaggagcttcaaacccaaagagatccaattctggtacagcagttgcgccggac

SEQ ID NO: 342831 - DNA, 50 bp, Homo sapiens
gaacatcttctggacctttgtccaggagcccagcagccggggccgcccta

SEQ ID NO: 342832 - DNA, 100 bp, Homo sapiens
taacgaattacatgatccaatgtaccagtatcgagttgataccggaaattttcaggctccccgaatgagaaagaatactcggaatcagcggtgaattgca

SEQ ID NO: 342833 - DNA, 80 bp, Homo sapiens
acgtggctgctgccaagggctacattgaggtgatgagggcgccatgttttggaagtttgacctgcacacaagctcgcacc

SEQ ID NO: 342834 - DNA, 73 bp, Homo sapiens
gccctgcatatgattggctctttagctgaaatacttctgaagaatgaagtgtctatgttgaaaaatgaggtgg

SEQ ID NO: 342835 - DNA, 90 bp, Homo sapiens
gccccttgtcagccagggctgaacccccgcagtctaacaaagtgccagtggtgcagcaccctcaccatgtccaccccctcacgcctctta

SEQ ID NO: 342836 - DNA, 100 bp, Homo sapiens
ggcaagcaagattataatcaggaagtggatgcctccatttttaagaagccgctggagttctggagtgggtggaagtggtggaggatcctctggtaggtca

SEQ ID NO: 342837 - DNA, 106 bp, Homo sapiens
tgctgaagcctttaaatgcagcatctgcgatgtgaggaaaggcacctccaccagggtgataaaagaaaatgtggctgaagttacccgaagttcagcttgcagtgta

SEQ ID NO: 342838 - DNA, 50 bp, Homo sapiens
atggcacctatggacaagtctataaggtccagtggcattgcagagcacgg

SEQ ID NO: 342839 - DNA, 99 bp, Homo sapiens
ggacctttactgtgcagctcctgaaaggagagacacttgtgaacattcaagtgaagcaaaagcctttcatgattatttacttgctggacagaagaaaag

SEQ ID NO: 342840 - DNA, 75 bp, Homo sapiens
ccctgacatgcaagaacagggtccagttacatggacacagaacagtatgaagaagcagtacgagactatgaaaaa

SEQ ID NO: 342841 - DNA, 134 bp, Homo sapiens
gagatccaagggaaaccgagataggccatggagcaattctaggggcttatagctccaataatggaatgctttgcttgtgccatctgcccccatcgaccggtactggacaccctggccatgctgactgcccaccg

SEQ ID NO: 342842 - DNA, 100 bp, Homo sapiens
caaaagtggatgagtttccgctttgtggccacatggtgtcagatgaatatgagcagctgtcctctgaagaaggcgtccagctcagcgcatgaaggtcgcc

SEQ ID NO: 342843 - DNA, 136 bp, Homo sapiens
aggggacgtcacatgtcattataccttcacccagcatttcatccctcgtcgaaaggattggattggcatctttagagttcagattcagaacaagaaagtggacatctctaaggtctcctccaagtgtgggtctaag

SEQ ID NO: 342844 - DNA, 100 bp, Homo sapiens
tagacatccctttccatcaagtgtcctacgtaaaggagtattggaatgatgtgttcagctgcccaacatgtttgggaacctgcgctccacgttaatggcc

SEQ ID NO: 342845 - DNA, 75 bp, Homo sapiens
cagatgttggatatttgcttggaaaaacgtgtgggtacgaccttgctagtgagacctgcaacgacttccacccga

SEQ ID NO: 342846 - DNA, 90 bp, Homo sapiens
gcccagaagatcaagactagtgtgagcaacaaagttcctaaaagtaaagctttagaggccaccaaattggcaattgaagctggcttccgc

SEQ ID NO: 342847 - DNA, 138 bp, Homo sapiens
gaaaaacaaacgtcttgaagactgaaagcctgttattcaaagaggttagcagtagactgttggaagtaagcatcaacaacagcaacttgtgattggcggtgaccggatattcagttgcacatccccacatcaatgcac

SEQ ID NO: 342848 - DNA, 83 bp, Homo sapiens
tttccaccgaatgccacctggtttataacaaaaggtacaaagaggatggtgaagctttgctaattttgctaccctcagaaaaa

SEQ ID NO: 342849 - DNA, 75 bp, Homo sapiens
ctacagggtacaaataaatgagtgaacgatgttgctctagatacaggctcaccagctggattccctcctgggggc

SEQ ID NO: 342850 - DNA, 74 bp, Homo sapiens
cgaggatgatgcggaaattaaccccaagtggaatgcagtagccctctgggcctgggatattgtggttgataact

SEQ ID NO: 342851 - DNA, 74 bp, Homo sapiens
cccaagctgactatggccttgaacacttggaggagatgttaaagtaacccatcttgcaggacgacattgaagat

SEQ ID NO: 342852 - DNA, 90 bp, Homo sapiens
ggtagagggtgtgacctggatgtctgaggaggaaggttaatgttcgtgaagaaattgaagagttttttccaagaatgtggaagataaatc

SEQ ID NO: 342853 - DNA, 121 bp, Homo sapiens
aggatgacttggttacagtcaaaaccccagcgtttgcagaatctgtcacagagggagatgtcaggtgggagaaagggtcaatgcaaccaacttcatggaggcaggagccccagttatgtgg

SEQ ID NO: 342854 - DNA, 78 bp, Homo sapiens
ttacaaaaatatcactgaagaacaacttagaccatttgttggctagattgagaaagaagtcagtgaggccatgatgaa

SEQ ID NO: 342855 - DNA, 90 bp, Homo sapiens
gtagggcttgccaccaacagaataaaataaaagatcttcaaaaggagcagaaaactttacaggtaaaagtcttgcagtgaaaaacccgag

SEQ ID NO: 342856 - DNA, 51 bp, Homo sapiens
gggcaattcccgaccgaaccaaacgatgtccagggtgctgcagaaggacgc

SEQ ID NO: 342857 - DNA, 50 bp, Homo sapiens
tctcgaatgggcacacctgtgtaggaggaagaaggcacctacgatcaaac

SEQ ID NO: 342858 - DNA, 87 bp, Homo sapiens
ttcttagtaagatgccaaaaccaaaaccacctccaaacagcgtcaagggttccacactgttgggagtcgctgcaagaatcggacagg

SEQ ID NO: 342859 - DNA, 50 bp, Homo sapiens
caatgctgggattggctgcttttcactccatggataccgaggactcggcc

SEQ ID NO: 342860 - DNA, 100 bp, Homo sapiens
gcatctggatctcttgttggaagagaaaatgaggtgccttgtccacattttgcgagagacaacagtaaaatactccaaaatacgttcttttcatggtcag

SEQ ID NO: 342861 - DNA, 75 bp, Homo sapiens
agaatgagtataaaggatgggttttaactacagacccagtctctgccaagtgagactgtggagatgagaaggtgg

SEQ ID NO: 342862 - DNA, 75 bp, Homo sapiens
cgggtacctgcggccaattcggtggaacgaggacgcggactgcgaaggcaggcccagctgagagccagcctggag

SEQ ID NO: 342863 - DNA, 109 bp, Homo sapiens
gtcaatggatcccatcacgggagtcggggtggtggcttctcggaaccgagccccgacaggctatgacgtaattggaagaattgttgaaaattctgatgctgttactgag

SEQ ID NO: 342864 - DNA, 83 bp, Homo sapiens
gatatcatcgaccctcgcacactctttgtcactgagaataactgaagtgaagtgatggactccgatttggagagtagtaagac

SEQ ID NO: 342865 - DNA, 82 bp, Homo sapiens
gtctgattcagatgacaactgtacagatgtcactgctgcttttctaacccaaactgtatgtcttgatgacactacagtaaag

SEQ ID NO: 342866 - DNA, 100 bp, Homo sapiens
cagccgcggcggcagcagcagtgagaggtttgtttgtaaaaacaatggtgtgttgtttgaaaaccagctgcttcaaattggacttaagtctgaatttcgg

SEQ ID NO: 342867 - DNA, 50 bp, Homo sapiens
gcgagagcttcgagcggactcagagcagataaaatccccccatctctgta

SEQ ID NO: 342868 - DNA, 89 bp, Homo sapiens
cctcagcggccctgtgatgctgccaccaccggaaggaggcagagacgagttgtactgctgtcacaggaaatggacgctggattacaagc

SEQ ID NO: 342869 - DNA, 100 bp, Homo sapiens
gtaacccaaagatcgtgcagctcttggcaggagtagctgatcaaaccaaggatggattttctctgtgggcagttctttttgttttgggaagacttctgac

SEQ ID NO: 342870 - DNA, 76 bp, Homo sapiens
gagatgcctcaacaaaaatgcagggagattatactttgactttgcgttgtcggacaagtaaccgcaagagcttgat

SEQ ID NO: 342871 - DNA, 100 bp, Homo sapiens
ggtgtccctgctccgcgactgccccaacaagaaggccatctatgcatcgaagctctcaaaggtctatggccctgtgttcactctgtattttggcctgaaa

SEQ ID NO: 342872 - DNA, 100 bp, Homo sapiens
ctggccggccgggggaagggacccgcacgccgggctttgttgtggaaatcccggttacctggcctagtgatgaccactttgtacagatcatgtgtatccg

SEQ ID NO: 342873 - DNA, 75 bp, Homo sapiens
ccaacagagcagcagctacgggcagcagatatcctagaaggaaaacatcaccatggctacagaaattggttctcc

SEQ ID NO: 342874 - DNA, 74 bp, Homo sapiens
ctttcggcttctgagacggcggcagcagcggcattcaggtttgaattttgggaagattttgaagaagaccatgg

SEQ ID NO: 342875 - DNA, 100 bp, Homo sapiens
ctgcaccttctccatcaggtgcagaagcttggtgtaaaaattgccaaagcagttgcctgccacaactttgtaaaagccaaaaaggaggttgaaaattcac

SEQ ID NO: 342876 - DNA, 122 bp, Homo sapiens
cgagtgcagccactcggccctgcgccgcgacaagtacgtggccgagttcctcgagtggggtgctggagaatctggtaaaagcaccattgtgaagcagatgaggatcctgcatgttaatgggt

SEQ ID NO: 342877 - DNA, 50 bp, Homo sapiens
gcctccccagtagctggaattacaggctggtccattcaggtccaggaaag

SEQ ID NO: 342878 - DNA, 97 bp, Homo sapiens
tggaaggaggcggcctccgggaaaagcgaccgcagcattagtgaccagaaggatcccaaggatcgaatggttcaggttgtgaaatggtacctctcag

SEQ ID NO: 342879 - DNA, 78 bp, Homo sapiens
ttttgcagagcatcccccaaagacagattgaagaaatgcagagacaggaggccagcaagcgcatctccagccacatcc

SEQ ID NO: 342880 - DNA, 82 bp, Homo sapiens
cagaacatccactagcctcactaaaggaggaggaagccaagaatctggtgagcgaagccatcgcagctggcatcttcaacga

SEQ ID NO: 342881 - DNA, 90 bp, Homo sapiens
caaattgcgaattactcgaggagatattcagacattaaagaactatcactggctcaatgatgaagttatggtggagaattcagactttac

SEQ ID NO: 342882 - DNA, 98 bp, Homo sapiens
agcctcccgggtagctgggactacagttgacaatgacacaccagttactctgggagtatatcttaccaagaaggaacagaaaaaacttcggagacaaa

SEQ ID NO: 342883 - DNA, 104 bp, Homo sapiens
cccatcctgccgtccttctccactttcgccagcccgtgccgcgagcgcggcctgcaggagtctctgctttctatccgtcaagatgataaagtcgtgtgcccgag

SEQ ID NO: 342884 - DNA, 96 bp, Homo sapiens
gtgttctgcttttttcattgttccactggacgctcatcagagggaagatctttttcctcaattgtaaatacaatcaagtggcatcttaaatttttg

SEQ ID NO: 342885 - DNA, 98 bp, Homo sapiens
ttggaccaaggaagaagagaccactagaatctggaattgagaagcatcaagtgtacctgatttgtgaacctatcttgcttcagttggtttcctcctaa

SEQ ID NO: 342886 - DNA, 75 bp, Homo sapiens
aagagctatatttggtgtcctgtaaaatcacagattatggttttggcttggtttgaagaaggtgaagaaacaatt

SEQ ID NO: 342887 - DNA, 75 bp, Homo sapiens
acgaggtctatgagaacaagacggacgtcatcctgatcttggaactgacggggaggtttactgcatcgacgcgcg

SEQ ID NO: 342888 - DNA, 100 bp, Homo sapiens
acaccctcagctccacattgagagcaaaatctacaagatgatgcagggaggagacgccctgctggcggacttggagtctaccacctcccacatctccaaa

SEQ ID NO: 342889 - DNA, 74 bp, Homo sapiens
ggatgctcaaggccctgcccccagccctgcaggagctcttgtccctggcaaagcgaaagcgcagtgactctgag

SEQ ID NO: 342890 - DNA, 100 bp, Homo sapiens
ctttacctcttcctggccctgctcctggtggccgtggctgtgttggcctctctggacatgggatgtagagctggaaagatctgcagaatcctgggctgaa

SEQ ID NO: 342891 - DNA, 98 bp, Homo sapiens
aagacttcatcctcccagacactacagaggtccttggtatagtagtgggagttctccttcaggatcatgatgttcgtcagagtgaatttcagcaactt

SEQ ID NO: 342892 - DNA, 100 bp, Homo sapiens
gctaagggtcttcatataccacgattaacagaggatgagactgtgatgcctggatgtacagccatctgttgaccataatactgaaagccaacaaactaag

SEQ ID NO: 342893 - DNA, 83 bp, Homo sapiens
ccgcagcctccgcggccgagagtgcagcgaatcgcaccccctccctccctggcggagcccctgaaggagctgttcaggcagca

SEQ ID NO: 342894 - DNA, 100 bp, Homo sapiens
gcggtggtggcgggtggaggttcgagcgctgttctcgctccggagccgctgcacatttcgatctctccttcccccaagccacacgcctccctgcctccac

SEQ ID NO: 342895 - DNA, 100 bp, Homo sapiens
catttcatgagagaagaaatacaggatgcctctcagctgccacctgcctttgacctttttgaagcctttgcaaaagccatggtaggggaggagtgtgtag

SEQ ID NO: 342896 - DNA, 90 bp, Homo sapiens
caacgtggacttccgagcccctgattggcgagcgtggccaattcctgtccccccagcagcatggcatcgtgtgctgaaccctctgagccc

SEQ ID NO: 342897 - DNA, 105 bp, Homo sapiens
tgccgtccttctccactttcgccagcccgtgccgcgagcgcggcctgcaggagcgtgagtgcatctccatccacgttggccaggctggtgtccagattggcaatg

SEQ ID NO: 342898 - DNA, 75 bp, Homo sapiens
ttcagtggcttcctgaagtgactaaaagaagctgtgaataaggtgaaaattcaggccatgtcagaagtacagaag

SEQ ID NO: 342899 - DNA, 75 bp, Homo sapiens
atcaacctggagctctacgcctcctacgtttacctgtccatgttttcagaaaggcactttgcggatgaactgtct

SEQ ID NO: 342900 - DNA, 98 bp, Homo sapiens
ggactgcacgtagcccggcgctcggcatggctctcctggtgctcggtagagttggctttgtgggacacagctgggcaggaagattatgatcgcctgag

SEQ ID NO: 342901 - DNA, 100 bp, Homo sapiens
cgagcagccaccgtcccgaccaagcgccggccctgcccgcagcggcagggtgctggagaatctggtaaaagcaccattgtgaagcagatgaggatcctgc

SEQ ID NO: 342902 - DNA, 82 bp, Homo sapiens
aacatggaaaagctcctattctgattgctacagatgtggcctccagagggctagcatggagatatggaccaaaaggaacgag

SEQ ID NO: 342903 - DNA, 83 bp, Homo sapiens
gtgttctccaaataccagctcgacaaagatggggttgtcctctttaagaagcagaagaagatctttacaatccaaggctgcta

SEQ ID NO: 342904 - DNA, 83 bp, Homo sapiens
attttctcttcttctgaaaaagagatcttggactgtgaattggagaatcaagaggcacatgagcaagatggaaatgatgaact

SEQ ID NO: 342905 - DNA, 100 bp, Homo sapiens
aggaccaagaaacctgtggttattcgtgccagcaagcagtggtttataaacatcacggatattaagactgcagccaaggctaaaataaatgaagctgtag

SEQ ID NO: 342906 - DNA, 100 bp, Homo sapiens
cgagaggaaactgttgtgcctcttcatattggcgatcctgttgtggtaacaagatgctcaactatagtgctcccagtgcagggggttgcctgctggacag

SEQ ID NO: 342907 - DNA, 96 bp, Homo sapiens
ttcatccctgagccttgagctcccagtcgcagagcaacttgctgagcttcgtcaggaatttcttcgacaagaagaccagcttcaggactataggaa

SEQ ID NO: 342908 - DNA, 100 bp, Homo sapiens
gtgggaaaacactgtgaggatgggatctgcactgtaactgctggacccaaggacatggtggtcgggaggatagcaaacaagctcaatttttagccttggc

SEQ ID NO: 342909 - DNA, 114 bp, Homo sapiens
gatgatatccttctcaaccttgtgggatgtgaaaactctgttactgaagaacctgtgagaagtttctacaatggtgggctcagctctcaggagaggtgcccatgcatatgtcta

SEQ ID NO: 342910 - DNA, 90 bp, Homo sapiens
ggcgaggatgcaccttcccctgccttggaaaggtatacaaatgctctcagtccagccagacaccaagccgaaaggttgtgctggctgcaa

SEQ ID NO: 342911 - DNA, 100 bp, Homo sapiens
tttctgtcttccttcctgggtcagtgattcccggaccctggaagagaagagggtggctaatgattaagggctctctaaatacgtacagattctgcgataa

SEQ ID NO: 342912 - DNA, 100 bp, Homo sapiens
actgccgccccatgtgtgtgagaggcgtcctctgggagagcatggatcctgaggtcccaggtacaggtttgcagattccgccagcagcacagcaagctct

SEQ ID NO: 342913 - DNA, 98 bp, Homo sapiens
ctgcaggctacctcaggggccgtccccaggacactgtccggatcttccctccctgcctgcctagggtagttaaaagacgagtgaatgctctcaaaaac

SEQ ID NO: 342914 - DNA, 50 bp, Homo sapiens
agtaagctggaaagcagatggtactcgggattaatgaaaatcaagttcca

SEQ ID NO: 342915 - DNA, 96 bp, Homo sapiens
gttttatattaatgttgagagagaggtccttcgattctatgcaatctgggatgatacagacagcatgtatggtgaatgtcggacctacatcattca

SEQ ID NO: 342916 - DNA, 90 bp, Homo sapiens
cagcgccacggtggatcagcgcctacccgagtgtgcgaagctagccaagggaaactgaacagccaagactcctataacaattttaccaac

SEQ ID NO: 342917 - DNA, 121 bp, Homo sapiens
cattttcacctcgcgtcgcgcccgggaggaaggaacgaggcaaggagctaaagcagcgtgcgttcagccctgggactctcagcgttctcatctctcttccttcaccatgaagctgatggac

SEQ ID NO: 342918 - DNA, 75 bp, Homo sapiens
tggatccagcaggacagctcagcccagagagttgataggtcccctcttgctgttggctgcacatcaggaaggctg

SEQ ID NO: 342919 - DNA, 90 bp, Homo sapiens
ctcgaagatatgactccaggaccactatattttctccagaaggggctgctggtgaaccaggtcctcatggcccacctggtgtcccaggtt

SEQ ID NO: 342920 - DNA, 100 bp, Homo sapiens
atattttcaaaatctatgaatgaaagcatgaaaaatcaaaaggagttcatgcttatgaatgctcgacttcaggtttatcaacttatgaggaaatgctggg

SEQ ID NO: 342921 - DNA, 100 bp, Homo sapiens
gcctcaagcgctccaccatcacggacgcaggcctcgaggaatcagagatcattgatttcttcctgggggcctctctcaaggatgaggttttgaagattat

SEQ ID NO: 342922 - DNA, 51 bp, Homo sapiens
ctgaccgagtgcttcctgagccccaacaatgcagatcttcgtgaagactct

SEQ ID NO: 342923 - DNA, 83 bp, Homo sapiens
gcgggccccgggacctgggctgggaacccgcggtggagcgggacacgaacgtgacagcacttcaaatgcaggcggggcgaagg

SEQ ID NO: 342924 - DNA, 50 bp, Homo sapiens
gtgtaatacatcatgaactgcagggtcaaaatgcagatcttcgtgaaaac

SEQ ID NO: 342925 - DNA, 100 bp, Homo sapiens
gtcgctgatcctgtccctggtgggcgaggagttccccgaggaggaagtacaagtagtactagtggtagcagtggaagctcaactaaaaatatctgggtta

SEQ ID NO: 342926 - DNA, 122 bp, Homo sapiens
gatgaagcggaaccatctgggagccttcctgatccgggagagtgagagctccccaggggagttctctgtgtctgtgaaggccaattcctgtccccccagcagcatggcatcgtgtgctgaac

SEQ ID NO: 342927 - DNA, 101 bp, Homo sapiens
accagtagcatttctatgttacaaactgaagatatttggggtctcgtcggcttgggattatcaatgcttgggagtgaaaatgcctcgtgtaaaagcagctc

SEQ ID NO: 342928 - DNA, 72 bp, Homo sapiens
gaggatcctgcatgttaatgggtttaatggagactgcgaggtgcgcccaggaccggagttcctgacccgcgc

SEQ ID NO: 342929 - DNA, 75 bp, Homo sapiens
attttttttcaagaactgccgtcttctttgcctgcactaatggcctgtgatcttggacccagccgaacccacagg

SEQ ID NO: 342930 - DNA, 82 bp, Homo sapiens
tgattatcgtaggaggagtcctccacctcgtcgcaggccaacccatggccagcacagacatgatggaataaagactgagcac

SEQ ID NO: 342931 - DNA, 82 bp, Homo sapiens
gagccgagagccacactttcaagtaaaccagatcatcgtgttcctgtgttacggggcccgcctcaacaagtgggtgctgcag

SEQ ID NO: 342932 - DNA, 90 bp, Homo sapiens
gccagcttaaggacaacacctgtgtggtggaattccagttcatgctgcccacatctcatccaaacagagcccacctgaatgaccttgaaa

SEQ ID NO: 342933 - DNA, 100 bp, Homo sapiens
cgccctcctgacgcggccggagcgcagccctgaggcccaggcccagtgtgccatcataatgtttgatgtaacatcgagagttacttacaagaatgtgcct

SEQ ID NO: 342934 - DNA, 98 bp, Homo sapiens
ccagccttcacttcagagacaccacctgatgtcactgccaaagcatgtcaggtttttagaacgactgttcgagcgacatataaaacaaaataaacatt

SEQ ID NO: 342935 - DNA, 90 bp, Homo sapiens
caccgggcatagtggttggagtttctgtagatggaaaagaagtctggtcagaaggtgctacgcatgatggtcggagtaaatatctcagat

SEQ ID NO: 342936 - DNA, 74 bp, Homo sapiens
taagccaggcatgtctcccgaggagtgcaggcgcttcaccacagacggttcatcatgcctagtggcgtataaga

SEQ ID NO: 342937 - DNA, 114 bp, Homo sapiens
ggcctcccggctcgacaagttcaagcagctgcttgccggccccaacacggaccttggtactccaaagattcaggtttactcacgtcatccagcagagaatggaaagtcaaattt

SEQ ID NO: 342938 - DNA, 100 bp, Homo sapiens
ggaaattttctacacattttggaattcagttactcaggcactttcttctcaatttcatatggcaacaaactagcagcccgacggccatggaggctgaaga

SEQ ID NO: 342939 - DNA, 97 bp, Homo sapiens
ccggggagctgcaaggctcgcccctgcccggcgtggagggcgcggggggcgcggagctcccgaaaagcccgtgaaacaagaggaaatggctgccttg

SEQ ID NO: 342940 - DNA, 82 bp, Homo sapiens
ccacgttgctcctggagatgagcacgccctttacctgcgtttcctggatgctcttaaaggatgccaagtttgtggaggaacg

SEQ ID NO: 342941 - DNA, 74 bp, Homo sapiens
gagcaagcagcccctgccatcggcacctgaacaccttccaccatgaccacctcagcaagttcccacttaaataa

SEQ ID NO: 342942 - DNA, 51 bp, Homo sapiens
gaaagagtcaacagcagtggcaacaggttttgaggttttgctgaagatatt

SEQ ID NO: 342943 - DNA, 75 bp, Homo sapiens
atattgtactggcctgctgctggcccgcaggtctgtccagccctgggagcggcggaccttccccctggcgcacag

SEQ ID NO: 342944 - DNA, 90 bp, Homo sapiens
ccaggacagtcagtctggtactaacaatgcaggtcgtggcaattctgcagaagttctattccaacagtgaaagtgcattggggttaaatt

SEQ ID NO: 342945 - DNA, 96 bp, Homo sapiens
gggaccataagggcttaactcatatatttaacccccctccaaaaagtggagccccctgagctgcccgctgatctgcagcactggatctcctacaac

SEQ ID NO: 342946 - DNA, 105 bp, Homo sapiens
ctcaagtcctgtcctcttctgaccaaagagacatcaatgcaagcttgaataagaaaaacaaattcttcctcctaagccatggcatatcagttatacagaaatact

SEQ ID NO: 342947 - DNA, 82 bp, Homo sapiens
aagctggccgagcaggctgagcgatacgacggtgtttcccattaaacactaccaggacaaaatcaggccttacatccagctg

SEQ ID NO: 342948 - DNA, 50 bp, Homo sapiens
gcggggaccgctgtgctctcgttacagaggaaagccatgaagagccagca

SEQ ID NO: 342949 - DNA, 50 bp, Homo sapiens
tattggaggaaaacacaccaaggactgcatcgacgtaggctggtgggaag

SEQ ID NO: 342950 - DNA, 90 bp, Homo sapiens
cagctagccagatcccggacccaaaccatgttccctgtgaaggtgaaagtggagaaatcaggaggtgttgcccatggcccccggggcccc

SEQ ID NO: 342951 - DNA, 100 bp, Homo sapiens
ctttatgatgatccacttctacttattaaataggcaattgaaggaacagactaaaaatcgtgtcctggaaggaaactacaggtactaccagggattttca

SEQ ID NO: 342952 - DNA, 51 bp, Homo sapiens
gagatatggcgcaactgcggcgcgcgagaaccactgtctctgatcaacgtg

SEQ ID NO: 342953 - DNA, 87 bp, Homo sapiens
tacccaggaggcggagcggacaaggctccggcctgcgaggaggttgtggcagcactgcctgaaggtatgagaccagattctaatctt

SEQ ID NO: 342954 - DNA, 100 bp, Homo sapiens
gatggccattgacatcatgcaggctgagccagagaagaggccaaagaaagtctcacagattcgcatccggaaaaccattcctaggccagatcctaatctt

SEQ ID NO: 342955 - DNA, 75 bp, Homo sapiens
acctgaacttccctgtgtcccgcaatgccaacctcagcaccatcaagcaggtggcgacctgcacatgacccagtt

SEQ ID NO: 342956 - DNA, 100 bp, Homo sapiens
gaggagaccttgacccctgaaaagagagaagtatgagctccatgcagggactgagtccaccccaagtgtcgtcgtgcacgtgtgcgacagtgacatagag

SEQ ID NO: 342957 - DNA, 82 bp, Homo sapiens
ctgctgctgaagtaatgcaatggtctcaatctctggaaaaacttcttgccaaccaaagttacttttcacatagaaccatata

SEQ ID NO: 342958 - DNA, 50 bp, Homo sapiens
gagaaagccccccagcatcaagggttcagaggacagttttggagaaggag

SEQ ID NO: 342959 - DNA, 90 bp, Homo sapiens
cggcgcgcgggggcgacgcgcgggaacaacgcgagtcggcgcgcgggacgaagtggcttttcatggcctgccactgaaaatcaagaaaga

SEQ ID NO: 342960 - DNA, 107 bp, Homo sapiens
aaacagcccagctcgcgcttcagcgtcccggcgccgtcgcgccactcctccgacgaagaaagctaccgtgaatttactgggtgaagaaaagaagagcacctaaacca

SEQ ID NO: 342961 - DNA, 97 bp, Homo sapiens
tcagaagtaagcgctctaagaatcaagaaaatggaccagtttgttcgttacgaggcatccagtaccctgctgactctgacatgcccccagcctcccc

SEQ ID NO: 342962 - DNA, 95 bp, Homo sapiens
aggggcagccggctctggtgctcccagaagagatagaagaggagttatgggaagaagaatttattgaacgctgtttccaagaaatgctggaagag

SEQ ID NO: 342963 - DNA, 83 bp, Homo sapiens
tcttcactttcctcggcaagaaatgtgtgctggagagatttaccagcatgagaattaagaaggagaaggaaaagcccaattct

SEQ ID NO: 342964 - DNA, 75 bp, Homo sapiens
ggtgacagcaacagcgacgactatgacctcgagtctgacatgatgcagaatcctgatacactatcagcaatgtca

SEQ ID NO: 342965 - DNA, 100 bp, Homo sapiens
aggagttcgtctcttacgtctgcggaagtgcagctgcctcagttcttagcgcagatttcctttgacctcgctgagtacactgcggacgttgacggagttg

SEQ ID NO: 342966 - DNA, 75 bp, Homo sapiens
ctgggtccttcccaaggttgagggacaaactctgcctgggcgagtccttttcctgcgttatgtcgttcagaccct

SEQ ID NO: 342967 - DNA, 100 bp, Homo sapiens
acctccgcagagaccgtgcttatcacccagcagagccacgaggagctgaagaaggttctagatgctaacaagtgagaaagatcagtctaaagaaaaggag

SEQ ID NO: 342968 - DNA, 83 bp, Homo sapiens
cttccgctggctcagccgcaagtacccgtccatcatagtcaactgcgtggaagagaagacaagttggatggcttgaggactgg

SEQ ID NO: 342969 - DNA, 50 bp, Homo sapiens
gaaaaggcctaagaattttggcattgagctccagcattgactttctagca

SEQ ID NO: 342970 - DNA, 100 bp, Homo sapiens
ttggtacggtccttggagtacggagcctgcagagggtcccacggtggaagcgagagaggagggcaaccttcaaaagatcctgtcccatgatcatcctcca

SEQ ID NO: 342971 - DNA, 100 bp, Homo sapiens
tagaatctcaaacaagacaacttgagctgaaagcgaaaaactatgctgaccagaccgctgctttgatgggagcacccctgtccatgcagcagcattttcg

SEQ ID NO: 342972 - DNA, 75 bp, Homo sapiens
aaagaaaacaaaatggtggtatcatggataacaaagccattgacctttgccgattgtgttggggacgaacttcct

SEQ ID NO: 342973 - DNA, 115 bp, Homo sapiens
actggaggacgagcaaaagatgcttaccgaatccggagatcctgaggaggaaacccctcctggagtttccccaaagccatggacagccctagtcttcgtgagcttcaacagcctc

SEQ ID NO: 342974 - DNA, 100 bp, Homo sapiens
ggaaaagcggtacattgcttcttatttagcactcacagatatgccaagagtttaacagtacctgggcatgggagatggagaagaagggctatcttgaaat

SEQ ID NO: 342975 - DNA, 83 bp, Homo sapiens
agaaaagcttgcagaatatatttgttccactctggtagctgaagaacatctcacagtggacgccagggtctattcctacgctc

SEQ ID NO: 342976 - DNA, 98 bp, Homo sapiens
gcgaatgagaaagtggagatgctactaggagctgagacgcaggctgggaagaggctaggcgacgtggtttcagatacgaaaaggactattgctgggaa

SEQ ID NO: 342977 - DNA, 100 bp, Homo sapiens
acacttcattgcagtggatcttagaaaatggaaaagatgttggaataagggaatttcggacatcgatgaagagttcatcttgaaacagtttgacattgac

SEQ ID NO: 342978 - DNA, 100 bp, Homo sapiens
gaagacctgcgtcctttttcgtttttcggatgatgccttcaatactacctttatttccaccataggattctcaaagttggattggtggaaacaatgaacc

SEQ ID NO: 342979 - DNA, 118 bp, Homo sapiens
cccagaccctggagcctcagttggaagcagccgatccagcctgcggagcctgtggggcaggtgaaaggtgtagcagtcactcggcctacacccacagcatcgaccttgtgaacccagc

SEQ ID NO: 342980 - DNA, 71 bp, Homo sapiens
caattgcagtggtgtgtcaaacaagatgtcttgaacaagtcagcaaagaaaaacagttccgcctttggaat

SEQ ID NO: 342981 - DNA, 75 bp, Homo sapiens
cagcaggctctacactgggatgcatacggtcctggatcagtgaatgcttgtgaaaagacctcatttatgtttctg

SEQ ID NO: 342982 - DNA, 98 bp, Homo sapiens
ttggaaataacgggagggaggacctggtccagcttcccttcctcaaataaggaaattgacacctggcgtggaactactataatgtctccagggatcct

SEQ ID NO: 342983 - DNA, 75 bp, Homo sapiens
aatttcaggattggtactacaaggaatacggttggacagaatgaactgaagattacaagtgatcaagtgataaat

SEQ ID NO: 342984 - DNA, 90 bp, Homo sapiens
gtgcgggcctgcgcctccctcggctcctggcgcgggcctcggggagagggcactcttaaaagacccattttacatgggcttgtaccagaa

SEQ ID NO: 342985 - DNA, 98 bp, Homo sapiens
gcctgacatccggctggaggcctcgggtgctccgaaagcggtaccttcgggggcccccccgcacccattgggcccccagatgccgacggccctctcta

SEQ ID NO: 342986 - DNA, 100 bp, Homo sapiens
cgaaaacaggcactggaccacttcaatgcagatgggtctgagcaaaattctgtggcatctctggaatactacctgagaatttttgtgtgccatgtcgaag

SEQ ID NO: 342987 - DNA, 75 bp, Homo sapiens
agttgcaggaaaacaagttcagggctcccactgattctacattatgatatcgcatcacaattggcaataaaacct

SEQ ID NO: 342988 - DNA, 101 bp, Homo sapiens
gtccttccgaggaagctaaggccgcgttggggtgagaccctcacttcatccggcagtcatggatcaggtaatgcagtttgttgagccaagtcggcagtttg

SEQ ID NO: 342989 - DNA, 51 bp, Homo sapiens
ggagtggaaaggctctcagtgaaaaagttttcggctttgtgagaaacctta

SEQ ID NO: 342990 - DNA, 100 bp, Homo sapiens
atatgaatgctgctaggcttttattccacaaacttatacaacctgatcatccgcagatatctcagcaggcagcagaagaggatgaaacacaaaaccagca

SEQ ID NO: 342991 - DNA, 76 bp, Homo sapiens
ggaacatgaagatgaaagccgtgctggctcagagaagtcaaatctacctgatgacatctttgaaaatggaaaggca

SEQ ID NO: 342992 - DNA, 100 bp, Homo sapiens
gccaagatggtgaagcagatcgagagcaaggaattgagttcttctcagactttatcacatgatggaggattcttcaatagactggaagatgatgttcata

SEQ ID NO: 342993 - DNA, 98 bp, Homo sapiens
gtaacaaaaaggcaattgaacttctgatggaaaccgctgaagttgaacaaaatggtggtctctttataatggtcaaaatccagttttgatggtgcctc

SEQ ID NO: 342994 - DNA, 75 bp, Homo sapiens
cagctgcgggctgagctggccagcgcagatcatggaagggaagtggttgctgtgtatgttactggtgcttggaac

SEQ ID NO: 342995 - DNA, 100 bp, Homo sapiens
tacgtgaacaacctgaacgtcaccgaggagaagtaccaggaggcgttggccaaggatctaaagcgggaagccagtatctgtcatatgctgaaacatccac

SEQ ID NO: 342996 - DNA, 142 bp, Homo sapiens
agaagatgtatgaaaattcctactggacaagaatatgctgccaaaattatcaacaccaaaaagctttctgctaggggcccctgaggtgttcatgcactgatcctggaccttggattaaacccttgcagtgctggaagaagag

SEQ ID NO: 342997 - DNA, 99 bp, Homo sapiens
cacggggcgggcagcggctgcctgggcactatggaggtgaagagcaagtcggcagaaccaattgaaagaccaacagcaacagcaagtggtatcgttatg

SEQ ID NO: 342998 - DNA, 98 bp, Homo sapiens
aacacaggaaggagttatgaaaagataacacccgtaagtgtgactacacattttgtgatccagtcatcatttctaaagtgaagtcactgcttttgctg

SEQ ID NO: 342999 - DNA, 51 bp, Homo sapiens
cggcatggctctcctggtgctcgtgaacaaggggagaagaattgccttcag

SEQ ID NO: 343000 - DNA, 100 bp, Homo sapiens
agcatatacaaaggcatggaagtatgaaaatggctcgtggtcccaagaagcatctgaagcgggtggcagctccaaagcattggatgctggataaattgac

SEQ ID NO: 343001 - DNA, 100 bp, Homo sapiens
cagctcactgcaaactctgcctcccagggttcaacttctcaacagagtctatggccaggcctgaagggagggtgaacgtgtaccaccaccttgtagagac

SEQ ID NO: 343002 - DNA, 117 bp, Homo sapiens
ccctgtcataaagaaaattgcccttcgggaaatccgaatgctcaagcctaccaggacatcctcggaaagtatttattctaggccaggctccagtattcctggctcaccaggtcatac

SEQ ID NO: 343003 - DNA, 50 bp, Homo sapiens
gaactgcaggaacctggcctcactagacatatctgaagagatggattaag

SEQ ID NO: 343004 - DNA, 75 bp, Homo sapiens
atgctgccagggtccctgaagagggaagacacgcggaaacagtacacgagcaagaagccattaactctgacccag

SEQ ID NO: 343005 - DNA, 98 bp, Homo sapiens
gaaaccggtagcgcttgcagcatggtggtggtgaagtttattaagaaggagaaggtcttggaggattgttggattgaggatcccaaacttgggaaagt

SEQ ID NO: 343006 - DNA, 75 bp, Homo sapiens
acgtgtacatcatttacggcatgtacttctgcatgaacatctccagccagggacagcatgaaagaaattggtagc

SEQ ID NO: 343007 - DNA, 103 bp, Homo sapiens
gtggccttagctgtgctcgcgctactctctctttctggcctggaggctatccagcacttacagattccagtctgctgttagatgattattcatccaagttgag

SEQ ID NO: 343008 - DNA, 101 bp, Homo sapiens
tgctgaccggcgtgtggaacactggtggtttgcagatcactgagacaccatgccacaaggagagtgatctcttcccctgttttcacaatggaggactccgg

SEQ ID NO: 343009 - DNA, 82 bp, Homo sapiens
atctttaatcactttgtgcagctttatcgggatgctctggcaggggtcctactgggcaatagacaccaatccgaaggaagat

SEQ ID NO: 343010 - DNA, 97 bp, Homo sapiens
ggaggacgagctccgggatgctgtactccttgtctttgcaaacaaacagagcagtccacggatattttgattcaagacagaattactctgagaagga

SEQ ID NO: 343011 - DNA, 100 bp, Homo sapiens
cgcacgaccggcgcctcggacaccttcgagggttgggatctgccagagcatcttttggagatcgaaaggtagaactttccagttcatcccagcacggacc

SEQ ID NO: 343012 - DNA, 100 bp, Homo sapiens
tttccccgcggccttcgcgccccaggcttcgcggggctacatgacatcaggtgtgaaatctaagaatcccctgccaactcttgagggctcaatccagaat

SEQ ID NO: 343013 - DNA, 75 bp, Homo sapiens
tgcccggttccgcctggccatgagcctggctcaggcctgcatgcccgagcagttcagtgatgaagtggaaccagc

SEQ ID NO: 343014 - DNA, 102 bp, Homo sapiens
tggcgcctggcagggcagccagctggccaggggggcccgtctgggccagccacctggtgtccgggctgtgtggtctttgaggatgtgtttgtatacttctct

SEQ ID NO: 343015 - DNA, 82 bp, Homo sapiens
ttttcaggaccaaaattgtggaaaagtcactctgatgatcaagcggtgctgattcacgagagtggaagcctccagagcttgg

SEQ ID NO: 343016 - DNA, 100 bp, Homo sapiens
aagctggccgagcaggctgagcgatacgacgggaactctaatgatccaggacaaagaagttaccctggagtatgtatcaagcctggatttttggtactgc

SEQ ID NO: 343017 - DNA, 83 bp, Homo sapiens
cgcggattcgccgaggcaccgaggcactcagaggagttgatattcactgatggactccaaagaatcattaactcctggtagag

SEQ ID NO: 343018 - DNA, 100 bp, Homo sapiens
aacacctgttaaagtccttgctcctggtgaattcggtaaccatagaccaaaaggtcatcctgtacagttctacagcatgaataggcctgcctctcgccat

SEQ ID NO: 343019 - DNA, 83 bp, Homo sapiens
aggaggaaggagagaaaatggcgtccacggcttagcagtgtctgcaaaaacgaatcttttcctacaacctgttaactgactgg

SEQ ID NO: 343020 - DNA, 96 bp, Homo sapiens
ggcgccgtgggtgccagagaggcggaagaggaggcctgatggggatactatggggacggtctaaatgccatcattgtgtttgccgcctgttttctg

SEQ ID NO: 343021 - DNA, 75 bp, Homo sapiens
tgagctgctggggaagtcaagccttctgtcaggatggctaactggttggctccccacatggtgccctacgtctat

SEQ ID NO: 343022 - DNA, 95 bp, Homo sapiens
tccagccggatccagcatctctccaccatcgactacgtggaggacgggatcagaacaagtacaaggaggctgcccacctgctcaatgatgctctg

SEQ ID NO: 343023 - DNA, 98 bp, Homo sapiens
catgcaaaggcaggggaggaagccacctcgagacaaatcttcctattttcaagctgaaagaatctactgttagaagaagatacagtgactttgaatgg

SEQ ID NO: 343024 - DNA, 100 bp, Homo sapiens
tgagaatacttgctgaaaaggaagttttctggaatggggtatcactgggatacatcagattggatgccaagcgttcctctgccggacatacaagagttcc

SEQ ID NO: 343025 - DNA, 80 bp, Homo sapiens
ctcagttggaagcagccgatccagcctgcggagcctgtggggcagtcccaacatggccaacacagtcaatgctgctctga

SEQ ID NO: 343026 - DNA, 50 bp, Homo sapiens
ctggtctcgaactccggacctcaggccgaggtgggcggatcacaaggtca

SEQ ID NO: 343027 - DNA, 100 bp, Homo sapiens
tttgctacagcatcccacattaagtcaacggcatgccagaggaacagagagaagggctccaggaagaactgattgacatcatcctcctcatcttggagcg

SEQ ID NO: 343028 - DNA, 50 bp, Homo sapiens
cagtgatctacgggctggagttccagtaatcctaaattggagagtcagag

SEQ ID NO: 343029 - DNA, 100 bp, Homo sapiens
caccgtgacaggccaagtgcaggggccagaagacaaagtcaattccatttacagaatgtctgaaggggacagtgtgggagaatccgtccatgggaaacct

SEQ ID NO: 343030 - DNA, 83 bp, Homo sapiens
ctgaattgtgctgccttggccaaaagagatccaaggattaatgtcgtgcttgctggtggccacgttgtgccccgagatgagat

SEQ ID NO: 343031 - DNA, 100 bp, Homo sapiens
gtcgctctggggctatcaggccagcatggacgctggcaaagcggggcagaccctgaagactcactgctcagcccaggtaaagattatagttcccaacagc

SEQ ID NO: 343032 - DNA, 74 bp, Homo sapiens
ctcagcctcccaagcagttgggaccacaggcggctatgagaggttttcctccgagtacccagaattctgttcta

SEQ ID NO: 343033 - DNA, 82 bp, Homo sapiens
agaagagccaggaatcgaaatgcttcatggaacaaccaccctggccttcaagatcgttcagaaagaggcagagcgggccgaa

SEQ ID NO: 343034 - DNA, 75 bp, Homo sapiens
ctacccaaatgggtcgcatggattgattaacgtagacgagttgtactgctgtcacaggaaatggacgctggatta

SEQ ID NO: 343035 - DNA, 74 bp, Homo sapiens
ggtaaagattctgtcactagtccagacatggatgaaataactcacgttggtggaccaactgggtgatccctgcc

SEQ ID NO: 343036 - DNA, 95 bp, Homo sapiens
tcatattgaacattccagatacctatcattactcgatgctgttgataacagcaagatggctttgaactcagtggagataagtaattaacatttcg

SEQ ID NO: 343037 - DNA, 90 bp, Homo sapiens
ccggcaggcagtcacaagcagcagaacttcgggttgaatggatgtatatggctacctactggcacgagaagggcggctagaggatgttga

SEQ ID NO: 343038 - DNA, 75 bp, Homo sapiens
agagggaagacacgcggaaacagacttttggaaaagaatttgataaacattttgggaaaggaggttctaaactac

SEQ ID NO: 343039 - DNA, 83 bp, Homo sapiens
gtcgagtatctggtgaagtggaaaggatggcccccaaagaatcccttggcaccatgtcctgtgtgcattataaattttcctct

SEQ ID NO: 343040 - DNA, 100 bp, Homo sapiens
tgaatccagaaaccagcacagactgtgacggaattactctgcttaatgtaagcaagctgaacattttgaagcttgctcctggtgggcatgtgggacgttt

SEQ ID NO: 343041 - DNA, 75 bp, Homo sapiens
tcgcagtggtcgcttcttctccttgggaatttgaagtactgccttgtaattcttaatcagcctttggacaactat

SEQ ID NO: 343042 - DNA, 120 bp, Homo sapiens
gattgcaaggtgaataaagaagtggagcgtgtcctgaaggagttccaccaggccgggaagcccatcggcgccgtgccgtccctgcagtgacaccgaggtgctcctagccgtctgcaccag

SEQ ID NO: 343043 - DNA, 101 bp, Homo sapiens
tgcaacatgaccacgtcgttccgcgacggcctggctttctgcgccatcctgcaccgccaccggcccgacctcatgtctgagttcactgacaccatcctgtc

SEQ ID NO: 343044 - DNA, 98 bp, Homo sapiens
atatgctccgttttcctctccctgtcgtgctgggcctttgaaaccggcttctttgctggtggctgcttggtgtaaagtggatatctcggcactccctc

SEQ ID NO: 343045 - DNA, 74 bp, Homo sapiens
cgggtggaaaccaggcggccagccagctggaggctcgggttcatgacgctctcgatattcctgtgcagaaacct

SEQ ID NO: 343046 - DNA, 90 bp, Homo sapiens
ggatcaaggacgagtgttcgtgaaagtgaaccccaaggcggagggtcatcacactgaaacggtgttcaaccgggttttgccagggcctat

SEQ ID NO: 343047 - DNA, 83 bp, Homo sapiens
gcacttcagtatctcaggcggcaccctgtccccgaggaggggaccatgacacaatgatatcatcaagttgaatcgaaaggaag

SEQ ID NO: 343048 - DNA, 100 bp, Homo sapiens
gaccactgaatggaagaaaaggacttttaaccaccattttgtgacttacagaaaggcagaactggggctcccttgcatcttccagttacaaattcagtgc

SEQ ID NO: 343049 - DNA, 98 bp, Homo sapiens
ccctgcgctgccgccgctctgaggagttaaaggaacagctagtggttccaacagtcctacctcagattctgcatctgtacagagagcagacactagct

SEQ ID NO: 343050 - DNA, 98 bp, Homo sapiens
cacctcgctactcgcttgcctacccgccggcccgcgggtctacttcctcaaagaaaccaaggtgtatgttggtaacctgggaactggcgctggcaaag

SEQ ID NO: 343051 - DNA, 97 bp, Homo sapiens
agaattatacctagaagtctactaatggacagttagtcacccacctacatgttgaggccttcccttcttcttggtggtgttcttgagtaagataatc

SEQ ID NO: 343052 - DNA, 75 bp, Homo sapiens
aagaggaggatctcccacctttccaagcaaggccaggaggtcctggacccaagccagaagcctctgcaaagcttc

SEQ ID NO: 343053 - DNA, 75 bp, Homo sapiens
gtgcgtgccaagccctacacgctggaggagttttcctatgactacttcagatgggcactgtgccccgactgcggc

SEQ ID NO: 343054 - DNA, 96 bp, Homo sapiens
agctgttgtccctccgctatgaccttactgaggtaggaaaagtaattggaattgctattatgaaacactttggatggaaagcagacttgaggaatc

SEQ ID NO: 343055 - DNA, 75 bp, Homo sapiens
agcggcgctccaccggcgtggtcaacatccctgccgcagagggctgctcttcacctatcgtggtgaagtttgctg

SEQ ID NO: 343056 - DNA, 98 bp, Homo sapiens
tggcctccgtgacgcggcctcctccgcgcctcgcggcatggcgtcggaggggccgcgggagcccgaaagcgagataacgaaggaggcccaacttcatt

SEQ ID NO: 343057 - DNA, 73 bp, Homo sapiens
ctccaatcaccggcatttttggtggacacatcagggcagcccaatggatccaatggtgatgaagagacctcag

SEQ ID NO: 343058 - DNA, 98 bp, Homo sapiens
gtgcagctgatgaaggggaagcaggagtgcatggactccaagctcctggccatgaagcagtgtaaccctttagtaaacctgaactatgctgtgctgct

SEQ ID NO: 343059 - DNA, 75 bp, Homo sapiens
cctcaacacggatatcagcatcctgtccttgcaggggtcaggcccagccccaggcccagtggtattactgaattc

SEQ ID NO: 343060 - DNA, 78 bp, Homo sapiens
tcctaccatctaaaatacgaaggtttctggctgggaagcggctcagccccagggcagcacatcagagacaccatggaa

SEQ ID NO: 343061 - DNA, 100 bp, Homo sapiens
gacaatccaaaacaaacgctattcctctcacatattgtactccaagatacttggattacgaagatttggagcgcaagtactggaagaacttaacttttgt

SEQ ID NO: 343062 - DNA, 100 bp, Homo sapiens
tgtgacctgctggcattgaatgatttatagctaagactccaggacacccctgaagccgagaaatgaaccttctgataacttaagagagattctccaaaat

SEQ ID NO: 343063 - DNA, 98 bp, Homo sapiens
tttttcatgacctttctcatctgactcgtgatctgcccatcttgttactccctagcagtgtggtaagagctctgaggaacatgaatacagtgatgaag

SEQ ID NO: 343064 - DNA, 96 bp, Homo sapiens
cgcaccgccctccgcggccgccccctggggatccagcgagcgcggacggcctggtggagcagctgtacgacctcaccctggagtacctgcacagcc

SEQ ID NO: 343065 - DNA, 52 bp, Homo sapiens
accaaatattatggatcctatctgaagagtcaaggaaacttttcttttgagc

SEQ ID NO: 343066 - DNA, 51 bp, Homo sapiens
cggaaaccccgcctcttacagtcacgaggtgtggaccactacaacgaggtg

SEQ ID NO: 343067 - DNA, 101 bp, Homo sapiens
gaaaagatggctgccctggaggccaaaatctgtcatcaaattgaggcattctgaaggcaaatcctgtttagacccaggcaaaggttcctggtgacccaggc

SEQ ID NO: 343068 - DNA, 100 bp, Homo sapiens
ccagagaccacatttgaagtatatgttgaagtggcctatcccaggacaggtggcactctttcaggaatcctgaagtgggtaaaactgattgacaactttg

SEQ ID NO: 343069 - DNA, 83 bp, Homo sapiens
catgaccctgaaggtccaggagtacccgaccctcaagggactttgaacatgtcggggatcgccctcagcagactcgcccagga

SEQ ID NO: 343070 - DNA, 76 bp, Homo sapiens
caaagggcacgtatagcattggtaaagaacgatcgtccagtggagaacccttaggagaaatcttgagagtggacag

SEQ ID NO: 343071 - DNA, 113 bp, Homo sapiens
cttcccaacaccatgccgtccgccttctctgtcagctctttccccgtcagcatcccagccgtgctcacgcaaattgtggctactaatttgccccctgaagatcaagatggctc

SEQ ID NO: 343072 - DNA, 96 bp, Homo sapiens
ctgaaagacaggtgtgcgtcatgcacttgaagcacctgaggaccctgctgagccctcagccgtgctggtatagaggactctaagaagtggggcatg

SEQ ID NO: 343073 - DNA, 90 bp, Homo sapiens
cccagcatctaaagtcaaatctctcaagcccattgactatatcagatccagactgtgaagacatgaaaagataatagttggaaacctcag

SEQ ID NO: 343074 - DNA, 101 bp, Homo sapiens
ggaggagccattgtccagagggctattaagcggcgaccaggataactgataccgtgcttccagaagatttttctaacagtgtttgcaagctataaaatagt

SEQ ID NO: 343075 - DNA, 99 bp, Homo sapiens
tgtgacccgccttcacaaaataatgcaggtgacaatctccaatagacttgtgtcttcaccttgctgcattgtgaccagcacctacggctggacagccaa

SEQ ID NO: 343076 - DNA, 132 bp, Homo sapiens
ttcagaggaaagcgagctccaacccgcggccccggcgccaagccgccgtcatcttcttcctgtgccaggtctcctctgagcctccggcctccataagacccaaaacagatgacacctcttcccagtcccccg

SEQ ID NO: 343077 - DNA, 95 bp, Homo sapiens
gtgggcccgcttcgaggtggagagagcccagtgggaggtggagcgggcggagctgcagcgcttcagcatggaagggatctcaaatgtcattcaga

SEQ ID NO: 343078 - DNA, 95 bp, Homo sapiens
tctttgtcatctcaatggctggggaaggtgctcaattcccatacatgcactagagttgccagtagtcatcagagtaccaaaactgatctatttct

SEQ ID NO: 343079 - DNA, 100 bp, Homo sapiens
ctcccaggtggcagctgcctccccaagacagatgaaggatttgggggcagagcacttggcaggtcatgaaggggtccaacttctcgggttgttgaacgtc

SEQ ID NO: 343080 - DNA, 100 bp, Homo sapiens
aagagaacgacacaaaaggaaaaaataaaaagaagaagaagaaaagcaagatactgaaatgtgatgaacatgtcagcaatctgaagatggtcttacggag

SEQ ID NO: 343081 - DNA, 100 bp, Homo sapiens
tcgggctggccatggcgaggggtgcacggcggccacctgagtggcgcggcggtgtcagcagcctcccgcgacgatgcccctcaacgttagcttcaccaac

SEQ ID NO: 343082 - DNA, 100 bp, Homo sapiens
tccagaccaaaattgaaaaaatggttgacctcacccagattcttcgttgtcaagccgccaaagtggagagtgcgattgcagaagggggtgcttctcgttt

SEQ ID NO: 343083 - DNA, 100 bp, Homo sapiens
atgcctagaccctgcccaacagaatttatatagagatgtgatgttggagaactacagaaacctcgtctccctggctccattccgacttagacaagggaga

SEQ ID NO: 343084 - DNA, 50 bp, Homo sapiens
aaggtgaaagtggagaaatcaggttcttgggtgtctctggggagtccctg

SEQ ID NO: 343085 - DNA, 99 bp, Homo sapiens
aggaagtaaaagagcacagctttttcaaaggtgttgactggcagcatgtctacttacaaaagtttctctgatgagcagaacaagcgttcagctttacct

SEQ ID NO: 343086 - DNA, 98 bp, Homo sapiens
tccaaatatgtggatgtacctgtgaacgaggtggtcttcagccccggggagtcccactgcgccacatgcagtgaggatgggagtgtgcgggtgtgggc

SEQ ID NO: 343087 - DNA, 50 bp, Homo sapiens
agaagaccccggcgctggtgaacgcctgactggctcatggagaaagccta

SEQ ID NO: 343088 - DNA, 100 bp, Homo sapiens
aaattattacttcttcatgatgctgatgtcaactcccagtctgcaacagatatggagtctggagaacggttaccatcctcagcagcctcctctactacac

SEQ ID NO: 343089 - DNA, 96 bp, Homo sapiens
gtgatccctcaagactggtccacggagtgtatgaccacaaacagccatcaagagcagaaagaccatgggtttgaggtggcctccacttcccctgaa

SEQ ID NO: 343090 - DNA, 98 bp, Homo sapiens
gggcactgtggtcctgggaaagctggaatcaggatctatttgtaaaggccagcagcttgtgatgatgccaaacaaggaagcacaagcctatgcagacg

SEQ ID NO: 343091 - DNA, 98 bp, Homo sapiens
gtttgcgtgcaatgttcaccagtcagtgtttgaaggagaagagagcaagtgctatatgttccacatgtatgttggagttcgtgctggaggagggatcg

SEQ ID NO: 343092 - DNA, 83 bp, Homo sapiens
cacggagctgcagccggttgggccggtgtactttcccggtgtccggctttgctggcccagcaagcctgataagcatgaagctc

SEQ ID NO: 343093 - DNA, 96 bp, Homo sapiens
ctggtgctgaatcatgagcccaatgtctccaaaaggtggacgccctgcttcatctggcccgccagaatcgggctgtggcccgcacagcccagaatg

SEQ ID NO: 343094 - DNA, 102 bp, Homo sapiens
ggcttttgtaaggcaacactcagtgagaagcttggtggggcagaggttgcagtgacctgcatggtgttccaaacacagggacatggatgaagctggaaacca

SEQ ID NO: 343095 - DNA, 74 bp, Homo sapiens
tttatacaagctttttctagggacaccataaccctaaggaatatcttggatgtcttcacggggcttatgactta

SEQ ID NO: 343096 - DNA, 100 bp, Homo sapiens
tgtgagcagtgcttttgaacaagagcgccgccctgtgctgggctgccgggagctcgtcttcaggaacctctccaagatcctccctgccctgtgccacgac

SEQ ID NO: 343097 - DNA, 51 bp, Homo sapiens
cctgcaccttcaaggccaaactatgcagggacctcaggatggaaaccagca

SEQ ID NO: 343098 - DNA, 75 bp, Homo sapiens
cggacgctcggtcccgcgctgcgcatccccgcggacgccacagcgctgctggcggtaaggctggaaaggactccg

SEQ ID NO: 343099 - DNA, 98 bp, Homo sapiens
ctggatggaacatgatggaggctcatttttaatgtccaaagtggaccaagatctcattatgactcagaaaaagttaatcagctgtgttcagcgaatac

SEQ ID NO: 343100 - DNA, 75 bp, Homo sapiens
caccgagatacctctatggttcatgagcttaataggggaaggtgtggctcattgactttaatccatttggtgaag

SEQ ID NO: 343101 - DNA, 90 bp, Homo sapiens
ttgggggcacggatgtccagatctacatctgcaaacaatggacggagattcttcactttacagggatagctgggagtatggccaccctgc

SEQ ID NO: 343102 - DNA, 73 bp, Homo sapiens
cttcgcagtctggaaagctttaggagttcacagtgaaggaatgttcccaatagtagacataaaagtcttcgca

SEQ ID NO: 343103 - DNA, 75 bp, Homo sapiens
tgtcaaagccatcatatatcagtatatggaagagggtgcttcaaggatgaccgcatcgtcttctggacttggatg

SEQ ID NO: 343104 - DNA, 100 bp, Homo sapiens
acttgtcaatttgtcttgatgggctacagttagagtctgaagttgttaccaatggtgaaactacatgttcagaaaattatcctcttgacttgaaccacag

SEQ ID NO: 343105 - DNA, 49 bp, Homo sapiens
tctggacacagaagtatttgtgacagatacattccaccgttgatctggg

SEQ ID NO: 343106 - DNA, 75 bp, Homo sapiens
cgaaaggagagcccgtcattagcgtgaaaaccacaagcaggtccaaagagagaattggctctaccagtgcacctg

SEQ ID NO: 343107 - DNA, 75 bp, Homo sapiens
cccagaattggtgcgaaatggagatgaggagaatcccctcaaagccataaaattttgagtagaaaaatccagaaa

SEQ ID NO: 343108 - DNA, 97 bp, Homo sapiens
tccattggatttaaaagacagtcctcgtcagcactgactttcagctatggaatcgtactaaggctcgtacgtctgcatcgattatcttacgtggggc

SEQ ID NO: 343109 - DNA, 75 bp, Homo sapiens
agactggagatgaggaggatgggagtcccatcggggaagaggctgctgggggtgacaggctcatccatgagcagg

SEQ ID NO: 343110 - DNA, 75 bp, Homo sapiens
tatgcaacatgctcagcaggagcttcatcaacgatatatgtcagatctaaagaacgtggtgtagtatgggaagaa

SEQ ID NO: 343111 - DNA, 90 bp, Homo sapiens
cgggaccctcagggctttaccagcaactaccccagtgccggggagggttctgctgcttcgaaagctggttcttgggtgtctctggggagt

SEQ ID NO: 343112 - DNA, 100 bp, Homo sapiens
ctgtggtgcctcgcctggtcaagtttgtagatattctgaccaattggtatgttagaatgaaccgcagaagattaaagatggctgatcactgggaaactgc

SEQ ID NO: 343113 - DNA, 80 bp, Homo sapiens
agcctcctgagtagctggtattacagaaaagaagagtcggggacctcctagccagttacattccagaggatgaggcgctg

SEQ ID NO: 343114 - DNA, 100 bp, Homo sapiens
tccctggcaagattcttctgaattgtgctgccttggccaaaagaggattttaaactgtctacggttcttaacctcatctgttaagttcccatgcctggag

SEQ ID NO: 343115 - DNA, 80 bp, Homo sapiens
ggcggtttttattaaggctgttcatgtgaaagtgaacctccttggcctgggcgaagctgtgtggaccaagcaagtcagga

SEQ ID NO: 343116 - DNA, 100 bp, Homo sapiens
ctgtgccgggcggagagaactcagcgaggattctgaggctcagctatgtgaaccatgcagaggacctggcctccaagctcctacaatgttccccaaagaa

SEQ ID NO: 343117 - DNA, 137 bp, Homo sapiens
caagccgctcttccccacctgcccggtgcccgaggaggcagccaagctcgtagcctgccactccgtgcgaggcaagtgaggcctatctggttggcctttttgaagacaccaacctgtgtgctatccatgccaaacgt

SEQ ID NO: 343118 - DNA, 95 bp, Homo sapiens
aaacatggcggcggcgggtgttgtgagcgggaagggttatcaatgccgggaagagcacacacaatgaagaccaagccagctgtgaggtgctcact

SEQ ID NO: 343119 - DNA, 82 bp, Homo sapiens
gcaagagcagtttactgttgcgttttgcagacaacactttctcagggggatatgagactttctactcggaatatcctgagtg

SEQ ID NO: 343120 - DNA, 101 bp, Homo sapiens
gaatgagacttctgcagtttgttactggaacctgccgattgccagtaggaggatttgctgatctcatgggttcttgatacatatttgccagacttcaagat

SEQ ID NO: 343121 - DNA, 83 bp, Homo sapiens
acttacccgagaacgtgcgggaagagaagatcatcgagcatttcaaacggctggagcagccctacttcagcgccaacgcccag

SEQ ID NO: 343122 - DNA, 59 bp, Homo sapiens
tctcatacacctgtctctattcaggaagagatagatcactcctctgccaaagatcccaa

SEQ ID NO: 343123 - DNA, 96 bp, Homo sapiens
cctgcggtttggagatgacatcaaggccagcataagccttaacctgcctaactgctgaaagtctggagtaagtgaccactgggctttggatgatca

SEQ ID NO: 343124 - DNA, 74 bp, Homo sapiens
tgcccctgagttcaagttcatgccaccaccgacttatactgagcttttcctccgcaaccatgtctgacaaaccc

SEQ ID NO: 343125 - DNA, 75 bp, Homo sapiens
ggtacaggtgccctgcggacacgttgcagtcattggagaaatcgatgaagaaacagattctgcgcttgatttggg

SEQ ID NO: 343126 - DNA, 98 bp, Homo sapiens
attgttgcacaatatcgacctgaagaaacctctgtagaggagcaggatgcaaccgacaggctgtggccggacagctgctgcccagcacatggagcctg

SEQ ID NO: 343127 - DNA, 100 bp, Homo sapiens
gagacatcaaacttactaaagacggcaatgtgctgcttcacgaaatggtgattgtagagaaggctccaaaagccagggtgcctgatctggacaagaggaa

SEQ ID NO: 343128 - DNA, 97 bp, Homo sapiens
tcagccaaagaaacaagccgtggaataggtgtatcaagtaatggtgcaaagcctgaaggtctattgacattcagggatgtggccatagaattctctc

SEQ ID NO: 343129 - DNA, 100 bp, Homo sapiens
gacagctccctgggcaccaggcagctaacagttcaaagaggaaatctcccggaggtttaaggctcagcaggatcagctggtcctgatcttcgcaggcaag

SEQ ID NO: 343130 - DNA, 126 bp, Homo sapiens
ggagaaacaacaactgctacatctgttggaggagccaactagcatggaagtgcaggctccgagctctgtccagtggtgggagtattacatcccctcctctttctccagcattgccgaagtataaat

SEQ ID NO: 343131 - DNA, 98 bp, Homo sapiens
ctccggagcacgggcacgacgggggcaccttctcggctgctatgatcagggccaaagcggtcagtgagaaggaagtggactctggaaacgacatttat

SEQ ID NO: 343132 - DNA, 78 bp, Homo sapiens
ccggcgccggagacgatgccgttatgttcctcctgctgatcaagagaagctttttatccagaagttacgtcagtgttg

SEQ ID NO: 343133 - DNA, 90 bp, Homo sapiens
gatcttcacaacagtttagtgtggatactattttcagctgaactctcatctctcaacactggcaaatattcataagatctaccacaccct

SEQ ID NO: 343134 - DNA, 50 bp, Homo sapiens
tccctgtcgtgtgacattttctggaaatgcaacctcaccacaagtacaaa

SEQ ID NO: 343135 - DNA, 50 bp, Homo sapiens
tcaggtctggagctcgaccgggccagggatttgtcttggctgttactatg

SEQ ID NO: 343136 - DNA, 100 bp, Homo sapiens
actacgagtaccagcactccaatttgtatgccatatcaggcaaggagatgagacaccatctacaaataatggaagtgatgatgagaaaacaggactcaag

SEQ ID NO: 343137 - DNA, 75 bp, Homo sapiens
taccactgctgtctggaaatcacgaaggtagcagcaattgcagagacagatgaatctgcagaatcagaaggtgta

SEQ ID NO: 343138 - DNA, 100 bp, Homo sapiens
ggccaatgtcttggatgagcctgggcaagacttggaggcagacttccctaagaccccaaatccagggttttccaaagtgtggttcaagaaccacctgcat

SEQ ID NO: 343139 - DNA, 83 bp, Homo sapiens
ctggacctgcggccgcccgtgtgtgacgtcagaaatggtggagtcaatgaagaaagtagcagggatggatgtggagctgacag

SEQ ID NO: 343140 - DNA, 51 bp, Homo sapiens
tagaacagttcaccgagactcagatcactttgggaagcagtgacatccaac

SEQ ID NO: 343141 - DNA, 74 bp, Homo sapiens
caaaacagtggttttgcatatagatggccttgatgatacggttttatgacttacctagtggagcctttatttac

SEQ ID NO: 343142 - DNA, 83 bp, Homo sapiens
cctggggttttactctaaagggtggcctggagcacggagaaccattaatcatctctaagtgggaagtaccttctgtctatagt

SEQ ID NO: 343143 - DNA, 50 bp, Homo sapiens
cccatcactccaaggagagaaggtttttgtcatccattggagggacactg

SEQ ID NO: 343144 - DNA, 50 bp, Homo sapiens
agaggatgaggaggtcataagtcaagagtgatgacgaacagagtgattgg

SEQ ID NO: 343145 - DNA, 87 bp, Homo sapiens
ctggaaactgtacattgaagcagagacaaaggactggtggacatatgaattctgttatggacgccacatccagcaataccacatgga

SEQ ID NO: 343146 - DNA, 80 bp, Homo sapiens
aagaaggaacggaaacaaagttattttgctcgtttgcaatggattttggataaacaagatctgttgaaggagcgccaaaa

SEQ ID NO: 343147 - DNA, 99 bp, Homo sapiens
ccagcaacatggcactgggcaagttccgggccgcgctgcgagactacgagacggcccggaggctgtttgatgtcctgcacgagcccttcttgaaagtac

SEQ ID NO: 343148 - DNA, 100 bp, Homo sapiens
tttcagatcttcaacaggtgtggcatgaacaggtggacactagtgtggtcagccagcgagccaaggatctcatggtccggaatgacaccccctgtggaac

SEQ ID NO: 343149 - DNA, 85 bp, Homo sapiens
gtctggagcaaggaaaaaaacctctgaccgtgaagagacatgagatgattgccaaacccccagtggaaggaacaagcagtggcgc

SEQ ID NO: 343150 - DNA, 83 bp, Homo sapiens
gttagtaacccaggcagatgtggaaacagagatgcaacagaattgtcgagaacggtcaagaaagagtagaagttgaagaagat

SEQ ID NO: 343151 - DNA, 100 bp, Homo sapiens
cagaacccaagagcagtggattcccagtgtccccacgagctgtgtggtccatgatgagtgtttgagaacaaagataagattgtgatcatcatggaatatg

SEQ ID NO: 343152 - DNA, 100 bp, Homo sapiens
atatctcatagacctaatgcatgataagaataatgaaatccgaaaggtctgtgataatacattagatattatagcggagatgcctacatagaagagtgac

SEQ ID NO: 343153 - DNA, 100 bp, Homo sapiens
ctctacccgcagagtctgatggcagcggccactctgaggacgccaactcagcaactacactgcgctgcatcggactcgacgcccgctggtgacgcacacg

SEQ ID NO: 343154 - DNA, 83 bp, Homo sapiens
ctgcggtctcggatattgccgggtttggtgcacctcgatttggaggaagtagggcagggcccttatctggaaagaagtttgga

SEQ ID NO: 343155 - DNA, 50 bp, Homo sapiens
ggttcagccctttgatgaccgcagcagaacctagaagtcggaatccggaa

SEQ ID NO: 343156 - DNA, 100 bp, Homo sapiens
cgacgagcttgttttgtcccggactcgtggcaaagagcaatgacaatgcgaaaagtcttacaagaaatcctggagaagaatccgagatttcaccacctga

SEQ ID NO: 343157 - DNA, 100 bp, Homo sapiens
ttgatcgctggacctggccctgcgaccccagtcatgggccagacctcggtgtccacgctgtccccgcagcccggcagcgtggtattggaaggaactggcc

SEQ ID NO: 343158 - DNA, 88 bp, Homo sapiens
gtgacttcagagacactgccaagcagccttagccctagtgtagaggaagttggtgaaccatctaaagaagagaaggctgtggccaagt

SEQ ID NO: 343159 - DNA, 100 bp, Homo sapiens
ccgtggtggtggtggatatggtggcagtggggatggctataatggatttggtaatgatgggaattcctggggaagtcggagcctgagcaccagcactgag

SEQ ID NO: 343160 - DNA, 97 bp, Homo sapiens
ggtggaggtggcaagatgagacgagaaagaacacgctttgttgcttctaaacctctggaggaggaggaccctgatgctcccataagacagaaaatgc

SEQ ID NO: 343161 - DNA, 83 bp, Homo sapiens
ctccattggatttaaaagacagtcctcgtcagcactgactttcagctatggaatcgggacttaagtcacaacagattatcttt

SEQ ID NO: 343162 - DNA, 113 bp, Homo sapiens
gaggtgatgaaccaaaatttggcctattatgcagctatgcttggagaagaacacaccagatccatcggcccccgtgagaacatcctgaagagggtagaagagaggtctgagcg

SEQ ID NO: 343163 - DNA, 83 bp, Homo sapiens
gtcgctggagcgggcggagctgtgcgagagcctcctcacttggttgctctaggtcgtaaccagcctttgaaaaaggagaaacc

SEQ ID NO: 343164 - DNA, 74 bp, Homo sapiens
cagctccggccgcctggctccccatactagtcgccgaaagcgtggatacccatcaacgaagttttgatattgga

SEQ ID NO: 343165 - DNA, 75 bp, Homo sapiens
gttccccgacaagtttggatcctgtgttccccgtagatcatgccactaatcgtacccagtttggggagaaaattc

SEQ ID NO: 343166 - DNA, 50 bp, Homo sapiens
cctaaggaaaaacgtctgacctgcggagtcaccaggagactaaagtccat

SEQ ID NO: 343167 - DNA, 75 bp, Homo sapiens
ggattctcgacctgctaacagaactggaccttttcgataaagcatatgatggctttcattgaacaagaagccaat

SEQ ID NO: 343168 - DNA, 96 bp, Homo sapiens
ccattgacgccatgtcgggttattcgagtgaccgagaccgcggccgggaccgagggcaaaaccccagtcccagctggagaggaagagggtgagctg

SEQ ID NO: 343169 - DNA, 83 bp, Homo sapiens
gtttgccaatgttggagccgtctgcaaagtgtccccggcaagaagttacagaatgtctgaaggggacagtgtgggagaatccg

SEQ ID NO: 343170 - DNA, 102 bp, Homo sapiens
ggaaaatcaacttcagcttagctgttttatcaatcaggaagtcaagtatctttttacaggacttaaattgaattaaacaaccaccatgtcgagcaaaaaggc

SEQ ID NO: 343171 - DNA, 50 bp, Homo sapiens
gacgagtccggaggggctgccgcgggagggaagatcagttttcctgccat

SEQ ID NO: 343172 - DNA, 88 bp, Homo sapiens
agtttctggtcactccccaggattatgcgcgagctgaaaccaccaatgggtgaggtcgtcacccctacggccccccaggagcctcctg

SEQ ID NO: 343173 - DNA, 89 bp, Homo sapiens
agcccgtctgacaatagcagtgctatgttactgcaatggcatgaaaagggcaattgaaggaacagactaaaaatcgtgtcctggaagga

SEQ ID NO: 343174 - DNA, 50 bp, Homo sapiens
agcctcaggctttaggaactgaagagatatggaatatatgaacgctgtcg

SEQ ID NO: 343175 - DNA, 74 bp, Homo sapiens
cttgccctcatcctggttctggaatcctcagttcaagtggcaatgaggatgacttgttctttgaagctgatggc

SEQ ID NO: 343176 - DNA, 110 bp, Homo sapiens
acccatcctgccgtccttctccactttcgccagcccgtgccgcgagcgcggcctgcaggagcaaattgtggctactaatttgccccctgaagatcaagatggctctgggg

SEQ ID NO: 343177 - DNA, 82 bp, Homo sapiens
atcatagcaacattccgatcatgggcaggtatgaaattgaaggctgtgaagtgatttgggccattaaagataaagctatagg

SEQ ID NO: 343178 - DNA, 71 bp, Homo sapiens
tcaagaaagaggctgaaaacccccgagaagttttggatcaggtgtgagcattttcgatccatgttccagtc

SEQ ID NO: 343179 - DNA, 100 bp, Homo sapiens
gtggtacccttgctccaagatgcttcccaaaaacaccagctgtggggccatccatccagacattgcccacatggagcggctcctgcagcaggccatggcg

SEQ ID NO: 343180 - DNA, 96 bp, Homo sapiens
ctcctaaggagctggtgtcttcatccagaagggacagtttgtgccagctctccagagagaaaagatcattgtaatggcctgccgagaatttgagat

SEQ ID NO: 343181 - DNA, 100 bp, Homo sapiens
aacttcgtactttctatgagaagcgtatggccacagaagttgctgctgacgctctgggtgaagaatggaaggtggctatggcggttccagcagcagcagt

SEQ ID NO: 343182 - DNA, 100 bp, Homo sapiens
ggagaaattgtatacactggaacagaatcaacccagaacggagagctccctcctagaaaaggtccttgaatgggcaagagggcacatgaagtacggcgtc

SEQ ID NO: 343183 - DNA, 90 bp, Homo sapiens
ctgattcagctcagccttacaagtggcgggggaaagcacacaggagcttcctggacgatttaacaggtcctcaagcgagtcttcaaagaa

SEQ ID NO: 343184 - DNA, 75 bp, Homo sapiens
gatctttattcccagatctcctctgtccccatagatgaagattatggaagagattcgggccctcccactaagaaa

SEQ ID NO: 343185 - DNA, 75 bp, Homo sapiens
aagaaaatcgcccagctcaccaagctttcactttcagaagaacagaatgaagtaatgaaaaatggctgtgaatct

SEQ ID NO: 343186 - DNA, 100 bp, Homo sapiens
gaccaatgctcaagtgatggctggttttcaggaactcataaatgccacctcaacaattcagaggagaacctccatttctaccagaatcctttgaccgaat

SEQ ID NO: 343187 - DNA, 82 bp, Homo sapiens
aaatgccctcaaacgcgccaacgggtcatctataacgaagttatacagacctccaagtactacatgagagatgtgactgcca

SEQ ID NO: 343188 - DNA, 100 bp, Homo sapiens
ctgttgagtatgctccatgtagatcacatgccatggacaatattaccaggcagaaccaattctacgatacccaagtcatcaaacaagaaaacgagtcagg

SEQ ID NO: 343189 - DNA, 100 bp, Homo sapiens
atcttgttgactatgaggaagttctagggcttctggttgggactcttgattcagtcttggactctactgctaaagtagctccatttcgcatcctacacca

SEQ ID NO: 343190 - DNA, 50 bp, Homo sapiens
cacacacaagatctaccacctgcagaggtgaatcacaagcctttgagaac

SEQ ID NO: 343191 - DNA, 83 bp, Homo sapiens
cccgaaggaaaaggaggaattcgccgtgcccgagaatagctccgtccagcagattaactgctgaagtactgatcgagttctgc

SEQ ID NO: 343192 - DNA, 75 bp, Homo sapiens
aagaggcaaaacttcggacatagaggccaaccaacctttggagcgtcgtctcggagatgcagccaagaaagccat

SEQ ID NO: 343193 - DNA, 96 bp, Homo sapiens
ggagccaggggcccgagggcggggaccggcggcgctggaggagcgaggcagctgtactaggactgggaacggggcctgtatatcattgggatcaag

SEQ ID NO: 343194 - DNA, 138 bp, Homo sapiens
aacagatatactaaagcaggctaccaaggacagagtcagtgatttccataaattgaagcaaattagaagaacccgaagaacctaaagtgctaacaccagaagaacaattagcagataaactgcggctaaagaaattac

SEQ ID NO: 343195 - DNA, 74 bp, Homo sapiens
gttaatcctcaatttaagcctgatctaacccctagaaacagattgtttgggatgaaaagaaaaaccagtgggtg

SEQ ID NO: 343196 - DNA, 100 bp, Homo sapiens
ggtcatctaaaggaggttttaaacagtataacaggatagaccatgaagctgaaggaacttgagcggccagctgtccaggcatggagcccagccagccaat

SEQ ID NO: 343197 - DNA, 82 bp, Homo sapiens
gatcatgtctgcgagccaggattcccgatgatatcatcaagttgaatcgaaaggaagggaagaagcagaattttccaagact

SEQ ID NO: 343198 - DNA, 136 bp, Homo sapiens
agtaaaccacagactacgagggagtttgacagctattaaaaccagggctccacagttaggaggctctcctggggtttgctctatgctggtttcatcttcattatggcccttttcttggcacttgttataagatcta

SEQ ID NO: 343199 - DNA, 50 bp, Homo sapiens
accgtgatctcaagtccaacaacagacagtcattttgtttactcattcag

SEQ ID NO: 343200 - DNA, 76 bp, Homo sapiens
ctcttccagaccattcacaagactctgcgctcctcagaccaccggcaggtgaacagcctgatgcagaccgaggagt

SEQ ID NO: 343201 - DNA, 50 bp, Homo sapiens
ttctcctattgaggagtcaacggaggacatgtatgcccaggactctatag

SEQ ID NO: 343202 - DNA, 90 bp, Homo sapiens
gaatcctacctgtttggtccttattattcttctgtttattagcattatcttgacttttaaggtttcaaccgcagcggaggtggtggctat

SEQ ID NO: 343203 - DNA, 74 bp, Homo sapiens
gccgggcccggcttcccagcctgacgtgccctaaagtacatgccccacgcagtcctcaaactcctggagaacat

SEQ ID NO: 343204 - DNA, 75 bp, Homo sapiens
gaagacgccgaggaggcagagcaccgcggcgccgagcgcagacccgagagaatgagtctgcaggtcttaaacgac

SEQ ID NO: 343205 - DNA, 82 bp, Homo sapiens
gtcgaggaggcgcaggagactgaccgcaacggcagggagacatatactgcctggactgcctggctgatgtgagctagtttgt

SEQ ID NO: 343206 - DNA, 96 bp, Homo sapiens
tgttgctaccgactcccaggagcccatctgcagcgatgcagctggggctgcagaagggaccctgcgtgcagtggtggagtccattgatgattacgt

SEQ ID NO: 343207 - DNA, 100 bp, Homo sapiens
ctgcgacggaaacaatcgccagagatgccggggctagccttccccaccagtattggatgaacgaatatacctcatccattggaattggagtttttcattc

SEQ ID NO: 343208 - DNA, 75 bp, Homo sapiens
atatagtgaagaagttactcctattgcagtagaaatgacacaacatttgatcaccggggaacccttgatccgtcg

SEQ ID NO: 343209 - DNA, 51 bp, Homo sapiens
cagatcgggacttacagaagtctaccaatgagtctcgctctgtcacccaag

SEQ ID NO: 343210 - DNA, 82 bp, Homo sapiens
aagatcatcattaaggacggaggcacgtcgttgcttagcaaatctaaggcctcttttagattctggaacaatgggcactaag

SEQ ID NO: 343211 - DNA, 99 bp, Homo sapiens
aaagctgcgggatacaaagtcagcccaggcagacctccagaactttgaccagaataagctggaagaagaaatgagaaagcgaaaagaaagagtagaaaa

SEQ ID NO: 343212 - DNA, 100 bp, Homo sapiens
aacaatcggcaaggggaattttgcaaaagtaaaattggcaagacatatccttacaggcagagagcaataatgacgatgaggacctgacaccagagcagaa

SEQ ID NO: 343213 - DNA, 96 bp, Homo sapiens
cgctaggtggcatctcctctcacggatgcctcgtgccggtggtggtgtgcacattgagccccggtatagacagttcccccagctgaccagatccca

SEQ ID NO: 343214 - DNA, 90 bp, Homo sapiens
ggatctttcccatagaactttacagtaatctatgccagcaattatgacaatgttagcagaccatgcagctcgtcagctgcttgatttcag

SEQ ID NO: 343215 - DNA, 90 bp, Homo sapiens
caagatccggcccatagccgagcagactggcatctgtaaggtgcggccgccgccggtgcgagacaagaagcttctcaatgacctgaatgg

SEQ ID NO: 343216 - DNA, 89 bp, Homo sapiens
ggaagaggagcgggagcaggagcgcggagcggagcgtcccgacccgccgttttcaaatggaacattttgatgcatcacttagtacctat

SEQ ID NO: 343217 - DNA, 51 bp, Homo sapiens
gagatgcctggcagccccgctctctgcaattcaagtcaatctgaaagtccc

SEQ ID NO: 343218 - DNA, 97 bp, Homo sapiens
tagatggattagctccagttcgctctagcagacaagatcagatccacaggtggatgatgaagacttacaagatgaacctttacagatcacagttctt

SEQ ID NO: 343219 - DNA, 74 bp, Homo sapiens
agtgcttttatattcccaaaatacaggatctgcctccaggatacaatgtctctttgctatatgaccttgaaaat

SEQ ID NO: 343220 - DNA, 100 bp, Homo sapiens
ggaacgggacaggaggagcggcggatggggcacgcacagagtgcaagacgctgagcaatgcaggctgctgagcttcgtgcttatctgaaatctaaaggag

SEQ ID NO: 343221 - DNA, 100 bp, Homo sapiens
ggagagaagacctcatctggatgccaggcccaggaattcccataccaaccacagagcaatctgcagagcgctgtgtaagcacattgcttgatctaatcca

SEQ ID NO: 343222 - DNA, 75 bp, Homo sapiens
gccgcagcctgtggctgtgcagggccccgagccggcccgggtcgagggggcagtgcccaaaggaaatgccactaa

SEQ ID NO: 343223 - DNA, 100 bp, Homo sapiens
ggctgcggcagacggcgacagtggcggcggcgccatggcagggcttgcaggtaccttaacatggggaatcttcttaaagttttgacatgcacagaccttg

SEQ ID NO: 343224 - DNA, 75 bp, Homo sapiens
ggattatactgtactgcccatgaaaaaggatgttgaccggacagagactctccaacatgtgccttctgaccatac

SEQ ID NO: 343225 - DNA, 100 bp, Homo sapiens
gtgtacgacgcgcacaccaaggagatcgacctggtcaaccgcgaccctaaacacctcaacgatgacgtggtcaagggtctactgttatgagaagaaaacg

SEQ ID NO: 343226 - DNA, 156 bp, Homo sapiens
gagaggaaaaggaaaagggaagggagagaaaaaggagagcctctgagctcaacggaggattgtgcctgagaagaacccacagaggaaagaccacagcaagattctttcattcgtctcctcctagcctgggggaccaggctcgaactgaccctggac

SEQ ID NO: 343227 - DNA, 50 bp, Homo sapiens
ggatggaacacttcagtgcattcaagatagcagaatcctatttccaggag

SEQ ID NO: 343228 - DNA, 76 bp, Homo sapiens
acaaagaagactttgcttcattaaagtgtctgagaaggaagggccgcgatgggcctcttggaacattggtgtgttc

SEQ ID NO: 343229 - DNA, 101 bp, Homo sapiens
ccattgctccggcgcgttctcaagggcttgcagctggatcatgttctaattgagctcacccaggctggattgaaaggctccacagagggaagtgagagcta

SEQ ID NO: 343230 - DNA, 83 bp, Homo sapiens
ctgcttcttgtatagtgaaatccatgagcgtggatgagacagataagtatttgattttcatcaagcagctgatggtatccagg

SEQ ID NO: 343231 - DNA, 104 bp, Homo sapiens
gtgcaagcagcttccaagccctcaaagtttgaaaggcaaaattctagtgaaggatcagctcagctactatttaataaaacaaaatctgtagaattcacgttttg

SEQ ID NO: 343232 - DNA, 82 bp, Homo sapiens
tctgtccacgatagtgccaggcctatgttggaggccaagtcctgtatctgccatgtctgtggcgtccacctcaacaggctgc

SEQ ID NO: 343233 - DNA, 100 bp, Homo sapiens
gaaagctccaaatctgggtcctcaaagaggaacaaagtcatcaagctagtggacatcacggacatccagaagcacatacccccggcctcatgagtacctg

SEQ ID NO: 343234 - DNA, 50 bp, Homo sapiens
cgcgtggaacggctgcttttggaagcccaatcaattgagcagagactgat

SEQ ID NO: 343235 - DNA, 101 bp, Homo sapiens
tttgttctcagctctgctgcctcatgatccagacctgtcctataaattagccttacgtgccatgaggagcagacgcctccgcctagacctgaagcctaccc

SEQ ID NO: 343236 - DNA, 87 bp, Homo sapiens
cgaccgagcatcctggcggcgccgggccactgggaggtgcaggtgggaagcacacctcaggaccaaagaatcgtcgggtacatcgcc

SEQ ID NO: 343237 - DNA, 75 bp, Homo sapiens
aaaagaaaaatattgctgtacctaaattcaatgccaggcttcccgtatccagcagccaccgccgcggccgcctac

SEQ ID NO: 343238 - DNA, 75 bp, Homo sapiens
tctatggtgcagatattaatgggagcatatatgatgaggcagaagaaatccttagacaagagctggagaaaaaag

SEQ ID NO: 343239 - DNA, 100 bp, Homo sapiens
tcatgtgattcagcctaatatctcagggaatttagtgatggctccaatgaagctggtggtatctaccaagtcctagaaataccatatgaaggagatgaaa

SEQ ID NO: 343240 - DNA, 100 bp, Homo sapiens
cagaaagtcggcagagcactgtgattgcttgcagtgtttctttataatacattccatgggaggagtgcaccaattccagctggacatcactgtgaaaatg

SEQ ID NO: 343241 - DNA, 100 bp, Homo sapiens
agagcggcaagatatggcaccgcaagccgtccccggccacgcgggacgggacacattcagctaacgtattttagcaggtggagtgaggttgaagattcct

SEQ ID NO: 343242 - DNA, 75 bp, Homo sapiens
gccgagggtggccctaggggcagcgagcaagacagcaagcaggtgaccagaagtcagcagcttcccagaagcccc

SEQ ID NO: 343243 - DNA, 99 bp, Homo sapiens
ctcaagggatttatgtcatatctgctccttccatctacgctcgggagctgctggagccagttctgcttctcggcaaggagcgatttgctggtgtagaca

SEQ ID NO: 343244 - DNA, 75 bp, Homo sapiens
agtccacccaccgccgccgcctcccaggcatttggctttatgtcccgagttgccctacaagcagagaagatgaat

SEQ ID NO: 343245 - DNA, 148 bp, Homo sapiens
gataaattagatgcttcagaatcactgagaaaagaagaagaacaagctacagagacacaacccattgtttatgggtccacatatagcctcagttacattagctgcttatgaatgcaattcagttaattttcccgaaccaccctatcct

SEQ ID NO: 343246 - DNA, 100 bp, Homo sapiens
ttttattctaatgggcctctctgtgttcatgacttcagtcctaaaggctcctatggatattccaggtttaaacctgagtcaacaagaatactacccctat

SEQ ID NO: 343247 - DNA, 75 bp, Homo sapiens
agaaaatacaaatcacacgcataatggatgaaaggaaccgacagcatcaacaacagcaacttgtgattggcggtg

SEQ ID NO: 343248 - DNA, 80 bp, Homo sapiens
taacccaaaggaggaaacagctggctaagctcatcattgttactggaggtcctgcacataggaagcgcccacaaccgaag

SEQ ID NO: 343249 - DNA, 90 bp, Homo sapiens
aaatgtcaagaatatgaaatgagtctggaaaactgggccaaagcagtgaaacgctccatgaattggcattgaatgccccagaggagcccg

SEQ ID NO: 343250 - DNA, 100 bp, Homo sapiens
ggcagaactggctcatctatacatatggagtcactaactcagggaaaacccacacgattcaagggatggtgaagcatattacaggcagttacaaggtcac

SEQ ID NO: 343251 - DNA, 100 bp, Homo sapiens
aggaagagcgcagtggctctgccgacgccgcgttcagaaagcaccagcagacgtttttgaatcaactgagagaaattacggggattaatgacacccagat

SEQ ID NO: 343252 - DNA, 76 bp, Homo sapiens
tttcgcccctcgcgtccggagtccccgtggccagaactgaagcagattacctggctcagtgtcacagggctgctga

SEQ ID NO: 343253 - DNA, 100 bp, Homo sapiens
aatcatgtcaagcgaagccttgaaaaagctgccctgagacggtgtcccgccgaaaggtgtctgacttccagcaactgctggcctgtgccagggtgcaagc

SEQ ID NO: 343254 - DNA, 100 bp, Homo sapiens
caggttgccttggaaaatgccaacgccgtgtctgaagcagctggatccgcctcagaaggagcagctggggagtgctcttgccgagatggaccgacagctc

SEQ ID NO: 343255 - DNA, 100 bp, Homo sapiens
tatatagcatcttgcatgttggggaccacacggaatttgtcaaaaacctgctgccaaagtctataggcgctaatgtgcatgctacaacagcaacaggaga

SEQ ID NO: 343256 - DNA, 100 bp, Homo sapiens
ggaaaacagaatggaactgtggtccagtatcttcctggccaggaaggaatactgggagaatcttcggatagcctcaggccggccatacaacccttcaatg

SEQ ID NO: 343257 - DNA, 89 bp, Homo sapiens
ttctctccgtgcaacgctggcaagtctcaaagtcgccacagggggcaatggcggcttcctgtgttctactgcacactgggcagaagatg

SEQ ID NO: 343258 - DNA, 100 bp, Homo sapiens
gcatctattacatccaccagtgcagctgcagggggtgtcttccaaccttttctttgtagaacacaactttcctgaacaggaaatccaagagggcaaaagc

SEQ ID NO: 343259 - DNA, 113 bp, Homo sapiens
aggtgatccagcaaggtcggcagagcaaggggcttacgcagaaggacctggccacgcccgtggaccgggagcccgtggaccgggagccggtggtgtgccaccccgacctggag

SEQ ID NO: 343260 - DNA, 76 bp, Homo sapiens
tttgcctagaggctatcacacgttctaccaagatgtaaaggactggtggctcttcgggttctatttctgtatgccc

SEQ ID NO: 343261 - DNA, 100 bp, Homo sapiens
gacctcaagaagcagctccacgaaaggcagccgcggatcgccgcgctcagcgacaaacaatgctggccagaagagctgtgcaggagtacatcattacagc

SEQ ID NO: 343262 - DNA, 90 bp, Homo sapiens
tcgcctccaggccaagagggatccttcacccgtgtctggtcagttcaccgggacctggaggcccagattgcgatcgtgacggagaaccag

SEQ ID NO: 343263 - DNA, 82 bp, Homo sapiens
cagaatattcctgttcctactacagttcctgttcctggatctttctttcatcaaggtgataaacgtgggccagcgattttta

SEQ ID NO: 343264 - DNA, 95 bp, Homo sapiens
gccgctgtgctatatcacaagatgaacaatgagaagcaggcagaagattgcatcacacggtaaagaggattaggctgccttcagccaaatctgtc

SEQ ID NO: 343265 - DNA, 100 bp, Homo sapiens
ggaaaccagctgcgctgtcctaaatgtggcgacttgtgcacacatgtagagacctttgtatggatcaagcatgaattgcaagcaaactgctacgaggagg

SEQ ID NO: 343266 - DNA, 104 bp, Homo sapiens
gggatcgctgcaacctttagactaatgactgtccgaaacatcgcctccatctgtaatatggttttcctcctccaccaggcgctccacctccatctcttatacca

SEQ ID NO: 343267 - DNA, 100 bp, Homo sapiens
ttatagcaaaatacccacacaaaataaagagtggagctgaagctaagaaattgatatgtgtaacacaccaacgtactgtgacctaggaaaggctgctaag

SEQ ID NO: 343268 - DNA, 74 bp, Homo sapiens
ttcaacgcctccaaaaagccaaactacagcgaactggacacacatacaggcatgcattcctcagcagcaactga

SEQ ID NO: 343269 - DNA, 82 bp, Homo sapiens
ctgcagtttgcaatatgactttggaggaattctcggctggagagcagaagaccgaaaggccctgggaggagcggggacactg

SEQ ID NO: 343270 - DNA, 100 bp, Homo sapiens
gaaggacctctggccacccggattgttcctactgacatgaatgaccagaatctagaagagccatccagatatgcttgtgtagtaaaacgtgaatttaaga

SEQ ID NO: 343271 - DNA, 100 bp, Homo sapiens
ccatgcaggaaatggaagaatgtccaataagcaagaaaagagcaacatgggagactattcttgatgggaagagtacagttgtgaatttggctccgcgaag

SEQ ID NO: 343272 - DNA, 96 bp, Homo sapiens
aactggcactgattcaaattcaacagaatcctctgaaacttccacaggtgccactgattaatgaacttgaatcagcaatacatcagctgtacaaac

SEQ ID NO: 343273 - DNA, 75 bp, Homo sapiens
cgtgcaccggggcggtccgttgccaaagccagagagaaaaggaacagttccgtaagctctttattggtggcttaa

SEQ ID NO: 343274 - DNA, 82 bp, Homo sapiens
atcaagcagaatgtgatttgcttgaagatatgagttaataaaggtatccatggagaacactgaaaactcagtggattcaaaa

SEQ ID NO: 343275 - DNA, 99 bp, Homo sapiens
cgaacactggacacaggactggggaagactggatttcagcttaggagaagacactgggccatctatgttggcgatggatatgtggttcatctggcccct

SEQ ID NO: 343276 - DNA, 90 bp, Homo sapiens
accagatgtacttgtgcttcctgctggccgtgctgctgcagggtttcgaaaaaacgatgaaatgaaagctatggatgttttaccaatttt

SEQ ID NO: 343277 - DNA, 97 bp, Homo sapiens
gagaggcacggaggagccgctggggctgccgccacggccgcccggaggtgctggagaatctggtaaaagcaccattgtgaagcagatgaggatcctg

SEQ ID NO: 343278 - DNA, 52 bp, Homo sapiens
taatcccagcactttgggaagccaaggcaggtggatcatgaggtcaggagtt

SEQ ID NO: 343279 - DNA, 74 bp, Homo sapiens
ctgaatgacgcctacggaccccccagcaacttcctcgagatcgatatgaggaggccgactacctcggcgtgcgt

SEQ ID NO: 343280 - DNA, 90 bp, Homo sapiens
ctctcccgcctgaaggcaccttggccaggtccccgtccattgatagcattcagaaagatcccagtccacctaaacccactgtgttcatct

SEQ ID NO: 343281 - DNA, 98 bp, Homo sapiens
ctagagagatcccggctcccagcccactgagtggcttcagcctcgctgaacagaaactgttcatacttggtgcgctgtggactcttgtgataattaac

SEQ ID NO: 343282 - DNA, 74 bp, Homo sapiens
gcaatttgaagatacatgagacagcagccaaacccccaggtacttgaagtttattgagttgcccttgactcaga

SEQ ID NO: 343283 - DNA, 75 bp, Homo sapiens
aaggtttacacttgtcaacttcctcttcagtcatcagtatggcaggatggtggctggcaaagtgttgatggcaaa

SEQ ID NO: 343284 - DNA, 50 bp, Homo sapiens
taaaactccaagaagccaggtgttcaagaaataaaccccagctctctagc

SEQ ID NO: 343285 - DNA, 82 bp, Homo sapiens
caagccgctggcagccgcggatctcaccgccgctcaggaagatggcagtgaacgtatactcaacgtcagtgaccagtgataa

SEQ ID NO: 343286 - DNA, 59 bp, Homo sapiens
cggttcgctgcccggtccgcccgcggtgagaggatttttagactctgaggagcagttgg

SEQ ID NO: 343287 - DNA, 75 bp, Homo sapiens
gctccacttgccgagcctgatgatggggacgtgccgcccctttgcgggtgggtttggaggatttgggacaacatc

SEQ ID NO: 343288 - DNA, 100 bp, Homo sapiens
cagattgggccaacatgttccaacactacatccgaattttgaagatgtaactgagtttctggaagaggtcattgaagccttgatattggatgaggaagtt

SEQ ID NO: 343289 - DNA, 97 bp, Homo sapiens
taaaatctcccaagaggaatgacaaacaaccagctcttcaggtggggaacgccaagcacaacgtgcatgtcatgaacatctccacaggcaagaaagt

SEQ ID NO: 343290 - DNA, 80 bp, Homo sapiens
tcagtgcccgctttgttcagctgcagcatggagagatagataaacgggaactgtggctgcaccatctgtcttcatcttcc

SEQ ID NO: 343291 - DNA, 98 bp, Homo sapiens
aaactcccagggcccgcccaggacccccaagccgccgcggacgcagaagcctggctacagataagggaccaaaatgactgactcaaaatatttcacca

SEQ ID NO: 343292 - DNA, 48 bp, Homo sapiens
taaaaatcattaaattggagcctgggttatgtaccgaaggactctacc

SEQ ID NO: 343293 - DNA, 80 bp, Homo sapiens
gataaactcaacatcgacagcattatccaacggctgctggaagggagcatttcctgaagacgtagtcatgcagcacgtca

SEQ ID NO: 343294 - DNA, 153 bp, Homo sapiens
cgcttaccgcctggcctctcggttccgcggcgcaccggagggcagcatgtcgcggcggcggcacagcgacgagaacgacgaaatttttaagaactatggcgctgaaaagtatggacctcattccgtttgtctaattcagaaatcagcattcgt

SEQ ID NO: 343295 - DNA, 50 bp, Homo sapiens
catcaccaccggatcaacttcgacaaatatgtggacaacagtgagtatat

SEQ ID NO: 343296 - DNA, 73 bp, Homo sapiens
caggagctgacggccgccaagaagcacggcaccaaaaacaagcgcgggcctgggttccaataaataattgcta

SEQ ID NO: 343297 - DNA, 83 bp, Homo sapiens
ctgaacttttgaagataatggcctgcattttattggtctacaaagacagcaaaagggctattgcaagacacgaagtccgagaa

SEQ ID NO: 343298 - DNA, 100 bp, Homo sapiens
gggacccggctaccctggacagcgcatcgccgcccgcccgggtcgccgcgccacagccgctgcggatcatgggaagacatgtaaggaatttgcataagac

SEQ ID NO: 343299 - DNA, 76 bp, Homo sapiens
gcctttgcagtctcgacataagtgggtcggcaccaggaattattatagaaagatcggctacagattacaaggcccg

SEQ ID NO: 343300 - DNA, 96 bp, Homo sapiens
tcccacaggaagtgtcacacagcagtcaagtatgtcccaaacgtcttcaagtccatcatctccagaaccagctagtcttcctgcagaagatattag

SEQ ID NO: 343301 - DNA, 100 bp, Homo sapiens
gatagaaattttaaagactgttgtgaacagggatgtacctaatgttgaacgtcatagagaacatctcattaactacattatatttttgagaataacacca

SEQ ID NO: 343302 - DNA, 80 bp, Homo sapiens
gaacaagcacaggcctgaaggggagcccaagggtgcacagcccctggctacgatgctctgacctttgacccctgccgttc

SEQ ID NO: 343303 - DNA, 100 bp, Homo sapiens
cagcttccaggatcctgagatccggagcagccggggtcggagcgggtccttctggcactcctctggtggaccgcccccatcggccacacttgccctgctc

SEQ ID NO: 343304 - DNA, 115 bp, Homo sapiens
ggcaagagtaacagcagcgccgtcccgtccgacagccaggcccgggagaagtgagaagccctaccactgcaactgggacggctgcggctggaagtttgcgcgctcagacgagctc

SEQ ID NO: 343305 - DNA, 98 bp, Homo sapiens
gcctattattgggatgacaacttcgacccagtgaagatagtgatccggggagacaggaacacgggcaagacagcgctgtggcaccgcctgcagggccg

SEQ ID NO: 343306 - DNA, 75 bp, Homo sapiens
gcggaacgcaggagacacaagaagcggatccaggtaaaaatgtctccatcgtatcatcagtccaaaggggatccc

SEQ ID NO: 343307 - DNA, 90 bp, Homo sapiens
ttcaactgtgaatctgctcgagaaagacaggaagcagagcaagccatccagtgtctcaatggcaagttggccctgtccaagaagctggtg

SEQ ID NO: 343308 - DNA, 88 bp, Homo sapiens
accccctctcttggggtttaaggttatatcttaagtgtggtgctgctaacattgcccaggcagcatctggttcagctttatctatatt

SEQ ID NO: 343309 - DNA, 100 bp, Homo sapiens
gctgagtttcctggtagagccggccgagctgaggcggtcgcggccatgaagatgctgagggttggaaaagcaaaagcagatgtgtggcccaaaactgctc

SEQ ID NO: 343310 - DNA, 100 bp, Homo sapiens
cctgtgtccctgaccatggctccctgcagtaccctttaacggtgatgatgaacagtctacacagatggctgcaagttgggaagatgataaagttacagaa

SEQ ID NO: 343311 - DNA, 75 bp, Homo sapiens
ggaagagatgatttctccatcctgaacgtgcagcgattagcctgaggcctgctcagtcgttcctaatgaataaaa

SEQ ID NO: 343312 - DNA, 80 bp, Homo sapiens
tgtgccggaggttctgaagaagatcgtaacaacttatgacatgaccatatactccttgacgacagggactaccaccttca

SEQ ID NO: 343313 - DNA, 127 bp, Homo sapiens
catctcctcgtccgacctcacaggccgacaagatacctctcgcatgtccacctcacaggaactgctgctggagtttgaatcgaaaatgcggaagagggagcacgaattccgtctgcaggctgacaac

SEQ ID NO: 343314 - DNA, 75 bp, Homo sapiens
cagcagcgcagtaccaccttccagagatgcgccatggctgcggagcggacccggccgctgcaaggctctggcggt

SEQ ID NO: 343315 - DNA, 101 bp, Homo sapiens
ctgagacctcgggcaacctcagcagtgcgcagggctgcactgtctccgtctgcggcctgcagtaagcgggcaatgccaccgtagataagttggaggacttc

SEQ ID NO: 343316 - DNA, 75 bp, Homo sapiens
cagaaacaaaacttctattgagtcatggattgaagagaagtttggatttaggtggcgagtagaaaaagaagtaat

SEQ ID NO: 343317 - DNA, 74 bp, Homo sapiens
cagaaccggtcgaaaaccgtgtatgagggattcatctcggctcaggactcaccgcttaaggctgtgcagatgct

SEQ ID NO: 343318 - DNA, 100 bp, Homo sapiens
aaaagatggcggctgccgcacaatcccgggttgtccgggtcctgtcaatgtcacataaagagaggcctgtccagtctttgaaaacatcaagagatacttc

SEQ ID NO: 343319 - DNA, 88 bp, Homo sapiens
accagcatgaaggacatgcgcaaagttctgagaacattacagcagatcaagaaatccagctcaactagtatgttcaacacaccaggaa

SEQ ID NO: 343320 - DNA, 75 bp, Homo sapiens
tggaaaggcccagatgatatcctactaggcatgttttatgacacagatggagcacgtgcagaaactaattcccgt

SEQ ID NO: 343321 - DNA, 75 bp, Homo sapiens
gaagaatctaacaaacggcaaagaacttactgattcttgagccattatttggaaagcaggtctataaatgagaaa

SEQ ID NO: 343322 - DNA, 82 bp, Homo sapiens
ctctccgtgtggatctggcagtcggtcatccacctgctgcagatggggcaggtgtggaggcctgatcttttggccagaagga

SEQ ID NO: 343323 - DNA, 50 bp, Homo sapiens
tcaaacttcagttttactgtactttcaaacctctggttgaaagaaatata

SEQ ID NO: 343324 - DNA, 98 bp, Homo sapiens
gcccttgcagataatatgtacagaaacatgatcattgacagagagaaccagtgcgtcattatcaggaccaacttggaggccttgcagaagaagctgga

SEQ ID NO: 343325 - DNA, 75 bp, Homo sapiens
gaggtgttcgagaacgaccccgagacgaggtacttggaaggctccatcgcccctgaagacaaaggaagctgctca

SEQ ID NO: 343326 - DNA, 74 bp, Homo sapiens
cgtggtcaaggagaagctggctgtttaaggagttcatgagtaaacatgttcacttaatgtgttaccggatctgc

SEQ ID NO: 343327 - DNA, 89 bp, Homo sapiens
acagatagatgttaaggacatctgcaaatctttcaccaatgacctgcaaatgcaactggttgatcctgaagacataccagctatggaac

SEQ ID NO: 343328 - DNA, 114 bp, Homo sapiens
gtgccagatggtgttacctggagcttaaaaagctgcacgcaagtgttaaacttctgacaatgcagatcttcgtgaagactctgactggtaagaccatcaccctcgaggttgagc

SEQ ID NO: 343329 - DNA, 100 bp, Homo sapiens
gaagactctagatgtttttaacataattttagcaaggcaacaagcacaagttgaggaagagctgaagagagacctgaaaattaagaaagaaaaagacctg

SEQ ID NO: 343330 - DNA, 75 bp, Homo sapiens
aatgaaggaaaccgcactctcacactggccttgatttggcagctaatgagaaggacccagatgatgtggtaccag

SEQ ID NO: 343331 - DNA, 100 bp, Homo sapiens
ccgcaagatggacggtttcgccggcagtctcggtaactaaatgaccatggaatctggagccgagaaccagcagagtggagatgcagctgtaacagaagct

SEQ ID NO: 343332 - DNA, 107 bp, Homo sapiens
ggcttccagtggaggcattttggggcagaatacagagatatggaatcagatttgataatgggctgcattaaaagtaaagaaaacaaaagtccagccattaaatacag

SEQ ID NO: 343333 - DNA, 74 bp, Homo sapiens
ctttgtgtcccgacactctgccaccttctccagcattgtgaaaggtcggctcctgtggtttcaacagccgcatc

SEQ ID NO: 343334 - DNA, 75 bp, Homo sapiens
tgaacgagcgcgtgcagcaggctgtggcgcggcggccgcggatcctgtctacctttcatgaccaactacagtttt

SEQ ID NO: 343335 - DNA, 82 bp, Homo sapiens
ctcagcctcctgagtagccgggactacagatgaactctttgccagcagagaggatccaggaaatacagaaggccattgagct

SEQ ID NO: 343336 - DNA, 50 bp, Homo sapiens
ccatcagtattgagccaggagttgaggaatcctatgaggatggttgtgag

SEQ ID NO: 343337 - DNA, 99 bp, Homo sapiens
ctgcttcatccttgtttaatgactttggtgccctcaacatctctcagagacgaaaggcaacaattggcattgactttttatcaaaaactatgtacttgg

SEQ ID NO: 343338 - DNA, 82 bp, Homo sapiens
gtaccacactctaggtttattgagtgtaggtataaagaagctcgagcattctttcagggttctcatgtatcagccatcttct

SEQ ID NO: 343339 - DNA, 97 bp, Homo sapiens
ctagacagcagcgactagggctcgggcgccggcgagatgcctttgttcaccgccaaccccttcgagcaagacgtggattaaagaggatattcctgaa

SEQ ID NO: 343340 - DNA, 100 bp, Homo sapiens
cagcatcaagatccgtctgacagtgccggtggtggtgtgcacattgagccccggtatagacagttcccccagctgaccagatcccaggtgttccagagcg

SEQ ID NO: 343341 - DNA, 75 bp, Homo sapiens
gagcgtcttgatccttttgcagatggcaggatgacgcaaaacacggtgattgtgaatggagttgctatggcctct

SEQ ID NO: 343342 - DNA, 75 bp, Homo sapiens
gcggcgttggaggccaccgtttccaggtgctccatacttgcttgcagtgcctacgtggctctggctttgggtgat

SEQ ID NO: 343343 - DNA, 83 bp, Homo sapiens
gtttatcaaaatcacgttataatcagattttgaccaagcattttgtaagtgcacctggagcagagaggggccctcccgaggac

SEQ ID NO: 343344 - DNA, 75 bp, Homo sapiens
ctggcttcagaaaaggatgctgcagccatggagagcaacgtgaaagtgcagaggggcaagattcttgccaagaga

SEQ ID NO: 343345 - DNA, 104 bp, Homo sapiens
cctgtctggagcaaggaaaagatccctggaatatgaagagacacagtatggtagccacacccccaggagctcagtctgaatattcttggagaaagatgctgagt

SEQ ID NO: 343346 - DNA, 51 bp, Homo sapiens
cggaggcagaggtggaggcgctttgaaagttttctggatatgccgcagaag

SEQ ID NO: 343347 - DNA, 132 bp, Homo sapiens
gttgaatctgcatggaatatcaggaaactgagtccaacactatgctggtttgagttggccagcgcagaagcttattgaatttatttaccttttcagagtttccctttaagcactacttttgcctcatcctac

SEQ ID NO: 343348 - DNA, 82 bp, Homo sapiens
aacagatccaactgtttcctggttataagtcaccttcaggccattcagaggaggaaagagaggggaatatgaagtcagccaa

SEQ ID NO: 343349 - DNA, 75 bp, Homo sapiens
gggggtctctatgataggggaaggaaacttcatggtgttatggtcaacttgccgcacaaccgtgttcaaatctgt

SEQ ID NO: 343350 - DNA, 74 bp, Homo sapiens
actggaccccagcggtgaaattcgcctgtgagctggaaggaaacagtgctgttcctttgggaaccacggccaaa

SEQ ID NO: 343351 - DNA, 100 bp, Homo sapiens
tgccctcattaaagcagccggtgtaaatgttgagcctttttggcctggcttgtttgcaaaggtaatggaactgctggtccatctgaataaacgtataaaa

SEQ ID NO: 343352 - DNA, 100 bp, Homo sapiens
ctgctggtggggctcacggcgcctgccttggcgctggccggctacatcgaggttgatctcctatcaagagtttttggcatttgaatctgttttatgtgct

SEQ ID NO: 343353 - DNA, 74 bp, Homo sapiens
gaacagactagaaattgcaccacagatatatgggttatgtgtatggactcagaaaaacatatgatctacacttt

SEQ ID NO: 343354 - DNA, 90 bp, Homo sapiens
ctggctccgtgtccgacccctggaagctgatgctgctggacgccactttccggggtgcacagcaagtgcctttgccattttcatgtcgcc

SEQ ID NO: 343355 - DNA, 90 bp, Homo sapiens
aacatgcccctaagctctcagctttgaaacaagctactatgtgggcatgtgccttgcggcttcagaaaagcggctccacgccctcagcca

SEQ ID NO: 343356 - DNA, 90 bp, Homo sapiens
ccgcgagccccgcggctgagaccccgcagcctggaggagggctgtccggggctttgggaggatacttcatcgagacttaaagtcaaagaa

SEQ ID NO: 343357 - DNA, 75 bp, Homo sapiens
gcagcctgtgaggatggccacctttccaggcccaggtgacaaaaggtgagacactcacctagaacagtgccgtgc

SEQ ID NO: 343358 - DNA, 50 bp, Homo sapiens
agaggatgatgtttttggtgaagctcctggaatgaggccgcccatgggag

SEQ ID NO: 343359 - DNA, 76 bp, Homo sapiens
tagatcaccagtcaagaccctttttcaaatttgtcccatcagatgaaaagaagaaacaaggttgtcaacgagaaaa

SEQ ID NO: 343360 - DNA, 75 bp, Homo sapiens
cctcgtgccccgcaggcacccctgcactcggtggtacagtgtgatgccattagtgtattggagaaagaacatgac

SEQ ID NO: 343361 - DNA, 146 bp, Homo sapiens
gccttgttccgctccagtctggccgagttcatttccgagcgggtggaggtggtgtccccactgagctcttggaagagagcagtgagcccaaagagatagttgaaaagtccaaaatcccaggccgaagaaactcccgaactgaagag

SEQ ID NO: 343362 - DNA, 98 bp, Homo sapiens
gttgggagatggcaaagacatcttctggtcagagatacttcttaaaatggagtttcactcttgtctcccaggctggagtacaatggcatgatctcagc

SEQ ID NO: 343363 - DNA, 100 bp, Homo sapiens
agaagaagcaaaaagagatggatgaagctgctacgctcaagaacttgacaggtctaaaccagcgtcggtgagaggaaggggtataagctacaatgcctag

SEQ ID NO: 343364 - DNA, 100 bp, Homo sapiens
agcttgttatgcagcaaacagtcctagaagaattcttcgaaacattggtacaatgaatacatttaaggtatgagctggtgcccctctggtgtgcagtact

SEQ ID NO: 343365 - DNA, 100 bp, Homo sapiens
gtctctaaggccgatgaggaatttggaaacacatgtgggacatacaagcgttggatatagagccctgcctgatgtggctctgggaattcctgcagagaag

SEQ ID NO: 343366 - DNA, 90 bp, Homo sapiens
acgtgttcaatacacctcccacctgtcctcaggcatatcaaaggtttccactgtatccaaaaggaggggagaagttgcagtttgattatg

SEQ ID NO: 343367 - DNA, 100 bp, Homo sapiens
tcatctcgctcggctgcgggaaatcgggctgaagcgactgagtccgcgatggaggagacggtggctcagggagtaaaggaaggccagttgagcaaacaga

SEQ ID NO: 343368 - DNA, 75 bp, Homo sapiens
aactctgtaggaggaagctatctagagctggccaacacagtaagaatgattgatgttggctgatattggagtgct

SEQ ID NO: 343369 - DNA, 97 bp, Homo sapiens
tgaaggagaaggaagtgcgtccgaagcacgtgaagtcagagcaccataacatggtgtgggaagtgaagacaaatcagatgcctaatgcagtacagaa

SEQ ID NO: 343370 - DNA, 88 bp, Homo sapiens
gattggagacacaaaatcagaaattaagattctaagcataggcggaggtgcagccttccaggggccgacctcctttcatgttatccag

SEQ ID NO: 343371 - DNA, 73 bp, Homo sapiens
accggcctgccggcccccagaacaagagcccacccacctttgggttcctgttggacatcgatggagtgcttgt

SEQ ID NO: 343372 - DNA, 100 bp, Homo sapiens
cagccatttatttgtcccgtggagtggccagacctgcaactgctccaccggctctctgagtgacattcagccctgcctgcgggagggcgaggacaagccg

SEQ ID NO: 343373 - DNA, 100 bp, Homo sapiens
cgttaaagtctctcttcaccctgccgtcatgtctaagtcagaggaggtggtccaggccacgctggtggtcctggccttggccatggtgcccatcctgctg

SEQ ID NO: 343374 - DNA, 75 bp, Homo sapiens
cctgcctgggcatagacttccttaagggctgaatgctaaaggagccattctgtatgcctttgagatgttccgtct

SEQ ID NO: 343375 - DNA, 74 bp, Homo sapiens
gccatgcacctcagcatgctggaaggttatcttagatatgagaacaaatacaatctgttggaaccctatggaag

SEQ ID NO: 343376 - DNA, 82 bp, Homo sapiens
gtgcagccaaccatgatgctgccatctttccaggaggctttggagcggctaaaaacctatctctggaaacatggctacagaa

SEQ ID NO: 343377 - DNA, 80 bp, Homo sapiens
ttgctaatttcaaaaactaccagatctccagcaccctgccggtggcactactgagagacgaggtgccagggtggttcctg

SEQ ID NO: 343378 - DNA, 100 bp, Homo sapiens
tagtatcggacatgatcctcatcttttatacactcttagtgctgtccaggatcggatgagaaggtattcgaggtacacgtgaggccaaagaagctggcgg

SEQ ID NO: 343379 - DNA, 100 bp, Homo sapiens
ttagctaatattggaacaagcgttcagaactataatgatccagccttttatgaagaatgcaaaatggaatacctgaaggaaagggaagaattcagaaaaa

SEQ ID NO: 343380 - DNA, 101 bp, Homo sapiens
gcctgtaccatgatgtgatgctggagaccttgacacttatatcctccctggatgcccagcctacagagtctgagaaggaaatttataatcaggtgaatgta

SEQ ID NO: 343381 - DNA, 97 bp, Homo sapiens
aggtgctgatggaaaacgagaaggagggggatccatccaacctacaaggaaaagtacagaagcatcaggcttttgaggctgagctctcagcaaacca

SEQ ID NO: 343382 - DNA, 75 bp, Homo sapiens
tgcacctcagaaaactcaatgacagccaagaccgaggataggtgtggccattggcgaccagatcctggacctcag

SEQ ID NO: 343383 - DNA, 100 bp, Homo sapiens
ggctcacaccacaaaggttaacggcagtgcctcaggtcgttgaggacttccacatggagattggcacaggaccagactcaagacacacaactcataacag

SEQ ID NO: 343384 - DNA, 75 bp, Homo sapiens
ctcctggaagtgttggcggaggaagttctccgggagatgttgcataaccactccttcgtgggctgtgtgaatcct

SEQ ID NO: 343385 - DNA, 100 bp, Homo sapiens
atctactgtctttttcttcaatgggcagcatatgaaagtggattatgggtttagcatgagctttaacagacataatctgaaatactatgtattaccgaaa

SEQ ID NO: 343386 - DNA, 50 bp, Homo sapiens
cagaaacaggttcattcattgttggcactacgagatgcacttttgaaaaa

SEQ ID NO: 343387 - DNA, 99 bp, Homo sapiens
ggagatatgtctactggtcccatagcagaaagctggtgttacacacagcacttattttagaggagattgcaattgattgtcataataaggaaactgaac

SEQ ID NO: 343388 - DNA, 83 bp, Homo sapiens
ctgtcatcctgaattttcaccaccatcaaactataggcaataatggagaccagtcccacaagatgacaaccagtcgttgtgtg

SEQ ID NO: 343389 - DNA, 99 bp, Homo sapiens
gtgctgggagccaccatggagagtaggtgctacggctgcgctgtcaagttcaccctcttcaagaaggagccatcccgacatgcatgctgtgggatcgtg

SEQ ID NO: 343390 - DNA, 75 bp, Homo sapiens
tgttttattttgctttcagagaatgataacggcaaaagcttctatcatttttgttactcttcagtacaatgtcac

SEQ ID NO: 343391 - DNA, 113 bp, Homo sapiens
cctgtcatctaataaaattcgtagcttacccgcagaactcggaaacatggtatcactcaggaagttcgtgaatgctaatcaagggctaaataaagtggaaagcagcatccttg

SEQ ID NO: 343392 - DNA, 100 bp, Homo sapiens
acagaatctgccggatggtgctggccacttgcttgggatcctttatcctggtcatcttctatttccaaaatgacggtccttcgctacccaccaaacagaa

SEQ ID NO: 343393 - DNA, 100 bp, Homo sapiens
ctttactcagctgagtgtgccacacaggtagccctggacggcattcagtgttttgactgcaataaggtcactgatcagtgcctgtccttcttcaaacgct

SEQ ID NO: 343394 - DNA, 90 bp, Homo sapiens
ccgagggctacgaggtggctcacggaggccgctgtgtcaccgtcttctctgcccccaactactgccattgatgcaccatccaacctgcgt

SEQ ID NO: 343395 - DNA, 97 bp, Homo sapiens
ctgggcacgtcatcacagacattgtggaggggaagaaagttggtaccttcttttcagaagtaaagcctgcagttactgatagtaacaaagatgaaga

SEQ ID NO: 343396 - DNA, 82 bp, Homo sapiens
ctggtcgagccggaggaagccaccaggttttaaaatcaaagatgggaaaatcggagaaaattgcccttccccatggccagct

SEQ ID NO: 343397 - DNA, 100 bp, Homo sapiens
acgcgcttgtcgtgtcgttccgcttcggggagaagctcttctccggggtcctcatggatctgtccaaaagttgatcatggccttgccaggttggtgacag

SEQ ID NO: 343398 - DNA, 98 bp, Homo sapiens
ttcttcagaattagaaaggagctgcttcccaataaggaaacaggccgcgatgggcctcttggaacattggtgtgttcatctgcattcgatgtgctgga

SEQ ID NO: 343399 - DNA, 75 bp, Homo sapiens
taaaggacaaaattagagaacgagacagcaaaacatcgcaggaatcccttggcaccatgtcctgtgtgcattata

SEQ ID NO: 343400 - DNA, 75 bp, Homo sapiens
ccgccgcagagtcccaccgccacaggttttgggatttgagattgacgcggtgaactctgtccagttttcaaacca

SEQ ID NO: 343401 - DNA, 98 bp, Homo sapiens
aaagagcttgctccctacgatgagaactggttctacacgcgagctgattgaatttagtggaagcttttgtagaagatgcagaattgaggcagacttta

SEQ ID NO: 343402 - DNA, 75 bp, Homo sapiens
ctctctggcctggtactggctacccttctctcgcaagaggcttgtggaactattgcagtctatcaaggaccacag

SEQ ID NO: 343403 - DNA, 74 bp, Homo sapiens
aaaaacacgctcagagataaccttgaaagaacatcagtgtatcagcacagcaaatattccaaatgccaggctgg

SEQ ID NO: 343404 - DNA, 75 bp, Homo sapiens
attcgcagtggtcgcttcttctccttgcccgaaaatggcacagaaatggtatcaagaaaccccgatcacaaagat

SEQ ID NO: 343405 - DNA, 75 bp, Homo sapiens
caagcatgagccaccgccgccagcgtgagtgcatctccatccacgttggccaggctggtgtccagattggcaatg

SEQ ID NO: 343406 - DNA, 98 bp, Homo sapiens
gcagccgcggagcagtagccgccgtgggagggagccatgaagcattacgagagaggtggagaagagcgagtacttgagaaagaagaggaagaagatga

SEQ ID NO: 343407 - DNA, 82 bp, Homo sapiens
cagaagataaacgaggggctggaacacctcgccaaagcagagaaataggcttaaaagacaaccttcttgcttctgggacatc

SEQ ID NO: 343408 - DNA, 90 bp, Homo sapiens
ggctatggcggttccagcagcagcagtagctatggcagtggcagaagattttaattagctgaggatcctgtggaggagaccatcgcagcc

SEQ ID NO: 343409 - DNA, 97 bp, Homo sapiens
ctcccgcagcctgcctttccttccccctcggaaaatggttcccactgccgggcgaggtgagaagccctaccactgcaactgggacggctgcggctgg

SEQ ID NO: 343410 - DNA, 75 bp, Homo sapiens
tcttacgtctgcggaagtgcagctgcctcagttcttagcgcaggcgatagatgatgaggaagatcgcttccatgg

SEQ ID NO: 343411 - DNA, 97 bp, Homo sapiens
gctctcgcagtcggagaggcggctaaggaaaggtgccacagcagagacgcgaaggagaggccctagaaccgttctaaatggcttctaagaagttggg

SEQ ID NO: 343412 - DNA, 90 bp, Homo sapiens
gctttcactatggggtggagacgtggtactcagcaagctcgagttaaagttggatgtgctggaacaggctatttttatgattcccacaaa

SEQ ID NO: 343413 - DNA, 100 bp, Homo sapiens
gggactcagactgagctgattgctggaggccagctcctttcctgcctctcacctcagcctgctccaggacggagtctcgctgtgtcgcccaggctggagt

SEQ ID NO: 343414 - DNA, 100 bp, Homo sapiens
cggccggaagcgcggagggagccgcgggatggaccgcagaagatgactcaagaccggcctctgcttgccgtgcaggaggcgctgaagaagtgcttccccg

SEQ ID NO: 343415 - DNA, 75 bp, Homo sapiens
acaagaagggctttgggggcagtgtaatctcaaaagtcctgctagtgatcaacaactaatggaagacaaaaccag

SEQ ID NO: 343416 - DNA, 100 bp, Homo sapiens
gggcgaccagatcaacgccagcaagaacgaggaggacgcgggcctccacctcagatatatgacaagcagttggatgaaagagaacacacaattgaagaat

SEQ ID NO: 343417 - DNA, 51 bp, Homo sapiens
acaccactgaagcattgccaaggttcaaaccttgtactactcagctgatca

SEQ ID NO: 343418 - DNA, 75 bp, Homo sapiens
tatccagacgctctggtcatactaaagaacacatctggaagctcttttgtgacagggacggcttgttgcgggcac

SEQ ID NO: 343419 - DNA, 51 bp, Homo sapiens
ctccctgctctggatcatcgaactgaataaagttcaggagccctggaaagg

SEQ ID NO: 343420 - DNA, 76 bp, Homo sapiens
gcggcgctggagagggggcgctgagctgttgggatcttagcaaagcaatgtctcaagatggtgcttctcagttcca

SEQ ID NO: 343421 - DNA, 88 bp, Homo sapiens
gcctcccgagaagaagttgaggcgctatagacatcctcaggatccatgttccagtgatgctgggagaaagagaggcccgggcacccca

SEQ ID NO: 343422 - DNA, 51 bp, Homo sapiens
tcaaatgaaggccaagagaaccaaggtggaccttcaatcctgctgttctca

SEQ ID NO: 343423 - DNA, 100 bp, Homo sapiens
caggcgacaggtgtcgcttgaaaagactgggcttgtccttgctggtgcatgcgtcgtcggcctctgggcagcagagactctccaacatgtgccttctgac

SEQ ID NO: 343424 - DNA, 83 bp, Homo sapiens
ccgagcgggcggcttcctggcctgggcgctccggtggcggcggagagatgccctgtatccaagcccaatatgggacaccagca

SEQ ID NO: 343425 - DNA, 88 bp, Homo sapiens
gtaacagcgcgaatccccaccaagcttcctgcctgacacagctcacttcaagaagtgcacaatgtcagaacgtggaattaagtgggct

SEQ ID NO: 343426 - DNA, 98 bp, Homo sapiens
tttgtcatgtagccaagactggagaaacaatgtctacatccggataaaagacgatgaatggaatatttatcgccggtatacagagttcaggagtttgc

SEQ ID NO: 343427 - DNA, 100 bp, Homo sapiens
tgatgatatctttgcatatgtcaaggatcgatattttgtcgaagaaactgtggaagtcattaggaacaatggtgcaagcaacgcacctcttgctttttcc

SEQ ID NO: 343428 - DNA, 74 bp, Homo sapiens
aagactgctgctccctcgccgtcactgttgtataaatccggccaagagccactgcacaatgaggagctggcagg

SEQ ID NO: 343429 - DNA, 101 bp, Homo sapiens
actcttactaatgtctataaagccagtatgatagcaatgatggcagaattcctggaaaactcaagcaattcgtatttgacttacattctggaaaactgcac

SEQ ID NO: 343430 - DNA, 83 bp, Homo sapiens
gcagcgggagctggacggcgagcgcgagcggcgcgagaaatgcgcgtcccgggacgactggcgctgtgcgcgctccatgcacg

SEQ ID NO: 343431 - DNA, 82 bp, Homo sapiens
tgagtccagctcctctgacagcgaagactccgaaacagacaatgcagatcttcgtgaagactctgactggtaagaccatcac

SEQ ID NO: 343432 - DNA, 100 bp, Homo sapiens
aggaacctcctgccgggctcgtggcggcttctgtccgctccgcggagggaagcgccttccccacagtgcacctatgatatgtgttttagaaatagccgtt

SEQ ID NO: 343433 - DNA, 50 bp, Homo sapiens
aaagccctggtggagctgaaggttgcagatgtcgtgatctcaacagcttg

SEQ ID NO: 343434 - DNA, 80 bp, Homo sapiens
aaatttctttccgggctggtgatatgctgaacttagctctcaaaggaagccaagttgtctgaaacaatttcagcttccaa

SEQ ID NO: 343435 - DNA, 96 bp, Homo sapiens
gatctccatgtcctgttgtggggcttttacagcctttggatgttccatttaagcagacctcttccatagctgtagctggagcggtaattggagctg

SEQ ID NO: 343436 - DNA, 76 bp, Homo sapiens
ctgagcttggcctcggcgtcctcgggagcccctcaatagtgaagatgatgtgagtgatgaggaaggacaggaactc

SEQ ID NO: 343437 - DNA, 87 bp, Homo sapiens
cccagagctacccttcttggagcccacaggggtccatggaggtgaaccacccagcacccctcagcctcttggaacttgcagcccaca

SEQ ID NO: 343438 - DNA, 50 bp, Homo sapiens
gatgaaaaagtgtgacttggcagctgatctttaatctcatgaagtacgac

SEQ ID NO: 343439 - DNA, 82 bp, Homo sapiens
ctaaatcctggatggaagatagcttgaacagggctgacaacatttttccttttccgataacgaaggaggcccaacttcattc

SEQ ID NO: 343440 - DNA, 51 bp, Homo sapiens
gaggcgttgcaggacagcccccagggttttggccaaattgggcgagggcac

SEQ ID NO: 343441 - DNA, 50 bp, Homo sapiens
agccgcggcggcagcagcagtgagaggctgatcagctgaccgaagaacag

SEQ ID NO: 343442 - DNA, 100 bp, Homo sapiens
tccaggagttcgtctcttacgtctgcggaagtgcagctgcctcagttcttagcgcagtatatttaaagttggagttcgttgctaaagatggcagacccag

SEQ ID NO: 343443 - DNA, 74 bp, Homo sapiens
cttcatgtgtcctggaaactgggctgggtagagatcaacagcagttcaaggttatattaaggaagatcttgatc

SEQ ID NO: 343444 - DNA, 88 bp, Homo sapiens
tcccacagccgggcgttgggggaaagactccagcgggaggaagaagaggcctttgccagcagtcagagcagccaaggggcccaatccc

SEQ ID NO: 343445 - DNA, 98 bp, Homo sapiens
caagatccactaccggaagaagaaacagctcatgagattggagaatgttctctttggacctcacgactgctcccatgcccctccggatggctatccaa

SEQ ID NO: 343446 - DNA, 90 bp, Homo sapiens
ccatcagggaaagccgttgcctatggaccgccgggagagcctgcccacctccccaccctggacgccgggcgcgtcccggccccccagcag

SEQ ID NO: 343447 - DNA, 75 bp, Homo sapiens
ctgctttaccgctacatgcacttcttggagaaccaggttcggttttctgtgaagaccctgattgatcggtcttgc

SEQ ID NO: 343448 - DNA, 100 bp, Homo sapiens
ctggctctttaccagcagtgaagatcccaaagaaaagagggcggaaacccgggtacaaggtgcagatgtccggcgaagtgcgggacaagtcctatctcct

SEQ ID NO: 343449 - DNA, 100 bp, Homo sapiens
caaattgctatctgtctagattgtttacgaaataatgggcaatcaggggacaatgtagtaaagattaatcctaccatatgaaagatttattaaaggagaa

SEQ ID NO: 343450 - DNA, 82 bp, Homo sapiens
ctgtgctcgcgctactctctctttctggcctggaggctatccagcgactttctgcagggcgactgcaccaaagcgaaacaga

SEQ ID NO: 343451 - DNA, 82 bp, Homo sapiens
ttcaagctgcattttagacatagctggcaagagtattttcgtgtttgcctgagaatacagatcaacccacagaacaaagcgg

SEQ ID NO: 343452 - DNA, 100 bp, Homo sapiens
ctccgaagctcaccgcttacctgccggctatgtcggaagacgacgaggactgctatggcaatttgagccccatatgggggttggcaggcagcagagaggc

SEQ ID NO: 343453 - DNA, 98 bp, Homo sapiens
ctcagtatgtctcagaaattttggaaaaagttacatgtgaaagaagatatattccagtgctaaggaaattcctgaagatgtagatatggaagaagaaa

SEQ ID NO: 343454 - DNA, 100 bp, Homo sapiens
ctgatctcacagatgagacttcacgactttttgtaaagaaaacaatagtagtgggcaatgtgtccaagcagatgtaattgttaattctgtaaacccacat

SEQ ID NO: 343455 - DNA, 87 bp, Homo sapiens
ttcatctcctgaagaaaaatgaaaagctacttagagaacttaggaacttggattcaaggcagtgctctcaagaggcagaatttatat

SEQ ID NO: 343456 - DNA, 75 bp, Homo sapiens
cttcagcccgtcagcaagtggcaagcctatggactcaaaggctatcctgggaaaccaggaacaactggtaactgt

SEQ ID NO: 343457 - DNA, 100 bp, Homo sapiens
acacagagagacggcagccgctgtacagattcatcaccacggctctggaagaggatctgaaccagaagaagcgggagcaggagatgttcttcaagctgag

SEQ ID NO: 343458 - DNA, 100 bp, Homo sapiens
tttaccaacgccatcaccgacctcatcagtgagctgtccctgctggaggagcgcttccgggaagctattttgccagccacttcattatgggaggagagaa

SEQ ID NO: 343459 - DNA, 99 bp, Homo sapiens
gctaataatgctggcaaagtggaaaaatgtgcgatctcacattcttgaaggtggcattgaagagcactaagatcggaagatgagtgagcttgaccagtt

SEQ ID NO: 343460 - DNA, 100 bp, Homo sapiens
cagcaggaaagctgccatcagctgagcaagtccaccaacagtttctgtgtcccacttcatctttaataaggcatgtggagaccccaaggcaaaaccatcc

SEQ ID NO: 343461 - DNA, 75 bp, Homo sapiens
acaaggacaacaatgagatcgtggacaagatcatgggcaaaggacagatccaggccagaagaatgtttgaaggtg

SEQ ID NO: 343462 - DNA, 51 bp, Homo sapiens
cagcggcgctcgcagcgcccggcaacctccaagtcccagatcatgtctctg

SEQ ID NO: 343463 - DNA, 100 bp, Homo sapiens
ggaaaaactggagagcttcatcaaaaatagtgatagctttgataaatgtttctttctcagcaaaatagaggagaagcttacccctcttccagaagataat

SEQ ID NO: 343464 - DNA, 85 bp, Homo sapiens
cctttattggagacaaaaccgtcactgtggaatatagacccataattgacaaaactttgaacgaggctgactgtgccactgtccc

SEQ ID NO: 343465 - DNA, 100 bp, Homo sapiens
aatttgggatataggagggcagacaataggaggcaaaatgttggataaatatatctatggagcacaggaaagccactagtgaaaacgtcacgaatgacag

SEQ ID NO: 343466 - DNA, 83 bp, Homo sapiens
tgttgtcgtggccggagcggcccgcgcctgggctgccggcacttcgcggcagatttcaacactacacttgcacaatgtctttg

SEQ ID NO: 343467 - DNA, 87 bp, Homo sapiens
gagttgctccaacagcaaatattttttcccaggctttaacagacttctgtgattcatatggcttagtctgcaataaaccaacagttt

SEQ ID NO: 343468 - DNA, 100 bp, Homo sapiens
tgatcctgtcactgtcagtataaactcatggattgaactggaaatggaagttccagtattaccgaaaatctctctaccgatcaccagttcttcactgcct

SEQ ID NO: 343469 - DNA, 98 bp, Homo sapiens
gaagaggctttggttttagcaaaaggagcccggaggaacattccaaaggaaaaatttcagatcgtaaagctgaaaattgaaatcatgaaagtagacag

SEQ ID NO: 343470 - DNA, 90 bp, Homo sapiens
ggagaggtagccatgatgccccacttggtgaatggagatgcagctcagcagcaaaaatttctctgaagatgattttgcttctgcattgag

SEQ ID NO: 343471 - DNA, 121 bp, Homo sapiens
tcagacttttaagcttcccttaacgccagtctttgaagggcttgccttcaaatgaacaggaagcggtgcaggaggttcctagagttgttcagaatcctccaaaaccagtcatgaccactag

SEQ ID NO: 343472 - DNA, 75 bp, Homo sapiens
cataatatgtatgccaaagcagcagccttctcgacagccttttactgtgaacagatgccagaagtgggtggagaa

SEQ ID NO: 343473 - DNA, 75 bp, Homo sapiens
gaagtccttcttcgccaaatacgtcagccatgtcatctgagcctcccccaccaccacagccccccacccatcaag

SEQ ID NO: 343474 - DNA, 83 bp, Homo sapiens
tccttcgcacgtgggtctcgtcggcggcgcagaccgccctgggcgctgcctatggcacagccaagagcggtaccggcattgcg

SEQ ID NO: 343475 - DNA, 124 bp, Homo sapiens
gacacggggcaggctgagttcctcttgctcacagagctctgtaaaggaagtgggacccatggcagccgagacctcccagtcaacagaatcatcgatgtggatcttgtaactggctcggcgcccg

SEQ ID NO: 343476 - DNA, 100 bp, Homo sapiens
gctgattacctcagcagatgaaatacatgaaggagacctagtggaagtggttctttcaggcagtaaagagggatatattgaacacagttgctgatcgttg

SEQ ID NO: 343477 - DNA, 100 bp, Homo sapiens
tctgaagcctcagctcttgccaaacagacccgagacccatgtcagccccactggatgcccttgagatcttcttagcccagagagcagtggagttgagtga

SEQ ID NO: 343478 - DNA, 100 bp, Homo sapiens
tttggagaggacggcgcctcctacgaggcagaaatcagggagctggaggccctgcggcaggggctgtagacctggaccatgtgacagatgagcgggaacg

SEQ ID NO: 343479 - DNA, 100 bp, Homo sapiens
tgccacccgaggagttccgcccctttctggcaaagatgagggggattcttaagttttagagaacaacttgtaatggagccttcatctcttgagctgccgg

SEQ ID NO: 343480 - DNA, 83 bp, Homo sapiens
cctgcagctgggctgcctggagctcagggctaccttttcatctctgtgttggtgaactcaaacagtgagctgatccgcctgat

SEQ ID NO: 343481 - DNA, 76 bp, Homo sapiens
ggcggcggggcagagagcggcctccgagggagtggtgaaaggacataggaaggagtctggggaactgtactacagc

SEQ ID NO: 343482 - DNA, 88 bp, Homo sapiens
atgctggtggtctgcatcaccaccggatcaacttcgacaaatagtcgttgaggacttccacatggagattggcacaggaccagactca

SEQ ID NO: 343483 - DNA, 90 bp, Homo sapiens
tgatgcatccagaagactctgtggtttcctcaaaagtcttggaaatctgaaatagagtactatgctatgttggctaaaactggtgtccat

SEQ ID NO: 343484 - DNA, 98 bp, Homo sapiens
acgctcccagccctgaagagaaactgcaccttatcacccggaacctgcaggattatatgcgtcaggcaggagaagtgacttatgcagatgctcacaag

SEQ ID NO: 343485 - DNA, 97 bp, Homo sapiens
atgccgggggagcggggccttccacaccccctccgtgggtgtgtggactgctaggcggtttgcttatctttttgtgaatatcaatgtgacctctgag

SEQ ID NO: 343486 - DNA, 51 bp, Homo sapiens
ggcacctcacccaaagcctcactggatatcatggaaatcaggacagtggca

SEQ ID NO: 343487 - DNA, 100 bp, Homo sapiens
agacaaagaaagttcgaaaagttcctccaggtttgccatcttcagttcgatacaagaggctgttttcctagcgtggcttgctgcctttggtaagaacatg

SEQ ID NO: 343488 - DNA, 100 bp, Homo sapiens
atgcagaatccaaaggcagcgcaaaaaacagccaccgattttgctatgtctctgagctgcgaggtaagaatgattgatgttggctgatattggagtgctc

SEQ ID NO: 343489 - DNA, 100 bp, Homo sapiens
ggaaggccagacgcctctggatctggcaacaccattcgttcctggttaactcggaaacacatccagaggctgcatgcagctgccacagtcatcaagcgtg

SEQ ID NO: 343490 - DNA, 100 bp, Homo sapiens
cttcaaaaactgggtctgtgactacaacatattgctgcaatcaggaccattgcaataaaatagaacttccaactactgaattggatttgcaactcaaaac

SEQ ID NO: 343491 - DNA, 89 bp, Homo sapiens
aaaaagaaactaaaaaatggcagctctcagaatgggaagaatgagagaagtcatatgcccggcacaaagtcaatgaaaggattctattt

SEQ ID NO: 343492 - DNA, 98 bp, Homo sapiens
tgcaaggggagtcgtggcgtcgtctgcgaccgctgccttctcggatgcctgtgaggagccaccaacatttgaagctatggagctcattggtaaaccaa

SEQ ID NO: 343493 - DNA, 100 bp, Homo sapiens
aggagttccaccaggccgggaagcccatcggattggtttatcttggaagctaaagggcattgctcatcctgaagatcagctgaccattgacaatcagcca

SEQ ID NO: 343494 - DNA, 101 bp, Homo sapiens
tacctgtgagatgtttcatcccaacagtggtcttggaggcattgggatgggacttggtccgggtggacagcctattagtgccagccagttgaacataggtg

SEQ ID NO: 343495 - DNA, 75 bp, Homo sapiens
gagattactatgaatgcactggaatctataaagaggtgaagtgccagcattataagaaaaaacgaacggagcaag

SEQ ID NO: 343496 - DNA, 100 bp, Homo sapiens
gtcgccttgcaatcgttggagggggctatactccatccaaatatgcagtggaaggtttcaatgacagcttaagagaggagccttcaggggaagtagaggt

SEQ ID NO: 343497 - DNA, 83 bp, Homo sapiens
ctcaattacacttcgactctcaaagcaataccaggatagctgttgtttcagagaaaggagtacctctctctagaactgtacgc

SEQ ID NO: 343498 - DNA, 82 bp, Homo sapiens
cttcattgctgcgcgcctctgtggtcaggacctcaacaaaaccagccgacagcagattcggaagctttgaggttcctgaaga

SEQ ID NO: 343499 - DNA, 80 bp, Homo sapiens
ttggaaagtttttttaatgtggttggaacaactgaggatgaaaactttcggaagagaaagttgcctgtggtaagttcagt

SEQ ID NO: 343500 - DNA, 123 bp, Homo sapiens
tagcagaggacgcggccaggcgattcggtgaagcgattcctgcaggcgttggttcccctctttgacctgatgtacattgaagatgtcagtttctacatgtgggaagtagacattgaaggcttt

SEQ ID NO: 343501 - DNA, 100 bp, Homo sapiens
agaggacagagggtagctgccgtcgccgtcggcagtcaagcagttctgcaaattctcagcagggtcagtgggagacaggcatttatgtttgaatcatctt

SEQ ID NO: 343502 - DNA, 100 bp, Homo sapiens
ccaaatatcggaacccctccttgaagctgatggtgaatgtgtgcggacacactctgtaatggaactgctggtccatctgaataaacgtataaaaagccgc

SEQ ID NO: 343503 - DNA, 50 bp, Homo sapiens
cagctctctcgggactaggcagggaagcagctcgagagtgtcgtagaaag

SEQ ID NO: 343504 - DNA, 100 bp, Homo sapiens
cttgtcagtacccgagtttccggaagggccgttgctccagggagaactgcaaatatcttcatccacccccacatttaaaaacgcagttggagataaatgg

SEQ ID NO: 343505 - DNA, 100 bp, Homo sapiens
agatttggaagatatgtgggagcagaaatttctacagttcaaacttggagctcgcataacagaggaattaatcaagcaatggtcaagataaatggagttg

SEQ ID NO: 343506 - DNA, 100 bp, Homo sapiens
tgaactcttttccagtgtccttcaggagatctgtgatgagtggtactgactgtcctcacccacacccctgcccctcgagtgagactgggacaagatgctc

SEQ ID NO: 343507 - DNA, 100 bp, Homo sapiens
aagacatcctgagaggacttggcagatatgtgtcacaaagatgtctacacggaactgccagggaatggactcagtgatcaaacccctggacacaattcct

SEQ ID NO: 343508 - DNA, 100 bp, Homo sapiens
gcctctttctctcaggctttcctacaactcatgcccagcagcagcaagcagtgcagcctgggagctctattccaccttacaacaccgaggtgactgagac

SEQ ID NO: 343509 - DNA, 100 bp, Homo sapiens
ctggaatttgcgttttatgtcattgaacagtttaattggttggggtcagataagaagaggagtgacaatcaagccaacagtagatgatgactgaagaata

SEQ ID NO: 343510 - DNA, 75 bp, Homo sapiens
cctgtttgtggataagacagtcccacagtccagatattgtcttcatgcgaacttggtatcctgtttccatcccag

SEQ ID NO: 343511 - DNA, 75 bp, Homo sapiens
cgccgcgccgcgctccaaccgcctcctcctcctcagtaacgcgggtcttagaaaaataccccaatacacccatga

SEQ ID NO: 343512 - DNA, 100 bp, Homo sapiens
aacactgcagaaaggctatctgaagaaaagtagaaggaaaaacagaacgttgcaaactctggaaaaaaacttggatacagtttatgtaacttgatggaag

SEQ ID NO: 343513 - DNA, 71 bp, Homo sapiens
gaggcccaccctggagtaaccctcactggagaatccagaggaaatggctagtgatgagctgaaagagatgc

SEQ ID NO: 343514 - DNA, 51 bp, Homo sapiens
ttctgggtgacactcaacaggattcccggagaagggagcactggctttgct

SEQ ID NO: 343515 - DNA, 101 bp, Homo sapiens
gcgaatacccacccacacaagatgggaaacctcgacctgtctcccagttggttgcacagcaggttactcagcagtttgtgcctcctacacagtcaaagaaa

SEQ ID NO: 343516 - DNA, 75 bp, Homo sapiens
agagcctcgcctttgccgatccgccgcccgtccacacccgccgccagtccctgaagaggaaggagaaggaatatg

SEQ ID NO: 343517 - DNA, 75 bp, Homo sapiens
gcctttgaaaatcaacgacaacttgagcacagatgatgattattctccaccgtctaagagaccaaaggccaatga

SEQ ID NO: 343518 - DNA, 100 bp, Homo sapiens
cagatatgcgcgtcagcatactttggcgggttgatgccggcccaggatggatcagacctgtgaactacccagaagaaattgtctgctgcccttttccaat

SEQ ID NO: 343519 - DNA, 108 bp, Homo sapiens
cgcaaaggctttctcgcttgtcaccttgccatgtggaagaaactggaagaagaagatggagtgtgggagaatggactttcctatgaatgccgtactctgcttttcaaa

SEQ ID NO: 343520 - DNA, 75 bp, Homo sapiens
gaatgttgagttcggcagcatacaggtagatgacattaatgctgataagaatatctcttctgcacagattgttgg

SEQ ID NO: 343521 - DNA, 83 bp, Homo sapiens
cagattcgcagtggtcgcttcttctccttggcagagaagaggcgatggcggcgatggcatctctcggcgccctggcgctgctc

SEQ ID NO: 343522 - DNA, 132 bp, Homo sapiens
caaactgatggacgatgatgccaatggtgatgtggatgtggaagaaagtgatgagattgttaaaggaaatgggctggcaggaagacagtgaaaatgatgaaacatgtgctcccttaactgaggatgaaatga

SEQ ID NO: 343523 - DNA, 75 bp, Homo sapiens
aaacctcgctccggaaaggggacacctgaccaagatcactccatggatgaaatgacagctgtggtgaaaattgaa

SEQ ID NO: 343524 - DNA, 100 bp, Homo sapiens
gcctgcggtgcctgagctgagtgaggccgaggccgggaggccgtgcccggagatccctgccgcccaggtgtcacttgttctgtttgggggaaaagtgtct

SEQ ID NO: 343525 - DNA, 75 bp, Homo sapiens
gtgccccccagtgtggagaagggcctgccaccgtccaaccaccacgcaggggtcctggtgttcctggaacaggct

SEQ ID NO: 343526 - DNA, 100 bp, Homo sapiens
gcagaaggaattgtcaatgggcatactttgttggttgcatctgctaaagaggatcctgccaacattttacagggcaattgaaggaacagactaaaaatcg

SEQ ID NO: 343527 - DNA, 82 bp, Homo sapiens
catgtattgaagaattccaatcccagttcatttttgtaagtaaggaggtctctgtaccatggctcgtacaaagcagactgcc

SEQ ID NO: 343528 - DNA, 82 bp, Homo sapiens
gaaggtggctgtggagttcgggaaccagctggagcatcaagatggtgctcatgtggaccagtggtgacgccttcaagacggc

SEQ ID NO: 343529 - DNA, 83 bp, Homo sapiens
ggaatcgtgagcgggcgggaggaggccggggaccacacaggagcatcagatccatgctgctgctgactcggagccccacagct

SEQ ID NO: 343530 - DNA, 90 bp, Homo sapiens
aggagctcaaggggatgcagctgctgcgggagaataattctgtagctcgtgcagtaatgcagtcccaaaagccacccaaaaattgtagag

SEQ ID NO: 343531 - DNA, 134 bp, Homo sapiens
gggaaatggaaggcaccaagccacaccagcagctgaaggaagtttccgtggaagaaagatggtgatggaatttcctgataatgtgttaaatctcgatggacatcagaataatggtgcacagctaaagcagttca

SEQ ID NO: 343532 - DNA, 100 bp, Homo sapiens
gcctgagcgcaacacttctccgagccagcgagccagcgagccgccgacccgccgagcaaaatgtaaaagaatgtgtggatcatttaagtagagatgagga

SEQ ID NO: 343533 - DNA, 80 bp, Homo sapiens
gacaccagcagcatgcccagccagggcagggtggagagctgcagctgcagaaagtggatctcttcagcctgggaattatc

SEQ ID NO: 343534 - DNA, 97 bp, Homo sapiens
aaccatttgtttttaactaccgggaagatttacacagatggaaccagaaaagatacgaggctctaggagagtggccacagatgtctttaattccaaa

SEQ ID NO: 343535 - DNA, 78 bp, Homo sapiens
ttggatatcctgaaagatcaatgcctgaagcaggacattctaaatgaaaagactgaattggaagcaacacttaaggaa

SEQ ID NO: 343536 - DNA, 88 bp, Homo sapiens
accccctggtgctgctcagtgtggtggatcatttcaaccggttccagcaacagatagaaatgctttaagttcactctggggaaagctg

SEQ ID NO: 343537 - DNA, 88 bp, Homo sapiens
gctggtcagagggctgtgaagacgcacggtgccaggaccaagtatctgattcggaggaacctgagtgcctcagtcatcgccgtcacca

SEQ ID NO: 343538 - DNA, 90 bp, Homo sapiens
gacagattcgcagtggtcgcttcttctccttggctgaaggtgatgtggccgccctcaaccgacgcatccagctcgttgaggaggagttgg

SEQ ID NO: 343539 - DNA, 98 bp, Homo sapiens
cgtacgggcggccgtgcgcgaggcgagggaccctccattttccatatccaggaaaatgtgatgcgccacaggtatcagcgtctggatcgccacttcac

SEQ ID NO: 343540 - DNA, 100 bp, Homo sapiens
gctttctaagaggtgtcccttcaaagatgtgagagagaaaagtgagtttattctgaagagcatccaggtgcaggtatttggactgtattctggagaagaa

SEQ ID NO: 343541 - DNA, 98 bp, Homo sapiens
atgtggaggagatgtactgtgcttggctggaaaaccccaaaagtgtacataagggggaaatttgcagtggtgagaaaatgtataaagaaagattctgg

SEQ ID NO: 343542 - DNA, 100 bp, Homo sapiens
atttgaactctttgaagttgggtttctcagtcctgccactttcacagtgtacgaataccacagaccagacaccatgaccacccttgatgataagttgctg

SEQ ID NO: 343543 - DNA, 101 bp, Homo sapiens
gacggcgcccgccctcccgccgccgccctaagtgcacgatctgattttctggagagatgtgaagaagactgggtttgtctttggcaccacgctgatcatgc

SEQ ID NO: 343544 - DNA, 75 bp, Homo sapiens
gattaatccatgtgtgaaaaaagaatatagagatgacccttttcatcaggaccgcctggcccggtgcaccatgca

SEQ ID NO: 343545 - DNA, 74 bp, Homo sapiens
tgacctgctgcctcctgatgataagcagctgctatacagtgaggccaagccggaaggaatcagaatgaacaaaa

SEQ ID NO: 343546 - DNA, 96 bp, Homo sapiens
gcggcgcagggggtgcagcttcgagagcccaagggcagccgatgaagtgcaaccttcacatgaatgggaatgttatcacctcagaccagcccatcc

SEQ ID NO: 343547 - DNA, 51 bp, Homo sapiens
gtggcacctcgcatgttcaaaggagtgcatccgccccaacccttttccccc

SEQ ID NO: 343548 - DNA, 90 bp, Homo sapiens
tagagtcattcacgccattgctaattcgaggagaattctgcctaagccaactcgaaaaagccgtacaaaaaataagcaaaagcgtcccag

SEQ ID NO: 343549 - DNA, 90 bp, Homo sapiens
atcagaaaattgaagatgagtacaaaaatcccaggagaaacctaagctatcatgagaagtttttctctcctacaagaagccataatcccc

SEQ ID NO: 343550 - DNA, 97 bp, Homo sapiens
tcatgctggagggagacagtgaggagatgggggtcatccccagcaaaaggagaatctataccccattcacagaagataccgagactgtgggccagag

SEQ ID NO: 343551 - DNA, 100 bp, Homo sapiens
tatccggggacagaaactgaaaaactttcttgtctgcacagaaagtcccagtacaacttccattgctgagaaaatcctcagaggactttcccacttcgct

SEQ ID NO: 343552 - DNA, 75 bp, Homo sapiens
aagagacagcgattggacagaatttgtgaagagtatcctggctttaaatcctcgaacacaaactcatgcaactct

SEQ ID NO: 343553 - DNA, 98 bp, Homo sapiens
ccagatctctttgccaaattggcattgaattttgctactcagataaaaggttctggagacagcctgtatttcttggatcttggcttccttccatcttc

SEQ ID NO: 343554 - DNA, 90 bp, Homo sapiens
aagtctgttaaaaatctttgcgcattaatcttatcactggtcatttagaggaaccaatgccaaaccccatagatgaaatgacagaagaac

SEQ ID NO: 343555 - DNA, 75 bp, Homo sapiens
caggactgcgcccccgggagcgggcgcccagagttgttgcgaagctctttggtgaataatagaactcaggccaag

SEQ ID NO: 343556 - DNA, 82 bp, Homo sapiens
ctgcacatcgcacccaggtggttcagctcgcatagtgactgggctggcttagatgaagatgaagatgcacatgtctgggagg

SEQ ID NO: 343557 - DNA, 96 bp, Homo sapiens
ttcctagagttgttcagaatcctccaaaaccagtcatgaccactagacccacagctgttaaagcaacagtttgcattgagactccttgcattccgc

SEQ ID NO: 343558 - DNA, 90 bp, Homo sapiens
ccacaccaagaacagcgagcaggcgcgcagccacctggagaaggcggtggatgatgctgaagaacctgacaaaacaggggagaataaagc

SEQ ID NO: 343559 - DNA, 74 bp, Homo sapiens
tcagcatggaggctgctgggcaggtcatgagtcaccatgatatattcgactttatgggagaaaatttagcaaag

SEQ ID NO: 343560 - DNA, 50 bp, Homo sapiens
aggtgctggagaagacagagactgtaagaaaagcctggagtgcacgaagt

SEQ ID NO: 343561 - DNA, 75 bp, Homo sapiens
aagaaagtcagggggactgcaaaggccaatgttggtgctggcaaaaaggagtcaaattgactttatcagctttaa

SEQ ID NO: 343562 - DNA, 100 bp, Homo sapiens
cagcaccccttctgtgtttgatcagcaaagagcatcagacaacagtcagcgctttcgagaaacctgttttgcatttgccttgacaccacaacaagtgcag

SEQ ID NO: 343563 - DNA, 75 bp, Homo sapiens
ccgcccacttctgcctgccactacaacaaaactgtctcagatgtccaggatgttaccgttcctgctgctgctctg

SEQ ID NO: 343564 - DNA, 87 bp, Homo sapiens
actcggttaagggaaagcgccgagatgacgggctttctgctgccgcccgcaagcagaggctaaagaattacctccaaagccattgtc

SEQ ID NO: 343565 - DNA, 95 bp, Homo sapiens
tattacaccaaggaggagcagtggaaagagaagaaggcgccgcccttgctggagggggcccccttgcgactgaagccccggagcatccacgagtt

SEQ ID NO: 343566 - DNA, 75 bp, Homo sapiens
ggaacgaggggtgaagcggcccaggtgagggccacaatgctgcttggagcctctctggtgggggtgctgctgttc

SEQ ID NO: 343567 - DNA, 100 bp, Homo sapiens
cgttggagtcataagacggcgtcggtgttgcagtctgtgtccttggaggtgaccagggccactgcaggcatggtgctagctctcaagaggcagaatttat

SEQ ID NO: 343568 - DNA, 97 bp, Homo sapiens
gcagattccagaaaaattacagcacatctcagtgaatttgcaagtgggacagtggccttagagctattgagaatttgatgcaaaagaaggggaaatt

SEQ ID NO: 343569 - DNA, 76 bp, Homo sapiens
ctcggcctcgcggcgacggcggcggtggcggcttggacgactcggagagccgagttgcatgctgagaatttgaaaa

SEQ ID NO: 343570 - DNA, 96 bp, Homo sapiens
aggagacagtgcaggacatcgtgtaccgcaccatggagatcttccagctcctgaggaacatgcagggttctccaaaaaatgtggaatcctttgcat

SEQ ID NO: 343571 - DNA, 88 bp, Homo sapiens
caaatggttttgacactccagaagagaggtatcagaagcttaaaaagaaagcaggaattatgtttcaaatggacaatcatttaccaaa

SEQ ID NO: 343572 - DNA, 74 bp, Homo sapiens
aagaatcctgcaaaaatgtctctctatccatctctcgaagacttgaagcaattaccagctctggctgggtcgcc

SEQ ID NO: 343573 - DNA, 75 bp, Homo sapiens
tgactagcagcttcattttgaaacatatctgaagagatggattaagaatgctttggattaaggattgtggagcac

SEQ ID NO: 343574 - DNA, 90 bp, Homo sapiens
tacaagaagagggcggagcggagacgggagtattatgaaaagatcggtgagaactctgtctcagtcgacgggaagtgcagtgactccacg

SEQ ID NO: 343575 - DNA, 98 bp, Homo sapiens
tgaagatagtgcctttcagccctaccagcttccatgcctatggctgttctaaaattgggccaaatatatccatttcagagaggctttttctgtaaaga

SEQ ID NO: 343576 - DNA, 90 bp, Homo sapiens
agagcccaagcctaaaaaggcccctgcaaagggagccatggctgccacgtactccgcactcaacagctccaagcccaccccccagctgaa

SEQ ID NO: 343577 - DNA, 100 bp, Homo sapiens
aaggagctgctgtctggaattggcaacatctctgagagttagggcctagtcaaaattttgaagctgagtcaattcaagataatgcgcatatggcagaggg

SEQ ID NO: 343578 - DNA, 100 bp, Homo sapiens
gcctttgagcggactcccttttaagggagaagagaagtttacctttattgagaaatgtaacaaccctcgttctgtcacattattgatcaaaggaccaaat

SEQ ID NO: 343579 - DNA, 97 bp, Homo sapiens
ctgggtcccgccgggtctgaagcctgaacagagggtcctccgcggaagggcagctgaatggactccagagcagccttaaccctgcagcctttgtgcc

SEQ ID NO: 343580 - DNA, 99 bp, Homo sapiens
tgagattatgcctgaggttgtggaaaaggaagattactcagagattatagggagcatggtggaaggagaacatgaatctctcagaggcccaagtacagg

SEQ ID NO: 343581 - DNA, 51 bp, Homo sapiens
cgcttcgagtctattgccattgcccaagctgttccatttcctccaagtcac

SEQ ID NO: 343582 - DNA, 100 bp, Homo sapiens
taacaaaaggggtggattatatacattcaaaaaaattaattcatagagatcttaagatcttaaaccttactcaggcattgagagacgggaagagtccttt

SEQ ID NO: 343583 - DNA, 50 bp, Homo sapiens
gaacctaagaaattaaattctccagattagtgacaagagctggggttagg

SEQ ID NO: 343584 - DNA, 90 bp, Homo sapiens
ccaaattccttcaatgataaattttgtgatcagatgatgatgccgctcctacgaggactgctgtggctccaggtgctgtgtgcgggccct

SEQ ID NO: 343585 - DNA, 98 bp, Homo sapiens
aaacgggagcaccacagtatggtaactctcaggagccttctccgcagttggcttcctcggtagcttccacacggagcatgcccgagagcctggacagc

SEQ ID NO: 343586 - DNA, 75 bp, Homo sapiens
cccaagtcgacgccgcaacccggggaaagcagtggtcccaggctgcacccatggcagaaggaggagggcagaatc

SEQ ID NO: 343587 - DNA, 100 bp, Homo sapiens
tgaaccgctgcaaactcatctccaggaaggacttcgagaccctctacaatgactgcaccaacgcaaggttacaactgatggaaaaccaaaaatcgttgat

SEQ ID NO: 343588 - DNA, 96 bp, Homo sapiens
cgatgtccccagcacataataacttggcaaatggttatgagccttagagtttctgaactccaagtactgttgggctacgccgggagaaacaagcac

SEQ ID NO: 343589 - DNA, 98 bp, Homo sapiens
gagaacggcaacccatccagatcaccatgccgcaatatgtcggacgccttggccaacgccgtgtgccagcgctgccaggcccgcttctcccccgccga

SEQ ID NO: 343590 - DNA, 80 bp, Homo sapiens
gaggcccacctgctgacatctacctgccagctgtgagtacccaggaagctgcaccgtgtggcctggagctgtctatctgt

SEQ ID NO: 343591 - DNA, 90 bp, Homo sapiens
agaagatgatttttattccatcttctatagcttttttaacaacattggaaagaactgttcaagctaagccaagtagtagcagtaaaactt

SEQ ID NO: 343592 - DNA, 51 bp, Homo sapiens
gccaccgtgcacatccgaatgggttctccagcatttggctcaaggccccaa

SEQ ID NO: 343593 - DNA, 75 bp, Homo sapiens
gcccaatagacaactctgggctattttcaggaaagtacacaggaagatgctatgaaatttccatcttcccaatct

SEQ ID NO: 343594 - DNA, 51 bp, Homo sapiens
gaacatcctttgactggttagccaggttagagcagccagcgggtacagaat

SEQ ID NO: 343595 - DNA, 76 bp, Homo sapiens
gcagtctacagagacagcagctaatgtgaaagagctcgtgcagaatttactggttggtgttcgaggaagagacatt

SEQ ID NO: 343596 - DNA, 88 bp, Homo sapiens
tccgccgattcctcctccttggtcgccgcgtccttggctggcgtggtgtccgcaatgttgccagtgtctgtctgcagattggctaccc

SEQ ID NO: 343597 - DNA, 100 bp, Homo sapiens
ggctttctgctgccgcccgcaagcagaggtagcctcatggctgcaacctgtgagattagcaacatttttagcaactacttcagtgcgatgtacagctcgg

SEQ ID NO: 343598 - DNA, 100 bp, Homo sapiens
cccgggggctctggtcccctcctcgtggaatgcagtagccctctgggcctgggatattgtggttgataactgtgccatctgcaggaaccacattatggat

SEQ ID NO: 343599 - DNA, 100 bp, Homo sapiens
gcggagcagtgcgtcagagtttcagatggtgtgaatgtagatacccaccacatccctgttaatgtgacactgcgtcgaattgcacatggagcagatgctg

SEQ ID NO: 343600 - DNA, 96 bp, Homo sapiens
attatgacaggggtcatgacagatgaggcagagcccagcaaggaggcaagtgaggcctatctggttggcctttttgaagacaccaacctgtgtgct

SEQ ID NO: 343601 - DNA, 74 bp, Homo sapiens
acagctgctcccttcgccttcgccctttccacctcgcggcagttcggtagctacagcaagctgggtagcaggca

SEQ ID NO: 343602 - DNA, 118 bp, Homo sapiens
cttcaagaagattgaactttattgtgaacaggtagagtacctgttgttgcagagttattttctgagtcagtttcagcttagcctgcgacgcttatgattagagccaacaatttgaaat

SEQ ID NO: 343603 - DNA, 115 bp, Homo sapiens
ctggtgcggaacatccccttccaggcccacagccgggagatccgagagctcttcagcgatcctttaatgtggacagctgtgattggaactaataatatacatggacgctatcctc

SEQ ID NO: 343604 - DNA, 100 bp, Homo sapiens
ctggatgctcttttggaacagcaaaacaccattgaaagtaagatggtcactctccaccgaatgggttacacaacagccaatgcggagtctgacaatgagc

SEQ ID NO: 343605 - DNA, 100 bp, Homo sapiens
ggaaagtcggccaagaaagacaaagacccagtgaacaaatccgggggcaaggccaaaaagaaggcatttctcacaagagtggcaaagatacagcagggtg

SEQ ID NO: 343606 - DNA, 95 bp, Homo sapiens
ccgacggtcacccgaatcgcagggagtcgccgctggagaggggctcggcgcccggcggggactgcagaagcggccagcttgatgtccgggagctg

SEQ ID NO: 343607 - DNA, 80 bp, Homo sapiens
ggagcgagccaagctgcacgatgtggagcgttcgtgctggccgtgggcagcgccgtctttgatgccatgttcaacggggg

SEQ ID NO: 343608 - DNA, 100 bp, Homo sapiens
tactggaaagacccagaatatgccaagtatctaaagctgacattcacgtttcattctgccacactcgggaacggtgatcggggaagcatggggatccggg

SEQ ID NO: 343609 - DNA, 74 bp, Homo sapiens
ggaatgcagtaccctcagcagcagacgccttcctgagtcctggatctttcttccttctggaaatctttgactgt

SEQ ID NO: 343610 - DNA, 90 bp, Homo sapiens
tccttgtttgcacggagcagcaaacgcagagacaaaagaaacgggccccgactgggactggtttggctgaaagacaaagaagcaacacat

SEQ ID NO: 343611 - DNA, 89 bp, Homo sapiens
atagtgttcctgagctgccaacgatacctgaggggggttgttttgatgaaagtgaaagatgggctcaaggacagcttgcctgactgcag

SEQ ID NO: 343612 - DNA, 88 bp, Homo sapiens
aagtctctgatattggaagccaagaccaaactgcagctggaatacccagtacagttctgcttactacacttcaagaaagatctgaaag

SEQ ID NO: 343613 - DNA, 100 bp, Homo sapiens
cggaggaggattcgcagttcaacatcaagtattggtaaaggttttcaaggtgtcatgaaaagatggggatttaaaggccagcctgctacgcatggtcaaa

SEQ ID NO: 343614 - DNA, 100 bp, Homo sapiens
ctgttttctcactgtacttctgggtaaactggagaagagcttcaactctgttcacctgcttgcagagagaaatctcatcatctgtgcagccttcttaaag

SEQ ID NO: 343615 - DNA, 75 bp, Homo sapiens
agaggcggggctcaaagttcctacccgcgagagggaagaagcaggatgacagtgatgggattccgtggtcagaag

SEQ ID NO: 343616 - DNA, 98 bp, Homo sapiens
attactacaggagaaagaacatttccatcaaaccctgagagctttattaccagacatgatctttcagataacgaaggaggcccaacttcattcaataa

SEQ ID NO: 343617 - DNA, 100 bp, Homo sapiens
gacagcaaacagagattcgggttctgccgcttatcttcaggagcgaagagctgcttctgtatcttaagggaatccgagcccgcattttagagactttggt

SEQ ID NO: 343618 - DNA, 82 bp, Homo sapiens
agggcatcctctacaccatcgacaccgaaaactccaccgtagcccttgccaaagatgaggtggaaagtgagaaatggtacct

SEQ ID NO: 343619 - DNA, 100 bp, Homo sapiens
gtttgctctcatgaacatgcaatgagaagactgatcaatctgaatgcagtaatagtggccttgtcttcaaaatcatgggatgtagagactgcaacagaat

SEQ ID NO: 343620 - DNA, 98 bp, Homo sapiens
ggctgcccggacggtgttggttgggggcgctattttcttggaaggtgttactgttaaaggtgtaactcaagtaacaacacaaccaaagttaggagagg

SEQ ID NO: 343621 - DNA, 51 bp, Homo sapiens
gcgggactccggacctccaggaggaaagaactgacttcctctggtgggcca

SEQ ID NO: 343622 - DNA, 100 bp, Homo sapiens
agaagagaagcagaattatacctagaagtctactaatggacagttagtcacccacctacatgttgaggtcatcatcagatttgaaatatttaaagtggat

SEQ ID NO: 343623 - DNA, 100 bp, Homo sapiens
tttggaacttatggtagaacttccttggaacaaaagtacaactgatttattcctgacgacattgaatgccaccactagtaccttccagtttgaaatatgg

SEQ ID NO: 343624 - DNA, 100 bp, Homo sapiens
agactcagctggggctcattttcacatctctcctgaatggatcacagcgtcgcagatgtctttgcgctccattagcttccgcagtgagagccgccctgac

SEQ ID NO: 343625 - DNA, 74 bp, Homo sapiens
cgcgacctgctcctggacccagcctgggagaagcagcagaggaaggatttttttcccaggaagccatcccgtca

SEQ ID NO: 343626 - DNA, 100 bp, Homo sapiens
ggacaagactgtatgatagtgttagttccacagatggggaggacagtctagagagaaaggtttttagtctggaaatacaagcaaaatttaacaaaataac

SEQ ID NO: 343627 - DNA, 98 bp, Homo sapiens
tgggatcttagtacaaaacgtgttaaagggaaatctgtgcgttcaagatccatggccaggagctgccctttgaggctgtggtgctcaacaagacatca

SEQ ID NO: 343628 - DNA, 82 bp, Homo sapiens
ctcggagaggtgctcggattctcgtagctgtgccgggtaagaatgattgatgttggctgatattggagtgctcattcacatg

SEQ ID NO: 343629 - DNA, 75 bp, Homo sapiens
tggcccagtcttaccgttcagtggcttcctgaagtgactaactaccaagtcaggattgttacccccaccacctgc

SEQ ID NO: 343630 - DNA, 122 bp, Homo sapiens
ctaaaacacatcatgaaggcctgttttgaagagaaggggaataagactgcatctgttcatatgaggtagaagaacggtcaaggctcaaccggcaaagttcccctgccatgcctcacaaggtt

SEQ ID NO: 343631 - DNA, 75 bp, Homo sapiens
cgcaaacaagccaatcccaggaggaaaaacggaccttttcctctaaatgaagtgcttgctgaatgaggaatggga

SEQ ID NO: 343632 - DNA, 82 bp, Homo sapiens
ccgtgacctggggatcgctacggaccttaaaatacccgcaacagccccttcgtcccaagagcttactccacgggaacagcct

SEQ ID NO: 343633 - DNA, 101 bp, Homo sapiens
ccatggccgagtcacctagccgggacgtcgtgggatccggaacagcgtccgtctccaagagagtatgaagagagtgcgtctgtagggcagggaagatggcg

SEQ ID NO: 343634 - DNA, 100 bp, Homo sapiens
tccccagttgctgtacgagagcaagctctataagattcttcaaggtggggttggcatcccccacatacggccaggggttatcaccatgcaagctttgtcg

SEQ ID NO: 343635 - DNA, 100 bp, Homo sapiens
cacgggcagcgtgggcatgtctctgaccatctggacggtgtgtggggtcctgtcactatttgtcctcccaaaccgaaggaccctgtatctgcagctgtgc

SEQ ID NO: 343636 - DNA, 76 bp, Homo sapiens
tgattgaaattatctctggtgctgcagctcttgatcctgcagcatatcctgacatggagtctgatatacgttcatg

SEQ ID NO: 343637 - DNA, 75 bp, Homo sapiens
tggcacttcattggccacctacagaaacaaaatgtcaacaaattgatgggcagctgctcccaaccccagaacctt

SEQ ID NO: 343638 - DNA, 50 bp, Homo sapiens
atcggaaagcaggtccttttggcgctggatcagttccatgacaagacccc

SEQ ID NO: 343639 - DNA, 105 bp, Homo sapiens
gctgaggcgccgcggtaccatgaggcgccgaactctaagaaggagctgatgtggaggagcagctgagacagttcaagatgacgaccacagtagccacagactatg

SEQ ID NO: 343640 - DNA, 50 bp, Homo sapiens
cggagcgccatggcctgcatcctgaagaattgatgaattgcaagtttgtg

SEQ ID NO: 343641 - DNA, 146 bp, Homo sapiens
gaaggcggtgctgtgccagcgttgcggctcccgggtgctgcagccagggaccgctctcttctctcgccgacaggattggcagccaccatttgcatgtgatgttgataaacttcattttacgccacgtatccagagactgaatgaat

SEQ ID NO: 343642 - DNA, 75 bp, Homo sapiens
taagtgtccccgtagagtcaaccggtggatagatacttctcaagacatcacacagcgtgagtcaatcaaggaggg

SEQ ID NO: 343643 - DNA, 98 bp, Homo sapiens
ccccggactcgtggagttgtgaacgccgcggactccggagccgcacaaaccagggctcgccatgaagccaggaggaagagggtaatctggaagagttt

SEQ ID NO: 343644 - DNA, 98 bp, Homo sapiens
ctggtcctcgacggggaggagatcccggtgcagaagaacatcctggcggcggccagcccgtacatcaggagttcgcagcacttactaaagaactcaat

SEQ ID NO: 343645 - DNA, 90 bp, Homo sapiens
tggccaagaagatcatcattaaggacggaggcacgcagttaccgaggagacactttgtgttggcttagccagggttggagccgacgacca

SEQ ID NO: 343646 - DNA, 50 bp, Homo sapiens
aaactggacattataacattaagtgaacatgtcaaaccttttaagccaga

SEQ ID NO: 343647 - DNA, 75 bp, Homo sapiens
gtggtggaagctggaccagaggccgggaggcgaggaaaccgtggtccccagtctatgtgaggatctcctgtcttc

SEQ ID NO: 343648 - DNA, 102 bp, Homo sapiens
aggacttctaccgctgcggctactgcaagaacgagtcgggcagccgctccaatggcagtatttggcagtcgtattcagagataaacccctggagctatggga

SEQ ID NO: 343649 - DNA, 98 bp, Homo sapiens
ttccacacgaacaagcgcgtgtgcgaggagatcgccattatccccagcaaaaagctccgcaacaagatagcagggatgtacagttacccagcacgtgt

SEQ ID NO: 343650 - DNA, 76 bp, Homo sapiens
aggtatacaaccaggattctcaagattccattggagaagtttattgttggccaaaaccaggctttgattgaaccag

SEQ ID NO: 343651 - DNA, 75 bp, Homo sapiens
aaggacgcaaagttctccggcgagacaagttggatggcttgaggactggtactaaaaggaaacgtgactgggagg

SEQ ID NO: 343652 - DNA, 75 bp, Homo sapiens
tctctaacgttttagaaaatcataacaagcggttctctaccctgtaaagctggagtcacatcagaagccgcgcag

SEQ ID NO: 343653 - DNA, 75 bp, Homo sapiens
cagttcatatagcatctggacagtcaacacgggcaccatgaagcacttcctgagaccggaacatgaacattttgc

SEQ ID NO: 343654 - DNA, 80 bp, Homo sapiens
tctacctgtacacgcacctgaagcaacagcccatctgggatggcaccacagatgtgacgcggacaatgcattttgggacc

SEQ ID NO: 343655 - DNA, 75 bp, Homo sapiens
agtgacccgccctgggagctgcccccagcggttttattgctctgcaggtctccaccctggcaggaagctcttgcc

SEQ ID NO: 343656 - DNA, 90 bp, Homo sapiens
ccaatcccaggaggaaaaacggagctgactgctgggcaggaacgtctctcaggagaaagagtggaagagaaaattgtgaactaaggcccc

SEQ ID NO: 343657 - DNA, 95 bp, Homo sapiens
cccggctgccctgtggcctcgctcctcggaggatttctcactatgtgcaatagacactttggcagtgttgtggcacaaaccattcggactcaaaa

SEQ ID NO: 343658 - DNA, 100 bp, Homo sapiens
ggccgcgctacaccaacctctcgtacatcggcgagggcgcctacggcatggtgtggacagatgggagttttgtggttcatgatataccttctggatctta

SEQ ID NO: 343659 - DNA, 74 bp, Homo sapiens
cggcaggctgaggagaaagcggcgcgcggagggagtgcatccgccccaacccttttccccctcgtctcctgtga

SEQ ID NO: 343660 - DNA, 87 bp, Homo sapiens
ctcctgctaaagaaggctctgggcgtgagcctcagccgccccgcaccccaaatccaggcctcctcgctggggaggcagagtcctcgc

SEQ ID NO: 343661 - DNA, 82 bp, Homo sapiens
gttcctcgagcctgggggcgctcagctctggcaggctgccctgagcacgctcaaccccaaccccacggacagctgtcccctc

SEQ ID NO: 343662 - DNA, 88 bp, Homo sapiens
gggcggcggtggcggcggcggcagctgcagtgacatgtccagcatgaatcccgaataattcaaccctatgaaaagataaaggccaggg

SEQ ID NO: 343663 - DNA, 90 bp, Homo sapiens
ctgcatttcttgccctagtgacttaactgccgaaggaaaatgtcactgtcccattggccatattttagtcatgatgctatggactcctac

SEQ ID NO: 343664 - DNA, 75 bp, Homo sapiens
caactatggcagcagcgtggcctccgccaccgtgcacatccgaatggatgagaattctccagccaacttctggga

SEQ ID NO: 343665 - DNA, 51 bp, Homo sapiens
ctggcctggaggctatccagcaggactaccccaatggcacctggctgggcg

SEQ ID NO: 343666 - DNA, 75 bp, Homo sapiens
ctggagggcgagttctcggtcaccatgtggtcctcagacgttccatcctcagagcagcctgaactgttcctaaag

SEQ ID NO: 343667 - DNA, 97 bp, Homo sapiens
tggtgcacacgccctgcatcgagcagctggagaaggtccttgaatgggcaagagggcacatgaagtacggcgtcctccacattcacggcctctacac

SEQ ID NO: 343668 - DNA, 130 bp, Homo sapiens
tctcaatatctgtcttcggtggactccttcggcagtccacccaccgccgccgcctcccagggggatatgagactttctactcggaatatcctgagtgttgcgtggatgtaaaacccatttcacaagagaa

SEQ ID NO: 343669 - DNA, 98 bp, Homo sapiens
taggtgtgagccaccacacccagccactaagttccctgtattgaacactgatatacaaggaatgaatagaagtcaagaaaaacagacctggtgggaaa

SEQ ID NO: 343670 - DNA, 142 bp, Homo sapiens
aagactttggcctgcgagacaccttgagcatcgcatccacggattcctttgcttccgcagcagagcttaacagagcgttccaaaaagaggactctccagctactttttattgcatcagtatgcagtggtttagagaatggga

SEQ ID NO: 343671 - DNA, 106 bp, Homo sapiens
gtggaggagctgtgcagccgcgaggaggcgcgggaggtgttcgagaacgaccccgagacgatgtgaagttcatttccaatccgccctccatggtggcagcggggag

SEQ ID NO: 343672 - DNA, 100 bp, Homo sapiens
tcaacaacatttctttaaaacacgatcttcatgtatgtggtagaagaccaaagaagagatgagctaggaccatccacctgcctcacagcctgctggacgg

SEQ ID NO: 343673 - DNA, 75 bp, Homo sapiens
tggtggttggacagtcagcatttgcagactttgggaaaatggtatcatcggaggcaagctgtaaaagaattacat

SEQ ID NO: 343674 - DNA, 80 bp, Homo sapiens
agacgtgtcgtcactatgtggcccatgtgaaggaacaagactgccaatggagactgccgcagagacccccgggagcggag

SEQ ID NO: 343675 - DNA, 80 bp, Homo sapiens
cgagcgcgagcggcgcgagaaagcttttggaaatgccaagacagcccacaacaacaactccagccggtttgggaaattca

SEQ ID NO: 343676 - DNA, 50 bp, Homo sapiens
cccacctgcatggatcaccggactaccatgccggggatgaagcgagactg

SEQ ID NO: 343677 - DNA, 83 bp, Homo sapiens
ctctctttctggcctggaggctatccagcggccgcctgggcagaatgtcacgatggacgagggcggcacgcccctgctccccg

SEQ ID NO: 343678 - DNA, 95 bp, Homo sapiens
tggaaccccaccaagtaggactgatcaggtcttacaattctaaaaccatgacctgtatttggattcaagatgtgaaataatcagcgatgggaaaa

SEQ ID NO: 343679 - DNA, 74 bp, Homo sapiens
cttgtatgcaacgccccccttcacacacagtaagcttcatggcggctgaagagatgcattggcctgtccctatg

SEQ ID NO: 343680 - DNA, 80 bp, Homo sapiens
aatgtcccaaggaacacctgggcaacagaatattggtcaagttgctgaccttgaagtgagcgagtgctgtgctttcatgg

SEQ ID NO: 343681 - DNA, 96 bp, Homo sapiens
tttggaagcccttttcctccaaatcctgggaaaggtttattgatcatctaatggtgatgtttggtgaaacaccctcttgggacctagagcaaaaat

SEQ ID NO: 343682 - DNA, 71 bp, Homo sapiens
cgagcagcagtgtgtcacgctctggggaccagacagagattactgcagtttatgtgacaagcagccaatcg

SEQ ID NO: 343683 - DNA, 83 bp, Homo sapiens
gtacctttatgaaccagtgtatcccaagtataatttggcttcctgagattctgccttagcaagaaaggagtgggaaataccct

SEQ ID NO: 343684 - DNA, 75 bp, Homo sapiens
cggcatggctctcctggtgctcgcatgccaatgaagatgtggaaagaatgttactaggaaacaagtgtgatatgg

SEQ ID NO: 343685 - DNA, 82 bp, Homo sapiens
gccgcggcggagccggaggaagctgatggtcatcttttccaaacggccgaagccctgcagcccacgctacagccggagatgc

SEQ ID NO: 343686 - DNA, 87 bp, Homo sapiens
agttcttcttgtcagtgaaattgattggctcaaaaggattaggtttagcgatattgacatgggagaaattatcatggggaacattga

SEQ ID NO: 343687 - DNA, 100 bp, Homo sapiens
attgaaactctaggaggtgtctttaccaaacttattaataggaataccactattccaaccaagaagagccagagacccactgctaaggagttattgaagc

SEQ ID NO: 343688 - DNA, 74 bp, Homo sapiens
tggtccaggccttccagtacacagacgagcatggggaaggtttggctctttaaccatggatggtggccttcgca

SEQ ID NO: 343689 - DNA, 75 bp, Homo sapiens
gatagatgtgtcctatgaataccgcttcctggagttcacgactctgagtgctgcaggaacgaatgcaggaatttg

SEQ ID NO: 343690 - DNA, 75 bp, Homo sapiens
accccctggagcccccatgatccctaagaagacagcttgaacctagttgtgtgaattacgtgcctgagcctgaga

SEQ ID NO: 343691 - DNA, 82 bp, Homo sapiens
gccgatccagcctgcggagcctgtggggcaggtttggcaaacatcgaaaagatgacaagattgagaaaacgggtaaaataaa

SEQ ID NO: 343692 - DNA, 75 bp, Homo sapiens
gcaatatctctgggctttcacaggttctccccatgacaccacctgaacgtctcttcctcccaagggtgtgtggca

SEQ ID NO: 343693 - DNA, 100 bp, Homo sapiens
gctgggtgttgcagctgtccatgcctggcacctgcttggagaccagactttgtccaatactagccctgcccccaggaccctcctcccagccgccatcgcc

SEQ ID NO: 343694 - DNA, 100 bp, Homo sapiens
gtccgcttctcgcccaacagcagcaaccctatcatcgtctcctgtggctgggacaagctggtcaagcaacacagtcactcctggcggcaaaccaaacaaa

SEQ ID NO: 343695 - DNA, 95 bp, Homo sapiens
ggccacaactctgcagtggaccacagcattcctgaaatacatccaggaaagacatggagattctcttaaaaagacagatgcaccatcaggaatgg

SEQ ID NO: 343696 - DNA, 50 bp, Homo sapiens
ccaggccgggagccgaccggcacagcagaaactggcagacctttcacttc

SEQ ID NO: 343697 - DNA, 100 bp, Homo sapiens
ccatgaggcgaggctagggaggacctcacttccccggggtgtaataatgttaactgagcccctggaggaacgcgcatagatgatggtgacaagaccaaga

SEQ ID NO: 343698 - DNA, 98 bp, Homo sapiens
atccaatccttacatggttttagatatagatagccggatcgagctgggagatgtgacaccacacaatattaaacagttgaaaagattgaatcaggtca

SEQ ID NO: 343699 - DNA, 100 bp, Homo sapiens
cagaatccaagagatgagagaggacccaacatggggcagaagcttgaaatcctcattaaagatactctcgatgctaggacttgatggatcactagttttt

SEQ ID NO: 343700 - DNA, 75 bp, Homo sapiens
ctaaagcagcgtgcgttcagccctgggattgatcgtgtcctgtgctgaagatgtttccggaacaacagaaagagg

SEQ ID NO: 343701 - DNA, 100 bp, Homo sapiens
tgataaaacatttagaacgatgtgaacatcgaatcatggaatcccttgcatggctctcagccgaatacatcaagcaatggtaacatctttaaatgaagat

SEQ ID NO: 343702 - DNA, 88 bp, Homo sapiens
gattctccagtacctggatatcagcatacaattcttacatattcctggtgtagaatctgcaaacagaggaggctgcggaggaggagga

SEQ ID NO: 343703 - DNA, 98 bp, Homo sapiens
aaggcagctcgctctgggagcctagaatgcatcagtgcccttgtggcgaatggggctcacgtcgaatcgatgctatagaagacaaacaagggaaggtt

SEQ ID NO: 343704 - DNA, 100 bp, Homo sapiens
caggatctcacagctgcagtctaatagtaacacagaggagctgtaaaattgacaagcttggcatgtggaaatcagcacatctgggcctgtgattccaggg

SEQ ID NO: 343705 - DNA, 74 bp, Homo sapiens
gaagaagttaaaacatttcagggcaagccaattatggtctctaattaacagaagatggcaaagcccagccacag

SEQ ID NO: 343706 - DNA, 98 bp, Homo sapiens
gggttattcgagtgaccgagaccgcggccgggaccgagggaccaagaatcgccttcagccctgtctggtgcatccttggcagaaagtgaggaggaaaa

SEQ ID NO: 343707 - DNA, 83 bp, Homo sapiens
ccccgctctgctgtgggcgctgctggcgctctggctgtgctgcgcggcccccgcgcatggtgtgaacccacatccctgccccc

SEQ ID NO: 343708 - DNA, 75 bp, Homo sapiens
ctgcaacaggaccacagtcaagacgatcatagtcactggatctggcgacatggccagaaaggctctcaagcttgc

SEQ ID NO: 343709 - DNA, 80 bp, Homo sapiens
ctgcagtactcgggcaagaccaccttcgtcaatgtcatcgcgactacatgaggaaataattgacttttataacttcatgt

SEQ ID NO: 343710 - DNA, 101 bp, Homo sapiens
cttgtaaaacctggaacagcagcatcattgtcaaagggaaaaagaccttgatgaagttctgcagacccactcagtgtttgtaaatgtttcctaaggtcagg

SEQ ID NO: 343711 - DNA, 109 bp, Homo sapiens
gaagcagcacgggatcccagcctcaggcctgcacggacggtgttggttggggccggatcacctcaacagtcacgtcagacaagtgcactcaacagaacggcccttcaaa

SEQ ID NO: 343712 - DNA, 100 bp, Homo sapiens
ctgacgctgctgctgtgtgcggtgctgctgagcttggcctcggcgtcctcggcacctgaactcctggggggaccgtcagtcttcctcttccccccaaaac

SEQ ID NO: 343713 - DNA, 100 bp, Homo sapiens
tgctgcatagtttcggtcatctaaaggaggttttaaacagtataacaggtcatactccctgtcacaaactccagctgaactaacttggaggaggatcttc

SEQ ID NO: 343714 - DNA, 82 bp, Homo sapiens
agacaaaggcggtttcccgctcgcagagagccggcttgcaggttggatggcaagcatgtggtgtttggcaaagtgaaagaag

SEQ ID NO: 343715 - DNA, 100 bp, Homo sapiens
tgtactggcctgctgctggcccgcagggctggtaatcctggtggacctggacctggtggtcgaggaagaggtagaggtcaaggcaactggaacatgggac

SEQ ID NO: 343716 - DNA, 87 bp, Homo sapiens
gcagcaatgaccctgtggccattgtgaccaagaatatggcccaggtgaccaaagccctggacaaggccctgagcaccatggacctgc

SEQ ID NO: 343717 - DNA, 100 bp, Homo sapiens
tgctactgcacggtgaacctggaccaggaggaggttttcaggaccaaaattgtggaaaagtcactctggttcattttccagacactgaaagagcagaatg

SEQ ID NO: 343718 - DNA, 100 bp, Homo sapiens
ccgtatccaagacagtatgcaaggccacgacccacgagatcatggggcccaagaaaaagcacctggactatgggccatcaactgagaaagaccttgacga

SEQ ID NO: 343719 - DNA, 80 bp, Homo sapiens
gaacgccgcgctgcgcatctccaacagcgacctgagcgcatccctacccaacagaggatgagaaaaaacagattgctgct

SEQ ID NO: 343720 - DNA, 96 bp, Homo sapiens
ccccggcgccgcccggaactgcagcgggcagagatcctacaagaatccaggatgatgatcccagattgccagcgcaggttggaagccgcatatttg

SEQ ID NO: 343721 - DNA, 134 bp, Homo sapiens
caaaagagtctccgcggtggaggtctgcgttgctcttgcttttcctcgctggggtgtacgtggagtacgacaaggagttctcccctcgtcagcgacaccacaaagagttcaagttcaacttatcccagattcct

SEQ ID NO: 343722 - DNA, 75 bp, Homo sapiens
ctggcctgggcgctccggtggcggcggaggccacggcgtatgcctccgaggacggggtcctgaccgaggccatga

SEQ ID NO: 343723 - DNA, 104 bp, Homo sapiens
ggaacacgctgcctcagggagcccgcgaccgcgccttctcctccgccggtcccatacgatttcacctgtgtacacgatggcgagagtgaggctgaattaatacc

SEQ ID NO: 343724 - DNA, 100 bp, Homo sapiens
agctcaccccgaggaagtctctcgccacggtgaactccagaaagccattgacttattcacagatgccatcaagctgaatcctcgcttggccattttgtat

SEQ ID NO: 343725 - DNA, 100 bp, Homo sapiens
cagcctgtggaggtggataaatatgggaatatcgatgcagttcacctcaaggccatggtttactgccacctccagagaagctcactgccgaggtcctagg

SEQ ID NO: 343726 - DNA, 74 bp, Homo sapiens
ctgtctctatgaatgtgactaccctggttacctcatatttgattatggaagattcccacaagagtaccacgtca

SEQ ID NO: 343727 - DNA, 101 bp, Homo sapiens
ggccgagaagctctacccactgccctcggcccgcggtacctcaggatgagtggggagggtaccccaccggtggcaaagatgaggagattccctgcaggaga

SEQ ID NO: 343728 - DNA, 75 bp, Homo sapiens
ccatgatgatccaaacacctatgccgctcctacgaggactgctgtggctccaggtgctgtgtgcgggccctctcc

SEQ ID NO: 343729 - DNA, 100 bp, Homo sapiens
aacacagtagtggaagatgtaaagcaatatttcgagcagtttggcaagggtgcggaggcagcaaatgttacaggtcctggtggtgttccagttcaaggca

SEQ ID NO: 343730 - DNA, 75 bp, Homo sapiens
gaggcaagcaaggtcttggacaagtcaaaggcggcaggttgctgatcatagagtgaagctccaggaattagagag

SEQ ID NO: 343731 - DNA, 98 bp, Homo sapiens
tcgactccaaatggttgaaaacagatatacagggccatgtttatgagtggactaagtgaaagcaaacaaacccatgtacacctgaggaatgtcgatgc

SEQ ID NO: 343732 - DNA, 74 bp, Homo sapiens
aattgagacggagctaagagatatctgcaatgatgtactgccctggtacctgacagtgtaaagaaggagctcct

SEQ ID NO: 343733 - DNA, 75 bp, Homo sapiens
tgaacactcaagtgaagcaaaagccttccatgattacatgctgcagttggagaagaaacttgaacgtgaacttga

SEQ ID NO: 343734 - DNA, 83 bp, Homo sapiens
aagtcctccttgccaggccttcaaccactatctcagtgcaatgggttactataacaacagtaccaaggtggctgtgaaaaccc

SEQ ID NO: 343735 - DNA, 75 bp, Homo sapiens
ggagcctcaggcggacagatggactgtaagggggtggtattgttgaaccaattcctctcaatatcaaaacaggta

SEQ ID NO: 343736 - DNA, 75 bp, Homo sapiens
gtccagacagtttagcagaacagcctccgcggctccggggagaagggttggggtctgctaggtccccggaatgag

SEQ ID NO: 343737 - DNA, 83 bp, Homo sapiens
gtcaccaggaagtttgtgcatgaagacagcagccacatcattgctttatgtggtcaccatggctgttattggctcccttgctg

SEQ ID NO: 343738 - DNA, 90 bp, Homo sapiens
cgagaaacagatcaagcactttgtggaaggagcctgggagaggccaggcctccccggactgctagcctgcttttcctggggtccctggag

SEQ ID NO: 343739 - DNA, 86 bp, Homo sapiens
cccaaagacgctaaacgtgccctactctgccccgggggagaggtgtccctggccagtgtccttccacctgtccacaagcatgggga

SEQ ID NO: 343740 - DNA, 75 bp, Homo sapiens
aagaaacaagccgtggaataggtgtatcaagtaatggtgcaaagcctgaagatgcccaggtggacctgtttcgtg

SEQ ID NO: 343741 - DNA, 100 bp, Homo sapiens
tccgcgcgctcggctgcgctgggcgggccccagggccatgaagcccccaggaggagaatcgagcaatctttttggaagtccagaagaagctactccttcc

SEQ ID NO: 343742 - DNA, 82 bp, Homo sapiens
gatttagaggaccactagttggaccccatcctcgtgctggaggaacagatcctggtgtatagcctggaagcaggacgccgcc

SEQ ID NO: 343743 - DNA, 74 bp, Homo sapiens
cccgcgctcctgctgccgttgctgggcctcgccgctgctgccgtcgcggatatggagtctggagaacggttacc

SEQ ID NO: 343744 - DNA, 100 bp, Homo sapiens
ggcggcggcaaaatggcggcgcctgaggagcgggatctaacccaggagcagacagagaagctgctgcagtttcagaaactaaagttacagagtggagagg

SEQ ID NO: 343745 - DNA, 83 bp, Homo sapiens
atttgctccccctcgtgcagcaacccccacacccagcaccagggaacccgagcgtcatgttagggtgaagcagaggacctcag

SEQ ID NO: 343746 - DNA, 83 bp, Homo sapiens
ctggtgcacacaccctcgtattctcctgcccttccccagtatattcggtgctcttcgaactggtgcttatatggtgtacattt

SEQ ID NO: 343747 - DNA, 98 bp, Homo sapiens
gcgagctgagtggttgtgtggtcgcgtctcggaaaccggtagcgcttgcagcatggtgaccattgtgaggtagatattttgttctaattttccagatg

SEQ ID NO: 343748 - DNA, 75 bp, Homo sapiens
tctgcaaatctttcaccaatgtgtctgcttttggggcagagttttcatcggaggcatgcagagagttaggctttt

SEQ ID NO: 343749 - DNA, 90 bp, Homo sapiens
tccagaacatctgggagaatatttaatggaaaatcgcttggttaaaacctgacacttttaacagtaatagctcttcaagtctgcaataaa

SEQ ID NO: 343750 - DNA, 114 bp, Homo sapiens
cggcggcttcgcggcgcgtcctccgcagaggcccccgacggagacaaggacgacaatgcagatcttcgtgaagactctgactggtaagaccatcaccctcgaggttgagcccag

SEQ ID NO: 343751 - DNA, 71 bp, Homo sapiens
tgcagctcttctggtctccggcgcccgcccctcagacgtaatttatgtgtctcggtaccacgtgaaagact

SEQ ID NO: 343752 - DNA, 100 bp, Homo sapiens
agcgcgtttcccgcctgagcgcaactagcggcgggtcgtgggcacctccaggtgggatgtgtgtgggctgaaattccgagctgcggttgtgcatgagaat

SEQ ID NO: 343753 - DNA, 82 bp, Homo sapiens
cgggaaggaagatccggcgcggggcacaggatccggagctggagcccccagttcaaaaggtgatgacctatcaacagccatt

SEQ ID NO: 343754 - DNA, 82 bp, Homo sapiens
agaggctctgcgacaagtacaaccgtgccatcgacagcatccaccagctgctgtgagccgtgagctttgaggcggtgggatg

SEQ ID NO: 343755 - DNA, 100 bp, Homo sapiens
ctccccagccatgtggaactgtaatatttgaagctgaagtctcaggagggagaagtggttatattgccattgatgacatccaagtactgagttatccttg

SEQ ID NO: 343756 - DNA, 100 bp, Homo sapiens
attctttactcagctgagtgtgccacacaggtagccctggacggcattcagtgttttgcatatggggtgaagaaaaacatgccccagagtcctgcggctg

SEQ ID NO: 343757 - DNA, 96 bp, Homo sapiens
accgggatcgtgaccgagaccgtgaccgagagcgtgaccgagagcgcgaatatcgtcatcgttagaagacttggattcacttgctggtcatcattg

SEQ ID NO: 343758 - DNA, 51 bp, Homo sapiens
gttcaccagcaccggctccagtgggctctgccgaaatagaactatttgtga

SEQ ID NO: 343759 - DNA, 82 bp, Homo sapiens
aatcaaagaactggatctttatctggcttactttgtccacactccgggttgaaatcacaaagattagacacctttttagata

SEQ ID NO: 343760 - DNA, 100 bp, Homo sapiens
tataaagaaaaatttaaggaatgccaaaggctccaaaaacaaataaacaaactttcagatcaatcagaataagtcttgactgggatgaaaagagaccaga

SEQ ID NO: 343761 - DNA, 96 bp, Homo sapiens
cagatcaaagggcggctgctggaggagcacagtcggatcaaagtgggcgacgtatgaagtgaaggtgataggctacaacctcatgcaggccatgcg

SEQ ID NO: 343762 - DNA, 100 bp, Homo sapiens
cagacgtggggcgatgcttgtgaccctgcagctcctcaaactacttacaggtaccgtatccagcctggaagaccatggctacctagtggacattggtgtt

SEQ ID NO: 343763 - DNA, 96 bp, Homo sapiens
cctgtccatccagctgacttggaattagggaatgaatctgaagtctgctgcagtaaaacacagaaggctttaaaatgttttcttgcataaaattca

SEQ ID NO: 343764 - DNA, 75 bp, Homo sapiens
gtcgcagacctcgaaatgatagacggaaaccactggactttgggaaaaccatgtggcagagtcgggaccacaaac

SEQ ID NO: 343765 - DNA, 100 bp, Homo sapiens
accctgggcacagcaggcatcggaggacattgaggtgctgctgggccacggggcagacccaggcatcagggacaggcatggccgctctgcgctgcacagg

SEQ ID NO: 343766 - DNA, 104 bp, Homo sapiens
agagctgcccacctcatggacctggcaggaaacaagtctagattgaaaatgtcaactccagacatcactgtgcttctggaaactataaagaggaagtgggagct

SEQ ID NO: 343767 - DNA, 90 bp, Homo sapiens
caagaatccaaagaaaacaaaatggtggtatcatggccctgattacgtcaaacagagatttcaggaaggtgtagatgctaaagaaaatcc

SEQ ID NO: 343768 - DNA, 113 bp, Homo sapiens
tgtgacctggccgatgaggaagtactgagcctgttggaggaactggcccggaaacaggaggacagttgcatgctgagaatttgaaaaatgaagatgatgtagacactggacta

SEQ ID NO: 343769 - DNA, 100 bp, Homo sapiens
gctcatcgctcgcatcgctgccgccaacggggaggactggaatgaaattgaccccattaaaaagaaagaccttcatcacagcaatggagaagagaaagca

SEQ ID NO: 343770 - DNA, 100 bp, Homo sapiens
cacgcagagccgcaagctggtggaagcgctgtgcgccgcgggccaccgcgccgaactgctccggttcccgggttgaggaacaggttagcaccactgagag

SEQ ID NO: 343771 - DNA, 103 bp, Homo sapiens
gagcgcgaatatcgtcatcgttagaagccacgaggccccctggtggctgccacactgatgagttccagtgccggctggatggactatgcatccccctgcggtg

SEQ ID NO: 343772 - DNA, 100 bp, Homo sapiens
gatcaaaactcgctcggtggagcagacgctactcccgctggtttctcaggatatgggcactgtggtcctgggaaagctggaatcaggatctatttgtaaa

SEQ ID NO: 343773 - DNA, 75 bp, Homo sapiens
ccacaaacgccgcaccaggtcttgtagcagcgcctcctcgggtggtgacttcacacgccataatggcactggtgg

SEQ ID NO: 343774 - DNA, 75 bp, Homo sapiens
gccagactgattgtcatgctcagggaccctgtggagaggattttttatcaagcagaaatgcatcgaacaacgaga

SEQ ID NO: 343775 - DNA, 50 bp, Homo sapiens
tgtcagagaatgaaacactcatcgcatgcttctcggacaaactatttagt

SEQ ID NO: 343776 - DNA, 50 bp, Homo sapiens
gatattcaccaagcgcttcgctacaagcctcaagtactacagccttccag

SEQ ID NO: 343777 - DNA, 100 bp, Homo sapiens
gtaagaaacagtgctttctgaaacaacaaagccaaacttccattggtcagggtcccagggctggtggttgctttgggtctacagctacgtcttacccgcc

SEQ ID NO: 343778 - DNA, 100 bp, Homo sapiens
cgccatttgaaggacgtgtctgcttccactcctgccgtgattgtcagcttcctgaggtctcctcagccatgctgaactgaaaatgttggggcttttcagg

SEQ ID NO: 343779 - DNA, 100 bp, Homo sapiens
ttattacgaattgtgatcacatcctctgattggcaacatgttagctttgaagtggatcctaccaggccagaacacaaagcgtgaatccggaagaaaagtt

SEQ ID NO: 343780 - DNA, 100 bp, Homo sapiens
tttcttccagcttctgctgtccttctttgtggagagcaaggtctatcagccacagtctctgcaagtttccaagagcagcagaaaatgaacacattgcagg

SEQ ID NO: 343781 - DNA, 100 bp, Homo sapiens
cggcacgcccgggagtgagcggacaggttgttattgatgccttcagattgatcaatgctaatatgatggtcttaggacatgaaccaagacaaacaacttc

SEQ ID NO: 343782 - DNA, 75 bp, Homo sapiens
cgggcaaacctcgcgaggagaagaggacggccctgagcaagggttttggccaaattgggcgagggcacaaaataa

SEQ ID NO: 343783 - DNA, 82 bp, Homo sapiens
atctgatcgggtcttccttcattttcagagtggcagaatcacaccaccccgaagagccccttcaccagatggcttctcacca

SEQ ID NO: 343784 - DNA, 115 bp, Homo sapiens
cttatgagagtgaaggacctgaaaatcatatagagaaagacagatggaagtctttaaggagtccaaaactacttacctggaagaccttccaccaccccctgagtatgaattggcc

SEQ ID NO: 343785 - DNA, 99 bp, Homo sapiens
agaagaccggaggcgtcgacgtgtggacttccacgacgtccaggactatgcagacagcacatccagggggcagtaccacaccctgcaggctggcttcag

SEQ ID NO: 343786 - DNA, 98 bp, Homo sapiens
agacggctcacctgtgcgggatggaacaaaagtccacaggtcctggctaccctgggaagagacaagaagtaaatgaagaaagaggaagattccaggac

SEQ ID NO: 343787 - DNA, 87 bp, Homo sapiens
tttggaactgtcaggtacctcaaagcatatgtgtcacaaagatgtctacacggaactgccagggaatggactcagtgatcaaacccc

SEQ ID NO: 343788 - DNA, 75 bp, Homo sapiens
gcccgagcggccggaccttgtcttcgtttgccaagatggtggataagaatatttacatcattcaaggggagatta

SEQ ID NO: 343789 - DNA, 113 bp, Homo sapiens
cctgatggacagccccgaagacgccgacctcttccactccgaggaaatcaaggtctgaagaactgttgcccaattcaacagtgccagcattccaactttgttaaacctaccaa

SEQ ID NO: 343790 - DNA, 98 bp, Homo sapiens
ttctgaagtaaaattatgtgcatttgttacttggtcagctcagggagaaatacagccctgtgttcactgtgtacatgggtcccggccagtggtggttt

SEQ ID NO: 343791 - DNA, 75 bp, Homo sapiens
taatcattgcatcctatgatgccaacaagaaaggtgaagcctgatggcacatacgtgaaaccgctgagtaacaag

SEQ ID NO: 343792 - DNA, 100 bp, Homo sapiens
tgggagcccagttggaagcccgggaccgtttaaaaaactgtaggtggcaagtgggagaaaccatcagaaattttggaaatcaaaggacagaactgggaag

SEQ ID NO: 343793 - DNA, 100 bp, Homo sapiens
aggagacatggacgaagccttcaaatccatcaagctcatcaaaagttacagaatgtctgaaggggacagtgtgggagaatccgtccatgggaaaccttcg

SEQ ID NO: 343794 - DNA, 98 bp, Homo sapiens
cgccctctgccgccgcaccctgcacacccgcccctctcctgtgccaggtggcgacctgcacatgacccagtttttccgaggcaatctggctggcttaa

SEQ ID NO: 343795 - DNA, 75 bp, Homo sapiens
caatcctctcatcttgtcctacctgaagtatgccattagttcccaggaacatcattcatggcagtgattcagtaa

SEQ ID NO: 343796 - DNA, 75 bp, Homo sapiens
atcgggctcaggacctgtgagcagctgctgcagtgtttcgggcccagatggctacctgtatgagcgtgaggccat

SEQ ID NO: 343797 - DNA, 98 bp, Homo sapiens
ctacatggacacagtgagcttgtctgccactgggttttataggtgaaatagcccaatttttggtatgtgctcatagtttagcatatgatgaaaagcca

SEQ ID NO: 343798 - DNA, 50 bp, Homo sapiens
agcctctcaaagtgctaggattacaggacttaaccaccaccatgtcgagc

SEQ ID NO: 343799 - DNA, 100 bp, Homo sapiens
ggcacatgttaatctggctcaaggctacctccagctgaaaggttgcagatatcaagaaagtcaacaacttcatcagagaacaagacttatatgctttgaa

SEQ ID NO: 343800 - DNA, 101 bp, Homo sapiens
gtgaaaatggttccatttccattttccctgttctcaaggaaatgggtcctgatgaatatgaagagatggaagaagaggaggaggaggaagaggaggaagac

SEQ ID NO: 343801 - DNA, 82 bp, Homo sapiens
gaatgacaaacaaccagctcttcaggaatatattaaaggaatctgtgaacctgaactagaagaaagagaatgttaccccaag

SEQ ID NO: 343802 - DNA, 82 bp, Homo sapiens
tggccgctcacccgtggaaagtacaggtcctgacagctgctgctcctgctaaggccaagccggctgaagctcctgctgctgc

SEQ ID NO: 343803 - DNA, 100 bp, Homo sapiens
ccagaggacagctctgtgctgatccccaccgacaattcgaccccacacaaggaggatctaagcagcaaggttgcatcataaatacaaaggactgaagtta

SEQ ID NO: 343804 - DNA, 83 bp, Homo sapiens
cctctcaccatgttcagcataaagtaccattcttaatgattatcctcaacaagacagctgtgttcaattacaaaaaaagatgg

SEQ ID NO: 343805 - DNA, 99 bp, Homo sapiens
caacacatgttttcttctggtatctggctaaaaatccagcaactatcacaagaatactccttagccacttcaattgggataaagagaagctaatggaaa

SEQ ID NO: 343806 - DNA, 76 bp, Homo sapiens
ggccataccgttgaccgctcctccaactaaccaggacttgccatgaggtgttgaagccttgtttcactgagttgga

SEQ ID NO: 343807 - DNA, 100 bp, Homo sapiens
acccggacagaggcaagcaggggcgccgtgggtgccagagaggcggaagaggaggcctgatgggtttgaccttgtctgtgtcaatgcgtggatgctggac

SEQ ID NO: 343808 - DNA, 75 bp, Homo sapiens
aggcagacagtggggaggaagaatgccggtcacagcccaggaggtatccacaaattacccattatcaaaaacaaa

SEQ ID NO: 343809 - DNA, 102 bp, Homo sapiens
gttcgtctcttacgtctgcggaagtgcagctgcctcagttcttagcgcaggtcctcagaatggttggaatgaccctccagctttgaacagagtacccaaaaa

SEQ ID NO: 343810 - DNA, 100 bp, Homo sapiens
cggtttcaccgcgctcgttatcatgtggcagaagcactatgactacgtctactttgagaactcctccagcaacccatacctgatccggagaatcgaggag

SEQ ID NO: 343811 - DNA, 75 bp, Homo sapiens
ggtggactacggggagcgcgccgagctggatgactcggacggttattcagcttctcaaggctggaaaagcgaagg

SEQ ID NO: 343812 - DNA, 75 bp, Homo sapiens
tagagacgttttccggagggattccatcatagggtctcctatggacagaagtgcgggcaaggagctttgttcctc

SEQ ID NO: 343813 - DNA, 74 bp, Homo sapiens
taaaagaactgcagaaaggggagtacaaaatggttcgttacatcagaaggatacagttcatgacaatgactttg

SEQ ID NO: 343814 - DNA, 87 bp, Homo sapiens
gatttgtcctgtctggatcttacagtttttggagccgtgagggatacagcagtttggtcaatattgtcttaacatgcttcaaataaa

SEQ ID NO: 343815 - DNA, 100 bp, Homo sapiens
gaagaaaaaagaaaagaaactgacaaaaacatttctgaggagatgagtatgatgtatgtgccatttgtttggatgagtatgaagatggagacaaactcag

SEQ ID NO: 343816 - DNA, 101 bp, Homo sapiens
ttacctgcaccgttgtcctacttccagaatgcacagatgtctgaggacaaccacctgagcaatactgccttggacaagattcgctatgagagcctgacaga

SEQ ID NO: 343817 - DNA, 100 bp, Homo sapiens
ttgtccaaagcagtcgtaagaagaggtcccaatcccccactctttccgccctaatggaggtctccagtttcgtgccggatggagtgctgtgatgtgccag

SEQ ID NO: 343818 - DNA, 75 bp, Homo sapiens
ctctggatgctgacagaaacaagggacctgaaggagaagaaggagaaggtggaggagaaggcaagccggaaagag

SEQ ID NO: 343819 - DNA, 100 bp, Homo sapiens
gtaactcagcgaattgtaatggaaagcatatggacaggtctacgccacatcacttaggatcgaacctgcaagcacttatagacagtactcgggaaccaaa

SEQ ID NO: 343820 - DNA, 100 bp, Homo sapiens
tccgcctcccgattgactggcctgcttggcaaggcaagtagcggcggcgcttcaaggatcatccagcagctcgtcaacggcatcatcacgcccgccacca

SEQ ID NO: 343821 - DNA, 75 bp, Homo sapiens
catttttcagggacgtagccatccagagaatgaagactattctcagcaatcagactgtcgacattccagaaaatg

SEQ ID NO: 343822 - DNA, 74 bp, Homo sapiens
atcatcctcatcatcatcatagagtccggcagcgtcttctcttgagggagcaatttggagaagagctggaaccc

SEQ ID NO: 343823 - DNA, 82 bp, Homo sapiens
tgacgtgcccaaccacagagaccaggtgacttaagagattaaaattaatttggttgctgttggttctgaacaaataatgagt

SEQ ID NO: 343824 - DNA, 82 bp, Homo sapiens
ccatgctaacctactatgagggtcgagcagagcattaggtggtctcttcagtcagcctacacaagctcctacccagtccaac

SEQ ID NO: 343825 - DNA, 100 bp, Homo sapiens
ctgatgacctgctgctcgtgctgatctcagggttctagagcacctcagcagtcttgccagagaagtgagcctggactatgagcgcagcatgaacaagatc

SEQ ID NO: 343826 - DNA, 100 bp, Homo sapiens
tttcttcgggcctgtgctgagttacaccagaatgtaaatgtgaagaacataatcattgctttaattgataggaattgaatgatctggcacgggaccctcc

SEQ ID NO: 343827 - DNA, 97 bp, Homo sapiens
catatttaactacagaaaaaaattccttcaaaagaatggacgatgaggataaacagttacgtaatcaaggtcaagtgaggggaacaagcgcagccag

SEQ ID NO: 343828 - DNA, 100 bp, Homo sapiens
aggcagaagactatgatgttgtaaaagttattggaagaggtgcttttggtgaagtgcagttgccctgacttctcaaaaagcactgcacagaggaggaggc

SEQ ID NO: 343829 - DNA, 50 bp, Homo sapiens
agaaccgtcagtttgagccagatggaatggttttagggaagactgttgcc

SEQ ID NO: 343830 - DNA, 51 bp, Homo sapiens
aggcaatgaggtgaacgcagaacgtactatactggcaattgctggagaaga

SEQ ID NO: 343831 - DNA, 87 bp, Homo sapiens
agaagaagccctactgcaacgcgatgacgtcatgatgccccagcgggtgaggctgcaacacgaggctgccgttcagcacccgtcgag

SEQ ID NO: 343832 - DNA, 100 bp, Homo sapiens
ccgagatctgaaagctggcaacgtgctgatgaccctcgagggagacatcaggctgggttttatgaatgaagctatggctacagattccccaagaagaccc

SEQ ID NO: 343833 - DNA, 82 bp, Homo sapiens
ggaggcaggctgcggcagacggcgacagtggcggcggcgccatggcagggcttgcaggctcttgtcaggatggtgaagctgt

SEQ ID NO: 343834 - DNA, 100 bp, Homo sapiens
tgggttcagttttcttcagaagaaggacttcggaatgcactacaacaggaaaatcatattatagatggagtaaagcaacggcagcctttaacagttgagc

SEQ ID NO: 343835 - DNA, 98 bp, Homo sapiens
ctcgcttcagtcagtcgggccgcgccgcgcctcagctctgatgatacaccccctgaagactccattcctttggtctttccagaattagaccagcagct

SEQ ID NO: 343836 - DNA, 100 bp, Homo sapiens
agcagtcggatgggggaggactgctttatggacttgcatcaggagtagcaagaatacaaacaagtgatcctaatgctgtggtcatgggattggcaccaga

SEQ ID NO: 343837 - DNA, 90 bp, Homo sapiens
attgtcctgagaagatcctgtattcttggggagagttgctaggaaaatggactggggttttaaggggtgtggcaggaggttttggactcg

SEQ ID NO: 343838 - DNA, 83 bp, Homo sapiens
ggagcctttgggaaagtgtacaagttcttctcaccactaaatccaatacgagttcatattgatattggagctgatggcagagc

SEQ ID NO: 343839 - DNA, 75 bp, Homo sapiens
cacgaggagcagacctcatgaataaaagccgttttcggctttgtgagaaaccttaccatcaaacacgatggccag

SEQ ID NO: 343840 - DNA, 82 bp, Homo sapiens
tttgcccatatctgcaaaatgacagatgtctttgaaggatcaaagttctgatcgtaccagtctttcttcagtgggagcccag

SEQ ID NO: 343841 - DNA, 80 bp, Homo sapiens
gcagagcattggcaggaggggcaaggtggaacagtgcctccggagccagcgtggtggccatagacaacaagatcgaacag

SEQ ID NO: 343842 - DNA, 98 bp, Homo sapiens
tgtagctttcatgagcacaggcatcagtcaggcagatgtttgtcgactggaatggacaatgcagatcttcgtgaagactctgactggtaagaccatca

SEQ ID NO: 343843 - DNA, 100 bp, Homo sapiens
gcccccccgcgccgaccgcgttcctatggacagacgcacagacacctgcagagttgtggaaagtaaaaatgtagccctaccaaaaggaactattgtactg

SEQ ID NO: 343844 - DNA, 82 bp, Homo sapiens
cgcggattcgccgaggcaccgaggcactcagaggaggtgaagatcatgacggagaaggaactcctggccgtggcttgtgagc

SEQ ID NO: 343845 - DNA, 100 bp, Homo sapiens
caaaacaaagtagaataagaaatatttcaaatacagtaatgaaagtaaagcagatcctgggcagaagagtccctgtgaagcaggaagagtgagggcaggt

SEQ ID NO: 343846 - DNA, 58 bp, Homo sapiens
aacatgggacattccaacacagagattgacgtgtccctcaacaccttacactaagtca

SEQ ID NO: 343847 - DNA, 100 bp, Homo sapiens
agaaagtacagtctatgaatgagatagtccagagcaacctctttaaaaagcaagtggagcacatgatccagaagaaccaatgtctcttcaccaacaccca

SEQ ID NO: 343848 - DNA, 135 bp, Homo sapiens
atgctccgttgagagacgcggctttcggcaagaactggattcgtggcgccacaagctcattcactgtgtagggatcagtgtcgtttagggatgtgactgtgggcttcactcaagaggagtggcagcatctggacc

SEQ ID NO: 343849 - DNA, 73 bp, Homo sapiens
acattatcctacccctagtggctggcagcctcccagagactccacaaggcacacagagaaactgtccttcccc

SEQ ID NO: 343850 - DNA, 146 bp, Homo sapiens
tgctgggcctgcaggggtaagcccacctcccctacctggagccggaacacagcatcatcccagtaagctccaaccagtggtttgagtccagccaatgacactggagccaaaaagaagaaaaagaaacaaaaaaagaagaaagaaaa

SEQ ID NO: 343851 - DNA, 74 bp, Homo sapiens
cggagctgacggtggaggttcgcggctctaacggggctttctacaagtttctgatgaagaattgaaaagaagag

SEQ ID NO: 343852 - DNA, 97 bp, Homo sapiens
ggttgagctcatgttcccgctgttgctcctccttctgcccttccttctgtatatggctgcgccccaaatcagggccttatgtgcccagaccacaagg

SEQ ID NO: 343853 - DNA, 75 bp, Homo sapiens
cagttggagctaagagccaaagccttagctaaaagggggaaatttgcagtggtgagaaaatgtataaagaaagat

SEQ ID NO: 343854 - DNA, 90 bp, Homo sapiens
gttagagaaaagggctatgaacgattaaaagaagaactcgcaaaagctcagagggaaccaaccggtgagccctctcctaagagacccagg

SEQ ID NO: 343855 - DNA, 99 bp, Homo sapiens
cgtttgtagaagaggagcatctgctccagtaagactttgaccccgacgcaggcttcagtgattgccgcggatcagaagcctgagcactttggctcgaga

SEQ ID NO: 343856 - DNA, 96 bp, Homo sapiens
gcttcctcaacttcacgctggcgcgagccccgtcctccttcgccgccgcgcacaaccgcacgtgcagggttttggccaaattgggcgagggcacaa

SEQ ID NO: 343857 - DNA, 75 bp, Homo sapiens
cccacagcaggttggacagttcacaggtgcacattcaggttcccgagcacaaacatcaagataacgttcactgcc

SEQ ID NO: 343858 - DNA, 75 bp, Homo sapiens
cctcaatgcagtcttttatagaaaaggtcgaaacagtggggcctgggaaaccaagtcacctccaccagctgcacc

SEQ ID NO: 343859 - DNA, 96 bp, Homo sapiens
ccccaccattgaagactcctacctgaaacatacggagattgacaatcaatgggccatcttggacgaatcctgcaatgataaggcgaagttgagagg

SEQ ID NO: 343860 - DNA, 76 bp, Homo sapiens
ccgcgagccgacaccatgcgatccaaggcgagggcgaggaagctagccaaaagtcatcatcagatttgaaatattt

SEQ ID NO: 343861 - DNA, 102 bp, Homo sapiens
cggttctaacttcgaaaaatcagattgaaagactgacccgtcctggttcctcttacttcaatttgaacccatttgagggtggtatttccaacattttggagg

SEQ ID NO: 343862 - DNA, 88 bp, Homo sapiens
aagttggagaagtatccaatagggatattgtagaaactgtctttaacctggagtccaaaactacttacctggaagaccttccaccacc

SEQ ID NO: 343863 - DNA, 82 bp, Homo sapiens
cgcagggaggatgtcgggacaccccggaagctgggaaatggctttaacagacttctgtgattcatatggcttagtctgcaat

SEQ ID NO: 343864 - DNA, 82 bp, Homo sapiens
gagggatccttcacccgtgtctgcaaaatgatgcttcaacacccaggccaggtctctgcctcggaagtgagtgcttctgcca

SEQ ID NO: 343865 - DNA, 90 bp, Homo sapiens
acaatcaacacggccattggacacatcaataggtggagccgccaccaaaatgcagattttcgtgaaaacccttacggggaagaccatcac

SEQ ID NO: 343866 - DNA, 83 bp, Homo sapiens
atccggttccttggtgtcatccagccttagcaaaccagaggtattgttgcagcatctggcagtgagactgaggatgaggacag

SEQ ID NO: 343867 - DNA, 82 bp, Homo sapiens
gtcgctggtcgtgcgacccaagcccctgcattcctgtacggtgacgccaatgccccctttgcccagtggagcacagagcgtg

SEQ ID NO: 343868 - DNA, 100 bp, Homo sapiens
aggagttggattctccagtacctggatatcagcatacaattcttacatattcctggtgtagaatctgcaaacagatggctcagcgacttcttctgaggag

SEQ ID NO: 343869 - DNA, 101 bp, Homo sapiens
ccggcaaggaaacttcgcaggctgagctccagagattatattggggttgccattttgtgaagccatagacatgtggtcattgggatgtgtgattgcagaat

SEQ ID NO: 343870 - DNA, 128 bp, Homo sapiens
tgccaatttggacactctagtagctgtaatagaatgccagcaaccagaagcagacttatacagcccgagggcaacatccttcgagaccggttcaagagcttccagaggaggaatatgatcgagcctcg

SEQ ID NO: 343871 - DNA, 100 bp, Homo sapiens
ggagtgaaggtgggcctaggctaagtgatgcagccaacacgaacggttgtcatgtgtaacacaactttcgatcaccgcgaaaacaccgtcctgggaaagc

SEQ ID NO: 343872 - DNA, 100 bp, Homo sapiens
cattcagctggtataattcatagaccagcttaccaaaacctgaggcagaaagtggataattttgtgtcaacacatctggacaagcaggaatggaatccta

SEQ ID NO: 343873 - DNA, 100 bp, Homo sapiens
gtggaggaagagattgcagtgggggctgccagtgctaccctgagaaaggtggacgtgctgcagatcaaattacgaagctgtataatctcttcctgaaaat

SEQ ID NO: 343874 - DNA, 74 bp, Homo sapiens
gtgattgtcttgtattagagccttcagaaatgattgtgaaaaggcgacggcggattgacagaagtatgattgga

SEQ ID NO: 343875 - DNA, 124 bp, Homo sapiens
cttcaggaatgccaggagcaggatctgcagaagacgcagggctcaagaccctgtcacactcactgaaaatggcggaccagaacctggagaaactgaagacggagtcagagcgtctggagcagca

SEQ ID NO: 343876 - DNA, 100 bp, Homo sapiens
ggagacgctgggagcgagcgcagcaaagcgcccagcctgccgcctcgctgtccctgcggcttctgggggttgcagatatcaagaaagtcaacaacttcat

SEQ ID NO: 343877 - DNA, 82 bp, Homo sapiens
cgacgtcatcatgctgaccaccaatcagatccgtaaggattttttatcaagcagaaatgcatcgaacaacgagaatcaagat

SEQ ID NO: 343878 - DNA, 51 bp, Homo sapiens
tgatgagctgatcttaatcaaaaattacagctcttttgaggaagcttaagc

SEQ ID NO: 343879 - DNA, 75 bp, Homo sapiens
ggactgcaaaggccaatgttggtgctggcaaaaagggtgaaaatggtcttccaggcgaaaatggagctcctggac

SEQ ID NO: 343880 - DNA, 82 bp, Homo sapiens
gaaaagtaagaacaaacaaagaaacactggagatattcagaagtataatgggtctctcccaaatggcgatagaggaaggagg

SEQ ID NO: 343881 - DNA, 50 bp, Homo sapiens
ctttttgtcagattatcaggatgagggttgcacagagcattgaggatcac

SEQ ID NO: 343882 - DNA, 82 bp, Homo sapiens
cacatgtcacagagccttgcaaataatagcaagatatgtaccatctccttcagtgaatctacagacctattttctcaggagc

SEQ ID NO: 343883 - DNA, 83 bp, Homo sapiens
ccttcaggacggcgaccacgtggccttggtctaccccccagcaattctgtggtgttcttggtcacacatttatggagtttctg

SEQ ID NO: 343884 - DNA, 98 bp, Homo sapiens
tcctgaaggagttccaccaggccgggaagcccatcggaggtcggatccgcagctgcttgcccggttctactatgccgacgaggagctgaaccaggtgg

SEQ ID NO: 343885 - DNA, 109 bp, Homo sapiens
tatgcattgaagcaaattgaaggcacaggaatatccatgtcggcttgtagagagattgcagtgctggagaatctggtaaaagcaccattgtgaagcagatgaggatcct

SEQ ID NO: 343886 - DNA, 100 bp, Homo sapiens
gagtgaattcttgagtagagtctgccagcgccacactgatgcccaggcacaggcatctgcagtgttgggtggtgaattcctcaagtacatggaggccttt

SEQ ID NO: 343887 - DNA, 94 bp, Homo sapiens
tcggtggactccttcggcagtccacccaccgccgccgcctcccagcccgtggaccgggagcccgtggaccgggagccggtggtgtgccaccccg

SEQ ID NO: 343888 - DNA, 100 bp, Homo sapiens
ccaacagggatgaattctacagccgaccctccaagttagctgacttctgggggaacaacaacgagatcctcagtgctgcatcttcctcccgtgaggctgg

SEQ ID NO: 343889 - DNA, 110 bp, Homo sapiens
cggcccctgcgccggcctcggccaccgagatcctgctgacgccggctagggtctcggcgcggaagatggccggcggcgtggacggccccatcgggatcccgttccccgac

SEQ ID NO: 343890 - DNA, 100 bp, Homo sapiens
gaagataaagtctaccttacagggtataactttacattagcagatatactattgtactatggacttcatcgctttatagatttttttcccaggaagccat

SEQ ID NO: 343891 - DNA, 83 bp, Homo sapiens
atataagccaggcatgtctcccgaggagtgcaggcgcttcaccacagacggacagagcgggatgccaccagcttgtccaaagg

SEQ ID NO: 343892 - DNA, 100 bp, Homo sapiens
ggcccacccgcccggccgccgaggagcgggaggaggacgggaccccggcgcccccaccccatccccgggaggtcccctcttgctgttggctgcacatcag

SEQ ID NO: 343893 - DNA, 82 bp, Homo sapiens
caccagtccaactcgggtcgcccccaccattatttcggtgacttaagagattaaaattaatttggttgctgttggttctgaa

SEQ ID NO: 343894 - DNA, 98 bp, Homo sapiens
ctggctcaggaacagggacagcacctcatcccctggatgggggaccacaagatcctcatcgacagatgaacagactagccactttgcattgactggaa

SEQ ID NO: 343895 - DNA, 97 bp, Homo sapiens
accaagaagaccaaaactgtccagtgtaaagtgaccctcttagatggcaccgaatacagctgtgacctggagaatgtgacagtgatgataacatggg

SEQ ID NO: 343896 - DNA, 98 bp, Homo sapiens
tacgctgcccagctggacgtcaagaatgagtcagtacaagcaagttcacctgacctctcagctgggaccgctgtcagcatcatgattggagtactggc

SEQ ID NO: 343897 - DNA, 90 bp, Homo sapiens
atgcgggccctgctggaccagctcatgggcacggctcgggacggtgccgtgagcgatgtggagatgcaggaacactatgatgagtttttt

SEQ ID NO: 343898 - DNA, 99 bp, Homo sapiens
ccattttctactgtccctgcgcgaggaccatggccaacctggagcgcaccttcatcgccatcaagccggacggcgtgcagcgcggcctggtgggcgaga

SEQ ID NO: 343899 - DNA, 100 bp, Homo sapiens
ggaccacctgcccagcgttggcgaggagccccgggaggtgcttctgcggctgtacggagccatcttgcaggctctggaatgtttttgtcaggcagcatct

SEQ ID NO: 343900 - DNA, 90 bp, Homo sapiens
gatcgagctgtggacccatccagacaagtaccccgttggggttcatttcctgcccaagaaggttggtgttcgaggaagagacattgttgt

SEQ ID NO: 343901 - DNA, 94 bp, Homo sapiens
atatctggggccaagggacaatggtcaccgtctcttcaggtgagaagccctaccactgcaactgggacggctgcggctggaagtttgcgcgctc

SEQ ID NO: 343902 - DNA, 121 bp, Homo sapiens
cttaccttccaggtgcatctcgcgttggagaggaaatcagagaagggacaagacacaccttagatcctgtcttgggaacccattctccataaacactatccgcttcttttttccgatgttg

SEQ ID NO: 343903 - DNA, 82 bp, Homo sapiens
cctcggccttccgacgtgggcggtgggccccagccccacagaccagcccagcattcagggcttgtcaatgaggcagatcaga

SEQ ID NO: 343904 - DNA, 100 bp, Homo sapiens
aaacttgttgctgcaagtcaagctgccttaggcttataacatcacatttaaaagcatctcaggctgacattattatcggacacttatgtatcagacatga

SEQ ID NO: 343905 - DNA, 75 bp, Homo sapiens
ccaagttatgcagccttaaacgacttgttctctatcgaacaaaagtagagtgggcaggcttggctgaaatgagaa

SEQ ID NO: 343906 - DNA, 100 bp, Homo sapiens
atccatgtttctggacgcggatttttggcctcatactctgttatagataaacaagtttggcagtaatcagtccaaaccagagttcacagtggacctcaag

SEQ ID NO: 343907 - DNA, 75 bp, Homo sapiens
gatgggaaaaatatttgatcaagcatctgacagatacgtctcatggtgtaagaaataagtgcctgcagttacttg

SEQ ID NO: 343908 - DNA, 123 bp, Homo sapiens
gccaacttcggcaagatccagatcgggatttacgtggagatcaagcgcagcgatggtgcagattcactttataggaacagcttcagcttcagtgatgaaaaactgaattctccaacagactct

SEQ ID NO: 343909 - DNA, 83 bp, Homo sapiens
gaaggaacgaggcaaggagctaaagcagcgtgcgttcagccctgggaaagatcaactgaaatcggcaaacttctgagttccta

SEQ ID NO: 343910 - DNA, 75 bp, Homo sapiens
gtcaaggtggcctaccaggaggccaggggtgtcgccatgtttttgaatcagagccgacaggcacttgaattgaaa

SEQ ID NO: 343911 - DNA, 75 bp, Homo sapiens
agttttttttgccgaaggcttgtctcaactttgaatttttcagtcaccaggagactaaagtccatcaaaaacatc

SEQ ID NO: 343912 - DNA, 98 bp, Homo sapiens
ggaacttcccgccttcaaggaccgcgtgcctgagtaccctgcagtggaatgttggctgtccgtgaaaaccgctacattgtcctggccaaggacttcga

SEQ ID NO: 343913 - DNA, 100 bp, Homo sapiens
ctcaccagagtgggtttcatgttgacagaagatttggatgggattgccatggcttacctgtgggttatgtggtccgaatcagtggtgggaacgacaaaca

SEQ ID NO: 343914 - DNA, 98 bp, Homo sapiens
tgaacaaaaggaggaaattaaagaacaaaagacgacgctcattactcaataggttgttccattcagctagtggaagtacctcaaagcagcaatacgag

SEQ ID NO: 343915 - DNA, 88 bp, Homo sapiens
gaagatgcaagcggtttgggaccttgaacaaggcaaatatggttttggaggaggtgcgccagtctgtaactcctgccgagccagtcca

SEQ ID NO: 343916 - DNA, 100 bp, Homo sapiens
gagacagagaagactttaacagaactcaacaaatgctgtggcctttgtgtctgcccatgtaatagatttgtgtaagaattgtcatcatgtaatagccaga

SEQ ID NO: 343917 - DNA, 75 bp, Homo sapiens
gagcctggagccgtgaacccagccgcgccaggactttccttatcccagttgattgtgcagaatacactgcctgtc

SEQ ID NO: 343918 - DNA, 100 bp, Homo sapiens
tgcctaccacctagaactggattgtgcgcactgctggagaggaaggaggagaatggacggagggtggccgccctgggtgccgagctgtttgtgccagggc

SEQ ID NO: 343919 - DNA, 97 bp, Homo sapiens
gttaattcaattagtgataatgtatgggaagtccttatcttaatggaatattgtcgaggtatcaatataagtgatgaggattttcttttgctggagc

SEQ ID NO: 343920 - DNA, 75 bp, Homo sapiens
caggtttcggcacatggagattgatgtaagaatgattgatgttggctgatattggagtgctcattcacatgaagt

SEQ ID NO: 343921 - DNA, 83 bp, Homo sapiens
catgcagggacagatacaaacggagatatctttttcatggaggcggtctatgcttgcttggtgcttatgctgacagtgatgac

SEQ ID NO: 343922 - DNA, 83 bp, Homo sapiens
cctttgtcagagccatcatgggcacaaagcagacattcgtagagaaacatggatgaaacaggaaatctgacagtatcttctgc

SEQ ID NO: 343923 - DNA, 75 bp, Homo sapiens
cggcccgcggcccgttttcgggaggaggcggagggcgcaaagcgagccggcaacagctggaaacagagaagaaaa

SEQ ID NO: 343924 - DNA, 87 bp, Homo sapiens
aggattccaagtaactcttatttggcttgaccactatgctatcatcaagtttccgctgaccactgagtctgccatgaagaagataga

SEQ ID NO: 343925 - DNA, 98 bp, Homo sapiens
gtcgggggcctcatcagaaatgttacacacggagtatcaaactctgctgccaagattgtccgtgtggagcccttggtgaccatgggccaggtgactgc

SEQ ID NO: 343926 - DNA, 75 bp, Homo sapiens
atccgtaagagcaatcagatacctactgaggtcaggagcaaagctgaggaggtttttcagacaaggatcttgaag

SEQ ID NO: 343927 - DNA, 50 bp, Homo sapiens
tttgaacctcagattaatgcggagggtgacctcacagtgactcaagctac

SEQ ID NO: 343928 - DNA, 88 bp, Homo sapiens
gaggactggcattgctgccatcgcagttcatgggaggagacaacaaccggatcccagtcatcgggcccctgaagatccgggagcagca

SEQ ID NO: 343929 - DNA, 75 bp, Homo sapiens
gtggataatataatcaactcctctgcctggtacgagcaggtgataataaatatatgcacttgaaagtattcaaaa

SEQ ID NO: 343930 - DNA, 83 bp, Homo sapiens
caggattcgttggctgccgtccccgctgctgtgcattgggttaatttggagtggcccctggagtcagtttcctacaccatccg

SEQ ID NO: 343931 - DNA, 99 bp, Homo sapiens
gcctcaggccagtcgcctccaggccaagagggatccttcacccgtgtctggaatggccaacctgctgacgggccccaaacggaacctgatggccctggc

SEQ ID NO: 343932 - DNA, 75 bp, Homo sapiens
caccatcatccgagctcgcttcgaggagcttcatcgcagtaggaatggcagccccatctatgaaggaaagacagg

SEQ ID NO: 343933 - DNA, 74 bp, Homo sapiens
tgccgtgtgcagtataataacctggaacaggtcacgagaagagaatgccttctagatgcaaaatcacctccaaa

SEQ ID NO: 343934 - DNA, 100 bp, Homo sapiens
ccataacattacaacgttgaccaatcctccagaaaagaagctctaacagaggaccctggctgtctacggggttgggctggagtgcaatggcgcgatctcg

SEQ ID NO: 343935 - DNA, 100 bp, Homo sapiens
tcaggaaactgagtccaacactatgctggtttgaggtactggtcttcttggacattaatctttgaatacttgctgactgctaagaaatgaccagagggga

SEQ ID NO: 343936 - DNA, 100 bp, Homo sapiens
tcatatatccttcatatgatccatcttagtgaagaattaggatacaggaagggaaaaggccgaggcatcagcgtgtgaagaccgcaaagacgatcccgag

SEQ ID NO: 343937 - DNA, 100 bp, Homo sapiens
tcgtgcagctcttggcaggagtagctgatcaaaccaaggatgggagccgggtgtgggctgagccctgcctgattgatgctgccaaggaggagtacaacgg

SEQ ID NO: 343938 - DNA, 74 bp, Homo sapiens
accttgttatcagtgatggctcttctctggaagatcttgtgggggcagtacccaaaggaaacgctacgaaagaa

SEQ ID NO: 343939 - DNA, 130 bp, Homo sapiens
ggacagccaagctcagcggatggccgaaaatctaggcttcgttgggcctttgaaaagccaggaactcgtgtccctgaagccttgtaaagctgcggagctggttgccacccacttttctggacatattgaa

SEQ ID NO: 343940 - DNA, 97 bp, Homo sapiens
gagtcttccagttcatctaactcttatttctccgttggcccaaccagtcccagcgctgtcgtgctcctctactcgtgaagctgtggtctaccaatct

SEQ ID NO: 343941 - DNA, 75 bp, Homo sapiens
gtgaatgggcacctcgacctcccccagaatttgtccgagatgtcatggggaaagaatatggcaaagctgatgcaa

SEQ ID NO: 343942 - DNA, 75 bp, Homo sapiens
gctaggggcccggaagggaaactgcgaggcgaaggtgaccggggaccgagtggatgattcaacagccacacaaag

SEQ ID NO: 343943 - DNA, 100 bp, Homo sapiens
ccctgcccgcctccagggccctggccacccctcccaagctccacacttgtgagaagtgcagtaccagcatcgcgattccagaggagaaccagccacccag

SEQ ID NO: 343944 - DNA, 96 bp, Homo sapiens
gcgccgccgccgccgccgcggacaatgagaggttcaaatggtgaaagacgatgacccctcctggaagcccacttttatcgtgaaacctgatggtgg

SEQ ID NO: 343945 - DNA, 100 bp, Homo sapiens
cccggaaacttaggggccacgtgagccacggccacggccgcataggtctgggaggggctgaacgtggtgaagacaggccgagtgatgcttggggagacca

SEQ ID NO: 343946 - DNA, 51 bp, Homo sapiens
cccaaagtgctgggattacggtgcaaggatgatgctgaaaggaataacaag

SEQ ID NO: 343947 - DNA, 100 bp, Homo sapiens
ggcaaatcatgcgctttgcaatgaaatctcgaaggggacctcatgtccctgtgggacacaatgcccccaagtggaatgcagtagccctctgggcctggga

SEQ ID NO: 343948 - DNA, 101 bp, Homo sapiens
cccacagccaggcgggacgcgcacagtccctccacgcggaaagaagtaccttcgccggtcaccggctcctgcagggttcttctgagctatgaaggggccca

SEQ ID NO: 343949 - DNA, 97 bp, Homo sapiens
cggccggctgcgtggtgatcgttggcagatgcattgctgtttgctcccttggggtctggatatgtgaagagcttgcacagtgtacaagccaccctca

SEQ ID NO: 343950 - DNA, 101 bp, Homo sapiens
ctttgccggcatgagcatctccatccacatctccactgatggcctcagcctctccgtgcctgccacgcgccagccggagcggttgcagggcacacattact

SEQ ID NO: 343951 - DNA, 100 bp, Homo sapiens
atcaggaatagattctcttgaccatgtgacatctgatgctgtggaacttgcaaatcgaaggtgaagaagggcaaagaccccaatgcccccaagaggccca

SEQ ID NO: 343952 - DNA, 100 bp, Homo sapiens
ggccacctgggtggtggatgtgaagaatggcaaaggatcagtgcttcctaactcagtttggaccgaattctaatttttcttgactacaagtcttcaaaat

SEQ ID NO: 343953 - DNA, 90 bp, Homo sapiens
ctggaagacgcgctcctgcgccgagtgtgaacatggctacgcctcttcattcccgtccatgccgagcccccgactgcagcattcaaagcc

SEQ ID NO: 343954 - DNA, 76 bp, Homo sapiens
gccagacttacctgtcctactcaccgatttgaagattcaatatactaaggcctcaacacctcccaagcacagagtg

SEQ ID NO: 343955 - DNA, 114 bp, Homo sapiens
ggcgaatcacttataaatggcgccgaagcaggacccgaagcctaaattccaggaggatgatatcatcaagttgaatcgaaaggaagggaagaagcagaattttccaagactaaa

SEQ ID NO: 343956 - DNA, 75 bp, Homo sapiens
aggacagagtcagtgatttccataaattgaagcaaagagtttcaattactgaaaattacttggaaatagaaggaa

SEQ ID NO: 343957 - DNA, 122 bp, Homo sapiens
ctggagagatggcaccggcctgaggtcaaggagaaattgaactaaactctcctttgaagactggccatgtgtccttcaagcccagcttagaccaacagcgttcatgcccaacctgtacagac

SEQ ID NO: 343958 - DNA, 75 bp, Homo sapiens
ctgatccgcaaagtgtctacctcggggcagatccggaccaagacaaagaaacagccttggtataatagcacgtta

SEQ ID NO: 343959 - DNA, 93 bp, Homo sapiens
ccccccttccccacgcaaccccagatccatttacactttacaatgccatggacaatattaccaggcagaaccaattctacgatacccaagtca

SEQ ID NO: 343960 - DNA, 50 bp, Homo sapiens
ggagactcctgaccctcagaatgatgcggaaaacgccatgcggtacataa

SEQ ID NO: 343961 - DNA, 100 bp, Homo sapiens
aaactgacggagacgcagatgtggacttgaaagaagctgcagcggaggaaggcgaggaacctacaagcagcaattggcgcctattatgactttgagagcc

SEQ ID NO: 343962 - DNA, 100 bp, Homo sapiens
agacaccctctgggggtcctctctgagtcaaatccagtgcggagcgtgctttggacaccatgaattttgatgttataaagggcaagccagtacgcatcat

SEQ ID NO: 343963 - DNA, 90 bp, Homo sapiens
gatagataccgaattcttatcacaaagagatccgtgctcagctcacagagcagatgaaatgcctggaccagcagtgtgagcttcgggtgc

SEQ ID NO: 343964 - DNA, 75 bp, Homo sapiens
cccgagcgcgccccaagcccgggcgccaccgctgccacctccgcgagatcttcgtgaagactctgactggtaaga

SEQ ID NO: 343965 - DNA, 148 bp, Homo sapiens
gtcccccaggtgttcctgacagcatcatctgggacagtgcagatccctgtttcagcagttcagctccaccaggtacatgtcccagagcaagcacacggaggcccgggagctcatgtactcgggagccctgctcttcttcagccatggc

SEQ ID NO: 343966 - DNA, 74 bp, Homo sapiens
ggctttcgcatttgggaccctgcaggggccgtgggcaagacctgccttctcatcagctacaccaccaacgcctt

SEQ ID NO: 343967 - DNA, 112 bp, Homo sapiens
acaagaaaggcaaggaaacatcttttgacaagatgtcacctgaaagtggtcacagccgcatctttgaagattttgcaggactgtccagaagagcctgaagctattaatgatg

SEQ ID NO: 343968 - DNA, 76 bp, Homo sapiens
tcggtgctccggggaggtcacctgacgaggagaggcggggtttcaccatgttgcccagactggtcttgaactcctg

SEQ ID NO: 343969 - DNA, 80 bp, Homo sapiens
gacgtggtcacgaggaccaataagatcagggacaggatcagtgaagtggagcccaaatactatgcagatggggaggacgc

SEQ ID NO: 343970 - DNA, 83 bp, Homo sapiens
aagacgtccaatctgagcgtgctgcggacggcgctgcggtacatccaggcaggtacttcccggagcgagcggggaacgcgacg

SEQ ID NO: 343971 - DNA, 90 bp, Homo sapiens
agcctctggacattgactacatgggggaggaacagctccgtggttgcagctgaccatgtttgcatgaggcagggactcggtcccccttgc

SEQ ID NO: 343972 - DNA, 90 bp, Homo sapiens
gcataactgaagccactaagacggacttggcgatgtacatcaatgaagttaaacgggacaaggagaccttgaggaaaatcagcgaatttc

SEQ ID NO: 343973 - DNA, 75 bp, Homo sapiens
agggcaccccgggcgggcggcggctgctgatgggagctacagtttttgtccagcccctggacctggtgaagaacc

SEQ ID NO: 343974 - DNA, 100 bp, Homo sapiens
aaacgcttgttgaatggcttcagagtcaaatggtaaagctttccagtttgaatttagatgatcacgcaaagaagaaattaattaaacttgtaggagagcg

SEQ ID NO: 343975 - DNA, 74 bp, Homo sapiens
actgggcatctggaggattgtgatcaggatccaaagagtcggacgaggaaggcagccaggagaaaggaggggac

SEQ ID NO: 343976 - DNA, 90 bp, Homo sapiens
ctagaaagtttcataagacaggactttccagggaagacaaaggcgctttggctaagctggtggaagctatcaggaccaattacaatgaca

SEQ ID NO: 343977 - DNA, 98 bp, Homo sapiens
tgaactaccctgagaatgggtggactcccggagaggattcctaccgagagtggatacagccacccacacagaatatgcctatgggtcctggagggatg

SEQ ID NO: 343978 - DNA, 75 bp, Homo sapiens
cccagacaagtccccagggaatgccacagcatcctccagcacctcagataagccaatggacacgtcagtgttatc

SEQ ID NO: 343979 - DNA, 98 bp, Homo sapiens
cgtcccgcgcggggcacgatgttgaacatgtggaaggtgcgcgagctggtggacaaagcgtgccatgcctctgcaactcctcctgttgctgatcctac

SEQ ID NO: 343980 - DNA, 51 bp, Homo sapiens
gggcaaggaggtgctgctggaggatgatgaagaacgagagcttcaaatgga

SEQ ID NO: 343981 - DNA, 74 bp, Homo sapiens
cagattcgcagtggtcgcttcttctccttgtgtgatccagctttgcttcctgagcccaatcacgtcatgctgaa

SEQ ID NO: 343982 - DNA, 83 bp, Homo sapiens
cccagctttaaaggagatgcaggagaaaatacggcattgctaggttttcaagctagaaatgcccttcttcagtcaaatctttc

SEQ ID NO: 343983 - DNA, 75 bp, Homo sapiens
ccaggtgttaccccctccagcttagacttcctggcctccagaatgtgaagccttctccttccaaaaagtttcggt

SEQ ID NO: 343984 - DNA, 99 bp, Homo sapiens
agaatcttgtcactttagccactgctactacaggttgctccttgagggcaggacagttcttatggctttatccgttgcgtaagcacagagaggtctgcg

SEQ ID NO: 343985 - DNA, 100 bp, Homo sapiens
ttccctcggtctgggcttctctgaggcggcgagagatggtcaggtctggagctcgaccgggccaggtcctctcaaactgtgagtaactaagtggtttgtg

SEQ ID NO: 343986 - DNA, 100 bp, Homo sapiens
catgaagacttgaacttaatacagcaagaaagaccatcaagtttaccaatgaagactggcccatttgcagagcactccaaccagctgtggaacatcagcg

SEQ ID NO: 343987 - DNA, 98 bp, Homo sapiens
aaagatcagccctttttggaaacatacaggatatctaccacttcaatagcttacagttgaacatgagtcttcttatgattagtgagaatgtaaaattg

SEQ ID NO: 343988 - DNA, 90 bp, Homo sapiens
tctccctgagggagaccttggcaaggagattgagcagaagtacgactgtggagaagagatcctggagtgtctggaaaaattcaccgtgag

SEQ ID NO: 343989 - DNA, 83 bp, Homo sapiens
caacttcctgtcctactaccgcctcacacgcttcctctccagagtgatcaagtgtgacccggagctggaagctatcaaagctc

SEQ ID NO: 343990 - DNA, 100 bp, Homo sapiens
ctgctggaggagcgcttccgggtggatgcccggagcataccagtgttagcaaaatggcaaaattcatatagcattaaagttgtacttcaagagctaagac

SEQ ID NO: 343991 - DNA, 74 bp, Homo sapiens
agaaattaaaagacattcatttttctcaacgatagactggaatccaaatggagcggagtccctgaaagattttt

SEQ ID NO: 343992 - DNA, 100 bp, Homo sapiens
acccggttccccggcccacagtgggggtgtgcaaacccgagagaactgggttacaggaaatacaggaggcagaggaacaaataaaagacaccacgagaaa

SEQ ID NO: 343993 - DNA, 98 bp, Homo sapiens
tcccccataggtcactgtgtggccatctaccactttgaaggtgaaactgatggtaaatccatttgcttatgaagaatataggaaagataaaatacgac

SEQ ID NO: 343994 - DNA, 80 bp, Homo sapiens
tatgttataaaaaatttgttactcaacaacaatatagagatcacctttttgataaggttctctacttaaaagacaatgac

SEQ ID NO: 343995 - DNA, 75 bp, Homo sapiens
gatctggacaaaggaacaggtatctcaggcaacttgccactccctactgaataaagctacagtaaaagaaaaaaa

SEQ ID NO: 343996 - DNA, 100 bp, Homo sapiens
ggcagtggcagtgtgaccaagaaccatgcctggtggatccagacatgatcaaagccatcaaccagggcaactatgggaacgaagagctctagaaagaaga

SEQ ID NO: 343997 - DNA, 101 bp, Homo sapiens
attgatgacaaggagtttgatattcctcaagttgatactcctccaacactggaaagcatactaaatgagattgaaaatattgaacttcccatggatacaaa

SEQ ID NO: 343998 - DNA, 112 bp, Homo sapiens
ccgacatgttcacgcacgggatccagagcgccgcgcacttcgtcatgttcttcgcgccctgcggagctggagtttgttcagatcatcatcatcgtggtggtgatgatggtga

SEQ ID NO: 343999 - DNA, 100 bp, Homo sapiens
gcctctgaaaagaatcggggcccaagaaaaggcgaaaattgtacaagctggagataaggaccttgatgggcagctagactttgaagaatttgtccattat

SEQ ID NO: 344000 - DNA, 100 bp, Homo sapiens
ggagaacgaagatgtaactgttgagctaattcaggtgaatgaggatttgaataatgctatccttggatatgagagtgcaccaattccagctggacatcac

SEQ ID NO: 344001 - DNA, 74 bp, Homo sapiens
tagaagaaaggaagacggactcgtatcggtaccccaggacagagttcacccagggcatgatcttacctacaatg

SEQ ID NO: 344002 - DNA, 49 bp, Homo sapiens
cgatctggagcttttcccctccccgggctgctctttggcgtaaattgca

SEQ ID NO: 344003 - DNA, 75 bp, Homo sapiens
caccactggcaaggcccagcttgtgaaaatgggctctctaaatacgtacagattctgcgataatgtgtggacttt

SEQ ID NO: 344004 - DNA, 76 bp, Homo sapiens
catgaagactgtgtaaataatatcagaaagttcgtcgctgcttcctgtgctccaggagaggacatctcctgtattc

SEQ ID NO: 344005 - DNA, 50 bp, Homo sapiens
cgcaaattcttctatgggaaagaagctgcatataccctcctcttatatga

SEQ ID NO: 344006 - DNA, 90 bp, Homo sapiens
cggcagccctgcggctacggagacaggggacatcacccagaagggctatgaaaagaaaaggtccaaactcctatctccttacagcccgca

SEQ ID NO: 344007 - DNA, 87 bp, Homo sapiens
atgatgagcgccttaaggatctctttggcaagtttggatgttttagaagaatgtatgtctcttcccaagctatcttcttattctgga

SEQ ID NO: 344008 - DNA, 83 bp, Homo sapiens
acgccaaggaggtcacccgcgtgctaatggtggaaacccacaacgcctgaactctttgcttccggaatccgggattgttgctg

SEQ ID NO: 344009 - DNA, 97 bp, Homo sapiens
tttcaaagcccaatattgaaggtgccccaggggctcctattggaaataccttccaggtgctccttgtcttctgagatgttgggcccctcttgggatg

SEQ ID NO: 344010 - DNA, 98 bp, Homo sapiens
catgcagggtgtgagcagggctgagatgggcaccgcggatctggggccgtcctcagggggcagtacccaaaggaaacgctacgaaagaatacatggag

SEQ ID NO: 344011 - DNA, 101 bp, Homo sapiens
ctggtgtttggtgtacccatgtgactaatttgtccaaagagaggttgtctaccttcataacaacaatatctctgtagttggatcaagtgacttctgcccac

SEQ ID NO: 344012 - DNA, 75 bp, Homo sapiens
caagatggacgccgagcaggatcccagcttgggcactgtttaaaggaaagttccgagaaggcatcgacaagccgg

SEQ ID NO: 344013 - DNA, 100 bp, Homo sapiens
cgagctcgttggagcttgaacccattgtcacccctccgatcacccggaagttcaggctgaattctgaaggcaaacttgagcagacggtctccatggcaac

SEQ ID NO: 344014 - DNA, 100 bp, Homo sapiens
caaggtagcacatacttgtctccatcctcaggaatcccttcctgatactagaagtgagatccaatggatttgaacagaagcgctttgccaggcttgccag

SEQ ID NO: 344015 - DNA, 98 bp, Homo sapiens
agtggagcaggccgtgctgctgtcacgcctggaggaggagtaccagggcaaatgacacagctttgtgaactgatcaacaagagtggggaactccttgc

SEQ ID NO: 344016 - DNA, 78 bp, Homo sapiens
tggcgtcaccatgggggctgtgctgggtgtcttctccctcgccagctggacatttatgcagtgtgtgattctttctaa

SEQ ID NO: 344017 - DNA, 116 bp, Homo sapiens
attcctcagttctggaggtgcgatggccaagtggactgcgacaacggctcagacgagcaaggctgtcgaacgccacagaagtatgatcccactttcaaaggacccatttacaatag

SEQ ID NO: 344018 - DNA, 75 bp, Homo sapiens
tcgtcaagccacaggttttccagtcgcactgcgcctctgaagagccaatccattcaggatgggaaaccacgcagg

SEQ ID NO: 344019 - DNA, 75 bp, Homo sapiens
caggaccaggctgcgagaacagaattctggagtccaaggaagaccaagatcaaggcgccagcagatttggtgtct

SEQ ID NO: 344020 - DNA, 74 bp, Homo sapiens
cagagagggaagagattcagccagcacactcctcgcgagcaaggccccaggcatggaagagctgatatgggaac

SEQ ID NO: 344021 - DNA, 75 bp, Homo sapiens
acgtgctaatggagcatggtgtgcctggtgttcgagatctcttaaaagtgattttggagaagattttgacaattc

SEQ ID NO: 344022 - DNA, 100 bp, Homo sapiens
atgttgagccttcttggtattcttaagtacaaaccttcaggaaatgccacagatatgtcttgtccaataagcatgtggctcctgatcatcttttgcaaat

SEQ ID NO: 344023 - DNA, 100 bp, Homo sapiens
ttcctgctgatccaaaactctatcgacatcacaacaagttgaggttatgctttaaggaattcatcatgaggaatgtccagaaagagaagtgtatgacccg

SEQ ID NO: 344024 - DNA, 74 bp, Homo sapiens
caaaagtgaaattttacgaactcagactgtgatcaaccactctatgattgtcctatgtgtgggctcatatgtac

SEQ ID NO: 344025 - DNA, 90 bp, Homo sapiens
agcaacgcgagtgggagcaccaggatctcgggctcggaacgagactgcacgggaggagctgtgtattgggaagcaatgcagaaaacaagc

SEQ ID NO: 344026 - DNA, 100 bp, Homo sapiens
agcgatgcaagctcggatccgagactggcagcatgagcagcatgagattgctatgctatgccttgtatgactaagacctcttaccaagaatacgtgtcag

SEQ ID NO: 344027 - DNA, 96 bp, Homo sapiens
cgtgggcgccctccccgccaaggcccgtgcgagttgctctatatgcaatcagtgctgtctactttgctggagtgatggtgcgactgatgttgactt

SEQ ID NO: 344028 - DNA, 88 bp, Homo sapiens
ggtccgccatcttatgaagagtgaggcccctgtacagggcggcgactggcggcgcgatggacctgaccgggctcctgctggacgaaga

SEQ ID NO: 344029 - DNA, 96 bp, Homo sapiens
cgaggctcggggcctgctgctggccacaaagaactcccacctgcgacacatcgagcacatggaggggaggagccccagccccgcgacgaggaggaa

SEQ ID NO: 344030 - DNA, 99 bp, Homo sapiens
agagaagacgatctgcacttcgcattttggcattgacatttaattttagggtcctttatatagaagggagagatcctgatggtgaacatgccaggagag

SEQ ID NO: 344031 - DNA, 92 bp, Homo sapiens
gccgcgaggaggcgcgggaggtgttcgagaacgaccccgagacggacggggaggtttactgcatcgacgcgcggttctacgggaacgtcagc

SEQ ID NO: 344032 - DNA, 108 bp, Homo sapiens
tagataccgagctgctagccgagagattttactaccaagccctgtcagtagctcctcagattgacggcagttctgctactgcgaattgatgacatcgtttcaggccac

SEQ ID NO: 344033 - DNA, 100 bp, Homo sapiens
cagagagggcctgggagcttgctgcagcttcagaggatgtgctgtggtttaaaccagtggaactgagaacgaagtggggccggagaggacatatcaagga

SEQ ID NO: 344034 - DNA, 83 bp, Homo sapiens
ggctggacgacagcagcaggaggcgtgctcccatctccggtgagaagccctaccactgcaactgggacggctgcggctggaag

SEQ ID NO: 344035 - DNA, 100 bp, Homo sapiens
caggcaccatggacagcgtgcggtctgggccttttgggcagcttttccggcctgacaacttcatctttggtacaccaggggttggaaaaaccacactagg

SEQ ID NO: 344036 - DNA, 75 bp, Homo sapiens
ggggaagggcctcaaagccagaaggtggatggtctgaagcatttgctggagacaggggcctcggtcaacgcaccc

SEQ ID NO: 344037 - DNA, 82 bp, Homo sapiens
caagtcgtccccctctccgccccccaggaggggcgagagggagccgcagctgatgtcaggcattcagatttgggagaagtag

SEQ ID NO: 344038 - DNA, 82 bp, Homo sapiens
attctacggacaatatttacatgttgcaaataaatccggattcttcaatcaaccccacctgcctagagctggaacgttacct

SEQ ID NO: 344039 - DNA, 83 bp, Homo sapiens
ggaagagcggccccgcggggggcgatgaccgtgcgctgaccctgactcactccagagttcaagctgaagaagatgtggaaaag

SEQ ID NO: 344040 - DNA, 137 bp, Homo sapiens
agttaactgcagctcaacagcagcaatatgcattagcagcagctcagcagccacatatagcgagaattagaactgcagcgtcagcgtgacttgcataagatcaagcagcttcagcagacagtgagagacctggagtc

SEQ ID NO: 344041 - DNA, 76 bp, Homo sapiens
gaatctgttcttcttttgcatcctacgtaaccagaccaagctgtgggttgtcgagatgtccacagaaggaggattt

SEQ ID NO: 344042 - DNA, 82 bp, Homo sapiens
gaatatgtggagagggccattgaatatcgacttcatgagatggacagacagcaggaagatagcctggagaaggtgattaaag

SEQ ID NO: 344043 - DNA, 100 bp, Homo sapiens
agtcaaatccactgagctctgtgctgggcatttggctggaggcattgacagttgcaagtcctgccgtcatcactgacaaagtaatcccagcttgtctgcc

SEQ ID NO: 344044 - DNA, 100 bp, Homo sapiens
gttccccacggaggccatgggcgacccagcccccgcccgcagcctggacgacatcgacctgtccgccctgcggctgctacaggagctgagagaccctacc

SEQ ID NO: 344045 - DNA, 75 bp, Homo sapiens
ccttcccccaagttatcaaatccaagggcggtgttgtgggcatcaaggaacacatgattctgtgcagatttgcag

SEQ ID NO: 344046 - DNA, 90 bp, Homo sapiens
ctgttgctggagatcctgggcctcctgtgcaaaagcatgagctctgcgtgcctcttgctgtgccctacctggacaaacccccaactccgc

SEQ ID NO: 344047 - DNA, 75 bp, Homo sapiens
gcgagcgccccgagttgccctcagtggtcttcttggcaagtgccaaacccaagtctgaaatccacgtgtctatgg

SEQ ID NO: 344048 - DNA, 82 bp, Homo sapiens
cacacaggagagccaggattcatgctctacatccccatagagagtgttgcggagataggaacatgggagagaaacaatctgg

SEQ ID NO: 344049 - DNA, 96 bp, Homo sapiens
gccatcgttgctgccttcttcgtcaaggctgtttgccctggagcctgacctgctgcccctcttccagtacaactgccgccagttctccagcccaga

SEQ ID NO: 344050 - DNA, 101 bp, Homo sapiens
ggagcctgcaagttgttgctccgcttgttggactgctgctgcaaaacttttctacactatgataccctggcaactggaataatttattttcatcgcttcta

SEQ ID NO: 344051 - DNA, 98 bp, Homo sapiens
cttgtgtgaacgcaatgacaagtgcataactcctcctcagagccctgatctcgtggagccatcgacaaggacacctgtttctccccaagtaacagatt

SEQ ID NO: 344052 - DNA, 80 bp, Homo sapiens
ggcaggcgaggctccaggcctccagtttcagagactcctccactctctgggaatgacacggactccctctcctgcgacag

SEQ ID NO: 344053 - DNA, 74 bp, Homo sapiens
cagatcttcgagttgtcatccccccttcaagcaagggcatgatgcctccactactgttctccatagtggtgttc

SEQ ID NO: 344054 - DNA, 100 bp, Homo sapiens
gctgaaggagcagcagatggtgatgagaggccaccgagagacctccatggtccatgaactcaaccggaccagttgctcttctgtgatgactgcgatcgtg

SEQ ID NO: 344055 - DNA, 82 bp, Homo sapiens
aaaagagcaggtggaaaaggaaagctcgaagagtgtggaaaaactaccttcctgctatcaatggcattgtatttctggtgga

SEQ ID NO: 344056 - DNA, 75 bp, Homo sapiens
ctgtatttgttggagcccatttctgcttaacagagcgttccaaaaagaggactctccagctactttttattgcat

SEQ ID NO: 344057 - DNA, 100 bp, Homo sapiens
ctgccttgtcttctccactgttcctggaggaatccgagaagagcagagcggagggagccccagacacgtgggccgaggccctgaacgtgttccagcaggc

SEQ ID NO: 344058 - DNA, 90 bp, Homo sapiens
caagtgggagcactggaagtacgggcagttgcagtgttggagctaaagcagatgatgttgagggcaaaattagacaaatcattccacctg

SEQ ID NO: 344059 - DNA, 100 bp, Homo sapiens
ccttcccctcctcgccgccaccgcccaggaccgccggccgggggacgagctcggagcagcagccaggaagttctactacatcaccctgctacgagacccc

SEQ ID NO: 344060 - DNA, 83 bp, Homo sapiens
gaaactttggcgacaatgttggcctgtctgcaagcttgtgcaggcaccttctagccaccatggcaacctcatctgaagaagtt

SEQ ID NO: 344061 - DNA, 100 bp, Homo sapiens
aaggattccaagtaactcttatttggacgcagagggctctacgtgtttgcacctggctgccaagaaaggccactacgaagtggtccagtacctgctttca

SEQ ID NO: 344062 - DNA, 83 bp, Homo sapiens
cgacgaaagccagcgagctcctcagcctcagtgtactaatggtcacttgatgtgcgctggctgttttatccacctactagcag

SEQ ID NO: 344063 - DNA, 90 bp, Homo sapiens
ggcggagaccctcgaagtgcgcaaacttgacactcaccctgaccgggttatgtaccgaaggactctaccgtgtcagcgggaataaaactg

SEQ ID NO: 344064 - DNA, 100 bp, Homo sapiens
attggatatagaacttaaagtaaaacaaggtgcagagaatatgatacagatgtattcaaatggatcttcaaaggtggatacccttcgccatgttatcagc

SEQ ID NO: 344065 - DNA, 88 bp, Homo sapiens
agaggttggatttatgcaaacttgggccaaaggacagttagaagacagtaggatgaaacaggcgcctatttaatcgacagagacccca

SEQ ID NO: 344066 - DNA, 106 bp, Homo sapiens
atttgggtcgcagttcttgtttgtggatcgctgtgatcgtcacttgagtctcactgtcgcccaggctgcagtgcagtggtgccatcacgcgtcactgcaacctctg

SEQ ID NO: 344067 - DNA, 110 bp, Homo sapiens
gttcacgcacgggatccagagcgccgcgcacttcgtcatgttcttcgcgccctgtgcagagcagagcgggcggaggaccccgggcgcgggcgcggacggcacgcggggca

SEQ ID NO: 344068 - DNA, 127 bp, Homo sapiens
ttcgaactgaaaaggaaagaaaatctgtttcagctgagatcaactatggaataaggtttactcagggtggagagattcaaccagttagcgtgaaagttggagataaagttcttctcccagaatatgg

SEQ ID NO: 344069 - DNA, 101 bp, Homo sapiens
ccccttcctgatgatcccggacctgagcagcccgtacctctccaacggacccctgtctcccggaggagcgcgcaccacctttccagctcacccccagggcc

SEQ ID NO: 344070 - DNA, 111 bp, Homo sapiens
tgacgctgctgctgtgtgcggtgctgctgagcttggcctcggcgtcctcgggtgctggagaatctggtaaaagcaccattgtgaagcagatgaggatcctgcatgttaatg

SEQ ID NO: 344071 - DNA, 90 bp, Homo sapiens
ggagacagcggcacagaggtgcttctgccaggaggaatgccagctcctgagcaggcctcattggtggaggaggggcaaccacagacccgc

SEQ ID NO: 344072 - DNA, 98 bp, Homo sapiens
aggttttaaaggcagcagatctcttagcggcagatttctcaggttcgttggggtgataaaggatctactgaggaaggtgcaaggctagagaaagccaa

SEQ ID NO: 344073 - DNA, 98 bp, Homo sapiens
tgctattgattctagtcatccctggcttcatgagtgtatgattcgtctctttaatactgtgaagccatgtccctggagggagatgaatgggaactgag

SEQ ID NO: 344074 - DNA, 101 bp, Homo sapiens
tggtttctagaccatctacctcatctagaaggagagcaattagtgagacagcctgcctagggtagttaaaagacgagtgaatgctctcaaaaacctgcaag

SEQ ID NO: 344075 - DNA, 80 bp, Homo sapiens
tggagcctcagttggaagcagccgatccagcctgcggagcctgtggggcagaggaagaagcccctccagatggtgctgtt

SEQ ID NO: 344076 - DNA, 83 bp, Homo sapiens
tcttgtaatcaggttacgtcgaccccctctaagatacccaagatatgaatttgaaagacatattggctgacctgatacctaag

SEQ ID NO: 344077 - DNA, 82 bp, Homo sapiens
cccgagacattctggatggcagaggtggcatctctggtgagaagccctaccactgcaactgggacggctgcggctggaagtt

SEQ ID NO: 344078 - DNA, 100 bp, Homo sapiens
cggaggcttggtgactccagtggcccagagagaagaagaaggaggttcctgctgtgccagaaacccttaagaaaaagcgaaggaatttcgcagagctgaa

SEQ ID NO: 344079 - DNA, 83 bp, Homo sapiens
aaagaatatttagaatgcaggatggagaggttcgatacaagaggctgttttcctagcgtggcttgctgcctttggtaagaaca

SEQ ID NO: 344080 - DNA, 51 bp, Homo sapiens
cacacatgtagagacctttgtatggatccacaccacccatgactgtgttca

SEQ ID NO: 344081 - DNA, 100 bp, Homo sapiens
ttcttcaaagagtagacactctggctgctccctgacagcacagcctatgcccctgaggccaccgactacgatgtgcgggtgctactgcgcttcccccagc

SEQ ID NO: 344082 - DNA, 73 bp, Homo sapiens
tagaggacaacgcagatatagaacatttcttttatcacaataatatcgtctactgcattatttttggctgcaa

SEQ ID NO: 344083 - DNA, 74 bp, Homo sapiens
cttgtatatgagtatacattgctgatgatgggagaaccagttactaccttctctaacacaggctccatcctatc

SEQ ID NO: 344084 - DNA, 50 bp, Homo sapiens
tgatgtatgatgagatcttcatggattttatggaagaccttgggttatgg

SEQ ID NO: 344085 - DNA, 50 bp, Homo sapiens
cgacatgcctttgtgcctttcccagctcaccagcgactggaaccagcaac

SEQ ID NO: 344086 - DNA, 111 bp, Homo sapiens
aaaatggcagagaatacaaatttgatgtttcgtcagagttactagagtctctgctggatgaaccgaatcctaacagtccagccaatagccaggcagcacagctttatcagg

SEQ ID NO: 344087 - DNA, 100 bp, Homo sapiens
cgacatcaagagctgcgagatccaacagtttctgccactgccttctacaaagcacaacctgtaattcagttcatgtgtgaagttcttgatattcataata

SEQ ID NO: 344088 - DNA, 114 bp, Homo sapiens
cacctccatcactaccaataccatcaataccagctctgacaaaacaggtttctttacctccagaaagaagaatattggccccttgaattctggaagttcattgaagagtctgaa

SEQ ID NO: 344089 - DNA, 82 bp, Homo sapiens
aatatttatgacatcttgccttggcgacaggaagacctggcttgacaaaagtaagctgaagccaggaacaagagttgctttg

SEQ ID NO: 344090 - DNA, 100 bp, Homo sapiens
agagaactgtctcctggtgaccgagcacccgcctccgggcatcttcaactcatttaaatcaaacggtattgagatggattgggttatgaaacataatggt

SEQ ID NO: 344091 - DNA, 75 bp, Homo sapiens
cgacacccctggtggatggcgaggatgagagggcgtctctggccgagcctctttttgtggaaaacgacagcagca

SEQ ID NO: 344092 - DNA, 74 bp, Homo sapiens
tttccagcccgtggtccttctccatattcgaggtcaaaatgcagatcttcgtgaaaacccttaccggcaagacc

SEQ ID NO: 344093 - DNA, 100 bp, Homo sapiens
ttgcataccaccaatcacaggcacgaggcggccctgaagctctacaagtacaatggtcagttccgttcaaggaaacacatatcccagccaggcgccagta

SEQ ID NO: 344094 - DNA, 100 bp, Homo sapiens
cctgcgcgtgtgcgtgctcagcgagctccagaagaccgagcgggactatgtgggcacgctggagttcctggtgtcggggatggtggatccaggagagaag

SEQ ID NO: 344095 - DNA, 75 bp, Homo sapiens
gacctgtcagcaactaaggaacaaaagtaatgaagatttacacaaactttgtcatgagggtcctgtgtggcaagt

SEQ ID NO: 344096 - DNA, 98 bp, Homo sapiens
tcttcttgctctcctttctgtaaacacaggtattagtcactgtaccactggctttactacagaaaggtgccattcagtttaatccaccgttgtcagag

SEQ ID NO: 344097 - DNA, 90 bp, Homo sapiens
cccgattccggaaaaggtgccaagagcttagttgaactccttgctgatagccctgaagagatgcacagttggattaaagcagtctctggc

SEQ ID NO: 344098 - DNA, 83 bp, Homo sapiens
cgaaaggaacggctgaaggccctacgggagaaaaccgggcgcaagggctgaccagtttgagtatgtaatgtatggaaaagtgt

SEQ ID NO: 344099 - DNA, 99 bp, Homo sapiens
cagaataccagtgattttgagaaaacgggattttctgaagaagtactagatggtctattacaatggctaccatggagacacctctgaaacatttttggt

SEQ ID NO: 344100 - DNA, 75 bp, Homo sapiens
ccaataaaaataaactgcttgaacatcctttgactggttagccaggccataggaaaaggatacagagtagagttt

SEQ ID NO: 344101 - DNA, 82 bp, Homo sapiens
ggcggtgccggcgccggagacgatgccgttcacaacattctgaaattttttggttattgtaatgatgttgatcgggagttga

SEQ ID NO: 344102 - DNA, 90 bp, Homo sapiens
ggcatggtcaagatagacctgaaaaccaagtcttgtagtggagtgagaatccaaggatggagagccaagcccacgatcagctgcccacac

SEQ ID NO: 344103 - DNA, 138 bp, Homo sapiens
tttgatttgtggaacctattattttacagagtatttcaatattccttatgattgggaaagaatgccaagatggcctgtatgtggaatcagagggaaaacgctcataattaacctgccaggtagcaagaaaggatctca

SEQ ID NO: 344104 - DNA, 51 bp, Homo sapiens
ggacggcgagcgcgagcggcgcgagaaaatcgggctggtggtcatcctggc

SEQ ID NO: 344105 - DNA, 90 bp, Homo sapiens
ggtccgagccatggatgctgaccggggagtcaatgctgaggtccactactccctcctgaaagattctgaaaaagagttccacgtcctccc

SEQ ID NO: 344106 - DNA, 74 bp, Homo sapiens
cagatggcagccagtcagtggtggaggatcttttgccagaaatgagggcatactggcctgacgtaattcactcg

SEQ ID NO: 344107 - DNA, 89 bp, Homo sapiens
aatcttcaacctgtcaaagccttcttaattatgtctgagaaaagaatatagtcagtacaacgctctgaacgttccactccacaatagga

SEQ ID NO: 344108 - DNA, 88 bp, Homo sapiens
cggctcctcggctggtggcaagtattgctgtgggtgctgggacttcccgtccgcggcgtggagggaatacaaacagaagcttgcacga

SEQ ID NO: 344109 - DNA, 83 bp, Homo sapiens
tatgggagagacctttaagaaactcaatgccatggagagacagctgcaggatttaattgtgatgggggccccaggatcatctt

SEQ ID NO: 344110 - DNA, 96 bp, Homo sapiens
tcctggagaagcggccgcggccagggaacggggcatcgcggttccaacgatcctgataacttaagtgactctctcttttccggtgatgaagaaaat

SEQ ID NO: 344111 - DNA, 50 bp, Homo sapiens
gaaacagaaattctggaacacctatatgggtgatcagcccatgacctaaa

SEQ ID NO: 344112 - DNA, 89 bp, Homo sapiens
tcttgagaaggaacagaagttacagaatgactttgcagaaaaggagaggtgttatgaagcggagattgaggagatagatgaagaaaatg

SEQ ID NO: 344113 - DNA, 83 bp, Homo sapiens
cccggagtggggtgtcggcgcctcattcgggtggagctgagccggagacagacaaatttacatgtattggagaccagaccaga

SEQ ID NO: 344114 - DNA, 75 bp, Homo sapiens
gcttggttaacttgggagaaagtttcatctgtggatggagtattgcagcccactcacccagtgtacaacattgga

SEQ ID NO: 344115 - DNA, 125 bp, Homo sapiens
ggcaagagacaagcactcaaatctgcctccactgacctggggacagcagatgttgacgtggaacagatggccatcgactggctgacaggcaacttctactttgtggatgacatcgatgataggat

SEQ ID NO: 344116 - DNA, 76 bp, Homo sapiens
tgtgaatgaagaagcaactggacagttccatgtataccgcgccatgtcagaaccggctggggatgtccgtcagaac

SEQ ID NO: 344117 - DNA, 78 bp, Homo sapiens
cgtggtatgagagtggataatataatcaactcctctgcctggctttccttaaagtttcccatgtctcaatggactcct

SEQ ID NO: 344118 - DNA, 100 bp, Homo sapiens
gctgctgagcttggcctcggcgtcctcgggtacctagtagaactgggttgtatcaagccgctctgtgatctcctcacggtcatggactctaagattgtac

SEQ ID NO: 344119 - DNA, 100 bp, Homo sapiens
gctctgccgtgccacctgctgcacccacgaatctgcccacccctcctgtaacccagcctgtttcacttcttgctcattgctatggacagtgctatcaccc

SEQ ID NO: 344120 - DNA, 76 bp, Homo sapiens
catgaagaacacacagcggtggaaaagagagatggtctcgctatgttgcccaggctggtcctgaactcctggccta

SEQ ID NO: 344121 - DNA, 75 bp, Homo sapiens
cgatccagcctgcggagcctgtggggcaggagcaggggagagaagacagaagaggttggagaggtcagggaggtg

SEQ ID NO: 344122 - DNA, 100 bp, Homo sapiens
atcaccaggctgcttactggaaactggatgcagcaaggaaataggatttaaccgctctctgcctcccagtttgtcccatgaggagcacccccatagccat

SEQ ID NO: 344123 - DNA, 115 bp, Homo sapiens
agcgcaggagccgtgagagcctcaacgtggacgtggtcaagtacgagagtggccctgacggaggggaggaagagtggagtcaacatatcaatggagcaagtcacagtcgtcgatg

SEQ ID NO: 344124 - DNA, 73 bp, Homo sapiens
agagaagcagcggatcagcagaggtgctggagaatctggtaaaagcaccattgtgaagcagatgaggatcctg

SEQ ID NO: 344125 - DNA, 101 bp, Homo sapiens
tgaaggagaccatcaaaggattccagcagattttggcaggacgtactcatagatcaaaccaagttactgctcctgagtatgtctttctgatatctgaactg

SEQ ID NO: 344126 - DNA, 50 bp, Homo sapiens
gcggccaacatgagcttcttgtttactatactggcaattgctggagaaga

SEQ ID NO: 344127 - DNA, 75 bp, Homo sapiens
caagagcaagtgtataatgactgtgcaaagaagattgttaaagttgctgatagtccaactccaccgccaccacct

SEQ ID NO: 344128 - DNA, 101 bp, Homo sapiens
ggaagcttcatctgaagatgtcctgggcgttcatatgctgatgcttttggaagatgcttggagagaactgtttgttctaggaatagcacaatgggccattc

SEQ ID NO: 344129 - DNA, 75 bp, Homo sapiens
aagaaatagtaggagaatcaaatgataaactgcgaggacagagccactgggccccagttgtgacagcgttgagga

SEQ ID NO: 344130 - DNA, 100 bp, Homo sapiens
tcagtgttcaacatctgacagtgcttgcaggatctctcctggacaaatcaatcagacctacaacaagaaaggggcctcccgaaggaaagaccacctgaag

SEQ ID NO: 344131 - DNA, 100 bp, Homo sapiens
ctacaggaacctggaggctgtggaattaatttccaaagactcatgttacatgagaaagccaccaagaagaccaaagaaaaggagacaaggatggctcttc

SEQ ID NO: 344132 - DNA, 124 bp, Homo sapiens
cttcccgcgtccgccgattcctcctccttggtcgccgcgtccttggctggcgtgacctgaaggagaagaaggagaaggtggaggagaaggcaagccggaaagagcgaaagaaagaagtggtgga

SEQ ID NO: 344133 - DNA, 100 bp, Homo sapiens
ggggaatgcttttttatctcatattagtgcctgtgatggcatctttcatctaacacgatttgaatttgttgaaatgagcagtcgtaaatcaaagagtaac

SEQ ID NO: 344134 - DNA, 90 bp, Homo sapiens
gtttttgtagaaacacacaacaggaattttccattggtggcattcttcaccaacaggaatgtaggagccttttattctcatgtaatgccc

SEQ ID NO: 344135 - DNA, 80 bp, Homo sapiens
ggcgacgctggctgcagggacccggtgacagcgtgagagggttaccttcccgccaatgtagaccggagaccagccactct

SEQ ID NO: 344136 - DNA, 75 bp, Homo sapiens
gtttaacccgcggtggcggcggcgacggcggccctggcagacccagtcatggcagcctccagcatcagttcacca

SEQ ID NO: 344137 - DNA, 98 bp, Homo sapiens
aacaccatcgataacttcacccacgggctggctgtggctgccagcttccttgtgagcaagaagctggtgcccctgggtgaactgaccaagcacagcac

SEQ ID NO: 344138 - DNA, 125 bp, Homo sapiens
catgatgaacttgccgatagtcttccttgtgcagaaggagagtttatcttccttcggcttaatgttcttcgtgaggcagctacggaatcctccaaccaccattggaatgatgactctgaaagcag

SEQ ID NO: 344139 - DNA, 100 bp, Homo sapiens
cagggcctaacatgggacagccgcaaccaggaatgacttctactactgtggttgagaggaaaggtgtctttttattgcttctagagacgttgaaagtgtg

SEQ ID NO: 344140 - DNA, 99 bp, Homo sapiens
cttccgctggctcagccgcaagtacccgtccatcatagtcaactgcgtggaagagaagagttaagctgaaatatgtaaaactaaagaattatctgaagg

SEQ ID NO: 344141 - DNA, 90 bp, Homo sapiens
gggagcctcagcggtctgcgcctggcagcaggagccgggtgtgggctgagccctgcctgattgatgctgccaaggaggagtacaacgggg

SEQ ID NO: 344142 - DNA, 98 bp, Homo sapiens
ttctgccgcttatcttcaggagcgaagagctgcttctgtatcttaagattactcttgtctctgctgctcctgggaaagtgatttgtgaaatgaaagta

SEQ ID NO: 344143 - DNA, 100 bp, Homo sapiens
cagatgagaaggttcagttggcaaaccagatatatgacttgaggtccttctgtagtgccatggtagaagaattgaggatgtccctgaagtgccagcgtcg

SEQ ID NO: 344144 - DNA, 101 bp, Homo sapiens
aacaacgaggtgctgtgcgacgtgcacttcctggtgggcaaggggctcagctcgcagcgcatccccgcgcacaggccatcagcatcagcaaagccatcaac

SEQ ID NO: 344145 - DNA, 100 bp, Homo sapiens
agagccagaggagttgcaaagacgggctaggcatcttgagaaaaaattcctggaaaacccaggaatgatgagaagacagcagctgattacaagattttag

SEQ ID NO: 344146 - DNA, 107 bp, Homo sapiens
tcgctttcagttcagtgatggggagccgtgtttggcagtgcagaggtagcgaagtgtcccaagaacatggaaggctgcttttgtcagagacgttttattaccgggag

SEQ ID NO: 344147 - DNA, 100 bp, Homo sapiens
gtcctcagaagcatgtgtcttccccagctctgcagccacatactatccgtttgttcaggaaccaccagtgacagagtgaggcaatggaacaaggtttacg

SEQ ID NO: 344148 - DNA, 78 bp, Homo sapiens
gaccgcctgcctggccattgcgagcggcatctacctactgctgaagagctttgatcagttcacctgcaacctgctgta

SEQ ID NO: 344149 - DNA, 98 bp, Homo sapiens
aaacaccggtaggagcggggaggtgggtactacacaaccgtctccagccttggtctgagtggactgtcctgcagttactccacaggatccgctgaaca

SEQ ID NO: 344150 - DNA, 82 bp, Homo sapiens
ccgggccctgtcgcgaacctccggcgcgctgccccgccggaccgtggtttccacttgagcggcacagtgacagaacctgcaa

SEQ ID NO: 344151 - DNA, 95 bp, Homo sapiens
gccgggggcagccgccatcggcagcgccagggagaagaaatgggtgaccgttggtgacacatccctacgaatctacaaatgggtccctgtgacgg

SEQ ID NO: 344152 - DNA, 96 bp, Homo sapiens
ctcctcctctccttctacctgctggggttgcttgtcagtagcgggcaagttggtgagtttgtaagtgatgcccttctcgttcctgacaagtgcaaa

SEQ ID NO: 344153 - DNA, 89 bp, Homo sapiens
tccaggtgcacagcgcgggagccgtcacggtgctcaaggtgcactacatcctccaggaggtggtgatgggtgggatggtgttggaaaca

SEQ ID NO: 344154 - DNA, 74 bp, Homo sapiens
gaaggacaccaagatgcggatccgggcctttccggcgaggattaaatccaccacacagggtgaaatctatctcc

SEQ ID NO: 344155 - DNA, 75 bp, Homo sapiens
tggacaacaccatggaaatatttgacattgagatcgcagtggtcatgggctcctgcaccgcaggaggagcctatg

SEQ ID NO: 344156 - DNA, 75 bp, Homo sapiens
cccggctcccgcaccatggaggaggacgacagctacggaaaacgaagccccctcctgtattgacagctgggaatt

SEQ ID NO: 344157 - DNA, 74 bp, Homo sapiens
tgggccgccgctgctacctgcagcgccgtgtggcacgacacaaaaatcaggatggatgacatggctgtggatag

SEQ ID NO: 344158 - DNA, 50 bp, Homo sapiens
gttttgccggaggagcccctcaggccggtctagacagtttcaaagtgaaa

SEQ ID NO: 344159 - DNA, 99 bp, Homo sapiens
cgaacgcgaggccaacagccccgcatgatctatgttttggtgagctcttagaacaacacacagaagaattggtccagttaagtgcatgcaaaaagccac

SEQ ID NO: 344160 - DNA, 100 bp, Homo sapiens
aaatctatacatggtcccccaggggatcaggcctgtggtccagctcactgccattgaggaatccatcaacagcatcaagtccagactaagcaaaagtggg

SEQ ID NO: 344161 - DNA, 100 bp, Homo sapiens
tttgttctctggcatggaaggggtcctcagagttactgggggtgtcggttggtggaaatatgaattctgctatggcaaacatgtacatcaataccatgag

SEQ ID NO: 344162 - DNA, 100 bp, Homo sapiens
aagcagccaggcagtatcgggagcaggaaagccagtgttgtggaccctagcacagaggaaccagtgaccttccgggatgtggctgtggactttacccagg

SEQ ID NO: 344163 - DNA, 75 bp, Homo sapiens
gcggctcacggcggaggacgacgcgctcaaccagatcgcgcgggagtctcaaaccatgaattatgtgggacagct

SEQ ID NO: 344164 - DNA, 98 bp, Homo sapiens
ttctgtcaaaaacaaggttctggaaacaactgggcatatggattcgccatgaagtcagcgtaaataatgtaacacataaactgtgcagtaaccattgc

SEQ ID NO: 344165 - DNA, 100 bp, Homo sapiens
ctggctgcgtgcacagcgccttgttccagcagggcctgatccagcataaccagtgtgcagcgttcagacaatgggtcgtatatctgtaagatgaaaataa

SEQ ID NO: 344166 - DNA, 95 bp, Homo sapiens
aagagaaacctgggtgaactttcacggacaacctcagaggacaacgaagtgttcggttcattttccagacactgaaagagcagaatggctaaata

SEQ ID NO: 344167 - DNA, 98 bp, Homo sapiens
tggatgccaccaatatgccagctgtcaaagccatcatatatcagtatatggaagagctctttgaggagttgcaggagctgctgacccatgacaccaag

SEQ ID NO: 344168 - DNA, 49 bp, Homo sapiens
tggaccaggttgagctgcgcgcaggcttgctgatctgggacgatgcccg

SEQ ID NO: 344169 - DNA, 75 bp, Homo sapiens
ccatggctgactacctgctgtacaccctcaacaaacaccagcgctttgggtcaaaatgcagatcttcgtgaaaac

SEQ ID NO: 344170 - DNA, 83 bp, Homo sapiens
gcggtgggtcctcgcttgcagttcagcgaccacggttatggaaacaaaggacatgctttacatcgtcactgaatttgctaaaa

SEQ ID NO: 344171 - DNA, 78 bp, Homo sapiens
tgagatcgccctgcccgtcgccaatgacaggttaagaaggcttttttgctctgtagcctggacgtactttgaagcccc

SEQ ID NO: 344172 - DNA, 100 bp, Homo sapiens
tggacagcaactggacacttatgaagatgggttccacttccaaacatgagttccaggccgagacaaagaagcttttggacattgttgcccggtccctgta

SEQ ID NO: 344173 - DNA, 100 bp, Homo sapiens
ggccgaccgggcgcaccgaccatggcctccaaatgccccaagtgcgacaagaccgtgtacttcggaacccaagacagaccaggatgaggagcattgccgg

SEQ ID NO: 344174 - DNA, 89 bp, Homo sapiens
tcctcttcctctcggagctcaccggatttataacgacagaagtcagttggaattgatcacaccttttcagttgtacttcaatcctgaat

SEQ ID NO: 344175 - DNA, 83 bp, Homo sapiens
ctttggaaacgacgtcatgtgttagagtccctgtgaagcaggaagagtgagggcaggttcactgcagctcagcagcatgtctg

SEQ ID NO: 344176 - DNA, 100 bp, Homo sapiens
tgtactcgggctggtgctgccattaatcctgtgggccgacagaagtgcaggtaatagcctgcagctggtgttttgagaagccctactgctgaaaacttaa

SEQ ID NO: 344177 - DNA, 83 bp, Homo sapiens
cgtcgctatggcgcccaccatccagacccaggcccagcgggaggatggccacaggaatgattcctcctaaaccattaatgaga

SEQ ID NO: 344178 - DNA, 100 bp, Homo sapiens
caaagtcttgccacaagacaaagaatactataaagtaaaagaacctggtgaaagtcccatattctgaatgtccctcttccagtggaaagcccaaccatgc

SEQ ID NO: 344179 - DNA, 75 bp, Homo sapiens
tccagtgactgtcaggtcgatcatattgatatcagtatcaagataaaagtttggaatgggagaaaaattctcaaa

SEQ ID NO: 344180 - DNA, 98 bp, Homo sapiens
gcaaatgcagaaggaggagtactggcgaagacgagaagaagaggagcgttggagaatggaaatgagatacctcggatctgcattttcaagtgagcaaa

SEQ ID NO: 344181 - DNA, 96 bp, Homo sapiens
aacccagagcgtgcttgccgatgggacagattctgcaggttcgttccaccagtcataaaccagatgaaatctatggcatgattgaaagactatctc

SEQ ID NO: 344182 - DNA, 82 bp, Homo sapiens
ggaaccaaagcggatcagagagggctaccttgtgaagaagtgccccaggtgctaaagagctgtgcagaatttgtggaggagt

SEQ ID NO: 344183 - DNA, 51 bp, Homo sapiens
gactcatccccgggagtgttgagaagaaggtagataatgactataatgccc

SEQ ID NO: 344184 - DNA, 100 bp, Homo sapiens
gtcttgctgagcccggggagttaggatgacgcgagcggtgagggagcccggaacgattccttcgcggaacaattgaggtcccttgtatgtcatcgtggag

SEQ ID NO: 344185 - DNA, 50 bp, Homo sapiens
gcagagcccggagaaaagccacatgtacttggggtgcattgaagttctgc

SEQ ID NO: 344186 - DNA, 50 bp, Homo sapiens
tggacacagaccattgcaatggaaatggagtaccttagatccacagaaga

SEQ ID NO: 344187 - DNA, 88 bp, Homo sapiens
tggtcagaaaccctccataacctgaagtgtggcaaaggagcagagaactttgacaagttcttcacacgaggacagcccgtcttaacac

SEQ ID NO: 344188 - DNA, 100 bp, Homo sapiens
attcaacatgattgcatttgaagatgaatttcatcctttcatcgaagcacttctgccccacgtccgagcctttgcctacacatggttcaacctgcaggcc

SEQ ID NO: 344189 - DNA, 74 bp, Homo sapiens
cgtctcttacgtctgcggaagtgcagctgcctcagttcttagcgcagacttctgctggatgtgtctaggagatt

SEQ ID NO: 344190 - DNA, 75 bp, Homo sapiens
cttggatgttcttggacttgacgggcaattgaaggaacagactaaaaatcgtgtcctggaaggaaactacaggta

SEQ ID NO: 344191 - DNA, 98 bp, Homo sapiens
gaagtcttttgagccccaagaaaactcagaggcgacatgttagtacagcagaagaggatgttgacaatgcgtctctggcacgtcttgaccttgaacgc

SEQ ID NO: 344192 - DNA, 74 bp, Homo sapiens
cagctgctggtatcaaccgggctcccagccctagaccagctcttagagttctgccatagaatcatggagtcaac

SEQ ID NO: 344193 - DNA, 100 bp, Homo sapiens
atattttgcactccagcatgccgatagttcaaacttctatatcacagaaaagttgacgaaggatcagagattggtgtattcgggcagactgcttcccgat

SEQ ID NO: 344194 - DNA, 96 bp, Homo sapiens
gggaattgctgaattagaactgcagaggttcctctacagcaagacattgggtttgcctatcacagatgaacaaatccaggagatgaaatcaaacct

SEQ ID NO: 344195 - DNA, 75 bp, Homo sapiens
cgcatcaacaagatgttgtcctgtgctggggctgacaggctcccacagctcctgtgtgcggctttggcagtgtgg

SEQ ID NO: 344196 - DNA, 97 bp, Homo sapiens
aatgatcctcgccttttacctggtccacctcttccgcttctaccgcgtgctcacctgtatcagctggcccctgtcgagtgctccaagctcccgaagc

SEQ ID NO: 344197 - DNA, 50 bp, Homo sapiens
gccgggcccggcttcccagcctgacggccagaagcggactcctagaagag

SEQ ID NO: 344198 - DNA, 76 bp, Homo sapiens
tcgcagtggtcgcttcttctccttggttctttgcagatgtagttccagcagtcaggaagtggagagaggccggaat

SEQ ID NO: 344199 - DNA, 100 bp, Homo sapiens
agcttcggtgaacttaggttccatgatgtgctattctatacttggaccgtttttccccaaagaggattcaagatgaccaacgaagaacctcttcccaaga

SEQ ID NO: 344200 - DNA, 90 bp, Homo sapiens
aaaaggccatcaagacagttgtggacctctcagtaggggtccatgggattcgaattgaattcattaatgaaaaaggtgtcaaacgcacag

SEQ ID NO: 344201 - DNA, 117 bp, Homo sapiens
gcggctgcgctgttcgtgctgctgggattcgcgctgctgggcacccacggagcctccggggctgaggtggggctggtgtccgagcacttctcgcaggccccgcagaggctgtccttc

SEQ ID NO: 344202 - DNA, 100 bp, Homo sapiens
cctctgcagcctctctgacaagtggaatatcagaagctctttcctgacattcccatagggtattctgggcatgaaacaggcatagcgatatctgtggccg

SEQ ID NO: 344203 - DNA, 100 bp, Homo sapiens
ctacttccacttcgtgttcttcctagcttccctgtatgtgatgatgaccgtcaccaactggttcaaagagacacggcgtcttttggaaagagtggtatat

SEQ ID NO: 344204 - DNA, 111 bp, Homo sapiens
cggcgagccaagttccgcagcctggcatggcttctggggacctttacgagcaacagggagctgccaccaccgtgtactgtgctgctgtcccagaactggagggtctgggag

SEQ ID NO: 344205 - DNA, 46 bp, Homo sapiens
cagcatcccagccgtgctcacggttttgtagtgcatccctgagcat

SEQ ID NO: 344206 - DNA, 102 bp, Homo sapiens
gcagaggaaaatgcaagaagactgatggagcaggcttgcaatattaaaatccagacatttaatgtggatgcaccatgccagaccgtggaagatttaacgaat

SEQ ID NO: 344207 - DNA, 101 bp, Homo sapiens
acgtggccgagttcctcgagtgggatgaccagctgaactcagaagaaaaaaagaagagaaagcagcgaaggaataggacaaccttcaatagcagccagctg

SEQ ID NO: 344208 - DNA, 80 bp, Homo sapiens
cctgacggcgtgaccgacccgagccgatggtttcacccaaatatcactggtgtggaggcagaaaacctactgttgacaag

SEQ ID NO: 344209 - DNA, 90 bp, Homo sapiens
agcgacaacatggaggccgtgaagaccttcaatagcgagagttcacatgagactctgaatatagtggaggagaagaagcgggcagaggtt

SEQ ID NO: 344210 - DNA, 88 bp, Homo sapiens
ctgaatcctccacttcccactggaaccatgcccctcccagtcccgcctgctcctgcaaccagcacgcccgacgctgccggttcaactc

SEQ ID NO: 344211 - DNA, 98 bp, Homo sapiens
gctgcagagcgcgcttctgatcctgggggcatcttctctgcattcagtttcatccaagtcattccgggatttcttactagaagaaaaaaagtctgtta

SEQ ID NO: 344212 - DNA, 100 bp, Homo sapiens
cacctcgcagctaaaaacggccacatcgacatcatcaggagcagccagggcttcctgcatctgaagttcgcgcggacccgtgagaaccaggtggtgctgg

SEQ ID NO: 344213 - DNA, 75 bp, Homo sapiens
cctggcgctcatcaccccggagtttgggcttcctgtagacacccttttcctgcgcaacagagctgggcctccctt

SEQ ID NO: 344214 - DNA, 100 bp, Homo sapiens
ggctccaggcgcagctggacctcattgagaaggactatgctgaccgagaggcacgagaactctggtcccggctacaggtattgaagcccctgggtgataa

SEQ ID NO: 344215 - DNA, 76 bp, Homo sapiens
aactaagaccaagtcctcgctggactgctcagggtgccagacctcatcaaactggaggaagcagcatctcgtgcag

SEQ ID NO: 344216 - DNA, 108 bp, Homo sapiens
cgtacctgagaatacttttaaaggaacctgttgataaatgcaaaacagtggctgttgcaggtccgtaaaagccctgggctcagccagagcagggcagaggatgacggg

SEQ ID NO: 344217 - DNA, 50 bp, Homo sapiens
gcgcagcctccctctattaccagatctgggcggaccccggcaaatacgcc

SEQ ID NO: 344218 - DNA, 100 bp, Homo sapiens
atctgtgctggggtcccctccggatgttcaatgagcatggcatggagacggccctggcctgctgggagtggctgctggcaaaggggacgtcccaacgaag

SEQ ID NO: 344219 - DNA, 100 bp, Homo sapiens
gttcacgtgacatcaagaggaagcggaaaccagtggccacagcatctttgtctagccccagtgcagtgggtaattccagaattgattggccataccattg

SEQ ID NO: 344220 - DNA, 90 bp, Homo sapiens
tgagggtgaggctctctgcacactccagagaaagaccacagcaagattctttcattcgtctcctcctagcctgggggaccaggctcgaac

SEQ ID NO: 344221 - DNA, 100 bp, Homo sapiens
cggggatttcctgattggtgctggcatcagcacagacaccgctttgccgatagatctcactgatgaaaaggcctccaggtttttcacctttccgatcatc

SEQ ID NO: 344222 - DNA, 90 bp, Homo sapiens
cccgacagcgccatggcccagattctgccaattcgttttcaggagcatctccaggcatctgtggctcttgtgcaatgaacatcaatggag

SEQ ID NO: 344223 - DNA, 100 bp, Homo sapiens
cgaggcgctggcccggaggctccagaaacgggtcctgctgctcaccaaggttgaaatcacaaagattagacacctttttagataggtgttcttcagcacc

SEQ ID NO: 344224 - DNA, 90 bp, Homo sapiens
ggattacatgtaaagtaccaggacagtgcatggcacatacagttaatcaactggcccatgcccttcacatggacaaagatttgaaagctg

SEQ ID NO: 344225 - DNA, 98 bp, Homo sapiens
ggggatcggtttgatgtggtggttttggcccctttgctgcaaagtggatattgtacctgtggatgcatcttatgaagtaaaagaactatatgtgccag

SEQ ID NO: 344226 - DNA, 89 bp, Homo sapiens
gactgttgcccaaaactacagttctgtcactcacttacacagtattgggaaatctgtgaaagccatcagaagacctggtgccctatgac

SEQ ID NO: 344227 - DNA, 106 bp, Homo sapiens
tctgatgcccttgtggaacgtgctggggtttgcactgggttacattggcgaatttgaaatcattgatgaccacagagctgggaaaattgttgtgaacctcacaggc

SEQ ID NO: 344228 - DNA, 134 bp, Homo sapiens
ggacctgggtctacgataacgcgcttttgctcctcctgaagtgtctttggtccaacgttgttccaggtgtgatgaatgcagactctgctaccattttggctgtttggatcctcctttgaaaaagtctcctaaac

SEQ ID NO: 344229 - DNA, 100 bp, Homo sapiens
gagtactgccagcatggcgtgaaggaaggggccacactggtctgcggcgggaatcaggtccctcggccagggtttctttcggagaagtattcaacaaaac

SEQ ID NO: 344230 - DNA, 75 bp, Homo sapiens
tgtgtcgcaggtgctcccccacccccattctcttcaggggggcttcctctaatgcttcaggactgccccaaggcc

SEQ ID NO: 344231 - DNA, 100 bp, Homo sapiens
agtcaatggtgaaaataaaagtccactactattaaatgacagctgttcccttccaggtcaataactgggagatggacaaactagagatggaagatgcagt

SEQ ID NO: 344232 - DNA, 98 bp, Homo sapiens
tcccccaaagatgagatttacctgtgagatgtttcatcccaacaggtatggctctctcggcatgatgaccagcgtgctggtttgtccagatggcaaga

SEQ ID NO: 344233 - DNA, 90 bp, Homo sapiens
ccactggcaaggaaggtgtgatttacaatggcctcagtgactggctgtatgaaggaggatcccttttcccccagaaattactcaatgctg

SEQ ID NO: 344234 - DNA, 85 bp, Homo sapiens
cggaagcgcggacggcgcacgacgagtactggcatgcgcacgtggacaagcttgcctttcaggagagtaagaacctctgcgaagc

SEQ ID NO: 344235 - DNA, 83 bp, Homo sapiens
ctggagtgcgtgggggaccggctgttggcggatcctggtggacctctcaaaccccggtggccggcctgccctggcctacgaga

SEQ ID NO: 344236 - DNA, 82 bp, Homo sapiens
ccgacgaggaagttttctactgtaaagtcaccaacgagatcttccgccactacgagtgtccctggccagtgtccttccacct

SEQ ID NO: 344237 - DNA, 100 bp, Homo sapiens
cattgccgacggccacaggatgctcgccatctatgatggctttgacggcttcgccaagggccaggatgttgacaatgcgtctctggcacgtcttgacctt

SEQ ID NO: 344238 - DNA, 90 bp, Homo sapiens
cagggtgacatcaagctctgtgagggtttcaatgaggtgctgaaacagtgccgacttgcaaacggtataagaacagcactcctggaatca

SEQ ID NO: 344239 - DNA, 75 bp, Homo sapiens
cgcctcgactccaaatggttgaaaacagatatacaggacatgtattcctctgagaaaccttggacagcagatttt

SEQ ID NO: 344240 - DNA, 74 bp, Homo sapiens
taccaagaagggatctatcacctctgtacaggttttgggatttgagattgacgcggtgaactctgtccagtttt

SEQ ID NO: 344241 - DNA, 98 bp, Homo sapiens
aggacctccgcagactgacccccctcaagcctgtgaagaaaaagaagcaccgctttgggctacccgtgcagctctgtcatttccactctgctctgctg

SEQ ID NO: 344242 - DNA, 104 bp, Homo sapiens
ccagggcagcatctctggtgcatgctgatgacgaaaaacacccagaagtccacattcccctcgagaatctacagcagtttcctgccttcaattcttatacctgc

SEQ ID NO: 344243 - DNA, 75 bp, Homo sapiens
cgcggagggactgcaccttctccatcaggtgcagaagtatgaagtgtaacagaacagactttaccacctgaaact

SEQ ID NO: 344244 - DNA, 100 bp, Homo sapiens
gaaatggaatcggtttctgagtccagccaacagcagaagagaaagccagttatccacggactggaagatcaaaagaggcttcagaaatggagcagttaag

SEQ ID NO: 344245 - DNA, 74 bp, Homo sapiens
tgagaagctacaaacaagaaatgggaaaactcgaaacagattttgctgttaaattccaaaagtttcaagccttt

SEQ ID NO: 344246 - DNA, 50 bp, Homo sapiens
ttacactgcttgtagctcttaaggttagaaaatggatttctgactggaat

SEQ ID NO: 344247 - DNA, 87 bp, Homo sapiens
ctatccagaggtctcggacgtggccatgaaagtactcaacagcatcgcctacaaggatgctgaaaacgccattcaacagatgggtgg

SEQ ID NO: 344248 - DNA, 82 bp, Homo sapiens
agcaaaaccaacgcctggctcggagcagcagcctctgagggttgtgagtcccggcccagcccctccacccccctgccccccc

SEQ ID NO: 344249 - DNA, 100 bp, Homo sapiens
tttggcttcaatgtcatattttggggtatatttacttctggcacatgggaagagaaatcagatgaaatttcctttgctgacttcaagttctcagtcactc

SEQ ID NO: 344250 - DNA, 96 bp, Homo sapiens
gcttcgctgctttaccatgtttgtgacctccctctccgtgccaggacaacacctgcagtgtactggaaaggtcaaaatgcagatcttcgtgaaaac

SEQ ID NO: 344251 - DNA, 96 bp, Homo sapiens
ggaaagcggcgagtaagatggaagatgaggaggtcgctgagagctgggaagaggcggcagacagcgggattctccagtacaagaagaggtgctcgg

SEQ ID NO: 344252 - DNA, 75 bp, Homo sapiens
aggattccaagtaactcttatttggcaggaccagatgctgtgttggggaggacaatctggggagttttaggttta

SEQ ID NO: 344253 - DNA, 51 bp, Homo sapiens
aaaggagctttcgaggagagaacgagagaacgacatcacgcctgtactgga

SEQ ID NO: 344254 - DNA, 100 bp, Homo sapiens
gctgcaggagtgcctggcagtctacaaacacaacacctggatttcattagcatcatgacctacgattttcatggagcctggcgtgggaccacaggccatc

SEQ ID NO: 344255 - DNA, 104 bp, Homo sapiens
gagtcatttctgttccgcacaggcctgctgaactgggtgctttatataggacttaattcagtgcacaaatgagatgaatgtgaacatcccacagttggcagaca

SEQ ID NO: 344256 - DNA, 100 bp, Homo sapiens
cggacacgggagcaagatggcgattccgggcaggcagcagttaatagtatcatatctatcgtttttggtactcgaagaattgcctgggctcaccttgatc

SEQ ID NO: 344257 - DNA, 101 bp, Homo sapiens
cgactatctgacctcacagttctatgccctcaactacagcctccggcagcgcatggacatcctggataatcaaactgatggctgaaggcgagttgaaggat

SEQ ID NO: 344258 - DNA, 100 bp, Homo sapiens
ctttacctgcttcccaatcccactgatgaggatcagcccatgcccccaacaatggcaaccaagacatgtcagcctggttcaatctgtttgcagacttgga

SEQ ID NO: 344259 - DNA, 100 bp, Homo sapiens
gtcagccttccagcctcatcattcctcttccatttcctccccagaaacactgtactttatgaagctcctccaagacctgccttcctatttcaaggaaaga

SEQ ID NO: 344260 - DNA, 75 bp, Homo sapiens
taaggacaaaagccaagaggaggacagttcgctacacagcaatgcatcgagcacttttcaggattagaagaggct

SEQ ID NO: 344261 - DNA, 100 bp, Homo sapiens
gcgcgaaggcatcgagtggaacttcatcgatttcgggctggatctgcagccatgcatcgacctaatagagagacctatacactgcctctaggactgggac

SEQ ID NO: 344262 - DNA, 100 bp, Homo sapiens
taaaagcaaccctgacttcttgaagaaagacagatcctgtgtcacccggcaactcagaaacatcaggtccaagccccaggccatttactgcaaggatgtt

SEQ ID NO: 344263 - DNA, 100 bp, Homo sapiens
ggaattttgaagtacaccgtggtgacattgtatcattggtgtgaaggcttccataattaccatcacacctttccctttgactactctgcgagtgaatttg

SEQ ID NO: 344264 - DNA, 127 bp, Homo sapiens
gctgaattcttctctgatatcttcctgtcatggttccccttctactacatgctgaaggaggtgatttcctcacctttctgagaaggaagaaggatgaactaaaactcaaacagttagtgaaattttc

SEQ ID NO: 344265 - DNA, 113 bp, Homo sapiens
caaagcatacatgctgcacatcggcaccctggataaggtccgagaagagtggcagagtgagcacatcaaggcctgcgagatggtgagaacaagaccaagattggaaagccagc

SEQ ID NO: 344266 - DNA, 90 bp, Homo sapiens
cgaaagagaaacccggagggcgccgggtaagactttgaccccgacgcaggcttcagtgattgccgcggatcagaagcctgagcactttgg

SEQ ID NO: 344267 - DNA, 99 bp, Homo sapiens
caacggctcacagatctgggacaccgcattcgccatccaggctctgcttgagttaagtgggcagaccaacatccacctcagcaaaaacttcttcctgac

SEQ ID NO: 344268 - DNA, 51 bp, Homo sapiens
gcctacgcagagctcatcgtccttgatggagtctcgccctgtcacccaggc

SEQ ID NO: 344269 - DNA, 90 bp, Homo sapiens
aatgattatgattcaaccagtcatggtgtaaaaggaagagaatgtctcctggacctaattgccacaatgctggtactacagtttattcgc

SEQ ID NO: 344270 - DNA, 90 bp, Homo sapiens
cctccgggacggagatggagccgtggtccttcccaatgagcttccactgcgattccaaagacttggacacctagtggctctgatggcact

SEQ ID NO: 344271 - DNA, 90 bp, Homo sapiens
accctgcacggctttgtgcacggagctatcagaggactcctgaaacctggagagctacctgctgtataaaggctggcctgagggcatttg

SEQ ID NO: 344272 - DNA, 82 bp, Homo sapiens
ctgccccggaagggcctgcatccccaggctcccaggcccagataaaggccactgtgaaacgcaaggtatatgaagattctgg

SEQ ID NO: 344273 - DNA, 74 bp, Homo sapiens
taaaattggactcagagtttccattgacactgatatggacggcatcagaattaatgtaactacactgaaagatg

SEQ ID NO: 344274 - DNA, 83 bp, Homo sapiens
cgcgggagccctggaggggaagccctgggcgctgcctatggcacagccaagagcggtaccggcattgcggccatgtctgtcat

SEQ ID NO: 344275 - DNA, 100 bp, Homo sapiens
cagtgagctggagaagttccagggcgactacgtgcacaagtctgtgtttatcattttcttccaaggcgatcagctgaaaaacagagtcaagaaaatctgt

SEQ ID NO: 344276 - DNA, 100 bp, Homo sapiens
aagccaagaggaggacagttcgctacacagcaatgcatcgaggagtcattgcagttttcagtagaggtgtacttctgagaagtggcttcttgggtcttca

SEQ ID NO: 344277 - DNA, 88 bp, Homo sapiens
cagaaacgtccacatgtgggtactgcattcctaccggtgtgacagggcagctggtggaatttttgaagaaaatggaatctcgaggccc

SEQ ID NO: 344278 - DNA, 78 bp, Homo sapiens
ctgcttccatgttggcatctgcccctcctcaagagcaaaagcaaatgttggggttccgagtctgaggaagacataacc

SEQ ID NO: 344279 - DNA, 100 bp, Homo sapiens
cacagctaagacgccaggacccactggaagcctagaaatgggaatcctcagagctgggtcaacggcgggccaggaaagaagggaatgagtttaagatgat

SEQ ID NO: 344280 - DNA, 90 bp, Homo sapiens
aacaggcccggggcgccctgcgcttcgccaagctcggctttgagatcttcctcagctccttccagtctaagccagaaatccagtacgcac

SEQ ID NO: 344281 - DNA, 100 bp, Homo sapiens
tcgtggccgacctcagtgaacagagcctgaaggatggggaggagcggggggaggaggacccagaagtggccttcgataagaagtacaagtctgcctttaa

SEQ ID NO: 344282 - DNA, 89 bp, Homo sapiens
tttccatcctggagatctacaggatttatcaaatcgagtcactgtcaagaaaatctctaacttccaaggtcccaccaacagttcagaaa

SEQ ID NO: 344283 - DNA, 84 bp, Homo sapiens
acagccgcggcggcagcagcagtgagaggttagctttatacgtctacgaatatttactgcacgtaggagcacagaaatctgcac

SEQ ID NO: 344284 - DNA, 90 bp, Homo sapiens
gcgatggcggcggcggcggccggagcttctctcagccggagccatgtgttcacatgtcatgtggaccagtatttaactgtggaaaccgcg

SEQ ID NO: 344285 - DNA, 90 bp, Homo sapiens
agaagcatgatattgagctttacatgcacttgaacagactagaaattgcaccacagatatatgggttgcccagaggcagagctacacaac

SEQ ID NO: 344286 - DNA, 50 bp, Homo sapiens
gttcagctgatggaaccttaaaggtgtcaaagtcgtgttctcaggccact

SEQ ID NO: 344287 - DNA, 100 bp, Homo sapiens
gccctgtgtgacaccaagataagtaacgagatctattgggaaactgattataaccactcgggcaccatcgatgcccacgagatgaggacagccctcagga

SEQ ID NO: 344288 - DNA, 83 bp, Homo sapiens
cagagtcacacacggtcctaagagctgggcaccaggaagcgaaggctggtctctaattaacagaagatggcaaagcccagcca

SEQ ID NO: 344289 - DNA, 73 bp, Homo sapiens
ccctcctcaggacctgtctgttcatctctggtattggtcatcattgatgtgaagccgaaggacctagggctgc

SEQ ID NO: 344290 - DNA, 76 bp, Homo sapiens
ccgggagaggctgctgtggaggctgaggaggcggcggcggagatctggctgacatagcccagagatacaggataag

SEQ ID NO: 344291 - DNA, 75 bp, Homo sapiens
aacctccgcctcccgggttcaagtgattctcttgtctcagcctcccaagaaagcttgctgttgtgagggattccc

SEQ ID NO: 344292 - DNA, 82 bp, Homo sapiens
ttggggttctgacagctgcgcgcgacaatgcagatcttcgtgaagactctgactggtaagaccatcaccctcgaggttgagc

SEQ ID NO: 344293 - DNA, 88 bp, Homo sapiens
tgtacactgaaaactggacattataacattaagctttgtgccttgggcaaagggcagcttactcctggaagaggactgactcaaggac

SEQ ID NO: 344294 - DNA, 75 bp, Homo sapiens
tagatgcaagtgatgatggaatcttggccaaaatcgtgtcttatcgggacctcaaagaagtaactcctgaagggc

SEQ ID NO: 344295 - DNA, 100 bp, Homo sapiens
cagttgagctgtggagaggaaaagaattaagaggcaagataattgttttcaagtgttggaaggctgctatggagaaatagagacggggtttcgccgtgtt

SEQ ID NO: 344296 - DNA, 83 bp, Homo sapiens
ggctgaaggaggaggacaaagagcccctcatcgagctcttcgtcaagggggatatgagactttctactcggaatatcctgagt

SEQ ID NO: 344297 - DNA, 100 bp, Homo sapiens
gggaagaaaagtttctctgctcagactggggcagcacctactccgtgtcagtggtggagaccgactacgaccagtacgcgctgctgtacagccagggcag

SEQ ID NO: 344298 - DNA, 50 bp, Homo sapiens
aaaggtccctggagctgcagacgcggtcaagagcaatctgaatccaaatg

SEQ ID NO: 344299 - DNA, 91 bp, Homo sapiens
cctggaggaaggaagtgcggagccagcctgagttgggagaagagctccagagagagggtttctcttcccctcccagttcgctgacctcgcc

SEQ ID NO: 344300 - DNA, 100 bp, Homo sapiens
agcctgtctggaagttacttgtggacatgatagtgtctcacttggtcacccaggctggagtgcagtggcgcaatcttagctctctacagcgtcgatcttc

SEQ ID NO: 344301 - DNA, 100 bp, Homo sapiens
gaaaaagcccacaaagaaactgtggaacaacttcagtccacaagccctagccatgccgtggtagccaatgttcagcttgtcttgcatctaatgaagcaac

SEQ ID NO: 344302 - DNA, 87 bp, Homo sapiens
gcgtcgccggcgccgtgtgacttcgggctgtgggctcgctcgcggctcttcggccatgtttgaaaaagtaccagaaggtcctatccc

SEQ ID NO: 344303 - DNA, 119 bp, Homo sapiens
cgccccgcgagcacagagcctcgcctttgccgatccgccgcccgtccacacccgccgccagggggggccctcagcctcttggccttgaacgggctgttcatcttgattcacaaacacaa

SEQ ID NO: 344304 - DNA, 81 bp, Homo sapiens
agccgctgttttgccggaggagcccctcaggccgggcataaggaaatggtggcaggcacttcctcctaacaagaaggaagt

SEQ ID NO: 344305 - DNA, 60 bp, Homo sapiens
cagaggtggaggcgctttgaaaggcaagaagctcttctggctgccattagtgaaaaagac

SEQ ID NO: 344306 - DNA, 89 bp, Homo sapiens
ctgtggcagagcccagctcgagccaggctggcagcatgagcagtgcaggctcacccatgacatcagcctggaggagtttgaggatgaag

SEQ ID NO: 344307 - DNA, 119 bp, Homo sapiens
ctttcatccacaagatccggcccatagccgagcagactggcatctgtaaggtgcggccgccgccggtctcctctgagcctccggcctccataagacccaaaacagatgacacctcttcc

SEQ ID NO: 344308 - DNA, 100 bp, Homo sapiens
cagaaatgaagatgaaaaaggatttatttcctgttgggagagaaattgctggaattgtattagatgaattctttgctgaactggataaagtaatgggccc

SEQ ID NO: 344309 - DNA, 75 bp, Homo sapiens
tcccttatatggtggagagaatctcaaaaaattatgctcttcagctaccaagtggcccatccaacaggacttctc

SEQ ID NO: 344310 - DNA, 100 bp, Homo sapiens
gttgtttgatttcatcgatgatctggcagacctcagctgcctggtgccctccctatcctgaagacattagctgagagtctggcaccttttaaaggtctga

SEQ ID NO: 344311 - DNA, 100 bp, Homo sapiens
ttcgcagcgtggattttaaccgaggcacggacaacatcaccgtgaggcagggggacacagccatcctcagttaccttatcccatatcacacaactggtcc

SEQ ID NO: 344312 - DNA, 83 bp, Homo sapiens
gccagacctgacgaagagccttttgtgaagaaaaatccagttacactcttaaaggaattgtcagtgataaagtctcgatatca

SEQ ID NO: 344313 - DNA, 50 bp, Homo sapiens
ctaccctcctgtacttgttccaactcaaagcctgtgtggtgcccctatct

SEQ ID NO: 344314 - DNA, 83 bp, Homo sapiens
aagagctgtcctgaccaagaggaccagactttgttaatgaagatgtctttggtggacttgggaaagaggttgctagaagcagc

SEQ ID NO: 344315 - DNA, 95 bp, Homo sapiens
ggggagtacagctctctggaacatgagctgttccatcgggactgtgagcaagctgagaactggatggctgcccgggaggccttcttgaataccga

SEQ ID NO: 344316 - DNA, 100 bp, Homo sapiens
tttaaagcactgaaacaaatgattaagattaacttcaagttggcaatgaagggctattggcctgtcagctgctcccatccatcccctgcttactgcattg

SEQ ID NO: 344317 - DNA, 100 bp, Homo sapiens
gaaaatgctctgaagtactcaaagacactgacagagcacctgaagaatgatgccaatgggtggaatgatgccacctggaccaggaataccacctctgatg

SEQ ID NO: 344318 - DNA, 74 bp, Homo sapiens
agtgatactgagctggaagccatctgccctcactatcagcagccagatgatgataattccgaagaaggcttcca

SEQ ID NO: 344319 - DNA, 80 bp, Homo sapiens
aaggccaagttcatctcctccgtcaccagccacatctaccagatcttcagtgtctattggatttttccaagagaaagttt

SEQ ID NO: 344320 - DNA, 75 bp, Homo sapiens
tctgaactcaggacttggcaaaccatgctcgacagctgaccaaggccatgatgcgaaaggccacggccagccgcc

SEQ ID NO: 344321 - DNA, 101 bp, Homo sapiens
gacaattttctgtcttacttgttcacctcatcatgaagatttagtagccattggcctatttgatggctttgcagatggactaggagttgctgaagctattt

SEQ ID NO: 344322 - DNA, 52 bp, Homo sapiens
cggaacttgccgcgtcgaggactgtcggattcatcaataagctgcagccagg

SEQ ID NO: 344323 - DNA, 83 bp, Homo sapiens
tgctgtgtttctgccggatcagatgagcagattggttagtgaagatgagatcgtggggctcaccagcgtcccccatggcttct

SEQ ID NO: 344324 - DNA, 50 bp, Homo sapiens
gtggtgacattgtatcattggtgacagcccagaaacttgcaggacctgtg

SEQ ID NO: 344325 - DNA, 101 bp, Homo sapiens
ttcgggtggcaagaaaaaccgacgaatctttacctacactgactctgatagatacaccaatttggaggagccccgacacgtctctgctactggactgtggt

SEQ ID NO: 344326 - DNA, 101 bp, Homo sapiens
aaagatccctcaaacctggatgtagttgggaaggatgttttcaaacagtctcagttacttgaagaaatctgtaatcttggaagggaccccaaatacatctg

SEQ ID NO: 344327 - DNA, 90 bp, Homo sapiens
cattgtggcaatcatcctgaatgaatttagagccaaactgtccaaggctttggcagtttgtacgaagactactttatttttacaagccca

SEQ ID NO: 344328 - DNA, 138 bp, Homo sapiens
ggatgatcgagaggatctggtgtaccaggcgaagctggccgagcaggctgagcgatacgacgaaactatgttccaacttcctgtcaacaatcttggcagtttaagaaaagcccggaaaactgtgaaaaaaatacttag

SEQ ID NO: 344329 - DNA, 100 bp, Homo sapiens
gtccttcgaggccagcgtggccctgctggaggcctcgctgaggaacgacgccgaggaagcattgcagtgtcgagatggctatgaaccctgtgtaaatgaa

SEQ ID NO: 344330 - DNA, 74 bp, Homo sapiens
aaacccacaggcacacccaaacgaagttatacggaagcgtctcctcattgatggagatggtgctggagatgatc

SEQ ID NO: 344331 - DNA, 131 bp, Homo sapiens
ggacccagaccctggagcctcagttggaagcagccgatccagcctgcggagcctgtggggcaggtcatcatcagatttgaaatatttaaagtggatacaaaactatttcagcaatgcagacaattaagtgt

SEQ ID NO: 344332 - DNA, 75 bp, Homo sapiens
ggggaccaagctggagatcaaaccaatggctgccatccggaagaaactggtgattgttggtgatggagcctgtgg

SEQ ID NO: 344333 - DNA, 90 bp, Homo sapiens
tgcatatcttcagatattatcagaagaaacctcagtgggcttccgagtggacctgccaatcaagtcggcccgctaccgtggccagtacaa

SEQ ID NO: 344334 - DNA, 98 bp, Homo sapiens
cggagcgcaggcctcgtgccgttacggccatcacggcggccgcagtggcgtcctggagccctcctcagggattacctgcaagtcgtgtgaggtataga

SEQ ID NO: 344335 - DNA, 80 bp, Homo sapiens
cccgttcttgcctcaggccagtcgcctccaggccaagagggatccttcacccgtgtctgctgtttgcagacaaggtccca

SEQ ID NO: 344336 - DNA, 98 bp, Homo sapiens
tccagatgaggtgatggcaacggccaacttcggcaagatccagatcgggatttacgtggagatcaagcgcagcgatgaatgttggctcaattaagaaa

SEQ ID NO: 344337 - DNA, 75 bp, Homo sapiens
caagatggtgttggaaagcactatggtgtggcatagaatgtcaagctaaccaggcgtccgctacttcagaagagt

SEQ ID NO: 344338 - DNA, 95 bp, Homo sapiens
ccgtcttttagttgcttctcttccttttttctctccggtttctcatcactccaaccaggtggcgacatgtctaagaatgtgagccagtcacagat

SEQ ID NO: 344339 - DNA, 82 bp, Homo sapiens
atgatgatgctacaagccagcttgcaagaaattggggatcgatttgatgagcctgtcccagacctctgcagcctcaagcggt

SEQ ID NO: 344340 - DNA, 82 bp, Homo sapiens
gcggcttgaagaaaaacatgaagctttacttaaggaaaaagaggtgacgggggaagtgacagatccatcaggaaaagtccac

SEQ ID NO: 344341 - DNA, 90 bp, Homo sapiens
ggcaaacactgtgaacattgctgtttctagtgggccagaaaaatatacctttatcaatgaatgtgtcaacctttctggcatacgaccagc

SEQ ID NO: 344342 - DNA, 96 bp, Homo sapiens
gacagagccaaggtgcagggcaacacctctacaaggatctgcagccatttatattgcttaggctactgaagccatttggaaatagcatcagcagat

SEQ ID NO: 344343 - DNA, 73 bp, Homo sapiens
ggcccgtccccagcccgggccgtccatcctcgcattgctgttgaatgtcccacagtgttttgttcgccccacg

SEQ ID NO: 344344 - DNA, 74 bp, Homo sapiens
gaaccccaggactgcgcccccgggagcgggcgcccagagtatgccgagattttgctgtcctggaggaccacacc

SEQ ID NO: 344345 - DNA, 96 bp, Homo sapiens
gggaggctccgttgcctgctcccggagggagacgcgctgccgaggagaacccagcgggtgtggtatctgtgcgctttgaagaagatgaagacagga

SEQ ID NO: 344346 - DNA, 97 bp, Homo sapiens
acaaacagcccgcccgaccccgtcccgaccctggccgccccgagcggagcctggagctcaccatggatgatgatatcgccgcgctcgtcgtcgacaa

SEQ ID NO: 344347 - DNA, 76 bp, Homo sapiens
gatggacacaacaccgcggaggaggacatggaggatgttgatcagatgttttgggaggttatgcagttgagaaaag

SEQ ID NO: 344348 - DNA, 74 bp, Homo sapiens
ggacttctcacccccaggatgtcatcgaggataaagccaccaatccttccaaccgccaggaggactgggaatac

SEQ ID NO: 344349 - DNA, 75 bp, Homo sapiens
gaacgagtgtaagcagctgaacgagaaccaagtgcggacgctgtgcgagaagaatccacactggtgatagaccat

SEQ ID NO: 344350 - DNA, 100 bp, Homo sapiens
gacttcacatcaagttcaaggagtctcttgttaataaataaactatcaatcttgcccagactggagaaaggactgcagcaacaaccctgtttcagtattc

SEQ ID NO: 344351 - DNA, 71 bp, Homo sapiens
ctggacaagatgaagtctttctgccagaccttcacggcatggtgcaactcccacctgcggaaggcaggcac

SEQ ID NO: 344352 - DNA, 50 bp, Homo sapiens
ttgtcatttggaagaagcgaagagccacccgtgggaaactgttacaacag

SEQ ID NO: 344353 - DNA, 100 bp, Homo sapiens
gttttattcgtcttttggaatctattggatatggttaggcaaagatgcaatctacacaatcccagtaaaaaacattcttgctgtggaaaaactggaagag

SEQ ID NO: 344354 - DNA, 74 bp, Homo sapiens
ctgtgtttcagctgggatagggataaaagaatcagagtgtctcaacccttgacaagaggaccaagtgcctttat

SEQ ID NO: 344355 - DNA, 90 bp, Homo sapiens
aggacatagcaactctggctgatcaaagaagagcagcccatggatgctttcattggatttggaggaaatgtgatcaggcaacaagtcaag

SEQ ID NO: 344356 - DNA, 73 bp, Homo sapiens
tggtgactttgaacttgcagacttgcttgctgcccgtggagccccacctctgccacccattctcaggtgaagc

SEQ ID NO: 344357 - DNA, 73 bp, Homo sapiens
tctgcggctggtccaggccttccagtacacagacgagcatggggaaggcgcagatcaggcctctataaccgcc

SEQ ID NO: 344358 - DNA, 74 bp, Homo sapiens
agagcttctagaccaggcatcggtgaccagggaggaagtggtgtctgagctagaggtgaagaaggcaggagaga

SEQ ID NO: 344359 - DNA, 100 bp, Homo sapiens
tgcgctccggagagctcaagctcatcgacttcggttcgggtgcgctgctcaaggacacggtctacaccgacttcgacggagtcagccagcctgaaagagc

SEQ ID NO: 344360 - DNA, 76 bp, Homo sapiens
tggattccagaggggtgacagcaaaacgcacctacaaaggcagcacctaagcaaaagattgtgaagcctgtgaaag

SEQ ID NO: 344361 - DNA, 83 bp, Homo sapiens
ctctcgggcttcatctcttgtgtggggagtttcatcctagcgggtttctgagtcccttcaacatgatcctgggaggaatcgtg

SEQ ID NO: 344362 - DNA, 100 bp, Homo sapiens
attccactcgtggtatgagagtggataatataatcaactcctctgcctggaactgcaagcacatgttgaccagataactgaaatggcagcagtaatgagg

SEQ ID NO: 344363 - DNA, 93 bp, Homo sapiens
ttggaagcagccgatccagcctgcggagcctgtggggcagtccttcagctcctacttaatggaagcctcgcagatgcaagatggctccagcag

SEQ ID NO: 344364 - DNA, 75 bp, Homo sapiens
ggctccaccttccacagggtgatcccttccttcatgtgccaggatttaagtgccctgtatgctcaaaatttgtat

SEQ ID NO: 344365 - DNA, 75 bp, Homo sapiens
ggggttcggggggccaccgaatcgctgtcacgccggcagaacatccagtcatggataaaaatgagctggttcaga

SEQ ID NO: 344366 - DNA, 50 bp, Homo sapiens
gaaaggatgtgcaaccctccaagtggaaatggagtttcactcttgttgcc

SEQ ID NO: 344367 - DNA, 76 bp, Homo sapiens
gtgggggttatggtgggaggagccgatactgagcttcttcctatttgccatggttatttatcgagaaagctgatgc

SEQ ID NO: 344368 - DNA, 90 bp, Homo sapiens
agaggagagtgacaagcatttcatgcaaaattttgcctgcagcaatgagggcagtggaagcatgagaggaggaggtgggggcaatgccag

SEQ ID NO: 344369 - DNA, 99 bp, Homo sapiens
ccaccaccggccgcctcagccatggacgcgtccctggagaagacctgcctagagctggaacgttacctccagagcgagccctgctatgtttcagcctca

SEQ ID NO: 344370 - DNA, 83 bp, Homo sapiens
cgacatgttcacgcacgggatccagagcgccgcgcacttcgtcatgttcttcgcgccctgggacccagacatggagctgcggg

SEQ ID NO: 344371 - DNA, 100 bp, Homo sapiens
atctgcagagtgaagtgaaaatagcaaacaatccaggtggcagggagtgcatcaaaggtgtgaacgcaggttttggcggcagatgggaggccacctgcgg

SEQ ID NO: 344372 - DNA, 101 bp, Homo sapiens
tgttatgctcagtgctgtcgtcatgacctattggaccaactttgccaagactgggccagggctcgacccacagagcaccctcagccatcgcgagtttccgg

SEQ ID NO: 344373 - DNA, 96 bp, Homo sapiens
gcgcgtcggcgagctcacccagcaggcgctgcagcggtacctgaagacccgggagaaggtggctgccccctgcgttcctccatccaaccatgagct

SEQ ID NO: 344374 - DNA, 89 bp, Homo sapiens
agagggaagagattcagccagcacactcctcgcgagcaaggtttttagaacttcagccataaaaatgggcagaattttccttgatcata

SEQ ID NO: 344375 - DNA, 95 bp, Homo sapiens
gcggaacactcgcctgtccccgccggcttcggcttcagcgccgcgggagaccctcctgttcttaactgtgggcgatgagaaaggtggtggactct

SEQ ID NO: 344376 - DNA, 82 bp, Homo sapiens
ggctccgcagcaagatggcggacgagaaggacagggaaggaccatggccaacctggagcgcaccttcatcgccatcaagccg

SEQ ID NO: 344377 - DNA, 100 bp, Homo sapiens
cagcgacccctgagcagtgttctctgtgctgagcggcgggactgagctgttgagttagagccaacatgagtgagggtcgacatgttaaaacgggtcagtt

SEQ ID NO: 344378 - DNA, 74 bp, Homo sapiens
gccgatccagcctgcggagcctgtggggcaggaccgtatccttgatgagcttgacaaagacgatagtacccatg

SEQ ID NO: 344379 - DNA, 153 bp, Homo sapiens
cacgccttggccagatgattgtggattatgaaaaccctttaaagaagatgatggaagaatttgtaccccatagcaaggaattggcaaattgtcaactgctgatggtaaagcttttgcagatcctgaggtactccggagactgacatcctcagt

SEQ ID NO: 344380 - DNA, 50 bp, Homo sapiens
gcggccgtcagcaacctcgtccggggcacctggacgatgacggattaccg

SEQ ID NO: 344381 - DNA, 75 bp, Homo sapiens
aatcagcccatggcttacgctgcacttccatcccacggtcagcacacgtcacatggagatgggcgtcaagaagtt

SEQ ID NO: 344382 - DNA, 82 bp, Homo sapiens
ctggttcctgggaggccagttaaatgtctctgacctgcctagagctggaacgttacctccagagcgagccctgctatgtttc

SEQ ID NO: 344383 - DNA, 82 bp, Homo sapiens
agacctctttggacccgaaattgtaagtgattcttaaagtggtggcaactttgttaaaaaactctacaccaagtgcagagct

SEQ ID NO: 344384 - DNA, 87 bp, Homo sapiens
aattcctcaatgactgccctctaaaggaagagctgccttgaggtgcagtgttggggatccagagccatgtcggacctgctactactg

SEQ ID NO: 344385 - DNA, 99 bp, Homo sapiens
ccgcatcgctgaatgtgcccggacctgcgccttctgggatggcactggatctttaaaacgcagtggttcctttagcaaactccgggcttccattagacg

SEQ ID NO: 344386 - DNA, 74 bp, Homo sapiens
cacagtgggggtgtgcaaacccgagagaactggactggattatggacagaacttggaaatattgagaataattt

SEQ ID NO: 344387 - DNA, 98 bp, Homo sapiens
catccaagaggtgaaccacgccgtggaggctggagaagcgactggaggagtggttggggaggacattgcctggcagtgactggacacccaatgcccag

SEQ ID NO: 344388 - DNA, 83 bp, Homo sapiens
aaacaccctgcaatctttcagacagcactgggaagtcttccagaaggtgacagaggtcttcatcctagtgcctgcgctgctgg

SEQ ID NO: 344389 - DNA, 100 bp, Homo sapiens
cggctgaaggccctacgggagaaaaccgggcgcaaggtgttcaggcgcttcgtggaggttggccgggtggcctatgtctcctttggacctcatgccggaa

SEQ ID NO: 344390 - DNA, 50 bp, Homo sapiens
cctgagtgatcttgaaatgaatagataatgttaattcaagactctcgaag

SEQ ID NO: 344391 - DNA, 100 bp, Homo sapiens
tccctgctctacaacgtgcctgcagtggccgaggagattcaggatgaagttgatcataaggcctatgggttttctgccccaaaagaccaacaagtagtca

SEQ ID NO: 344392 - DNA, 115 bp, Homo sapiens
attaaagcagccggtgtaaatgttgagcctttttggcctggcttgtttgcaaagggatgctgagaacttgctggagtcacagccactgggatcctttctcatcagggtcagtcac

SEQ ID NO: 344393 - DNA, 90 bp, Homo sapiens
tcaacctcatagcagccgacctgaggcgggcaaaactgttccgatttgcctctgagaacgatctcccagaatggaaggagcgaggcactg

SEQ ID NO: 344394 - DNA, 100 bp, Homo sapiens
tcagaggttcctgtactgcgatgtgatgctggagaactttgcacatgtaacatccctggccactgaagatcctggtgtcgccatgggccgccgccccgcc

SEQ ID NO: 344395 - DNA, 98 bp, Homo sapiens
gatacctttgatccagaacttgcagcaacaataggtggatccataaagaacccagccaacccgcagagggaggggaggggctgagctgtgaggagagc

SEQ ID NO: 344396 - DNA, 74 bp, Homo sapiens
gcaagatggcaagagtcttctctgttctcagaatgtcatacccaggctatcccccaacaggctacccacctttc

SEQ ID NO: 344397 - DNA, 100 bp, Homo sapiens
accaggaagaagaaaaagagatacaaatgcaccagaaagttttaaagctgataggaagatgtcttcaggaaatgctaaaattgggcaccctgcccccaac

SEQ ID NO: 344398 - DNA, 74 bp, Homo sapiens
tgttgaaactatttaaagaggttgctagcttacagcttttaggagagtatgagtcccttggaaaagaacacagg

SEQ ID NO: 344399 - DNA, 82 bp, Homo sapiens
gggaaaaagacatcaacaacaatgtggagaaagccccctgtgccacctccagctatggggtgctactttgggagttgctgac

SEQ ID NO: 344400 - DNA, 100 bp, Homo sapiens
ctgggagcttgctgcgctgtagaatcttgaggggtctccatccagatcagctgaatcagagtttgcattgttaacaagcttatcaaccagcccagccgta

SEQ ID NO: 344401 - DNA, 98 bp, Homo sapiens
tcctaatatcaccaattcttctaagttcctggacattgatccggaggaggattcgcagttcaacatcaaggatctatcttgggatcccatggctttct

SEQ ID NO: 344402 - DNA, 89 bp, Homo sapiens
ttatgttgatgaacatgactcgaatgagaaggaagtatttcaaggcactgtttagtacagctgttgaaatgaagataaaacaatcagca

SEQ ID NO: 344403 - DNA, 100 bp, Homo sapiens
tccaagatgcagttttttgatgctgaggagctcctggtcgatgaagaggatgatgtttttggtgaagttgttctaccatctccagagggaacgctgcttc

SEQ ID NO: 344404 - DNA, 100 bp, Homo sapiens
attcttatcatttctaagcaggttcatgccagcccagaacagagaatcaggacttggaccctctgtggaacacccgagtacctagcccccgaagtcattc

SEQ ID NO: 344405 - DNA, 100 bp, Homo sapiens
aggcaccagtgcagctgatttgacctccagtgggatagatacgattagcaccaggatcgtgtctcattttgaacccagccttcagtttggaaacctgcag

SEQ ID NO: 344406 - DNA, 102 bp, Homo sapiens
gtccgcccaggcgcagatgcgggccctgctggaccagctcatgggcacggctcgggacgacaatgcagatcttcgtgaagactctgactggtaagaccatca

SEQ ID NO: 344407 - DNA, 50 bp, Homo sapiens
tgtcagagcaaggagaagctgttggtcagactatgatgactggagaccgt

SEQ ID NO: 344408 - DNA, 100 bp, Homo sapiens
gggagaaatccccactcctccaagaaccaacccccaaattggctgggacagaatatgagttggaagtaaagagggtgcaagacattctttcgggaataga

SEQ ID NO: 344409 - DNA, 76 bp, Homo sapiens
aaaccaggaagaggcagaaggactgctaagattatgtttgagaccttcaacaccccggccatgtacgtggccatcc

SEQ ID NO: 344410 - DNA, 97 bp, Homo sapiens
aagtttatgcaaacctttgttctggctcctgaaagtacaggggctcaggtccaggtggcaggggatatgctacccaactcaactgagcgggccatca

SEQ ID NO: 344411 - DNA, 98 bp, Homo sapiens
ccgctgagacggtttttcacaaggtgaatcttggaagcaaccagtaccttttctctgtcatagtggatcctaaagaaatgccctgcttctgtttgcgc

SEQ ID NO: 344412 - DNA, 51 bp, Homo sapiens
gctacgtgactcctgtgaagaatcagggtcagtgtggctcttgttgggctt

SEQ ID NO: 344413 - DNA, 75 bp, Homo sapiens
tgtgaggagctaatccctgaatatctgagacacagcattgttggttttgccatgtactattttacctatgacccg

SEQ ID NO: 344414 - DNA, 93 bp, Homo sapiens
ggccacttgcttgggatcctttatcctggtcatcttctatttccaaagtgtccctggccagtgtccttccacctgtccacaagcatggggaac

SEQ ID NO: 344415 - DNA, 75 bp, Homo sapiens
cttctgaagataatcgagaaataccagctaagactcaatggtgccagtcattgaaatcccaggttttggaaatct

SEQ ID NO: 344416 - DNA, 96 bp, Homo sapiens
agaggaggcagtggccctggtggaagacttgcagaaagaacctggaagacagaggctggaggccctccaggccctccaggtggtctgagaatagaa

SEQ ID NO: 344417 - DNA, 50 bp, Homo sapiens
aaatcggatacagatacaggggtactttgaactcaagtaaacaaaaggga

SEQ ID NO: 344418 - DNA, 75 bp, Homo sapiens
ccaaaattgaaaaaatggttgacctcacccaggactcatctgatgatgtgagaagagttcagaggagggagaaaa

SEQ ID NO: 344419 - DNA, 100 bp, Homo sapiens
aggcgcaaggcttcaggcgacccgtactgggcctactctgcttgcaaaattggatattacaaggctctctccacggatgccacctgtgccaagtgcccac

SEQ ID NO: 344420 - DNA, 100 bp, Homo sapiens
atggcccccgcccgtctgttcgcgctgctgctgttcttcgtaggcggagtcgccgagtcggagcagcagccaagctggacagatgacctgcctctctgcc

SEQ ID NO: 344421 - DNA, 83 bp, Homo sapiens
tgataaagtaacacgccctcaagagctggatttgacacatcaagggcagccaattactgagttgtggcaatttatgactatac

SEQ ID NO: 344422 - DNA, 100 bp, Homo sapiens
gtcgccgctgctgggagatgggcctactcgcccgccaccctgcgctgccgccgctctgaggagttaaaggaagctgaatatggtgggcatgatcagatag

SEQ ID NO: 344423 - DNA, 90 bp, Homo sapiens
ggatcctgtctctggcccgcaatcaccccttcctcactcagttgttctgctgctttcagacccccgtttagctgtgcctcccagtgacta

SEQ ID NO: 344424 - DNA, 125 bp, Homo sapiens
gtttacatcactggccgccatctggacacccttcgcgttgttgctcaggagtgcttttatgggaccaacgctgggtggatttctgtatgagaaaattggttttgaatgggcagcagctatacaag

SEQ ID NO: 344425 - DNA, 78 bp, Homo sapiens
atgaaagaagtcattccttttttgaagaaacttattggagaagtgtttaatattgtgagccaacagtctactgctcga

SEQ ID NO: 344426 - DNA, 90 bp, Homo sapiens
ctcagaagaaagacgttcaacgacttactggggagagaaagaaaaggaacgggagctgagaggcagcttcaaaagatggtccatgatatt

SEQ ID NO: 344427 - DNA, 74 bp, Homo sapiens
agattcgcagtggtcgcttcttctccttgatccatgcatacaaccttgaaacgaatgcctgggaggaaattgca

SEQ ID NO: 344428 - DNA, 100 bp, Homo sapiens
gcttgacccagcagggactccaaggggtggagctgggaacattcctcataaagcgagtcgtcaaggagttgcaggatttccagatgtgacttgcactcag

SEQ ID NO: 344429 - DNA, 100 bp, Homo sapiens
ctggttttcaggaactcataaatgccacctcaacaattcagaggatttgacgggatctgaactatacacccaggcggccagcctcctgcatcctgtggtt

SEQ ID NO: 344430 - DNA, 100 bp, Homo sapiens
tacatttctgtcttccttcctgggtcagtgattcccggaccctggaagagaagagggtggctaatgattaagatctcacgccacctgggcaagatgtata

SEQ ID NO: 344431 - DNA, 95 bp, Homo sapiens
agacatccaaatctggtattcaacaaataattgagtgctttcgatcaggaaatggccagcctcaaacgacaattcacggaactgttatcggatat

SEQ ID NO: 344432 - DNA, 100 bp, Homo sapiens
gatggggaacaggctccgtgcagagctgggccgacccgaaagttccgaggattctgaagacgacggggagacattgctggaggtagcgggtactcagggg

SEQ ID NO: 344433 - DNA, 96 bp, Homo sapiens
ccggcccacagtgggggtgtgcaaacccgagagaactggatttgaatataacctgccgctttgcaggtgtattccacgtggagaaaaatggtcgct

SEQ ID NO: 344434 - DNA, 74 bp, Homo sapiens
cagagctgcaggagctggaggctgtatacgaacggctctgcggcgaggaggaccatgacttcttccagcatgtg

SEQ ID NO: 344435 - DNA, 100 bp, Homo sapiens
attaaacaagctagaactgcagttgggaaagacagtgattgttataatcaaaatcccacagccaacaaagattctggccaagagtcagagtctattccag

SEQ ID NO: 344436 - DNA, 71 bp, Homo sapiens
agatgtgccgccgctgccaacgtcgagcggcgacggctgatttggagcaagaggtggtggtggccttcccc

SEQ ID NO: 344437 - DNA, 80 bp, Homo sapiens
cagctcccatataaatgctggcagaatgacatcactcctttacatgttgcatcaaaaagaggaaatgcaaatatggtaaa

SEQ ID NO: 344438 - DNA, 100 bp, Homo sapiens
caccgggatcgtgaccgagaccgtgaccgagagcgtgaccgagagcgcgaatatcgtcatcgttagaagaaactgttgctaaaactggaatgatccttct

SEQ ID NO: 344439 - DNA, 76 bp, Homo sapiens
attttgatgaacaatattgaacgctatcttaagtttgaacacaaggtcataaaagaaaaggttcctccaagaccta

SEQ ID NO: 344440 - DNA, 74 bp, Homo sapiens
ctgtgcactgataataaccctgcaggtaacagagattcaaaggtaccttcagaaggaaagaaatctctctacac

SEQ ID NO: 344441 - DNA, 100 bp, Homo sapiens
gtttgcaaatgcagaggaagaatttttctatgaggcagctgagtatgtcccagagaaggtgaagaaagcggaaaagaaattagaagagaatccatatgac

SEQ ID NO: 344442 - DNA, 80 bp, Homo sapiens
cctgcgcagaggcggcagcaccaccggggttgactccgggggcgcggcgaggaggtagcccctgaagaagatgaaaggaa

SEQ ID NO: 344443 - DNA, 75 bp, Homo sapiens
ccggctgcagcgagcgctggacggagaggaaagcgatcacctgaaagaaccattcttagaagccactgacaattc

SEQ ID NO: 344444 - DNA, 90 bp, Homo sapiens
ccatcatggacgccgagcttcgggtaacttttacagtggagggggtcaccagtcgttggcacaccaagaagctgccccgcaagacccacc

SEQ ID NO: 344445 - DNA, 100 bp, Homo sapiens
gcaggggatggcaagatagcggcgcgggagcgtaccgtcggtgcccactttctggaggcagtggtgaggaagttcgatgccatctataaatacggaagcg

SEQ ID NO: 344446 - DNA, 50 bp, Homo sapiens
agtaatggtgcaaagcctgaaggtatttctcaagctgccagatacgttta

SEQ ID NO: 344447 - DNA, 75 bp, Homo sapiens
gaggagttgagaaaaaccaatgatggcgtgatcaacatgagcatccccattgtactgcccgtctctgcagaggat

SEQ ID NO: 344448 - DNA, 100 bp, Homo sapiens
gagctgcgcgagcgggtgtgggcgctgttcgacgtgcggcccgaatgccagcgcctcttctaccggggcaagcaggtgtgttccagagaacaagccttca

SEQ ID NO: 344449 - DNA, 51 bp, Homo sapiens
aagagtcaacagcagtggcaacaggcaccacactgtaactcgaggcatcac

SEQ ID NO: 344450 - DNA, 100 bp, Homo sapiens
ggtgcctagatgggttcttgaacatatttccaaaagcaagataatggtactacgacatttctgccaaaagtaactacaactttgaaaagcccttcctctg

SEQ ID NO: 344451 - DNA, 101 bp, Homo sapiens
agacgacaagcacacactatggcgctgaaacggattaataagcggacaaggcaaaatctcagcaagttcggacctctagtacaataaggcgaacctcctct

SEQ ID NO: 344452 - DNA, 98 bp, Homo sapiens
tgcccatcgccatgagcatcaaggcaggcacggtggatgaggactcgtcaggctccgacttctccaggcagccaccaactaccacaacgggcacacag

SEQ ID NO: 344453 - DNA, 75 bp, Homo sapiens
ggctctttgaactttggatgctttattgtacaaagctcacagaaatgcaagttgagagtagttattacagtccac

SEQ ID NO: 344454 - DNA, 100 bp, Homo sapiens
caagatgcagttttttgatgctgaggagctcctggtcgatgaagaggatgatgtttttggtgaagaaatggtggagtcaatgaagaaagtagcagggatg

SEQ ID NO: 344455 - DNA, 51 bp, Homo sapiens
tgagcaagcataagctgccaaaccaaggtgccttagctggaccaattattg

SEQ ID NO: 344456 - DNA, 100 bp, Homo sapiens
ccagagtgttgccaaggccaaatatgaatttttatttggcagatctgaagggaaagctccagatactacttcactgctgtatctcccagtgtaaccctag

SEQ ID NO: 344457 - DNA, 87 bp, Homo sapiens
ggcctggcgcccgtcaacttctgcgacgaagaaaaaaagagcgacgagtgcaagatttggaggccaatcactgccaccttttatttc

SEQ ID NO: 344458 - DNA, 98 bp, Homo sapiens
cctccggagtggccagcaggcctgcgagggagttttgggaatgcacttggaaactgtattctggacaaagactacctgagatcactaaataagcttcc

SEQ ID NO: 344459 - DNA, 100 bp, Homo sapiens
aggtgcttcggagtgcttatgccaagaggaacagcagtgtaaatgactcagattgtcctaaagcagttggatgggaaaagaaccagaaaggaggcatggg

SEQ ID NO: 344460 - DNA, 100 bp, Homo sapiens
cagtgcccttgtggcgaatggggctcacgtcgacagacaactaaactggtaggtggcagcagaggaaggaattcttcagattgatggctactgacttaaa

SEQ ID NO: 344461 - DNA, 75 bp, Homo sapiens
aagacccaacacctgtacccaatatagaagaagtagtacttcccaaaaatgacatagggcctgattacattccaa

SEQ ID NO: 344462 - DNA, 50 bp, Homo sapiens
gaagtcgtgcacgaacaccaagaaagctgatgtcctgaccactggagctg

SEQ ID NO: 344463 - DNA, 100 bp, Homo sapiens
gtttggaccttcttagaaacaattctagagtagagcgcctgtaccatgatattgcccagcaaggctatcgagactcatttgatccgcaagtctagcagcg

SEQ ID NO: 344464 - DNA, 80 bp, Homo sapiens
cccagtcccaggacgtggcgcgggtctccagtgcttcagacctgcctagagctggaacgttacctccagagcgagccctg

SEQ ID NO: 344465 - DNA, 100 bp, Homo sapiens
acagtaactgaacattggtctaaagtctttccaaaaggtcaaggttcacaagctgcaacagatcaacttcatgagcctaatgcaaatagtaggatcatcc

SEQ ID NO: 344466 - DNA, 100 bp, Homo sapiens
ggcggaggccgagaagcgagtcaaggcctcccactccttcctccgagggctgtttgggaatctggtggacagtaacaaactttggtgaaatttcaggaac

SEQ ID NO: 344467 - DNA, 100 bp, Homo sapiens
acacatggcagatgagaaattggagaaggacgagatcatcaagttgtatagctgtatcattggcaacatgatttcgttttttgctccactcaagcctgtt

SEQ ID NO: 344468 - DNA, 75 bp, Homo sapiens
gtaagaagtactccagggaaacctcccagaggctgggaggcggcagaatgcagccagaggagggcacaggctggc

SEQ ID NO: 344469 - DNA, 75 bp, Homo sapiens
agctgatgcagtccgagagctagatggaagggctgggaagaggctaggcgacgtggtttcagatacgaaaaggac

SEQ ID NO: 344470 - DNA, 75 bp, Homo sapiens
cttcactgtgcgtgctgaccatggaatggaagttggatacactttgtgacttgtacgagacactgaccattacac

SEQ ID NO: 344471 - DNA, 50 bp, Homo sapiens
ctcccgggctggactcaggcttctcagttactccacaggatccgctgaac

SEQ ID NO: 344472 - DNA, 102 bp, Homo sapiens
acaaaaactgatttcaaaaactcgtgctgctttgggagtttaaattacttcagagaacttcaatagtactcaaaaatttatagaagataatattgaatacat

SEQ ID NO: 344473 - DNA, 119 bp, Homo sapiens
ctaagagactatattcccctgaacagcattctatcatggaaggaggagatgaagggcaagggccaaaatgatgatgtcatcacaatggatcccaaagacaattggtcaaaagatgcaaa

SEQ ID NO: 344474 - DNA, 100 bp, Homo sapiens
cagagagccgcgcccgccgcgcggagcgccccttcgcgtcccctgcaccatgagctggggcaccgagctctggttgttgacctcctgtactggagagaca

SEQ ID NO: 344475 - DNA, 83 bp, Homo sapiens
ttaattttagggtcctttatatagaagggagagtagggttcacagtgtccaccgtggaggaggagaggactctgaaccctcgg

SEQ ID NO: 344476 - DNA, 95 bp, Homo sapiens
caagtcacccagaactcaagtaggtagtgaataccgggagtcctggccccctaactcaattcacagaaccccaaagtccaagctcttcttgggat

SEQ ID NO: 344477 - DNA, 100 bp, Homo sapiens
gggaagggcaactttgccaaagtcaagctggctcggcacatcctcactggtcgggaggagctgatgcagcagaatgggattggttatgtgttaaatgcca

SEQ ID NO: 344478 - DNA, 74 bp, Homo sapiens
ccaagggacaatggtcaccgtctcttcaggatattcagtcggagctggtcattttcggagccagcatactaccg

SEQ ID NO: 344479 - DNA, 76 bp, Homo sapiens
ccggagccgaggtccgctcggatgatgattattccccaccttctaagagacaaagaccaacgagccaccacagcca

SEQ ID NO: 344480 - DNA, 130 bp, Homo sapiens
gtttcaagggctgcacggccttgcactatgctgttcttgctgatgactaccgcactgtcaaggagctgcttgatggagattttgctggaggagcttgccaacagcgatcccaagttagccctcactggag

SEQ ID NO: 344481 - DNA, 100 bp, Homo sapiens
accccagccgaccttgagctccaggagttcgtctcttacgtctgcggaagtgcagctgcctcagttcttagcgcagagaaattgctgaaagaatggctaa

SEQ ID NO: 344482 - DNA, 100 bp, Homo sapiens
gtctatatgcttgtgcttctccaaaaacacccatccaggcagggggatatgtggttacccaggctgtccttacccacctggtggtccatatcctgccaca

SEQ ID NO: 344483 - DNA, 75 bp, Homo sapiens
ctccactcccggacccctgccccagatatgtgtcacaaagatgtctacacggaactgccagggaatggactcagt

SEQ ID NO: 344484 - DNA, 51 bp, Homo sapiens
aacagaatgctaaggaagctgtggcaatggatccggattggtgccaatgtc

SEQ ID NO: 344485 - DNA, 74 bp, Homo sapiens
ctgtgcgcgcctccatctgggccatggatggttggccacggacagagcgaaggggagaggatggtagtgtctga

SEQ ID NO: 344486 - DNA, 100 bp, Homo sapiens
atttaaagctattcaaccagatgtaagtaaggaggtctctgtaccatggctcgtacaaagcagactgcccgcaaatcgaccggtggtaaagcacccagga

SEQ ID NO: 344487 - DNA, 100 bp, Homo sapiens
ccgtaggaagactgccacacctagactgatgcttattagtcatcaccgttattcctactaacgtcctgtgtcactgagacggcaccgaaagcgaaggaag

SEQ ID NO: 344488 - DNA, 75 bp, Homo sapiens
ccccctgtactttgtggacttgcaggatgacttagacgactttttggaaagacatcgttgatgataatgaagttc

SEQ ID NO: 344489 - DNA, 75 bp, Homo sapiens
agactgagaagagaacttgaaaaaactattaatcagcaaagaattcatgctagtcgctgaaaattttgttccccc

SEQ ID NO: 344490 - DNA, 96 bp, Homo sapiens
catccagggatctatttgtttttagtccatcccaatgaaatgaagtggtccaaaggcaaagttcgggacaagctcaataacttagtcttgtttgac

SEQ ID NO: 344491 - DNA, 97 bp, Homo sapiens
catatttgagtcatttccttcgtacccacagtgcttcatgagaggagcaagtaatactgcagacacattgtttcaagaagtattaggtcggaaagac

SEQ ID NO: 344492 - DNA, 90 bp, Homo sapiens
gtgaagtcagtgcctcagttgctgcataaagatagggaggtggtgatggagcacccctcttctggaagtgactggtctgatgttgaggag

SEQ ID NO: 344493 - DNA, 83 bp, Homo sapiens
cagatcagaggtagtcggacctttcccgctggcgcgcagcctcagctagaattcagaaggagctggcggacatcactttagac

SEQ ID NO: 344494 - DNA, 82 bp, Homo sapiens
ccgactactggcaatgcctcctaatgaaacttgtaccgtgaaagttgtccgtacagatagtctgaaagggaggagaggtcgt

SEQ ID NO: 344495 - DNA, 100 bp, Homo sapiens
gtgaaaaataccacgacaaaaccaccctaatttacactgactgggccaaccactacctagcaaaatcaggccacaagcggctgatcaaggacttgcaaca

SEQ ID NO: 344496 - DNA, 99 bp, Homo sapiens
gaatgaagccgcggaccctcgcagtttgcagtaagcattggctactggcatgacccttacatacagcactttgtgagactgtctaaagagaggaaagcc

SEQ ID NO: 344497 - DNA, 75 bp, Homo sapiens
aaagaaggcaaggagagaatgtatgaagaacagtcacaggacaggagtcttttagtcctgctatacagctgcacc

SEQ ID NO: 344498 - DNA, 95 bp, Homo sapiens
acattcctgtgtcaattcgacggagctggatgaactcattcagtatactgcattggaacaaaaactgaaaaaattgacggaagatttgagttgtc

SEQ ID NO: 344499 - DNA, 120 bp, Homo sapiens
cgagtaccttccctgtcccatcgcaaacccaaagatccccgttcctggagattctgattgaggatgaccgagtgggagacagcagcaccagcggtggcagagaccccagacatcaagctc

SEQ ID NO: 344500 - DNA, 100 bp, Homo sapiens
tcgctccgtggccttagctgtgctcgcgctactctctctttctggcctggaggctatccagcggcagtcagggcgacagcaagaatgccaagaagaagaa

SEQ ID NO: 344501 - DNA, 100 bp, Homo sapiens
ccgggacaacatgctgcggggcacagggtttggaaatcccttgtctccaggttgctgggattgacttcttgctcaattgaaacactcattcaatggagac

SEQ ID NO: 344502 - DNA, 74 bp, Homo sapiens
gccccctgcaggaactctacaacccaatccaggtggacccccaaaagtacaagggcatatttaacggattctca

SEQ ID NO: 344503 - DNA, 98 bp, Homo sapiens
aaagaggtactgggagcggcagcagatacaagatcagtgccctaaagaggtactgggatatcagtatggtttgaagtggtgaacatggatttttctcg

SEQ ID NO: 344504 - DNA, 100 bp, Homo sapiens
atatttcctgtcaccaacaaagatttcaggaagatgagaatgtgcctactgctcctgatcctccaagtcaacatttacgtgggcatgggacaggcttttg

SEQ ID NO: 344505 - DNA, 75 bp, Homo sapiens
cctgtcaccatttctttcacaaaccttgtgtctcaatttggctacaaaaggaagaagccatggatttaataaata

SEQ ID NO: 344506 - DNA, 75 bp, Homo sapiens
ccacagcggcagctccagcccggcccggcagcgacatggaagatattaataaggcagcggaaagaagaaatatga

SEQ ID NO: 344507 - DNA, 51 bp, Homo sapiens
taaaaccttcctcaccgtgtactttctgaaacagctggaagaactgctgag

SEQ ID NO: 344508 - DNA, 100 bp, Homo sapiens
ctctgggctccagcccgccgaagccgcgccagaactgtactctccgagaggtcgttttcccgtccccgagagcaaggagtgttcagcctgggtgttcctg

SEQ ID NO: 344509 - DNA, 101 bp, Homo sapiens
cttgccctggggttaacactccagtgggatgaacagacaaaccccacaagcactgcatacgggcactccacagaaggatgttattatcaagtcagatgcac

SEQ ID NO: 344510 - DNA, 100 bp, Homo sapiens
atgctgcctcgaattcggagttccactaaaaagatatgagaagaagtttgtgctacagaaactactatgctgacaaccagacctgtgatggagaattgtt

SEQ ID NO: 344511 - DNA, 82 bp, Homo sapiens
agtatgggaaagatctaccttctggaagctactactacgtggtgcttggaaaggtactccaaagattcaggtttactcacgt

SEQ ID NO: 344512 - DNA, 96 bp, Homo sapiens
agggactccacggccagagccctggatgtcatttggaaaaacactagagacagacggctggcagtccaaaagaaactcttccttcaaaacctgtga

SEQ ID NO: 344513 - DNA, 75 bp, Homo sapiens
tcacttacacagtattgggaaatctgtgaaagaatcatcacctatctttactggcagatcacagagggaaggaag

SEQ ID NO: 344514 - DNA, 88 bp, Homo sapiens
gagcaggcgaggtggccggagccgtgtggaccaggaggagcgctgagccttcacgtaaatgggtccagtcatgcctcccagtaagaag

SEQ ID NO: 344515 - DNA, 75 bp, Homo sapiens
ttctgctgtccttctttgtggagagcaagatcctggctctgcagagagaacagcccagaaaagaaagttccccag

SEQ ID NO: 344516 - DNA, 88 bp, Homo sapiens
gcgtcctctaacacattcagactacaagtccagacccaggagagcaaggcccagaaagaggtggacaatcagctcattggtaccacgc

SEQ ID NO: 344517 - DNA, 74 bp, Homo sapiens
gagctggcggacatcactttagaccctccacctaattgcaggccctcgggaccaaggatcacgtcatgactccg

SEQ ID NO: 344518 - DNA, 75 bp, Homo sapiens
gggcgaggacggcggcggaccggggcagccccgcgccctggccaggtcctggctataagtcaccatggcacagca

SEQ ID NO: 344519 - DNA, 75 bp, Homo sapiens
ctacccaggcactgtggtccgagaattactgggagatgtactcaaagatcggccccaggaagcagatggaatcga

SEQ ID NO: 344520 - DNA, 82 bp, Homo sapiens
aaccatttgcttttctggggagtcctggcggtttttattaaggctgttcatgtgaaagcccttgaagataaggatggtcaaa

SEQ ID NO: 344521 - DNA, 75 bp, Homo sapiens
cgacgatgaggtgacagtcacggagaaagtggatgaggaggggctgaagaagctgatgggcagcctggatgagaa

SEQ ID NO: 344522 - DNA, 82 bp, Homo sapiens
cggagcttatactcctcccagtgacgggtctggagtgcgtgggggaccggctgttggcggggaagaaatgatttcccttggg

SEQ ID NO: 344523 - DNA, 51 bp, Homo sapiens
ccagcccagaacagagaatcaggttcttgcatacactgagggacttcacgg

SEQ ID NO: 344524 - DNA, 90 bp, Homo sapiens
gaacaagcaaagaaggtgataaccatgtttgtacagcgacagtgggtaaacctcacaagtgcaactactgtggacgaagctacaagcagc

SEQ ID NO: 344525 - DNA, 78 bp, Homo sapiens
agctcttggcaggagtagctgatcaaaccaaggatgggatgctgtatgattatgttgaaaggaaacgaaaagaaaatt

SEQ ID NO: 344526 - DNA, 100 bp, Homo sapiens
agagaatgttcacatgctttacaagctgaggatgctcaccaagccctgttggagactatgcaaaacaagtttatcacaccagtggcagttcgcagcctcc

SEQ ID NO: 344527 - DNA, 99 bp, Homo sapiens
caccaagggagagagaggaatgtgctcttgtcctggcattgcatccacaggaggggcaggaaattctttgaaggttatcaatactctggctgaccatca

SEQ ID NO: 344528 - DNA, 85 bp, Homo sapiens
gagcagaggaagccttgaggacctactcacagataggaattgaaggtactaccaactgagcagtcaccacggccggagaaaacgg

SEQ ID NO: 344529 - DNA, 100 bp, Homo sapiens
gggcccacccctgtccaccggacctatagtggacctgctccagtacagccagaaggacctggatgcagtggcctataatgcaaagagcaaaagctttgaa

SEQ ID NO: 344530 - DNA, 82 bp, Homo sapiens
tccggtactcagacgctggcgggcgcagtttctcacgacgggccgagcctgccactgctcagctggaagctcagaaagccac

SEQ ID NO: 344531 - DNA, 100 bp, Homo sapiens
cccccaacacctgagccaggtgaagggccccgtaaattggaaggatgcacaagttccaaggttacgtttcaataaatgtggagaggactataaactgcac

SEQ ID NO: 344532 - DNA, 98 bp, Homo sapiens
ttccctggactccagtcccttgtgggaaacaatccctcgcctccggaggcggcgaggagcggcggagacacctatggctgccgatgaaggctcagcag

SEQ ID NO: 344533 - DNA, 100 bp, Homo sapiens
cagctccaggcttcctgaacatgaaattaatagggcagatgaagcgcgttccttcacctcgggcagaataactttgcagaagcccacaggttcttcacag

SEQ ID NO: 344534 - DNA, 101 bp, Homo sapiens
cagcctcatgttttcaccagtcacatctcttactactgctagtcgctgcaacactcctctacagtttgaggtacatcgagaagtctgcagaggagctggac

SEQ ID NO: 344535 - DNA, 101 bp, Homo sapiens
tttcttctatttcttgtggatattatggctaataacacaacaagtttagggagtccatggccagaaaacttttgggtgcatacatagagacgtgaagccag

SEQ ID NO: 344536 - DNA, 76 bp, Homo sapiens
cggtcggactcccgcggcgggaggagcctgttcccctgaggtatgtgatagtggaatgtgaagatcaagatactca

SEQ ID NO: 344537 - DNA, 98 bp, Homo sapiens
tctacattgccctctgtgagtttggtggaagaaacagaggaaagattagtggaaaggatttcattttaccaggaatggtggttccttctaagaccaaa

SEQ ID NO: 344538 - DNA, 100 bp, Homo sapiens
gtggatccctatatgtatattgcaagagattctgaaaaagagttccacgtcctcccttatcgagtctttgttccccttcctggatccactgtaatgttgt

SEQ ID NO: 344539 - DNA, 82 bp, Homo sapiens
tgggtgccagtgtgcgcttctgcagcttccgcagggccagtgagcaggtttgaagatgccgcatttggattggatgaattcc

SEQ ID NO: 344540 - DNA, 100 bp, Homo sapiens
tgaagacacacctgcccctggctctgctcccccagactctgttggatcagaaggtcaaggacggggacaagttctggcggatgcccgagtgctacatccg

SEQ ID NO: 344541 - DNA, 76 bp, Homo sapiens
aattatcgcgaccaacacataccagcagtctattatcctcccagtccacaacgctgaaccgtggctggacgaatgt

SEQ ID NO: 344542 - DNA, 75 bp, Homo sapiens
ggaaagtcaatcgtaggaagaacacagtacagatataatgaagatctggaacttgaagatgccattcatacagcc

SEQ ID NO: 344543 - DNA, 90 bp, Homo sapiens
tggaggcttactgcaagaagtatgagcagctcaagatctgccggaggcgctgggcaatgaccccgggactccaggccagaggggtctgaa

SEQ ID NO: 344544 - DNA, 100 bp, Homo sapiens
ataaagataaaccccttatttataaaggagttattcctgatgaagctaaagctttgtctctgttggcaccagctaatgcagtggcaggtcttctgcctgg

SEQ ID NO: 344545 - DNA, 74 bp, Homo sapiens
tggcctaagaatatgatgccgtctagttttgccatgaagttggactaaatgctcttccttcagaggattatccg

SEQ ID NO: 344546 - DNA, 74 bp, Homo sapiens
cggggacccaggagtttcctgtgtccagcgctgccggagccgcctgaggaaactgggtcccttgaagaatctac

SEQ ID NO: 344547 - DNA, 51 bp, Homo sapiens
ctcccgctccgccctcccttttccctggctggtccagggaccctcatcatg

SEQ ID NO: 344548 - DNA, 100 bp, Homo sapiens
cgctggccggatggaaatcctaatgacagtctccaaattcgcctccatctgtaccatgggctggttgatatgtgaagagccaacctgtcgcaatcgaact

SEQ ID NO: 344549 - DNA, 74 bp, Homo sapiens
tttgccttgctcattgctatcagcatcttctctgcagaccaacgacctgacctccgtccacctgggcgtgaaat

SEQ ID NO: 344550 - DNA, 90 bp, Homo sapiens
cttttgagtgcaactgccttccagacttgtgcaccatggacaattttgctgagggagatttcactgtggcggattatgccttgttagaag

SEQ ID NO: 344551 - DNA, 98 bp, Homo sapiens
ggtgtcccagctggattcggtgcgggtctggctgggcaagcactacaagaaggaacacctttgtcctagaatattgtggagaggtactcgatcataaa

SEQ ID NO: 344552 - DNA, 113 bp, Homo sapiens
gctcaaaagatctgcagagctcccagggcggacagcagcctcgggtgcaatcctggagccccccagtgagggaactcattatacaatgacaaatggaggcagcattaacagtt

SEQ ID NO: 344553 - DNA, 74 bp, Homo sapiens
tgctgttgcttggcctggtgggcccagtcctcggtgcggcgcggccaggttgtgaagatgagaaaagaagtgaa

SEQ ID NO: 344554 - DNA, 88 bp, Homo sapiens
ctccagaaatccaggagattgttgataaggaaccgcggggaaaggcgaatgggtgcttttgaatgtgttcgtaaagtgtatcagacag

SEQ ID NO: 344555 - DNA, 109 bp, Homo sapiens
gccggggcctagcgctatgcctgcggcggagactgcatcaggctctcgcttcctgcctgacacagctcacttcaagaagtgcacaatgtcagaacgtggaattaagtgg

SEQ ID NO: 344556 - DNA, 100 bp, Homo sapiens
atttccatcaaaaagtgattaagcagagaatggagaagaaggttgattccaggctcactcagtaacttgatggattttgtgaagaaaacaggcatttgcg

SEQ ID NO: 344557 - DNA, 76 bp, Homo sapiens
caagaagcagtataagatgatctgccatgtgttcgagtcggaggatgttgaagatgacagcgatgcagagacctat

SEQ ID NO: 344558 - DNA, 50 bp, Homo sapiens
ggcctccccagcagcagccatgggcaaacagtccacaggaagaggttgaa

SEQ ID NO: 344559 - DNA, 75 bp, Homo sapiens
ctctctggccgctatcatcccagcagtggagttcagcccactactctgaaccagacaatgcagatcttcgtgaag

SEQ ID NO: 344560 - DNA, 83 bp, Homo sapiens
gtgaggagccagacgacaagcacacactatggcgctgaaacggattaataagacggtctggaaaatcccgaagcagaagcccg

SEQ ID NO: 344561 - DNA, 90 bp, Homo sapiens
catggaagctttggagcagtgtatttttttcttgcagaacataaattattaggaaacattaaaaatgtggccaagacagctaacaaggac

SEQ ID NO: 344562 - DNA, 100 bp, Homo sapiens
gaagaagcaagaaatagaaggtttcatctcatagctatggatgctcctcaggcagtgccagacccagaagagggctcttcagcacctagaagctggaaag

SEQ ID NO: 344563 - DNA, 88 bp, Homo sapiens
ggtgccgacatggggcttaagatgtcctgcctgaaagtatctccagatgaaatggccactgcttgatgtccaggcagggagcctccag

SEQ ID NO: 344564 - DNA, 74 bp, Homo sapiens
cgccgccgccggacgtcggcaacggagaaggatatgacatgtctacatttattaggcggtatagtagatattta

SEQ ID NO: 344565 - DNA, 82 bp, Homo sapiens
cggatctgtgtgcccacagctcctggagccccacaggagggcccagttgaagcggtgcctggagcggctgaagcagcagatg

SEQ ID NO: 344566 - DNA, 100 bp, Homo sapiens
gatgaggaggggccatggccagcgacggggccaggaagcaattctggaagcgcagcaacagcaagctcccgggcagatcctgaaagagatgtgcgatgtg

SEQ ID NO: 344567 - DNA, 82 bp, Homo sapiens
catatgggggttctggagagcggggtgtggggtgcccgtggttgacacgagctgtgtccccagctgttcccgtctacaatgg

SEQ ID NO: 344568 - DNA, 100 bp, Homo sapiens
tggagaggggccgtggcccctgcagcggaaccggacccagtccctgagccgcccctacacccacagagtccgaaattgaagttcagaggaagaattgcct

SEQ ID NO: 344569 - DNA, 96 bp, Homo sapiens
ccagattgaagacgagcggcagcatgtcaatgaccagaaagaccaggacacagaagacttagatcactatgaaatgaaagaggaagagccagctga

SEQ ID NO: 344570 - DNA, 100 bp, Homo sapiens
ttcacgctttgccaaagtacacatcctgtatgtggggtccatgcctcttaagaactcttttcgaggaactatccgatgctggctatgagtttgacatctg

SEQ ID NO: 344571 - DNA, 87 bp, Homo sapiens
cagtatcatgctggccaagaagatcatcattaaggacggaggcacggtattctgagagaagcctcacaaagtgtattggaattacta

SEQ ID NO: 344572 - DNA, 75 bp, Homo sapiens
cagatgtctgacagccctgtgtgacaccaagataagtaacagcttagatgtcatacagaattgagagcaaagaac

SEQ ID NO: 344573 - DNA, 126 bp, Homo sapiens
ctgctactggccctgctgggctggctgctgctggccgaagcgaagggcgacgccaagccggaggatttccaaatctgaagtctgtccgagaactcattttgaaacgtggacaagccaaggtcaaga

SEQ ID NO: 344574 - DNA, 100 bp, Homo sapiens
ccacaatgatttctccagtgctcatcttgttctcgagttttctctgccatgttgctattgcaggacggagtattgttgcagaaggccgagatgacctcta

SEQ ID NO: 344575 - DNA, 74 bp, Homo sapiens
cttctgcagtgattttaaccaaggcagttggtggaaatgaggtgaggacaccagtgatgaattctgaagcaaaa

SEQ ID NO: 344576 - DNA, 97 bp, Homo sapiens
gcaccacagtaccctggagcagcatcccacggccacacctaccgagcccccccccagctgtcttcgcttcgtccagaccaacatctcccgcctcctg

SEQ ID NO: 344577 - DNA, 100 bp, Homo sapiens
gaagacctattttactgataagaaaacacatctttacacactaactcagggtctgagttgtgcactgcctatgatccactccacagaagttctgatttct

SEQ ID NO: 344578 - DNA, 119 bp, Homo sapiens
ccccaccacggagttccggtacaagctcctgcgggccggcgggccaaatggagcggagtccctgaaagatttttgccaggaagatctggaagaagaggaaaacctgcctgaggaagaca

SEQ ID NO: 344579 - DNA, 100 bp, Homo sapiens
cagagagcaacgtcaactattacaatcgcttgtacaaaggagagtttaaacagccaaaacagttcattcatattcagcctggccaactcagccaatccgc

SEQ ID NO: 344580 - DNA, 90 bp, Homo sapiens
ggacaccgtcttcatgaagaagtgtgtagcccacaatgccctggagtgtgcacgagccatctacgcctacgccctgcaggtgttccccag

SEQ ID NO: 344581 - DNA, 100 bp, Homo sapiens
aaggtgtggctgattgacgacattctagaaaagatcaacagccaccttccctctcacattcggattctgggtgttgctctcttgccattcgtggatgagc

SEQ ID NO: 344582 - DNA, 100 bp, Homo sapiens
tgcatctttgacaagtttgagtgttgctggaacggttcggatagaatcattgatcagcgattcgagaaggtttcctactttgtatttggtgatttcaact

SEQ ID NO: 344583 - DNA, 129 bp, Homo sapiens
gcagctgcgcccgctgccagcacacgactacttcgagttcttcgccgccgacctgagataaagagttctatctgtcttctacgcgggaaaatctatgatgctctagataaccgaaccctggctacctac

SEQ ID NO: 344584 - DNA, 75 bp, Homo sapiens
cccaacagatccagcagatggctgataaaattctggaggttctgggggaagagaagctgaaggagatactgaagg

SEQ ID NO: 344585 - DNA, 90 bp, Homo sapiens
gtgttcttttggggtagtgtctgggatccagtacgagttgaatcattgttcaaataagttattgccttgtctgtcaagatccgcagttat

SEQ ID NO: 344586 - DNA, 50 bp, Homo sapiens
aagagtcaacagcagtggcaacaggtctttcatggtgctgattcagacat

SEQ ID NO: 344587 - DNA, 100 bp, Homo sapiens
cggagctgacggtggaggttcgcggctctaacggggctttctacaaggttcgagaacttgtcttggacaattgcaaatcaaatgatggaaaaattgaggg

SEQ ID NO: 344588 - DNA, 100 bp, Homo sapiens
gccaatctggctagtaaaaaggacagaattgaatcacttgaaaagaggctcgaggagtgtacctcacagccttctaggatctccagagtggacaggaatc

SEQ ID NO: 344589 - DNA, 100 bp, Homo sapiens
ctcactcttactggaggactgtcaagacctagaggatcaagacataatgggagcatttttagacaagccaaagatggaaaagcataatgcccaggggcag

SEQ ID NO: 344590 - DNA, 83 bp, Homo sapiens
atctttgacatggacggacttcttctgggaagccagttgagggaagttctccatgaatgtacgtcacaatgatgatgaccgac

SEQ ID NO: 344591 - DNA, 100 bp, Homo sapiens
tgcagctcagcagccgccgccagagcaggacgaaccgccaatcgcaaggcacctctgagaacttcaggtggatggagagctagaagctctgatggaaaat

SEQ ID NO: 344592 - DNA, 90 bp, Homo sapiens
ctttctactcgaacaaagagatctttctgagagagctcatttcaaattcatcagatttcagccaggccctggccatccggagctatacca

SEQ ID NO: 344593 - DNA, 75 bp, Homo sapiens
gcctggctctcctggcaaggaggaaggggctaaaatttcccaggaacgagaaaaatttgctgatgaaggcagtat

SEQ ID NO: 344594 - DNA, 126 bp, Homo sapiens
gggagcgcctcgtcgacatgagtgatgtggaggaaaacaacttcgagggcagactgctggagccagttctgcttctcggcaaggagcgatttgctggtgtagacatccgtgtccgtgtaaagggtg

SEQ ID NO: 344595 - DNA, 100 bp, Homo sapiens
ggtattcgatgagctgcgggacaagctgctggagcgagtgtcagccatcgcttcggaggggaaggctgaggaaagtctggttctacttcggcgtcgtggg

SEQ ID NO: 344596 - DNA, 75 bp, Homo sapiens
tacaagctgatctccctgctaaatgaaaaagggcaagatactgggggtggcccagttgaaatccttcccttcctc

SEQ ID NO: 344597 - DNA, 100 bp, Homo sapiens
cgacactcggcctaggaatttcccttatctccttcgcagggcttccccacacccacggagtgaagtcagccgcggccctgcctgggaggaacttaccgtc

SEQ ID NO: 344598 - DNA, 100 bp, Homo sapiens
tgcttgggatcctttatcctggtcatcttctatttccaaagaagatgaagtcctcagtacattctgaagaagatgattttgttccagagctacatagaaa

SEQ ID NO: 344599 - DNA, 75 bp, Homo sapiens
gtctctaccagtgggactttgccagttatgatattctcaggagatctgaatctcaatgtggtagcaatggcttta

SEQ ID NO: 344600 - DNA, 82 bp, Homo sapiens
gaattcctcaagacaccattccaggtgaaatgacaatggatgctctgttggctcgattgaaacttctgaatccagatgacct

SEQ ID NO: 344601 - DNA, 90 bp, Homo sapiens
catcaaaaacaagtattggtcatgttgtgcaactactgtatcgagcttcttgttttaaggctatgcccaccctaatagaattaatgaaag

SEQ ID NO: 344602 - DNA, 98 bp, Homo sapiens
cttgtcctggctcttgccctcatcctggttctggaatcctcagttcaaggacgcgtgaccaaaaccaaagacggccatgaagtgagatcgtgcaaagt

SEQ ID NO: 344603 - DNA, 78 bp, Homo sapiens
aaccaggttctcaacaggctgactacattgtggatatcaagcctgccaatatggaagagctaacagaggtgattacag

SEQ ID NO: 344604 - DNA, 100 bp, Homo sapiens
ctgttgaagaaacgcttaacccacttcttccagaccagctggtcttgcttctggagcatctcttggagcagaagactctgagcccccgaactctgcaaag

SEQ ID NO: 344605 - DNA, 51 bp, Homo sapiens
tattaaaggaagcacacctaaggaggagagacttcagcatgcaaaccttca

SEQ ID NO: 344606 - DNA, 127 bp, Homo sapiens
gttggcttcttcatcatccgggccagccagagctccccaggggacttctccatctctgtcaggaaacctcgacctgtctcccagttggttgcacagcaggttactcagcagtttgtgcctcctacac

SEQ ID NO: 344607 - DNA, 74 bp, Homo sapiens
ccagctgacggagatggtgcagaagatggaggaggcctacagattcctggaggagatgcggcggcggcttccct

SEQ ID NO: 344608 - DNA, 82 bp, Homo sapiens
tgaacccattgtcacccctccggagccgtgccgctcttggccaccgaaagcgtcaagcaagaagaagctggagtacggcctt

SEQ ID NO: 344609 - DNA, 98 bp, Homo sapiens
taacctatgcacttgtggaatgagagaaccgaggaacgaagaaacagacattcaacatgattgcatttgaagcatcagtgtcattcaaggacgtgact

SEQ ID NO: 344610 - DNA, 100 bp, Homo sapiens
gccgcattgacaggatgtttcctgaaatgtccatccacttatccagacccaatggaacatcagcaatgcttctggtggaagagattagaaactcatgatg

SEQ ID NO: 344611 - DNA, 83 bp, Homo sapiens
ggaggaagaggaggagggcgactgtatgatcgtggatgtcccggatgctgcgggtaactaggatttctacctcaaccgcgaga

SEQ ID NO: 344612 - DNA, 80 bp, Homo sapiens
ccgcggcctgccgcaatggaaacatctatattctgagaagtgggggcgtgatgctggtacatgacatccgacgaaatgag

SEQ ID NO: 344613 - DNA, 100 bp, Homo sapiens
gagcgcagagcgggcgagcgcggtgatgcttttccttggacgatcagcttgcataatttcagcatatatacccttcttggaaaacaagtgacactttgcc

SEQ ID NO: 344614 - DNA, 75 bp, Homo sapiens
ccggtggaggaatttgtggctggctggatctctggtttactcatttggggagatgccgtgggacttggcgctgat

SEQ ID NO: 344615 - DNA, 88 bp, Homo sapiens
tattctaagtgggaaagagtttggcgttgaaagaagtgacttaattcagtgcacaaatgagatgaatgtgaacatcccacagttggca

SEQ ID NO: 344616 - DNA, 73 bp, Homo sapiens
ggatttgttaaggattccaagtaactcttatttgatggccgaacagacccaattttggatgatgttggtgaag

SEQ ID NO: 344617 - DNA, 75 bp, Homo sapiens
tctcaagtcaaagcagcaggaagataccacaatcagaccctccggaaggcggagcgtgaagtaaaagcattggca

SEQ ID NO: 344618 - DNA, 100 bp, Homo sapiens
ggaaaaaggaagagagcactgcagccagtgaaaccactgagtcaaccacagaagcccctgtgaagcgagcatctctgctgggtgatatgcatttccgaag

SEQ ID NO: 344619 - DNA, 89 bp, Homo sapiens
gtggacccctcagtatatggatacggagtacaaaaacggcccttggatgatggaggccccgagcattcctctgattcagaatacactct

SEQ ID NO: 344620 - DNA, 82 bp, Homo sapiens
tctacctgtccaccattgtgaccgaggtggtggtgcctcccaaagagctcgttttagctggcaaggatgcagcagcagagta

SEQ ID NO: 344621 - DNA, 83 bp, Homo sapiens
cagagagggcctgggagcttgctgcagcttcaggtgaggcggaaccaaccctcctggccatgggaggggccgtggtggacgag

SEQ ID NO: 344622 - DNA, 100 bp, Homo sapiens
atggaggacgaggagagacagaagaagctggaggccggcaaagccaagattccaactccacagagtgaccagagagaggacgtggctgaagacaccaaag

SEQ ID NO: 344623 - DNA, 100 bp, Homo sapiens
cgagctcaccaactgcgtgcccggcgtgctggaccgccgcgactccgccgcgctgcgcacgcccagcccgagcgggaagaagttccgcagcaagccgcag

SEQ ID NO: 344624 - DNA, 50 bp, Homo sapiens
gagatatgccaccagcatttattaagagccatgtgttcacatgtcatgtg

SEQ ID NO: 344625 - DNA, 51 bp, Homo sapiens
aaaatctacaagatgatgcagggaggagtcctcatcaccgggggcatcgtg

SEQ ID NO: 344626 - DNA, 100 bp, Homo sapiens
tttcattgaaggaatcattgctcgtgggaacgcttattcaacggcaaaagctcgagcagcacctaaaatagccaatggtaaagcagccagtagcagcagt

SEQ ID NO: 344627 - DNA, 90 bp, Homo sapiens
acttccaagtcatcaccagaaagtttgtggggacattcatggacaattctttgatttgatgaagctctttgaagtcgggggatctcctgc

SEQ ID NO: 344628 - DNA, 75 bp, Homo sapiens
cgagctcgttggagcttgaacccattgtcacccctccggtcaaaatgcggatcttcgtgaaaacccttaccggca

SEQ ID NO: 344629 - DNA, 100 bp, Homo sapiens
cagagtgctccctgctaacggggacagatacgatgaatggattaaagcagataaaatagtaagacctgctgataaaaatgtgccaaagataaaacatcgg

SEQ ID NO: 344630 - DNA, 126 bp, Homo sapiens
tatcatggatacaaccaaatgatggaatgcctaccgggttataagcgggttaacaacaccttttgccaaggaatggttccccaaggtgaggccaactttgctccatctctaagccctgggagctcc

SEQ ID NO: 344631 - DNA, 75 bp, Homo sapiens
atatgacaaagcccgaaagtgtctccaccagaattatatccagatcgagagacagaagattctgaaagggttcaa

SEQ ID NO: 344632 - DNA, 83 bp, Homo sapiens
ccgccgtcgcccaggatgggctgggaatgaagcgatgtagccttttaacaaccatgtccaagggacctgcagttggtattgat

SEQ ID NO: 344633 - DNA, 100 bp, Homo sapiens
tcgactccaaatggttgaaaacagatatacagaatggcagttcggaaaaccctcattcctcctcagcctcctgatgttgctagtcctcgagtggaaagct

SEQ ID NO: 344634 - DNA, 82 bp, Homo sapiens
aatgatcgacaagtgggaagaccgatgggaatggttaagactgaggatttcttccagaaagcatgtatgaacgtattctcac

SEQ ID NO: 344635 - DNA, 100 bp, Homo sapiens
gcggaagcggagagcaacagcgcgccgatgtccaacatcacagtcacatacagagatggccgagtggcacagctggagcaggtatacatccgtggcagca

SEQ ID NO: 344636 - DNA, 74 bp, Homo sapiens
tcgacggcacctcgggggccacactgcaggcctccgcgctcagtggataatttcttgagaggagataactcccg

SEQ ID NO: 344637 - DNA, 100 bp, Homo sapiens
gaaaggaaaaacagtgctcggaaagcatctattgtgaaaaacctaaaggataccttagtgaggatgaggatgatgaccttcagtatgccgatcatgatta

SEQ ID NO: 344638 - DNA, 100 bp, Homo sapiens
tgctcctggacagcagcctctccagcaactgggatgacgacagcctaggggtgcccttagaaaaggacaactcagaagagtttcgtcagcgagagctgcg

SEQ ID NO: 344639 - DNA, 100 bp, Homo sapiens
ccggaatttgaaaagtgcctttcacatgagagatcctaataatcaacttcacgtaattaaaaatttgaagatagcagtaagcaacattgtcacccagcca

SEQ ID NO: 344640 - DNA, 100 bp, Homo sapiens
cttcgccaaggagatcgtctctctcatcgaggcccaaaccgccaagttcactgagacttttttgacggagagggacaaacaatccaagtggagtggaatt

SEQ ID NO: 344641 - DNA, 82 bp, Homo sapiens
ttcgacctcaccacgccctaccgcatcttcagagcaggtgttgccaatgctgcggttcgtgcagaagcggggaaactcaacg

SEQ ID NO: 344642 - DNA, 100 bp, Homo sapiens
caagctcttaagcatcgtggcgctggtggggggagtcctcatcatcatcgcctcctgcgtcatcaacttaggcgatgacagtcgtctagaggagctcaaa

SEQ ID NO: 344643 - DNA, 75 bp, Homo sapiens
tttacttcaaactctgagccctgattctgaacatgtcactttaaagcatcgccctgagcaactggtggtttgtgg

SEQ ID NO: 344644 - DNA, 82 bp, Homo sapiens
tcatgtcgcgttacgggcggtacggaggagggagtgcatccgccccaacccttttccccctcgtctcctgtgagaattcccc

SEQ ID NO: 344645 - DNA, 89 bp, Homo sapiens
tttaaatacttaagagaagaagttaaaacatttcagggcaagccaattatgcttggccccaagtgtggaaggctccagcttccttcccc

SEQ ID NO: 344646 - DNA, 90 bp, Homo sapiens
ggaagatggcggcgggggcgagggagatgttaatctctgtggccctaggccaggtgttatccctccttatttgtggaattggcttgacta

SEQ ID NO: 344647 - DNA, 100 bp, Homo sapiens
ctactgggggaagtttggggagttctgtcatgggtgctccctgctgatgacagggccttttatgggaaaacttgttattggacacaatatgctcttggac

SEQ ID NO: 344648 - DNA, 75 bp, Homo sapiens
cggcgctgagaggggctgcggccggagcgggcggctgagacaaaggcgacgcttcctgcctgacacagctcactt

SEQ ID NO: 344649 - DNA, 88 bp, Homo sapiens
tttcaaggggatcagaggtccctggagtttctgcttcctccagagccagatggatagtggctataatacgcagaattgtggaagcaat

SEQ ID NO: 344650 - DNA, 100 bp, Homo sapiens
ccagaacttgcctaaacctttaactgaatttccgtctcctgctgaacagcccacatgcaaggagctgagatctgtatctgtggacctgaatgttgatccc

SEQ ID NO: 344651 - DNA, 90 bp, Homo sapiens
gaaaatcagataacttgtactggagagaaatcctacaagtgtggttcatcatgcctagtggcgtataagaagaccccgccaccggtccct

SEQ ID NO: 344652 - DNA, 75 bp, Homo sapiens
gattcttctgcctcagcctcccagatagaatttggagttgtgtacagttgtgtggaaggcaagatgtacactgcc

SEQ ID NO: 344653 - DNA, 100 bp, Homo sapiens
gccgggagaagcatgggaaggaggccgagccgggatctcaggtcctcgggggcggcggccacgccaaggacgggagtccaggcatgataaagaaaagata

SEQ ID NO: 344654 - DNA, 100 bp, Homo sapiens
ggatcacggtgagggaaagatgagcgaggagacggcgacttctgacaacgacagatataatttctacagtagaatttaatcattctggagaattactagc

SEQ ID NO: 344655 - DNA, 83 bp, Homo sapiens
cggccggaggacaccccatcgtgcagatgaaactgttaaagatggagtcaccttatacctgctacagtcggtcaatcagttac

SEQ ID NO: 344656 - DNA, 50 bp, Homo sapiens
atcaaggaggccattctcttgggagtgcatccgccccaacccttttcccc

SEQ ID NO: 344657 - DNA, 88 bp, Homo sapiens
ggccttgccacctgcagcctgactgcgccgcaagacccggatccggctggaatggttcaggacctcaaggggctcggctatgagaagg

SEQ ID NO: 344658 - DNA, 100 bp, Homo sapiens
ttcaaagaaacattaagaacttggatcccattcacctgaggcacccgaagaagagaccatccatatttccaggcaaatgaagaggattcttccagttctc

SEQ ID NO: 344659 - DNA, 75 bp, Homo sapiens
gacgatcattctgcaagcaggcaacctgaatacagggggattcccgaagtcttccgttttctgagaatgtgagtg

SEQ ID NO: 344660 - DNA, 82 bp, Homo sapiens
tattgtgtcttccccggccggtccctcgcctcccggccgagctgacgaaatgaagctgttgtcatttctggaaggaaactgg

SEQ ID NO: 344661 - DNA, 100 bp, Homo sapiens
ccacttcttctctggattgaccattcctgatgggggcgtgcatattgtagggggtgaactgggagagcttgtttcatatccatatcccactgtattcctg

SEQ ID NO: 344662 - DNA, 83 bp, Homo sapiens
cggccatcacggcggccgcagtggcgtcctggagccctcctcagattgtcactgctgttccaagggcacacgcagagggattt

SEQ ID NO: 344663 - DNA, 97 bp, Homo sapiens
tgcaggaggaggacggcagcaaccgcagcagcagccttcagtgtaataatccgatgaccaaagagccgaaactggaagcagctgtgcggattgtccc

SEQ ID NO: 344664 - DNA, 100 bp, Homo sapiens
gtggggccctccccaagctgggaatctgtgctggccttcaggtggtgatctttgtgaagtctgtgcagcggtgcattgccttggcccagctactagtgga

SEQ ID NO: 344665 - DNA, 100 bp, Homo sapiens
gaaaggcccacctgtgtcctggttgagggtctccagggttctttggggcccgagcaatgtctcaggctgtgcagacaaacggaactcaaccattaagcaa

SEQ ID NO: 344666 - DNA, 98 bp, Homo sapiens
ctacggcaacggcttaagctctcggaggagtggcagagtacgatctgaaggaggggcttctggttagcccaggtcctttcccataacctgtgcacggt

SEQ ID NO: 344667 - DNA, 82 bp, Homo sapiens
taagactcccgaatacttcagaagtggggaaatgggaaggtggccatccagaaggaggacttgcagaagtaccacaacaggg

SEQ ID NO: 344668 - DNA, 75 bp, Homo sapiens
tccctggaatatgaagggacacagtacggtagtcaaacccccagaaactggcagacctttcacttcgtatccaac

SEQ ID NO: 344669 - DNA, 75 bp, Homo sapiens
cccagaagaacaattagggtgacgtgtgcattgagtaaacatgtatagccatggaattgaattggcttgccaaaa

SEQ ID NO: 344670 - DNA, 80 bp, Homo sapiens
gaaattccccccgaagaagactcccccacatctgggatgtcctggaacaggtggaggcctatcaagctgaggctcgtgag

SEQ ID NO: 344671 - DNA, 99 bp, Homo sapiens
tggaattgttacttagtgctgccacctgctggatgttaaaagattgtgggattagtgatatgcttttctaaagagtagaaaagtcgaagatgtctagac

SEQ ID NO: 344672 - DNA, 75 bp, Homo sapiens
actagtgattctgggagcagcagtctttctgatatctaccaggtggagagacttatccaagaacgtggctgggag

SEQ ID NO: 344673 - DNA, 74 bp, Homo sapiens
cctgcagaaggtctctggagacatcttcagcagcactctcgagtggaccctgaggagctcttcaccaagctcga

SEQ ID NO: 344674 - DNA, 100 bp, Homo sapiens
acgcctccattgtttgaccacaacaagggccggattctcacccaggtgttggtgtctgtccagtcccttatattagtagctgagccttattttaatgaac

SEQ ID NO: 344675 - DNA, 74 bp, Homo sapiens
gagtccggacatctgaaacttggtgtctgacttccagcaactgctggcctgtgccagggtgcaagctgagcact

SEQ ID NO: 344676 - DNA, 74 bp, Homo sapiens
cgggcaccgaggaccagctcaatgacagtagctgctgctggtggtgacaatgtcaaataacggcctagacattc

SEQ ID NO: 344677 - DNA, 75 bp, Homo sapiens
cgggaacagccatgcaaaggcaggggaggaagccacctcgagggcagctcagttctggcaccaaaccaaatcccc

SEQ ID NO: 344678 - DNA, 74 bp, Homo sapiens
aatggaatcacggtttttggaacaaggattttggatgaagaagtttttgaggtcttatatccagatggccaggc

SEQ ID NO: 344679 - DNA, 50 bp, Homo sapiens
gggtgctgggggaggctctgcagaggcgccatgtggacggcagtgtttga

SEQ ID NO: 344680 - DNA, 51 bp, Homo sapiens
gggaaaatctccccggtgactttcaggcgggagacctttgactttgacgac

SEQ ID NO: 344681 - DNA, 75 bp, Homo sapiens
ccaggtgtgaggagcaggagatggaagtctgtgtcagcggtgcccactgtgctggccatgaagaatggggacgtg

SEQ ID NO: 344682 - DNA, 75 bp, Homo sapiens
gcttgacgcggaaaaatctgctatattaggctttggaggagaagatacggaccacggagacacaggtgcttgtgg

SEQ ID NO: 344683 - DNA, 100 bp, Homo sapiens
tggaggccctagccagtccacagattgtagcggcattcacctctcaggctgtaggttctgaagccagacacaagatgaaaaagctaactccaaaacagaa

SEQ ID NO: 344684 - DNA, 75 bp, Homo sapiens
aggtctccgtgcagcccaacttccagcaggacaagctgattgggcagaaagtggcccatgctctggcagagggac

SEQ ID NO: 344685 - DNA, 90 bp, Homo sapiens
ctaatccagaaaattatcaacattctcacagacaagcatggagcctggggaaattctgcagtgagggattaatgaaaatcaagttccatc

SEQ ID NO: 344686 - DNA, 98 bp, Homo sapiens
gctatggcaaaccgaacaattttagtggacaataacacatggaataatacccatatttctcgagtagggcaggagagctggagctgctggcaggagag

SEQ ID NO: 344687 - DNA, 101 bp, Homo sapiens
acaagaccatgctggcaagtctgaaggtcaacctcccagtgcaacgtcagcttaaagaagcagaggagccgcagcatccttagctccttcttctgctgctt

SEQ ID NO: 344688 - DNA, 101 bp, Homo sapiens
tggagctctacgcctcctacgtttacctgtccatgatgatcacggaagccttggcccaaggtgggatgcacataagagcccggttcccgcctaccaccgct

SEQ ID NO: 344689 - DNA, 103 bp, Homo sapiens
acattgtagcaaaatggcgactgtcattcacaaccccctgaaagcgacccagatgatgtggtaccagttggccaaagaagagcctggtgttggtgcatgtgct

SEQ ID NO: 344690 - DNA, 51 bp, Homo sapiens
ttcacagctataccaaacttaaaggcaacgccctgctgcggcggctggtcc

SEQ ID NO: 344691 - DNA, 96 bp, Homo sapiens
ctgccgcaccaggctcatcctgtccatcgtgtgcctgatgatcacgcagctggctggcttcagtggaccaggcagcccaatggatccaatggtgat

SEQ ID NO: 344692 - DNA, 96 bp, Homo sapiens
aacctcctcgaacgcgggagcggaccccaataccactaacctgcgccccacaaccagtgccaatatctgcaatgtggtcctgatgcggtacgggga

SEQ ID NO: 344693 - DNA, 75 bp, Homo sapiens
tcggacctgagtgaccccatgtgggctgaaaatgatgagaatggacaagcagaaaacttttccatggacccacaa

SEQ ID NO: 344694 - DNA, 100 bp, Homo sapiens
ctggccggctgtgaaggggcccatgagcaggtggacttcaaggacttctacccggccatagcagatgcgctggctccctccctccgaggctacttctcag

SEQ ID NO: 344695 - DNA, 75 bp, Homo sapiens
gttcgtctcttacgtctgcggaagtgcagctgcctcagttcttagcgcagcaacatttcattgaattggatgaaa

SEQ ID NO: 344696 - DNA, 100 bp, Homo sapiens
aagaagactgatggagcaggcttgcaatattaaaccttggaatggatggctttggccaaccagttggcattcttggacgccctgccacagcatatggatt

SEQ ID NO: 344697 - DNA, 100 bp, Homo sapiens
aaggttgatctcatagacaagtttgtacatccaaaaattaaacaaccaccatgtcgagcaaaaaggcaaagaccaagaccaccaagaagcgccctcagcg

SEQ ID NO: 344698 - DNA, 100 bp, Homo sapiens
tgagaaagcaaaggctgctctgaagcgcacgacctccgactactttctccttcaagggaactctaatgatccaggacaaagaagttaccctggagtatgt

SEQ ID NO: 344699 - DNA, 101 bp, Homo sapiens
acccgacaaatgggcgcatgacgatggagagcagggaaatggactgctatctccgtcgcctcaaacaggagctggatgctccagaccttgtatgattactt

SEQ ID NO: 344700 - DNA, 50 bp, Homo sapiens
atcctcaatgcgcacaggaagtgcgtggggcagcagccgctactcaaaga

SEQ ID NO: 344701 - DNA, 50 bp, Homo sapiens
tggaaatgtcatccgatggcacaatcagctggatctaccatgaaagactt

SEQ ID NO: 344702 - DNA, 100 bp, Homo sapiens
agcagaaccccaggactgcgcccccgggagcgggcgcccagagcatttcttctgaggccctgaagaagtatcaagtgggctttgacattgcggtggtgag

SEQ ID NO: 344703 - DNA, 100 bp, Homo sapiens
aggagaacgtcccgctggatctgacccgagatttgaaaaagggcgcatctatacgttcattggagaagtcgtcgtttctgtgaacccttacaagttgttg

SEQ ID NO: 344704 - DNA, 75 bp, Homo sapiens
gtgtggtacttctcctagttgcagtcaggcttcatacgctattgtcctgcccagcaccaagctatggatcatcat

SEQ ID NO: 344705 - DNA, 75 bp, Homo sapiens
gaaggctcaggctagggaggagaaacatcagaagcagttggaaagaactgataaatttcaaacggaagagagtgg

SEQ ID NO: 344706 - DNA, 100 bp, Homo sapiens
ataatgtataaccaggctgtgcagttattccacgtgtgaatatatcacctagcatgaccttgaggataggattttctgccgtctcttggcaaaaatggca

SEQ ID NO: 344707 - DNA, 82 bp, Homo sapiens
cacattgagagcaaaatctacaagatgatgcagggaggagtgccctctggtggtcagaagatgctgtgctgtctcgttagga

SEQ ID NO: 344708 - DNA, 101 bp, Homo sapiens
cgaagacagtccctggatcaccgacagcacagacagaatccctgctaccatacgctgggagcggactcttggagctattgtaagacaaaagaatcacccaa

SEQ ID NO: 344709 - DNA, 50 bp, Homo sapiens
ccagaaacaggttcattcattgttcttctcaccactaaatccaatacgag

SEQ ID NO: 344710 - DNA, 75 bp, Homo sapiens
tcaggggaatattctattggacaagtactcactgttggatggcaagcatgtggtgtttggcaaagtgaaagaagg

SEQ ID NO: 344711 - DNA, 71 bp, Homo sapiens
ctgaccttccaggcctacgagcagattctcgggatcacctgcatcatggccgccctcagaccccttgtgaa

SEQ ID NO: 344712 - DNA, 104 bp, Homo sapiens
gcgggtgctgcttgctgcaggctctggggagtcgccatggaatttatcatggcatccagcattgaccactacaagtaaaatgcgaattccacattctcatgcat

SEQ ID NO: 344713 - DNA, 90 bp, Homo sapiens
ctctccttgcttggaattctgcccactctgcggagttagcagtcacgacctccagcacagagtcgacttcaatgttcctatgaagaacaa

SEQ ID NO: 344714 - DNA, 100 bp, Homo sapiens
cgtgtcgccgacgccaaaggggacagcgagtcggaggaggacgaggacttggaaggaataagacgagttggaagaagacctgatcaacaacttcagggtg

SEQ ID NO: 344715 - DNA, 100 bp, Homo sapiens
atcgactcggccaacaagaaccgggacgaagccatcaaacagctgcggaagctgcaggtggggaacgccaagcacaacgtgcatgtcatgaacatctcca

SEQ ID NO: 344716 - DNA, 87 bp, Homo sapiens
caaggccgcccgggaactgctgacgcttgatgagaaggacccacggcgtctgttcgaagggctgacaaagaagagaaccaaagtcca

SEQ ID NO: 344717 - DNA, 50 bp, Homo sapiens
ggagacacactggatgtttttaccatgaagacagagatgtcaatgacccc

SEQ ID NO: 344718 - DNA, 82 bp, Homo sapiens
tccagtgtccttcaggagatctgtgatgagctggagaagcgactggaggagtggttggggaggacattgcctggcagtgact

SEQ ID NO: 344719 - DNA, 98 bp, Homo sapiens
gttcacagagctagccggacgtcctccgactcaagagcaaacatgaacgttggagttgcccacagtgaagtgaatccaaatacccgtgtcatgaacag

SEQ ID NO: 344720 - DNA, 74 bp, Homo sapiens
accttcatcacagacaacagcctggtggcagcgtacaatgccagtgtttcagtcccagacagcagtggccccga

SEQ ID NO: 344721 - DNA, 90 bp, Homo sapiens
cacagagctgtaccagtacacggcccacgttgccagaaagctgtatgtgatggcttctgtgtttgtctgtctactcctttctggattggc

SEQ ID NO: 344722 - DNA, 74 bp, Homo sapiens
tggaaaggcccagatgatatcctactaggcatgttttatgacacagatggcaatgaagggctattggcctgtca

SEQ ID NO: 344723 - DNA, 97 bp, Homo sapiens
caatgagtacaactaccgctgctggaccacaaaccgctgccagaaaagagatacaactcgtcaacgaatcaaattcagtgatgacagagtatgcaag

SEQ ID NO: 344724 - DNA, 75 bp, Homo sapiens
ctgccatcttagtctagggactgaggagtcgccgccgccccgagtcccggtgatccgcaggggctggctgaccat

SEQ ID NO: 344725 - DNA, 75 bp, Homo sapiens
gcagtagatgatgatgtagcagaagaataatcatgggccagactgggaagaaatctgagaagggaccagtttgtt

SEQ ID NO: 344726 - DNA, 100 bp, Homo sapiens
gggtagacctgtgggcacggacgcacgccactttttctctgctgatccaggctgaccggttccctgatgtgttacctgcttctgctactgatccaaactg

SEQ ID NO: 344727 - DNA, 74 bp, Homo sapiens
gccccctctctgaagaatgcagccttcctaggtccaggtcctattttgtaacggattatgatccaaccattgaa

SEQ ID NO: 344728 - DNA, 75 bp, Homo sapiens
gctataccagacgtttaaggatcggggtatactggatacactcaagggtctggtggttccagtcatcaggaatgt

SEQ ID NO: 344729 - DNA, 90 bp, Homo sapiens
ggtttgtacagatcgccatggctttgcaggccatcaccatcgaggctgagccaagagctgatggcagccgccggaccacccgctatgaca

SEQ ID NO: 344730 - DNA, 50 bp, Homo sapiens
atagctgttgtttcagagaaagtctattatcctcccagtccacaacgctg

SEQ ID NO: 344731 - DNA, 100 bp, Homo sapiens
ggcaaaggcaaaggcggctcgggagattcagccgtgaagcaagtgcagatagatggccttgtgtaatggataggtaacagagaagacctcgtcccttcct

SEQ ID NO: 344732 - DNA, 90 bp, Homo sapiens
caaagaaactataaacaatttagatacttcatcatctgacttcactatattacagctcatatcaggacatcctgtgagactcttccccct

SEQ ID NO: 344733 - DNA, 98 bp, Homo sapiens
gctatgatcattgacaaactggaagaggaggctatggtggtggaggtggtggcagcagaggtagttatggaggaggtgatggtggatataatggattt

SEQ ID NO: 344734 - DNA, 83 bp, Homo sapiens
cattaatcaagcatccaatttctctgacaaccatgagtggaaaaaactaattatggttcagcactggcctgagacagtatgcg

SEQ ID NO: 344735 - DNA, 74 bp, Homo sapiens
caggtgtggaagccatgagcaatttttacccacctcttgatgaaccatctattggaagtaaaaatgttgatctg

SEQ ID NO: 344736 - DNA, 75 bp, Homo sapiens
ctttaaacttaaagacctctttggacccgaaattgtaaggatgaatgctatcaagtaagacaagtgtttgcccag

SEQ ID NO: 344737 - DNA, 100 bp, Homo sapiens
aggcaacggagctaccagccggtgtcagttgtacccgaggcgttctcagcagcagcaagtacctgtggtggatttccaggctgaactgaggcaggcattc

SEQ ID NO: 344738 - DNA, 101 bp, Homo sapiens
aactgcaggaagcagaaaaagagctaaagagaaaacaagatgacgctgaccaggacatgatgatggcagggatggcatacgaggagcggcagcggcactgg

SEQ ID NO: 344739 - DNA, 126 bp, Homo sapiens
cctgcgcgaagctggccaaagcctgcccagacggctcacctgtgcgggatggaacaaaaggcctccggtgtggctgtctctgatggtgtcatcaaggtgttcaacgacatgaaggtgcgtaagtct

SEQ ID NO: 344740 - DNA, 50 bp, Homo sapiens
cgcccgtccacacccgccgccagagagtcacaccccaaagcctctttatt

SEQ ID NO: 344741 - DNA, 100 bp, Homo sapiens
cccgcgaggccctggaggctgccgagcgtgaggagactcagcagaaggtgcagatcacccctgagtacctccagagcgtctgtgtccgcctgttcagtaa

SEQ ID NO: 344742 - DNA, 100 bp, Homo sapiens
ctgcatgacatcctgcacgagcccacatgccaaataagtcatctgagcaaaacaagctatcgatcagggaagatctccagttataatagataacactaat

SEQ ID NO: 344743 - DNA, 95 bp, Homo sapiens
aggcgaatatttaacttatatctgcctgtcagattcctagaggggagtgcctgcgagcctcgggtgagccttcctggaggagcctccgtctgctt

SEQ ID NO: 344744 - DNA, 82 bp, Homo sapiens
ggagcatgaaaacatcattgtgaaatacactttcgggaaatggcctctaaatcctggctgaattttttaaccttcctctgtg

SEQ ID NO: 344745 - DNA, 75 bp, Homo sapiens
gtctacactgagtcggaggcgaagaacccttaggagaaatcttgagagtggacagcaattgtgaagatcgccaga

SEQ ID NO: 344746 - DNA, 98 bp, Homo sapiens
cggaggtggctctgagggcagggacgtgttggacacgctgactttgtaggctccgccaagaggcgccgcaggaggaacaagcacatcatgattgactt

SEQ ID NO: 344747 - DNA, 75 bp, Homo sapiens
cagagcagacttaccctgaagtagttagaatgatttgtgtaagaattgtcatcatgtaatagccagacatgagta

SEQ ID NO: 344748 - DNA, 82 bp, Homo sapiens
ccgagcattgtgggcctcatcatcttcctcctgtgcaccctcttcatcagtaatctcaggggcgatataatcaatgaggtgg

SEQ ID NO: 344749 - DNA, 96 bp, Homo sapiens
agcaggccatggaccaacttcactctccagggcacaccgtattcagctctgagcggtctttgctagtgaggccaaggagccaccctgagccaaaag

SEQ ID NO: 344750 - DNA, 98 bp, Homo sapiens
ggcggatgccctgcagtacctgcagaaggtctctggagacatcttcagcagttgatattcactgatggactccaaagaatcattaactcctggtagag

SEQ ID NO: 344751 - DNA, 73 bp, Homo sapiens
gcagaatggctggcaccacctcagggacttcagtactagtgctaataacatccagattgataaaaccaagcct

SEQ ID NO: 344752 - DNA, 74 bp, Homo sapiens
attgctgcagccgcttgtcagtgtgatgaagattggcacccagccatcatcgtctacagactgccgtggacctg

SEQ ID NO: 344753 - DNA, 75 bp, Homo sapiens
acaaccagcgcctgcgcctacagaacgagcatcgaggtccgcgggagagctgtggggcttggtgagtgtttcgtg

SEQ ID NO: 344754 - DNA, 87 bp, Homo sapiens
gactctgggcggcgaggaaggcgtctcccgggaggaggaagccaagaatctggtgagcgaagccatcgcagctggcatcttcaacga

SEQ ID NO: 344755 - DNA, 100 bp, Homo sapiens
tgcatcatccccacaagtcagtccaacatgtggtacttcaggctctgttttacttgctagacagagctgtggataggtcatgaacaacactgaagaaacg

SEQ ID NO: 344756 - DNA, 83 bp, Homo sapiens
cccctccgcaagagctccctcaagaagggagggaggctggtggagaaggctgtgttatatgacatcatcctgaagaacttcga

SEQ ID NO: 344757 - DNA, 83 bp, Homo sapiens
ctaggatggaaaacatatccattaaatgggatacatccagaaagtgcccagaagaaacttcctgctggaaaaaatgaaaaagc

SEQ ID NO: 344758 - DNA, 75 bp, Homo sapiens
taagcccacatatcaggaccgagtggccccgccaggaatcacatgcagcccaactacagattcttatggaattcc

SEQ ID NO: 344759 - DNA, 100 bp, Homo sapiens
cccagacaagatggacaccgcggaggaagtgtgccgtgcaggtgaagctggagctggggcaccgcgcccaggtgaggaaaaaacccaccgtggagggctt

SEQ ID NO: 344760 - DNA, 96 bp, Homo sapiens
gccagatcaacctggagctctacgcctcctacgtttacctgtccatgaacaccttccaccatgaccacctcagcaagttcccacttaaataaaggc

SEQ ID NO: 344761 - DNA, 100 bp, Homo sapiens
acaaagagcttgctccctacgatgagaactggttctacacgcgagctgtgccgggggaagacatttccctccatccacctgtggacccggctcctgtcgg

SEQ ID NO: 344762 - DNA, 100 bp, Homo sapiens
tcagtttctggagctggccgtcaacatgtcctttcctaaggcgcccttgaaacgattcaatgacccttctggaggccactgtctgcagctcccgtgaaga

SEQ ID NO: 344763 - DNA, 82 bp, Homo sapiens
ggcatattagcgctagccctgcagacagaggtgtgctgacgacctgctacaacagaacatctgtgggtcttgcagatatgat

SEQ ID NO: 344764 - DNA, 90 bp, Homo sapiens
agaccaaacatccagatctggagtgccggcacaggaacttcacccggatgaaattgacaccgactctgcctacattcttttctatgagca

SEQ ID NO: 344765 - DNA, 111 bp, Homo sapiens
atatctgtcttcggtggactccttcggcagtccacccaccgccgccgcctcccagactgtgccctgtccacggtgcctcctgcatgtcctgctgccctgagctgtcccgag

SEQ ID NO: 344766 - DNA, 100 bp, Homo sapiens
actagcagatgtggttggaatccttgctgtgctgaatcctggctgtgtgaccccaagcttcaacggaccacaccaaaatgccatctcaaatggaacacgc

SEQ ID NO: 344767 - DNA, 100 bp, Homo sapiens
gagtacctgttgttgcagagttattttctgagtcagtttcagatagaagaggagttatgggaagaagaatttattgaacgctgtttccaagaaatgctgg

SEQ ID NO: 344768 - DNA, 101 bp, Homo sapiens
ctcggcccgtcaccctccggaccaataccttgaaaacccgacgccgagaccttgcacagtgtgaaatggcctttccccgggtcaagccagcacctgatgaa

SEQ ID NO: 344769 - DNA, 50 bp, Homo sapiens
aagttccatcccacctttgagtcagtccaagccttatgcatttgatcggg

SEQ ID NO: 344770 - DNA, 80 bp, Homo sapiens
gtctgggtttcagaggagccagcgcctccgatttggtgccctggttgtcagatgttggaaagcagtaggacggaacatac

SEQ ID NO: 344771 - DNA, 75 bp, Homo sapiens
gcaccacagtccttctgcagtccctcgtccagccacccccagagccacctgagctgaagattcccttgagaacaa

SEQ ID NO: 344772 - DNA, 98 bp, Homo sapiens
tctttgttccctgcagccctcccacgagaccccaggcatggaggagagcctggcagaaatgagtattatgactactgagcttcagagtctttgttccc

SEQ ID NO: 344773 - DNA, 75 bp, Homo sapiens
cgtccgacagccaggcccgggagaagtgaaaaaccatttcgctgtgatgaatgtggtatgagattcatacaaaaa

SEQ ID NO: 344774 - DNA, 97 bp, Homo sapiens
cccttgtggcgaatggggctcacgtcgaggcaaacttgaagataaatcttttgactccagctctttagaggatctaaagtgaccttgatggacagtg

SEQ ID NO: 344775 - DNA, 100 bp, Homo sapiens
gaggaggtggcagtggaggagtgtgacagggatgatgaagaagacctgctggatgagggccaagatcagtcagggaaccaaggtcccggaagaaaagacg

SEQ ID NO: 344776 - DNA, 90 bp, Homo sapiens
aagagatcaataagaccgtttcccgaatgaaagtacatcaggaacgtctctatcaagaatacaatttcagcaaggctgagggccatctga

SEQ ID NO: 344777 - DNA, 95 bp, Homo sapiens
ctgtcccgggcctaccccctggactccctggagaagcagatggaaaaggccggatcacctcaacagtcacgtcagacaagtgcactcaacagaac

SEQ ID NO: 344778 - DNA, 73 bp, Homo sapiens
ccaatcacaacgccaatctagaatactctgcgatttgtttagtgaatgaccctaggccccagcacaagtacaa

SEQ ID NO: 344779 - DNA, 99 bp, Homo sapiens
gtcatgggaggacatgaagcggctccacgaggaggaccagaaggagatcggtgacctccgtgcccagcagcagcagggtatggacagtggatttgcagg

SEQ ID NO: 344780 - DNA, 100 bp, Homo sapiens
cagtgatacaacattggaacttagtgttatgccaaaagatgaagacattctccaagtgaatgcatacacagccacagctatcaacagcaccaacttctgc

SEQ ID NO: 344781 - DNA, 75 bp, Homo sapiens
caggaagtagacttttttcagagtcttgtttctggcgctggagacatcaagcttactaaagacacaggagttgac

SEQ ID NO: 344782 - DNA, 75 bp, Homo sapiens
tgcttctgcgatgactgtgagaaactcgtctctgggtagttggcaaaaaaggagaaagccactaaggtacaaaag

SEQ ID NO: 344783 - DNA, 100 bp, Homo sapiens
ggtagccggctgcgcgtggctggggaggcgaggccggacgcacctctgtttgggggtcctcaggatgtacagttacccagcacgtgtacctcctcctcct

SEQ ID NO: 344784 - DNA, 100 bp, Homo sapiens
cagacctggtggcacagctcagggctgctcacagtgaaggcaataccactgctggattgggttgctccttgagggcaggacagttcttatggctttatcc

SEQ ID NO: 344785 - DNA, 82 bp, Homo sapiens
caagcaggagctgggagccccaggctttccatctgatggtcccctggtgtgtgccctggaacaggagcgaaggctccgcctc

SEQ ID NO: 344786 - DNA, 74 bp, Homo sapiens
aaatctcaaattcctgggccctatccccagagtttcttatcaagtctgcaaatgaagagtccagaaaagaagcg

SEQ ID NO: 344787 - DNA, 89 bp, Homo sapiens
tttgtcttggaggtggcattgttgggagcgctgttttcgtgatcttcagaccccaggttctttgtcaccttcaggccattcagaggagg

SEQ ID NO: 344788 - DNA, 83 bp, Homo sapiens
ggcggcggcaccaaggcccccaagccctccttcgtgtcgtacgtacgccctgaggggcggatgtccacgcgagggacccccgc

SEQ ID NO: 344789 - DNA, 75 bp, Homo sapiens
gaggaatgtctttcctaccatctaaaatacgaaggtttctggctggatccatccttttacaatccctgctattat

SEQ ID NO: 344790 - DNA, 75 bp, Homo sapiens
cggcctttgccccaatcttgtgtgggcactgaagggggactacaggttcgagagaatacggggtgctttgcattc

SEQ ID NO: 344791 - DNA, 75 bp, Homo sapiens
tacgagcgacaggagttcatctacccggagaagcaggagccctactcggcagaaatggtggagtcaatgaagaaa

SEQ ID NO: 344792 - DNA, 100 bp, Homo sapiens
ctagaagcttgcagaaaaattggtgtacctcagtccgtggtggatgactggattgaatcatataaacaagacagggacatcgcacttctggatttaatca

SEQ ID NO: 344793 - DNA, 100 bp, Homo sapiens
gacccttttcccctccccgggccacccagcccgcccaactcccagcggagagcaaggactcgctcagcagcagcctgaaaacttgctacaagtatctcaa

SEQ ID NO: 344794 - DNA, 100 bp, Homo sapiens
gcttcacggaggcaatagctagccggttcttccaggggacccagccccctaaccatgggagctcaggacactctccctgttgcagcagcatttacagaaa

SEQ ID NO: 344795 - DNA, 75 bp, Homo sapiens
cgccgctgccgctgcgtgggggtgaggggatcaggtcttgtggatgagcagcagaaagttcggaccatcagtgct

SEQ ID NO: 344796 - DNA, 90 bp, Homo sapiens
taaaatcctgctctggccggattccagactcgtgggggaaaggctgctcttggggtgaagccttattcctgatgctccagacgatcacca

SEQ ID NO: 344797 - DNA, 51 bp, Homo sapiens
gaaagttcattgggcctgcacctccagggacaactacacccttcagatcaa

SEQ ID NO: 344798 - DNA, 100 bp, Homo sapiens
cggaaccttccaccatcaagggaccgcagggccgggcatcagaacacaccatgatggctgtgacctaagaccctcaggaagccccggggtcatggcccag

SEQ ID NO: 344799 - DNA, 100 bp, Homo sapiens
agacacgggtgaatgctgctaaaaacaagactggggctgctcccatcattgatgtggtgcgatcggctctgtatgtggatgtgatccgtgtgaacagcta

SEQ ID NO: 344800 - DNA, 100 bp, Homo sapiens
atggaaacctgtgaagttagctgggccaggccaaagagagtacgttaaaggaccttgacacctctgacagaaaagaggatgttcttagcacatcaaaaga

SEQ ID NO: 344801 - DNA, 74 bp, Homo sapiens
tggaaggtgcgtgtggggctgggtctcggagtgggagacgtggagtgcagatttcttcagaggccccacagtat

SEQ ID NO: 344802 - DNA, 100 bp, Homo sapiens
tagaagaaaaggaaccctggcctgagatgttgttattcatgaggaccaatggattggcgagacagtactacaatcaacatttagcagtcagttattaaat

SEQ ID NO: 344803 - DNA, 96 bp, Homo sapiens
agcaccgcacgccctgcaagggagggaggctgccggcgtggaccgcgggaaggcggggctggggctcggcgggaggccacccccacagccgccccg

SEQ ID NO: 344804 - DNA, 100 bp, Homo sapiens
cgcagagtgccctacaactacctgcagcgggcctacatcaagaatactctggagcagtgcaatgtgtgttccaagcccatcatggagcggattctccgag

SEQ ID NO: 344805 - DNA, 100 bp, Homo sapiens
cggcgagatgcctttgttcaccgccaaccccttcgagcaagacgtgggaaactttgagggaaattttgagtcactggaccttgcggaatttgctaagaag

SEQ ID NO: 344806 - DNA, 100 bp, Homo sapiens
aggcagcttcccacagcaggttggacagttcacaggaacagatggagtcggataactgttcaggaggagatgatgactggacccatctgtcttcaaaaga

SEQ ID NO: 344807 - DNA, 75 bp, Homo sapiens
ctcgctactcgcttgcctacccgccggcccgcgggtctacttcctcaaaggtctggccgtgggcctgggcttcgg

SEQ ID NO: 344808 - DNA, 82 bp, Homo sapiens
aatgggctaataatgctggcaaagtggaaaaatgtgcgatcgaggagactggcagagggaaagaaagttcaactatggtggt

SEQ ID NO: 344809 - DNA, 101 bp, Homo sapiens
atgctttatttttgtggcaggcatctgtgggatctgtaatagaaattccgatacatacttctgcatgtctatgcgaataccagtggatgaggaagccttcg

SEQ ID NO: 344810 - DNA, 98 bp, Homo sapiens
aacttctgcgggatcttcaaccacctcgagcggctgctggacgaagtttcacctgtgattccctggatggttaccattcttttgaatgcggctccata

SEQ ID NO: 344811 - DNA, 75 bp, Homo sapiens
cttcttcctcagtgcggctggcaagttcggaggtgacttcctggtctatcctgggaacaccagctggctgatgag

SEQ ID NO: 344812 - DNA, 100 bp, Homo sapiens
cttctctgcattttgtccacatgagaggattacctttccaagccaatgcccaagacattataaacgagtcaaattgactttatcagctttaatcgatggg

SEQ ID NO: 344813 - DNA, 75 bp, Homo sapiens
cttgagttctgcaaaagctcaggttaatccaggttatggaaacaaaggacatgctttacatcgtcactgaatttg

SEQ ID NO: 344814 - DNA, 83 bp, Homo sapiens
atgggcatacttgggttaatcaatcttgtgttcctaggagaatgttaacagtccagacctttttcactacatcaaccacggat

SEQ ID NO: 344815 - DNA, 100 bp, Homo sapiens
tcccgcaccatggaggaggacgacagctacgatacgtaggtaacctttccagagatgtgacagaagtccttatacttcagttgttcagtcagattggacc

SEQ ID NO: 344816 - DNA, 95 bp, Homo sapiens
agatcagcgaggagcagcagcagctccagcaggcgctggctcctgctcaggcctgcagtactcaactgacaatcaatttgtacaacggctcaaag

SEQ ID NO: 344817 - DNA, 136 bp, Homo sapiens
ttcacctcgcgtcgcgcccgggaggaaggaacgaggcaaggagctaaagcagcgtgcgttcagccctgggacctgcctagagctggaacgttacctccagagcgagccctgctatgtttcagcctcagaaatcaaa

SEQ ID NO: 344818 - DNA, 90 bp, Homo sapiens
caagggcatcagccaggagcagatgcaggagttccgggcgtccttcaaccacttcgacaagatgccagaagtgggtggagaactgtagga

SEQ ID NO: 344819 - DNA, 100 bp, Homo sapiens
agtacaagctgatcctgtccacagaacatccagtcatggataaaaatgagctggttcagaaggccaaactggccgagcaggctgagcgatatgatgacat

SEQ ID NO: 344820 - DNA, 100 bp, Homo sapiens
cacatgacgtatttgagttgaagcagttttctcagctgcctgctaacatagctgtttgcagttctaagggtgtcaaattgagaaccaggtagatccccac

SEQ ID NO: 344821 - DNA, 50 bp, Homo sapiens
ctagcgtcctggaattacttcaatcaaaccaaagtctgacattctgaaag

SEQ ID NO: 344822 - DNA, 75 bp, Homo sapiens
gaagtccagagctgaggactgcctgtttgcagatcctgataacttaagtgactctctcttttccggtgatgaaga

SEQ ID NO: 344823 - DNA, 82 bp, Homo sapiens
gccagagccggccggcggggccacgcccggggccaccctccccaagtccccatctcaggcatccgtgggctctgagaagctc

SEQ ID NO: 344824 - DNA, 100 bp, Homo sapiens
tgcaggaggagatgcttcagagagaggaagccgaaaacaccctgcaatctttcagacaggataccgaagtgtataaagctacagtaaaagatgacctcac

SEQ ID NO: 344825 - DNA, 83 bp, Homo sapiens
ctcaatctctggaaaaacttcttgccaaccaaatatggtttgaagtggtgaacatggatttttctcggcttcacatgtacagt

SEQ ID NO: 344826 - DNA, 99 bp, Homo sapiens
tatatggagcacagcatcctcctcttgacccacggctcaccaaaaagtacatggccacctctggcctagaccaccagctgaagatctttgacttgcgag

SEQ ID NO: 344827 - DNA, 96 bp, Homo sapiens
ctggctccgggtgacagccgcgcgcctcggccaggcccaagtctgttttggtggtctgagaggaaaaaagatgagcttctaaagttttgggaaaat

SEQ ID NO: 344828 - DNA, 78 bp, Homo sapiens
gggcctcgcgcgcctcgggcgcggctccgcagtgagcccaccaagaaggaagcgaattaccgaattgatgggatatga

SEQ ID NO: 344829 - DNA, 83 bp, Homo sapiens
atcaagaaaatctccatcgaagggaacatcgaagaatggctacgtgactgtcagtgagatcaaagccagtcttaaatgggaga

SEQ ID NO: 344830 - DNA, 100 bp, Homo sapiens
ccgtgtttacactcctgttggcaaagcagagcaaggaaaatttgcgttagaggttccagtgggtagtgactcgcaaaatgtggtccagccgcctttccag

SEQ ID NO: 344831 - DNA, 71 bp, Homo sapiens
catgcccaaatcccggaaactccagcgtgtctccagccgtgaaaaattgtatggcgacttcttgagctgga

SEQ ID NO: 344832 - DNA, 80 bp, Homo sapiens
gaaataccagtccccagtgagggtgtacaaatacccctttgaattaattatggctggatgtccgtcgcttggtagtggcc

SEQ ID NO: 344833 - DNA, 82 bp, Homo sapiens
ttcagtattaccaggtccctgaaaagctaccccccaaagtcctggagctgtgaaatgaagctgttgtcatttctggaaggaa

SEQ ID NO: 344834 - DNA, 100 bp, Homo sapiens
acttttaactttcattgtcttttccgcccgcttcgatcgcctcgcgccggctgctctttccggcagggtttccaggcctgaggtgcccgccctggcccca

SEQ ID NO: 344835 - DNA, 100 bp, Homo sapiens
tcgtccgcagacgccgccaccgccatgggctcctgaggagcggttggttccccgaggcgtacgtgaaggctctggaggaggggcccgtgaatcccatgac

SEQ ID NO: 344836 - DNA, 82 bp, Homo sapiens
cccacctgcccggtgcccgaggaggcagccaagctcgtagcctgccactccgttttaaaatcaaagatgggaaaatcggaga

SEQ ID NO: 344837 - DNA, 74 bp, Homo sapiens
cccagtcctgcggctcctactggggagtgcgctggtcggaagagtcttgctctgttgcccaggccggagtgcaa

SEQ ID NO: 344838 - DNA, 75 bp, Homo sapiens
acagggctctgatgagaacatgtcagaatgttcgaaaagatataatccgcatcctccccagtctagatgtcgaag

SEQ ID NO: 344839 - DNA, 74 bp, Homo sapiens
ggagagagaggtggagtccggcccccgaaagaggcaacagccaactcagtttataaatccagaaacacctggct

SEQ ID NO: 344840 - DNA, 90 bp, Homo sapiens
ggggggcatagacatcaatacctgcaatcaggtccagtggcattgcagagcacggatggttgcaggagccaacttttacattgttggacg

SEQ ID NO: 344841 - DNA, 75 bp, Homo sapiens
atacctgccctggcagcatggctcagactgcatgacagccatgtcaaaatctgccgtgaagatatccttggactt

SEQ ID NO: 344842 - DNA, 90 bp, Homo sapiens
gggagaaggttctgtctatcagtgctgcgagaaaggaaagaaacaagtttgctctcagcgggttaaacccatccagagtaatggctgcgg

SEQ ID NO: 344843 - DNA, 98 bp, Homo sapiens
caggaaagacatggagattctcttaaaaagacctggacaaatttgctgcagaagatatcattgatcccattgcaaaggccaagatggtggctttgaaa

SEQ ID NO: 344844 - DNA, 100 bp, Homo sapiens
ggacctggcctgaagacatttcctctcctcccctctggatttctcagaggaccaagaatcgccttcagccctgtctggtgcatccttggcagaaagtgag

SEQ ID NO: 344845 - DNA, 90 bp, Homo sapiens
ggtgcgcttccggatcgggggcaagcggaaggtgatgcccaagatggaccaggtatccgcccccagatcatgaacggccccctgcacccc

SEQ ID NO: 344846 - DNA, 100 bp, Homo sapiens
gacgtcttgcctgtgtcccacttgttcgcggcctatagggcctgcctaggctccaactgacagtaatcccaagagctcccctttcaggggatgacggagt

SEQ ID NO: 344847 - DNA, 75 bp, Homo sapiens
cagaagtgcagaggtcaatctttatgtacagccaagctctactccaggaagtgaaaatgtgctgcctcgagagcc

SEQ ID NO: 344848 - DNA, 100 bp, Homo sapiens
catgcagcaaccactattttcttcctgcccctcgttgatgagagcattcgaagtgacctcagcagggcatccagggcagagcggcttgggtaaatccacc

SEQ ID NO: 344849 - DNA, 82 bp, Homo sapiens
ttcgcagtggtcgcttcttctccttggtggtcgtcggttttctgagggtacttcagctgacagagagattcagagaacgtta

SEQ ID NO: 344850 - DNA, 100 bp, Homo sapiens
gcaacctggagaagaagcagaagaagtttgaccagcaactactcctacccaccgtgcaccctgacggatgaggagacccggacggagatgctgaaccgtg

SEQ ID NO: 344851 - DNA, 75 bp, Homo sapiens
cttaatctcatcacccagtggaaggcgtgtttaccaggtgtaccttgaaagacttttaacatacgcagagataga

SEQ ID NO: 344852 - DNA, 100 bp, Homo sapiens
cagttcagaagagccaaggaataaacatgcaatgaacccaaaaggaaagtccctgagtacacactgaccatccaggccacagacatggatggggacggct

SEQ ID NO: 344853 - DNA, 128 bp, Homo sapiens
caaactcatcggaaacatggcactgttgcctatcagaagtcaattcaaaggacctgcccccagagagatttttcagctggtggaatagctacaataaggcaatcagctacctagccacagtgcccaag

SEQ ID NO: 344854 - DNA, 95 bp, Homo sapiens
tgggtcctcgctgtggggcaatccgggcttgcagacgaggtgtccctggccagtgtccttccacctgtccacaagcatggggaacatcttcgcca

SEQ ID NO: 344855 - DNA, 80 bp, Homo sapiens
aagctctagaaatgaatgtttccatctcttcagagatgaaccaggatgctccaggatgaaacgccataggcctgtcagca

SEQ ID NO: 344856 - DNA, 110 bp, Homo sapiens
tttgatccagtagggtcttaccagagagactccttcaaggctggaggctcagcaagtgccatgctacagcccctgcttgacaaccagatgattccaatgtacagccaatg

SEQ ID NO: 344857 - DNA, 74 bp, Homo sapiens
ttgacaaagcactactggctattggaaatgctgaatcgtctcaaacttgtcattctgaacaaggtgataaaaag

SEQ ID NO: 344858 - DNA, 100 bp, Homo sapiens
tttatattttaccacttccttgaatagagctgcagaaactggagggcagcagtggacctgtgcggacgtctcctcacagcccacggccagggctacggca

SEQ ID NO: 344859 - DNA, 100 bp, Homo sapiens
aatttcgtgttactgaagctttgagaggtcacatgtgtgaattacatgaacgacagccttcgcaccgacgtcttcgtgcggttccagccagagagcatcg

SEQ ID NO: 344860 - DNA, 90 bp, Homo sapiens
agagaaactccacctctgtgaagagaaagcaaagtcctattccaacagtcatgagaccctggtgggcagcagtgggaccattctgaccac

SEQ ID NO: 344861 - DNA, 100 bp, Homo sapiens
ctcttggctcttgccgttgccctctacttgggctactactgggcatgtgtgcttcagggcaattgaaggaacagactaaaaatcgtgtcctggaaggaaa

SEQ ID NO: 344862 - DNA, 100 bp, Homo sapiens
ctgacctggagatccaggagatcaatgtggcctcatcctgcatgactcgcctgtcccggtctcgtacagcctctctgaccagtgcagcatccgttgatgg

SEQ ID NO: 344863 - DNA, 82 bp, Homo sapiens
ggctttcggcaagaactggattcgtggcgccacaagctcattcactgtgtagcaaaatgatgcttcaacacccaggccaggt

SEQ ID NO: 344864 - DNA, 88 bp, Homo sapiens
ccgcctccgccgctgcctcaggagcggaacaacgtcggcgagcggggtcagcccaaggccaaccccactgtcactctgttcccgccct

SEQ ID NO: 344865 - DNA, 82 bp, Homo sapiens
atctatagttgtgacctggatatcaacgtccagcttaagatcatcaaagctaagccagaagatttatcacattttcatcatc

SEQ ID NO: 344866 - DNA, 100 bp, Homo sapiens
ggcgcgtggaggcggcgcactaccagctcgtctacacctgcaagattttggctatggaaaggggaaatgttctaagcagagcccgtcaggagcccacggg

SEQ ID NO: 344867 - DNA, 80 bp, Homo sapiens
ctccccagccctgcagaacactactgccttcctcatcaacaaagtgccccttcctgttgacaagttggcacctttacctc

SEQ ID NO: 344868 - DNA, 97 bp, Homo sapiens
aagtaacttgtggaatgctgagaaagatcctgcactggatggatcagcggacaacacacagaccggtaatctgggtcaatcagttctgccatcccac

SEQ ID NO: 344869 - DNA, 75 bp, Homo sapiens
gagctccacattcaggggaaccgcctcaccgttctgcccccagaactagggagaccaaattttgaggaaggtgga

SEQ ID NO: 344870 - DNA, 75 bp, Homo sapiens
cttttggactgcggaaacgtttgtcagaggaaagaggcttcagtttaatgctatgaagagaccctgacccgcctg

SEQ ID NO: 344871 - DNA, 49 bp, Homo sapiens
cggcgccatggcagggcttgcaggatgacagtgatgggattccgtggtc

SEQ ID NO: 344872 - DNA, 74 bp, Homo sapiens
tgggcgccggagccgaggcgagcgccgcgcgcaccactgatcctggccaatttggagcaaggcttagcagaaga

SEQ ID NO: 344873 - DNA, 110 bp, Homo sapiens
caagaagcagccagaaccatcacctgcattggttccatccttgactgttactacagaaaaagttgccaagagggtgatcctgttgtcgggcacaccagccatgtcccggc

SEQ ID NO: 344874 - DNA, 100 bp, Homo sapiens
cggagctatcggcgccgcggcaagagccaggttgaaattgtaacacacactggaccccatagacgtctgtggatgggtccacagttccagttcaaaacca

SEQ ID NO: 344875 - DNA, 100 bp, Homo sapiens
cgcgaatatcgtcatcgttagaagggggcagctggcattttatgctatgtgggagcctatgtcttcatcacttatgatgactatgaccacttctttgaag

SEQ ID NO: 344876 - DNA, 75 bp, Homo sapiens
ctcggctcgcagatgacgctagtgcaggtgaaaatggcattacggacatcaggacatctcttactgggagtagtt

SEQ ID NO: 344877 - DNA, 100 bp, Homo sapiens
gcagcattgaacagaaagaagaaaacaagggaggagaagacaagctaaaaatgattcgggaatatcggcaaatggccatcatgcagaagggggatacaaa

SEQ ID NO: 344878 - DNA, 100 bp, Homo sapiens
gatggttttgcatttcagaatcttgtgaagttgatctcctatcaagagtttttggcatttgaatctgttttatgtgctccagattccatgttcatagtgg

SEQ ID NO: 344879 - DNA, 100 bp, Homo sapiens
ggaggcggctataataatagcaaacatcgatggcctactggggataacattcatgcagaacatcagattttgcaagaacgaggctcaaggatgtgaggga

SEQ ID NO: 344880 - DNA, 100 bp, Homo sapiens
gccatcaggctcaacgaggaactcaaagtggatgaggaaagtgctggagaatctggtaaaagcaccattgtgaagcagatgaggatcctgcatgttaatg

SEQ ID NO: 344881 - DNA, 90 bp, Homo sapiens
cgtgcccagatgctcataaggattgtcctctttctacaaaaggagctcgaggccatgagcagatataccagcccagtgaacccagctgtc

SEQ ID NO: 344882 - DNA, 50 bp, Homo sapiens
ccgattaaagactgtgttgcattatcagaaggattgagtcatcgggctcc

SEQ ID NO: 344883 - DNA, 100 bp, Homo sapiens
attccatataaaaacaacgacctaagcatgtttgtgcttctgcccaacgacatcgatggcctggagaagggatctccatccaccaagcgaaggggtcaga

SEQ ID NO: 344884 - DNA, 76 bp, Homo sapiens
ccctcgcgtccggagtccccgtggccagaagagaagctgaatttggacgacagccagtgggaggacatccacgttg

SEQ ID NO: 344885 - DNA, 100 bp, Homo sapiens
gggaaaggcgacctgggggagccgcccccgacacggcccacgggagctgcagtccatggctgaccaggagcaggtgtcaccagccgccatcaagaagacc

SEQ ID NO: 344886 - DNA, 75 bp, Homo sapiens
ccgaggctcgcgggcggcgggcccggcggacaaggcaaaatctcagcaagttcggacctctagtacaataaggcg

SEQ ID NO: 344887 - DNA, 90 bp, Homo sapiens
taattgtccaggagagtggtgtttgggtgtggaagggagacaagaggagcagcagcggcaccgcccctcaccctggagggtcctgtacaa

SEQ ID NO: 344888 - DNA, 50 bp, Homo sapiens
gcggcggagactgcatcaggctctcgaatgctgcttctaaattacttggg

SEQ ID NO: 344889 - DNA, 75 bp, Homo sapiens
gtgatcgctcagctggagaacgcggctaaagttctgatggtaatctgtaagtcagatgctccaacaggggatgtt

SEQ ID NO: 344890 - DNA, 90 bp, Homo sapiens
gtcaggacgtaaatggaaccctggtaacacaagtggcaagacagccgggaacccctaccccatccccttattcagcacatgaaataaaca

SEQ ID NO: 344891 - DNA, 102 bp, Homo sapiens
cgactgcggcgcgctgctggacgaagagctctcctccttcttcctcaactatctcgctgacacgcagatgactttgaagaagccaaggaaattttgacaaag

SEQ ID NO: 344892 - DNA, 101 bp, Homo sapiens
tgcagctgcagtcaacctcttccccaatttcaatgcggtttctgagtcccttcaacatgatcctgggaggaatcgtggtggtgctggtgttcacagggttt

SEQ ID NO: 344893 - DNA, 100 bp, Homo sapiens
tgctcttgaggttcacagatgatacgtttgatccagaacttgcagcaacaatagaacaccttccaccatgaccacctcagcaagttcccacttaaataaa

SEQ ID NO: 344894 - DNA, 89 bp, Homo sapiens
cgacgccccagaggaagctggagagggatgtgtggctgcgatcctcggggaaaccgagtgactgtgaagtgctgaccacactcacccca

SEQ ID NO: 344895 - DNA, 75 bp, Homo sapiens
acagctgatggaaaatgtgtccaggaaggtactaggttttgacaagcttgcatcatgcgtgagtataagctagtc

SEQ ID NO: 344896 - DNA, 82 bp, Homo sapiens
tctcggggcgggcgccgcgggacctctccgggccatggccctgggcgctgcctatggcacagccaagagcggtaccggcatt

SEQ ID NO: 344897 - DNA, 73 bp, Homo sapiens
tggacgcgaggagccgggcgcttagaacagaggcttgcacaggtggaggaaaatgttggggcttttcaggaag

SEQ ID NO: 344898 - DNA, 99 bp, Homo sapiens
cctggggcaacctccaccttgacggttccaggttcacaagaatgtactttaaacatgtactctttgaggacacattctttgacgagtgctattttgaag

SEQ ID NO: 344899 - DNA, 95 bp, Homo sapiens
cccagcagagatcagcaatccttggctcactgaggaggtttggaggaagataccaactagagataaaaataccagaaacatacccatttaatccc

SEQ ID NO: 344900 - DNA, 118 bp, Homo sapiens
tgcctggcatcgagaagaactggagcaccgacctcaacatccaggagatcatgacgacgctgctgaccggggcggtgggctccctgctcctggaatggtacggctggcagagcatctt

SEQ ID NO: 344901 - DNA, 75 bp, Homo sapiens
gtcgcatctgctcaacgacgaggacctgacgcagacctctgtgagtgaaagccttcagagggaagctgctaagaa

SEQ ID NO: 344902 - DNA, 100 bp, Homo sapiens
acgcaaggctggagccgcagcgggagcccccgggattgtggtccatcaggagtctgtgtgtgccacctatggaagtggcttaagcagcacgtgtattgta

SEQ ID NO: 344903 - DNA, 74 bp, Homo sapiens
ctgcctaagaaatcatggcattcacacagcccataaagcaagacagagacgagttgtactgctgtcacaggaaa

SEQ ID NO: 344904 - DNA, 100 bp, Homo sapiens
ctacccgcttctcgtagtcctgggagcacagcagaagtgcctccggtgtggctgtctctgatggtgtcatcaaggtgttcaacgacatgaaggtgcgtaa

SEQ ID NO: 344905 - DNA, 76 bp, Homo sapiens
cgccatcgttgctgccttcttcgtcaaggtgccggagagctggatggaggcagatcgggaattccatttggggcaa

SEQ ID NO: 344906 - DNA, 75 bp, Homo sapiens
tcacactagtatcgcatgtccactatccagaacctccaatctttcgaatgagtccctggaacgccagatgcgtga

SEQ ID NO: 344907 - DNA, 100 bp, Homo sapiens
agaatgttaatgcttgatgggatgccggcagtcagagtcaaaacagagcttttggaatctgaacaaggggtgatttgatgaaggctgctgcaggagagtt

SEQ ID NO: 344908 - DNA, 76 bp, Homo sapiens
accctggtccggcagccgcacaccatcctgcgcgtcgtgtcttgggctagcttgtcactttctgcaaaggtttccc

SEQ ID NO: 344909 - DNA, 97 bp, Homo sapiens
aacagattgagccagaaggaagacaatgctgctcaatgtacttctccagttcctacccttcctcaagtggggaactcaggagaccaagcaggggcaa

SEQ ID NO: 344910 - DNA, 75 bp, Homo sapiens
tgctgctgacgctgctgctgcccggcctcgggtccctgaagaggaaggagaaggaatatgagcatgaaatggagc

SEQ ID NO: 344911 - DNA, 100 bp, Homo sapiens
gggcatgtaaggtgcgcggagggactgcaccttctccatcaggtgcagaagctactgaggaaaaggcacataggaaatgacatcgtcaccatcgtcttcc

SEQ ID NO: 344912 - DNA, 100 bp, Homo sapiens
gagtgggtctacaccgaccagccgcacgccgaccggcgccgggagatcctgggtcatcatcagatttgaaatatttaaagtggatacaaaactatttcag

SEQ ID NO: 344913 - DNA, 82 bp, Homo sapiens
acttcaagaatgaagccgcagaccctcgcggtgttggagagcacaatggctgaacaagtccttcctcaggctttgtatttga

SEQ ID NO: 344914 - DNA, 50 bp, Homo sapiens
ccccctggagatggtgatgacaggagcctacagtaaacccaccctttcag

SEQ ID NO: 344915 - DNA, 100 bp, Homo sapiens
aagagtgagcgagcggacccgcgatgggttttccagccttctccttcaggaggcacagcaggggaccctggtggcctctctgaccccttctaccctccaa

SEQ ID NO: 344916 - DNA, 90 bp, Homo sapiens
atggaagcagctgctgctggccatgagataatcgtgcagtattttctgaatcacaacgtgaagctcttggagcaatttgtctgcgcccac

SEQ ID NO: 344917 - DNA, 82 bp, Homo sapiens
ccagtggaggcattttggggcagaatacagagatatggaatcagacaaatttacatgtattggagaccagaccagaagccct

SEQ ID NO: 344918 - DNA, 100 bp, Homo sapiens
gaaagctttcctaggccaaaaagaggtctgggaccaagtaaaggcttccaaccctgacctaaagttgtgggagattggcaagattattggtggcatgtgg

SEQ ID NO: 344919 - DNA, 98 bp, Homo sapiens
aggtggcagtcgggggtggctgtaattgggtgagctggagcggcagctgcttcaggccaaccccatcctagaggcctttggcaatgccaagacagtga

SEQ ID NO: 344920 - DNA, 98 bp, Homo sapiens
atcatcaagacaagccagcagctcgctcagtacaagagatggttcaggaatgatgggcgtacagcctgcagcttatgttagtgctcctgtcacccacc

SEQ ID NO: 344921 - DNA, 74 bp, Homo sapiens
gtgggagtctccgcgtcccgctcgctgggagagagaattcggttccctcaaaattataaaggcaggaaagctca

SEQ ID NO: 344922 - DNA, 75 bp, Homo sapiens
gactgttttaagaaagtgctacgctatgaaggcttctttggactgtatagagattccctaaaaactttggcagat

SEQ ID NO: 344923 - DNA, 50 bp, Homo sapiens
agaaacagatcaagcactttgatatttgaatggtggtacttccataagca

SEQ ID NO: 344924 - DNA, 100 bp, Homo sapiens
ctgaaattgcagaaaaatttgttttcttcattggcagtaaaaatgggtatcctgtggagcacccagacaaattcctgaagtttggcatgacaccttccaa

SEQ ID NO: 344925 - DNA, 89 bp, Homo sapiens
tgacatgggtactatgcaggaaagaattaccactaccaagaagggatctatcacctctgtacagtctcttcaagaaaatgaggaggagg

SEQ ID NO: 344926 - DNA, 50 bp, Homo sapiens
cgttggtgctcgtgacctctttatggtgggagtgtaagataaccttccag

SEQ ID NO: 344927 - DNA, 101 bp, Homo sapiens
gttaatgctggcaaatactccacaactttcttcatggtgacgtttgcagccctttacagcactcacaaaggatcatcatgcctagggttcataacataaaa

SEQ ID NO: 344928 - DNA, 75 bp, Homo sapiens
cctgtgatgttaaattcaaaaactacctcatccccaagggcccactggaaaatgacttggtagttcatgtggcac

SEQ ID NO: 344929 - DNA, 101 bp, Homo sapiens
ggaggtagccgcagcgccagcaccagggcagctgcaatgactctccgcacggtattattgtcattgcaagcactattggcagctgcagagccagatgatcc

SEQ ID NO: 344930 - DNA, 82 bp, Homo sapiens
gggcgctgccaaccgtgggcgagctctgggtgtgcgggcggcctggcgcggcgctccgggtctcattctgttgcccaggctg

SEQ ID NO: 344931 - DNA, 74 bp, Homo sapiens
tgtggaggtagccgcagcgccagcaccaggacagagcgggatgccaccagcttgtccaaagggaagttccagga

SEQ ID NO: 344932 - DNA, 115 bp, Homo sapiens
cctccagctggatccttccttaggactgatggagaagatcaaagagttgctgcctgactggacttgccggagcagccttacttgcagcctccactcagcatcttggtgattgagc

SEQ ID NO: 344933 - DNA, 83 bp, Homo sapiens
ggcgatggtcttcctgctggggctcatgtttgagcgtgcttctgttcttcaaggttgaaaactaagcatggggaagagctgca

SEQ ID NO: 344934 - DNA, 82 bp, Homo sapiens
caaactttgcaaggaattcggtccagaggattacggcgaagaggttcatgggcgggggtggtgagagctgcagcctcatcgc

SEQ ID NO: 344935 - DNA, 114 bp, Homo sapiens
caacagtgccgaggatttctcggactgcaattacaacagcttcaatccgtcgtcatagatggagaagagaagaatcattgaaaaatggctctgctacaggtggtggaaataaag

SEQ ID NO: 344936 - DNA, 99 bp, Homo sapiens
tcatgttcctgatcctgtcatttcaatagcaatgaagccttctaacaaggttgtttttgccctgggtggaatatttaatgctttttggctgatggaatt

SEQ ID NO: 344937 - DNA, 75 bp, Homo sapiens
gaatggcttgtgaaatcatgcctctgcaaaggaacttagtgatttggcccgtgaccctccagcacaatgttctgc

SEQ ID NO: 344938 - DNA, 100 bp, Homo sapiens
cgccgctgggcctgcaggtctctgtcgagcagcggacgccggtctctgttccgcaggatgctggagaagaagcaggcgctccctccattccagccacaga

SEQ ID NO: 344939 - DNA, 100 bp, Homo sapiens
aaccgacaaccttcccagaaagtccaagctcgtggaactgtggaaggtgcatcagtgaagaaatggaccaatgtgtataatcatggaatctccttgctaa

SEQ ID NO: 344940 - DNA, 126 bp, Homo sapiens
gacaacggagtgagagttcaaagattctttgtagcagacactgcaaatgaagctctcgaggctgctaagagactaagtttctgagtcccttcaacatgatcctgggaggaatcgtggtggtgctgg

SEQ ID NO: 344941 - DNA, 83 bp, Homo sapiens
cttggactgagtcctgcaggacacagactccatcaagaatgctggaggaagggtgtttgtccactgccaggcaggcatttccc

SEQ ID NO: 344942 - DNA, 82 bp, Homo sapiens
aacgtggagatcaactcctctctgttaatggagtgcggacaaggcaaaatctcagcaagttcggacctctagtacaataagg

SEQ ID NO: 344943 - DNA, 83 bp, Homo sapiens
gaagatgaagaaggaaaaagcggaagaaaacatgaagatggcggtggagataagagttgtggttcaccttgaaactattctag

SEQ ID NO: 344944 - DNA, 76 bp, Homo sapiens
ctggagcacatctttagagccatcctgatcaagaaaaccgacaggtatcattaatgggattggaaattttaagtgc

SEQ ID NO: 344945 - DNA, 75 bp, Homo sapiens
aagaactgccgtcttctttgcctgcactaatgagtgcctggaagagctgggatgtctggttgagtcctatggcat

SEQ ID NO: 344946 - DNA, 75 bp, Homo sapiens
ctgaagagggaagacacgcggaaacagatactagagtaaaaggatggtttcttctggacaattatatacccacat

SEQ ID NO: 344947 - DNA, 80 bp, Homo sapiens
cgacggcaccctcgtctccttcaccgccgacttcaagaagtaatctcaggggcgatataatcaatgaggtggtcctaaag

SEQ ID NO: 344948 - DNA, 100 bp, Homo sapiens
gatgcgatgcgggggctgctgcaatgacgagggcctggagtgtgtgcccactgaggagtccaacatcaccatgcaggatgagttccacccgttcatcgag

SEQ ID NO: 344949 - DNA, 75 bp, Homo sapiens
gtggcttatgagtacctttgtcatttggaagaagcgaagagggtacaggcatccttcacctgctattgttgcaag

SEQ ID NO: 344950 - DNA, 100 bp, Homo sapiens
tttatccttcgaaggaagcctgtggaggctgggctgggatcagatgggaagcggaagctcatcatgaccagaaactgtttccctatggagagcacttgga

SEQ ID NO: 344951 - DNA, 97 bp, Homo sapiens
agattcgcagtggtcgcttcttctccttggttttggaggtgccctgggttaccttttgggtgctatagactgggcccatctggagctgggaagactg

SEQ ID NO: 344952 - DNA, 100 bp, Homo sapiens
ggtacctgggcaacctctggaagaaccacaggccctggcctgccttgggccggggatttaacacaggacctgggatccagttggaggacggcggtgatgg

SEQ ID NO: 344953 - DNA, 116 bp, Homo sapiens
gggaagtgcctcaagactttgccagctcactcggatccagtctcggccgtactaatttggtcgaagcagataaccaagcggagtggaccgacgttcagaagaagattatcccgtgg

SEQ ID NO: 344954 - DNA, 100 bp, Homo sapiens
gggaccaggaccgggccccactttccagtgcgtataacccgtatatagagataattgaacaacccaggcagaggggaatgcgttttagatacaaatgtga

SEQ ID NO: 344955 - DNA, 100 bp, Homo sapiens
agcctgtcctccatgttttataagtattgacattacacagtgttaacaatgcatccacagaggcacctatggggacctgctggggtgatatctcagaaaa

SEQ ID NO: 344956 - DNA, 90 bp, Homo sapiens
gggacttgggcccagtttatggcttccagtggaggcattttggggcagaatacagagatatggaatcagagctcccagctcctccagcag

SEQ ID NO: 344957 - DNA, 100 bp, Homo sapiens
agcaaatgtgtccctgaaaacttcagctgccgcgtttggcaccagtaaatggggagcaggagaaccgagtgcagaagggaaatggatattttcaagtgcc

SEQ ID NO: 344958 - DNA, 100 bp, Homo sapiens
ttggacaggaggtcatacagctgatactacccacccccggttacgcctgtcacataaaggatctcctcttcagcgtgtgtgccctcaacgtcctgtccac

SEQ ID NO: 344959 - DNA, 82 bp, Homo sapiens
tgtgttgtgactgctttggacgtgggagtcacctgaaagccaggaaatggaactgtggctgcaccatctgtcttcatcttcc

SEQ ID NO: 344960 - DNA, 75 bp, Homo sapiens
gtgttggcctttcctgttggggttgaccccaggagcaagcacaagttcaaaatccacacttacggaagccccacc

SEQ ID NO: 344961 - DNA, 100 bp, Homo sapiens
cctactgaatggattcaagacttcaaaacccattttcttggagaaaatatggagaagtcttgtgcaagcaaggaagaagtcaaagaagtcagtattgaag

SEQ ID NO: 344962 - DNA, 88 bp, Homo sapiens
atcattccgtcaccttcagccacatcagaacttgacaataaaacccacagtgagaatttgaaacagattatgtttgagaccttcaaca

SEQ ID NO: 344963 - DNA, 75 bp, Homo sapiens
ccagaagaaaccttccctaacactgaaaccaatggtgaatttggagtgtgtcatgaacaatgtcacctgtactcg

SEQ ID NO: 344964 - DNA, 75 bp, Homo sapiens
ggcgctgctgctcgggctgctcttggagggccaggagctgactatccgccagatctccctgctgggcttccgaga

SEQ ID NO: 344965 - DNA, 100 bp, Homo sapiens
agcgccggcctcctcagtgcgaagaagctgcagccgcacctggccaagggactatggtgcagccctgcggggcctgtgcgaagacgccctggaaggcctg

SEQ ID NO: 344966 - DNA, 82 bp, Homo sapiens
ctgtgcccagccactggatggtggcgttgctgctgctgctctcaggaacaagatcactcaaggtgaaggataatctactaat

SEQ ID NO: 344967 - DNA, 100 bp, Homo sapiens
tacaaatacccctttgaattaattatggctgtaaaatgtcggttccaggaccttaccaggcggccactgggccttcctcagcaccatccgcacctccatc

SEQ ID NO: 344968 - DNA, 74 bp, Homo sapiens
gtgagaccctcacttcatccgtggaaatcctgactgctcgtcagaagaaagcagaagaactaaagagactcact

SEQ ID NO: 344969 - DNA, 50 bp, Homo sapiens
cgaaactttcaccgcgagcggagcctgccttctggtacaagatgcctgtg

SEQ ID NO: 344970 - DNA, 74 bp, Homo sapiens
gtgtggaatcccctttggggcagaagactccaaggctaacagagaccctgatgctggaattgatgaagctcaag

SEQ ID NO: 344971 - DNA, 82 bp, Homo sapiens
ccaaaaacagtggataattttgtggccttagctacaggagagatgttcgggcagcggcgcagcgcgcaggcgttggagctgg

SEQ ID NO: 344972 - DNA, 98 bp, Homo sapiens
catggcatttcagtcactggtttgcagagtccagttttcagcattgcaaataacaatctcagctactgggatgcccccctgggaagttcttatatgtg

SEQ ID NO: 344973 - DNA, 82 bp, Homo sapiens
ctgactgctgctcacactgccgtgagaacctgcttatatccaggaccaaggagggccaaaccagtgctcctgccacctctct

SEQ ID NO: 344974 - DNA, 85 bp, Homo sapiens
ccagccttgtttttcagcagctttgaggaaaagtataggtagttggcaaaaaaggagaaagccactaaggtacaaaagacactgg

SEQ ID NO: 344975 - DNA, 100 bp, Homo sapiens
tactttggcatcaccaacagtcagctcaagccagacacatgaagtttatctcgacaatgctagttgcagtctgtgtgaccctgaccaagttattttaatg

SEQ ID NO: 344976 - DNA, 50 bp, Homo sapiens
acatggaacagggactcactgggggatccaatgatagctggacaagtcag

SEQ ID NO: 344977 - DNA, 51 bp, Homo sapiens
attctgtacttgaaggctacaatgaaatttaaaagcctgttgattcaagaa

SEQ ID NO: 344978 - DNA, 96 bp, Homo sapiens
tcggccaagaaagacaaagacccagtgaacaaatccgggggcaaggccaaaaagaagacccatccaaatgtggataaaaaacttttcactgcagag

SEQ ID NO: 344979 - DNA, 74 bp, Homo sapiens
ctgctcttctgcctcttgatctccgccaccgtcttcaggccagactattgggaagaagttacctgcaactacag

SEQ ID NO: 344980 - DNA, 80 bp, Homo sapiens
gcgccggctggtggagctggcccgagaggagctggcgcgagacaagacaatgcagatcttcgtgaagactctgactggta

SEQ ID NO: 344981 - DNA, 75 bp, Homo sapiens
ggacggtgtcctaatggaactgcaagactgtgcccttcccctcctgaaaggcttggactatgtcagccatgaaga

SEQ ID NO: 344982 - DNA, 100 bp, Homo sapiens
gatggataccgtatcgacgtggggcctccggtatgttgccgctgcgttgaggaagaagacgttactcgtgaaagtcgttttaattttagcggttatggga

SEQ ID NO: 344983 - DNA, 100 bp, Homo sapiens
cttcacgcttcgtactcattgagcgccgattttatgccaggcaccgtgctgggaaacgaggtatcagttacttcagcttcgacctgcgcagagagcatca

SEQ ID NO: 344984 - DNA, 100 bp, Homo sapiens
ctgctacttcaagtaccaggtcctggcgatcagcaccaagaacccactgcaggtcgcagaacttgaaaagcgcctgacagagctggagacagctgtacgt

SEQ ID NO: 344985 - DNA, 100 bp, Homo sapiens
gcgaaggcagtaccgtttcctcagcggcggtaagactttgaccccgacgcaggcttcagtgattgccgcggatcagaagcctgagcactttggctcgaga

SEQ ID NO: 344986 - DNA, 98 bp, Homo sapiens
cagcggcagcgatcaagcaggcagcgggctttgccagcaaaaccgaaacagtgtttgaaagatgtatggtgatcttgaaacctccagacacaagaaaa

SEQ ID NO: 344987 - DNA, 82 bp, Homo sapiens
cttggtgctgtggctgatgcatttcatggctatcatctacacagtgcttgtgatttcacgtatttttgctgaactcgtaaaa

SEQ ID NO: 344988 - DNA, 100 bp, Homo sapiens
acatcggatcgatgctacgctaacctatcgggttctctctccgcgcgttcaggtccggaccctatttgtcagtggccttcctctggatatcaaacctcgg

SEQ ID NO: 344989 - DNA, 83 bp, Homo sapiens
atgagagtttggcttggattatctcaacattctgttggtgatgtacagttcattgattatgaatattctggatacaactacct

SEQ ID NO: 344990 - DNA, 100 bp, Homo sapiens
gggagatggtgacaagctcaaggcctgcgagtacatagtggaatgtcatgggatcacccttcttccccagttcttgggcatgtaccggcttaatgttgat

SEQ ID NO: 344991 - DNA, 100 bp, Homo sapiens
cacggcgccagctcctcccgacgccgaggcagaggtggaggagacactgaagcgactgcagagccagaagggagtgcagggaatcatcgtcgtgaacaca

SEQ ID NO: 344992 - DNA, 99 bp, Homo sapiens
cccaaccctccagtcgtccactccgctttgcttgtgatgttctgcaccctgaacacccacaaagtggacatggacaagctcctggggggccagatcggg

SEQ ID NO: 344993 - DNA, 50 bp, Homo sapiens
catcgcctttagcctcaatgacgcctcagcacttttcaggattagaagag

SEQ ID NO: 344994 - DNA, 75 bp, Homo sapiens
cgggtggtcaccgagaagtccccgaccgactggtgattgaattactcagatatgaagatcatcatctaggttttg

SEQ ID NO: 344995 - DNA, 95 bp, Homo sapiens
tcaccgtgcaccttcgcaagaagcaccagttcaagtggccctcagggcatccccgttttcgacccggatgcagagtctacagcctgacccagctg

SEQ ID NO: 344996 - DNA, 80 bp, Homo sapiens
ggatgccgaagtcctggaggtgttccacccgacgcatgagtggcaggcccttcagccagctggtgctcaagaccgaatcg

SEQ ID NO: 344997 - DNA, 90 bp, Homo sapiens
gggatagccatgggcaagctgcaccttgcatgagggacaaagctacacaggctctgcgaacatcaatagatgcttatgacaactttgaca

SEQ ID NO: 344998 - DNA, 75 bp, Homo sapiens
ggaggctgaggaggcggcggcggagatctgggccataaaattttgagtagaaaaatccagaaatttgaaaatcag

SEQ ID NO: 344999 - DNA, 50 bp, Homo sapiens
tccattgctatcagcccattactcaggatgaccgagtgggagacagcagc

SEQ ID NO: 345000 - DNA, 96 bp, Homo sapiens
ggcgaagggaatcgcaaggctcttccctgaccattttctactgtccctgcgcgagcctttcagcaatggattggtgactgtgatggttccccagct

SEQ ID NO: 345001 - DNA, 137 bp, Homo sapiens
cgcgggatctcgctgttcctcgctctgctcctggggagcccggcggcagcgctggagcgaggcactgattctggcagcgaggtgctccctgactccttcccgtcagcgccagcagagccgctgccctacttcctgca

SEQ ID NO: 345002 - DNA, 76 bp, Homo sapiens
gaccgctcctccaactaaccaatctgcacattcattgcaaccttcttctggtgatgaaatatctactaatgtatct

SEQ ID NO: 345003 - DNA, 80 bp, Homo sapiens
gatcacccacaaagggggccagaggagcgacggaaacatattgaaatggattccaggcgtgtgcctcgagacaagctggc

SEQ ID NO: 345004 - DNA, 100 bp, Homo sapiens
catatgcaaaagcagctggagcatgagggaagccaacgtggcctgccttgaccttgggtttcaacaaatcctcactatggatgggctcattgaggacatt

SEQ ID NO: 345005 - DNA, 90 bp, Homo sapiens
tggtctaaggcgccagactcaagaagaaaaactgctgtccagtacatagaaagcagtgattcagaggaaattgaaacaagtgaattgccg

SEQ ID NO: 345006 - DNA, 82 bp, Homo sapiens
tcggctgcgctcgctcgggtggcgacttcctccccgcgccccctccccctcgccatgaaggaatactcccccagttgcaaga

SEQ ID NO: 345007 - DNA, 80 bp, Homo sapiens
ggccattgtacaacttatcaacacaaggcagccacaggccaaaatcattgtattgggagtgcatccgccccaaccctttt

SEQ ID NO: 345008 - DNA, 100 bp, Homo sapiens
tcaacctagagctgccaagaagcattcttcatctaaagataagatggctttggaagattcagaacagaagcacaatcttttacattcaatctttatggat

SEQ ID NO: 345009 - DNA, 82 bp, Homo sapiens
tgatgtctgtggggccgccggcggcccggcttcagctggagcagatccgcagggacatccgagacttccggtctagcgcggg

SEQ ID NO: 345010 - DNA, 97 bp, Homo sapiens
agatggagaaacaagtgaccaacagttgaatcaaagtatggacacagttgaaaacaatcctcgaacaggaaatcttggtgcactaattaaggtcttc

SEQ ID NO: 345011 - DNA, 76 bp, Homo sapiens
gcagctcaggaggctgttaaactgaatagttctgtcccaagaagaactctgaagatgattcagccttctgcatctg

SEQ ID NO: 345012 - DNA, 75 bp, Homo sapiens
gcagctgttgaaggcgtgatgagagtcattgggggagagcctggggatgtacaggagatgcctgctccagaatct

SEQ ID NO: 345013 - DNA, 75 bp, Homo sapiens
cgttttgccagcgataatacgcctcagccttatgtttgatcatcggccaaggtcctggcgagaactgcctctgcg

SEQ ID NO: 345014 - DNA, 75 bp, Homo sapiens
caatcctgctatccaggctgccattgacctcacagcgggggctgcaggttcattttccagacactgaaagagcag

SEQ ID NO: 345015 - DNA, 101 bp, Homo sapiens
accaacaacttcctgcgcttccagcttaccatgcggctgcgctccataaaggcagacgacaaggacttcctcccagctgacatccaggctcagtttgccat

SEQ ID NO: 345016 - DNA, 51 bp, Homo sapiens
tttttggcctaccctccaaagaaaaggtgacttaagagattaaaattaatt

SEQ ID NO: 345017 - DNA, 100 bp, Homo sapiens
tggggctgctcccatcattgatgtggtgcgatcgacacttctgagaaattcatcaggctgtgaagcgcgccgtgatgaatatcgaacagagtttaccaca

SEQ ID NO: 345018 - DNA, 98 bp, Homo sapiens
acgaggcggcggccgcggggaggaggatgggggctaaccagttagtggtgctcaacgtgtacgacatggtagaattagaagatcatgtgatgttggag

SEQ ID NO: 345019 - DNA, 50 bp, Homo sapiens
gatcatcctggggacctggtacatgaaatatggctacacacacctttctg

SEQ ID NO: 345020 - DNA, 122 bp, Homo sapiens
aggacttcgactgctgttgtctctccctgcagccttgccacgatcctgttgtcacaggtctgcggggtttccgagaggctcgccgggatttctggcggggggctgagagcctggaggctgcc

SEQ ID NO: 345021 - DNA, 95 bp, Homo sapiens
atctctctcatctcgctcggctgcgggaaatcgggctgaagcgactgagtccgcgatggagtcggcgtggcacaagcctaatggaagatgatgaa

SEQ ID NO: 345022 - DNA, 75 bp, Homo sapiens
tgcagcatccttgatgataaaccagtaaatattttatttggagagaagcaagcatctttgcctctttggagtagg

SEQ ID NO: 345023 - DNA, 100 bp, Homo sapiens
agctctactccaggccccgtccgcccgggggcgccgcccaccgcgcctcgctcgcgccgtgccgtccctgcagtgacaccgaggtgctcctagccgtctg

SEQ ID NO: 345024 - DNA, 137 bp, Homo sapiens
gcgcacgtgggaaccgccgcagctccacactccaggtacttcttccaaggacctaggtctctcgcccatcggaaagcattagcagcaatccttggagcagtgccattcctggggacatactgggcagcagtacctgc

SEQ ID NO: 345025 - DNA, 50 bp, Homo sapiens
agaatgggtaccgatccctctgtgaacagcttctaaccgaaaatcttcag

SEQ ID NO: 345026 - DNA, 98 bp, Homo sapiens
ctatttcatactcctacgtgaacatccttttaccacagcctcagccacatgccggtggtggtgtgcacattgagccccggtatagacagttcccccag

SEQ ID NO: 345027 - DNA, 74 bp, Homo sapiens
agatcattgtggccaccccaggcctcagcagtgaccctattgctcttgtgacaaccatgagtggaaaaaactaa

SEQ ID NO: 345028 - DNA, 100 bp, Homo sapiens
caactgaagaaaatgtttgaagcaacaagattgcttgcaacaattgttatgcttctggtgagagagtgtaaggaggtcctgaagggcggcctgctgatga

SEQ ID NO: 345029 - DNA, 75 bp, Homo sapiens
tcagatagcacttgccttccccatattattcaggaaggtgcttttgcacttgtgtttaaaagtgttcattttccc

SEQ ID NO: 345030 - DNA, 100 bp, Homo sapiens
ggaacactacataagcgaggctgtggaagatgctcccagctacagagggtaccgggatgcctgcaccattactgttttaacttctagtcatggcgaatga

SEQ ID NO: 345031 - DNA, 74 bp, Homo sapiens
gatcatcacactacgatgaactgcttgctgcagaggccagcaattaccagctctggctgggtcgccacaacttg

SEQ ID NO: 345032 - DNA, 98 bp, Homo sapiens
gaggcacccgatatatgttctctaggccttttagaaaacatggaaaaccagtagattcccagacatcgcgaagtgaatctgaaattgtgccaaaagtt

SEQ ID NO: 345033 - DNA, 100 bp, Homo sapiens
aaacacaaacgcgttctgatcttcccttcctacatgattttgggaaccagtaggacattgacatacatccgagaacattctgtggtggatccagtggaaa

SEQ ID NO: 345034 - DNA, 74 bp, Homo sapiens
caaagatggacttctctgtacagccaaagggaaaggacagtcccaaaccagagtgaatattaatgctgccttgg

SEQ ID NO: 345035 - DNA, 98 bp, Homo sapiens
ggatcatgaactagtgacctggaaagataatatcgtctactgcattatttttggctgcaaaagtggaagaacaggctcgaaaacttgaacatgttatc

SEQ ID NO: 345036 - DNA, 82 bp, Homo sapiens
gcaggagaagctggagctcacggagaagaaggcctccgacgcatttgtctggccttcccttttactgctggctgggaaggag

SEQ ID NO: 345037 - DNA, 100 bp, Homo sapiens
cagcagatgaatggacaccttgaagcagaggagcagcaggaccaggatctcccagccatccagccccggctagtggcggtcagcaaaaccaaacctgcag

SEQ ID NO: 345038 - DNA, 80 bp, Homo sapiens
caaaaaaccaaatctcacatcttccagcagaaatcggggctgcttgctctcggtgactacatgaatgtccagtgccatgc

SEQ ID NO: 345039 - DNA, 88 bp, Homo sapiens
ccagtgcttcgtgtggagcggcacggctgaggcccgcaagcgcaagggcgtctctggccgagcctctttttgtggaaaacgacagcag

SEQ ID NO: 345040 - DNA, 100 bp, Homo sapiens
gtgtattaaactgggttttccttacttatactgtcatcagggagactgtgaacatgtcattgtcattactgacataagaggccccagacctaaagcagga

SEQ ID NO: 345041 - DNA, 82 bp, Homo sapiens
acgccaaccgctccgctgcgcgcaggctgggctgcaggctctcggctgcagcgctggctacctggcctatcgaaactttatg

SEQ ID NO: 345042 - DNA, 105 bp, Homo sapiens
cttaaggaaagagtgggaaagtgagggaatacaaacaagtgatcctaatgctgtggtcatgggattggcaccagaacattttcattatcaaattctgaatcaagc

SEQ ID NO: 345043 - DNA, 75 bp, Homo sapiens
ccagagcgccggcaagagctcggtgctggagaacttcgtgggccgatatcagttttagagaatgtggcgtggaga

SEQ ID NO: 345044 - DNA, 73 bp, Homo sapiens
cggcctgggctttgcctctgaacagcatctgacacagttgacatgaagacaatggagactgcagagaaactgg

SEQ ID NO: 345045 - DNA, 75 bp, Homo sapiens
attaacaccttaataaccagcggagctgacacagccaattactatgcgagtcagaagaaaacatttgaaattaat

SEQ ID NO: 345046 - DNA, 154 bp, Homo sapiens
gcccacccagatgccagtagtgcccgccccacccgcatgctctttgtcactccccggcggcagcacgaaagtaccatgcatgggcatccagtggcgagacctcctgagtcccgtcaacgtggacgacgacttctgcttcgggcaggtgctgggg

SEQ ID NO: 345047 - DNA, 83 bp, Homo sapiens
agggtctctccagaaaatcttgtggacaaatccaggggaagacttcaccacaagcaggaatgcagactcagcctcagatagca

SEQ ID NO: 345048 - DNA, 75 bp, Homo sapiens
cagaaggtcgcgaaggcagtaccgtttcctcagcggcggccctaccattgaccatgccctgctggacatgccctt

SEQ ID NO: 345049 - DNA, 83 bp, Homo sapiens
ctattgattcatcagattttgcattggatattcgcatgcctggggttacacctaaacaggtgttggagagcacaatggctgaa

SEQ ID NO: 345050 - DNA, 75 bp, Homo sapiens
cagcctcctgagtagcaattacagatcatggaagggaagtggttgctgtgtatgttactggtgcttggaactgct

SEQ ID NO: 345051 - DNA, 98 bp, Homo sapiens
cagaacccacaaaaactcctggcagaacaagtagcactctctcagaagatcagatgagccgtcttgccaaggtgtgacgaagatccagtctctctaca

SEQ ID NO: 345052 - DNA, 83 bp, Homo sapiens
gggatttctacgacccggagcacccgacccctgagaagatgaagatcctgccaaaggtgatcagagtcgatcagttgaccttg

SEQ ID NO: 345053 - DNA, 90 bp, Homo sapiens
ccctcaacttggctactccctgccttgtgtggagctggtgatgctgctggagtggtggtcgggcacggaatgcaccatcttcacggaccc

SEQ ID NO: 345054 - DNA, 100 bp, Homo sapiens
agacagacgtcccccaaaacccctcgcctggctcggacccacggagccggcagcccagcactccgattatgatgcatcattatcacagaagaaattcgtg

SEQ ID NO: 345055 - DNA, 75 bp, Homo sapiens
ttcaacccgtgtacgtgcctgtgcctaaaagaattgtaagtgctcagagcttggctgaagatgatgtggaatgag

SEQ ID NO: 345056 - DNA, 51 bp, Homo sapiens
tgaagaccaatattcaacaggcattagggcctagtcaaaattttgaagctg

SEQ ID NO: 345057 - DNA, 82 bp, Homo sapiens
ctgtctgcctgtgtccctgaccatggctccctgcagtaccctttaacggtgatgtacagttcattgattatgaatattctgg

SEQ ID NO: 345058 - DNA, 100 bp, Homo sapiens
atttgaaagaagccatattttcaggcagcaattcccccaggcaagcaaccgtcttcactagcttctccaaatcctcccatggcaaagggctctgaacagg

SEQ ID NO: 345059 - DNA, 50 bp, Homo sapiens
gcctggtgctaaaggtgccaatggtgctcctggcattgctggtgctcctg

SEQ ID NO: 345060 - DNA, 73 bp, Homo sapiens
tttgaaaataaggaagacttgtcgggaacacagggaacagtgttgataaagactgctgaagaattgatgaatt

SEQ ID NO: 345061 - DNA, 100 bp, Homo sapiens
ttcgagtttgacgacggccaatgcgcccccagatcctaagtgtgaacgtgaagtccccagccctgctgctgagccagttgctgccctacatggagaacag

SEQ ID NO: 345062 - DNA, 87 bp, Homo sapiens
aacgctctcatccggaggcaggaccagctgcagctgctgtcacagagatgcggcggaccctgacgcctgccagctccccagtgtcct

SEQ ID NO: 345063 - DNA, 78 bp, Homo sapiens
gccaaccagcctgtcgtgatcgacaacgttaacacagaaatctgcctcctgggccatgccgcttctaaggcctgtttc

SEQ ID NO: 345064 - DNA, 113 bp, Homo sapiens
ctgggcgcggattcgccgaggcaccgaggcactcagaggaggatgatcggctgaatgtaacagaggaactaacgtccaacgacaagacgaggattctcaacgtccagtccagg

SEQ ID NO: 345065 - DNA, 100 bp, Homo sapiens
ataatggatgaaaggaaccgacagactctcctggcgtccccccgagtgcaaacgctcatcacctgtttagaggattcagctttgtggcctcaagcctgat

SEQ ID NO: 345066 - DNA, 82 bp, Homo sapiens
agagtgagtcttcaaatgcagcagaaggcaatgaacagaggcatgaagatgaggaactttatattgctgttggaatatctgg

SEQ ID NO: 345067 - DNA, 100 bp, Homo sapiens
agaagctgctaaaccgggatatccaggacctgtagatgaatacatgttgccatttgaggaggaaattggccagcatccatctcttgaagacatgcaggaa

SEQ ID NO: 345068 - DNA, 80 bp, Homo sapiens
gactcaacgtgagacgcaccgcccggactcaccatgagattcagttgtggaaattctttttgaacaagataatgaagagc

SEQ ID NO: 345069 - DNA, 90 bp, Homo sapiens
ctcacctgtgcgggatggaacaaaagcgtactgtaagaactctgtggacggcctctggtactgcttcgatgacagcgatgtgcagcagct

SEQ ID NO: 345070 - DNA, 74 bp, Homo sapiens
cagtcatctgggggcccactgcagtgtttctgaaagatctatccagcactccgatggccagcaacaacaccgcc

SEQ ID NO: 345071 - DNA, 88 bp, Homo sapiens
tcccctctacatagacgacaccctgacggaaaatttgagaatggtgttgcagaaggaatggtggatccaagtctcaatcccatttcag

SEQ ID NO: 345072 - DNA, 75 bp, Homo sapiens
tggaatctctgcacgggccttgaatcatttgctgtttcaaatagagaactgtgcgatgatgagaaagagttcata

SEQ ID NO: 345073 - DNA, 90 bp, Homo sapiens
tgcatcgggtcccttcgctgggtggatccaaccgaagagaaaggggtgctccaccactccctcccatcccgaggtgatctttgcctgctc

SEQ ID NO: 345074 - DNA, 100 bp, Homo sapiens
tggctggacagctagctgcttatggctataaaattacagagccctaatttgtttagaactgtaatatgcacagttaaaacaacttgtcctctcaggacct

SEQ ID NO: 345075 - DNA, 100 bp, Homo sapiens
tcagtggaaaggagagctaccatcactaaggcccgacgccgctctgacgccactgaggtgcgccacgacgtgacgtcaacgttcgcgccggaagtggaag

SEQ ID NO: 345076 - DNA, 100 bp, Homo sapiens
gaggaaacagtgaccctgagcgaagccaagccgggcggcagataaaagttagagccgcatgtcctggaggtgactgcaggttgttggatttggagtatcg

SEQ ID NO: 345077 - DNA, 76 bp, Homo sapiens
tgatgaactatagcaatgagaatggtgacaaaatatctgaacagaagaggacttaggagagatctgaactccagct

SEQ ID NO: 345078 - DNA, 75 bp, Homo sapiens
gtggaataggtgtatcaagtaatggtgcaaagcctgaatacaagttgtgcaaagtgaggaagattactgtgggag

SEQ ID NO: 345079 - DNA, 95 bp, Homo sapiens
acccagcttatgctagctggaggacagataactgggaacaagactgtggtcaacctgttatttgctgcctatagtggcgatgtctcagctcttcg

SEQ ID NO: 345080 - DNA, 107 bp, Homo sapiens
cgcaagaacagaatgaagaaagtcagggggactgcaaaggccaatgttggtgctggcaaaaagatgatgaacaacatgggtggtgatgaggatgtagatttaccaga

SEQ ID NO: 345081 - DNA, 75 bp, Homo sapiens
tgccattccagcactggactcatggaggctgagcatttattcaggatcacccagtatactccataccagcctgag

SEQ ID NO: 345082 - DNA, 83 bp, Homo sapiens
cgcgggccctttgcagctgcgattttcgccctacgttttcaacggagggccatgttttatggatgagtatgagaagactgagg

SEQ ID NO: 345083 - DNA, 75 bp, Homo sapiens
ggaactggaacagaggaacattttgaaacgttggattatctcaagatgcccaggatcaaatgagaaagatgcttt

SEQ ID NO: 345084 - DNA, 100 bp, Homo sapiens
cacaaagcagcccaaccaaagggatccaatgagttccacctacatagaggaattgggtaaaagagaagtcacaattcctccaaaatatagggaactattg

SEQ ID NO: 345085 - DNA, 50 bp, Homo sapiens
cgacaagcacatcaccactctgcaggtaatgtggaccgaactaccatgta

SEQ ID NO: 345086 - DNA, 102 bp, Homo sapiens
gtcctggctcttgccctcatcctggttctggaatcctcagttcaaggaactgtggctgcaccatctgtcttcatcttcccgccatctgatgagcagttgaaa

SEQ ID NO: 345087 - DNA, 83 bp, Homo sapiens
taaggccattggacacagaatccgagtggctgcaataggatctgtggctttggacacagcaaggtcacatggagagaaacaat

SEQ ID NO: 345088 - DNA, 98 bp, Homo sapiens
ctgggacccccaggaggtgaccctgcaggagagcctgacaaggagctgaatcctaagaagaagatttgggagcagatccagcctgatcttcacactaa

SEQ ID NO: 345089 - DNA, 75 bp, Homo sapiens
cgctggtgcccggccccggactgcggaatccacacaggcgacagaccctacaagtgcccacatcctggctgcgag

SEQ ID NO: 345090 - DNA, 75 bp, Homo sapiens
ctgggtcctgcatttggccaccaagacctgggaacaagtcaagctcgagtgcagtagcgagatctcagctcacct

SEQ ID NO: 345091 - DNA, 100 bp, Homo sapiens
ttctcgttcaagttaatccaggtgagactttcacaataagagcagaggatggaacacttcagtgcattcaaggtgactattatatggttaaaaagatttt

SEQ ID NO: 345092 - DNA, 100 bp, Homo sapiens
tgatgatatgttatcaaaagtagagaaaatgaaaggagagcaagaatctcataggcatagaatgtcaagctaaccaggcgtccgctacttcagaagagtg

SEQ ID NO: 345093 - DNA, 74 bp, Homo sapiens
ccgacttcgatgatcgtgtgtcggatgaggagaagtgctacagttgaaactccagcagcgccggacccgggaag

SEQ ID NO: 345094 - DNA, 75 bp, Homo sapiens
ggcatcccaaggctttgggttttcctctccaaacaaaacaggtggctccagccccgggcctggctggggttccca

SEQ ID NO: 345095 - DNA, 75 bp, Homo sapiens
atagtgatcctcgatttctcaatctctggcttaaattaggtaaaccagacttgaatacaacattgccaattagac

SEQ ID NO: 345096 - DNA, 73 bp, Homo sapiens
ccggttccccggcccacagtgggggtgtgcaaacccgagagaactgggctatgactttgcagccgtcctggag

SEQ ID NO: 345097 - DNA, 82 bp, Homo sapiens
ctggggacccggatcagccgcctgacccggcgggtggaggagatcaagagcctgtcatagggaactgcatggatagaagttc

SEQ ID NO: 345098 - DNA, 100 bp, Homo sapiens
agggtgtcaggactaagagaagtcacaaaacagcagatttcccaagagcagcggaaaatgatccagtcacagattgatcacttattcattagtaatttac

SEQ ID NO: 345099 - DNA, 85 bp, Homo sapiens
ttgtgacagaatatgccaaaaatggagaaatttttgtggcctgaagcacgaggacaaacgtggaggtagcggatctcacaactgg

SEQ ID NO: 345100 - DNA, 136 bp, Homo sapiens
ccgccgaggtgcagggggctggcaacgaaaatgagcctcgcgaggccgacaagagccacccggagcaggaggaggaagatgacgactcctccacagcctcagacagcgatgttctcatccgggacaactacgagcg

SEQ ID NO: 345101 - DNA, 100 bp, Homo sapiens
cggagatggtgcagaagatggaggagttcctctgtgacgagggtgcaggtatctctggggactacatcgatcgcgtggacgagcccttgtcctgctctta

SEQ ID NO: 345102 - DNA, 83 bp, Homo sapiens
cgacgggcatgccaagaagatgagaccgggggaggcgacgctaagttgctgatcgtggcgatggccaccatgtctgggagatg

SEQ ID NO: 345103 - DNA, 95 bp, Homo sapiens
cttctgcacaagacggcgcgcatcttcacgtcacccgccatgtcgaccttgctggacattaagagcagcgtgctcaggcaggtgcaggtgtgccc

SEQ ID NO: 345104 - DNA, 95 bp, Homo sapiens
atcagcacaaccttgttgcatgccagataaatgatcaggcttgcacccttgctcggaggaatgcagacgtcttcctgaaatacctgcacaggaac

SEQ ID NO: 345105 - DNA, 100 bp, Homo sapiens
gctcccaaacatctgcagctgatttgaaattaaaaaaaaagcttgtggtgaaggggggcaaaaaaaagaagcaagttctgaagttcactcttgattgcac

SEQ ID NO: 345106 - DNA, 74 bp, Homo sapiens
ctcgccgtggtcaagttcaccatgagagggtccacattggccaactgtattcaactgacaagctgatcattgag

SEQ ID NO: 345107 - DNA, 50 bp, Homo sapiens
ctccctacagttgtgccatgcgaatgccattacactgtgcttggagatgc

SEQ ID NO: 345108 - DNA, 74 bp, Homo sapiens
ggactccgcggccggcccggcgcggcccagcgccctcaggctgaccccgcactacatctacccaccagccatcg

SEQ ID NO: 345109 - DNA, 100 bp, Homo sapiens
ggcatcgcctactacatgtactcggggggcggctctgcgctggccgggggcgcgggcggcggcgccggcaggaaggctgttcgctgctatgaatctctaa

SEQ ID NO: 345110 - DNA, 74 bp, Homo sapiens
gcgcataggcaagtcatttatgaaggagtctcttcaggacagaaagtcatgttctatgtctcctcaggacacag

SEQ ID NO: 345111 - DNA, 95 bp, Homo sapiens
cattctaatgtaccatcttcgcagtctacagccagcttcctgtctcatatcatatctgaagatattagtgagctacaaaagaatcaaactacatc

SEQ ID NO: 345112 - DNA, 99 bp, Homo sapiens
attaaaaaatctggagggactccaacttcaatgcgccagcagccctgtggtggcgacgacgatggaccaggagccagtgggcggtgtggaacgaggaga

SEQ ID NO: 345113 - DNA, 100 bp, Homo sapiens
caagagcttcatctgcgatggacagaataactgtcaagacaacagtgatgaggaaagctgtgaaagttctcaagatgccatggacaatattaccaggcag

SEQ ID NO: 345114 - DNA, 50 bp, Homo sapiens
ctgacagcctggaacaacgtcaagtacggcgtctgcgtcctgcacaactg

SEQ ID NO: 345115 - DNA, 100 bp, Homo sapiens
catggctccgcagaacctgagcaccttttgcctgttgctgctatacctcatcggggcggtgattgccgggttcaaaccttgtactactcagctgatcaca

SEQ ID NO: 345116 - DNA, 101 bp, Homo sapiens
tggttgtaaacttgacctaaagaccattgcacttcgtgcccgaaacgccgaatataatcccaagtttgcaatggattttggataaacaagatctgttgaag

SEQ ID NO: 345117 - DNA, 75 bp, Homo sapiens
agagccgcgggccctttgcagctgcgattttcgccctacgttttcaacggaggagttacactgttagaccttatg

SEQ ID NO: 345118 - DNA, 74 bp, Homo sapiens
cctttcggctctggcctgaagcagtactcccgcctcctggagcgggttgcaaattcgtgaagaatcagcatcat

SEQ ID NO: 345119 - DNA, 75 bp, Homo sapiens
ctcccctctcaggacaacccagatgtgcaacaaagtgcgatggatgtacagttacccagcacgtgtacctcctcc

SEQ ID NO: 345120 - DNA, 75 bp, Homo sapiens
gttggggccactgcgaggccgttttagaacagctttgctgagccatcaaggtctaatggaagcatggttcggcat

SEQ ID NO: 345121 - DNA, 99 bp, Homo sapiens
aagatgaacaacaatatcggcattctgtgctacgaagattctcgctgaagtctgttaattctactttttgagtacttatgaataaccacgtgtcttcaa

SEQ ID NO: 345122 - DNA, 90 bp, Homo sapiens
ccagcctgggtctcagccccgcgtacggcctttcacgagtcttcaagccttcaggtgctggagaatctggtaaaagcaccattgtgaagc

SEQ ID NO: 345123 - DNA, 80 bp, Homo sapiens
gcggcttcctggcctgggcgctccggtggcggcggaggaggctactcacagtcgaactacaactccccggggtccggcca

SEQ ID NO: 345124 - DNA, 101 bp, Homo sapiens
tatcagtggtcacagaagtctctaccaatggtgcttcagaagtttcatactttcaggctaacagagaccctgatgctggaattgatgaagctcaagttgaa

SEQ ID NO: 345125 - DNA, 83 bp, Homo sapiens
accacgcctgccccagggaaccgcacagggggatatgagactttctactcggaatatcctgagtgttgcgtggatgtaaaacc

SEQ ID NO: 345126 - DNA, 96 bp, Homo sapiens
taccttctatctttgattctccatatcacctacaggttttgcgtgtgaagctgtgtggaaatgtgaaatactaccagtcacaccattatagtaccg

SEQ ID NO: 345127 - DNA, 82 bp, Homo sapiens
cttcggcagtccacccaccgccgccgcctcccagatgttgatgcctaagaagaaccggattgccatttatgaactccttttt

SEQ ID NO: 345128 - DNA, 97 bp, Homo sapiens
caagccgcggagggccagcctcttcttcggcgccctccaggcctgttggaggtagatgatgagctggagatcaaggcctactatgcaggccacgtgc

SEQ ID NO: 345129 - DNA, 82 bp, Homo sapiens
gtggatgaggctctgcggctggtccaggccttccagtacacagacgagcatggggaagacaaagatcattccactcagcctg

SEQ ID NO: 345130 - DNA, 50 bp, Homo sapiens
gttctgctttaataagcgagacctcaggtggtccattatggctgacatgc

SEQ ID NO: 345131 - DNA, 75 bp, Homo sapiens
ttcaggaaccaccagtgacagagaagaaccttttgtgatggtctctgaaaatgtcttgggtaagccgaagaaata

SEQ ID NO: 345132 - DNA, 100 bp, Homo sapiens
gtctgagatttatggattcagcacaagtagcatatctctcagaagatagaagtgtgcaagaagtactacagaagcatttcaatatcagcaaaaacctgcg

SEQ ID NO: 345133 - DNA, 101 bp, Homo sapiens
ctggtatctgtagatggctacatgaacatgcaggagaatccagctttggcggttgcaattaaaacatgtaaaaactgtacttcggacagcgtgagagagaa

SEQ ID NO: 345134 - DNA, 99 bp, Homo sapiens
ctagagatcgtaacagtacggacacagaagaacagttgcagtgatgtgcagggaaaccacccctactcctaatcccccgactacagaagaggagaaaac

SEQ ID NO: 345135 - DNA, 100 bp, Homo sapiens
cgcgcccggccgcgacgcccgggacccagattgcgggttcagaacactctgctccagccaaggtggtgagggcagctgttcctaaacagcgcaaaggcag

SEQ ID NO: 345136 - DNA, 90 bp, Homo sapiens
cgactgggatcctacgtgcatgaagatggacgaggtcctgtacagcatcgccgagaaggtgctggctgctgtctacaaggctctgagtga

SEQ ID NO: 345137 - DNA, 100 bp, Homo sapiens
gtcgaatgattcagacttgcaaggagaatcttatttatactgctgatccagaatcctttgaagtaaatacaaaagatatggacagtacattgagtagagc

SEQ ID NO: 345138 - DNA, 97 bp, Homo sapiens
ccctcgggacccaaggccacaaaggagagctccgtggagagaagatggggcgcctacccttcttcagcaagatgggaacagctgagtctgaaggaag

SEQ ID NO: 345139 - DNA, 75 bp, Homo sapiens
tcaaattttaaggggccagagcatatgcagtcgggttctctataaaggtgtcttaaaaaggttgattttgttata

SEQ ID NO: 345140 - DNA, 75 bp, Homo sapiens
ttgcaacgcgcacctaactccaggtcatcatcagatttgaaatatttaaagtggatacaaaactatttcagcaat

SEQ ID NO: 345141 - DNA, 100 bp, Homo sapiens
caccgacccagccggcagtatgccacgcttgacgtctacaacccttttgagacccgggagtgagaaagatcagtctaaagaaaaggagaagaaagtgaaa

SEQ ID NO: 345142 - DNA, 71 bp, Homo sapiens
tggagaagtacggacccctgaagcccctgccacagatccatgatgtgcagttctctggagcaggcgctggc

SEQ ID NO: 345143 - DNA, 74 bp, Homo sapiens
gagggacgtggagcgagcgggtggaaaccaggcggccagccagctggaggttgtgaatgggagagttcacatcc

SEQ ID NO: 345144 - DNA, 100 bp, Homo sapiens
ttcttacaacatggcagacattgacaaattctcacatgcttaacactggaaatgatttgaaagaaaatgtcaaaagcgattcagtgctgctgaccagtgg

SEQ ID NO: 345145 - DNA, 100 bp, Homo sapiens
acggtccccagagagccaccggaggagcagctcacctgagagacggagccccggctcgcccgtgtgcagaggttacaactgatggaaaaccaaaaatcgt

SEQ ID NO: 345146 - DNA, 82 bp, Homo sapiens
gcctgttacattctctatctgcgcaccttggagtccaagcttgtgctctttgaaaccgaccagagggcaaagtgttggagac

SEQ ID NO: 345147 - DNA, 51 bp, Homo sapiens
cttgcagctcatctctattgatggatgaaacaagtgaagatgctaactgtc

SEQ ID NO: 345148 - DNA, 75 bp, Homo sapiens
gcggcggcggtggagatcgcaggtcgctcaggtgagaagcgccactgctttgatgtcaactataattcaagttac

SEQ ID NO: 345149 - DNA, 90 bp, Homo sapiens
cgctgccgggcaccgaggaccagctcaatgacaggatggctaaaggtgaccccaagaaaccaaagggcaagatgtccgcttatgccttct

SEQ ID NO: 345150 - DNA, 98 bp, Homo sapiens
cccaagagcagcggaaaatgatccagtcacagggccctcatctttgtgtcccatggagccggagagcacagtggccgctatgaagagctggctcggat

SEQ ID NO: 345151 - DNA, 75 bp, Homo sapiens
tcagtcccggcttacttcacctccagagacctgtttcgcaagctatagtcagcagactggacctcaacaacctca

SEQ ID NO: 345152 - DNA, 98 bp, Homo sapiens
tagtgtccacgttgaagcagaaccagattcctgacattcagacaactgacttgtaactgacttataactgacttgtaatacactgctactatatcaaa

SEQ ID NO: 345153 - DNA, 110 bp, Homo sapiens
cctggacctatgaatatccagtttgagccatcggatctaagatccaaaaggtgtgatgaatgcagactctgctaccattttggctgtttggatcctcctttgaaaaagtc

SEQ ID NO: 345154 - DNA, 101 bp, Homo sapiens
ccgctggatgaacaacctgctgatgagggaggtgcccctgcgttgtaccatccgcctgtgggacacctaccaggcatgtcggtgtaaacctgattgtctcg

SEQ ID NO: 345155 - DNA, 100 bp, Homo sapiens
ctccaatgggcctttccagcccgtggtccttctccatattcgaggtggctattatcatggaaaactaatttttcccagagaatttcctttcaaacctccc

SEQ ID NO: 345156 - DNA, 99 bp, Homo sapiens
cctcccgggtagctgggactacagagctgcatcctgtggccctataacactcttctccaaaaggacctgccagagactgggagtgttgactgctgcaag

SEQ ID NO: 345157 - DNA, 101 bp, Homo sapiens
tctcaggatgttctgagattgcatcaggatattaatgattataaccggagattctcagggcaacccagatctatccagacatttaatgtggatgcaccatg

SEQ ID NO: 345158 - DNA, 90 bp, Homo sapiens
aaggcctcggcctttcacattcgggaagcgtcgggattaggtgaaagtttttgctgagtacccgggcagctcagctcagttgagggtgct

SEQ ID NO: 345159 - DNA, 74 bp, Homo sapiens
ctgctgtggaagaccagccccaaagtactatactggcaattgctggagaagattttgcaattgttgcttctgat

SEQ ID NO: 345160 - DNA, 75 bp, Homo sapiens
ctcaaatgagccaacctgagtcacaagaagaacatgtgatcatccaggccgagttctatctgaatcctgaccaat

SEQ ID NO: 345161 - DNA, 97 bp, Homo sapiens
ggtcgccgtgctctccgggcacgtcaaccccttcctcccgtatatcaggttatcttatgatgaggcttttgctatggctaatgatcccttggaaggc
